United States Patent Application Publication US 2019/0348154 A1 - sequence listing, part 115

SEQ ID NO: 432933 - DNA, 573 bp, Serratia marcescens
atgaaacaccctgaggaaaaaaacgggcggcagcggcggaggtgtcccggcgtaagaacgtggttgctggcgccgacgctcattgccctgctgtcggggcatgcgttggcggcgggcgggaacaataacctgcatctgcacggcacgctggtggcggagccgtgcgttatcccgccgggagaggatgaaattccgttggattttggcgttatcgtggataagtacctgtatatcaacacccgtacgcacagccagcgtttttccattcatctggcggattgtgacctgtcgctgggttcgacggtcacgacgcgttttatcggaacggagagtgccgctctgccaggattactggcagtaggttctggcagcggcatcgctatcgggttggaaaccccggaggtcaaacctgttccgctgaataaggccagcgatcgttttccgctgcggtcaggggataactacgtaccgtttcaagcgtatgtgcaggcggagccgcaagcgataacgggccacagcataaagcgaggggagtttagcgctacggcaacctttgggctggaatatgaatag

SEQ ID NO: 432934 - DNA, 672 bp, Serratia marcescens
atgatttacgtgtcaagccgactcgttgatattggctctgcagcagattttatcccgccattcgggaaatatattgtgtatgggtatgcacataaggtgagtggtgaatacaaatttaaaactgtgccgcaaaattttattgtgcaaataaaatcaggtgaaaccatcggacatgcggcaaaacgtgcatatgaccaatttaaaaactatcaatcatttatgacaaatgttcccccgaatagagcctgccctgcattcggtgttgccgatcaagccggaggtaatcaatatttgccatggggctctgtttatatcccggcaggcgcttgtgattcccctcctcccccccctgagtggtgtagtatcgccaccaacgagataaatattgatcatggtacaatcaaccttggtagcggtatgaaccaggtaagtaaaaattttgttgttagatgcagttctcctatgtctgtacagcttagccttagtcaggaaacggtaactcttgcgccaggggtgcaaagcaaactttcgtttcctggtacggatcatggtcgattggcaacgcacgcaggggataatcaggccagtatacgtagtgaattgcatattgatagtggggctaaaccgggaaattatagtgggtcctctattctgagcgtgaactattattaa

SEQ ID NO: 432935 - DNA, 936 bp, Serratia marcescens
atgcattttaagaacaataggataatgaaagattgggtggtgtttatcactgtcgtagaggagcgtagttttacactggctgcaaaaaaacttcactttagtgtggcatcggtcagtaaatccatctccagactggaaagtacccttgaagttgttctgctgagtcgaaatgcgcataaggttgaaatcaccgcggcgggagacatcgcgtttaatcgagcgaagtcaatcctgcagatgtaccatgaattattttctgaaataagcaatcgtgataacagaatcaagggaaaactgcgattttctgccccatccattctctgtgaactgacagccagtcactgggtgtatgattacatgcgtgaaaacaaagatgttgagcttcggttgttgtcgcgcgaccggagtgagcttaccgttatttcacccgaattcgatgacctggttctgaaaagtggcattctggattccgccgatttggtacatcatggtttaggcgccatgggctttaacatgtgtgcgagcccggaatacctggcgcgccatggtgcaatcaatacaccacaggatttagctgaacactggattatgaaagtcgaacacccttttttgagttatccgctcaccttgtcaaaggaaggggagtccttcgagctcaatatagaaaatgacaccagcctgacgtcaaataatatccccagcctgctgaagatgacgctggaaggtgcaggtgtttgcctggctttgcctgactgggtcgcctctaaatatgtcaaaagtaatgaacttgttgttgttctcccagagtggaaattcccgaggctgcagatttatcttgtctggcgctaccgggaacactattcgcgtttgttcagtgattttagacggtatattgaggtgaggtggaaagagcttatggagaatggattaggttag

SEQ ID NO: 432936 - DNA, 1224 bp, Serratia marcescens
atgaggcgatggcgcaaaggcgttgggtattggctggtgttttgtttgctctattttgttctcgccatgtttagtcttgaaacccgcgatccctggagcctgtccagttcagtctggttaccggccgggctggtgctcggcgcattatgcacttacccgcgcatatactggccgctttggggcgtcagcgccggcttgctgcatatctttgtcagcctgctgtatgggcgatctttagatgtggcgttgattttcgcgttagttgacctcgcggtgctttttcctctggcgaagatgtggcgcagcgtgcaccgctatctcgggcatgacacctggcgtacggaaacgctgttattattgttgggcgtctatatggtcagtatcaccgggggggtggtcagcgtattcattctgatgctgctggattatccggtggtattcactcattttttcacctggtctttgtcgaacgccaccggttgtctggcaggggcgcctttctttatttttcgtcgttttctcaaggaggcggatcctacggtctcatggcgagcgctggtggtgttattgggcgtttcggccatcttcctgttgcccccggcgctgattcatcacgctttgctggctcagactctgctctatttagcgatgggcggatccttgatattggcaatgttgtggcctttgcgtatcctgaccgtttattttttgtatctgacattgctggtcagtctggcgacgttatcggattatggcccgttggcgatggacgaatctctggggatgcaggtctctcagctctatttgctggttgtcatcagcctgagcctgatcctggcgatgcgcgaaaaagaaaacaccctgagccacgagaaacaggaacaacaggcgctgttgttgcgtaacctacttgaaaaacaacagcccgtttttttgcagttctcttccgatatggcgcagttggactggtccggaaatcaaacggttttcggcataccgtctcaggaactctccactttgcttttgcttcaggccagaattcatccggaggatcgcgacgcttttagacagttcatctcagtgacgccggataacagtgagacggtccggcagtgttccttccgcctgttgcttcccgataagcagtaccacagagtgcgttgccatagtgtgacgtatcgtcttcaacctggagccgttgctgctatggtactttatacttaa

SEQ ID NO: 432937 - DNA, 606 bp, Serratia marcescens
atgcaacaacggatcgtgattgccgacgatcacccggtcttcctgatcggcctgcgcgccgtgattgcttctgctttcaacgagcgctttatcgtcagtgatgaagctacgaatgtagaccaattgcttagggcattagaaaaggcgttgccagacgttctgctcacggactttaacatgccagggcaacatcaatctgatgggttgcgcttaattgacacgctgcgacgtaaatatcccgccttgcctattgtggtggttactgtgctggccaatccgggggtgattaattcgatactggctgcgggcgtctatgcggtcatcaataaacaaagtctgacggcggaattgacgctgtgtctggaaagtttgttgcgggggcgtcgctatatcactccggtagcggcagggggctcggcagacatgagtccgcgtgaactggaagtggtgcgtctgctggctcagggaaagagtgtgaatgacattgccgcgatgctgagccggactaaacagacgatcagcgcacagaaaaaaagcgcgatgaataaaatcggtgtcagttcaacggcggagcttctggaatatctgcacagcgtgggtctgtaa

SEQ ID NO: 432938 - DNA, 2712 bp, Serratia marcescens
atgaggcgtttactcctgcttagcctgttgttgcccatactggtgaaggccgcggataatatagaggttggcttgctcgatgatcgcgcaccctacagtgattttactgtctggcagcgtgcaaacggcgccctgccagagttactggatttgctgtcaacaccgggggaaacgtcgtttacgcctaaagcggcggctgacttagcgcaactcacgggtatgctcaaacagcgcggcgtcactatggcgttaccccccccattcagtattccccctccggggatactggtttcgcaccccttattgcagcagcactgggcgttgatttctcgcagcaatcatcttcccgtccatattaatcatgtgctgaacctgaatctgcaacgtattttgttgctgcgcaacagccccgttgggccgaaaattaccgcggcctggcccggtgttgtgctggaagaaggcatggggttgagtgaggcattaaaactattaaatgccggggctgcggatgggttggtttgcgatgccgctttggccgatatgctcatgcataacctgtatccggggcaattaagcagtgaaatactgcctgagatcagcagcagccaaactctctggctgcttcccggtcaggaagacttgctcagacatgtcaatgaacgtattgatgccctcccgcctggaaccgcgtcgtccattatcacgcgctggttgttaaacgctgcgctcaacgatatgcaccccagtccggaatcaaatgatggcttttttgattcttttgtggcggtgagtagtgttatatcgctatttcttattgcgtttctgctttctgaaatcttgcgtcgccgccgcgcggaacgggggttgcaggatgccctgacatactggcaaaccttgttgaacagtgttcctacgccacttctggtgtgcgatcccgtgggggaaataacgcactgtaatcagaccttgctggcattactgcaactgacgactgagcaggtgatcggcgtgacgctggatcaattcctgagacataatccgatggtgccgccccttgagcatcaggagtgggtcacggccatcagtacgcttcacccgcaattttccgaccgcactctctgtatacagggtgaggcgcgtgaaattatgcagtggctggtcgtctattgcgacagccgccgtgtcccacagggtttgctgatcggttggtatgacatcagtgaacgtaagcgactggagcgcaaactggcgattacctcacaggaggcggtgaacgccagccgggaaaaaagtgattttctggcccgcatgagccatgagatccgttccccgatgaacgccatccttggcgttctggaactggagcagcaaaaacacgccggcgcggattccgcactgaatattgcctatgcggcgtcgcgccaactgctgcaaatcgtgggtggggtgctggatatctccaaaattgaagcgggggaaatcaagcttcagttgcaaaccggcgcgttgtacccgctcgtaacgcaaattgtgaatacctatactgccctagccgcgcagaaaggcttgaaacttgaaagtgacctggaggccagccgtggacggctttaccgcatggatggcgccaaactgagccaggtattgagtaacttgctgagtaacgccatcaagtacaccgaacggggatttgttcgccttaaggtggcttgtgaacccgcagctcatggaaaagagcgtctgaccttccaggtagaggacagtgggctggggattgcaaaggacatgcaggaaaggattttacagccatacgtccaactggatcccaactttcccgccagcagcgggcttggactggccatttgcgcacagctactgaaactgatgggcagcagcttgcatatccggtcctcccccggaaacggttccggctttaccttttctctacagctggagagggtcgaagaacgcaccgctgtcgtgagctcccagaacccggcaagtgtgggacattctttgcagatcctggtcgtcgatgatcaaccggcaaatcttgtggtgatgaaactgcaactggaaacgctgggccatcaggtcatgacgtgtgatgacggtaaacaggcagagcggcttcttgcccggcagacgtttgacctggtattgactgactgccagatgccggtgatgacggggtatgaactcgccacacgacaacggcggcgggaaagtgcggaagggggttatcaggtgattgttggctgtacggccaatgcgtttagtgacgaaaaactccgctgcctggaggcgggtctggatgcggtgctgatcaagcccctgacgttgcaggatttacgtcagatgttgtcagatcaagggttggtgcgcctgaatatggctgaaattcaggcaatggcggcggggcaaccccagattatcgcttcactcgttgatgaactgcagcgaggaagcgaacaggatcgccaacggctgttggacatgactcccgagcagcctgagcagtacggtgccgtgctgcaccggcaaaaaggcagttttgccttagcgggctttcaggtgggggtaaatctgtgccggcagatggagcttgcgctcagggaggaagattcagtggtatttcctgtgtatcgcttgcaactcaacgcattgatcttacgatttattgcattgctttcatcccagaggaatgtgccgtaa

SEQ ID NO: 432939 - DNA, 753 bp, Serratia marcescens
atgacggaaagtgtcttttttgccctgttcggcgccatcatcggcagctttctaaatgtggttatctaccgtctgccacgtaccctggccggtgaacccttaaccttatgctggcccgggtcccactgcccggcatgcaaaaagaaaatcaaggctcgccataatatccccctgctcggctggctgtggttgagaggacattgcgcagactgccggcgcgccatccctgtacgctattttctggttgaatgcctgagtgcggccctgtttcctctcatcattgagctgcatggaataacgccgcaaagcgcggctgatttaataatcctgagcttattgatcccactgttctttattgacttgacgtggttgttattacctgaccgcttaacataccctttgctgctgattgccttcgctctggccgcatcgggcgacggacgcatctgtttgcccgaagcctgcttcgcttccgcttgcggattcggcctcccctggatgctgaaccagctgtatacctggcgccaccgccatgcagggatggggatgggcgatatgaaactgtttgctggcgtgggggcctggcttggttgggaatcgttaacgcaggttatgctgctggcctcgctctcggccatcgttatcaccgtgtttttcttgcataaaaaaagggcggagaggttccccttcggcccttatctcatttcggccacgctgggcctttactttttacggcacattcctctgggatga

SEQ ID NO: 432940 - DNA, 519 bp, Serratia marcescens
atggctggtaacaatcagggcgggtttacctatttgtttgttctgctggcattaactcttctttccttcatgttgttaaaaagccgggaaggtgaacagatccgacaccgtcaacagcaagaagaggagttgctatttcgcggagagcaaattcggcgggccattagcctttatcagagcgccccctatggcaatgggtgctatcccacccatttttcacaactgcttgaggatcggcgaggcctcaaaatacgctatcatcttcgccgcgaatttcccgatcccctcaccggcagccctcagtggggaatgcgctatgatcctcaaggccgctggattggcgtcaatagcctgggttacggccggccgcttcgtaaagaagggtttgacgccaacctcgacagcgcgcgttttaaaaaagcgagcagctattcggaatggatctttacggtgaaatcggatacaacggcgcctctgccgtcagcctgtcaaagcccgggggcgaggaagggaaaatga

SEQ ID NO: 432941 - DNA, 360 bp, Serratia marcescens
atgcgcaatggtgaaaatggcttcaccctgatagagctactggtggtgatggccatcatcgccacgttgatgacgctggttacaccgcgtttcttcagccagacggtgcgtgcaaaacacatcgttcaggaacacaacctgaatgccctgcactcagcgctggatgccttccgacgagaccgtttcatcgggcctgaaagtttggatgacctcgtgcaagccggttatttacgccggctacccttagatcctttcagccagagccgggataactggcaaatagtgaccgacgaacaggggcggattatcgatattacgctccctgctgcaaataacgggataaacgacaatggctggtaa

SEQ ID NO: 432942 - DNA, 474 bp, Serratia marcescens
atgagcaaacagcagggatttaccttgattgaaatgatggtgacgctggcgatcctggcgtcactggccgccgccgccatccctctggcacaacaccagaagcagcatcaggatgaatatcagttacgggaatcgctgcgtcagatccgcagcgcgctggaccgctattctcaggccgtacaggacgggcgtatagatcatgagtcgggtggatccacctatccggccacgttggatgtcctcgtgaaaggcgtagtggataagacatcgcaaaacaaaacgcgcctctattttttacgccggctcccacgcgatccttttagcgatagcgaagggcttcccagtgcggaaacctggcgtacccgcagctcaagccaacccccagatgattttagcgggggaaaagatgtgtttgatgtgcgttccagcagccatgccattgggttaaacggagtcccctatgcgcaatggtga

SEQ ID NO: 432943 - DNA, 1836 bp, Serratia marcescens
atgctggctggctgtacccagcagcagcatgaaccacaaaaaacaacggcaccagccacccgtgaagcgttaatcgcgtcgctcaaagcaattgatcaggctcgcatacagaccccagatgacgtctcattgcgcacccggcaattgcaagtgacggagcaacttgtcagtggttatttgcaagaagccgaacgcgccgtcacgaataataaatataatcaggcctctttgttatggcacgatgtcctggtttatcaacctggcaatcagaaagcgcatcagggcctaagtcgaattgatagtgcccgcgcgatgtataaactataccagcaggcaatggagctgcattctgatgatccggaacaggcgctctacaaaatccgccagatcctggaggaagagccaaactggccccaggccagggtgatgcaagatcatctgttgcgcgaaatatccgtgcaaaatcagccggaaatgaagttaaaacgagatctgcggaaacctgtctcgttgaacttccgccatcatagcttaatgtctattttcgacaccatcagccaattgactggggtgaacattatttacgataaagatgtgccaaaaagcctgaccgccagcctggcggcgaggaatacgacagctgaagatgccttgaatttgcttttgctctctaaccagctgcgaaaaaaaattctcgatggcaataccatcctgatttacccggcttccccgaaaaaagaaaagttgtatcgtgatgtggtcatgaaaaccatatttttgggttatgcacgggcaaaagagactaacccggcattacgtaacctggtgaagctgcgtgatatacatatcgatgaaaggacgaactcggtcactattcgcggcacaaagcaaagcgttgaaaaagcggagcggctgctcatgacgttggatcgcccggaggctgaagtcactctggctgtcgaggtattggaagtctattcgaaagatattgagaaattaggcgtgaactacccgggcaaaattggcgtggggtttagcggcatagagggtaagagcgaaaatatcgccatgaatgcgtttaatgccggcaatatgtttgtcaatctgggcagttcacaagggatcaatgccgatctgcagaaagtccgtacgaatgctaaagttctggccaacccacgcattcgggtaaaaaacaataaaaaagcggttgtggatattggtgaacgcattcccgtcctgaccagttcagtgtccgacggtatttctcaggaaaaagtggaatatcaggatgtggggttgaagctggaagtgatgccggatattagcgtggacggcatgatttcaatggatgtcaaattccagcttagctctcaaggaggggcggagcgctctaaagatggcgtgaattactaccgcaccaataaccgggaagccaatacagtgctcagcagccaaaacggtgaaacacaaatgttggcgggcctgatcaaaatgaacgaccagagcgggcattccggcattccttttttgagcgatcttcccggtatcggccatttgtttggcagccatgagaaagacagcgaacgcaccgaggtggtcttgctcattaccccgatgattgagcgtaatatcgatctcccgggcagccatgtcagcaccatcgatatgggaacggaagagatggaaggcgacagcgatttcccgttaaggggcccgaaaacggagacgagcaacgacacgtttgatgcgccatcactggcacctccggcacaatttcccgcgaaggatacagccttacctgtgccgctcggccgtcagcaactgatgaaattctaa

SEQ ID NO: 432944 - DNA, 534 bp, Serratia marcescens
gtgagtaaattaaatctcccatcatcacgcgccttacattgggaatggacgtctctcttagaaaaaacagggcggtggccgctcgttttctgtttactgcccgtggcggtgttactttattggctaatggtatgccagccgcaaagccaacggctgaaaacctcgattgatgccatgcaacatcagttaaattcaccgcagcccttgttagcagaaaaaaacaacgagttggaatcggaattaagcgtgacggagtatgagcagataaaaatgctgttcgatacttttcataaatatcacctgcatgttgagagcagtaattatcaatttatgcctgcagaagaaaaggacgccagcacactcaccttaattatcccattgcagggccagtggttgtctttggcgcaggcgttgcgcgatatttctcgtgcattaccggttaatgtggaaaccctgcagatgagccgacccgatccggatagcggcactctgtcgatcgccctgcaactggtactgcgcaggggggaattttga

SEQ ID NO: 432945 - DNA, 159 bp, Serratia marcescens
atggccagactgagaacgcggatgagtaaaatcaaagaagttttacgcctgaaatttgactgtcacctgtccaacaggagtatcgcggtgtgcctgaacctgggcagcagcaccatctctgatatcgtgacccgcttccgacagtggccgatgccttaa

SEQ ID NO: 432946 - DNA, 1884 bp, Serratia marcescens
atgaagaaaacactgaaatacaccgcgttggcaaccagcttgctcttggccggactatcggtatgtgcacatgccataacacttgatgcggcgacaaagatgcccgatatcagtggaaagaatattttggtcggtttttggcataattgggccagtaagtctgatggttatcagcgaggcacttctgcagaggtgaacctttcagctgttcccgaggcgtataatgtagtcaccgtgtcttttatgaccggtgaggggatccctacgtttaaaccttataatatgtctgatgcggaatttcgcagcgaagtggccgcactgaatgcgcaggatcgtgctgttttgctctctttgggtggggctgatgcccatattcagctgggcaagggcgacgcgcagaaatttgcggatgaaattattcgattggtcgagaagtatggttttgacggactggatatcgacctggaaggcggtgcgatcactgccggtgccaacgccaccgaaattccggaggcgctgaaaattgttaaaaaaagttatcctaaatttatcatcagcatggcaccagagtttccgcatctgcgagccggtgggccttatgaacaattaattaaaaacctcgaaggctattacgatttcattgctccacagtattataaccaggctggagatggcgtggacgttgcggggcgtggttgggttgctcaggggaatgatgcggttaaggcggactttctattctatctgacggattctcttatccatggcactcgtggctttatacaaattcctgctgataagttcgctattggtctgcccagcaacccagatgcagcaaataacggttatgtcaaaaatgaagttgatgtgcgtacggcgatggaaaaactcgcggctcaagggacgccaatcaaagggctgatgacgtggtcaattaactgggatgccgggcacgacaagaatggaaacaactacggctatgagtttgttaaccgctatgccgatctggtgcataaatcccccttgccgacaccggatattgaagcgcctacggtgccgggcaaaccattagccagcgtcttggcggaagggatcaatctgaagtggcaggcttctaccgacaatattggcgtccatcattatgaaatctggcgtgatagcgtcaacgttgcccagtctttctttcctgtgtggcaagatcggcacgttaagcctgctacgttatacagttattacatcattgcggctgataaagcgggcaaccgttcagcagccagtgagtcaacccaggtaaccagcgctgagcgggttaaaccgatagaagataccgaagcgccgagcacgccggaaaaactgatgctttcaagcgtgaccgaaaccagcgcatcaatccattggcaaccttccacagataatgtaggagtggcaagttaccaaatctggcgggatggaaaagtggtcgcgaatacggcccaaacacgctggacggataatgcgttgaaggccgacagtgaatatcattaccagattaccgcgacggatgccgcaggtaaccagtcggaaaaaagccggcagctgacaataaaaacgcagactgagcacagtggtgaccatgctcgttggagtgattctaaggtgtatgtggggggcgatattgttcgttggaatggtaaaaactataaagcgaaatggtggacacaaggcaatcaaccagacagtaatgaggtctgggaatgcctggacaaagatgtcggaggggagtggaatatccataatgtctatgttggcggcgatgaagtgacctatcagggaaaacactgggtcgctaaatggtggacaaaagggaatacgccaggttccgataatgtgtggcgagcaaaataa

SEQ ID NO: 432947 - DNA, 1992 bp, Serratia marcescens
ttgaataaactctccctggctttactcatcagtacatcttttctggcgcaaccgacttttgcaacagaggctaatcgtaccctcagctatttaacatcatgggggagttatgatcaaaactccgttggggcattgaatcaatccaaagtcgataccttcctgctttcttttggtggctgggatagcgcgggagatatctcttcctccgacaacctgatttctgctccggactataatgcgtactggctgccgtcagcttatgtcgcctggtctcagatgaagctggcccatcccgagaagaaaatgatggtggcatttggcgggcaaacctatgaggggatgtggtctcatctgggtaatcctgagagcctcgaaaatattgcccaggggctggttaagctgctcaagacggatttcccggtttataagaaaggattgaaacctgaggagatggaaggtaaatgccaggagtttaactggggtggttctgcctgcaatatggccgtttatcagcgggcaggtacgatccagctcgatgggattgactttgactatgaaaaagaagcccggcttaccccacaggagaacgacaatctgttggcgctggctaaacgcgtacgtacgctattaggcccgcaaagcaaaaaattactcagcctgaccacctaccatgtcggtgccgatcccgatgcttgtgcgaatgcgaacgttaccgaaggctgttcttttattgaggataaacgttcttcccaccacggtgaagtcatgcctttactggtgaaaggaaaggatgtttttgacttcttcaatgtcatgacttacgacgcaggccctcgctttaagtacgatgtggcaatggcaaactatgcgaaggctgttggagataaatcgaagatcttattgggtaatacgatcaatgaacagtgggggcctgaagggcgttttactgagtcacgtgagaataatatcgcacgtgcagcctggcaggcgaaaaacaactatggtggtttcttcgtttggactctgggggcatcaactgcccagatgagtctcgcagatcaggtgcagtatatcaatgagatgcaccaggcggcaaaagacgcgaaggtaaccgacggtaaccagaagccgagggcggttgtcgcattcccgaaagaggtcacgggggcgaaaaccgttattctggatggttcggcatctattgatcctgaaggtgaaacccttagctataaatgggaacaaacgggggggccggctgtgaccctcgaaaatgccggacaggcactggcccgatttacactgaataccacggataaggatgttgacctgaaattccgtttgacggtcaatgacggtgagctcgattctgatccatttgaattcacgattaagcacaaagccgaaagcgccgttattgaaaaccaaaagccgacggcggttgccacattcccgaaagaagtcacgggtgcgaaaactgttaccctggatgggtcatcgtcagttgacccggaaggcgaggcgctgagttacacatggacgcaaatttcaggacccaaagcgacgcttaacaatagtcgtcaatccgaggcacaactcattctgagcaaaacggataaagatgctgagttaaaatttagcctgacggtaaatgatggtgagctggattcagacccatttgaatttaccattaaacacaaagctgaagagcatagcgatgttcactatgcctggcagaaaagtaaagtttacgttaccggtgatgtggtgagcttccagggaaaacaatataaagcgaaatggtggactcagggcaatgaaccgggcagtaacgatgtctgggaaaatatgaataaagtggataatgaagcatgggacgtaaaccggacttacctgggcggtgaaaaagcgaaatggcagggtaaaacgtgggttgccaaatggtgggttaaaggggaacagcctggcagtggcatagcctggaagtcagagtaa

SEQ ID NO: 432948 - DNA, 684 bp, Serratia marcescens
atggctattaatattgtaattgccgaccaacatactatcattcggcgtggtgtattatcgatgataagtagcatgccagctgctgagtatggtctaggggatggtgatttcaacgttgtgggtgatacagactcacctaatgaagtctatacgatgttgagtcaatgtaaggttgatatcttgtttcttggtttttcgctgaaaacaaagaaaacgcaaagccttatctcagagctagacgggacatccctggtcaaattgctggcgaacaagtttccagacacccgcatcgtggtcttatcccctttccggaatcgcaatatcatccgtcaggtcttgttggatggggccgtaggttatatcagccgtgagacctgtgaactaagtctatggcgcaccattgttgccgtctgcaacggtgaaacgtacattgagcgtagcctgatgaattttttattccgcagtagtattctggccgagcaagaattgacgcttcgtgaaaatgaagtcctccgtatgctttgtcatggtctctcattaacggcgattgccaataaaatgaacttaagcaataaaaccgttagcgctcataagataaaagcgatggaaaaacttggggtgaaaactgactgtcagctctattgcctgctgtcacaaactcagatgtttgatatcactatttag

SEQ ID NO: 432949 - DNA, 420 bp, Serratia marcescens
atgaaagaatcattgaatctctggcgcagtcagggaggttttaccttgttagaactcttagtggtgctcatgattattgcgttactagccggctttgtcggcccgaaaattttttctaatgtcgatcaggcaaaagaaaaaaccgcatttcgccagatgcgcgccctgagtgacgccttgagtcaatatcgtctggataacggggcctggccaagcgaggctcagggtctgaacgcgttgacgaaaaaaccagccaatgtgccaaactggaacggtccttacctcagtcaacaagtccctctcgatccctgggggaatccttaccaatggcataatccgacccgagaaaaagacggcctgaatgaagtggatatcatgtcgaatggaagggacggaaagccactgacttacggattctag

SEQ ID NO: 432950 - DNA, 453 bp, Serratia marcescens
atgaaacaggtgttttttattttggcattactgttgccctcgtcatcgtttgccgattgctggttccaggcggggcaacgctatggtattgagcccgaattgttgcaagcgatagccattgttgagtcaggacttaacgtacgagctaccaatgtcaaccctaacggcacggttgactatgggctcatgcaaattaacagcgctcatttggcaaccttgaaaaaattcaatatcacgcctcggcatcttcttgacgatccatgccataacgtgatgaccggcgcctggatcctggccggaaacatccgccatttcaggtattcctgggatgccgtaggtgcctacaatgtgggttatgccgacacacctaaaaaacagatcctgcgacagaaatatatccagaaagtcgcccagcagtatcaaaaattaaagaaaaacagggcaaagggataa

SEQ ID NO: 432951 - DNA, 1170 bp, Serratia marcescens
atgaaactgtatgacgtagtttatctggataacgcccatcgcaagaccgttcaggttaccgcgaactcccctgaagatgccagactccgctttatcgaagaagggtatctcgtggtgcaggtaaaaaaccgcaccccattgcgcagaaaaaccttcccattaaatctttttattcaagaactggtagctttgctggaagcaggcctggtgattaccgaagccatcgaagccctgcaagccaactgccatgaaacgcatgtgcagaacatttatcaccacctactggagaaactctaccaggggagccagctttctcaagcgatggctgctcagccatccatcttcccggcactgttactcaatactgtcgcctcatcggagcaaaccggacatctgccagaggcattgctgcgctttcaacattatgagcaacgcatggatatattgcgtaaacgaataaaagccactctgctttaccccaccatcgttatgagtgcgggtggcctgatcctttgttttttgttggggttcattatcccacgctttagtcaggtgtttgcgggaatgaaaaatcccggcagcagcgcacagcttattttatggtggggcaatctggtggagaaccacggttacctcttgttggccgcaaccgtaacgactgtcctgggcgtaatgactctcctacgtcaggctgccgttcgtcaggcactgctgcaacgatgcctgaaattaccccggttgcgccatcagcatcagctcaccattctggtacgtttttatcgcacgctgggtttgttattgctgggcgggttgcccgtcccacaagcgctgaacctaacgcgaagcatcttgccggcggctcatcagacagccttgaatcacgctctggcaggggttaatgccggtcagtctctgtccaccatgctggagagccaggcgctgaccacaccgatcgccagccgtttattgcaagtcggcgaacgtagcggcgatttgccggccatgtgtgaacgcatcgcggctttctacgatgaggccctcgaacaggcgattgaaacttttagcaaagtcttcgagcctgtattgatgatggcggtcggaggcattgtcggcctggtggtgttcttgctgtatatgcccattttcgaactggctgggggcctttcctga

SEQ ID NO: 432952 - DNA, 1635 bp, Serratia marcescens
atgtcaatgatgcacgctcaaaacggggatatgctggatgaattactgcattcggcggtacaaaacggccagacgctggcagaggcactgtataacacccctgaaaacctgccgggaattgcacgcttgctgggcctgtcctctctgacgatggaacagttagccaatgccgaacccgattttacccatgtctcactgaccgatgcgctggaacaccgtgttctgccgctgcaatatcaacaacaaggttggctggtgccggcggacccgctatcgctgtccgtacgtcagtggatgcatcgtttcccgctgcgccccgccctggtgccgccaggttgggtcaatgaacaactggatatattaggcaaacagcaacgtacactggatcaacttgaacaacaaaacggtgacgatagcagtaatgagacccagttggtcatttcgccaacaaccattgcgcaggaaagtcatgctatcgtcaaactggtcaatgccacactgtttgatgcgctacaaagccgggcaagcgatatccatctttccgccgtgccagatggattaacggttaaatatcgtatcgacggggtcctgcatacgatccgccactgtaatggcaatcagcaagctgaacaggtcatttcacggctcaaagtgttgagcggtatggatatcgccgaacggcggatcccgcaggacggccgtttcaaagcgctgatccatcagcttccggtagatttccgcgtctccatcgtgccagggattcacggagaggatgcggtattgcgcgttttggataagtcacacgaccaaaacctgtgcctggcatcgctggggtttggtgaacagactttgctggccatccgccaacttacccatatgccacacggaatggtcctggtgacgggccccaccgggagtggcaaatccaccacgctttacgccgcgctaagcgaacttaacagcggggagagcaaaatcatcactatcgaagatccggtggaatatcaactcaatagcgtactgcaaatcccggtaaacgataaaaaggggttaacctttgcccgagggctgcgcgcaattttacgccatgatccggacacgatcctggtgggcgagattcgagatagcgaaacggcaggcatcgcggtccaggcggcactcaccggccacgtcgttttgtcttccgtacacgcgaataacgcgtttagcgtactggagcgttttctgtatatgcaggttgaacccgccagcctgatcacggcgctgaatggcgtggtcgcccaacgtttggtacgcagcatttgtccctcctgtgcggttgagacgacacccgatgatcgggaactggccgcctggcaagaaagccccttgcacgacgtgcagccgcgctggatgcgcggacagggctgcgaatcatgccgccagagtggttaccgcgggcgtctggctctcgcggaggtactgacgttcagtgaatcaatgaaagacgcgctactggcccgttcatccgctcgccatctgcgtgagatagccctcagcgaaggctttattccgctcaacgacatcgccttgcgcgctgtgctggaaggcaaaacgacattacaggagattaatcgtgttattgcgcctacctaa

SEQ ID NO: 432953 - DNA, 654 bp, Serratia marcescens
gtgttattgcgcctacctaacgtgttgacctgcgagattttaccgcaacaggttcgcctggttcagagcgataaagaaataagctacgcggagcgccaggcggatgaatcgctggggacggtgctgcaaagactcctgcgcccctgcgctagccgattgccctggcgccgccgtgtcaaattcgtgctggacgccagcctggtgacccatctggtcgtgccgtggcagacagggatcggtacccccgatgaactacgtcagtacagcgccatactggcgcagaaagattatccacatctgtcaggaaaaaaaatcagggtcggttttgaggaaatgcgatatgggcacaacgcgctggcattcgtattagaagaaacgctctggcaaacactgtatcaggtcactcgggaaatcaatctctgcctgtctgacatcactacgcccctgcgcgctctactcctgtcctggcagaatcccctgcccgaggagggtatctttgcactcatcaaggaaccaggcagcactttcgcctgccggtctgccggggaatggcggcacatctaccacatggcactccccgagctggagagtgggcaacaattagcgttagtggccaacctgacgggcatgcgtcatgccccctgttatgtctga

SEQ ID NO: 432954 - DNA, 198 bp, Serratia marcescens
atgctgagcagagaggactttttcatgataaagcaaatgcgccgtcagggcgcctacattgtcgatatcgccacccaaatcggctgttccgaacgcaccgtcagacggtatttgcgttatccgtcaccaccggcgcgtaaggctcggctgctggggagtcaactgggtatatcccttgtagaaatacgtaccgcttaa

SEQ ID NO: 432955 - DNA, 336 bp, Serratia marcescens
gtgcagtccgatttgttccggctcacttacgcgactgaaaccctgaaagatcggggctgggacaactatgtgatggatgcccgcgagtggcggtcggaaactacacccacgccgtcccagcacaacggtttttacgtcgaaaaaacggcgctcaatgccgccttctctcaggatggccatcacctgcagccggtctcttttcgcattgtcggcgatgccgatacgttcattcaggtcatggcagagtatggactgcaggcccgccttgcagacagcaggccgacatatcaaacggtaacactggagccaggcgagcacagcaacgcgccaacctga

SEQ ID NO: 432956 - DNA, 276 bp, Serratia marcescens
ttgttagacaaaaccaaatccgttactacggataactccaccgcagcactcagccatctggcgttctgtgccctggcagcattggggctggcccgccaagacggcatcattggcacaccctacgccgaaaatctgttcctgatccgctggctggccaccgcccaaaaacagaagcgatttcccagaagcgtcgccgtggatatcacctggctgctcgaacgtggccgcaagcacggcccagccggtaaactgcgccagcatctggaatacctgtag

SEQ ID NO: 432957 - DNA, 333 bp, Serratia marcescens
ttgtttgacgtcagccggaaaacagcctggctgtggctgcagcaggccgtcgcgcgcgccaaggaggaagggattgaatttgcgctgccggccattaatcccaagacgctccggcacagctttgcgatgcacctgttcttcaaccacgtaccgccgaaagtggtgcagacctacatgggccatgaacgttatgaaagcacggaggtttacctgaaggtgtttgcgctggacgtggcgccgcagctgggggtgacgttctcgctggatcaccgcgaatacacgcacctgctgatgaaaaatagaatacctatgtattacattggtaattcatag

SEQ ID NO: 432958 - DNA, 294 bp, Serratia marcescens
atggctaaaggccccctcacccgtcccgcgatggtcaaaccggaacctgcccagggcgagactaaaacccgcctttccaacgtaaaggttaaccggaacagaacgaccagcgagaacccgaagaccatccgtatgacgccggcagaaaaagtcatgtgcagcgagctggtcgatgagatccaagatctgaccaccaagaccatcacggactcgacggtgttacgcgccgcactgtacctggccaaagaagttggcccggagaaaatgctggagatgatcaaagagtacctgtaa

SEQ ID NO: 432959 - DNA, 852 bp, Serratia marcescens
atgacagaagctcctgtgcagtccatcctcacgccgctgagcaacacggtggccagcatcatcgccatcatgaacaacaaaggcggagcaggtaaaacctccacgatcactaacctcgccatgactcttgcgcaggcaggccgtcgcgtgttgcttatcgatggggatcagcaagccaactcaaccgaggtgatggccaacggcaaaaaatactatgcgcaatatggccataccatctgcgacctgtataacaacccgcgctttaatatttttgatgccattattccggccgtcagcggcgaagaggtgatcgataacctgtttattatcccatcagatccgtcgtttgaacgcgttatggaaaattgcctgacacgtcatcaccgggaaaagattctgtttcgccatttgcagcccgtgatggacaggttcgactatattctgatcgactgctcacccggtctgaacctgtcgaccaccaatgcagcctttatggccgatcacgtgctcatcccggtcgatggcggcagcttcgccctgacggggctggatgtggttctcgactacctggacgagatcagggagacccgctttacccagttcagcgtattccgcaacgagtacaatggcgccaagaagaaaatgaatacctatcttcacgatcaactggaaagcaacgatcggaccaaggataactacctgaaaacgcgcatccgcgccgatgagaacatctcacaggcacaggtagcctgcgtaccgctctacttttataacaagggctcgctggccctgaacgattaccgcgcgttgatgcgtgaactcgaaaccgtcttatcgaaagaggctgcataa

SEQ ID NO: 432960 - DNA, 381 bp, Serratia marcescens
atgagaaaatatgtattccttcttcttcccctttttatctcgggttgcccaacgggtgacaggtttaacctctatcaagtacaaagtaagatcgtagacggtaaagtctgcgtcttttttaatgagtgggatatcgtaaaaaaagaatccatactgaatattgccatctggaaacaaggaggcgatgactacgtatatgaaaaatcatatgcttacagcccgataacgttggaggccaacaagtgtgttccaggtatcggtgaatttagttttatcgctggtgaaggatacaccgtattggtaagaacaccgctgaactcttatcggaccagttttgttgtgatgaagaaaggtgaaagtattatgttgaagcccgattag

SEQ ID NO: 432961 - DNA, 525 bp, Serratia marcescens
atggagccacaacaggaagggatcacgcgggcgttaacgccgggcgaagtcaatctggcgcgttcagtgtttggcagcaccattttctatcagaccgtcttagtccactgcgacagctacctgccgtttgggttgcagaatcagtacacggcgatgagcccgaatggggagttgtattttcgtagggctttatataaaaaggattatgcgagccaggatcctgaagctcggcatctttttattcatgagatggcacacgtttggcagtaccagaagggtatgtgggtacgtacccgtgggcttctcagctgggcagtaagctatcaatatcgacttgataaaccctcgctgcaccgctacagcatggaacagcaagcatcgataattgcggactatttcattctcaagagatatggggtgaatgccttcttccgcttgccaaacaggaaactcatcgggatagtggacagaaggacattgtcacaatttcaccccatcatcagaagcgcagggctgccattatga

SEQ ID NO: 432962 - DNA, 951 bp, Serratia marcescens
atggaaaatctactcgaacaaccaagctatacaccccacttctccggtcatgagactttcccactaaagcagatgtggctgaaaaagtcttatgatcaaaaaaacagtgataacactcttgacaaagctacgtttactcaggaggaggctatcggtgtgtttggcgtaggcaaaaacatggtgtcctccatcaaacattggtcgctcgcatgcgggctacttgaggagtctaacaccaacaaaggcgttttcattattccaaaagaatgggatatgatccttcaggataaaggattagatcctttttgtgaaaatccaagcacagcctggctcgctcactggcgtttagccggcttaccggcagctaacagtaaacatcgctctacaacttggtgctatatctttaacaatataacatcatcttcattttcacgcgataatatcgtagagcgtcttaaagattacgcagcagaaagaaaactaaaaatctctgaagcaacattaaagagggatgttgaggcctgcatcagatcatactgcccaaaatctgataacaatatagaagaaaacgcagaaccactattatcagaattaggtttaattcaagaggaaagtcgaggtctgttttccttcaagagaggacagaaatactccctcagcgaccatatttttattttttcactcatcgaattttgggagtccttatattctgaagcaaatacgttatcttttgaaactatagcatatggtccgtcatctcctggaagagtatttaagcttgatgaagactctgtcgcggacagacttgcaacccttgaagaaaaaacaaatggtttcttaaagtggtctgactcttcaggaattagacaagttgtaatatcaaatacatctgaaaaacaattagctaacttaaaaattgaacaaattattatggcttatggtgatttataa

SEQ ID NO: 432963 - DNA, 3300 bp, Serratia marcescens
atgttaatggacaaagttaaaattactcaacaatatcaacgctctgtccgaattgatacagacttgggacgcctggattcattagatggatatatttgtaataaatcggcacagaatgtttttaataatctttgcactcaaattatcaactctgaacaaagagcttttaccttaacaggcccatatggtagcgggaaatcatctcttgcaatcacgcttctttctacgttgcatcctaatgaagaaataaggaataaagcttatactcgtttagataaaagtattttgccattatttaaaaatgcatttcctatcaccaacggttggaatattttaccaataacgggtaaaagaacgagtgtcgtacaagaaataaacaattcgctggataaacaaacaaaatctaacaagaagaaagaaattaaaccaacaggtactgatctcattgatcggctaaaagtacttagtaattcttcaacatatgatggtttgattatagtcatcgatgaaatgggaaaattccttgagtattcggctcaagaagaaaatgatatacatttttatcaggatcttgctgaagctgcttcaagaagtaacggcaagttaattgttattgggattctgcatcaagcatttagacaatactcatcaaaattaggtaatgagatacaaaacgactgggctaaggtgcaagggcgctatgcagatataccattaatttcatcaagtgatgaaaccattgaactattgtctaaagcgatttcaattagcgaagatttaaaaaatgatgttaatgtaaatgctgctcaaatagtagcagatgaagttagaaagagaagaccttcaatcagtgcacagttagtagagtctttaattaaatgttggccattacatccaacaatggcaactatcttaggacctgcatcaagaagacattttggtcaaaatgaaaggagtatttttggtttcctgagttcttcagaacctcatgcgttccatgatttcctgaaatcaacaaaatatagcgaagatcaaacatacactccagagcattattggaattttttgcgtacaaatcttgaaccggcaatactatcttcaccagatggtcatcgatgggctcagtctgtagaagcagttgaacgcgtagaagctggttccgacaagctaaaagttagcttgataaaaaatattgcaatattggatttctttagaaatagcactggtctacctgcctctaatgaagtaattaaaagtatttatcacagtaatatcaattatgatttagagacattattaaatgaattaaagaaatcaagtgttatcgtttacaggaagcatcttgaatcttgggctgtatttgaaggtagtgattttgatatagatgaggagatcaagaaagaattaaacaatatatcctctcttgattacgaactgttgtctaaagcagcaggcattcgcccagtcgtggctaaaaaacattattaccaaacaggttcattacgctggatggatatatctctttgttcattagaggtattcaaagggaaactaaaaaatttaccccctattacctctgataaatttggagaactatttgtcatattcccagaaaaaggaatgactcattctcaacttaaaaaagaaattaagaaaagtagagataacatacctgaaaacattattccaggcgtacctattaagacagataaaattgtcgagaatgggtatgagcttatggctttatataaaatccttgacagtaatcatgaaataataagtgattctgtggccaggagagaaatatatgcaagaataacagttctaaaaaacattattgaggaatcattaagagaggcattacgctattcagaatggttaattaatggctcatgggttaatatagaaaattattcatcaattgcatctacatttgcagataaaatattttatgatgctccatgcctaaaaagcgaactaataaatcgcaacagtctttcacctaatgctgttaaagcccgtaaagacctgctctacaaaatgctgtatgctgaaaatcaagaaaacttaggactgtccggttggccagccgaaagaggcttacatgagacattattagttattcccaaaatccataaatctacaaatgggaaatttggattaactattccaaattataacgatgatgttgcagtcttgacacctctatttaaattcacagataaacttttcgcagatgaaaacaaacttgtatcagtacaacaaatgttttcactgtggggcaagccaccctttggtgtaaagaatggaatccatccagttctctttttggtatatattttagccaacaaagataaaatggctttatataaagataattactttatatcaaagataacggatagtgaaatagatgaacttcttcaagactcttcccgtttccatttgaagaagatcctcattgatgaaaataaaaacaatctactttcacaaattagtagaactttaacgcagttgaatattccttcttcaggacaagaaccactggagattgcaagatcgctcgttggtatggtttatgctttgcctgaatggtctaagcggacttcgacattatctgaggatagcaagaaaatgagagatctgttgctcagagcatcagatcctcacaaactgttatttgtcgatttaccatttacattcacttcagagaatgataatgatctttcagcgaggatcgaatcttcaattaaagaattagttaattcttacgacaatcttttacaaaatattcgcagaaaaatgctaatagcattggacgctaatgataatgattttgccgagatcaagaacagatcaaacactgtttcgggaatttccggcgatttccggtttgatgctttttcaacccgtttaaaagacttaaatgaaacaaacgaaagtattgaaagcattttaagcctggcagcgaataagccgccgagactatggtccgacaatgacattgatattgcattaatagaaatagcatcttgggctaaaaaattcaaaagaattgaagtgttgtcttcgattaagaatagaaaacctacaagagaagcttttgcttttattttcgatgatcgagaaaatggaacagtacaagctgaatatgatataaaatcatccgatataaaaatcgtagaagatatttcacaaaaaattctctgtgaaatacacgataaagattttagcaaaagtattttactggcagctcttgcaaaagttagtattgcaattgtaaatggtaaggatgattaa

SEQ ID NO: 432964 - DNA, 837 bp, Serratia marcescens
atggcagaacgacatgttttaggtatctctggtggcaaagatagcgcagccttagcgatatacatgcgccagcaccatcctgaactcaatattgagtattttttcactgatacaggaaaggaattacctgaggtttatgaatttttaggaaaacttgaaggatttcttggtaaaaaaattgagtatttaaatcctgaccgagactttgatttctggctaaaagaatacaatcattttcttccttcgccacaaacaagatggtgtactcgccaattaaagttaaggccatttgagctatgggtcagacctatgcttgcatccggcgacaccgttaccagctacgttgctataagagcggacgaagaatatcgtgaagggtatgcttcgaagcacaaaaatctaaaaatcgccctaccttttcgtgaaaatggtatagataaagctgctgtgggtgagattttagaagcttcaggcgtaggctggcctgaatattataaatggcgtagtcgctctggttgcacattctgttttttccagcaaaaaattgaatgggcacgattaaaagaataccacccagatgcatttgaagaagcaaaagcttacgaaaaaaatgcgatggaccacggttcaccatttacatggacacaaggagaatctctttctgaacttgaaaaaccagagagaataatacaaatattcaaagattatgatgagagaaaagcgagagcttctgcgaagaaaacgctaaatccattacgtccagttgaaatcgaagatattgatgatatatatggtgatgatgaggggaatggttcgtgcaatatatgtcataaataa

SEQ ID NO: 432965 - DNA, 2358 bp, Serratia marcescens
atggaaatcaaagatgttttcggggcgcagccaaaaagtgtttgggagtatctctgtgagaatggtcaaggattatatgtgcctgcatatcaaaggcaatattcttgggataagcctaaaataacacgtttaattgaggatatttgccatgggttcacaacgcttataagccgagatgatgcaataacatttttaggtactataatcgcaattcacgatacaaatttagttacggttgatcctatagttaagggagatgttccttccagggttatgactataatagatggtcaacaaagattgactacattactattagtgaatactgtattacatgaagagataaaaattaggttagttaaaaagataaataaaaaaagcgaagccgatgcagatatttggttagtcgaagaatgcatgaaggtgatcggtcgattagcaaaaacattcgaagaagacaaagattatggcgatgaaaattttcgatattatccgagaatgattagagcatatgacgactcgtggtctcgtaaaaaggataaggcgagttataagtctgctataggtcattatttgcacacgtatggtaaatatggtcgtgaggaaatcaagaaaaactttaagtatgatcctcctgaaagtgaacaagagaatagtagtaaatacaagccactatctgagggccggaaaacagtatatgctctggtcaaaaatatatgcaaaacaaatgattccacaggaaaggtctctgtaaaatcagatcagccagagttagaacttccagaaatatcaagtgttttggaaaatgagaagtttcaaaatcttctcttaaaatcggagtttccagaatatgtgaaagataaattaataatgaatgatgatcaatcatttgaagaattgattcggttaattttatttgctaactttgtccttgaccgtgttgcgataactatagttactgccaaaaatgaagattatgcattcgatatgtttgaatctttaaatacgacaggggaaccattaactgcttttgaaactttcaaacctaagattataaatgccgaaaaacttagcgggtatgaaagttcgaaatcacatcaatatgtagaagcgattgaaaattatctcgaaagtaccggcaaatcaaatgataaacaggaggcgacaagtcggttgattgtttctttcgcattagcggagaaaggagagaagctttcaaaaagacttagtgagcaaagacgttttctcaaggatagctttgaaaaatttcctgaattaaaacaacagcaagaatttgtcagacatttatcgcatgctgccctatttataagatattcttggcctgatgataagtcattaacttcgttgatttattctgctgaagaagctcagactgatgaagttattttatgtattgatttacttcggaaatttaatcacacaattacccttggtcctttaattcgtttctactctgaaataagaagagtttcaccagaatttagaactatggcaattaataactttattgatgcggttaaagctattactgcattttctgttctctggaggtcttcacgtcgtactacagagaatattgattcgcattatcgtagattaatgatgtatggatatgaagatgttggtttaaaacctctcgcaagggatatgaatgaatttggttcagaaattactttaaatgtgattgggcttaaaaaggcatttttatcaatacttgcaaaagaagggaatgtgggaagcaaggatgagtgggttaaggctatttcaaaaatacctgcatattcaaatcagaaagaaattacacgctttattctattggctgctgctcatgatagcgtagaggataaaaatattcctggccttaccgtagctggtagagtgggaactttacctatgcttgatattaaaaattggaaaggtgaacaattacaaacgattgaacacatcgcacctcaagaaaagtcccacgaaggttggttagaggatatttatgaggaacaagaacttattgatcgattaggtaatttaacattattaccaagtcgtgaaaactcatctcttaaaaatggtagttgggctaagaaaaaattattttacaagattctgtctgcaatgacaccagaccagttagagccattacaggagcaaggtaaggtacaaggaataaatttagcacaatctacaagtgagctattgtcagagtccagatatttaccgcttgttaaagctgtagctttagttgaaggtgattggacaaaagaacttatagagaaacgtagcgttagaatcgccgagttagcatgggaccgtattcatgcttggttgagtgttgaataa

SEQ ID NO: 432966 - DNA, 1269 bp, Serratia marcescens
atgaagggaatgcaaaagatccgcagaggtaagaattttatcgggatcgtcctctatacgttaaaaccagattctcatcatagggtagctcctgtcgtgatcgggggaaatatggatgggtgtgcagcgaaagatctgatcactgaattcaatctaacaaaaacgcttcgccctgatgtggataaacctgtttggcacaattcgcttcgtttaccaaaggacgaagtgctaaccgatgctcagtggtccgctatagctgatgactatatgaagcgcatcggcttctcggaaacgcatctcagatgctacgtgttgcatgacgatgcggtcggtcaacacatccacattatcgccagccgcatagaccgtattacaggcaaactctatctcggaaaaaatgaaaacctgattagtacacgcattatccaacagcttgaacacgactattcgctacttagaaccaaaggccctaaaacaaaaacctcttcagcattgccccgccctaagctaaaacgaaaaaaaacacgaaatgaagcgatgcaagagaaaaggacaggtgaacaatgcccaaaaaccatcatccagaacgctttagagacgttagtttctaaaagagtatcgatcattgagtttgtccaacagctttttgaacaaaatattaatgcattacccaatatcacatctacaggtaaaatgaatggtttctcattcgaatatgccgggattgctttcaaagcttcgcaattagataagtgttattcatggtcgaccttgcagggtaaactcgattatagaccggaacgcgataacggctttctgtttgacctaaaagcaactttcactaaagcgaatgcaaacgaaatcttaaaggaaaacgctaaaaactccttcgaagcattcattattgataggcatgtaggtaaagacgaaagtgctgtcgcttatgtagaagagaagtgttcctcagaagctttagcagggagtaataaagcgataacaactaaagccgtaaaagagatgcctaatcaaagctacgaggtctcagcattcagatggatggaaaccataccttaccttgatacgatttatcgtctgctgaaacaacttaaaatcccaattcttagacgccccgcaaagcaccaagtcatcactgaagcgatgaagatagaaatccatcccatcaatcccaaaaatactcttaagacgcctttacttgacggcaatttagtgccaccaaggcaacattaccaccttacatgtagattttag

SEQ ID NO: 432967 - DNA, 672 bp, Serratia marcescens
atgagcagccccatcacgaaacactgcaatgaagaagttaacattgacccgttaagtcgccgagaaacgaaagctgagatgacaacacccaaattcgagttgttcggcgaaacctacatgttcgttgagaccttttctgcaactgtcattagtcccctcccaatcactgaccaagtttgggttaaaaccgatactggggatgagacacagattccagcctttggtatcgcatttagaaaatctcacaaaatgtgtaaatacgagcttcgccagtatagagttgatggttcatttagtgtcttcaaagatgctctcattgttaatgcaaccactggtgaatacgaagtcaacttagatagaaagacagttattatcccggcgtttctcaccgtacttttccctaacacttcgatggcattttattatagggcgatgcctgttcctaattttttttcgaccatatttatcctgctttgttgcactgcagttgtttcattttttgtgttgccatgggattttaaatctggatatgtttttgatgaacacaaatatatgtggctaacctattttgcctcacgacttggaagctttacctgcattaaatggataaagagaagaagccaaaagtttgataacgcactaagaagaattattaagtcattaaaattttaa

SEQ ID NO: 432968 - DNA, 414 bp, Serratia marcescens
atgcagaatacaaagtttaatattatggagagatatttgatactgctcgataagtttgtcgataaaattatcgaatcaggcatttctgaacaacaattgatcgagaagtcgtatctgttctgtgcagggtattatattaaataccagcaagaaattgaaaggctgacattctcaaataaagatgtcgttttaacatttctattattttcatactacaattatattaatgggttagataataatttaattgacaaagtaaggatgaggagaacatgttcattacttattaatttcattgtcgataatggtagtaagacagaaaaaatttatgcgcaggaaaagaagaagtacaaatcttatacattgaaaagggatttatcagtaaagaataaaaggaaaaaatatggtttataa

SEQ ID NO: 432969 - DNA, 1224 bp, Serratia marcescens
atgtatattccccgaccggcaaaactgctgttccagcatgacgatggctggagccagtacctggataaacacggcgacaccctcagcgactggaccaaactcgccgtcgagcgcatgctcgcctgcggcacctgcgccatgggcgtacgccgctactgctacgcctcaccggattgcacccatgcccgcttcttctgccagagctgcaagtccaaggcctgcagcagttgtggcctcaaggccaccgagcagtggattgccgaacagcagcacatcctgcccgactgcgactggcaacacatcacgtttaccatgcctcacctgctgtggccgttcttcaacaacaactggcccctgctcaacgacctgtttcgctgcgccacccgcgccatgctccgctgggcgcgccggcagggtattgaagtcggcatcttttgcgcgctgcacacctacggacgccagctcaatcagcacccgcatatccacgtctccgtcacccgcggcggcctcaatatcaaacacggcacctggcggcagctgttctttaaaaagaaagaggtcgagcaaatctggcgcagcgccgtggtttacctgctgcgtgacaactacgcgcaaatcaaccccagtggccttccgggcctcggtcatatccgtaatgaagagcggtggcaccggtatctgcatgcccaataccggcggtgctggaaagtgcattttgccaaaaagacccgcggcgcctggcgcagcgtgaaatatctgggccgttatctgaagcgccccccggtagccgcttctcagctgcgccactaccgcggcggtgccgtggtgcatcagtattacgaccaccgcacacagcaacacaaacgccagaaaatcagccaggaggagatgctgcagcgctacgtcagccatattccggcgcaccattttaaaatggtgcgctactatggttttttggccaaccgcaagcggggttcgctgctgccgaaggtctacgacgcgctggagatgacggtacgggaaaaaccgaagcggcccggctttgcggtgctgatgaaaggcttcctgggcaccgatccgtaccagtgtatcctctgcaaaggtcggctgcgttttgccggcgcggtggcaggcgagcacgccaccaaactgctctctgacagactgcatcggatggcgaaaaaacgatggcttcagaccccgttgctggacaagtgcgcctga

SEQ ID NO: 432970 - DNA, 897 bp, Serratia marcescens
ttgccggccgaactgcgggccatctgtgacctcagcacgctgaaactggagtccggctcctttgtcgaagatgacctgcgccagtatttcagcgacgtgctctacagcctgaaaaccaacgacggcgctgacggttacgtgcacgtgcttatcgagcaccagtccagcccggataagcacatggcgtttcgcctcattcgctatgccgtcgccgccatgcagcgtcacctcgacgccggccacaaaacgctgccgctggtcattccggtactgttctataccggcaaacggagcccatatccttactcgaccaactggttgcaggagtttgatgatccaacgctggccgggaaactgtacaccggcgattttccgctggttgatgtgaccgtcattcccgacgaagagattatgggtcaccgcagcatggccgctctgaccctactgcagaaacatattcgccagcgcgacctggccgaactgaccgacagactgtccgccattctgctggccggctatctctcttcgccacaggtgatttcgctgatacactatattatccaggccggtgaatcggcgaatgcagaggcatttgttcgcgaactggcccagcgagtaccgcaacatgaggacgaactgatgaccatcgcacaacagcttgaacaaaaaggtatcgagaagggtatcgagaagggtatcgagcaaggtatccagaagggtatcgaacagggtatccagaaaggtatccagttgggtgaacagcgcggtattgaaaaaggtgagcgtgaagcctcactgaaaatcgcccgcaccatgctggccaatggcctcgatcgcgacgcggtgatgaagatgaccgggctgaccgctgacgacctggcccaaattcgccactaa

SEQ ID NO: 432971 - DNA, 615 bp, Serratia marcescens
ttgtcagataaaaccgcatccgtttccccggaaaacgccacctccgcgctcagccatctggcgttctgcgccctggcggcgctggggctggcgcgccaggacggtatcgccggcacgccctatgccgaaaacctgttcctgatccgctggctggccaccgcccaaaagcaaaaacgcttccccaggagcgtcgcgattgacatccagtggttactcgaccgcggccgcaagcacggcccggccggcaaactgcgccagcatctggaatacctctggcgttcctgcagcggcaacctggccgctcaatccgacctgttccgactcacctacgcctccgaaaccctgaaagaccagggctgggacaattatgtgctggacgcgaaagagtggaagtccggcgtcgtgccgacaccgtcacagcataacgggttctacgtcgaaaaaacggcgctgaatgccgcttttgcccaggacggtcgccatctgcactccgtcacgtttcgggtggtcggtgacgccgaccggtttatgcatgtgatggccgagtacggactgtgtacgcgccggcagggcagcacgtcagcctgccacaccatcgcgcttgaaccggcgtaa

SEQ ID NO: 432972 - DNA, 450 bp, Serratia marcescens
atgagcaacgcatcacgcactcgcacaccgcaggacacggccggcacgcaggaaagtcgcgccaaagcgctgcaaagtgccatcaccgccatcgagaaagcgttcggcaagggcgccatcatgcgcctgggcgacaaccatggcatggctgtcgagcgtatcccgaccggctcgctcggcctcgacatcgcactcggcggcggcctgccggtcggccgcatcaccgaaatctacggccccgagtcgtccggcaagaccaccgtcgccctgtcggtgattgcctgcgcccagcgcgccgggctgcagtgcgcctttatcgatgccgagcacgcgctcgatccgcgttacgcgcagcagctgggcgtcgatatcggtgacccggtgagacagtttttctgtctcattagggttgtttttcactcatcctggtgttacgttttcatcatctag

SEQ ID NO: 432973 - DNA, 381 bp, Serratia marcescens
atggtgacccgcgtggatcgcctggcccgcagcattaaggacctgcaggatatcgtgtatgccctgaatcagcagggcgtaacgctcagggcaacggaacagcccgtggacacgcgctcggcagcaggtaaagccttcctcgatatgctgggtgttttcgctgagtttgaaaccaacctgcgacgtgaacgccagatggaagggattgccgcggcaaaagcgcggggcgtataccgcggaagaaagccctcaatagatcctgcggaggtctggcgcctgtacaccacggagaaaatgggagccacggccatcgcccgtcagctcgggatcgggagagcgtcagtgtaccgggcgctggaaaattatgagcagccggcgtag

SEQ ID NO: 432974 - DNA, 996 bp, Serratia marcescens
atgagcagccggcgtagcaccatcccggctgattccctgttgcaactgcggcaacggctcgatcgcctgccgccaaaaagccctgaacgtgccacccagattgccactgccgctcagttgtatggtatttcagtcacgacggtctatcgcgctcttcgtctggtcctcagaccacgcacagctcaccgccgcgatcatggccagccacggatacttcccccatctgaactggaacattactgtgaactgattgccgcgctaaaactgcgaacgacgaataaatccggtcgccatctgtcaaccgggcgggcaatacagttgctggaagagcacggtgtggagaccgttcagggattgattaaaagtcctaaaggcttgcttagtaagcagaccgtcaatcgctggctttcccgctggcgtctcgaccagccccgcctgttacgggagcctccggcggtaagatttcaggcagaaagcagcaatgactgctggcagtttgatatgtcaccatccgatctcaaacatattgaacggcctgacagggttgaccctgcccggggcgaacccacgctgatgctgttcagcgtggtggatgaccggagcggtgttgcttaccaggaataccggtgtgtgtacggtgaggatgcggaatcagcgctgcgttttctctttaacgccatggcaccaaaaaccaggtctgattttcctttccagggccgcccgaaaatgctgtacctcgataacgggccagtggccaaaagccatgtattccagaatgtgatgcagtccctgaaagttgactggctgacgcagataccgtctgacggtgcgctcggaacagccgatttgggtggcaatatcgacaatgtaagcgccctgatggcgcatttgctttatcatgaaaaagacctctctgctcagcatgttgatatccttttcggtgtcggaaccatcaggaaacaacatgttgggtggagcggacaaatcaaatggtga

SEQ ID NO: 432975 - DNA, 747 bp, Serratia marcescens
atgaaccgtatcccattcgtgtttgtaattctgattttatgtcttcaatctaagtccggctgggccgcaaacctctccacatcttcggtcacttacgacgtatggacacatattatgatatcccccccgatctccctcacaaacaagaatcccttttcaggccaaatatccgctggggggcaggcttgtgaagtggcggagatcatcgccacaaacgtccacgctcccacgtggacctggaccagtgtaccggctcatgttgtgaaagataaaacgtgggttgtggcatggtccgggctgcccaccctctacgacggaatagagatacacgccaaggtattatgccgtaatgatcgtgttcctgataagaccacctggtcctatgggcggggggtaaagacaggctctatttcggcgcaaacagaagtatctcggacggggctttcggcctctatacgcgacagtccacgcctgcatatccgtcctggcggaagggcactttacaccttggccgtaaaacattctcccggtgcggcaattgagacgaaagagacatgcattcgttccgacgctgacggctgcattctaaaagaactccccggggggggaaagatcttcctaaacaacggggtggtcacaagtgcagggacgtaccgcctatccacatcttcgtccgccggtatccaggggtccccgccgccaggccgttacatcgtcccgtttaccgcaatcatcgtggtccgttga

SEQ ID NO: 432976 - DNA, 246 bp, Serratia marcescens
atgacgggattcgagttaaagctttggcggacggggcttgactggacgcaggcgcgagcggcggaggagtttggtatctcgatgcgtacttacatccgttatgagcagactaagccgccgagggttattgtgttagctatccaggcattgtccctggtggccatgttaccggacattgatactctgccggtgcatactctacgccagcggatcagaatactggcgggcgacatctccactggctga

SEQ ID NO: 432977 - DNA, 564 bp, Serratia marcescens
atgacaatggccgattttcgccgaatggcggcaaaaatggatcagcatatgcagcagttggacgcgcaaggcgtcacggagccgcaccaggttatcaaccgcatgatgggctatacccctgaactgcatcagatttggaccggcaccacggataaagaactgatggcattaacccaggaatatccggggttttaccgttacgccctcatcatggaaactgcgttcgagcaggagagccagaggtcatcccgatcttatgacggcatgcctgaattctctgcagcccataaacacaccatggaacagatactcaccacggccgcaaccctggaacggggatacctcgcttatcagggcaatgccctgtcggtgtttgatgaacaaataatccggctgggccagtcgttcaggctatggcaggaatgcgtagaagacttcaggaaagtgctaaatgccgatgagaacgtcacctccatgcagcgtgactacgttcatgcggggttgacacggattgccgatcggctcatggatttacaggcaaaaatccagatgcatagaaaatga

SEQ ID NO: 432978 - DNA, 615 bp, Serratia marcescens
ttgttagacaagaccgaatctattaccacagaaaacaccacttcaacactcagccatctggcgttctgcgccctggtggcgctggggctggcacgccagaacggtatggccagcacaccgtatgccgaaaatttgtttcttattcgctggctggccaccgcccaaaagcagaagcggttccccaaaagcgtagccatcgacatcagctggctactcgaacgcgggcgtaagcacgggccggctggcaaactgcgccagcacctggactacctgtggcgctcctgcagtggcaatctggccgcacaatccgatctgttccgactcacctacgcctcagaaacgctgaaagaccagggttgggacaattacgtgatggatgcacgggagtggaaatccggagttatcctgacgccgtcacttaacaacggcttctacgtcgaaaaaacagcgctgaatgcggcctttacccaggacggacgccacctgcaccccgtaccctttcgcatcattggtgacactgtcacctttattcgtatcatgacggaatatggcctgaacgcgaggctcgttgacagcaccccagatcaccatacggtcgcgctggagcccgcgtag

SEQ ID NO: 432979 - DNA, 921 bp, Serratia marcescens
atgaaaacgacacctacggcacacgatgccttgtttaaacagtttttgactcatccggaaaccgcacgtgattttctggaggttcatttgccgccggcattacgccaagcgtgtgacttaaacactctacgactggagtccgggtcgttcgttgaagatgatctgcgtgcctactattctgacgtactgtattcgttgaaagctgggcagggtgatggttacatttacgcgctgatcgagcaccaaagctccccagacaagcatatggccttccggttgatgcggtatgcgattgccgccatgcaacgccacctcgcagctggaaacgaccagctaccgctggttatcccgattcttttctatcatggacaagttacgccgtacccttacccgatgagctggctgcaggcattcaatgatccaacactggccaaccagctgtatggtggtgactttccgctggtcgacgtcacggtcattccggatgaccaaatcatgcagcatcgccgcgtcgccattttagaattgctgcaaaaacacgtccgtcagcgcgacctagccgaactgctggaacaactggtcacgttgctattggccggttacactacaaatgagcagctgacgtcactgatgaattacatgctgcaggttggtgaaacccgcaacccgggcgaactattatcaaccctggcatcacgggtgccggaacatgaggacacactgatgacgattgcagaaaaactaagagaagaagggcgccagaaagggcacatggaagggtggcaggaaggacgtcaggaaggagagcatgaagccgccataaaaattgcctgcgccatgttggacagcggtctcgatcgcgactcggtaatgaaaatgactgggctcaccgccgacgacctggcgcaaatccgtcattaa

SEQ ID NO: 432980 - DNA, 837 bp, Serratia marcescens
atgagtaaagtaggtttctttgatcgacggattttcgaaaggttttttaaacttgcctctgctataacggcgttcatttctgctgccgtgatttttaaagatataccaacagactcaaaaataaactgtggtattgctctgatcgtagttttaataattctctacatctccttatggttacgggcaaataatttaaaaagcataattttatctgtagagggtagcgaagtaaacataataaccggtgacatattcaaacaggatgggttcaaaaccattgcatttaatgattactttgacacaatggttgacgaaaaaataatatcaagcaaaagcctcaatggggtctttttaaaacaacatttaccaggcagcattgcagcgctagatgctcatattgaacactatcaatttgatgatggtgattttttagaacacgatgaagaacgtaaaaccgggaaaaccaagaaattcaacattggcacattgtgcgtttatgatgactatctcataactgcattttcaaaattcgacaagaataaccaagctcggcttaccatgcctgagtatcttgaattcttgataaagttctgggataaagtaaataaagtttacgcccaaaaaagcgtttccgtaccgatctttggttcaggaataacacgtataaaagagcataaaaacataacagatgaagaacttcttaagatcatgctctggacatttcgtatcagtgaaatgcgttttaagcacccggcaaagctgactatagtcattcatgaagataaaatagatcagattagccttctcgatttgaaactggctaggaatggattgtag

SEQ ID NO: 432981 - DNA, 564 bp, Serratia marcescens
atgtcgtataagaatggaaactattgtgccttttacgtacagtcgccctttaatgaaacctcattaggtgcgcacgccacaaaggattttgtttattacagtatgttgaaagcatggaaaggtgctgactccacatttccttttaataactcacatgacaaaacatacaacgtccgtgatggaagtaactgggaatcaacactaaaacccagattacgtgaaagactaagtaattcaaaaaatatcattctattcctaagtgttcgcacggtgagttcattggcattgaatgaagaaatagattatggggtaaatactttggggttacctgtaattgttgtctacccggactataaaaccaaaactgacctgttagatggacaaagcttaaagcaagcaatacggaacctatgggacaagctacctactttcagagatttaatgagtaaagtgccaaccttgcatgtccccatggataaggaactcattaaaaccgcattaaacgataaagacttcatggttaacagtaaaaaggaagctaatatctatcgctataacccatga

SEQ ID NO: 432982 - DNA, 765 bp, Serratia marcescens
ttgagtatcatccccctcgagatgggacagatttcacgtagcgcgatcagtctgcctggcggcttcgcgcgcgccgttcggctgcgcgaaatggcccttgccgcctcactggatgtgccccgctacctgctggcaccggaaattgcggtgctgctcgactaccttcccgatctacgccagcgcatgctgattgaaacgttgtggaataccggtgcccgcatcaacgaagcgctggcgctgacgccggccgatgtttttttcaatgacgagttgccctttgtgcggttacgcaccttaaagcaacgcgtcccccgtccgcgccgtcggccaaccaaagaagaacagcagctgtgggaggccccgtttcgggcggtaccgttgccagatgccggttatgtgcgccgactgcaggaatactttgcgacgttcaaactgctcacccgacgggcgacgccgatgtgggatgtggccagtcaggaaacaccgcgcaactggctgcgagcggcggtccatcgtgccgcccaggatggtgtgatcttctcggtacgccccatcaccccgcacacgtttcggcacagctacgcggtgcatctgttgatgaacggtgtgcacatcaaacaggtgcaggcgttgatggggcacaagcggctggaaaacacagaggtctatacgaagatctttgcgctggatgtaacgccggatctggcgttctctctgccggccgatgaggcacggcggttgttggcactgcctggtgcaagatag

SEQ ID NO: 432983 - DNA, 645 bp, Serratia marcescens
atgcttcatactaccaatcccgtcataaaacacaaaaccggtttgctcaatctggctgaagaactcagcaacgtatctaaagcctgtaaaatcatgggtgtctcccgtgatacattttaccgctatcgcgaactggctgatgaaggcggtgtggacgcgctgattaaccgcagccgacgcgctcccaatctcaaaaatcgtaccgacgacgcaactgaacaggctgttgttgattatgctgtcgcgttccctgcacatggtcagcaccggaccagcaatgagctgcgtaaacagggcgtttttctctcaggaagtggtgtccgctctgtctggctgcgccacaatcttgaaaacttcaaaaagcgtctgaaagcactggaagaaaaagtggctcgtgagggtatcgaactgactgacagccagatcgccgcactggaacgcaaagccagtgatgacgaggcctgtggcgaaattgaaaccgcgcatcctggttatctgggttctcaggacacgttttacgtgggcaacctgaaaggtgtcggacgtatttatcagcagacgttcgttgatacgtactcgaaggttgcgcactgcaagctgtatgtttgtagtggtcaagtaatattggccacggttttacagtaa

SEQ ID NO: 432984 - DNA, 291 bp, Serratia marcescens
atgacctttaatgttgaatttgacgaaagggcttttaaagaatggaacaagctcgacaagacgatccgagagcaatttaaaaaaaagttaaaaaagcttcagcaaaacccttacgtcgaatcagctcgtcttcatggtgatctgaccggctgctttaaaataaagctgagagcctctggttttcgattgatttataaggttatcgatgacgagattgttatatgggtagtcgctgtaggtaaacgggaagacgacaaggcctatgaaacagcccgcaagcggatcttataa

SEQ ID NO: 432985 - DNA, 255 bp, Serratia marcescens
atgagcacaatccagatccgagtagatgacgaactgaaaaaagatgcctaccaagcttttgaaaaacttaacctgtctccttcagatgctcttcgtctgtttctgcggtatgtcgcagagaatgaaaaactcccctttgccgaagtctccgtaatggtcagtgaagatgatgaagacgctgatattctggctgtcgttcgggaaaggctgaaaaatccggccagacggatcagggttaacgttgatgacctttaa

SEQ ID NO: 432986 - DNA, 711 bp, Serratia marcescens
atgttgatgaccagcagcgatcggccgattgccgtgacgcagtatgagaccgcactcgcgctgcggcgcatggcgctgctgcaaccttacctccctaaatacctgctggcgcccgaggtggcggtgttgctgcattatctgcctgatgagcggcagcgcatgttgtatgccacgttgtggaacaccggcgcccgcattaccgaagccttgacgttgacgccggaagatctgctgctcgagggaccgcgcccctgtgttcggctgcgcacgctgaaacagcgtcggcggggcagaggacggccatcggccgatgaaaagatagcccggatagtgccgctgctcgatgccggctacgtcgatcagctgcgtcggttcctggccacattcaggcccggccgtcgacgccccttgtttgacgtcagccggaaaacagcctggctgtggctgcagcaggccgtcgcgcgcgccagggaggaggggattgaatttgcgctgccggccattaatcccaagacgctccggcacagctttgcgatgcacctgttcttcaatcacgtaccgccgaaagtggtgcaggcctacatgggccatgaacgttatgaaagcacggaggtgtacctgaaggtgtttgcgctggacgtggcgccgcagttgggggtgacgttctcactggatcaccgcgagtatacgcacctgctgatgcaaaaatag

SEQ ID NO: 432987 - DNA, 249 bp, Serratia marcescens
atgaaagtattcctcgctgtcatcatcgccgccattccggtggcctacatcatttgggatcgctacttccgcattttcccgctgtcctatttcggcatcgagaatgtgcaacgcattgcgagatgggaaagcccggaatggcgcgagcgcatcttttcgcgcgggggaatgaccagtcatgagtggctccaagttaacaagcgccaactcaaggccatcgatgccgaactgcggcgccgtaaactttag

SEQ ID NO: 432988 - DNA, 1539 bp, Serratia marcescens
atggaaaatacactccccgacgatatcgaacagttaaaacgccttcttgctgagcaggaggcgctaaaccgtgctctgcaggcaaagcttgaagagcgcgagcgggaaatcgacaggctgctggcgcaactggataagcttcggcgaatgaacttcggcagccagtccgaaaaaataagtcgtcgcatcgcgcagacagaggccgagttgaaggcgctccaacaggagagcgacgccatcaccggccgggtagatgacccggaggttccgcggccacttcgccagacccgcacccgcaaaccgttccccgaatcactcccccgtgatgaaaatcgcatcctgccggtagaagcctggtgccctgactgtggcggttcgctgagttacctgggcgaagatgccgccgaacagctggagctgatgcgcagcgccttccgggttatccgcacggtgcgtgaaaagcacgcctgtacaaaatgtgacgttatcgtacaggccccggccccttcgcgtcccatcgaacggggtatcgcaggcccggggctgctggcgcgcgtgttgacctcaaagtatgcagagcacactccactgtaccgccagtcggaaatctatgcccggcaaggtgtggagcttagccgttcggtactgtctggctgggtggatgcctgttgtcgtctgctgtcaccactggaagaagcccttcagcactatgtgctgaccgatggcaagctccatgccgatgatacgccggtgccggtgttgctgccgggcaataaaaagacgaagacaggccgcctgtggacgtatgttcgagacgatcgcaatgccgggtcaacgcaagccccggcggtgtggttcgcctactcaccggacagaaagggcatccatcctcagacgcaccttgccagcttcagcggagtgctacaggcagatgcttacgccgggttcaacgagttgtatcgcactggcgatataatggaagcggcctgttgggctcatgcccgccgcaaaatccatgatgtccacgtccgcacgccatcggccctgacgaaagaaaccctgaagcggatcggcgaactgtacgccatcgaggcagatataaggggaatgccggcggagcggcgccttgccgaacgtcagctgaaaacaaaaccgctgctgaaatccctggaaagctggctgcgggaaaagatgaaaaccctgtcgcgacactcagaactggcaaaagcgttcgcgtatgtgctgaaccagtggtcggccctggcgtattatgcagataacggctgggctgaagcagataacaacattgctgaaaatgcccttaggatggtcagtctgggtcgtaaaaacttcctgttcttcggctctgaccatggtggtgagcgcggcgcgttgctgtactcgctgatcggaacgtgcaaactgaatggggtagatccagagcgctacttccagcatgtacttgatgtcatcgcagactggccggtcaacagggtcagcgaactactaccatggcgtgtcaccctgttggccgaatga

SEQ ID NO: 432989 - DNA, 348 bp, Serratia marcescens
atgatctcattgccgaccggcacaaaaatctggctggtcgccggcatcaccgacatgagaaacggcttcaacggcctggcggcaaaggtgcagatggcgctgaaagacgatccgatgtccggccacgtctttatcttccgggggcgcagcggctgccaggtcaaactgctctggtccacaggggatggtctgtgcctgctgacaaaacggttggagcaaggtcgcttcgcctggccctcagcccgtgatggaaaggtgttcctgacgccggcgcaactcgcgatgctgatggagggcatcgactggcggcatcctaaacgtcggcttaactcactgaccatgttgtaa

SEQ ID NO: 432990 - DNA, 1173 bp, Serratia marcescens
atgctgagcagagaggtctttttcatgataaagcaaatgcgccatcagggcgcttacattgtcgatattgccacccaaatcggctgttccgagcgcaccgtcagacggtatctgcgttatccgtcaccgccggcgcgtaagacgcgactgcgaatggaaaaactccgcccttttatggagtacatcgatatgcggctgaccgaaaacgtctggaacgccgaagtgatattccatgaaatcagaaagatgggctatcccggcggacgctccacgcttcgggcttacatccagcccaaacgcaaaatgcggccgggtaaaaagactgtacgcttcgaaacccagccaggttaccagttgcagcatgactggggagaaatcgaggcggaagtggccggtgagcgctgcaaaatcaacttcgccgtgaacacgctgggttactcgcgtcgcctccacgtctttgcggcgccgagccaggatgcggagcacacctacgagtccctagtgcgggccttccgttacttcggtggcggcgtgaaaaccgtgctggtcgataaccagaaagcggccgtgctgaaaaatcacaacggcaatgtggtgttcaacgcaggcttcctgcaactggcgcagcactatgacttccagccccgggcttgtcgcccccgccgcgcgcgaaccaagggcaaggttgaacgcatggtcgaatacctgaaatacaacttcttcgtccgttacacgcagttcgacagcttcgcgcacgttaaccagttgctggagcagtggcttgctgaggtcgcggaccagcgtgagctgcgccagttccggcaaacgccgacgacccgcttcgaggaagaaaaagcgcacctgcaggcgttgccggcaacggacttcgataccagctacttcgatatccgtcacgtggcctgggacggctatatcgaggtacggggtaatcgttactccgtgccggaagcctggtgcggccgcccggtctccatccggatcacactggatgatgagctgaggatctacggcaatgagcagcttgtggccactcatcgcctgaacaaccgtggtgccgggtggcagaccgttccggagcaccatgcaccgctgtggcaacaggtgagcatggtagaacaccgaccgctgagtgcttatgaggagctgttgtga

SEQ ID NO: 432991 - DNA, 801 bp, Serratia marcescens
atgcatgaactggaaacgctgttgggccgcctgaaaatggagcatctggggtaccaggtggaaaacctgctggagcaggcggcgaaggaagaactcaactaccgcgagttcctgtgccgcgcgctgcaacaggaatggagcgggcgccatcagcgcggtatggagtcgcgactgaaacaggcccgactcccctgggtgaagacgctggaacagttcgacttcagcttccagccgggcatcgaccgtaaggtggtgagagagcttgctggcctggcgttcgtggaacgcagcgaaaacgtgatcctgctgggtccgccgggcgtggggaaaacgcatctggcggtggcgctgggcgtaaaggccgccgatgcagggcatcgggtgctgttcatgccgctggacaggctgatagcgacgctgatgaaggcgcgacaggaaaaccggctggagcgccagctgcagcagctgagttatgcgcgcgtgctgatcctcgatgaaatcggctacctgccgatgaaccgtgaggaggcgagcctgttcttcaggttgctgaatcgacgttacgagaaggcaagcatcatcctgacgtcgaacaaggggttcgcggactggggagagatgttcggcgacaatgtgctggcaacggcgatcttggacaggttgctgcatcactcaacgacgctgaatatcaagggggagagctaccggctaagagagaaacgaaaagcaggcgtgctgagcaaaaatctggcgccagaaaacaacgaggcatcgctggagaaaagcggtcaacctggttga

SEQ ID NO: 432992 - DNA, 1101 bp, Serratia marcescens
atgcccttcgatatcgaaattgccgcccagctctttctggaagcgatcgggctcaatgcggatcaacaccggaatgcggtaatcgttgttcaggcgctgcgccatgccctctttgtagaacggcacctgcgccaccgtgcccagacgaatgccgcggaactcgaccggggcgcccggctgcaggccgcgcaccgaatcggaaaagaacagcaggtagtccttatgcacggtatacagcgaatcctgcgtgctacgctggttgtcgaacagctggtactccgccttctctttcgcctgttcgccgcgatcccagccctccggcacgtcaaaactgacgccgccgctgaacagggtagtcagcgaccccatctccacccgcatgccctgcgccgacatgtcgaacgccacgccgctgtctttccagaagcgcacgttggtggtgaccagctgatcgtaaggcgcggtaatgaacagctgatagcgcatggcgcgcgttttaggatcgaaatagctggtttccaccgagccgacgcggtagccgcggaacagcaccggatcgccggcgttgagctggcccgatttttcgctgtccagcacgatgcgcagccctttggcatccggagaggccagcggcggcgcgtcgagcagttgatagttgtctttgccgtctttgcccttgttgcccggctgcagttcgatataggcgccggagagcagcgtgcccagcccggagacgccttcacggccgatctgcggcttcaccacccagaaggcggagtcctggcgcagcaatttctccatgccggaattaaggcgcgcctgcaccatcaccttgctcagatcctcgctcagcgtgacggtttccaccacgccgacgtccacgctgcggcttttgattttggttttacccgcttccagcccttccgccgtcgtggtgaccagcgtcactaccggcccctgatggctgaagtggtaaaacaggatccaggcgccgatcagcgcggtcacgatgggaatgatccacaccggcgaccagcgcttgatcttctcgacgtccgcgacgctatgattattttccgtcaccttgcggctccttgttga

SEQ ID NO: 432993 - DNA, 813 bp, Serratia marcescens
gtgctggtcagcttcgtcaagctgatggcctacggcgatatcggcatcggcagcagcttcgtgccttattgcctgttctgcctgctgcaggtgcgcgccttccagtgcgtggacaggcgctggctgtggcaggacatcgaaccggcgccgcgtatcgatcgcccgctgacggtggggcgcaccggcatgcggcagggcgtgcgctcttgcgcctgctgcacggcgatcctgccggccaatcaggtgcgctgtccgcgctgccacaccaacggctacgtacgtcgccgccacagcctgcagtggacgctggcgctgctggtgacctccgtcatgctgtacattccggccaacctgatgccgatcatggtgaccgaggcgctgggcaacaagatgaactccaccatcatggcgggggtgatcctgctgtggggcgacggctcttatccggtggcgctggtgattttcatcgccagtatcatggtgccgtcgctgaaaatgctggcgatcggctggttgtgctgggatgcgaacggcaggaagaaaccgcgtgccgacagcgagcgcatgcatctgatttatgaagtggtcgaattcgttggccgctggtcaatgatcgacgtgttcgtgatcgccgtattgtcggcgctggtgcgaatggggcagttgatgagcatttaccccgcgacgggcgccgtgctgttcgcgctggtggtgatcctcaccatgttcgccgccatgacatttgatccccggctgacctgggatcgcgcaagtgaaacaatcaacaaggagccgcaaggtgacggaaaataa

SEQ ID NO: 432994 - DNA, 546 bp, Serratia marcescens
atgttgaaaaagctagaaaaacttggtgctgctctgagtaaactatcgaatggggtagatgaccctttattcaagaaacttgaaaattactctggtgctttaccgagtgaatattgtgattttttggttaactttagccagggagctgagtttgactctttaatcgtttataaaggagttgaagcctctccttgggcaagtaaagatggatatgattcactggagtatttctatggattaagtaattcagagggagagggggatgtctttgagttcattgaaatgtataaggatgatcttgggagccaatggttacccatagcatcatcagatggtggtaatcaaatatgtctttgcctaacggggaaaatggttggacaaatctggttctgggatcatgaggcagaccctttatatgatgaaaatcaagtaatatcagggttgtcactagctgcttacgatttgaaagatttcattttccgccttgaaattgataaggaagaacctgatatatcaggggtaaagaaagtcgttttagatttttga

SEQ ID NO: 432995 - DNA, 744 bp, Serratia marcescens
atgaaccgtatccccttcgtgtttgtaattttgattttatgtcttgaatctaaggccggttggaccatgaccgtactctcgtcgtcatgggccacgtacgacgtaacggcaactctttggagcccatctaccaacatctcacgagaccgtccgtattacggtcaaatctcagcaggggggaagggctgtgaagtgttgaacatccattacgcaaagggacaccattggcgttggggttgggctgtaatcagcgccccggaaatagataacaaaacgtgggttaaggcctggcccgataccgagaccacctacgacggattcgagatacatgtgagggttacttgccgtacctctagcgttcctgataagtccgtctgggattttggccagggggcatacaccgggacgctaggcttctccgaagtatctaggacaggggttacggcctctatagtcgacaaagctttccttcatgtccgtcctggcgaaaagggactttacaacttgttcgtgaaaacttctaccggtgcggcaatagagacgaaagagacatgcattgttaccgacgctgacggctgcattataaaaagactgcctggtgggggaaggctcttcctaaccaatggggtggtcacaagtaccgggacttaccgcctatccgtagattcgcaagccggtatcaagggggccccgccgccagggcgttatagtgcaacatttaccgcactcatcgtagtcccttga

SEQ ID NO: 432996 - DNA, 666 bp, Serratia marcescens
atgtacttcaaaaagaaggttgtcgaagcttactggcgtcaggctgtcatcaaactgctgcgggaaagctacgccgcgctggacttgcccgccgccggctatgagcacattcgggattatcgcgagtggtgccagttccttgaggtccagtttctgcggcgctggaaaatccactttgcgaaaaagaccaaacacgtgaggcaaaacgtcaactacctgggccgttacctgaagcgcccgccgatggcggcgtccgcgctgcggcattacaccggcggcgccgttgtgcatcactattatgaccaccgtacacagcggcaccaaaggcaggggttgagccaggaagagatgctgctgcgctacatcagccatgttccatcccggcattttaaaatggtgaggtattacggcttcctgtccaaccgtaaacgcggtgctctgctgccaaaggtatatgcggctctggagatggaggtaaagatgaagatggccaaaccgggctatgcctcattgatgaagcaatttacgaatgtggatccgtaccagtgcgtgctgtgcggcagccggatggtattttcgagtgcagaagcgggtgttcgtgcagaagacttgctggcccaacggcatcagcggctggaaaaagagcgctggttgctgacagcatag

SEQ ID NO: 432997 - DNA, 1161 bp, Serratia marcescens
atgaaaagaaaacccctccctggatttttaaacaacaggattaacgaacgttttcaggaaagattccacactgaatggcaagggactcatttatttaaaataaatcaaaatggagtgaatgatgtaatactttgcaccaatgattacctttgtctttgtgacgaggaatcactcaatgtaggaaatcacgagaaccgaatgggtgagaaaataatgtcatccgtctttcttaatgaaacaagttatcaggcggaagtggaacgggcatttagcgagttctttggcagtgaagacagtatcatgtgtcagtctggttatgccgccaatactggcttgattcaagcaattgccaatgaaaatgttccgatttatatagacattctcgcccatatgtccctgcacgatggggtacgtttggcaaacgccaaatcctatgcttttgctcacaatagtgttgaaggcgcgagaaaaaaaatagcgtcctacggccccggagtgatcgttgtcgattcagtgtatagtacaaacggaagtttgtgtcctttagaggattttgtcgctctggcagaagaaactggctgcgtgatcgttgtcgacgagtctcattccgtaggcacacatggcccagaaggacgtggtatcgtttatgcgctgggattaaccaagcgcgtggattttgtcacggcaagtctggctaaaacatttgctggacgtggcggattaattacgtgtctcaccctatttaaagactacttccaattggaatcgcatccttccctattcagttcctccgttatgaaccatgatctaaagtggtttatggatgctattgaacatattaaatcagccgatgagaaaagagagcgactgcatgctcacgccaaatatatccgaactgctctggctgatctagggtacgatgtatccggtggtagtgagcaaatcattgctttggaagcgggttcagagaaaaatgtactttctcttaaaaatcatttggaagagaaaggaatattggcttgtaccttctgctatccagttactacaaagaaaaagtcaaaagtcaggatggcagctaacgccaatctcagtgaaaatgaccttgaccgaatagttgacgcctttagtcaatttaaatcaaatcagacatctgtaatgtag

SEQ ID NO: 432998 - DNA, 3003 bp, Serratia marcescens
atgtgtaaatcccagaataatgttgtgaagcaatttataaatcaagcgattgaatcgaaagataagatcgcgattgagtatggtaataccataatgacctatgagcaattgcataaagaaagcgatcgattatgtagtttgcttcgattggcacaggtcgcacctggaaacagtgtacctttagttgtacagaggacgccggagtttattatcggcatgctggcaatagccaaggcaggcgcggcctatatccctattgatattcataatccacaaaaacgcattgcgcagattattgagcagtccaattcccctgtcgttctgttaggaaatcatgcatttacttcacatgttgagcttgctggcgtaccggtaattgcgatagacaaagcgtatccagacctggcgcgtgatccttgtatcccgaccttgtcttctgcggatgagtccgcgtatgtgatatttacctctggcaccacaggtataccgaagggcgtgatggtttctcacggtgcgcttcataacctggtgaactggcataacgtaaactttgctgtggatgctcagtgccgtagcacactcattgccggtattggttttgatgttgcccagtgggaggtatggtcgccgctgatttgcggcgccacgctggttctgccggatagcgaggaaacgcgactctgccccgatgccttgctgcgtttttttgcccttcaacgtttgacacatgcttttgtaccaacggtgtttgttcctgacattgttaacctgcctcaacctgctgaacttacgttgcgatacctgtttaccgctggtgaaaagctaagtcctgtcaatgtttcccatcttgactactcactaattgattactatggtcccaccgaagcgaccattttcacgacctgcaatacagtcatatgcgccagcaaaaatcaaccaccaagcattggtgtgcctattgccggagcggaagtttttattctggataaagaattgcaaccgcttggtgtcggccagcccggtgagttgtttatcggcggccccggtttggccattggttatctgaatgacattgaaatgacgcgccagcgctttattacctcaccgttttctccgggtaagcggatctaccgcagcggcgatcttgcatgctggttgcctggtgggcgagtacaatatctgggtcggttggacgagcaggtgaaaattcgtggtaaccgtatagagctgggggaaattgagaatgtgttgctgcagcatccgacggtgaaaggggctgttgcattggtggtgggggagccagacagggaaaaacgcatcttggcttttgtggcttcgcctcacaatgatgcacctgaacttcaggaaaagttgcgtcagcacatcgctaatgcgttgccggcttatttcatgccatcggcaatagtggtactgcctcgtttgcccctgacaataaatggcaaggtggataaaggggcactattggcgcatgagcagcaacgacgcgctgagcgtgtaagacctgaatccaactttagcgaacgtgaagcgcttctggcagaaatctgggcatcgttactggatgacgtttcacctggtctggatgatgaattcacgcatttgggcggccattctctgacagcagcaaaaatggcggtcgttatttccgagaaaatgggcgtccagacatacgtacatgatatctatgatcatcctacgatccgcttattagctaaagcgttggaagaacgtagcagaacaccatctgttgctacatctactgaaccgctacgcattttgcaagacgatatattcctgccggatgatatttatatcgatccacatttcgacgaatatcaagtcactgctccgcgctgcattttgttgactgggagcacgggcttcgttggtagccatcttttgtctgatctgatgcgaactaccgaagcgaaagtctattgcttgattcgcgcgcaagatctgcaaacagcacagctgaggttatcagatacgctagcgcactatcatattgtgctgactgaagcacaacgtgtgcgagccgttcccatctgtggtgatatttcgaagcctcgtttggggatgttagtggaggaatatcgacggttaagtcaagaagtggacattatttatcattcaggcggggctataaacttcatccaaccttatagctatctgaagcatataaatgtgcagggcgttcgggaaattattcgctttgccgccgaacaacgaaccaaacctgtgatgctgttgtcctcagttgctgttttcagttggaaaccacaacattctgaaagatggataatgcatgaagatgacgatatagatctgaacctgcctgaggttctcactgatatcggctatgtacgcagcaaatgggtcatggagaaagttgcaggcctggcagttgcccgcggtttgccgatgattacctttcggcttgggtacgcgaccaaccatagtgaaacaggtgttagcgcagaataccaatggtggggcaatctggtgaaaacctgtctggattgcggcattgtgcccgccttgcaggaattccgtgaagggcttaccactgtcgattacattaccagcgtgattacctacgtgagtcgcaatccgcaggctataggaaaaaaattccatctgacccctgaacctgaggatagtctgacgcttgacgaattttttagcctgttggaacaatacttcggtttccattttcatcgtcagccactgccagaatggtttgcccattgggaagaagatcctgaatctcccctttaccccatactgggcctgattagagaaaatgcgtctggggggcaatcaaccattgagctataccaaaatacgtatcaatgggataaacgaaatgtgaagcaattcttacaaggcagcatgattcaagaaccgcaatttactcgccaggtcctggcgcgctatttgcggcagtcaatcggttaccaaggcgagaatattaactaa

SEQ ID NO: 432999 - DNA, 513 bp, Serratia marcescens
atgtcactggtagaaagaagtttatatttactgcaaaacactcggttcttcacgcttgccagtcgttcgttagttggggatgtttgggctagcacagtcagttatgttgcagcatttgaaccaatccgaataatttggtgttcggaccgcttatctaagcattcggagaatatccgtgaacatgctcaggttagcggggcaatatttcgtgctgatttgcaaggggtttctcctctcggtttggatggtgcgcaatttgtcggcttttgccatgaagtcccagaatcggaaagtgtagaagtatatagttatttttcctcaattcaattcccagatgaagcattacgtgtagcaatgatgccgcctttcgaagagtttacaggaaatggtactcgtcgattttatgaattgaggattactgaatggtggctgttagatattgatctgtggctggagaaacgacaagatcgccgaatctcgttggatataagcctgatagccgcgccgttatag

SEQ ID NO: 433000 - DNA, 1218 bp, Serratia marcescens
gtgtcgaactttcaaaattggctgaatgaaaagtcatcaaatgattggtatattcacataaaacggctttccgcaaacgatacaggtgctacgggcagccatcagtcaggtgtttacctgccgaagaacgcagcaaattttttgttcccttcaattaacagaatcgatgaagagaatccctctgtagaacttatcgctaaaacactttcccacaatgtcaacgatactcaggttagagctgtctattataacagcaaaccgagaaatcttaaccccaagggcagggatgaaacacgaattacctgctggggtggtaaaaaaagtccacttcaaaaccagaaaaatacaggtgcattagctatattctgcttctctgcatccgataatctaaaagactgtgatcttgtcgaagtatgggtatgcagctccattgatgaagaagacttagttgaaacaattattggagaagtacttcctggaaccgcattatcaggcttatcgacacaacttcttggcggtttcgctatcgatgatacaaactggaaatctcggaattataaaatacccgagcactggaaagtaacattccctagcggaagcgagatcattgaatatttaccaaaaatatttaagtttaaggatgaaactcctgacaaacttttgttagagagaagagaaaaagaatacgatctattccgccaaatcgaagagcttcatgttcttgacaaagttaaagagggttttgattctgttgaagagttcattgagctcgcaaactcagtaagcaatcgccgtaaatctcgctcaggaaaatctcttgaaatgcatctcgagaaaattttcatcgccaacggtctagtaaaattcacaacgcagagtgttacagaaggaaagaagaaacctgattttctttttccttcaggagcagactaccacaacccagcttaccctgcggaaaaattaaggatgcttgcggttaaaacaacatgcaaagatcgctggagacaagcccttagtgaagctgaccgcatcgataaaatacacttattcactctgcaggaaggtgtttcaatcaatcagtttcaagaaatgaaaaatgctggggttacattagtggtaccgaaaccattacacgaaaaatatccaaaaggaataagaaatgaactaatttcattacatgaattcattgaggatacgaagaaagagagtggggagtga

SEQ ID NO: 433001 - DNA, 1431 bp, Serratia marcescens
atgcaagagttccaagagtatgccagaaagctgcgtgtcgaagcagaacatcagcaacaaaccagacaagagcaagacaaagctctggtcgaaaagctggtagaaatttacgatcaaaaagccatagctgagcttttgcgtgaggtcagcgggagctacgagtggactcgtgagtcactcaatcgttggctgaagaggaaaacaccacaaaaagttttgactgaagaagagttcaagttacttagatcgatgttgccggaaccttcccggtttcatcccaactataaattccgctttatcgatctgtttgctggcatcggtggcattcgcaaaggttttgaggacatcggtgggcagtgtgtgtttaccagtgagtggaacaaagaggctgtccgtacctacaaagcaaactggtactgtgatcctgaacatcacaaatttaattcagatatacgtgaaataactcttagcgaagataatgatgtctccgttcaggacgcatacaaaaatatagataaagaaatccctgatcacgatgtcttactcgcaggcttcccctgccagccattctcccttgcaggggtatccaagaagaactcacttggccgtgctcacggtttcgagtgtgagactcagggtacattgttttttgatgttgcacgaatcattgcggccaaaaaacccgcaatatttctattagaaaacgttaagaatcttaaaagtcatgataaaggaaaaacatttaaaattatcatggaaacgttagatgaattaggttatgaagttgctgatgctcaggcttcaggccccagcgatcctaaaatcatcgatggaaaaaactttttacctcaacatcgtgaacgtatcgtgttagtgggattccgccgcgatctcaatattcatagtggttttacattgaacgatttacatcgtttcttcccagagaatcgcccatctttcggtgagttactattagaaaaccctcctgaaaaatatattcttacggagcatctatggaaatatttgtataactacgcaaaaaaacatcaggctaaaggaaatggctttggttttggcttagtagatccgaaaaacaaggcaagtattgccagaacgctctctgcacgctatcacaaagacggttcagagattctcatcgacaggggttgggacatgaagctcggtgaaacaaatttctcagatcccaaaaaccaagccaacagaccacgccgtttactgcccaaagaatgcgccagaattatgggttttgaaaaacctgatggcgaatcattccgcatccctgtttcagatactcaggcataccggcagttcggtaactcagtcattgttcccgcttttgcagccgttgctaagttgcttgaaccttacattgtttcggctgttgaaaaagataacagtaaagctgcttga

SEQ ID NO: 433002 - DNA, 1461 bp, Serratia marcescens
atgaaaatgacactcaatcagtcgattataatcaataagttatctatcgacgtgaaaccgagccttgatccgcaaggcagagtagtctatttacccaatccagagcgaaaaccgtatcttatcactgacagccatcgtgattcacccgttggttttggtgtcaaaatcagtgctacgaaaaagacctatattgttcaacggagagtgtcctctcctggcaaccgtcctaagacaggtggaaaatccccatccgaggttatcaggtctacaattggcaatgtctctgatttcgctaacatcgatcaagcccgcgaggttgctcgcaatttagttcaaaccatgaagttgaccaaaaggaatcctaacaagattaaacgggagtccgatgcttctgaactcacaatcagtgaagtgtttgctcaataccgccaacatctcttgggtagatcgaaaccagccaaaccaaacactctgtcggtgttggataaggcagaaaatcgtttaaaggaatgggctggtctacgagttaaggatttaactggtaatgaaatccttcgtaagttcgatgaaatcgcctcaagagctagaacagcagcagaacagacgtttcgatggataaatgtggcagtgaaacatgcaatcgagattgaagcaggaaacgctcaaactcaacgacgacaacccacgttgtcttacaaccctttcaacatcctcaaagtgcaaaaaaaatttcggactcgatcagagctggaggatagctacaaagccaaaggtatcagaaacccattatctcatcaggatacattaggtcagtttttgaaagctctacatagtaagagaagctttaatcgcttaggttgcgactatttgctgctgacgatccttttaggtgctagaaaagaagaaacagcaccattatgctggagagaatctcttaccgatgaagaagcaaaaacaacgaactacgtagatctaaaaaacctgaaagtccggttttacgacacgaagaacagaaacgatcacgagctacccatcactgatgggatgaaacgtattctcgaagacagacgagatatcgtatttgatgaagcaagcccagagaaacgcaaatgggtgttccctgcacgttcgtcaaggagtaaggtaggtcattattcggacagtaaaagtttacgtcaatacttgtgtgaggatgctgggattatcaaacttgggatgcatgatcttcgcagaacatttggccgagttgcagaagagcttacatcgtatgcagtagtcaagaaactgcttaaccatcgtaatacgactgatccaacagaacgttatgttgaaccggatcaagaacgtgttcgtgaagctctgcaacgtatcgaattacacatgctgatgactgcacctaagctatacaatgcgcttttagcgtcagcaaaatatccaccattaccagagaacaaggactga

SEQ ID NO: 433003 - DNA, 264 bp, Serratia marcescens
atgaagaagcgtttttccgacgaacagatcatcagtattcttcgcgaagcggaagccggagtttctgcacgtgcgctctgccgtaagcacgccatttccgatgccactttctacacctggcgcaagaagtttggtggcatggaagttcctgaggtgaagcggcttaaatctcttgaagaggagagcgcccgcctcaagaagctacttgccgaagccatgctggataaggaggcacttcaggtggctctggggcgaaagtactga

SEQ ID NO: 433004 - DNA, 507 bp, Serratia marcescens
atgggaacaagaccccgttttctggctgcctggactgcggctaaaaatatttatgacccaaacgatcctctgggaaaagttaaaaatacgattggcggtgccgtaaaacgaaactttgagatacccgccgaatcaggtggctgggaaaacagctgtgctgtaaggatgagttacgtgctcaattacacaggccatccagttcccagaataggtcagttaaccgtctcaggcgcagataaaaaatggtactttttccgcgtgcgggatttgattccctacctgactaaaacgtggggaaaacctgacatgattgttaattaccctcaattacctgttacgcaactggccaacaaaaaaggattaatactttttgaagtatcaggttggggaaatgcgggcgggcacgccactttctggaacggaaacagttgttcagatcattgctatttcaatgagcccggaaccaattactctactccgcgagccaatttttgggagttgccatga

SEQ ID NO: 433005 - DNA, 327 bp, Serratia marcescens
atgaaaaaacctctatttgggcccgcatggattcgtttttctgaagtcaatgtcaatgtaaaaaaagtgggtgcattgattggtggaaaagtagaaagcaatattgaaaacggtatttttgaaaatgcttgtcctatacgaatgagttatgtactcaactatacaggcataccaattccctctaactccggttatgcgactgtgtctggtaaagataaaaaatggtatctttatcgtgttaacgatatgattctctttttagaaaagaacttcggcaagcctgatatcacggtgaaatcccctaccccagctaaatttttcaggtaa

SEQ ID NO: 433006 - DNA, 309 bp, Serratia marcescens
atggaaaaaactaacatcaaaatgcacccacgtttacaggctgcagcgccgatgaatcttgctaaggtcattggcggatttgactcgactaagtcattacacccgcgtttgcaagcagccgctcccatgaacttggctaaagtgattggtggttttgattctaccaaggcgttgcacccgcgtttacaggcggctgcaccaatgaatctggctaaggtcatcggaggttttgattccaccaaagccttgcacccgcgtttgcaagcggctgcccctatgaatctggctaaggttatcggtggattctag

SEQ ID NO: 433007 - DNA, 783 bp, Serratia marcescens
atgagcataatctctgttatcggcagcggcatgctgggggtaaatcagattaccacagaaggtttttccgtcattcagagtgtaaatcgagttttctggatcggagacattgctggtctaaacgaatatctgtctcatcataaaatacaccatgaggacctctcatatttgtatgaagatggcggcattgatgttgataattacaccaggattatccagtacatctcagatgcacttactgagtgtgaacatgtcggccttatcgttcctggtcatccgagagtcggtgtgaccattgttcaattactacaaaaatcatctcaggataaggcttttacttttcattgttatcctggaatttcaagtttcgacgcgatgatcaatgatattggtattgacccactggaagaaggtgtcagcatacttgatgctaatcggttgattatctatgattatgcaatggatccctgcatcaattattttatttatcatgtttgctctattggcaatgctaatacggactactcatcgccgcagacctcaaataaagttatgtatttgaaatcgaaattattaaaacattacccagccaatacacctattttcttgttgagtgcctcaacccaaaaaggacaatgtgcggataaattacaaggtgaactttctgatatcgagacattgctttcaaaagttacttatcggcatacgctttatattcctggctctttacccaacaaagagagggtgaatttcgattttcttaaagagatcaacattatttag

SEQ ID NO: 433008 - DNA, 927 bp, Serratia marcescens
atgtcaatactttcctatagcggaaacgatatgctgaatgattactactcatgctgcgaggaatcggcccttcacaaagatatccgcgaaaagtggccccctatttgcgcacaagttcgcgatcaagcgatgcacgatagatttttttttgcattaccacgaaaacacgtctcaaagattgacataggaaactggtcatttaactggacaaatgctgatgaaggagaggcaatggctctgctgatggggatttctgatgtcggcagcattccagtatgcgataatcgattggcattcctcaatgacggcgtgaaaaggttttcttcgttatatgaaagtgaaatgacattcatcgctgattttatttcaaccttggtatggttgattcctaaaaatgcaaatgccaataatggaagtgcttcattttacgaacttccacatgttacctttatttccgatgccacactcttctttgttccaccgttccatcagcttccaagagaattcgggtttcttggtttcgtcgaaaacctctatcacgaagcacttcatcatcaagtacacacgttcaacgcatttcatggcaatcaatactgtcagggagctctgggggagtcgctgatcgatttccctcaacggcaagatcgaactttcagttatacccaagctttcaatgcttgttacgtttacggggaaattgttagatatcgtcgcaaagtagctcaacacctttccacggagtatcagactaaagaattaacatggataaatgaggcattggattctgcaacaatgatgcgatttaatctggccgaacgtttatatcacgtcagagacgcatttttgcctccctggaaatcactcatcgaagaatggcagtttgaaaatgagacggggaaatatttcaactcggaggaaacattatga

SEQ ID NO: 433009 - DNA, 732 bp, Serratia marcescens
atgagtaatatagtcgaaggggaaggttatctgatttttgacgagtttttgagtagcgatgagctcttcgcccttcagttatatatgcaatttgagaattactatctcgtccattctcaagggtggtcaaaatcatggagaatgaccgacggtgagcctttggtgagtgttagttacttttactcattgctgacaggaaaaaccaccatagatgataatgttattatggatggtatccatattttaagtgaaaagattagcataataacatcacgtctgcgtgattttcttggggaagactggaatgcgttttcactcacaacattcttgtatcccgcaggtagcggactgggctggcatgaagacgatgctcaatacaaaggggcatatatattttatgcgcaccccgaatggaaacctaattggggtggggagctttgcgtcatcaatacacctgttaattccagtgcggggttatctgaacaaacctacaatgcttctgaagaagttttacgcatgtcagggataaccggaggggcggtcggaccggagtttggatggaccatccgtgaacgcagcatcaatgattctgggatcgggacatttatttatccaaaacccaatcgacttgtgatcataaaaccaaattattcacactgtatcaaaaaggttgatgtcagtgctggggacattatgcgttgttccgttgctggtttttttcataaaagctga

SEQ ID NO: 433010 - DNA, 1176 bp, Serratia marcescens
atgtttttgatattgttacgctcaatgcgtaagtatttttggttaagaacactcttgttggcgctagtttgcagttcagtaggttctggattgacgttcatcatggtttttggtgagctagccagattgaatgcggcaccgtcttcctttgccttggcgtttattttgtcaacatcaccggggtttttggggagtattgcaggaaaatatctgcttgcacgtattgaagcaaaatattgcttcatgatcgctgagtgtattggcgcactgggtttaattgttccttggtacggattggttcatagttccgtgaccatcctacagcttgctggcgttgcctcgtcagtatctgcggggataaccattcctgccattaatcattataccaaagctaaacttgctccagaagatattggggccggtgcggttatcgacacgctggtgtttgcttgccaggttttatttggcataggtgtcggcgtatttctttatggcaccgttcagagcaatacctatttgttggcaaatctagttagctacatcatagccattacatttatattttcactgccaaagctggcgaattatgcagaacagaatatttatgcacaagggttgcctaaaaggttgtcatcaaaacaacgtgctagcctttatttattgccggcactggcgatgactggagcaccggccatgtcgctcttgcctacattggtccacagcaacagtgaccaaaaagaaacactgctgtttttattgtttgcccgcagtctgggacaacttcttgggccatttttggtcaatgaagatcgttacaagaatcagtcatcactgtttattattgcgtgcatggcggcatttattgtgtgctatttattcgttccattgacaccgttattgagtgtttcgctattactggttttttctgcccatgtattttcaaatattatctatagccttggctggtacagtttgttgacgaactttgacaacgatcaggtagctgccgcctctgccagcagctacagaaaacaaattattatcggtgcagttgtcagtatctcggcgggcatattggctgacaaagtaggtagtcctctggcacttatcatttgttctatgacaggattattgctgtcttctctactgattttgcatgtaaaacgtcagtcttaa

SEQ ID NO: 433011 - DNA, 324 bp, Serratia marcescens
atgcgtaatgcgggtcagatcagcccctccacggcgtctgaatatatgcgcaattgcatcatgttttaccggtgggtgaggcacagggaacttctggcaccacacgctcctctgtggcgggagaagccctacaccgtcaaactctttgatcaggtggggtttgagcgatcggtaaacggaatcaccaccgatctcagcatcccaaatcgcaaacgacttggccaaaccctggaggatgggctattgccggtgtcggcggcggatcgtgatgccatcctggatttcaccgccgcgaacgctacgccggcgctctatcatcagtaa

SEQ ID NO: 433012 - DNA, 411 bp, Serratia marcescens
atggaaaagaggaaatacctggcgacgctttgttccattctgatgttgtcagcgtgtgagtcaaggattctcgatattcaggctgcaaaggtgagtgtggtcgatgataaggtatgcctgcaggtgcccgcgaaaagtcatgagtatctaaatgggatccagatcgtagaagcggataaagagaatgaagcgtttagaaaatattttgatgtaaatgaaagccaacctctccttttatcacaagactcgtgcgtgcctgatttcggttatccgttcaaggaaggacatacctacgggttcctgactgagactttctttaaaggggaaggtcaatcaggtggacggaactttagttcgtcattccggttataccgtgaatcgggggtcttgaaagttgagcagatcagatag

SEQ ID NO: 433013 - DNA, 846 bp, Serratia marcescens
atgcttttgcagaaaacgttgttagctttggcttcctgttcactattctcagtcgctgcattcgcccaaacacctccgtccccgtaccaaaacgtagccgcctcctccctgcaaccgcgacatggttctccggcgatccccatctctcgtcaataccagtgctacaaagagggcggatattattggccggcagacggttccggcattccgcaaagcgactgtaaagcggcgtatcagctcgtctatcacaagtaccttgataagtctgggattgttgtgccgaaagaagaagggaaaaaaagcgccatcaacagcaaaaaaaatgctgtcgatattatcgagcagtccaactatcagttcaggcagtggaatgaggcctccaagaatgttgctgactacaacaatccggatgccgttaaagccgccatcccggacgggcagctttgttccgccggtaatgtcggcgctgaatgggatgagcgttcgaaagtctggaatgacaaatccggtttagacgctgtgaccgcctggcgcgccaccgatatccaaaaaaccagtgaaggcaagatagatattgtctatgacgccacggcgacccacgatcccagcttcttcgaggtttatatctcaaggccggattataacgccgccaccgcgcccctgaagtggagtgacctggtgttgctggagaaagtcgagaatgtcaaaccggaaaaccagcaatacaaattcgccgtaaacgccaaagactatacgggaaaacacgttatctacattcgctggcaacgcatcgatcctgtcggcgaaggcttttacagctgtagcgacgtaaacatcaaaggataa

SEQ ID NO: 433014 - DNA, 813 bp, Serratia marcescens
atggatgatatctcattatctattgcaagaaacatgtttcacctccaagtttatgagtctgacggagttcgctttgaagacttgttttcaaaaataatgtactataaatcgccaggttttcagcaggtgaaaccgcatggtaatgttggtgatagaaagaatgatggttttattaaggatgaaggtgtctattatcaggtgtatgcgccagaagatgcatctaacaacgtattagctgctgtaaataaaattaaagatgattttcaaggtttaatggaatactggcatgatatatgccctattaaaaaatactattttgtcttaaatgataaatataagggctcctcgcctcagttgcataaagagttaattaacttgcaacgtaattttaatttgattgatactggggtttttgtagcgaaagatctcgaacgcgatcttttcaacttaccagatgatatgattcgttcagttatcggacacctaccagatattgaccatgaagaatatatgtttgtatccggatttacttgcttcatctctgcttggattaattttgaaaaagttactagggataagattttttcggtaaaagaacctaaccgtcctctttttatagggagaatagtagatattttagtgcaaaataaaacaatttctacgcaagatgcagattttattaaacacattactaaaattagaaatcatcttgtgcatggggtttcgatgacagttcctaagaaaagtgaaatagatgtattaattctcattaccgaaagagtaaaactagctggtgtatatcgtctagaataa

SEQ ID NO: 433015 - DNA, 825 bp, Serratia marcescens
gtgaacgacacaatcgtaaagcaatcagggaaaatgaccttcgaacaggtaatcaatttcttcaataatggcatgaagcaagctgaaacgttcctatttctaacccgttctagtcagttgcaactagaacaatgtttggcactagatcatttgttatataacgccactcggtttaagcacgaagagatacttcgctgtaatgaagaaaatgcgaaccttttcttaggcttcgagtgcgccattggtgctgtgaggtcagaattaatgatgtggctcttgctaaaacgtgatatgccgaatgaggcatgggaccaacttgttgcagctcaaatgggctgtttagacgcaagtcgtgcgcataggggatttgcgcactgcgaccaacggagagagattttggagcagcttgaagataaaattttcccgcaacaggtattcattagtgcaggatttgtttcagataggttggattgctcaatttgcggtaagcgttactctcaatgcgaacatctgcgaggaaaaccttatatgggccagttctgcgaagtcatccatcgtaatccacgtggcgaccatgcagcattagttgatgtacctgaagacaagcggtgccgggtcgtttcatttaaaactaaagacggacataaggacaaactgtcgtgggaaactacgccatacaatgaaggagaatttttcaaagagggtgatctacttgaggcaaaaatacatcttctaactcttgatcgctatccatatctggcctcaacagaaaaagtacttggtacagagttttcagcattaaaatcgaaattagaactaggataa

SEQ ID NO: 433016 - DNA, 489 bp, Serratia marcescens
atgagtacagaagtgcgcgattacgtttccatttctgataaattgaaagactttggagtttctgttcccaacggacttgcaatcctacctagtaatctagcaactgcaaagtctgtcgatgaccttcgtcagcacgttgaatctgacacagtgcggactctgctcaagataagcaagatcccctatgtcgagattttcgacgaggataatcagccttcgtatctgcaacagtacggctttgagtggtttggacctacactttttatatcgacaggcctgctatcgcagaatcccaatgttctatccataactctcggaattatcacgaactatctgtatgacttgttcaaaggagccaagaatagcaaggcctcgctcgatgtcatcatccaaaaagcagacggttcttgcaaagaggttcactatagtggacctcctgatgggttgattaatattgcccaaattattaaagaattagggggggaatag

SEQ ID NO: 433017 - DNA, 1191 bp, Serratia marcescens
ttgattgataactactggaaaaacaacttgttagtttgcactttaggtgcttttacaactgtatttgcaatgacgctgatgctgcctttcttgcctgtatatgtggaggagctaggagtagtcgggcacacaaaagtagtccagtggtctggcattgcgtttagtgccacgttttttgcagcaggtcttgttgcaccattatggggatatctgggagataaatatgggcgtaaatctatgctcgttagggcgagtttaggtatggctatcgtaatgtctcttatggggtttgctacgaatatttggcaactagtttttctacgacttttggctggtttagcagggggctattcatcaggagctactatattgattgcaatacaaacacctaaggctcgttctgcgtgggctttaggcgttttagcatctggtgtcatggccggtaatcttatgggacctcttatcggtggggtaatgccaccgttgattggtattcgccccacattttggggggcaggtatactgatttttttatcatttttattaacagcattttatgtaaaagaaaatcatacaacggcattgctttcagataaaaagaatgtgatgcatgagtctcctgtagtgaatcatcgtgtcgtatttactatgttaattacggcgtttttgctaatgttcgcaaacatgtcgatcgagccaattattacagtttatgttgataagcttgcaaataatgggttagatacaacatttattgctggccttgttatgtcggcagcggctttgggaagtattttgtccgcagcacagttaggtaaattggcagatcggattggacatgagaaagtgatctccagcgcattattagtatctggcttgttgcttattccacaagcattcgtgacccatggttggcagctaatcgcattgaggtttttaatggggttggcccttggtggtctactaccttgtattacagcagtaatcaagaagaatgttaatgatgacaatgcgggtaagatattaggtttttccgtttcggcccagttctgcggacaggttgttggtcctttaatgggagggtttataggtggttatcaagggttgtctcctgtatttctatacacttcaatcataatgatgtttggggcatatcttagtgccaagttgataagtagacatggtaaataa

SEQ ID NO: 433018 - DNA, 576 bp, Serratia marcescens
atgcaattaagttttaattcggtttttgttattatggactttcagcagatcattgttaaaaatatggtatctactgctgtcagtgaaagtgcaattatcaatactcttaagttaagagaaaaggctagagaggctggtgtgccagttttatatatcaaggttgccttttccgaaagatatgaagagattgatgagtggaataagctatttgcatctataaaacaattggatattcttaaaatcggtgatgaagggacttgtctagatgaacgtattattccatcggtgactgaatcggtttttattaaacatagagtgagtgcattttcttcatctgagttttcgggttaccttgagaataacaaagtcaaaactctgattttggctgggctaagtaccagcggagtgatactatcgacagtaagacaggcatctgacttggattacaggataattgttgctgaagatgcttgtggagatagggaagaacatgtgcacagatttctaatgaaagatatactacctatgcaggccgaggttttagatactgaaactattattaaattattggggtga

SEQ ID NO: 433019 - DNA, 630 bp, Serratia marcescens
atgattataaaaaaagatggcgaaatgcaaacattaaacaccctgcgtgaaatgataataagaatggatatagcgccgggggaacgtttgactgagagatggttggagaccattctgaatgtctctcgaacaccgataagagaagctttagtccgcctgcaaaatgaggggctagtagagcgagaggggaaaaagtggatctgctccccgattgattataatgaaattgaagaaatttgcatttatagagaagcaattgaggctggtgtcgtttcctatattatgcgtaacaacgaatccactgagtgtttaagtgtgatgttgtccgacatacgaaaagtcaaacctgatggctataacttccatgttgagttggcaaaggtttctgggaatagattttttgttggaactatcgatgaggttttaaataagttgtctcgattgcgttatttttctaaaggtggtggtttttatggtgatgaggagcacgaaatgattttaagaacaatgtgctccggtgatgtgactaaagcggtccacttgatgagggaacatatatcaaaaaacagccgtcaactaattaatgccatgaggaatgcgcatctgtcaataaaatctataagaaggtga

SEQ ID NO: 433020 - DNA, 522 bp, Serratia marcescens
atgggcgattatcatcacggtgtgcgcgtcgtcgaaattaatgacggcacgcgcgtcatctctaccgtttcgacagctgtcgtcggcatggtctgcaccggcaaagatgccgacccgaagcttttcccgctcaacacaccggtactgattaccgatgtgattgccgctgccggtaaggccgggaaatccggcacgctggcgaaagcgttgtcagccattggcgaccagtgcaagccggtgacggttgttgtgcgcgtcgaagagggcaaagatgcagcggaaaccacgtcaaacatcattggcggcgcggacgaaaacggccgctataccggcatgaaagctttgctcactgctcaggccgtcaccggtgtgaaacctcgtattctgggcgtgccggggctggatccgctggaggtggcgacggcgctggccgggatttgccagcggttgcgcgcgttcggttatatcagcgcgtacggctgcaaaagcatttccgaggccatcgcttaccgcgacaattga

SEQ ID NO: 433021 - DNA, 870 bp, Serratia marcescens
atgagccaatatctctctgaacacgaaccgcaaagcgagccggccgtcggttaccgccgcggtcggcgcctgaccacgctgacgctgggcgcggcactggtggcgattttgatcgtcaccgcgctgctggcaccgtggctggcgcctttcgatcccaatctgcagcatatcgagctgcggttattgccgccttccgccgcacattggctgggcaccgacggcttcggccgcgatttgctctcccgcgtgatttacggcgcgcggccgacgctgattctggtgtcgctgattctggtgttgaccattcccatcggcctgttggtcggcattggcgccggttatctcggcggctgggtagagcgcattttgatgcgcctgaccgacattttcctgtcgctgccgagcctggtgatcgcgctggcgtttgtggcggtcatggggccggggctgatgaacggcgcgctggcgctggcattgaccagctggccggcctttgcccgccaggcgcgggccgaaaccctggcgctgcgccgcagcgactacctggcggcggcgcgcatgcagggcatcaacgggctgcggctgatggtcggccacattttgcctttatgcctgccgagcgcggtggtgcgcgcggcgctgagtctggggggcatcatcctgtccgctgccggtctggggttcctcggcatgggcgttgcgccgccgaccgccgaatggggctcgatggtggccgaaggcagtaaagtgattttcgatcaatggtgggtcgccgccgcgccgggcggggcgatcctgttcgccagcctggcgtttaacctgctgggcgatggcctgcgcgacaaaatggatcctcgtcatgggcactga

SEQ ID NO: 433022 - DNA, 324 bp, Serratia marcescens
atggctaacaaaaaacatagtgtgtttaaagctctttcaatgggctttgagaaagttcttgatgagcgtggttatgataatggcgcttattacgtcaagggtggcaagatttggatttttgatattgtagctttaaagcaaaaattaggtgtctcttcaaatgaagaattagaagcacaagattatgatgttgagacatatctttcactggaaaaagaaccgaatgaattagcagcactatatgaagatatagctgttgaagatggtgaagcggtttatcttgaaggtggaatgtatctttatcccgatggttcaattcgttga

SEQ ID NO: 433023 - DNA, 183 bp, Serratia marcescens
atggctaaattaacagacatttacagttacccatcgttgatagaaattgcctatcaagccttgtcatatctgagttttaacctatcaactgtttatattccgaaaagagataagaagcagtgtttatataacctgtttttgtctcaaaaggagatagttttgatactgctgaaaaaggtctaa

SEQ ID NO: 433024 - DNA, 564 bp, Serratia marcescens
atgaaactctatgaaatcccgttcacccccgcttatagcgatgtaacccgaatcacttcttttaacggtatcagtctcaatcttccagctaaaatgatttacctgtttatggtaggtcttcagagaaacggccaagaggtctttccctcaatcaattacctgtgtgaattgttcggtattggtagaagtgcggctaaggctgctttatcccaactacatgaatcaggtctaattagttctattcagcgttatgataattcaaaggtgtacacagttgaaatcatgccacctgaattgattaaatgccgccagcaagagaatcaacctgaaccagtatctgaaccagaaaccacaatcaccagtgattctaataacgtcctcccctttccagtgattgaaagagatgaaaatccagttattgaagttgtagaagagattgagccaattattatccgtctttctaagccaaagcctaaaccagaaagtaagctgaattatctgtttgtcagtgattcagaggaagacgaagaaccatttaaaatgccagcctatgaggaattgtaa

SEQ ID NO: 433025 - DNA, 138 bp, Serratia marcescens
atgaaacgcagaagtacagtagtacacattgcaccagcactaatgaaaaagctagaagaattatcagagatgtatggtttgagccgtcagaaaaccttagagattatcctgaaagaggaattaaacaatgtcggataa

SEQ ID NO: 433026 - DNA, 144 bp, Serratia marcescens
atgtcggataagaaagaacgttcagtaatgaatttgtcggataagacacttagtcttcttaatcagctaagtgaaaaatatgatttgccacgtcagcagaccttagcggtattgcttaacaagaaaatgaaggaaatgaaataa

SEQ ID NO: 433027 - DNA, 276 bp, Serratia marcescens
atgaaaaaccgatttttgaatatgctaaacaatcctgtaccgcatcctgatttaactgatgcaatctttaactcagtgagtgaaccggagttatgcttaacagtccttaaaactcttcctgaaattaatcaggtgaccattgctacattctttagcggtcaagggttatcactgatgggtgctgcactaatctatgaaatggtgctgaaagcacatgattcacttgttgatttaatctggaatgaatacgaggtaaccaatatgactaatggctaa

SEQ ID NO: 433028 - DNA, 2088 bp, Serratia marcescens
atggctaactatacagttgatgaatttatcatccaattaggctttaacgagaacgtttctaaaaaccttcaaaagctcgaaagcagaacattaaaagtagctgaacgaattgaatcacgattaaacaaagcatttaccccaaagggtaatttcaatagtgtgattcaatctgctaataccgcttcaaaaaatatcaataaagcgttctctaaaagcatgaattttgatgaggctggtaaatcctctgtgaaatccgtagagaatgctgcaaaggcttctgcaaagcgtattaaggatatgtatcaggacgcttacggggctaaaggaaaaggtcgctcaaatccagcagcagcaaagccacaaggcagaggctcagatttaacagcttctaattcaatccgtaatctgtccaatacccagttctattcaaatctgacaagacgtcttgaaagtatgggttcaactggacaagcaagggcgatgaaattacgccagcagattcacggattaagagatgatgctttagccaatccttcagccagtttgaaccagttccgtttagctctccgtgcagccactgacagtgcttctaagtgggcttcacagcagcgtaagcaggtatctaatgcagaagggttatcaagctccttcggtcgtctggtaagcgtttcagcggccttatacgggacatttgaagccgtccgtaaggtggttgaaacaggtgtagcacgtgaaggtgtgaatctctccgctgaggctgtcttcaaggggcaatcgaaagacgctaaaacgttcgccgctcagttctctgaccaaatcggacagggtgtcacagagaccttgaaacagtacactggctttgctgctggtgctcagaattcgttaggttatcagggtacacaggacttctataagaacgctgctgtattcggtcgtatcagggggcttgatgctgaacagcttaaaggcatcatgacagcattcacacagatggcatcaaagggacgtgtacaggctgaagaactcagaggccagttgggtgaccgcttaccgggtgctgaacagatgtttgctgatgctttgggtgtaaacactcagcagcttgataaactgatgcagaacggcaagttactgtctaaagatgttctcccacgtgtatctgctcagatgaaaaagatggctgatgaagcaggtggattagaccgtgtatcacagatggctgtaactggtatcggacgtgttaaaggagcgatggagaatgaccttaacaaggctttcaccagctctgaaaaggggttaggccagttcaatgcttctgtagctaacatgctcaacgatgcttcaccgattgctgaggctttagggcatatcctcggaaaggttgcctctatgacatctggagcggttgaccatgtagatgagtggagccgtaaactctcagccctgattctacgcacatcagcgtggtatgatgacttatcagatgggcagaaaaagttagtggatagtgctgaacaattcgctatcggggctgctggtgttcttgctctggttaaatcaattgctggagtggctaacaagctgaaatggttgagtgctctgttaggtggtggtgctgaagctggtgcggctgctggtgcaggtggattactcaagggtgcatcccgtttagctggccctgttggtgtcgctctggttgctcatgatgctgtagacgcttcaggagttgaacagaaatatccaaccgctttaggtgctgataaccctattgctaaggctcttaactggcttgctaacccttctaaaatgttaggtgcaactgaacaggactctatcactaacagcccgttcacacgtgctatggggtcattgggtgactggcttcagggtaacaatgcgctgtccggtcaggctaatacattcgctgtaccgtcaatgtataaccctgctcagacaactattaggaatgaccagcgtattaatatcagtgtgaatatggatagccagaaaattggaacattccagacacaggttttaactggtggctttgaagacctgaatatcaatgctgaacatttaggcgattaa

SEQ ID NO: 433029 - DNA, 621 bp, Serratia marcescens
gtgctttctgaaatccaagcaaaccagactaagagtaaattaataatgaaagatttagcccatgctgtaaaaattgaatcacccgttgcaagtatcagtcatctgctaccttttgaacagcgccagcacctagagcgtttgtactttccaaaggttcaacacgccactgacaagatgtctaaagctgaatctgaatatcaggatgctgtagaatctcgttcagtgttgattaatcagaagaccgctgaatatctggctaatccttcagaacgtcacggattcattgtgaaacaggtttacccgactaaccaacagcaggtgattcaatcaatggctgaacagggctatatggttcatcgtgtatctgttggaatggttacctttattcgtatgccaaagaacgctaaagataatcctcttcaggaaatcacagataaagctacagcagaagctgaatcaactaccgacaagatgattgagcgattgaaagtgagagcaggtgaagctgtccaccagcgaaacaaaattgttattgaagctcgtaaagctctggattcaatcaaatcctttgaaagctatttaaacgtgattgtaaccgactctgaagaggtaaccgaataa

SEQ ID NO: 433030 - DNA, 261 bp, Serratia marcescens
atgagtattccaatgaaagggctgtcaaagcgtggtagttataatcatcttactgactcgatggaattcaagtatttcaatggtcaaacagaaattagtgaatcagcctataagctacttgcttcaggtaataaacctaaaccaactgtgaagccagctaaagcggtcaccacgtataaggtgaagcctaagccaacgattgaacagcaaagagatgcagccttgaaagaggctattaaacagatggtaagcgggggctga

SEQ ID NO: 433031 - DNA, 126 bp, Serratia marcescens
atgacgattaaacacgggatcggctttatttacgcgctggcctggaactctttttctctcgcggggtcggctggtgtgcgaatatttggcggtttctgcaccatggtgaaagacgcaatatattga

SEQ ID NO: 433032 - DNA, 651 bp, Serratia marcescens
atgaacagacgcaaaagtgatgacatgttggctgcagaatatgcgcttggcacgctcagagggtatgcaaggttgcattttgagcgccgtctgaaatcggatagcgttttggcgacccaggttggaaaatggcaaaatatgttgtcggggctggatattggtataacgccgatacctccccccgaaagcgtttggaaaaaaattgaattaaatctgcctcgatacgcttcgccccgacggcgcggacgaaattatattgcatgggggcttgcggcaggattaggcgtattgagcctgagctcgtggttttattggcgtacgcctgagttgaaaccgttagtggtcctgaacggaacacatcaagggacgtgggttgtgagttcagatggccaaagaaaaattgttcgtataacccccttaggcctggccgctattcctgacgggaaaagtcttgaactatggctgattcccgttggccataagcccgtttcaattggacttgtgaacgcgaagaacgtgagtcagttttatttggcagatgcaaatttagtgaaaggaacaacgattgccattagcctggagccattaggcggctcaccgaaccaacagccgacgggccccgtgttgtattcaggtgagttgcctctttga

SEQ ID NO: 433033 - DNA, 1704 bp, Serratia marcescens
atgcagtggaaatctctccaggccctgacgccggggttgacgcatttattggggtatcaacgcagctggctcaagccggatattcgcgccggcctttccgtcgccgccgtcgccttgccggtggccatcgcctatgctgagctggccggggtcagcccggtggtggggctctattcctgtatcttgccgatggtggcctatgcgctgttcggctcgtcgcgccagctgatcgtcgggcccgacgccgccacctgtgcggtgatcgccgcggtggtgacgccgctggcggcgggtaatatggagcgccattggcaactgaccatcatgatgaccgcgatgatgggcggctggtgcctgctggccagccggttcaagctgggggcgctggcggatctgctgtcgcggccgatcctcagcgggctgctgaacggggtggcgatcaccatcatcgtcgatcagatcggcaaggtgttgggattcacggtgcgcccggcgcagctgatcgagcgtatctacgcgctgcccggtaacctgctgcacagcgactggctgacgatggcggtgtcgttgttgacgctggtgacgctgctcggatttaaaaaatggcggcctaactggccggcgccgctgtttgccatcgtgctggcggcgttcgtcacctgggccggcggcctgcagcagcatggcgtggtgacggtgggcggtttcagcggcgtgttgccgatcgtccagtggccggacttccagcccggtttgctgcgcgacatggtgatcccggcgcttaacctggcggtggtgagttttgtcagcatgatgctcaccgcccgcagctttgccgccaagaacggttatgaggtgaacgccgacgccgagtttcgtgcgctggggctggtgaatatcgtctccgcgctgtcgcaaggtttcgctatcagcggtgcggactcgcgcaccgcggtgaatgacgccaacggcggcaagagccagctggtgtcggtcatcgccgctgcggtcatcgccttcgtcttgctgttcctgatggcgccgctgcagtttattccggtggcaggattgggcgtggtgctgatgtatgcggcctggtcgctgctggacattcgcggcatctgggttttgcgccgccgcaacgcgcaggcgtttcgcctggcgctgtttaccttcctcagcgtgctgctggtgggggtgatcagtggcatcgggctggcggtgttgctggggctgatgcagtttctgcgcaccgtcttccggccgacggagcagctgctgggtgtcaacgacgaaggcatgatccactccatgggcaacaacaatggggtgaaggcggtgcctggggtcatgatgtatcgcttcaattcgccactgacctatttcaacgtggcgtacttcaaacgccgtattctcaatttggtcgacggcacgccgttccagccgcgctgggtagtggtggatgcggtagccagttttacccatgccgatatcagcgtgcttgcggccatcgacgaactgaaacgcgacctgttacagcgtaacgttaagctggtgctggcggggcgccgcaccgagctgacgcgctggttccgcatcaaccgcttagggcgcgacaaagagctgattttggtgccggacctgtatctggcgctgaagctgattcagagtaaggagcaggcggaagccgccacggtggggtaa

SEQ ID NO: 433034 - DNA, 339 bp, Serratia marcescens
ttgctggaggcgaatcagccgttgaatgtggtctggctgatgaaaacagcgctgaaagaactgtggtacgccccgagtgaacaagaggcgcagaggcgctgggtaagctggtacaggcagtctcaggaaagcggaatcaaggcgttgcaacacttcgccgagaaactgaaagggtatgccggtggcatcatcgcgagtgccagacacaggttgaataccagcgtgctggaagggatgaacaataagataaaagtgatgaagcggatggcctatggataccgggataacgcttacttcttcctgaaaatcaaagcagcgttccccggtaaagcgcgatga

SEQ ID NO: 433035 - DNA, 540 bp, Serratia marcescens
atgaaaaaagtattattgcctttggctgccctggtattgtctgcaactgcttccaacgcaatggcagcaagcggcactgttaaattcaccggtgaaatcaaacagtctacctgccaggtaactagcgatactcagaataaagaagtttacctgggtacttacccaacttctgctttccaaaacgtgggtgacaaatctgcatctaaagctttccagatctctctggaaaaatgtgatgccggcaattacagcctgcgcttcgacggtaacaccgttgccggcaacccagacctgctgtccgtaagcaacgtgggtggcaccggcactgcagctaccggcgtgggtatcgaaatcactgacaacaacggcaagccattcgctatcggcgacggttccaacatcaaagacgacgtagcgaaagtcaccatcgctgctgacggtaaagcgaccttcaacctgcaggctcgttaccgttcattcgctgcagtgaccgcaggtctggctaacgccaccagcccgttcaccatcgaatacaaataa

SEQ ID NO: 433036 - DNA, 444 bp, Serratia marcescens
atgattaccatcagagcacgcgcggcggaagacaacgcgcaattggcagatatctggctgcgttcggtgcgcaccactcaccattttttaaccgaagacaacatcgcacaactgttcccgctggtgctgaacgattacctgccggcggttaacgtctgggtagccgaagagcggccagggcacccctgcggctttatcggcctgaacggcaacaaggtggagatgctgtttatcgacgccggtcagcgcggcaaaggggtgggcaaagcgctgctgacccacgcggaaacgctgcacgatgaactgcagctggacgtgaacgagcaaaacccgcaggccagcggcttctaccgccactacgggtttgtcatcaccggccgctcaccgctcgacggccaaggcaacccgttcccgctgctgcacatgaagctggacaaacgctag

SEQ ID NO: 433037 - DNA, 669 bp, Serratia marcescens
atgattgaatccctgttcccccacctgcgtctggaacaactgtgggacgccacctgggaaacgctgtacatgaccggcttcgccggcttggccacgctggtgctgggcatcgtgctcggcgtgctgctgtttttaacctcgaagggccagctgtggcagaaccgggcggtctactcgctgatctccgtactggtcaacgtcttccgctccattccgttcatcattctgatcgtgctgctgatcccgttcaccaaatcgcttatcggcaccattctcggcgcggacgcggccctgccggcgctgatcgtcggcgcggcgccgttctacgcccggctggtagagatcgcgctgcgcgaggtcgacaaaggggtgatcgaagcggcgcgctcgatgggcgccaaaaaccgcaccctgattttccgcgtattgctgccggagagctcgccggcgctggtttccggcatcaccgtcaccctgatcgcgctggtgagctacaccgcgatggccggggtgatcggcgccggcggcctgggcaacctggcctatctggaagggttccaacgcaaccacagtgacgtgacgctggtggcgacgctgacgattctgctgatcgttttcgtcattcagttcatcggcgacaccctgacaagaacgctcgataaacgttaa

SEQ ID NO: 433038 - DNA, 2298 bp, Serratia marcescens
atgaaatggctttgtgtggtgagtatgttgtccggtctggccctcagcccggcttttgcgcaggaaacgccgataatgcagggcattcacgcacagcagcgcgacgccttcgtgtcccatttgatgaagcagatgacgctggaagagaagatcggccagctgcggctgatcagcgtcgggccggataacccgaaagaagcgatccgcgagggcatccgcaaagggcagatcggcgccattttcaataccgtcacccgcccggacattcgggtgatgcaggatcaggcgatgcagctcagccgcctcaaaattccgttgttcttcgcctatgacgtggtgcacggccagcgcaccgtgttcccgatcagcctggggctggcggccagcttcgatctggaggccattgcgctcagcgcccgcgtggcggcgcaggaggccagcgatgacggcctcaacatgaccttcgcgccgatggtcgatatcacccgcgatccgcgctggggccgggtctccgaaggcttcggcgaagacacctggctggtgtcgaaaatcgccaaagtgatggtcgacggttatcaaaacggcgacccggccaagcccggttcggtgatggccagcgttaagcactttgcgttgtacggcgccgtcgaaggcggccgcgattacaacaccgtcgacatgagcccgctgcgcatgtatcaggactacctgccaccttacaaagcggcggtggatgccggcagcggcggggtgatggtgtcgctcaactcggtgaacggtgtgccggccaccgccaatccgtggctgctgaaagacctgctgcgcgaccagtggggctttaaaggcatcactatcagcgaccacggcgcaattaaagaactgattaaacacggcgtggccgccgacgcgcgcgacgcggtacgcctggcaatcacctccggcgtcgacatgagcatgagcgacgagttttacgacaaatacctgccgggtctggtgaaagacgggctggtgcctgaaagcgatatcgatcgcgcctgccgcgacgtgctgaacaccaagtacgacatggggctgttcaccgatccgtatgtgcatctgggcccggcgggttccgacccgcaggacaccaacgccgaaagccgcctgcaccgcgccgaggcgcgggtggtggcacgcaaaacgatggtgttgctgaagaacgataagcagacgctgccgctgagcaagcaggcgaccatcgcgttggtcgggccgatggccgacagccagcgcgacgtgatgggcagctggtcggccgccggagtggtcaagcagtcggtgaccctgcgcgaagggttggagcgggcggtgggcgacaaggcgcgcattctttacgccaagggcgccaacgtcacgcaggataaaggcattatcgactacctgaacgagtacgagccggcggtggcgttcgacacccgttcgccgcagcagatgatcgacgaagcggtacaggcggcgaacaaggccgacgtggtcgtggcggtggtgggggaatcgcagggcatggcgcatgaggcctccagccgcgctgacatcacgatcccgcagagccagcgcgatctgatcgccgcgctgaaagccaccggcaagccgctggtgctggtgctgatgaacggccggccgttggcgctgagctgggagagcgagcaggcggacgcgatgctggaaacctggtacagcggcaccgagggcggcaacgcagtggcggacgtgctgttcggcgactacaacccgtcgggcaagctgccgatgaccttcccgcgctcggtcggccagatcccgatgtactacaaccacctgaacaccggccgcccgttcggcaaggagaatccgggcaagtacacctcgcgctacttcgattcgccgaacggcccgctgtatccgttcggttacggtctgagctataccaccttcagcctgtcggatctgaaactgtccagcccgacgatggcgcgcaacggcaagctaaccgccagcgtcacgctgaaaaataccggcaagtacgacggcgccacggtggtgcagctgtatctgcaggacgtgaccgcctcggtcagccggccggtaaaagagctgcgcaacttcaagaaagtgacgctgaaggccggccagtcgcagcaggttgagctgccgattagcgaagacgatctgaagttctacaacgccagcctgaaatggggggcggagccgggcaaattcaacgtgttcgtcggcctggactccgacaacgtgcaggcgcacagttttacgctgaagtaa

SEQ ID NO: 433039 - DNA, 933 bp, Serratia marcescens
atgcgcgtattattggctccgatggagggcgttctcgattctttggtgcgtgagttgctcaccgacgtgaacgactacgatctgtgcatcaccgaatttttacgcgtggtcgatcagctgctgccggccaaatcgttctaccggctgtgcccggaactgcgccacgccagccgtacgccgtcgggcacgctggtgcgcgtacagctgctggggcagtacccgcagtggctggcggagaacgccgcgcgcgcggtggaattgggctcttacggcgtcgatctcaactgcggctgcccgtccaagctggtgaacggcagcggcggcggggcgacgctgctcaaagatccggagttgatctaccggggcgccaaagcgatgcgcgcggcggtgccggcccatctgccggtcacggtgaaggtgcgcctgggctgggactcctccagccgcagttttgaaatcgccgatgcggtgcagcaggcgggcgccagcgagctgacggtgcatggccgcaccaaagaggacggctacaaggcggatcgcatcaactgggcggcgatcggcgagatccgtcaacggctgagcatcccggtgatcgccaacggcgagatctgggattaccagagcgcgcaggattgcctgcaggcgaccggctgtgacgccatcatgctggggcgcggcgcgctcaacgtgccgaacctgagccgggtggtgaagtacaacgaaccgcgcatgccctggccgcaggtggttgagctgctgcaaaaatacgtccatctggaaaagcagggcgacaccggcctgtatcacgtggcacgcatcaaacagtggctgggctatttgcgcaaagaatatgacgaagccaccgaactgtttagcgaaatacgcgcgctgacgaactcgggagatattgcgcgcgtcatctgccgtagctaa

SEQ ID NO: 433040 - DNA, 363 bp, Serratia marcescens
atgaaaattacagctgaggaatttctcgaatacaagaatgccttagaaggtcattcgatgaatgctatctggcatgtgactctaccagagtgttatggcgaggaaccaagttttagtcaaagaaaatcatttttctttcaactattacagatgctacttgaagatgggaaaattaggttggcttctcatggtaagtatcttcgaggcagcactagtgagcaaatatcgctatttaaacatgttttccccaaaaatcaggaggaaatggatgccgatgccttcgacggattctggtttctgacagaggaatgccccggcggcatcgtctggatccatgacagcggctacgaagattggacctga

SEQ ID NO: 433041 - DNA, 381 bp, Serratia marcescens
atggacgatgaacgtatgacttacggtgaaatacgaaaaatgacactggagtgcttctatgattgctgtagaaacatacttgacattaataagaagaccggtgaaagaacatcttatgatggcttagaaattggatatgcaatctatcaatgcgaaaatactcctttttcgccgatagaaaagctaatgttcgaggtatttactctaattttaagggccggtagagggccgaagaaagcagagaatatcactcgtgatgctatcactttgattataagcgaaacccctctgaatattctcattgaagacatctctgatgatgagaaaaggaacttgctttatgatatggagttgcttggattgcttgataagcctgagtaa

SEQ ID NO: 433042 - DNA, 1227 bp, Serratia marcescens
atgcataaggatttggacgtttccatctcaacagggcgattcagaaaaataagagaatggaacaggaggcgcaattattatttcaagaaagtaaagctgaacattaagatttatattgcaaagcttatctgggataagcgtagaaaaattgtgtttgatatcaaatcggtcaaaaccgtattgctccttcgcaatgaagggaccgtaggagatgttgtggttacgacgccgctagtgaaatgtctttgtgagtcgggttatacagtggatttattgctcacaaaatcaagtagcgtggtgatggaacataacccctatgtcaggaatatctacgaggcagaggattgtaataatgaaattttcttgaaaagattcactcatgccgttgcgaaatcaacggttgaaaagttgagggggaataactatgaccttgtggtcgatctttgcttgtttgatactccggtacataggatgatgctttttagcgatataaacgcaaggtttgttcttggtcttaataaatggagttgcattaaccattacagcaaatctatttcatttgaaaatggtaaggagcacgtgactaaagccattgctttggttgcccatgccgtagggattaatcttaaaaatagccgtgcctatgacctgcatatcccagatgatatagcttttgaagtaagggggtatttaagtggttggaatgataaagttacggttataattaatgctttcactgggagtccagagagaaacctatctaaagagcaactctcccgacttgttgagatgcttaataaagcattgttcaatataaaaataatcattcttgatcatcgaaaagaactggatatatccctttcggatagtgttgttataaatccatttaattcactgcatcatgtcatggcattgattagagaggctgatgtagttatatccccagatacgtcgatcgtgcatatttctgccgcatggaataaaacgttgatttgtgtttacaaaaacgtaacggataataatgatttgtgggggcccgggtatgaaaatgcgaggcagattattgttaacagcagaaaaatagcggatgtggataatgttccggagcttatattgcatgagatcggtcgaagagatctgttcggtggacgagagataaaataccgtggcagttcgttgaacgatgaagcggatgccgccgataacgcaatattacccgttggataa

SEQ ID NO: 433043 - DNA, 270 bp, Serratia marcescens
atgttgaaacgctgcaacccttcaccggtcaggatggagacgattttatctatcagcgagcccggcgtggtgctgccgaatgagccgttaaacagcgcgacgatcatcaacagcaacagggaacatttggccagcgcggtggtgatgatcgacatctgctccagatggcgatccttgaagctgagcgttttcttcagcatcttgccgctgacggtctgcggcgaaaacagcgcggcgcacaaatcggtggcgaacagcaccataaaatag

SEQ ID NO: 433044 - DNA, 1023 bp, Serratia marcescens
atgagcaggatgataattgatacaaatattctttactcgatagttggtctatcgacaagccaaaaagttattgactcccctataggtgaatttaaattatccattacgacaccatcactcatagaagtgatctctaaatatcacaatgacttagactctataaaaaaatgcattagcccaatcataagcgaaaacattgagctaattagcattggtcatgctccaatatcaaatggatttctttataggttgcattttgcaaacgaaatagacgaagtaaaagatattattgctaacgttagagcactaaaaatatctagagaggctgagttctataggttcatactcatactggttgtctctggtttgtttgaggttattagagaagatggctacaagtttgataacgatgaacaaaataatagtcaacttagtcttgtgcagactctacttgaatctaatatggaatatattttagatttctttaaagatgagatacggaatggatatattaatggaaatgagcagcaagcagctttgaaagctttcgaaaccatacttatcgcactcctaaatagttttcatgtaaactatcatatgattaaaactgacacagttaacatctccggaagccaagacagcctcaaaaatctgcatgatagtttagaaaatgataattttgataaaaagtttaaaaagtatatggataatcctatatcccttgcttcaaaacaaaaacaccaaccagtagtagataactacctgaaagaaatggaaaaagatatttctggcgtttccggacttactgaggattcgttgagttttctaatgagcaaggttgaggatgcatataaaaatggtcgtaaattacgaaaaaatgacatatttgaccttctaatagttatttctttaaatatgccagatactttgattttaacacttgataaaggttttttaaaagaccttgaagatcttaatcctaacagctataaaaagtgtttggatttcggttttgtaaattga

SEQ ID NO: 433045 - DNA, 897 bp, Serratia marcescens
atggattcgccgttttataaactcaaaagcaaaaaaaaacttgcatgccttcttagtgttaatactaatgatttatatgccttaaaaaaagatgaaggtaattattctgtttttgaacaattatctaaaaagggtaagtcacgtaaaatacaaaagcctgtagataaattagatgtagcgcacacaagaattgccagtctattgtctcgtattgcgttaccagaatatctgcattcgggtaagaaaacgtgctctaatgtaactaatgcaaaagctcatcttaatcatgaaaagatgatgacttctgatattaaggcatttttcccatcaacaacaagaggcatgatattttcatttttcttttccgtgatgaaaatgtcatctgacgtagcagatatattgtcgcatatatgtacttgtcatgagcgtttacctacaggtagtagaattagcatgcttttggcttactttgcaaactccagaatgttttctgagattgatgaactatgccgaaagctaagaattaaaatgactgtttatgtcgatgatcttacattctcaggtgctaatgtaaatagattattttgctctgtggttcgcaaagtgattagtaagcatggtcataatatgcatccaactaaaacgaagctgtatgcaaaagataaaccaaaattggttacaggggtgattgtcttaggagactgtttaaaagttaggaacgagcagcataggttaatggccagagatattgagtattggaaaataattaaagatgctgaaaatgctagggatacaccgatcgctaaaacgctctttggtcgtttgcactcaatgggagttattgaacaacgctataaatcgaaagttcttaccttaaaattcaatactacaaactga

SEQ ID NO: 433046 - DNA, 309 bp, Serratia marcescens
atgttacataaagcccttcgtttgataagacaatatcacagcgaatccttagttgtgttatcaacgtctttaggcattcccaaagaaaagatagtagaacttgaaagcggagtatggtcaccgtcgattgaagttttacagagatatgcatcccattatgacataccagtatcctctttagtttttttttcagaatcattaggcacgcaagggcgtttatctaagcggttgcgcttaaatttggctggtaaagttctggatattgtagagtgggtaagtaaaagaaatgaaaaaacggaaaaagcttaa

SEQ ID NO: 433047 - DNA, 156 bp, Serratia marcescens
atgaagaatgataaagtaaccaacgaacagcaggcgcagagcaagtcaaaccggaaaaagtgggttgcttatgcgtgggaagcgattaaatggggtattagactgtttgatttaatcacgcgcgtaattgactacttagaagggggagataagtaa

SEQ ID NO: 433048 - DNA, 270 bp, Serratia marcescens
atggacatcatcgaagaacaattactttccctacaaaaacaggtcgaggatatgactcttgatcttgcggtgcataaagcgctgattcttgggcttatgagtgagctggacttgggaacactgcaagatttcagcgccttccgccgagttactcagcgggagcttgataagctccccctacaaagcgatgaacaattccacttcaaaagctcgctaaatcagtttctgaagcgtgcgatatctgaatcctcagcagatatgaacatttag

SEQ ID NO: 433049 - DNA, 501 bp, Serratia marcescens
atgacagctatcaccgccggtattgttcgcaaccagcccgccgggctgcgtgctttggttggggagtgcctcgctgcccctcgctggagaagcacctgcgatttttataatcagatgatggagcgtgagcgattgaccatttgtttccatgcgcagttaaaacagcgccatgctgtcatgcgtttagaggaaatgaatgacaatgagcgcgagcgtcttgtgtgcgccattgatgaacttcgcagcgctttcgctacttatcgtaagcacggtatcagtaaatctggattcattggccgattgaccataagccagcgccgcactttattcctgcatgccgggttaactgaggtcgagtttaatcaaccgtactggcgtattgatgatgaatcctgtaaatggcgtgaggagttattcagggcgctgcgtgagctgtttaatttattcgaatatgcaccgaccatattaacgtcggttaaacctgaagcgtattttcattaa

SEQ ID NO: 433050 - DNA, 363 bp, Serratia marcescens
atgcgtgacgaagctaaaaccaatactcaggaagacgaaaccgatacgaatataggcggtaaaaaacgagctatttccctctctccacaaccgtctgcacttttatcgaaagagggtttcgctctttatgtgggaaaaactccggcggccatcgttgcgatggctaaagcagggaaactccctgcgttttacatggctgacccgttgaaaccgggtagcaaagctgagttgtgggttaaccgcaaagagtgggataagtacgctgatcagctggttgaagatgcggcagaagaatggcacgggtggaaagaccgtatcagcaccagtaagccgggtagggggcgcagctataatgcagcctaa

SEQ ID NO: 433051 - DNA, 987 bp, Serratia marcescens
atgtcgattaagaagctcgatgatggtcgttatgaagtggacgttaggccgcagggttccgaagggaaacggatcaggcggaagttcgacagtaagggtgaggcatccatatttgagcgtcacatactggtcaactatcacaagaaggattggctggaaaaaccggcagaccgtcgcaagctaaccgccctgctcgatctctggtgggtgttccacggcaaaagccataaccgtggtgaaatcgaacgcggcaggcttaccgctatcatggccatactggcagaaatgggcgtggtgcgagctgaccaactaaccaaaaaagcgatattgaattatcgcgttcacatgctcaatgaaggattgaaggcatcaagtgtaaaccgccaccatgcgatattgagcgggatgtttactaagctgattgaagcggaagagtatcattctgaacacccgttcaaagggataaagcagcttaaagaggctcaaaccgaaatggcgttcctctcgattgaggaaatcagcactcttattgatctactcgacggtgacgatcgcaaagctgtattagtctgtttagctactggtggacgttggggtgaagttgccacattgaagggtgaacacatcataaacaatatgctgacgtttatgaaaacgaagaacggcaaacgacgcactatcccagtgtcggacgagttaatccgtcaggtgaaagtaaagactaccggtccgctttacgcacctaactatgacaatgtccgcaacgtcttgagaaagatgaaaccggacttgccagagggtcaggccgttcatgtgttccggcatactttcgccacacactttatgatgaatggaggaaacataatcactttacagcggattctggggcattcaaaaatacagcaaaccatgatttacgcgcactttgcaccggacttcttgcaggatgctgtaacactaaatccgctcaatggagtgtccatataa

SEQ ID NO: 433052 - DNA, 1389 bp, Serratia marcescens
atgaggctgcggctgctgggctgtgcggctctgctgttcaccggcgtcgcgcaggcggacgacggcgtgccggcgctgctgcagtttgccgagcagtatcaacggcagaacaccgggccggcgagcgaaaacgcggcgcccgccgaccgcggggcggggcaaaaaaagcgtgagccggcaaagcgtccaccggacacccaccagccggcttcaccggccaaagcttttacgctgagccaggaattattggcgcgtgaccaacagctggcgcgccagcgaatggaactgacggtgttgcgccaggaaattgccgcgctgcgggcggagaaagcgacgccacccgtcgcgacgttgcccgattcgtcaacgctgcagcagtggatcgccgggctgggcgccgcctggcgcggctcgcccgatgcgcagcgcgccgaggcgctgctgcggcaggcgatgcaggaaaccgccaaaaccaaagcgacggcgatgcaggccgaacggcgcgtcaccgagctggagtccgctgcgcaggcatcggcacagacgcttgcacaacgccagcgcgagcaccaggaggaactgcacgctctgcgtaccgcgctggaggcgagtgagcagaagcgggccggtgagcagaaagtgacccagcagacgcgcgaagcgctgtcggcgctgcataagcggctgcaatgggaggtgacgccggagcagttgaaggatgaacgcaagcgtttgtcctatgcggcgggcagtgcgctggggcgggatattcagggggtagtgacggagcgtcaaagctggggcgtaccggtggaccgcgacagcctgttggcgggcgtcatcgatagcgtgtcggggcgtttgcagctgccggcggatgaactgaatacgctgacggcgcaggcggatgccgccgccatggccgcgcgtgagaaacgcgttaacgaacagcagcggcatgatgaagattatctggcgcagttcagtcaacaaaagggcgtaaaacaatcggcgatgggcttttggtatcgggtggattacgccggtgagggcgcgctggcgccaacggcggtggtcgatgtggtcgtgaaggagaaattgaccgacggcacggtgatccaggatatggaactgagcggcaaggtgctgtcgcaaccgctgtccgagtatccgccgctgttcagggaggcgataagccatctgcacaaccacggttcgctgacgatggtcgtgccgccggcgctggcgtacggcgaaaccggctacccgccgaaagtgccacctaacgccaccatgatttatgaattacgcatcgacaacagtcaggctccgacaaagggggcccaggcggttaaacgggaagccggaacggcgggagggcagggatga

SEQ ID NO: 433053 - DNA, 933 bp, Serratia marcescens
gtgtccgagcatcaagccattaaccatactcctgcgaccgtcgatgagcatgttaacagtcagaaaatcgcagcagtaatagtctcttatcatccggaattgggtaacctcactaccttaatcaaagaacttaagcgtcaacaggtttccagcgttctcgttgataatggttcactagaagcatccgccgtcgaatcgctttccgagctcgccaccgtcgtgcgtttgccggaaaacgtcggtatcgccaaagcgcagaatatcggcattgagtacgctcgcgagaaacattgtgcccaactgatcgtttttttcgatcaagacagccacattgacgaacactttatgaccgggttgctcaaagattatgcccagatctcagccaccgagaggctcgcggctataggtccgatctttaccgattcgcgctacggtttccactatccattgatccgcgtgaacaaactaggctggcgcagcaaagtacgcccgcaattccaagacgcgccttttgaagtcagcatgattatctcttctggctcattgatccccgccgcggtcttgagtgatgtgggggatatggatgagtcgttgttcattgactacgtggataccgaatggtgcctgcgcgccatcgccaaaggttacaaagtttatgcggcgacctcggccaagatgtcgcacgctatcggtgacaaggcaatcaaagtactggcttggcatgtgccggtgcactcggctttccgcagatactaccgattgcgcaacgggctgttgctggcaaggatgaaacacatcccaccattgataaaagtacgtgaaaacgtttttaatgccatccatcaagtattgttgattgctacgcaaccgaataaaaaaacgcatctggcaacctggtgccgtgcggttaaagacggaattagctcaaaatga

SEQ ID NO: 433054 - DNA, 855 bp, Serratia marcescens
atgagtgcagttgaacataaagtgcccgttgtcgcgtccatagtactgtaccaacacaagcaagaggacattcaacccactatcgactctctgttagccgagccgctggtagaaaccatcgtgttagttgacaatgcaggtagcgaatgggcgagccagttaaacaatccgagaattgcttatatcaagtcggatttcaatggcggttatggccatggacacaatcaagccatgagtaagtatctgagcaaatgcaaatattttattatctgcaatccagatatcgagtttagtgcaggcacggtgaaaaatttgtataactttgcggaaagcggcaatcaccgattcatcgcgcccaagattgtttacccgaacggcgaagctcagcgcgtctgccgtttattgccgactcccgctcatctgttcttgcgcagattcatgccttttttatccaagtatctcgatgagaactatgagttgcaagatgccgattacaacaagaacttctttgcaccgacaatttccggctgctttatgttcgtagagtcgcgtttgttgcagcaattacagggttttgattcacgttactttatgtatcttgaagatgtcgacctctgccgtaaagtgcttcaatatgaaaaacctatgttttgttccgaagcgacggtgacacatgcctttgccaaaggctcatacaagaacctgaagttaatgggctaccacattcgatcggcaattacgtatttcaataaatggggttggttttttgacgcagaacgcagaggcgtaaataaaacatgcatgaaacaactgccacggctgggaaaacaggtgagggagaataaaaatgggtaa

SEQ ID NO: 433055 - DNA, 1467 bp, Serratia marcescens
atgggtaataatggaatactgaggcacttaccactcgccggtttcggtattgtttgcctgatatgcattattttgcttcccgtgaatggggtaagtaaaagctttgccattgctgcggttgcaaactttgtcttcttcacctatttcttcaaaaatatttacaatccggcttcgatcttcatgagtatgttcttattcatgattggttgcagccaggcgaaattgacactgattgagcaagacgatttcagtcactcaacatggatggctttgttcgccgttatcgcctgtttttacatggtggttgccacctttgtgctgcgacgaggacgcatcacgcttaatcgtgaaacaaacgttcgctctggaatcgccgcgcgtaccctcttctggtccaatgtcatctgcatcgtgaccgaagtgtttatttattggtatgctatccataaaattggcggcattcctttatttgacgacaatattcgcgcgaacattatgcccaaagtaatcagcaattatttgatgacgctgatggtccttcccactttctttatcattttcaataccatttacgttactgaatcgagaaaatacggatatcttattttcagttgcgcatacttaagcctactgatgttgttagggggaagaataaatatcttcatccctgtcattaccagtttattctatgtactcattcaatattatgttgcaaaagaaaataaatcagcgctattgattaccggcatagtcacgttgttctccgtcgttctgttgatggtgagtatgccattgattcgcacccaaatatatgtacagaaccatcagtcgtcgacagaggaaaaggcacagaccggcacgcattattatgaggccatttataacagcccaaatacaaacactcaggaacatagagaggaaaaagattttaaacctacgatgaagctgcctccgcagatgatgtcaatctggattaacctgagtaccgagatgcatgcattcaacaaaatggtcatttacttggataaaacccatgacttcagagatgggcgcatgttgatgaccgggactttccgtttcgcgaccaaaagtttcatgccggatgaaacgctggatttggtaaaaatgggaggatatgactggataaacatcatgacatttatgcagaaaccatacatggactttggcgtctatggcattggtggttttattctgatattcacctggatcgggatgacactgtatcaacgggtgcagcagagaaaaaccctcattaataccctgctctacagttacttctgcatggccatgctattcatgatttttgataaccatttctattattcaaccgttatcgtcaacattatcctgttgttattgttcaaagcctttatgagccgggattggttggcaaaactcaaactaactaaacaatctactgagctaaaggccgcggttcatgattaa

SEQ ID NO: 433056 - DNA, 1257 bp, Serratia marcescens
atgattaaatatctgaaccaaccgttagttaaaaactatgtttcactgctgttagtacagggggggaattttatattccctctactggtatttcctcttgtgggtcggaacatcggtgtcagtgagtttggcaacattctattctgctatatggttgccttctatttttccatttttgtcgattacggctttaacttttcggcggtccgaagagtctcaaaaatggaagatcaccacggcataggtgaaagcttctatagcattacgtgctccaaaattatgctggccacctgctcactcgtcgtgatgacgttgatgactctaagctgggataaactgaatcctctcagcgactatatgctactttcgtctttgttaatcgtagcatctatgttgtccccttattggctattgcagggtgtagggaaaacggccgcgggcgcgctgctcaccttattcgcccgaattttcactttggtggtcttcctctgcttccccatcacgccctatagcgccgttctgctattagtactgcccaactgtctagctgcgcttattatgttgctttgggttttctcacggtatcacattggccaaccgcgattttctttgcccaatgttacagcgaatctaaaagaaggctggccggtatttgtcgccaactcaatcaccatggtgtattcagccagtaatacgattcttttaggcatcatttccgggccgctagccgccgggctatatggcgcagcggagaggttggttcgctccggtctggccgtcatggcgccactatgtcaggctgcctaccctatcatttgcagctgtcgtgctgagcaaacagctaaacgaaataagatcattaagctagttttagccgccagcttcgtattcggtattagcgccttctcgatactgaatctgttttctacatcgattatcaccttgctttttggtgaaaaattcgtttccgctgcccccatactggcggtgttgtccattatgttattggtcattccacctgccatcgtattggctcaactgtacttgttggcgaacaaccacgataaagtattgcagagaatttatattttctgttcagcaacccactgcttgcatatctatttcacgacaacgctgtttggtgcactgggcgcttcttactcattagtcttcaccgagctcttggccacgctcttgattctttatatgagcatgagaatattcaaaagagaaaatttgatcggctgcgtttcttga

SEQ ID NO: 433057 - DNA, 864 bp, Serratia marcescens
atgaaagtgttgttaaccggttccaaagggcagctgggcagttgttttcgtgatcgtttgccatccgggtgggacctattggcgacggacagtgaaagcctggacatcagcgatctggccagagtgaagcaggtcgtcgcggattaccgtccggatgtgatagtgaacgcagcggcgtatacggcggtggacaaggcggaaagcgacggggagctggcggcgcggatcaatgaacaggggccgagctatctggcattggcagcggcggcgcacggctgtcggctgatccacgtctcaaccgattatgtttttgatggtcgggcgagccggccctaccgtgaggatgacgcgaccaacccgctgggggtttacggcagcaccaagctcgatggggagcgtgcggtggccggggtgcttccgggagcgatagtcctgcgcaccgcctgggtgttcagtgagtatgggaataattttgtgaaaaccatgctgcgtcttgcgaaagagcgtgacgtactgggcattgtcggggatcagcggggctgcccgacgtacgcgggcgatattgcgcaggcgatcattgagctgctgaaacgtgaggcggcggggggggtgtatcacttctgcggtaacaaagaagtgagttggagcgagttcgccggggcgatttttgcggcggcgctagggcagggtacgttgacgaggttgccgcaggtgaacgacatcacaaccgatcagtaccctacgccggctaagcgtcctgcatactcgagtttggactgcgggaaaattgaaagcttgggcatccagccttcagattggcaacaagcgttgaaaaatattatgccggtgctaggggaaaggtag

SEQ ID NO: 433058 - DNA, 537 bp, Serratia marcescens
atgcaggtaacggataccaaaattgcgggcgtgaaaattattcaaccgaaggtgtttggggacgcccgcggttttttcctggaaacctttgaggagaagcgctaccgggaaatgctgggcatcgatttgaacttcgttcaggacaaccattcgcgttcatcgcgtggggtgttgcgcggtttgcattttcagaaaatcaatccgcagggcaagctggtgcgggtggtgcgtggtgaagtcttcgatgttgctgtcgacattcggccggactcgccgacctacggcgcatgggaaggggttatcctgtcggaagaaaacaagacgcagttttgggtgccgccggggttggcccacggttttgtggtgctgtcggaggtcgccgatttcgaatacaagtgcacggattattataacccggcccatgagggatgcctgctatggaacgatcctgcgatcgggattgattggccgatagccaacccgcagctgtctgagaaagacaaggtgggtaaactgcttggggagctggcaggatga

SEQ ID NO: 433059 - DNA, 1014 bp, Serratia marcescens
atggctattttggttacgggcggtgcgggttatatcgggtcacatacagttctgaccttgttagagcgcggggaggaggtggtcgtgttggacaacctttgcaacgcttccgaagagtcattgcatcgcgttgagcagttgaccggcaaagctgcggtattttatcgcggggacattctggatcgggaatgcctcgggcgtatttttgaggagcagcagattaacgccgttatccattttgcgggattgaaagccgtaggggagtctacccgcaaaccgcttgagtattatcaaaataatgtcgccggcaccctcgtgctgctggaagagatgcgtcgcgccggcgtgcaccaatttatcttcagttcatcggcgacggtttacggcgcccactcaccggttccttatgttgaaacgacgccgattggcggcacgacgagcccatacggcacgtccaagctgatggttgagcaagtgttgcaggatttcgccagagcggagccgcaattttccattatcgccttacgctatttcaacccggttggcgcgcatgaatccggcatgattggtgaagatccgaatgggatccccaataatcttttgccttatatctctcaggtggcgatcggtaaactggagaagctgggcgtgttcggcggagactatccgacaaaagacggtactggcgtacgcgattatatccatgtgatggatctggcggaaggccacctgatggcgatggcacacttgggaaacatcgaagggttcaaggcttacaatttgggagccggcgtcgggtattccgtcttagagatggtgcaggcctttgaaaaagcctctggcgtcgccgttccttaccaaattttaccgcgtcgcgatggcgaccttcccgcgttctgggcagatgcgcgtttggctaagcaagagctgggttgggaggttcagcgcggcattgatgcaatgatgcgcgatacctggaactggcagcaaaagaacccgcaaggataccgctga

SEQ ID NO: 433060 - DNA, 621 bp, Serratia marcescens
atgaccttggactggtggttaacctacctgctgaccacgcttatcctcagcctgtcccccggctcaggcgccatcaacaccatgagcaccggcatcagccacggctatcgcggcaccgccgcgtcgatcgccgggctgcaggtcgggctgagcgcgcacatcgtactggtgggcatcggcctcggcgcgctgatttctcaatcgctgctggcgttcgagctgctgaaatggctgggcgccgcctacctggtgtggctaggcatccagcaatggcgcgccgccggggcgctggatctgcatgcgctggcgggcagcatgccgcgccgccgtctgttccgccgcgcggtgctggtcaacctgaccaacccgaaaagcatcgtgttcctcgccgcgctgttcccgcagtttatcttgcccaatcagccacaggccgagcagtatctggtgctcggcgtcactaccgtggtggtggatattctggtgatgatcggttacgccaccctggcgacgcgcatcgccggctggctgagaacgccgcgccagatgcagctgctcaaccgggtattcggttcgctgttcattttggtggcggggctgctggcgaccgcccgcaaagcctga

SEQ ID NO: 433061 - DNA, 318 bp, Serratia marcescens
atgcgcattttgtcagggatcgtttccgctacgctgttgatgccggcgctggcattggctgaggaagccaaagagcagcagattcacgataagccggcggtgcgcggcagcattatcgccaacctgctgcaggagcacgataatccgttcacgctgtatccttacgatcccaattacctgctgtacaccgacaccagcgatatcaacaaagaggccatcaagacgtacaactgggccgacaaggcgcgcaaggatgaggtgaaataccagcttagcctggcgtttccgctgtggcggggcattgccggcgacagctag

SEQ ID NO: 433062 - DNA, 459 bp, Serratia marcescens
gtgccgactatcaaccgcgcgcagaagctgtttgatcagctgaacaccttccttgaccagctggagaaatccggccgcaaagtggtggtggtgatcgtgccggaacacggtgcggcgttggtgggcgacaagatgcagatgtccggcctgcgcgatattcccagcccgaacatcacccatacgccggtcggcatcaaactgattgggatgaaggcgccgcatcagggcagcccgctgcagatcaaaacgccgagcagctatctggcgctgtctgaactggtgtcgcgcctggtggacggcaaggtcttcagcgaatccagcgtcgactggcaggcgttgacccaggggctgccgcagaccccggtcatctccgaaaacgacaacgctattgtgatgcagtatcagggcaagccctacattcgcctgaacggcggtgactgggtgccttacccgcaataa

SEQ ID NO: 433063 - DNA, 339 bp, Serratia marcescens
ttgctggaggcgaatcagccgttgaatgtggtctggctgatgaaaacagcgctgaaagaactgtggtacgccccgagtgaacaagaggcgcagagacgctgggtaagctggtacaggcagtctcaggaaagcggaatcaaggcgttgcaacacttcgccgagaaactgaaagggtatgccggtggcatcatcgcgagtgccagacacaggttgaataccagcgtgctggaagggatgaacaataagataaaagtgatgaagcggatggcctatggataccgggataacgcttacttcttcctgaaaatcaaagcagcgttccccggtaaagcgcgatga

SEQ ID NO: 433064 - DNA, 1725 bp, Serratia marcescens
atgaggaaatgcttcctatacagccgtgtaagtagcgatgtgcagatctcaggcgatggattagggcgacaggaagataagctaaaacaatatttgttacagaatgccttgagattgaacctttccgtcgatgattgtgaaattctcgttgattcaggtgtttccgggtggaaaggatcaaatatgggcgatacggctgctcttggtcaactgtttcgccgtgtcgagtcaggggagatcgacggctcagtactgatcgtagaaagccttgaccgctttagtcgcgagaatccgtttcgcgttgctggatacattgcaaaacttgtagaacacagcatagatatcattgatgttgaacaaaatctagtcattggcacgagtaacccttggtcgagtacgatcgcatcaattatcgcaaatcgtgctcatgaagagtcaacgctgaaatctaagcgtataaaggctgcatggaacagccgtaggaggaaggcggaagagtctgggcagtacatgataaagaacactccattctggattgatgttctggatgataagtacgttgctaatgccgacgcttcgattgtacgagagatttttgatctgtacttgcaaggatacggctcgtttaccatagccaagaaaatgaatgaggccggaaaagtcatacgtaacaaaagatggtctacaccaaagatttgtgcgttgctacgaaatcctcgctgtaatggtgatttcatatcacatagcctagaacgagactacgaaaaaggcacatcaacctcagttgaacatgttatcaaagggttgtacccaaaaatcgttacagatgaagagttcgcattagtacttaaccggttgaacgatggttcgaagaataagcgtgtatgcaaggaccgaaaagttaccattctaaatgggcttttaaaatgttcgatttgtggcggtgctttaactgtacgttcagcaggtgcatatcgttatgttggatgcttgaaaacaattgagaaaggcggatgttactctaagccaatacgatatgatgcattagagaagattgtagttaatcatattcgcaatatggatttagggaaggtgtacgaaagtaatgacagtcaggaagttataagtaaggaacgtataaaatcgttaatgtcacatatcgaagagtataaagccggtatcactcaattacgtgagcgtgggaagaagccaagttttgatatgttcacagaattgcaaaactctgaagatgagcttgaactgttaaagaaagaattagaacaactttcattatcaaagattgatttaagtgagtttgcggtaagtactgaattgtttgatataacacagatagcattgagaacaagactggaaagaacgatatctagcttgttgaacaagattaaggtttatcacacaaaagatctatcgtttagcttgatcgagatgatttacgttaacgatgtagtaaaacatgtacttgtagccgacaaaaagggtgatgtgactggtgatgttgttataagaaggaatggcgagagtactacatatgaaagctgtagtgttaaaatcattaaggatgaagatggggtattctcactggattgtaatataagcaaagtcgtattgaatgattacttgttgctaatgaatgttgttgatttcgtggactctgaggccaaagagttcttgaatcttcatcttaatgcggtgttggcacattga

SEQ ID NO: 433065 - DNA, 597 bp, Serratia marcescens
atgaaaaaggaaaataaactagtagccggtattggtacgaatgacttagcaaacgatattgaaaaacaacaagagattggtttaacacctgaaattagagagaaatgcaagcaagcgtggaagaatcgtctagaagcacaagactgcggtagagcgactgtctgcattgaatggttgacctacagtaacttcgcccggtggtggcttgatacgcacgttgagggctggtgcatcgataaggactggttagttgcaggtaataagcaatatcacccggataaatgcgtttgggtgcctcagaaaatcaattgcctaatgaacgatagaagtactaacggattgccgaaaggtgtcagtattcatcaaataaagtactatcgagcaacgtgtaaagttaatggaattcaagaatataagaacttcaaaactgcaataggtgcacacaggcaatggcaactttggaaaatccaagaaatcaataatgtcctacgtgagtttgcatttgatcaacgtcttgatggacgagtaattcaacgtctgttcgaagttagggataatatccaatctgattacgacaacaatattgaaacgaaataa

SEQ ID NO: 433066 - DNA, 531 bp, Serratia marcescens
atgaacaaattaggagctctttgcctattgctggcgccattttcttttgtttctcaggctatttctgcgttgcaaggcgaagggcgggtcaatatgcaaggggctattaatgacgctgcttgtgctatcgctacagaaagccgtgagcaacttattgatatagatattatatccgtttccgatattgcccgcgatgggcaaggtcggaacgtaccttttagcattaaattagttaactgcgttttggaacgaacagacaagacattgccgaggtggaaacagttccaggtgactttcgacggccgtgccgatggtgaattttttggcattaatggcggggcctcaggtatagcgctggaaataatcgatcttgaaggcaatgccgcaaggccaggaaaaccattgccattgatgaatgtgccacttggggattatcggctcaattatgtcatgaaagttatggcaaatagtcggcctttgtctgcaggggatttttattcatcggttagattcaaaatggattattactga

SEQ ID NO: 433067 - DNA, 909 bp, Serratia marcescens
ttgagagggctaattatctttatattcgttgcacccatttatttctatagcgcaatggtacaagcattatatgttgatggcgggttcaccgcttggcgttgggagggagaaccaccactgccgacacagcaatctcgatgggttgagattagctttcgcttttcctccattatgttcgatgactatgacgaaatattttccaatgggaaaaaagttcgctgtgataatcagggctgtcggtttgtattatggatctacagctactcggggatagtcgtgtcgccaggtgtttttttcgctcccggcggcactttattggcgtcgtcttacgaggccaaccaatgggtcaggaattcgatgccatatgaagattcgataagatttaaatacgatttaaataacaatgaccgacggtgtatgtttcttcatttagagaccggatctcacacccacatattaggttccacttgtaacggtgtacttccgccgctgccgccaactacaccagagccgccaccgccgccagagccgttatcttgcgcggtggcatggcaaagcagcattgagattgattttggcgtggtgacggcgggcgaaagcaaggctaaaggcttggcagccaaactggtctgtcagggcggaacgtcaggaaaagcccgcctcagatttacggatgtcaatcagataggcgcagatacggtaacgttgcgaaagagtggctcaagtgaggaaataaaagtgaagctatcggttggtgatgccaattcatctaatgagaagataattgatgtctcaccaggatttaatacgacttatgcgtttatagccaaattagacggcacacaactgagcggcgttgatggcggcactttttctggcaatgcgctgattgtatttgaagtcatttag

SEQ ID NO: 433068 - DNA, 657 bp, Serratia marcescens
atggctcgtaggcatgtaatacctgaaatctggcgctatagggtaaatggatggcgatatgggctcgcgctagcgggcctggcattgatggtgccactcagcgtagcgatgatgctatggctgatgccggcctcgcaggcagcggacaattggcaagtggaaggttccaatggcgtactgcatatcagcggtgcactggccgagagtgcctgccgattggaaatggcttcagcccggcaggatgtgtggttgggagaggtagcgaccggaaggcttgaacaggtgggcgcacgtggtgtaccggtggcgtttgaattacgtcttcgtgactgtttgcgcagcagggcggccagtcgggatgagcgtacgggaattttaagctgggcaccggatcaaccggcggtcagagtgagtttcagctcgcgggccgttcgggataacccgcagctggtaaaagcgcagggggtgggtggcatcgggttgcgcatgttggatgagcacggccgcaatgtgcgcctaggcagccgcggtgaaccgctgtggctgactccagggagcaatgtgttggcttacagggtaatggccgagcgtacggcacagcctctggtgcccggcagttatcacgccgtggtggattttcatttgagctatgactga

SEQ ID NO: 433069 - DNA, 501 bp, Serratia marcescens
gtgaaaaagggaaccaaaattcgacaggccatggcggcgttgctgttgtgcggctgtggtggtatggctttcacgcaagccgcgacggtgaaagtcagcgtgacggtggtgcaaccgttgccttgcaccatcaacggcgggcggccaattgaggtgaacttcggtgatgagctgatgacgacacgcatcgatggttaccgttaccgcgtaccgatagatttttcgtttacctgcaccaacccctataaaagcgccatgcgcatgcaggtacgaggcggcacggccaattttggtcaagggttgctcggcactaatcgcgacggtttaggcatcctcatcttacagaagcaaagcgggaatcagctgccgctgaattcttggctcaatttcacctatcccaatccgataacgctggatgccgtgccggtaaaacgggcaggtgtcaatctggagacgggggagtttaccgcatccgcaactctgagagtcgattatcaataa

SEQ ID NO: 433070 - DNA, 552 bp, Serratia marcescens
atggcggatgtgctttctcgccagtatgcggactggttcggtctggtgggggttagccctgatatcgatgccggcatctgctgggaacgtttggggataatgcctgaatatatcgcaccgtgcgatatgctgatgctgatcccgacgcgtctggcgaccgaactgaatggctctggtggactgctgcgtgatgtgccgactactgtcgagctctatggtcgacagtacggcgtcgaatggccggcaggccataatgtcggctgtgtacgggatggcattaacacgttgacagtgcactttgcttccccatggtacccgccagccggcgaggttatcgggagagtgtctgagttgttcagttgccaggtggaccctgacccaaaatcctgctccattcagaaacagaattccggcatgattgaaatgcccccaggaagaatattgactgtcctgactcggcaggcagagtgggttggggagtgcgtctcgctagaacagaatggagtgggcgctgccgtatatctctcgcagctatttggtatgcataagtga

SEQ ID NO: 433071 - DNA, 351 bp, Serratia marcescens
atgagtaatgatgagaaatttgttgcggctatttttaaggaattgattgaagaaaactcagtcaggtatagaacttcactaagtaagcctgtagatactggctctgatgtttatgcaaaagcccgcaatgcactggctaaactaagtaaagatgaaagggataatgtttttaaattcatcgacttggctattgtagatagcacctctgtgatctttgggacgcttgatggttctcattttccagacggaatagatggggatattatagttgactacaaaggtgaggagatacaaggtagtttacaggacttattcatagaaaaagctgaggatagaggtatttataactga

SEQ ID NO: 433072 - DNA, 519 bp, Serratia marcescens
atggtttttaaatatccatccgtacacattgataagtcacttaatattatggtgtctaacatgattgattttaacgctaggattgtgtctggtgtttctatagggaatgtcgttctaaatgaaaatatttcattatatattaatgagatgcaatccagatttagcgttaagattaaaaaccactccctacctgacgggagtgagcgaaagtcatatacagccgataataccttatccgtcataactgataaagacggtatcattttgtcacttggatgtaatgctcattatcaagggggctacaatggaatcatattccccggaatggaaataacagatataatcaagctgacgatatcacagaaaatatacaatggttcaatagttattaatgatgattttggtatttcgtttatcctcccatgcccatatgatgagattgccgattcgataaacgatattcctggtggggtgataataaacgaaattttcgtatctgatttttcattctggcgttag

SEQ ID NO: 433073 - DNA, 1017 bp, Serratia marcescens
atgcaaaaaacaaaaacggctttcgtcacaggcgctactgggctactcggtaaccatctggtacgcgccctgttggcgcaagggtggcatgttcgcgcgctggtgcgctcggatgaaaaatgccggcggcagttcggtgaagctcctgagattgagcgagtcaccggagatatgctgaatgtggccgctttcgccgagcgcctgacaggatgtgacgttctgtttcacaccgccgcttattttcgcgaaaactaccagggcggcaaccattgggacaacctgcacgccgtcaacatcgaagggacgaagtgcttgctggaacacgcccggtgcgcgggcattcgacgtttcgtccacacctcttccgtcgccgtattagctggagaagccgggcagttgctggacgagacctgtctgcgccgtgaggaagacgccgatgattactaccgcagcaaaattatggccgaccacgccgtactcgactttttacaacggtatcccgatatgcacggcaacatggtattaccaggatggatgtggggccccgctgatttaggccccacctcttcggggcagttagctcgcgacgtcctgctcggtaaattgccgggcctgattccaggcagtttttcagtggtcgatgcccgcgatgtggcgctggcgctgatctgtgccgccgagcgtggagagcgaggggcgcgctatctggcggcaggaaggcatatctccatgcaagcgctggtgcagatgttaggcaaaatcgccaatgtcaaaacgccaactcgcgttttacccaccccgctgttgtacgcgctggcgacaatgcaggaagcctattcccgcctcagtggcaagcctatcctgctgagtctggcgacagtaaggttgatgaggcaagaagccgaccggtcccattacaattcggctaaaagcgaacgcgaactcgcgctgagcttcagaccgctggagcaaacgctcggtgatacgttgagctggatccacgccaacggattttga

SEQ ID NO: 433074 - DNA, 615 bp, Serratia marcescens
atgaaaacgacgaaaaaacgtttaacgcgtgaggagagccaacggcaaacccgcgaccggcttatagaaaccgccaggcagttgtttatcgccaacggctacggtgcggcttccatacgagatatcgcgagtcaggcggggtattcacagggcgcgttctattctaattttgccaccaaagaggcactgctgttggcgcttttacaacgccatatgcaggcggaggcggggcaattggcgagtttgacgcaatccgatgcacgtacgccgaagcaggtgctggcggcgttggaaacctgggcggcgacgctgaatctggacgtggattggggcatgctgtcggtcgagttgcaacttcatgcgcggcgcagcccaacgtttgccgccgaatataacaaaatctggcgacatcatcaggcggcgatagcgtcagcgctggaagcgttgtttgatcacttggataaaacgccgccggcagagccggaagaattagcggcggcgtttatggccatggcgcatggactggcattgcagaaagccatgcaaggcggtgagccgtacggaaaaatcctgatggtatttttacgggggctattgtccgcgccgtcggaatag

SEQ ID NO: 433075 - DNA, 195 bp, Serratia marcescens
atggaaaagaaaacggcgcggctcacggtgctgattgacccggacaagaaaaaagccctggaagacctgtgcctgcagcaggacgttaccccttcccaggtggtacgccagctgatccgcgattacctgcataagcatcaggtggactatcccagccagccgacccacgccaacccgcgcgtagagagcaattga

SEQ ID NO: 433076 - DNA, 201 bp, Serratia marcescens
atgttttccaaaatacagttccgctggtggagcgtgccactggcgttgctgcttaccgttgcgctgtttatggcgctggatagctgcggagtaacccagggggttagcggcctattgcgttcgctgctcgtgggcagcgtcagcgttatcttgctgtatggcatcaaccggattgccgcaaaacaaacatccagccgctga

SEQ ID NO: 433077 - DNA, 453 bp, Serratia marcescens
atggagacagccaccaccacgctgcgcctgggtgcggcgcttgaaaatctggatacgctgagcaacgcttttcagcggttcgtggcgccgttcgcgcttgatccggcagcgatatatcagatggatttggcggccagcgaggcattcagcaacatcgtccggcacggcgtcaattacgacgtgcggcacaacgtggatgtgactatgtcactatctgccgacgcgatcgccgtgacgctcaccgacagcgggcgtcctataccggcggacattctgcaggcggtagcggataaacaacggtcgttccccgaaccgggctcgctggaaagttggccagaaagcggaatcggattgatactgatttattccatgatggacgaagttcgttaccgttccgccgacggacgcaacgaactgattctgattaaaaatacgacgggcgatcggacctga

SEQ ID NO: 433078 - DNA, 1161 bp, Serratia marcescens
atgatattacgacttgtgctctttattgtattgttaacctcatcagttgctcatgctgaacagacgatgacgcctgtaaccgatctcttcggccggaccgttaacatcaaattaccggtacagcgtgtcatccttggggaagggcgccaactgtatctggtcgccatgcttgataaagaaaatcctgccaagaggatagtggcctggcggaaagatttaatacagtcagatccggcaacatggcagcagtaccggcaacagtttccacaactggagaaaatcccgacatttgggggccgcgagcaagggaccttcgatatcgaacaggctattaatctgaaacctgacgtcatcatcatgaatatggatgcgcgaaatgccattgttgattcagggtatgaagccgcacttgccagtgcgggtatcccaattgtctacgtggattttcggtatgaccctattgcacatattcctccaacagtgaaactatttggcgagttatttggccaatcggaacgctctgaagcctatttgaaatttcgcgagagtgagttacaacgcgtcacatccaggactttaaaattaaagaatccattgccaaaggtatttttagaacgtcttggaggttattcagaagaatgctgtatgacctttggcaaggggagctttgggcgttttactaaattagccggaggagacaatatcgcagccaatcttgctcccggttcattttttacgttaaatcctgaaaaggtgatagctgcaaatcctgatgtcgtcatactcaccagcgggaattttcaggccttcgttcctggtggaaggtggatccctctcgggccgggcgtcaatatcgacgaatccaggcgtaagctggcatggttcaccagccgtccagcttatgcagatagcactgcacgccgtaatagcgcatttttcgccatctggcatcagttctacaacagcccgtatgatgtcattgccatccagcaactagccagatggatacatccacaattattcgcggacctggacgctgatgacacattccgtcgcctgcatcaggaatttcttcccgttccgtatcaatccggatatatggtaagcctgcaaaaagaggagaataaccatgacgttaagtctggcacaactccgcgctga

SEQ ID NO: 433079 - DNA, 2112 bp, Serratia marcescens
atggttatgaatcgtagaaagaagtttctggttttggctgttgtagaagttttaattccttatattgcgaacgcggaagataccgttgtcgttagcgccgacagtacagttacacaaactgaagatgcactatccaaacaaacccatattggcttattaggaagtaaagtcattcatgatacgccattcagtatcaaggtatataactcgcgatacattgaaaataggcaggctaaatctctcggcgatgttataaaaaatgattcatccgtgcgggttacctctccttcaggtgggatcctggattctttcatgatccgtggattccctattggcgaaggcaataccggtgaagtggcactcaatggtgtctatggtgtggcaccaaattatcaattattgccgcaatatctcgaacggatagagttactgaaggggccgggcgcgggactctatgggatgtccccgaacggaggggttggcggtgtcatcaacgcagtgactaaaagggctacagctcaggatattaaacgcctcaccaccgcctgggagtccaacaaccaactcggtgcatatgtcgatgtcggtaaattgtgggttaacccggacggggagatgtggggaatccgttttaacggtggcggtagtagtggcgatttggtactcgacaatgccaataaaaataaggcattaggcgtgcttgctctcgattatgggaacggaggggtgagggcttcccttgacctgcttgatcaatatcagcgagtcaaatccccaaatcgccccttcaccgtcgctgcaggcattgatgttccggatgctcctgatggcaagacaaacatcgcacaaaaggggatgtggtggaaaatccgggatcagggggcattgctacacacagaatacgatattaatgacaacgtgaccgtttttgcgaatgcaggcggtgggcgctcgatggtttcacgcatatcagagcaaacccctaatattattaacgacaaaggggatgtcgtctcgacgattactaatttccgctttaaggtgaatcgttatattttagaaactggcgcaagaagttatttttcaaccggttccattgatcatcaggcgacgctgcaggtcagttattaccatgatcgcctcgctatcgccagcacctggggacaaacggtagattccaatatttattccccgccagacgttgatgtcaccctgccttctgcgccagccagagtatcaaaaacctcctccagccagttaagtggtctcgcgcttgccgacacaatgaccgtactggatggaagtgttgacatcacgccaggcgtgcgtgtccaaagggttcgtgccgataacttcgccgctaatggcgatcgttcatcctcctatgatgaatatgccgtcactccgatgcttggcctggtctaccgtccctggaaacccgtttcgctgtatgccaactacattgaggggctcagcaaaggtgatgtcgcccctggtacggcacaaaacgcaggtcaggtgatgcgtccataccgatcgcgtcaatacgaagtgggcattaaatacgatgaggcgggaatccaaagcagtcttgctcttttccagatcacgaagccaagcggtgcaatcgacggtaacaatacattcaattccaacagcgaacaacggaaccgtggaattgaactgaatatctcccatgaacctctggataatttgcgaatgtcaggaagtctttccctgattgatgctgagctcaccaaatctcccaccactggcgttcgtggtaacaaacccgttggtgtatccccgatacaagcaaacacgagtgtggaatatgacctccctgtcctacggggattgtccctgaacagtcatgtcaattacagcgggaagcagtacgtcaatcaggcgaatacgcagtctatccgttcttggaccacggtagatatgggggctgcctataaaacgcgtgtttacggtacaccggcaactttccgcgttgatgttcaaaacgtgttagatcgccattattgggctggcgtggcgtcatacagcaccattgcgcagggagcgccacgcaccttccttgcatcggtaaccattgatttctga

SEQ ID NO: 433080 - DNA, 1698 bp, Serratia marcescens
atgaagcatcactcccacccatcgataagaacgcagtatatctctaggccaaagacttattcttatctatttctgctaattattgcagccataattattttggttggcaattctcctgatgacatttatcctctcgttactgctattagtgcatttgttttcgttgtggggataggatacttactctccgcgaaggtactgtttgccatatcgaccggtagtgtgctagttatcgtgctgcagtttattaatcagcttaaagtgcattattataaagacaaattgatgttctccgatctctttatgctgaccgacctctcaaatgtcggcacgttgtttcattatccggaagctgggttggccttggtcggattgggagggattgttgctattacgctcatcgttggctggcgtgcagtaccccgtcgacgtggggttacgccgagagtcgttgctctttgtatgatgtccgttagcggtggggtgctgagccaatgtgtgctcttttatcaacaagactgggccggcactttaccgggcggaacaggcgtggtgtctaatctggtgatgtcgagcagccagatgaactatgactctccctcctttcccgatgacagttctgagaactttactacccgcacatctgtgctaaataaagtatcccaggcatctgataatatgcacccagatattgtactgctgctgctggagtccaccactgatcctcgattgtatcagcttcccgatccggcattgctgccgcatttttccatgtttgaacaagggacggcggtgaaagcgcatacgctgatgcgagtacaaactttcggaggggggacttggttatcggagttttcagtcctcacggggttgcgcagcgatgattttggtaccaagaaaaatgcggttttttactcggttatcgaccatgtgaatgacagtcttttcaagcagatgaaagctaatggttattataccgtggttctcactccctttaataagtcagcttataacgccggccacgcctataccatgatgggagtcgataaaattatccaaccccaggaattaggttatcctggtagcttgcaggataacctgtggcatatcagcaccgccgacatactgcattacatcaaaaaaatactggatacccatactgacaagccagtgtttgtttatgcgttgaccatgtatgagcatgggccttatgacgctagccacaaagataactatcaactgaggccagtggtaacaaacaaaacttccgcagctaagttcagccactatatggaaaaaatacaaacctccgacgcagcgatgtcagaatttttccagtttatcgatcagcgtcaaaagcccacaatgttcatgtattttggtgatcatcagccgaatattgattgggagaatgggtattcgacatcactaccagatgccgcacatttgacgcagttcagtttgcgagacaatgccaatatgcagcctgttgcagacttggggtcgataactgatatcgcctttttaggagggattctgcttgaacaagccagactaaaggtgtcgcccttctatcaggctaatatcgacatgcgacacttgtgcaaaggggctttgaacgattgcgaagatcaatcactttttaacagctataggcactacatttataatattcttaaggtggcttctcaggactga

SEQ ID NO: 433081 - DNA, 222 bp, Serratia marcescens
atgagtgagttagagataaaacttgttgggattgtgcgggtgagttacggtgtacggttcgggagcaagttagtcgcggtgaattttagcagagcgattatatcgcatgggttgctagatgttgcccgtgtggatactgtaaacttgccagataaatctatacggtggatgttggttagagtgtcgtcgactaaatttgtgcttctggttatcactatttga

SEQ ID NO: 433082 - DNA, 696 bp, Serratia marcescens
atgaaaaccattaaaattcttcttgcggaagatgaatatgaaattaccgagatccttactgcttatcttagaaacgaaggtttcgaggtcgtgcctgcgcacaacggacggcaagccatcgcactgtttcaggccacgctaccacagttcgtgattctggatatcaaaatgccgttaatgaacggctggcaggtgctgaatgaaattcgcaagacgcacgatacaccagtcatgatgctaaccgcattagatacggatgttgacaaaatccatgctctgcgtaatggtgctgacgattatattgtcaagccatttaatccagcagaggtgattgccagagtgaacattattttgcgcagggtttcgtttcaccgtaacaacaaagatctttcagtttattccacaaaaaacattgaaataaacattgaacatcaccaagttacaataaaaaacaccggcgaagacatcggtgataagctaacatcaaccgagttcagattattaacacaccttattcgttatcccaaacgggtttttacgcgacaagagttactagagaactgcctgccggagaatgatgctaatgagcgcacagtagacagtcatgtcagcaaactcagaaagaaatttagccaagctggattatctaatattcctgaaagcatccgtggttttggttaccggctgggggattga

SEQ ID NO: 433083 - DNA, 1059 bp, Serratia marcescens
atggtacatcgcagcatcaatagtcagcttttcctcctaacgctaaaagtggtgatttccacattagtgctcatttctgccgtctatagcacctacttcatgattttctacgattggcattctcctccggcgttttcctggatacatgacagcctaatgacgatattatccgttctactctcttcggtgctcgccagttatctatcgttgagttttgccaaaagacttattaaaccattacagtcagtggctcacagcgccagaaaaatctctgaaggccagcttagcgaacgagtgaaccaccatcactgccataccatcgaaatagtccggcttatcaatgattttaactctatggcaggcaagctcgaagcaatgtctgatgatatgaaaaaatggaatgcagctatcgcccatgaattacgtaccccggttacagttattcagggccgtctgcaaggtctacgggacggcctatttgcgaacgacagtaggcagttcgacatgctgattcggcaaactgaaggactgtcccgtttgatcgacgatttacgcgtactcagcctatcggacagcggtcaattatacatttaccgtgaaacggtacatctgaaagcactgttacacaattgcgtagaaacgtttaatagccacctcaccaccagtggtcttaagcctgtcatcgaagccgcggatgtggtgtgttatgtcgatgaggtacgcctccgccaaatctttatagccctgctcagcaacgcctgcaaatatgccgaccccggtctgctgcggatgcgttgctcagcaaggcgcagcgatattatcataacagtggaagatgaagggcccggtatcgcagatgaggaatgtactgccattttcgaagcatttttccgttcccacactagcggtaagaaagaaatcaacggcagcggactcggcctggcggtagtcaacgccattgctctagcgcacggcgggcaagccacatatcgtcacagcgagcttggtggtacctgtattgaaatctcgctccctaactgcgtcaatgcgacattgtag

SEQ ID NO: 433084 - DNA, 1377 bp, Serratia marcescens
atgtccctagatatacaagcgcttcttgccgatgaggaaaaatactgttcgcacggtgacaccgttcactatgtaaacccgccgaaaatcttcaagcattgcaacggtagttatatgtttgatgagaatgacactgcatatctggatttgcagatgtggtactcggcagttaactttggttataaaaaccctagattggaagaaacgcttaaaaatcagattgataccttgccgcaaatcgccagccaatacttacacccaactaaaatagagctggccaaattcattgcccaagacgcagaacagaaatggggccatagtggtcgcgtgcacttcaacgtcggtggcgcgcaggcgattgaagattcactcaaagtagtacgtaatgcaagcaatggcaaaagtttgatgttcgcctttgaagggggctatcatggacgcacattaggcgcttcttcaattacgtccagctatcgttatcgtcgtcgtttcggtcatttcggcgatcgagcacagtttgttccgttcccttatccattccgccgtcctaaaggcatgacatcagaagagtatgcggatcacatcgtgagtgagttcgcccgcaagttcgaaaacgaatatcacgccatctgggatccgaaaaccaatcagtgcgaatatgcagcattctatattgagcctattcaggggactggtggttatgtcatcccacctgcaaacttcttcacaggcctaaaaaaagtactggacactcacggcatcttattagtggttgatgaaatccagatggggttctggcggacaggtaaactttggtcagtagaaaatttcggcatcaagccagatgtgctggttttcgctaaagcattgactaatggtctgaatccattgtccggtctgtgggcgcgtgaagaactgattaacccaggcgttttcccaccaggctcaacacactcaaccttcgcatctaacccactgggaactgcactgggtctggaagttatgaaaatgacgcatgaagttgatttcggtaaacaagtgcgtgacagcggcgcttacttccttgatggactgcaagagctgcaaaaacggcataaagaaatcggcgatgtggatggaatgggtctagcactgcgtgcagagatctgtaccgaagacggctttactccaaaccgcgaacttttagataaaatggtcgatatgggcttggaaggaaatctggagtatcaaggccagaaacgtggcttggtcctggatgttggcggatattacaagaacgtcattacctttgccccatcattgatgattaccaaagcagaaatcgatgaagctctaaccctgttggatcaactgatcagcagagctaagaacgcttaa

SEQ ID NO: 433085 - DNA, 1065 bp, Serratia marcescens
atgacttggttgaaccaacttgaacccaaaggtctgttacaggcctttggggaaatgcccccagacagttttcgtcttctggggcatgaacaaattttagcttttttcatgcgctttcacttgcttaccaccatggaagacaaggcaagagcccgtattcaacgtctaccattatatgcacgatgggctaaatggttatcgattaacacggcgtttgtaggtacaaccgtcagcgaatatgtaccgtttagcgctgatctccttcctgagtattttattgaactcttgcagcaacagatttcccctttatgtaaaatcactattattaaggatattccgcaaagctcaccattattatcagaaatggaaaatgactatgctgatgcagtaataaaaagcgccgtcaagcaaggttatattgtcgtagagggccaagctctcgcctatgtaccagtggattttgactctattgaatcctatcttgcacaactttcctatagtcgacgtaaaaatctacgtcgtaaactaaaaagtcggaatgatgttatcgtaactgtcattccaacaggaaggttctataatgaaattgacgagcgagttacccgtgaatattatgatctgtacgaagaagtatattctcagagtgaaatacattttgatcacctgacttacgatttcatatgtcaactgttgcgagataataacagcaacggtattgttttcgaatatcgtcggcgcagcgataacctcctgattggctggaatttgtgttacgcgtttagggggaatctgatcgataaatatattggcttgcgttaccctcatgctcgagaactgaatctctatttcttaagttggatagtgaacctagagtacgcgctgcagcatggcttgaagcactatatcgctggttggacagatcccgaggttaaagctagcttgggagctaaatttacctttacccgtcatgcggtttatattcgcagtccgcttttgcgcaccttgatacgcaggttttctaattcatttgaaggtgaccgctctaagttggatgcgaggacatga

SEQ ID NO: 433086 - DNA, 891 bp, Serratia marcescens
atgaaactgccgaccctcgtacttgatttagatgattctatccggcgcttgcccaatgaaaaccgcttacgcccagcaactcactggcgtgagcaagtccgctttgggtgtagcattaagcattttcgccagttttgggctgagacagaaaagacgcttccccccacagagcaatatggcactgtgttaataggcagcggagactttcatcacttgaccctccccttggtacaacactgccttaaaaacaaaactggatctatgcgccttatcgtattagataatcatccagataatatgcgatttccctggggtattcactgtgggtcttgggtacgccatgctgccttactcccacagatcagccatattcacgtggtgggggtcacctctcaggatattagcgtaaaacacgcctgggaaaattatctggcgccgctttttcgtggtagggtgacttattggagtacaggagtaaatgtaggctggggaaagaacatcggaattggcaaggcattccagcattttaacagcagcgagacgctatgtgaggctttctgttcgatgctggcacaacaacctgagccgacttaccttagtattgataaagacgtgttttccccatccgtcgttcgtactaattgggatcaagggcagatgacgatccccgaagcgttacgcatcattaaagcactcagcggtagtttggtgggtagcgacattacgggggaagtctctgaatggcagtaccaaacggcttggaagcgctggcttagcgccgccgatggtcagcagctgatatttggtgaaacgctaaatgagctccataatgagcatgctacgctgaacctgcaattgcttgaagcccttgcattcagccgaaaagtgtaa

SEQ ID NO: 433087 - DNA, 360 bp, Serratia marcescens
atgagtatgactgttttaatcttgtggggcctcaatgctatccttgatagtgttgggcagttagcgtttaaagcagctgcagtggattcgctgaaagataaaagtcgttcgagttggatacgaatgagtcttaggccttatgtttggtgtgggataatctgctatgtcgccgaattcttgctgtggatcgcctttctgtcgctggttccgctgtctgaaggggttttgctcggctcgattaatattgtagccgttatggtgcttggcaggattatcttccgtgagactatgtctccaatgcgagtgctcggtattgcttgtgtgtctctcggtgtcgccgttgttggattacagggttaa

SEQ ID NO: 433088 - DNA, 891 bp, Serratia marcescens
atgagcatgaatgactactggctcgaagggcgaggggagcgagctgaaaccggagttctattgattcatgggctgacaggaacgcccaatgagatgcgcattctggcccgagggttgaacaacgcgggcttcaccgtctacgctgttcagcttgccggacattgcggtactctaaacgatctgttggagtcgacttggcaagaatggttggccagcgtgcgtgccggggctgacaaactcatggtaaaggtaaagaaactgatcgtgggtggcctttcgatgggagcggtgttggcattggcattggcaactgagaggccgcagcagatcgctggggttatggcactttccagtacgtttcgccatgatggttggagcatgccaaaatatacccgcctggcatttattctaccgtatcttcggatgctcggtattggccgtcaaaaaatgttttacgagaagccaccttacggtattaaagataaggcacttcgcaagcgtatggtctcgcagatgcatgcgggtaatagtgctgaggcgggattacccggcaatccattctggtctgtagtggaaatgcagaaactgtcctcctacgtgttgaagcgtcttgcgcgtgtgcaagcgcccagtttagtgctgcattctagtcacgatgatattgcttcagtaaaaaatgcgatggatattgtcaaaggcgtccgccatgcaccagtgcaattggtattgcttgaagacagttatcacatgattactatcgatcgtgaacggcgtaaagtgaatgaactctgtattaattttgctatagaacgatctttagcagacgagaatgttgcggaactaatatctacccctggaacgctaagtgaaccttctggagggtgtttatga

SEQ ID NO: 433089 - DNA, 702 bp, Serratia marcescens
atgaatatagtgattccccccagtcagcaattggactgggttgtacagtgtgattttgatggcactatcagcttaaatgatgtcgccgatactttgttagagcgttttggtttgccgggttgggagcacctcgaacaagagtgggaaaacggcattattggttccagcgactgtatgcgtggtcaggttgcgcttttggacatgactcgagagcagcttgattcgcatctggataccattgaaattgatccccaatttccagcgtttgtcgctgcagccagtcgtttgggatgggcagttcatatcgtcagtgatggtttggactatgcaattagctcaatcctggcccgccatggcttagggcatttgaccgtttttgccaatcatttagtgcaagagggggagcgaaaatggcggctggaaacgccttggttccgtggcagttgcttaaaagggagtgcaaattgtaaatgtcacttgctgaatctacagaagcagcgcaggcaacaggtactatacgtgggtgacggcagttctgatttttgtgtctcaggcaaagcggatatagtgatggctaagtcacgtttgctcgcttattgccagcagcacgatatccctcatttaagaatgaacaactttaaagatgctaccaatttgctgtattcattcgtagcacggaacttgagggataaagctgtatga

SEQ ID NO: 433090 - DNA, 909 bp, Serratia marcescens
atgaatttgaaagaattaaagtggggggggatatctgtcatcgttagcttatggatgctgtctggttgtgatgataaaccggtaaaacctgttgcgactgccccaacccaagcggtagtgccagtggcgattgctcgcggaaaagtcgatgtggatggggggatcgtagccttatcatttccatcagaaggcgtcgtcgacaaagtcttggtcactgaaggtcaggcagttcagaaagggcaaatactgatgcaacaggatcatcgcctatattacgcagataaacgtgtagcagaaagtgaaatcgctgtggcagttgcgcagttacaagggataggtgaacaactaccggggctaaaacaaaaagcgactcgcttgaagatggctgcccaagctggagctgctcaaatgcagctcagcgatgaggcttatgaggctgtgcaacaggcaaaaacagccgttactgttgctcaggctcaagcaaatctggctgaaagacgcttagctaaactagttgaacatggcgcgcaacttgacctgcgagctccttttgctggttctattgtgaaattaaatgctcaggaaggcgcgtttatttcgagcggccagcccgtcatactctttttgcctaacaaaccgttcatcatccgagccgagctgaatgaaagctatctagcaggcgtaaaagtgggtatgaaagccaaagtgcaaattgataatgacagtgaaagaaaggatttgcccacagcccacgttattcgcattagttccactttcgtgctgagccaattgcaagaaaacgcccagcagagtcctcggcgcgtcgtagaatgcattctggcatttgatagtgagccatccacgttggtcgggcaaaatgtagttgtgagtttttatgacaatccgtaa

SEQ ID NO: 433091 - DNA, 726 bp, Serratia marcescens
atggttaatttttacagccactcatcacagcctgttttgcaggctcaggacatcagtaaatcgttcctgaccggaagtttgaccgtaccggtgttaaggcacctttcattaacggtaaaccccggggagttaactctcatttccggtccttctgggtgtggaaaaagcacgctcttgtctttgctctctggtctgcaacaaccagatagtggtaaggctattgcgctaggaatcgatctcagcacatttagcagggcagcaatggaaaggtttcgccttgaacatactggttttatatttcaaggatttaatctattcccctctttaacagcgatcgagcaagtgcaactccctatggggtacctaggggtaagcaagcgaacaagtgaagagcgtgctatggcggcacttgaggacgttgggctaagccaccgggcgcacatgtatccggcacagctttccggtggggagaagcaacgggtagcaattgcgcgcgcagtagcaaaagcaccgaagctgttatttgcagatgagccaaccagcgcattagatgcggaaagcgggcagcgagtgatcaacattctacaccggattgcccgaacatatggcgttacgacgctgtgtgtaagtcacgatccgcgtttgatgagtcatgcagatcgccttttgcatatggaagatggcgctattcagcaagatgcacagacatcgaatcataagaattga

SEQ ID NO: 433092 - DNA, 1137 bp, Serratia marcescens
atgatttcactcgcgcggaaatcactgattcacgaatggcgacgttttgtccctgtgggactctctgttggtttttccggtattttattgattgttcaggtggcgttggtgcttgggatttttggcagtgcggcaatatacataaacgcttcctctgctgatgtttggattggatatcccggtacccaaagtgttaattatggtcgactgattgggccggatgttaaaacccacttgcgtatggatcctgagatcgcagaggttgagtcttatctctgggtggatggcgactggtacaccccgaatgcggacggtggtagtgtgtctgtttatctttctggtatttcaactcgccctgaagcgatgatgttttcgcggcttcttcctgttgaactgcgagaaaagctgcgtgagcctggtgctgttatcgttgatcccgctgatttggctacgctgggttcacatgtaggggggcatgcttggattaataaacagcctgtatatatcgttggcatactgaaaggtttacgcggattgggcggtattaatgtgctctcctctcatgaaagtgctttaacgatcgctgggctgcaggaaggagaaggtagcacctattatcttgcgcggttaaagcaaccagggcagctctctagtgtattagcgcgcttctcacaaccggacaaacgcttcggcctatatgaaatgtggtcgtccaatgactttgcctcacgttcgcagctgtactggttgctggatacaggtgcgggtgtagccgtgttatttatggcgggattggtctgcttggttggggccatgattaccagtcagtcacttaaaacagtcattactagctacagccgcgaatatgccacgctcaacgcattgggtgcaagtcgcttcgctcttgcaaaggttgtggtggagcaatcctgctggattggcagcattgggcttctcttctcggctatagtaagtgcactgttactcagtattgccaaacactatcaggtaccggtagagatcacaccctttgccatgctgagttgtatattcttggtggcttgtatggtgctactttcaagtttgtcagctgtaagggaacagttaaatatcgatccttcactactgttacgctga

SEQ ID NO: 433093 - DNA, 1416 bp, Serratia marcescens
atgattttttttggtggctattttagaaagggagcgatagcaattccggcattgatattattgagtggctgtgttggctccaatagacctgatttaacacaaaaagtgcctgataagtgggacgtggctatgcctgcatgggggcatctcgtagatttacgctcctggtggcaaacttttaatgacccggtgttagacgaacttgtagaaaatgcgcttgctaataacctgaatattgcccaagccgaacagtggttgaaaacagcgcaagctctgaatggtgctaccgccagtagctatttacctcatctccgagcgggagttcaacctgtgcaagatgctgctgcccgggataattacctccacggcagtattgatatggtatgggagctcagcctctatggcgagtcagccaaccggcaacaggctggggaagccgttgttctatcggctcaagcccgggagcaaggggtgcgtatttctgtcgttgcaaacgtagtgcaaaattatttacgttttatatatgctggccgacagttgtctctactgtcctctcaggaggctgttgagaaacgtttacatacattagcggcgatccgtaaaaccgctcacattggtgatgcggaagaacagatcagttcttctttgcgtatggcacgtttacaggccaacatcattgaattacagcaagttagagagcaatcatcccgggcgctggcgctactgacgaacaagacactgacacagacggtgcaactattacatgataaaataaatttaactccggatattcgtattaaagagatacccgccgatttgctgcgtacgcgccctgatattagacaagcagaagctgatgtattgcaatctgccgctgatgtggggctggctcaagctgcgctttatcctcgtctgacgttaagcggttcattattatatgcatataaccagacagaaaattatcgccgcagtggcagtaatagtatccctgcccttggtcctatcattgatattccattgtgggattgggggatgcgtttagcgaataaacatgccaaagaacacgagcttcaggcagcactgctgggatatcgcaaagcggtgcaagatggtgttggtgagactgaggatgcgctatcttcgctgaactaccaaaatcaatgccttcaagctctgcatactgcttttgagcaacaaaatcatttacgcattatgcaacagaaactaaaccaactggggttatccagtgaatatgatggtttaagtgggaagagcacgatgttgcaagtagagtctgaattagttgaggcagagtttaagcatgcttctgctttcgtcaccttattcaaagcgttgggcggtgcgccgttgtcagcagtctccgagtcatttactacacacgcagagggacggtaa

SEQ ID NO: 433094 - DNA, 129 bp, Serratia marcescens
atggcccgcatggatgtcagcactcaatcggcggttatattgagtccggtgatggggagatatatgacgtttcagggtttgatgttggcagtgaaatggcttttaaaaatgcaaaaatatggccagtag

SEQ ID NO: 433095 - DNA, 159 bp, Serratia marcescens
atgcgcctacagggagggcaaaacgaaacccaaccggactaccaacacaagcatttaacgttgccagtggcccgctgctggcgattgctgtcaaaagacaacggcaactcatgggagattatgtcccacgagcgctacaataacccaatcaggatttaa

SEQ ID NO: 433096 - DNA, 1296 bp, Serratia marcescens
atgaagaaaaacatcaaaaatctttcatatatgttttttgtgcaaatggcaaactatgttttcccattaataacaatacctattgttgccaggatatttggtcctgaaaaattggggttgataaattatatcgcagcgattgttgggtatttctctcttgttgtcagctatagctttaactttactggcgtcagacgcgttacgcgggaaaaaaacagtagtaatcagatattctcaacaatatttacctcgcagatgttactgatttctataagcatggctatatttgcaatatgtatattcactattggtgatcttaagaataacattgcgcttgcgctgattactttttgctcgtgcttgtccttgctttttacccaaacatggtttttgcaagcttatagtgattttaaaaccattgcacttctatcttttgtttcaaaatcagcttcttgcatattgattgttgtgctcattaaatctccggacgatattttactctatgcggcgatccttaatgtaataactctaataacggcaattatcacatttggtattatcatcagtaaatatcgtgtaaagttaagattcgcaccaataaaagactgcatacgttacttgaaggaagataggcacctttttctctctagtgtagtgacaaatttgtatactactacagggattgttctcttgggggcaatatctacaaagcaagatgttggttactattcttcagcccaaaagcttattgaagttgctaaaagtgtaatgataatgccagtttatcaaattattttccctatcctttcggaaaaatttggtagggataagaatgaaggtgttgaaacagtaaagaaaattatgccgatatttatttgcatgagtttgatgatgcttatcggtatgattactttcagtaaattggctacgttaattatatttggtaaggcttttttaccgtcagcacctatcgttgtgattctgtctttcggcctttttgccgtgttttatggcattattattggcggccaagtgatgctgaatatggggctcgataaagtatttgtgaaaatacaaatcatagtttcagtatttagtttgactgctaattacttgattctgccgtatggcggaggtttaactactgcaactatatggacagtatctgaatttgcaatatcgttatatcagtatattgtgcttaaacgtatgggcatcattcttattgacagggatactttcaaactttcatctttaagtgtagctcttcgctatttgacaaaacgggattcataa

SEQ ID NO: 433097 - DNA, 903 bp, Serratia marcescens
atgataaagaaatttttgaaaatgctaaaaatcattaccgagagaagggaagagacacctaatgttaattgggttgagattaatgaaagtaataaaaagcactacaataattatgtgataccaaagttaatctggatatattgggactcagagacgttacctgaaattgtgcgaatgtgcattgagcaggttaaaaaactatgttctgattacgaagtgatggtattgaacgaaaacaatgttcataattatattaccctccctgaggttaatggctcgctccctaaatctaatgttgctgatatcatcaggttgttacttcttaaaaaatatggcggagtctggatggatgccagcatatttttaactgaaggtcttgagtggataacatcaagaatgcaaaatcacgaggcatttcttttttactcaaatgaatgtacgtctaacattgataaacctatctcagaaaactggtttatcgtttgccctagggaaagtaatttcattcaggcatggcttagagagtttgaaggctgtgcaaccagtgacgatccaaagaattattatgccaacttagagagacgagatgagctgttgcaacgtctgactcggcccgattacttgttatgttatatttcagccattgttgtacttgatagaaatcactttaatattttgtatgcatcatcggaaagcactgggcattactttaattataagcataactgggatggcatttatgttgctacggagttgctgctaaaaaataaagataaagtcgccattcctaaactgataaagtttaactcctcaacaaggaaaggggtcgagcgatttattaataaacgaatttatactaaaaagagtttattaggggcatatattgctgcacagaagaaatga

SEQ ID NO: 433098 - DNA, 792 bp, Serratia marcescens; identical to SEQ ID NO: 142984

SEQ ID NO: 433099 - DNA, 2385 bp, Serratia marcescens
atgtttattgaaaaaagcgactcattccttgaattatcctcagaagttatttttcctgaggcggctaatgctgccattttgaaacatgataaatgggcggatgtttgggagaccctgacaaccgatgccgatctgaactataccgatgaaaaggagactgtgagtctttcttctctggtcatgtcagccacatctgctatttatcaggctattacggacggctggacgatgtgcgtgggatacagtggcggcaaagactcccattctcttctgcacctgtttctgatggcattgatcagggcagtacgtaacggcacaaatatcagcgaacatcatttcattcagatgtccgatacgctgatcgaaaaccctgagatgcactatcaggcttcacaggttctcaaccagctcagaatgttcattgctgaacaccagctaccggtcacagtccttgtcgcccgaccgtctcttacgcagagctgggtcggccgcattctgactgggcgcggacttccgacctggactaattcttctacccgacagtgctcaaccgactacaaaatcgcgcccctgcgccaggccaaagctcgttacctgaaaaacgccccggcatccgttcgaagcagggtatgcctgatgctgggctccagggatgatgaaagtgcccgaagggccggaaatatcctcaaaatgggagggcaggcgaggaaagtaaccctgactgagcacggtggtgaactctatccggtaaaggagtggcgcactcaggacatctggtcttttctgatggcctgtggttccgaatcccgcttccctttaccaagctttatgccggataacttcagcctggcaacgctttataaagacgccaccggggagtgtatctggtcgccggagaaacccacccgatcctcagcttgtggggctcgatatggttgttcgctttgtacagccgtaggggttgaccattcaatggaaacgctccttcgaactgacccggagaaatacggttatcaggctggcctgagtcgtcttcagcgatttctttctaagatccagtacgactggagcctgcgggattatatcggtcgtaaagtgttcgaaggcggatatgtgcgtcttcaacccaatatcttttcttcgtccctgacagaacgtctttttcatgcctgttgcagccttgattatgttgaagcaagacgtgcggcagagcatcgcagaaagctactttccggcgaggttgacgatacggcttataaccgtcgtatggctgagccacaatttcggcttgtacaggaagcaaacgtgatccacgttgatttcctctggtcgttgcactgtttcaaccctcgcccgtttcgggcaattgagatctatcgcagggtctgggaagaggccgatctggaccttcttgaggatgaacctgacatgcagcctgtgccccgtacaccaatgccagctccactctggatgaaactgcccggaggccggttcggtacagcttatgatggactgactgatacgttgccgctgatgacctattttgacgggcaggctgaccccagggcttcacgtagcctaaagaccggagagagcagttctgtcgtcgtggcattcgaggaagaggatgagctgactgttgaagaagatacggcgtcctggattatctggcatgaatacgacgggttacgccagcgcatcgctgacggtgagtttactccaacgactgctgctcagtatcttcttcgttatggcgcggtccgaatttcaaaaggcaagggcgctgtctatcatcgtctcgcacaacggggacaaaccttttcccgcctggggataggcgacagagtgtcgcttccagagctggttgccagtcggcgttttaaaatactcagtgattctgcataccgtcaggttgtagcccggaaattgcgtggacagataaaaaagttcagattctgggcatgcgtagctgcctgtgttcagttgcacctacacaacaagacggcactcggagaaagaattttaacgttactcgaaggtgagagggaacagcaacaaggtgcgatccaggcgaagctgaaggcgggaatgatggatgcagttctaactctgtgtaaccagcgactccggatgaaagaaaatactaaccagccagaggagttccgctattaccgtgccgtaagagctcgtttcatgcaccatttatctgaatgccttaagccagagaatggcggcgttatccgtgacgttatctgggaactgagggtgctgagcagtgctcacggtacgaccaaaacaggtttttactatgtcgatagcaatcgcccgacagcaaaaggaatgttaaaccgccttctgttgaggatggtcaggcaggtcgtataa

SEQ ID NO: 433100 - DNA, 240 bp, Serratia marcescens
atgcaaaatcaaaatacacccgctcaggaaaaacacaccgtatacctttttaatgccgaacatgctgacaagacagccgccaagcaagccgggaaactcatcacgctggacattgaacacccaatgaccctcaacgatctctcgctgctgtgtgagtcggtcgcggacgctgtgggagcacctggcggaattaaatatgaaatcacaacagagcctaatggggttcaggaggaatactga

SEQ ID NO: 433101 - DNA, 309 bp, Serratia marcescens
atgactttgaaaataggaagtccccggacttccaagcctgaggggccatttgtattaatcacttttgagggggacgaatttctttttgatgacagacataatgtcgttaagataaatggcaggcctaaaaaaatggatgtaaagcgaaattattttgagtccgatctgggagaagggaaagcgaaatactggactttaaatatcgaagaggctcatcggttcaattcgattgatgaagcgacagaacaactttgtaaactgagtcgccctcatctgatcaaaattcgcaaagttgaggggggaatctga

SEQ ID NO: 433102 - DNA, 534 bp, Serratia marcescens
atggtcaaggtgataaatatcaacgggaatttagttgaattacctgagccctcagcaaagttatccaaagctgaatcacctgatggtaggttctcaaaacctaaaaataagatctctaaaatacagcgagctgagctgcgaatgaaatttggggggcgttgtgcctattgtggttgcaagcttccggaaaaagggtggcatgccgatcatgttgagcctgttcgacgcgactttgaactggtgagagccccggtcggcagcggcgtaactcatgttgcccgaagtacgggtaaggttatgcatcctgaactgcatgctatagaaaacttatttccatcatgcgctccctgcaacctttttaaaggagcttttagtgttgaaggaatgagaaatgaaattaccaaacaggttgaacgggctcgcgcatatagcgtgaatttccgtaccgcagaacgttttggtttgcttcatattgtagaaaaaacggtcgtcttctggtttgagcagtataacgaacagaaacaaaatgaataa

SEQ ID NO: 433103 - DNA, 609 bp, Serratia marcescens
atgtatttgcatcttgtgccccgtattcttcaccatatgaaaaacaagtgtactctcgtgtccgtgtctgtccctgaactgtcacttgagcttaaagctgattcgctggtggcaatgaaaccctatcccaacaagacctatcacgttggcatgctgaaggggcgacgagcattaaatggctttctggtaaagagcccacgaactttaactgagttcacaatgataacgctctgggaaatagacggctttggggaaattagtcataccgtaaaaacgctcgttcaggacaacgactatgacctggtctcccacgatgtccttttggcacatgcataccatcagacggaggagggattggggtaccgtgttcatccatcctatgacagtttagcccccgtcgattttgagccaacaatgcaatcccggtacataaaggaatccgacctttctcacgacgtatgggaaacctattcatggggggaatttctacgttcgcgtgaagagacatttcttgcgatgaccatgtcatctgctcgtttaagccatccagcattcatcagaggaaaccggcttcctcagactgaccaggccatcattatcagttcgtaa

SEQ ID NO: 433104 - DNA, 786 bp, Serratia marcescens
atgaacgtttcaactgacagcagcaacatatcgattgcagaactcaaagaagaatttatacccggtcttatgcttaatgccggggcaataggccattacggggactcggctttatcttcaaaggctatggataaatattcaaatcttctggagaaagacgcagttaccgctttatcagaagcattgagccgtatcgtaagtgccttagcggaggcagatccacgttctatcagtagcaatccatcctggttttcccgctttacgggcaaacaccttgaaaagcgcgttcgttaccaacacgcacgtgagaaggtggaaaatcttattaatgaggggaacggatatctgacacatgtgaatgagacgctactggttttagaagagctgcttgaaacatatgtgtcagaaatcaaacgccttaaaatttttatccaggcaggccgtgagttccttagggattcgaccgacgaaaaaaataatgacgatccaagccttgtcttcgataaaccgagggaaagatttgccagacgtttagctaacctggcaacactgcttgcgtctcacgaaatggccgccatacagatggaaatcactcgcgggtcttgtatagatattgctgaccgctttaacgaaactataaaagtcctggttccagtatggcggcaacacacactttcgctgttaacagtaaataacactgaccctacgattgtacgaaaagctaatcaggcgcacgaggctcttctaaaaagcctgcgacaaaatttagagggattccaaaaatga

SEQ ID NO: 433105 - DNA, 1113 bp, Serratia marcescens
atgattaataatttgagcaccaaaactgagattgttgcttttactttgacttccgctgaactggaaaagcttgggctgaatgagcaagatgaaaaggagattaaagccgtcgcggaatgcattaatgccgatgatccagaaacagtttatcgctttggccgggcaatgggggaaaacactgctaattatgcggatagcctgcttgagcaaattcgcaataaagatttagacgaagccgggagcaaattaactgaaattatcaaccttgcaagaagtgtaaacatctcgaacttaactgaaagtcgttcaaatctgccaattattggccctttgttggataaaatccgcacccgtgggaagaattttgccgcacagtttgaatcaactcgtgaacaaatcgatgctctggtttcagaggtttcggttactcagaatagcctcggttctaataatatttcgctccagcaaatgtttgatgaggtcgttaaagaacaccacttaacaggggtacatattgctgccggtaaattaatgctgggagaattacaattaaaagcagaaaatctcagagctaatgttggtaacaatcctgctaagttccaggaagtatccgatctggatactctaattgctaatttagaaaaacgtattggcgatttggttgtttctcagcagtctgctatgcaagtattgccaatggtgcggattatacaggcaaataaccaaagtcttatcgacaagtttcatagcgtcaaagaggttactgtccccaatttcaagcgtcagtttctgttagccatttctctaaatggacagtgtaacgctgtaaatcttgccaatgatattgataatgccaacaatgagttactccgtagtaatgcaaaattactgcatcgcaatgcagtagaaactatgaaagcaaaccaacggctggttattgatatcagcacccttaaagaggtgcaggatacgcttatccagacggttggcgatgttgttaaaatccagagagaaggggctattaagctcagggaaacagaaaaacaggttcttgccatgcgtgagaatttgcgcacccgactgacacaaaaaggggtagatcatggtgcgtaa

SEQ ID NO: 433106 - DNA, 894 bp, Serratia marcescens; identical to SEQ ID NO: 142980

SEQ ID NO: 433107 - DNA, 162 bp, Serratia marcescens; identical to SEQ ID NO: 142981

SEQ ID NO: 433108 - DNA, 312 bp, Serratia marcescens; identical to SEQ ID NO: 105669

SEQ ID NO: 433109 - DNA, 492 bp, Serratia marcescens
gtgaccactctcgtatttgaaatggcggatattaataaactgatcgaagaaattcgcaccgcaaaaacgttttcggtcaccgcagatcagatctatgacccggcatgctatccggggggagccctccttaacgctgagggacagactgaagaagatgcgcgtaaagctggtagggttttctttccctcatcctcaaaaattgccagcacacatctggtgccaaaagtgcttctcgcgcacagtcatggtgtatacctgatcactaatgctgagcttgagggctctcccgcatcccgcgatactgtggcttacgcccaggggatgaatccaaaactggatgaggactgggattacgcttgtgatgccgctttgggtgggtctgattgtagctataccattcccgttgagtggctggagttagcggtagagcagggttttcagaagtttcgacttcgaatgagtgaaaccaagatcaaacttgtcaccaaatag

SEQ ID NO: 433110 - DNA, 204 bp, Serratia marcescens
atgaaaatgttttttaccccttatgttcgtatcgttttctatttttgcgcattgatttttattgtttacagtttcagtgattttttccagggcgtccctgacagcaccttcttcagtgcggtcatcacgctacttgttatcggaaccattgttgcccggcatctggatcgcaaaaattctctcaaaaatacttcacagatttaa

SEQ ID NO: 433111 - DNA, 225 bp, Serratia marcescens; identical to SEQ ID NO: 376143

SEQ ID NO: 433112 - DNA, 237 bp, Serratia marcescens; identical to SEQ ID NO: 149275

SEQ ID NO: 433113 - DNA, 1167 bp, Serratia marcescens; identical to SEQ ID NO: 247993

SEQ ID NO: 433114 - DNA, 3105 bp, Serratia marcescens; identical to SEQ ID NO: 247994

SEQ ID NO: 433115 - DNA, 312 bp, Serratia marcescens
atgatcacatctctaatgaatttccgcgatttaaccggagaggcagtcatccaggcgcggcaatgcgttattaatgctgagatcgaagcggcccgggaaaaggtaattcatgctcgttcgttattcaaagcgggtatacataatgttgtaaacggtagttctggcattaaggctgcggcagcacattttctggtgataaaacgtttacagactgacactcggtatctggacgcggttatcactgataacctttgcatgttttctccagagggttatctgtatctgtttatgcaacaacgttatttcagataa

SEQ ID NO: 433116 - DNA, 282 bp, Serratia marcescens
atgaaaatcatccagctggaatccgggatgcaggtttggtctgtaacccgtaccaaaatgggaaataccaccattacaacggtcattgtccaccccgttgtcattattgaaattcatgataaccatgtgattgctcgctggaacggcaatgcaccacgtcggtttggagaaacggctatcaggggctggaagaaggagaagcccctgcttgtccgtgagcctttcggaaatgttcgcctggccgcccgtgcagaaaaaaccgctatgcaggaaaaagagtaa

SEQ ID NO: 433117 - DNA, 606 bp, Serratia marcescens
atgactgaattaaataaaagcccgtccggtttttccggagctgatgtcagtaaagaacaggctgccataagggaacttgtagaaagagtagtgaccaactatcgcagccggacagcacctgatcgggttcaaaaggcttcggtagcgtttaatgggggattaatcctgaccctgatgctggccttgacgctattgggctaccttgtggcggaattgctcagggggtatgttgcggatagttcaccctatgtgcctggtctaagttattcgcaattttcgatgctcatggtcgttgagctgtgtctatgctttcttgcatggtttttggttgtcacaggggactatccccggccgtggatatttcaggtagtcccgatggagcagtactggttttttgacgaagtcgatgacgacgatcttgcccggctttcctgtaacccttacatcaagcgctggctacttgatgaaatgtccggtattcatcgactgacctacacgaggctgcatgatcgactggagcgcatctgtaatattccatcccatctcgaatacagccgtattcaggcacataagctttccctaatcaacggaagcagtgcctcctga

SEQ ID NO: 433118 - DNA, 216 bp, Serratia marcescens
atgctagtcacattcagagtagcctcttgcctgcttaaatgcaaggagaagaaggccatgaaaatgccgaaccaacccattgttttgtgcatattaatagtttgtttaacgctgttgatattcacctggctcacacgaaactcgctttgcgagttgcggatgaaagacggaacaagggaggtatctgctatcctggcctacgaatccggtaagtag

SEQ ID NO: 433119 - DNA, 204 bp, Serratia marcescens; identical to SEQ ID NO: 142983

SEQ ID NO: 433120 - DNA, 600 bp, Serratia marcescens
atgaataaagaacaactaatcgacaaactggaacgcgtggtatgtggtcagtactcctacgaaatgcaggagcttgcgtattcggccctctgctgcattaaaggcaccccggacgactgcgctaagttccctgttacgcgtccgctgcctgacaccttagtggacgtatgggacgagatcgggcaataccttggcacaggcaaagccattgaaactcgcagttgcggcgtttcgcttctgcttcatggacactgctacgattcaaatcatgtgctgtactggcgcaatgctggcgcacttccagcagcttgcgatacgccactggctggtgggtctcgcaaactgttcacctgctcagcctgtggagtggacggtctggatgaaccacctgaaaccagttgccactgctgcacagagggggcccactggattgagagcagactcttcacctccgggcaggcagacactgaagaatttagaaccgtggcggtcgtgaaagagtgtgcaggctcaacgccggatgatcggctcatctggagcgtgattgaacagctcaacggcgaactggcggaaggcgataaactgtttaagcgacgctga

SEQ ID NO: 433121 - DNA, 945 bp, Serratia marcescens
atgaaactttcccgtcagacgacttctgatacttctgttgatggccgttcacgcgcatatgcctggggccgtgtccattatttcattatcgaacatgcaccaatggctgagctggtcgctattgacgagctgctggaaaaagctggctggagcaatgacggctgtccgaactatgagaaagatgacgagtttggtaatgctggttacagctgtggttactggatcgatattgacagcgtgggaagcttcaaggctgactacaaacgtcttaagggagagattagtgcgcatatcgcctcaaaggcggcagaggtggagatccgcgtactggactcgatgtccgacaaagaatgtaaagatgttgcctcggtggcatgtactgttcgccgtgacttacgtacgcagtccgaatcgcttcatccactgcgtactatcgtaacggttgatcattacaatccctatgtgaccaccagccgcccgctgagcatttccgcctggacacttatccacgactgtctgaaaaccggcaccatcaatgacgtctgttcacgattgagttcattaatcctgcactctgaagccgcgattgcccgttgtaagggaagctccgactactcttcggaacacgctcagctatcgttttttgctggaaacgactatgtcaccagacgcacccttgttgatgcagctcacgaagaggctctgcgaatgaaccgccgctttgatgaacgtattgcaatgaacgcggattctgatgccagaaggctccagtgcgaattcaacctgagcaaccatgttgtacagcgtcggaccgttgaatctgctcatatccaggcaatcaacgaagacgtcacccgttcacagacggaaccacgctgccctggaaagcttcttctgaaaatgaccagtcatgaggaagtgcgggactcactgagcacctgttag

SEQ ID NO: 433122 - DNA, 1185 bp, Serratia marcescens
atgtccgcaatcgaaactgaagtaaaaaacaacagcaacgaaatcagccttcgtggttacctggaacgcactggtaacggtgcccgtaaaggtaacggccttatcattgacccttcggttgttgtagagcaggaaggctttaacacccgcacggccggtatgggcgagctctactattcaatgcctcacgttgtggaacacctgaacagcctggccgatgcctatatggaagacccgttcagcgtgacgcctatcgttgttcagatggttaatggcgtacctgtactgcgtcagggggcttgccgtatccgttccatcgctattgcaaaccgccagctggaagcagaagggcgtgaacgcattactcgtattcgctgcgaagagtttcgcggtagcgcttcaaaagcagaactcttcaccctgaccggcaactccaatctggcgctgtctgtcgtagctgaagcgctttcaattaagcgtctggttgaagataaagaagagcctaagacctttgcggaactggcaaaaaaacgcggtaaatcagagcagcatcttcgccagatggttcgcgtactggacctgccttctgaactacagaccatgcttgttagcgatcaggtgagcatgtacgttgcgctggacgagtatatgtacagcggtgaggatgcggtagataacatcaacaaggcaatctccatctatggtaaagcgacgaaaaacacgctgaaattcgtcaaagctgccaaggtagaagagcgcatggcagatccgcagactccggaaaactccggtgatgagcaaccggcaggtaatgctaccgttaacacgccggtaccggatcaactgaatgatgaaagcaatacagagacgcttgttacgccaccggtacaggaaccagctccggctccaaaggacagcgctcctaaacagaacccggtaggtaaagcaccatccatgtccagcgttctgaacaaaaagaccgtgaccgtcattgccgacaccgcgatcccgatttttgaacgtattgctgaagaagccaagcttaaagaaggtgaatctgtcagcactgatacttacacgcttgttctgaccaatgatgaaatgaacgatatcatcaacgctcatgctgacctgaaagagtacctgcgtaagcatgctgagaagatgaacaagggacaggcatga

SEQ ID NO: 433123 - DNA, 282 bp, Serratia marcescens
atgaagaaggctgttagcaacgtagacaagactaacccactgccagtcctgacggattcggtgacacgggtaagtattcagtgcacggcaaaagatgaaaacggggcagggatcgaagtgaacatcctcgacctgattcaggatcatgatacggatgaagtgaaagtgcagtttgggagctcgcctgttcaggctctggcgatgctccgccgggttatgacagcactggaaaagcaggcaaatgcagaactgcaacagaattcctgctcgcgtatgcagtaa

SEQ ID NO: 433124 - DNA, 702 bp, Serratia marcescens
atggtaattacttattcattatcggaaacggttaatatgtttttacgcgagattattgcatctggacttgcagttttttgcgcatggtgcgttttgtgtcttttctctgatcaggagcgaggtaaagaggttcctgtttctatgaaaaaaataacttcaaagtcagctttctcctactttatcagttctcaaattgccgcttttactatctccttggtgggttccatcttaagcacgaaatgggacaacatcgtctggaacgatgaaataagacagttttatctgcatgtaggatttgggctggtaacttgtgtattctgtctgcttgtaatcttgcatgagaaatttatcaaaagaaatttaaatgtttattctgattattgtggttcactggcagttagtctcacaggagtctttgtactttctgcgctatatcttacattttcattaccatttcattatgaagaacgcctacttaatgatgcatccttggtggcttcggatggcgttgaaaattcagtcgtttttgcagacggtcgttactgggtttttgaactgggcttaccatatttcaaacagtcattgctcaaagaggtaagaaggggcaggtaccagctaatctgcactacagaaaaaaaaccaacatgctggtctggcaaaaagcttcccgaaaaaccaacctctttgaaagctagttcataa

SEQ ID NO: 433125 - DNA, 297 bp, Serratia marcescens
atgaaaaccaatctggcctatgcatctaattgctccgattctgtctactcctatatttatcaggcactgcaacaacgctctggtgccgagaatgaaagcctttatcagcaggccatttccagctgccgtacagctaaacaaaaaaagaaactggccgggtattatgccggtccatggcagctgctattcaacgcgtggtgtaacaatcgcgtccctaacacagcggtgctggctcttctactccagcagtgcttatctcatttccagtgcgaagaagttatcgcagcctggcagtaa

SEQ ID NO: 433126 - DNA, 438 bp, Serratia marcescens
atgtacagaaacgacagaaacgtggattccttcaacctggttaatgctcttcagccggtctttcgtaacaccggctgtgggatgtttgaatatgatcgtaaaaaacagaatgaaaccgctgattcaatcttacgagcgttggcgttaaatgccgatttcgcgagggccttaaaacagtacgtccggattaattctgtacgacgggttgttcagttcgatgacggctcggttcgctatggtattcatgccgaatttgaagggcatgataaaatcaattccttccgtatttttaaagatgaagatacagacgcatttgactcctatttttattcggtttgcgataataaagctgagctggtggattttaaaatggactctctcgatattcaattgcaggcagtttttgaaaaggtgacaggtatttttctgtcacattaa

SEQ ID NO: 433127 - DNA, 537 bp, Serratia marcescens
atgaaaaacgtaaatattttgaataccgatatcgcggccattaatgctctttctggcgtagaactgacagacgttctcactgccgggtatcaggtaaactggtcaggagaaagggaggtttcgctggtgggctttccgtgtttagcaagcaacaagcagccggtagaagttggtcccggcattttcattaaccgcgtgtacagcaaagacagccaatctctgtgcgggaaattgcgctatgacctgtctaatggtctggcgtccagcgcattttcatttttctcccattcaggctggtatgggggattccgtgtcgtatccttccgtgacaacgggccagctgcattgatcaacattggcattgtccatgaaaatgttttgaatgcattttgtgctgacttcccccgggctaatgtgagcgtaaaccgttttcattgtggcatgacgcttgagcagatccgcatgttcatttcagacaccgcttacgatatgccgctttataacaacgagtctgactttcgcaggctcgccagttag

SEQ ID NO: 433128 - DNA, 285 bp, Serratia marcescens
atgaatacatttttatacgtgctttgggcctggattgttgtgctttttatcgccaacaaactgctcgcaagacgtaagcccaagacggttaaaatcctggtacagcgcaacgggaaagccgcagaggttgatgctgtagtggttcagggttcaaagagagctaacaacagttctgttgcggacagcgacgcggtagatagttattttgaaatgaatccttactcccgcgaaaaccaggcgaatggttgggctatgctggccagagacgatgaccagcttaaataa

SEQ ID NO: 433129 - DNA, 354 bp, Serratia marcescens; identical to SEQ ID NO: 26525

SEQ ID NO: 433130 - DNA, 732 bp, Serratia marcescens
atggatgctttcaatctgctgtggagcattacgggtgtagctttcattatccttattttcgtcgtgttgctgtgtctgttgggttttatgacctctgccatagcggaacggcggactgcaaaggcaattgaatctgggcttcctgaagaagctcaggggctacttagtgatctcacctttcagttgtcggctcatagcactacgcaggttgatcacattctcgtagccccacatggtatatacgtcatagagcagaaaaactacgtaggcaagctctacggtactctggaggaaagccactggcggaaatggactcagtcccgaaccctcaagttgcagaacccgtttaagcaaaaccaggggcacatcagggctattcagtctgctcttaaggctagagaactggaatgtatcaatgtcgtcatcataaacggacgttgtaagtttgatggcatcaagccggaatggttatgtatggggatggacgattttatccataaagtcaaacaacgacgagggctacggttgttcacaccggagtctgttcagcacatctgttcggtgttgaagtcaacaaggaagtcgccagggctctatacggaccttactcatattcacaacataacgacaaagtacaaagccccgatgaaattcgagcaacgagtaacatacattctgctcagctttatccattatctgtgggcaagtctgttcactaagccgaagccttag

SEQ ID NO: 433131 - DNA, 1182 bp, Serratia marcescens
atgttaagcagtaaaaaaaggaagtcccctacaaatatcaaagaatcgctcaatgataacgctgaccgtttttataagatgtttcgcattcataccacggcaaaagttgctatgtcgctaattgccatgaccgctgtagggttttctttctacaatctttacgaacaatggcaggacgctgaagggaagaaagaccatatagctgtaatacggatttctggcgagatgggtaccggctcggaaacgggcgatggaacagtgatcgcaacagctcttgccaaagcttacaataatccccatgccaaagcagttattatcgaggcagagtcaggtggtggtggtccctctgacgccatcattatttaccgccagataaacgcgcttaaaaaccaccagccacagattgaacgcgtatcagatgccggtggctctctttcatctgtagccgctgacaagagtaacaaaaccgggagcacagaacgtggcgatgaagcacggtcgaagcaaaactccctcgaagtactctccagcggtaccggtcgttttttctctgatatcgcagactcatataaaccaatcatcgttagtgtgaaaggcatatgcgcatccgcatgctattacgcggtatcgcccgctgatgcaatttatgccgacagtaatgccctgatcggttctatcggtgtgcgtatggaccactggaatctgtcagagatcatgagcacagtaggcgtcaagaatgagccccttacggccggtgagttcaaagatgctcttgaccccttccacccattgtccgattcaacgagggagttcatgcagaaggagatcctgaacacgatgcatgaaaaatttataactgatgttgaacttggacggggtaaaaagcttctctcgcgtcatgatgccgatgctgtttctctctattcaggccgcgtatggccaacacctcaggcagttgtgtacggcctggtggatggagatcttacgtcagtagagatccgtacacgtctttcaaaaatgtactccactgacacgttcaaaaactacaatgagcctcatcgtaatctccgttctgcactcggcatgctgatgagcctgtcttcaaatattgagagccttaccggtaccactacccgcttggtagaatctgttaatgccaccagctacccctctgtgaggtaa

SEQ ID NO: 433132 - DNA, 663 bp, Serratia marcescens
atggctgcggataatacaagcagagcagcagtgctcagaacaatgcttttttttggcatggtcatttattttggttacagcttggctttccagaatactgaggagctcaaatatcagattactcaggaggttaatgcaagccggtccatcatatcaaatgaccgttggaagtctgttattgcaaatagtgaagcgactttaaattggttggtacatgactataagttaattgactatctgaatactattctgatccctgacaccaaaaaaccagccagaggtattaacattgttgctgaaaaatttacctctattaattacactatggccaaaaacatacccctcttactttatcagtccattttccggtggaacttaatcctggggtggctaatcgtttttctgccctatctatttgccatgctagcagatggaatgtaccagtggaaattgaagaggtacgtatttggtaaggttacagttcagttttatcgtatttggtttcgagcattttgggtgatcagtgctttaactatggtctacctggtcatgccgaatatgtcactatttaacaatatcgctcaacttttcccaccagtcgctttattgatactgggaattgcattgaatcgcttgtggtctaactttcaaaaactcatgtaa

SEQ ID NO: 433133 - DNA, 1110 bp, Serratia marcescens
atggatgaaaaaattgtcctgacgcgccagcaaattttaagctctgcactaaaagtcagcaaatgtcgctcgctcgtaaaaaggcgctttcagtctttgggtttaaagtacgcagattctcaggaagttcgagatcggctaactaagatagaaaaaaacgcgtttcatcatttgggaaaattttgtcagagcaacgatatcgattccctattctccatggcaaataccctgtctgagcttttccttttaaagggagagttgatcacgactgatccctttggggaccgtgaaaccagctactggtcggtaccacaaggttcatgccatgaatggattcaatcgctgaccaccagcgaaggtcctgaacgtaaattcgttagtttccgtatttctttcgataacaatgacgaacggtgtgatcttgtaaaaaagaatgcccgtatgcttggttgttatcttttgccctatttcgtcgatttgacacgcacggtgggcgcattcattaatttgccaggtagtgtctcttttaaacaagtacagcgcatcaaaccccagattcatccagaaacaacacattgtcatatagttactattgaggactctccctttctttctcggttaaaatttaaaatcattactgccatagatcagcttcctgaccctaatggcctttatacaaacacctttaacagcattattgaccgtgcactgctgactcatctcaaaaccgaacaggaaaaaatagatagtccaagagtctgcaaaaatgtgatttcggcttttgccgactcaactctttctctgccggtgtttaacatcggtctaaacgagcagtacagatactggacgccgtggggcatcaactttatagaattttcccgccaggccgcaaaagcaaggaccgctgtatttgttcctgatgtgggacagatcgagtggaaaagcgcagagcataaagaactggcggagttaagcctcatcgaccaaatcatacctaaacagtaccactggctcctgggtatcccgacgatgtggcgtaacaactattgcaatcacgatcagaggctagctctttttcgtgaatggagggaaagcaatggctgcggataa

SEQ ID NO: 433134 - DNA, 2085 bp, Serratia marcescens
atgtcagattcgaagaggactaacctccatgcacaagagaatttttatcggcctattcttgagtatcgtagtgcctcaatacttttgatttgttcggtgtctatgctttatatgggactttcttcagacggactggacatcgccccaatagttctgttcacctcaatattgctttttttgctgtgcctttatcgttgcaaaacagcagcgccatttttgatggctcattggcgtgtattcaagcgacatttcatgttcgttagtcttgattcactgcgtgtaattaacaaaagtaactttttctccaatgagcgaaagtatcgtcaactggttcaggattatcaaaataaaaataaggatatacccgagcgaaagtcctatttttgtgatgggtttgagtggggcccggaacatgcggatcgggcatatcaaatagctaacctctccagtgataaacgtgagatcgagttgccattcgtcttcaacccaattaagagacattttgacgcaatggctcgtaagatgggcggcagcaatgcaatttttgctgtggaacgtagggaacccatatttgtaactgaagacaattggtttggtcatactctgataaccggaaacgtgggtaccgggaaaacggtgctacagcgtttactaagcattagcatgcttcatcttggtcatgttgttgttgtcatagatccaaagaacgatgcagagtggcgagagtctctaatggaagaggctaagaccctgggtcttcccttctataaatttcatcctggccagccagcctcttcggtctgtattgatgtctgcaacacttatactaatgtttctgacctaacatctcgtcttttgagcttggtgacagttccaggtgaggttaacccattcgttcagtatgccaaggctctcgtttccaatgtgatttccgggctttcttacatagagaaaaagccttctatttatctgattcacaagaacatgaaaagccacatgtctattgtgaatcttacagtcaaggtaatggagtcatgttacgcgagatattatggttacgatgtctggaccgaaaaagttaagtacgtcgctaacgataccttgccggtacgtttcaagcgtctcgctgaatggtttacggctcatttcatgaattacgaggggtccgaacaaatagactggttagatactgtttcccagcttattgattactcaatgtccgacccagagcatatggctaaaatgaccgcaggtattatgcctgttttcgatatgctcattgaaaaacctttaaatgagcttttatctccaaacccgaactcagtatcatcaagagaaattgtaacaagcgaagggatgttcagcactggcggggtgctatacatttcgcttgatggcctttcaaaccccgatacagcagctgctatttctcaattaataatgtcagatctgacctcctgtgccggtagtcgctacaacgctcaggatggtgatatgtcagctaattccaggataagtatttttgttgatgaggcacactcagccattaacaaccctatgattaaccttctggcgcagggtcgtgcagcgaaaattgcactgtttatttgcacccaaaccatctccgactttattgctgcggcaagtgttgaaactgccaatcgaattacggggctctgcaacaattatataagcttgcgagtcaacgatactcctactcagacgcttgttgtagagaactttggtaagagtgcgataagcacaaatatggtcacttatacgaccggttcagaaacatctttgccgcataataacttctcaggttcaatctcagaaagaaagcagacaaccttagaagagagtattccaaaggatctcttgggtcaggtccctatgtttcacatagttgccaggcttcaagatggcaggaaggttgtaggccaaatccctattgctgttgctgagaaacaaatgaagccaaacacaactctgtcggaaatgcttttcaagaaggtcggaaaagttactttgcgtcaaaatctcgatatcaaaaatcttaataaatttctaaggaagttacattga

SEQ ID NO: 433135 - DNA, 3147 bp, Serratia marcescens
atgaatttcagggcgctgtatttatgtattaaacggattttggggatattctcatctcaggagaatgatgcaacctctgtaatgattgaggatatatcaagcctctctccttttgcgcaaattctaggagatcagaagtacactgttcctgatcatccaaatccagaagtcctgaaattcatcgagtatccaactcgtccgacgggcatacagacatttaatgaacagtcaatcctgtctctgtatcgggaaaaactgcactcaatttcaatgatgttagctatcagcgatagcgacatcagggacgatgcttatacatttactaatttagtactaaagcccttggttgaatatgttcgctggatacatcttttgccagcttccgaaaatcatcatcataatggtattggtgggttactttctcacagcctggaagtggccatactctctttaaaaaatgcgcatcactcagaactgagaccaatcggatatcaagatgaagaagtagtccgtagaaaagtatatctctatgctgcgtttatctgtgggttagtccatgatgccggaaaggtttacgatctcgatattgtaagcctgaatttagctagtccgatcatttggacgccaagctcacaaagtcttcttgactgggcacgtgaaaacgacgtggttgaatacgagattcactggcgaaagcgtattcataatcaacataatatctggtccagcgttttccttgaacgaatcctaaacccggtatgtcttgcatttttggatcgggtaactaaagaacgtgtttattcaaaaatgatcaccgccctaaacgtttatactgatgggaatgactttttgtctaaatgcgtgaggacagctgatttctattctactggtacagacctgaatgttttacgtgaccctattatgggtctgcgttctaatgatgcagcagcaagggccattagtaccatcaagcacaactttaccagtatcaatatcaacaattacaatgctaagcctatgcacatcattatcgtaaatggtgaggtataccttaacgagaacgcattccttgattttgttctcaatgatttcgaattacataaatataacttccctcagggagaggctggtaagacggtactggtagaatccctagttcaacgtggttacgtcgagccctatgatgatgagcgtgtcgttcactacttcattccgggtatctattcggaaaacgaaatatcaaacatctttagaaatggcatagggaaactagaattctataaccttcttaagctaaggtggattggtttaatctttgattcctataaaatccctgactcagtgccgggtctttttagcgttaatgccaataaagactttatttacattgacgagcaaaaaacagttactgaatacagaagaccagtgcccggtcgggacgctataactaaaattactgatactgttgagacggctgttcttaaggttaatgatttaggccgctcctctgcctctattgatgttgatatacattctaagaaaaatgaaggctcatccgacgattttgaaaagaaagccgaaagtgataatgaaattgataatgacacgcagatagttaaatctgagggtgaggaagcagctgatcctgtcatttctgatatagaagaaagtgaagatgaatcggcaaaggacacggaatcccatgtcatggtcaaccaacttcatgaactccttttaagcgctccactttccaatgactatatagtgtgtgttgatgctgtcccctacctcaacatagatgccactatggcattgctgccgggattagatgaaaaagcattcagtgaagagccctatttccaactgacattcagagaaggctctctcgatggaatgtggatagtaagggacattgacgatctgcgtttagtccagctcggcgataactgcgccgggttccagctcacctatcatgagccaagaaggccaacaactttaaagtcacttttcaatacttctatgtatcaggcattagtgattaatgatgagtcttctgttgaaaactctgccccacgtccaaagcaaacgcttgagctgcctcccccacgtgtaaatgcagtcgaagaacattctggcgacgtggaatatcatggaaccgatagtgcatccgcgactggtccgctgaaaactgaggcagtggaatatgaacattatcaacatctttttgagaaagaagatgaagagcatgagatcattgattataccgatttcacacagcttagtgtttctcggccagaagtcggtagttgtgcaacaagctcttcggtccataatgaaaagcttctccccgagccgtcagaattaccagaacttaaccgagaacagaacgctgatccccagggtacgattgaacgctctatggatgtttctgtaggacaagaaaactcagaaccagatactgagggtaactgcccaccaccagctgaagttgtgtattcccagaccgaagcagccgcaaccagtgtgatggctagtgaagagcccgccttacctcctgtacttgaagaatcaaatggagagcatgcgcccacagacgctaaggggcatcatctttcgccagcactggccagactgttcgccccaacagcaccggtagaaaaacaaaatcccaagcgcaaccggaataaatcatcggacaaagcagaagtacaaaaaccagcatcacctgtttctggtcacaatctgaacagtaaagtctttgcatctactgaatcagaccaaaatggtgaattctcgcttataagcgaaggtgacgttacagagcttgaatttgtagaaattgcgttagtactgcatcaaattctgtccaaaatggaggtggcgtttaaaagaaagcgcaaaaacagatttatggtaagtactcctaatactctctatctgacccaatcttgcgtggaaaaatttgggtcgcagttagaggctcaagatcttttcaataagcttcctcagtacctcgttaattctggtgctgtgatcaatacaaaatgccatgcatttaacatgcctactttgctggccgcatcagaccgggcgaaagtggacattgaacgaattatcaataacctgaaagaggctgggaacctataa

SEQ ID NO: 433136 - DNA, 738 bp, Serratia marcescens
atgaccgacgcaattatcacggacaatgagcgtattaacattgaacaaaaagatgtaatggtaaaaggttcaaataaaaagcaaggcgtaaacgctcaaacttctactcaacgcagaccagagcaccagggtatggccaaagttattattaaccccggcaccccagactttaaccggtttttaactgccagaaatggagcagtcatcagaggttttgatgatgtgagtatcgctatttcctctctctttaaaacggttgatgcagttaaacatcctgaccttgttcaggctattcaggattggttcaacgaactgcatgaagaaaacaataagatgaaagaaaatcttgttgcttatattaagtcaattgagttcgacaagaatgactcattcatgtcatcaactcagtttgtacctttcagttttgaaccagtacaactcaacttcaataaccacaacaccatgaggttttacaagtacatcttcgagatgaaccagctcatgaacacaatgtatgagtacaactcattgggtttactggctgtaagcgactatccggttatgtctcacaacattataaagagtattaatttatatgttgagaatgtgaaaaagactctgaatgtttctcgccgtaaggatgggccatacagtccagcagagttcatcaccaaagtaatgcaatataaaagtgtgcaggcatacattgcagccgaactgtcaggcaaacgtcgataa

SEQ ID NO: 433137 - DNA, 981 bp, Serratia marcescens
atgacgacatcaaggctaatcacagccgcacatatcgccaaaacagtaagcattctgatcttattattttcctgttcagccagaggagatggtgattgccgtgcaatatggcacaatccactgcgcatcgagcaatccggcattaccgtcacggctggcgccaaaataggcgatcttatcggccagggagaatcttacttttcagtaaaattactggaaaataacacgggattctccttgggtgagcaaggcgacttggttatgcagcccttctccgatctgactgcgacagatttaaagtacaatggcatcactgtctatcaaacgagttggaagggcgtcggcattgccatgtcgcttaatgacaaaccgggcctcatcgagttctatggtccccgcgagacgcctgtcggctatatcctgggcgctaactttaaacattatctgatcaagacaggcgatatacagcctggcaccatgccctcgtttgcgcctttctttttcaactatacctgcttaagagcctcaaatgccaggagattgggccacgtttattatcctgccgtcaatattgccgtcgagggctgtcgcctgaacacaccctcgaaacaggttattttagacaaggttaatcggcgggtattttccggtcctggcagcgtggccgggaatactcccttcaacatcgctctggagtgtaatgccaacacaaaagttgatttggaaatacgcggggaaacggttaatggccttcatcaagtcttggcgattaccccctcaaaagagtccgccaccggcgtgggcctacagattctgcacaacggcgttccctttgaactgggctccgcggccaacgtattaaacgaaacattaatagggataaatgaaatcccactcagtgcgcaatattaccaaactgaagagaaaatcacgccgggagaagtcaatggcatcgctcatttcaccgtctcatatcgctga

SEQ ID NO: 433138 - DNA, 2469 bp, Serratia marcescens
atgacgatgaataacaaggccaccaataaaacatcggtgctgtttttttgtgttctatcttcacctgtggttttagctgaagactactttgaaccctcagcgctgaacagagattaccagaccataactgacttatcccactttaatagtgcgcgcagtcaattgcctggtgagtattgggttgatatctatttgaataatgtatttttcgctaataaaaaagtgtctttctattatgtggatggtactttgcagccccgaatttgtcacagcgctctggttaacctcggtgttcgcatggacaaactggaagtaaacaatgacaccgaccttgcctcaacgcctatcagcaagattattcccggcagtcaggccaagtttgattttaatcgacaacgattggatttaaatatcccgcaggcttatatcgaaaatcttcctcgagactgggttaaccccgcactttgggatgatggcattcgcgcatttttaatggattacagttttagtggtaccgagtcatggaaaacgaaaaataaaaaagataatggaaatcaatatttaaacttgcgcagtggttttaactatgatgcctggcgcttcagaaactactctacctattcaaaccaaagcagtactaaatggaaaggtatcaacacctatgccgagcgcagctttcgggacagcaaaaacacgctgaccattggcgatagttcaacatcgggcgacgtttttgacagttttcaatttcgcggtctgaaattagcaagcgatcccagcatgtggcccgacagccagagagggtttgccccaacggttagaggtatagcgcaaagcaatgctgaggtcactataaaacaaaatggctatatcatttatcaaacacatgtacctgcgggaagttttgaaataacggatatctaccccaccacctccagcggtgggctgcatgtgatcatcaaagaagccgatggctcagaaaggagtttcttccagcctttttcctctgtccccatcatgctcagggagaacatgataagaaatgaattcacaatgggggaatatcgctctgcgcgaagcgctaaccaaaagtataagtttctacaggcatcgacgatttatggccttaaagatgataaaacactctatggtggcgccattatttcggaaaagcaccagggaatttctgccggcattggcagcagcctggggcatttcggctccgtctctgccgatgtcactcacaccaaaagccgattagccacagggcaagatcgtaaaggacaacaataccgtatccagtacgcaaaaaatattgaagcaacgggtaccaactttacgctggccggctatcaatactcgacgtctggctacttaagtttctcgcagctcagtgatatgaatgccaacattgaaagaaactggctggcgcgcggcgtgaaaaaaaatcggctggttctcaatattaatcagcctatccgtgatttcggcagtctatacatcaatggttaccaacaaaactattggcacagcgatgccgttgaacgaaattttctcatgggattttccacgaaccaatctggagtgagttacaatattggattgggctacaacagcggccgctatacggacaagcccgacaagatcgccacgcttaacgtccagattccgttaagcaaagggcaatcaaacagctggatgaattatacctcgagcaagagcagcaaaggcaaactcaatcagcaattagggctaagcggtaccgcactggaaaataaccagctcagttataacgtctctgcagctcaaagcggtactcgtgacggctattctggcaacagttcggcttattatcgcagtagatatggtgaaataggcgccggatacagctttgataaagatgtgcagcgaataaactacagtttacgaggcggcgccgtggttcatcgaaacggcattacactatcccaatcgctgggtgacactattgctttagtcgaagtgccaaatgcagacaatgttgaaatcatcaacagtaccggtgtcaccacagattcgcgaggctatgccgtggtgccttatatcaacagttatcataagaatcgaattaatttaaacccgcagtcctttgatgactcagtagaaatagagaacaatagccaaaccgtcatcccgacgaaaggcgccattgttgtcgccaactttgcatctaacataggaaaccgaattattttcaaagtacatcatcgtgggacggaaattcctttcggcgccgttgccacattgcgcggcgacccagcgaaatcaggtatcgtcggcaataataacgcggtctatatgagcggcatgccagacgctggaacaataacattgcgttggggagcgggaggaagctgccagggaagttacagtatagagcctaacgattctgcctcaagagttaagcagattagcttgcaatgtgaataa

SEQ ID NO: 433139 - DNA, 2022 bp, Serratia marcescens
gtgaaccacgcccccatccaaaccgcaacgctaacctggaacgaacagggtacacctgtttcgaaacagtttgatgacgtctatttttccaatcaggatgggctggaagaaacccgctatgtcttcctgcacggcaaccggctgccgcagcgtttcgccactcacccgcgcccgctgttagtggtggcggaaaccggattcggcaccgggctcaatttccttacgctgtggcaggccttcgcgggcttccgccaggccgagccggacgcagcactgcaacgcctgcactttatcagctttgaaaaattccccctgcagcaggccgatttggcggcggcgcatgcgcgctggccggagctggctccctatgccgacgagctgcgcgcccaatggccgctgccgctgccgggctgccatcgtctgctgttggccgaaggccgcattacgctcgatctgtggttcggcgacgtcaacgaactgctgcctcagttcgacgccagcatgaataaccaggtcgacgcctggtttctcgacggcttcgcaccggccaaaaatcccgacatgtggaccgagcaactgttcgccgccatggcgcgtttcgcccggccggaaggcagcttcgccacctttaccgccgccggcttcgtgcgccgcggcttgcagcaggccgggtttcaggtcaaccgttgcaaaggcttcggccaaaaacgtgagatgctcgccggcggtctgccggccgatacgcagcctacaccccacccggcgccctggtatcggcgtccggcggcggacaacaccgccgacatcgccctgatcggcggtggcgtcgccagcgcgctcaccgcgttggccttattgcggcgcggcgccagcgtcacgctgtactgcgccgacgagcaggcggccgagggcgcttccggcaaccgccagggggcgatttatcctctgttgaacggcagcggcgacgcgctggagagtttcttcagcgccgcgtttcccttcgcccgtcgtcaatacgacaccctcttgcaacaaggcgtcacctttgatcaccagtggtgcggcgtcagccagctggcctacgacgaaaagagcggggccaagatcgccaatatgctgaaaaccgactggccgccggcgatggcgatggcggccgaccgcaagacgctcagcgaactgtgcggcgtcgataccggctttggcggcatcacctacccgcagggcggctggctctgcccggccgagctgacgcgcggcgctctcgcgctggcgcagcggcagggtctggtctgccgctaccggcacgacgcgcaggcgctggcgcgtgaagaaaacggctggcgtatcgacttcgcccacggcgaaagccaccgccatgcgacggtgatcctggccaacgggcaccggttggccgagctggcgccgacgcaagtcctgccgctgtactcggtgcgcgggcaggtgtcgcacattccaagctcgccggccctcggtcagttgaaacaggtcttgtgctacgacggctacctgacgccggtcaatgccaacaacggccaacactgcatcggcgccagctaccagcgtggcgacaccgccaccgactaccgcgagcaggagcaacaggaaaaccgcgagcgcctgctgcgctgcctgccggaacaggcctggccacagcaggtggacgtcagcgctcatcaggcgcgctgcggcgtgcgcagcgccacccgcgatcatctgccgatggtcggcgcgctgccggactatcaggccacggtgacgcagtatcaggatttgcagcggcagaaccagcgtggcgaaaccgtcgccgaggcgccggtctatcccggcctgttcgctatcggcgggttgggatcgcgcgggctgtgctcggcgccgctggcggcggaaattctggcggcgcagctgttcggcgaaccgttgccgggcgatgcacgcctgctggcggcgttgaatccgaatcggatgtggatacgaaagctgctgaaagggcgtgcggtttaa

SEQ ID NO: 433140 - DNA, 2217 bp, Serratia marcescens
atgagccaagcggctaccgcctacgcttacccatggaacgaaccgcgcccggctgttgccgggccggtaagaccgcttacccgtgatgaactcgctcaggggcaagctgttttaaccaatattcgccgcctgccgcgcttcctcagcgccatgttcctgacgcgttacaccaacttgctcaagagcaaagggctacacgacgccaataaatggctggtattccagttcgatcgccgcatctggccgcgcctgcaaacggtgagcgccaaaaatgcgatgaacctcgccgcgtcaatgcggttttctgctgaagttgataattacgcagctctgcccggcatggatgacaaagagttacgccgccttgccgatcgcgtggccggtcagcttctgcagaattacgcagattactgcgatgagtttgtggcggagaacggcggcgacaatgccgggcttttcgaagatgcgacccaatcagaattttatggccgcattgccagtatggcgcgcgccttcaacatcaccccgatgcactggcgcaaataccgcaagggcaaactggatgcccggtcagcgattgccagcctgtcacggttggttgattccgagtggtgggaacgccagttaaagtcccagcgcacgcgctggcgcgaggcgttgctgatcgccctgggtaatgtgaatcgcggggcgtcgtcgtatgccagtaagcaggctattcgggatgtgaaagcgcgccgccagtccaattttgattatctgaacagccgcgagcttgagaacgtcgaaaccggcgaacgcttcagcctcatcgacaaggtgatggcaagcatttctaacccggaaatccgtcgtatggagttaatggcgatgatcgccggtgttgagcaggccgccgctatccgtggcgataaagggatgtttatcaccatcaccaccccatccaaatatcacccgacgcgcgccgttggcaagaacagccctaaggtgcattttaatcacaaatgggatgaagaggcgtacacgccaaaagacggccagcgctatcttgtgaagctgtttagcaagatccgcacggcgtttaaagatgcgggcctgcaggtctacggcgtgcgcgttgtcgaaccgcaccatgatgcgacgccgcactggcatatgatgctgtttacctccaaaaaacagcgccagcaggtgatcgacatcatgcgccgttatgccatggctgaagatggggacgaacgcggcgccgccaaaaatcgttttgactgcaagcacctgaacaaaggcggtgcggcgggctatatcgccaaatacattgcaaaaaacatcgacggctacgcgctggacggcgagcgcgatcatgaaaccggcgagctgttgactgatacggcggccgccgtcaccgcgtgggcgtcaacatggcgtatccctcaattccactttatcggcctgccgtcgcgcggcgcatggcgtgagtgccgcaagatccgctctgtcagtctggccgatgagtttgacgaaaccgttgaggctgtgcgcgctgctgctgatgccggtgactttgccgcttacattctggcgcagggtggccctaacgttgcccgcgacgatcagactgtgcgtgtagcccgccgggttgccgacgagcgcaacgcctatgacgaagaagtgcagaaaattgcggggatttttgccccgcatatcggcgccgatcgcgtttatgaaacccgcaccacgcaatggcgcatcgtcgctaaagccgttgccgttgagcctttgactttgaaaagcgcctccggcgcgcctcggagtcctgtcaataactgtgggttggtcggcagcggtggcgccgaaaatgcgcaggatgggggggctgtagaggccgtggcggtgatggaacatgcaccggaaacccagattgactgggatgacatgaccgttgcacggtctgttatgacgcgtttacgggcaaatgccccgcagataaacaggcagcaaagaggaattgacccatataagcgtatagagcctgctgcatcggccagattgaccactgccgagcgcgatcgcgtatccaaaatttactcagagctggcactacacggcatcgagccgacgcgctgggaacttgaggcactggcgcgcggcgctaaagtcaaatttggtgatatttcaatgcactatccggcggttagcgattgggcgggcttccaataa

SEQ ID NO: 433141 - DNA, 459 bp, Serratia marcescens
atgcgctacaaacgagacttcttcccggccgacatagcgatccgctgcatggccgaaacaggtgttaagctcgagtggttagcgaccggtaaaggcaaaatgtatgacgatggacgattagatgtgttggagttgcccagcaaaaagttggtagacggtgaagtcttcgaagcttcaaatttagtgcttgataaaagtttcttcccagccagccagcaaccgcctatcaaaccagtaatgatctatgacgcctcaaaccaatatgtcattgagaccgaatttaaagaagtttatgacggtaaatggctagtgaacattgaaggaaaaacgagcattcgcgatctgacacgcatccccgttaataaagtgcgtgttactggtgctggcgtgcctttcgattgtggtattgatgagatcggcattttaggcagagtaataagtaaaatagagtattactaa

SEQ ID NO: 433142 - DNA, 912 bp, Serratia marcescens
atggcatttgaacgccatgctttagatcccttggccaataagccttggctcggagaaaaaaaagataatcgaactttaaaggaactgatcgacacttggtattctttgcatgggataagccttgatgatggcgaaaaacgtcatgcaactatgcatcatgcctatgaatgtatgggacggccactggctaaagatttcaatgcacttctattcacaaaatatcggaaggcaagattagaaggtgagtttccacgtacgaatagagtacataaagtttctcaccgaactatgaacttagagttcgcctatttccgagccatgttcaatgaactaaagcgcttgggacattggagcggtgataacccgatcgagcatgttacagagtttaaaattgatgagtctgaaatggcatttctttctactgaagaaatcaaaatgctactaattgagtgcaataacagctcatcaactgatttaccactagtggttgaaatcgctcttagcacaggtgcacgatggtctgaggctgaagaattacgccaacagcaattaacgaagtataggataacatttacaaaaactaaatctgggaaaaatagaacgattcccattagtgaatcactttacgataaaatccccaaaaaaaatggacctctattcagctcctgctattcagccttccgctccgctatcgcccgtacaggcatagtgcttccggatggacaactgacacacgttttacgacatacatttgcatcgcatttcatgatgaatggcggaaacatattagttttacaaaaaatactcggccacagtgatataaagacaacaatgcgttacgcccatttttcaccagaccatcttaatgatgcagtaaaattaaacccattaagctatcaaaaaggaatttga

SEQ ID NO: 433143 - DNA, 672 bp, Serratia marcescens
ttgaaagtctcacaaataacgatattagcaatatttattatagtcgtaatgtttattcctatcattgtatatcacctgaatttcactggtgctttatttagtgatttatctgggaaaaatgccgattggggagcatttggttcatttataggtggtgtctacggggctgttttttcaggtgcgagctttattattttagctttaacgctttatgttaatcaaagaaaccacaattcacaattgaacttaatccatagcgagcaaaatttaaataaattcacaatattgctcaatgaacttcatgacaatttgaagaatgtagattatggttctaatggtatcgaatctgatgacattgattcatacatacaaacagcaaaacagcgattcattattgatggaagtcagagcgaggacgaagtcagagagatattcaaaggttacatgagcctttggactctagaacttgaggatgaaatttctttgttattagaaatatttgcattcatattaaatgcacgtgataaacagcaagaaatttatattgcattactttatatcaaagtaaataaaaaacaaaggtttttactatcagtgttcggggagatgaatatcaaagactttgctaagataactcccggctggaaagcatttagtcagttaccttggtaa

SEQ ID NO: 433144 - DNA, 702 bp, Serratia marcescens
atgtctcagtctgagcgccgccatgagcgccttgcggtccgcctgtcgctgattatcagccgtcttgtggcgggtgaaacgctggccatacagacactggccgccgaatttggcgtgtcagtgcgcacattgcgtcgggattttcgcgagcgtctggcctatctcgacctggagttccgtaacgggcaatgtcgtctgctatccggcagccgtcagagggagctgacggtgcagaccttcgtccgtcagtccggtgtggaggcgctttttccggagatagacaaccagctggtcaactcactattgagtgccagcgaatctccctgccttatctggcacagcaccaacgccagaacacaggcacggagtgaagtttttacgcgactgattcgcgccatcactgaacaccgtcgggttacgttactggcagaaggtcatcgttgcacaggtctggccccctatcgactggtgtgcagcgatggctgctggtacctgaccggtgaacatgaaggacatatatcggttttcacgctgggtgatattcatacggtcacattcaatcctgcgctttttgtcccagagacacagctacgtaatctgttgtcacaccccgattttcttcgggttttacctcactttcagactttccattcacttctcgttgtcggtgacaacggtttagcatgcaacaaaaccagctaa

SEQ ID NO: 433145 - DNA, 423 bp, Serratia marcescens; identical to SEQ ID NO: 130227

SEQ ID NO: 433146 - DNA, 975 bp, Serratia marcescens
atgactctgttagagaagcttaaagcagtgacaacggtggtggcggatagcggtgacatgaacgctatccgcgagtatcaccctgaagatgccaccaccaatccgtcgttgattttgaaggcagcggcgcagccgatctaccagccgctgatcgagcaggccgtcgcgctggcccgccagcagggcggctcgcaggaaacgcagttgatcaacgccagcgatcatctggcggtgaacatcggcgtggcgctgctaagccaggttcccggtaagatctccaccgaggtggatgcccgtctctcctacgaccgggggctatgcgtgtcgaaagcgcgcaagcttattcgcctgtacgagcatcagggtgttgaccgttcccgcgtgctgattaagcttgcctctacctggcagggcatcaaggcggcggaagaactggagcgcgaggggatccactgtaacctgaccctgctcttctccttcgctcaggcccgcgcctgcgccgaagcgggcgtgtggctaatatccccgtttgtcgggcgtatttacgactggtatcgcgaccgcaatctgctggccagcgacgctccccaggatgacccgggtgtcgtctcagtccgtcggatctttgactattacaagcagcaccgttacccgacggtcattatgggggccagcttccgtaaggtggagcaggtgctggcactggcaggctgcgaccgtttaaccatttccccggcgctgctcgacgaactggcaacgcgcgatggcgagctgccaactatgctgaagccgccggtgattgccaacgaagccccttcaccgctctcggagtcggagtttaactggctacataatcaggatcctatggcggtggacaagctcgcagaaggtattcgcctgtttgcccaggatcaggagaagctggaggggctgctgaaggcggcgtttgccagagaggcggttgggcaggtgtaa

SEQ ID NO: 433147 - DNA, 468 bp, Serratia marcescens
atgttaaaagttgctatcggagccgatgacgcggctaccaccctgaaaaatcaggtgaaaacttatctgcaggaaaaagggatcgaggtcgtggatttcagccacgacgttgccggcaacgatcaaatgtacccggacatcgcctttaacctcgcctcgtctattcgcgaggggcaatttgaacgcgggatcctgctgtgcggcaccgggatcggaatggcgatcgtcgccaataaagtaccggggatccgcgccgcccagtgccatgatgtctactccgcctcccgcgcccgtaagagcaacaacgcgcagatcatgaccctcggtgcccgcgttatcggcaacgagctggcattaaccatcgttgacagctggctggatgcagaatttgaagcgggccgttcggcgtcaaaagttgagcgtatcgcctactacgaaaacaaggttcacacccacaacgcacagtga

SEQ ID NO: 433148 - DNA, 771 bp, Serratia marcescens
atgaatggaaatgtgattgtcggtattagccataaggcctactttggctatcagcaaacgcagcagtggtgcgaggcggtggcgacagcgctccgtcagcccgcgctggccagtgcgccggttgagctgtttactttccccgcgatgcccacccttcctgtcgcgctgcgcgcctttgccgatacccgtatggccaccggggcgcagaacgtctgcgaagcgcctgctggggcatggaccggggaaaccagcgccagtctgctacaggagatgggctgccggtacgtggaaatcggccacgccgagcgccgtcgtcactttggtgaaacggtagcggtgattaatcgcaaaattgacatggccttcgccaacgggctgacgccggttatctgtattggcgaagagcagcggatgagcgctagcgacgcggcggccttcgcactggagcaggcgcaggcgttgctggcacaccgccccctgccgctgccgtcgctgatttttgcctgggaaccgcagtgggccatcggcgcggcggagcccgccagcgacgactttattcgccaggtctgccgcacgctgcgcgatgctctgcatcagcgctttggccagcagtgccgggttatctacggcggcagcgccgggccgggtctgctcacgcgactgtggccggatgccgacggtattttccttggccgtttttcccatcagccgcaggcggtggccgctattctggatgaagcgctcgctctgacaacgcccgcgcgtggttaa

SEQ ID NO: 433149 - DNA, 963 bp, Serratia marcescens
atggataaatccactgtgtcgcaggagtacgagttacttaccgaaatcgcggttgcttactattgtgatgaagtgacgcaggaggagattgcgaataagtttggtttttcccgcatcaaggtcgggcggctgctgaagcgtgcgaaggaggaagggatcgttgaaatcaacgtgcgctaccaccctatcttcagcacccaactggaaaagcaactgaccgaacgtttccccgtcagccgggcgcttatcgcccttgactacgccgatgagggtgagcagcgtcgtcaggtggcctcgctggtctcaagctatctcaataacgtgctgaaagataacgtgacgctggcggttgggcaggggcgcaacgtggcggcggtggccgaaaactcgggtgcgatctcaccgcgtgactgccgctttatctgcggcattggcggtacacatcgccctggggacgtgataaacgccgaccatattagccgtctgctggcccgcaagtttggtggcagcagcgagtcgttatacgcgccagcctatgtagaaaacccgcagctgaaggatctgctgctgcaaaacggcaccatcaaagataccctcgaccgggcgcggaaagcggatattgcgctggtgggcattggcgatatgaatgaagacagctacatggtgaagctgggctggtttaccccgcaggagatcagcaatgctggtctgcatcagggcgtgattggcgacattgcgggctatgacttcttcaacgcccgcggtgagcatgtgaatacggtgatggataaccgggtgattggtctgagcattgatgagctacggcagatcccctgcgtcattgcgattgcctcggagaacaccaaggcgatggcgattatgggcgcgctgcgtaccggggcgattgatattatcgccaccagcgcccgaaacattcgtacggtattaagcctcagccagtag

SEQ ID NO: 433150 - DNA, 957 bp, Serratia marcescens
atgaaaaaacctctcgttcccgacagcgaggagtcgctcggcctgcgtgccgcctggctccactacgtaggtggcctgacccaggccgccgtcgccaaacgtcttggcctgccctccgtgaaaacccaccgcctgattgcccgcgccgtggcggaaggggcagtaaaagtcaccatcgatggcgatattgttgcctgcgtggagctggagtcgcgcctctgcgcgcgcttcggcctgaatttttgccgcgtcaccccggaccttgccgaagagggactgccgttgcgcgcgctgggcctcgccggagcggagtacctgcgcaacctgttgagcaataatccggctatcaccatcggcattggccacggccgcacgctttccgccgccatccatcagcttccgcaccttgacgcctcccatgcccgctttgtttcgctgctgggctgtctgacacgcaactacgcgctgaatccgcacgatgtcatgcaccgtattgccgaaaaaaccggggcgcaggcctatatgatgccggtgcctttctttgccaataccgtggaagaccgcgaagtcctgctctcccaacgcagcgtaagcgaagtgttcagcatggcggcgggcagtacggtaaaactggtgggcatcggcaccgtcgaaccggcggcgcaactggtggaagccgggctgatcgcggtgcaggagattaacgatatatccgccgcaggggcgataggcgagatgctgggttacttcttcgacgcacgcgggcagcgcatcaccaacagcctgacggcgagaaccctggcggtatcccttgacgcgcgtcgtcgggaaaatatcgtcgccctggtgggcggtcagagtaaagtggcggccacaaaggcggcgctggcaagcggcctgctcagcggattaattaccgacgagcaaaccgcgcagaccctactggctgaggcttaa

SEQ ID NO: 433151 - DNA, 444 bp, Serratia marcescens; identical to SEQ ID NO: 130221

SEQ ID NO: 433152 - DNA, 933 bp, Serratia marcescens
atggcactcaccctttcgctcaataccaatccgctggtgaatcgctttgccgaacctgaggagctgattcagaccatcgcccagcgcattcgcatccgcgacgtgcagcttacgcatgagtttatcaatccgggctggccggcagcgaccatcaaccagatgacccgacgaatgaaaaaagcgctgcaggagaccggggtgcgcgtcacctccgggatgaccggcccgtacggtcgccttaaccactttggtcatccggacgccagcgtgcgccgctactatatcgactggtttaaaacctttgccgatatcaccgccgaactgggtggtgattcggtgggctcgcagttcgccatttttaccctgcgagattatcaggatctcgcccgccgcgacgcgctgatagctatcgccattgagtgctgggcggaggtggccgagcacgcgaagtcagccgggctgaagtatctgttctgggagccgatgagcgtcgggcgtgagtttggcgaaaccattcccgcctgtctggcgctgcaaaaacggcttagcgctgagccgatggcgctgccgatgtggatgatggcagatattgaccatggcgatgtcacctccgccgatccgcgggattatgacccctacgcatgggccgaagcggtgccccgctactcgccgattattcatataaaacagagcatggcggacaaaggcggacatcggccatttacattatcgtataatacccacggtcggatccagccggaaccgctgctgagcgccttcgcgcgcggcggtgcagagaacaatgaaatctgtctggagctgagctttaaagagcgcgagccgaccgacagccaggccgttgccggtatcgctgagagcgtcgccttctgggcaccgcatatcgacaccggcgtgcaggacctgaacatttaa

SEQ ID NO: 433153 - DNA, 1524 bp, Serratia marcescens
atgagcaaaaaaatcgtggatctgtttattatcggcggcggcattaatggcgcggggatcgctcgcgatgcgaccggacgcggtctgtcggtgatgatgtgtgaaaaagacgacctcgccgaggggacctcctcccgttccgggaaactggtacatggcgggttacgctatctcgagtattacgagtttcgcctggtgcgcgaggcgctgattgagcgtgaaatcctgctcaacgccgcgccgcatatcatctggccgatgcgcttcgtgctgccgcataacccgagcgatcgcccggcgtggtttattcgcctggggctgttcctctatgaccaccttggcgggcgcaaaaaactgcctggcacccgtacgctggatctgctgcgtgatccggaaggcgcgccgatcctcgatagcttccataaaggctttgagtactcagactgctgggttgacgatgcgcgcctggtcaccctgaatgccgtggacgccgccgagcgcggcgccaccattctgacccgcacccgctgcgtggccgccgagcgtaaagccggtgcctgggaaattaccctgcaaaatacgcagaccggcgaacagcaccgggtacgggcaaaagcgctggtgaatgcctccggcccgtgggtgctggacatcatcaatgatgtgacccgctcccacagcaaacgcagcgtgcgcctggtaaaaggctcacacctgatcgtgccaaaattctgggagggtcagcaggcctacctgatgcaaaaccacgacaagcgcgtgatttttatcaacccgtacgaaggcgataaagcgcttatcggcaccacggatattccgtgggaaggcgatgccgactccgtcgaggcggacgaccgcgagcaacaatatctgattgatgcggttaaccgctacttcaaagtgaagctgaccgccgctgacgtgattacccgtttctccggcgttcgcccactgtttgacgatggcaaaggcaacccgtcggcggtcacgcgggattacgtgtttgagctggatgatcagcagcaacttccgctgctgcacgtctttggcggtaaaatcaccaccttccgtaagcttgccgaacacgcgttacaaaaactcggaccgttcttcccgcaaatgggcgcagactggacgcgcagcgccccgctgcctggtggtgaaattcccggggccgactttgagtcctatctgcaaaccctgaaagagcagtatgcctggctgcccgcgccgctgcgcaaacactacgcccggctgtacggcgcgcgtctgccccaggtgctggggggcgcgaagcaggtggccgatttgggtcgtcattttggcggcctgctgtatgaagtcgaagtgcgctatctggttgaaaaagagtgggcccagcagccggaagacgtactctggcgtcgcaccaagcatcgcctgcacctgagcgatgcccagcaacaggcgttcagcgactggttcaccgacaccttcaccgttcagccgtgcgcccaggccagctaa

SEQ ID NO: 433154 - DNA, 1566 bp, Serratia marcescens
atggataaccgcgatattattctcggtctggactcaggcacttccgtggtcaaagcggtggcgttcgatctggaaggccagcagctcggatgtgcatcggcgcgcaaccgctactctcgcagcgagggccacggcgcggcgctgcagtcaatgagccagacctggcaggatgccgttgccgctattcgtaagctcgccgagcgcgtcgataatcttgccgcccgtgtggtggcgattgctgtcaccgcccagggcgacggcacctggctggtcggggccgggaaccgcccggtctctgatgcctggatctggctcgacgcgcgcgcggctcgcaccgtcgaatcgctctcccgctcgcccctgtcgcggatgcgctttgaagcgacgggtaccggtctgaacacctgccagcagagcgcacagatggcgcacatggatcgctatcacccggaattgctcaacggcagcgaagttgcccttcactgcaaagactggctgtacctgaatctgaccggcgtgcgcgcgaccgacccttcggaagccagctttacctttggcaacttccgcacccggcgctatgacgacaacgtcattgccgccctggggctggagcaccgccgccacctgctgcctgacatcgtcgacggcgtcgaaaccacgcatcccctcaccgctgaagcggccgcactgaccgggctgagagccggcaccccggtcagtctgggctacgtcgacatggtcatgaccgcgctgggtgccggtgtccacaccggcgaggccaataccgcctgttcggtggtgggctctacgggtgtgcatctgcgcgccgtccctacggaaagcgtctggctgaacgatgagcagaccgggtacgtcatccccctgccgtggccaggctacgtcacccaggtgcagaccaacatggcctcgacgctcaacctcgactggctgctgcatgtcgccagcgacctgttgaacagcttcggctgcgaggtcgatcatgcccgactggtgcagcacatcgaccgctggctcagcgaggccaaacccggcgcgctgctctatcacccctatatctccgaagcgggcgaacgcgggccgttcgtcaacgccgaagcccgcgccagctttgttggcctgagctaccgtcatggctttggcgacatggtgcgcgccgttattgaagggatcggctttgccgcccgcgactgctatcaggcgatgggtggggcgatgcccgccgagcttcgcctcaccggcggagccattcgttcgccacagctgcggcagatcctctctgcctgcgtcgacgtaccggtacgcagcaacagccgcgaggagaccggtgctgcaggggccgcaatgatggcggccgtcgccattggggcttatccgtcaatggcccgctgtgtggaaacctgggtcaagccgttactggatacgccggaagcgccgccgcctgaactcgtcgcgcgctaccagcatctctttggcacttaccagcatcttcgcagcgagctaccttccgtgtggcacaccttacaccagcctgatgcaggcctttaa

SEQ ID NO: 433155 - DNA, 654 bp, Serratia marcescens
atgtccggtgtttccgcactctctaccctacattcccgccgccgtatgaggcgttatctgctgtgtggcctggccgcagcggcagtggtggcggccatggccattgataccaaggtggtcaaaatcggttccgggcaggatgcacaggagcaggggttctccgccagcacctacggtgagaaaaccttcccagggattaaaagctacgtcgaatctcatgcggtggaggctgttgagcttgccaacgcgctgaaggtcaaccagcaggaggcggtgaagaagtacgccaccggcaccacgctgccggtattgccggttcgcttctccggcacggtgggtgaggggaaatcgggcatctttgcgcttcacgtggaaggtctgccggaagggatgaaggcgcggctgcagaccggcccggtcctcaccggcaccgagctgcgcgacgtgaccggcaagatccagttcggtgacttcaccaaccagattgagtatcagaacgcgggttcggcgattaaccaggcgctgaaggcctcgttgctcgacaagctcgaccgtaccgccctgtccggcaagcttgtcgaaggcgtgggggtattccgcttactcacccctaataactggctggtgaccccggtcagcctggaggtcaaatga

SEQ ID NO: 433156 - DNA, 1539 bp, Serratia marcescens
atgaagcagcgtgaatttcattcagcgttgacccgcggagaaataatcctgtcggcgaaaaacgtcagcaaggtgtatggctcaacccatgcgctgaagggggtgaactttgatattcgccgtggcgaagtcaccacgctgtttggtgaaaacggggcgggtaaatcgaccctgatgaagatcctttccggtgtgatcaccccgagcagcggcgagatcctgctgaatggcgaggtgaaggtgttcaactccgctaccgatgcccgcaaccaggggatctcgataatccaccaggaattgaacctcgcgccgaacatgaacgtgcgcgacaacatctttattggccgtgaaatcatgacctccagcggtgtcgattttgccgaagagacgcgagtaacccgccacctgatgaagtcgctggaagaggatatcgatccgctgaccccggtggagaacctgcgcctcgggcagcagcagatcgtcgagatcgcccgtgcgctgtcggtgaattcgcagatcctgatcatggatgaaccgacctctgcgctgagtgcggcagaggtagaggtgttgttccaggtgatccgcgacctgaccagccagggggtagctatcgtttacatctcccaccatctggaagaggcgctggaaattaccgaccgcgcggtggtgctgcgcgacggcgtgatgaccgcctacgcccgccgcgatgaaatcgacctcgactggattgtccgcaacatggtgggggaaagctttgacctcggcgcgccgccgtcgggttacgactttggtgataccgcgctgtcggtgaaatcgctgacggtgaaggggaaagccggtatccggctggtggataacctgtcgctggacgtccgcgccggggagatcgtctgcatttacggtttgatgggcgcgggtcgtactgaactaatggagtgtgtggcgggtcggctgcgccagtcgtccggggagattcatattgaagagagcgacgtctcgggtttgagcattgctgagcgtattgccagcggcctggcgctggtgccggaagaccgtcagcgggacgggctggtgcaaaccatgaccgtaggtgaaaacctgaccctcgccagcatcgggcgcttcgtgcgcgggctgatgctttccacccgcaaggaaaaggcgctgattaccgagagcattcgtaacgtgacggtgaaaactgcgggcggcgaggcggccatcggttcgctctccggcggcaatcagcaaaaggtggtgatcggcaaaatgcttgcgacgcatccgaaggtgattttgctggatgagccgagccgcggcattgatatcggcgctaaggctgaagtattccgcctgctggcagagaacgcccggcaggggctggcggtgatctactccacctcggaagtgggggagtgcctgagcatcgcgcaccgtattgtggtgatgagcaaaggccgcatttcggcggtgtttgactcttctgtatccaaagaacgcatcatggcggcctccggcgagtccctggtggcataa

SEQ ID NO: 433157 - DNA, 1062 bp, Serratia marcescens
atgactgacagaactcagcagctggccgtgccagcccgggccgtaaaaagtcgtactggcaccactaagagcatgagcctggcgcgtattctgcttgaggggcgtgcgttctttgccctgctggtgattatcgcggtgttctcactgatgtcgccgaactacttcagcggcgcgaacttcctgacgatggcctcgcacgtggcgatctttggcctaccggctattggtatgctgctggttatccttaacggcggcatcgatctttccgtgggttcaaccctcgggcttgccggggtgtgcgccggctacatgatgcagggcatcaatctggaagcgctgggcgtggtgctctatctgccggtctgggcggtggcgattctgacgctggcggtgggtgcgctggtggggctggtcaacggagtgctgattgcctggtgccgggttcctgcctttgtggccacgcttggctcgctgtatgtcgcgcgcggtatcgcgctgctgatgaccaacggcctgacctacaacaagctttccggcagcgacgccctaggcaataccggttttgactggctgggcttcaaccgcattttcaatgtcccggtcggggtgctgattctgggcgttaccgcgctgatttgcggctatctgttgagccgcaccgcctttggccgctggctgtatgcctccggcgggaatgagcgggcggctgagctctccggcgtgccggtgaagcgcgtcaaaatcagcgtctatgtgctctccgggatctgtgcggcgatggcgggactggtgctctcatcccagctgacctccgcgggccccacggcgggcaccacctacgaactgacggcgattgccgcagtggtgattggcggcgcggcgctgaccggtgggcgcggcaacgtgcgcggtacgttgctgggcgcgttcgttatcggttttctctctgatggcctggtgatcattggcgtttctgcttactggcagaccgtctttaccggggcggtcatcgtgcttgccgtactgcttaacactctgcagtacggacggagtcgacgttaa

SEQ ID NO: 433158 - DNA, 951 bp, Serratia marcescens
atgtaccttaacagcaagcgttttatcctggccgctgccacggtggcacttaccgctatcgccacaccaacctgggctgacgggctgatgaccatcatcgtcaacgatccctctaacccctactggttgacggaaggcaaggtggcgcagaaaacggctgagaaactcggctatacggcgaaggtgagtgcgcataagggcgacaccaataccgaaagccagctgattgataccgcgatcaccaataaatcaaaggccattattctcgacccggcgaacgccgacggttcggttggctcggtgaaaaaggccatcgcggcgaatatcccggtgtttattatcaacgccgagctgaaccagagcggcctggcgaaggcgcagctggtttccaacaacgcccagggcgcggcgcttggcgcacagcaatgggtgcagcaggtgggtgatgcgggcgactacgttgagctgaaggggccaccgtctgataataacgccgccacccgcgccaacggttttgagacggtgctgagccagtacccggatctgaaaaagacaggtagtgaagtggctaactgggaccgtacccagggctataacaagatgcagtctctgttgcaggctaacccgaatgtgaaaggggtgatcagcggtaacgatgagatggcgctgggtgcgattgcggcgctgaaagaggcgggtaagctgaaacaggtgaccgttggcggcttcgacggctccccggatgcggtggatgcagtgaaagaggggacgctggcctataccgtgatgcagccggtggcgacctttgccgctaaagcggttgagcaggcggacaccttccttaagaccggcaaaaccggcgcgtcgtcagagaaacagctgtttgactgcgtgttaatcaccaaagaaaacgcggcgaaaattacctctccatttatgcttgcagactaa

SEQ ID NO: 433159 - DNA, 858 bp, Serratia marcescens; identical to SEQ ID NO: 130213

SEQ ID NO: 433160 - DNA, 321 bp, Serratia marcescens
atgaaaactctacccgcaacgactttgtgggcggctaaaccatgcccgtcaccagtgatcgtatggcaaatgcttctttcacgtctgctggatcagcactatggcctgacactgaatgacacgccattcagtgatgaaactgtgattaaggaacatatcgatgccggtatctctttagccgatgccgttaattttctggtggaaaaatacgaactggttcgcatcgatcgtaaggggtttagctggcaagaacagtcgccttttattactgctgtagacattctaaaagccagacgggctatgagggaaatgagaacataa

SEQ ID NO: 433161 - DNA, 318 bp, Serratia marcescens
atgagcaacattacatgggggctgcagcgggatatcacgccacgcctgggagcccgtctggtgcaggaggggaaccggctgcattatctggctgaccgggccagcatcaccggtaaattcagtgacgtcgaatgccgtaagctggatgaaacattcccgcactttatcagccagatggagtcgatgctgaccaccgatgaactgaatccccgccatgcccactgcgtcaccctgtaccacaatggtttcacctgcgaagccgacacccttggcagttgcggctacgtatacatcaccgtttatcccactcaccgataa

SEQ ID NO: 433162 - DNA, 222 bp, Serratia marcescens
atgaaaattatcagtaaacgcagggcaatgacgatataccgccagcatcctgagtcccgaatctttcgctactgcaccggcagataccagtggcatggcagtgtctgtcattacaccggtctggcagttcctgacattcccggcgtgctggcggtatacgccgaacgccgccaggaccgcaaagggccttatacctgcctgatgagtattaccctgaactga

SEQ ID NO: 433163 - DNA, 477 bp, Serratia marcescens; identical to SEQ ID NO: 21302

SEQ ID NO: 433164 - DNA, 459 bp, Serratia marcescens; identical to SEQ ID NO: 21301

SEQ ID NO: 433165 - DNA, 240 bp, Serratia marcescens; identical to SEQ ID NO: 21300

SEQ ID NO: 433166 - DNA, 468 bp, Serratia marcescens; identical to SEQ ID NO: 21299

SEQ ID NO: 433167 - DNA, 444 bp, Serratia marcescens
atgaaacgtaaaacactgcctctgctggcgctggttgccaccactctgtttctcatcgcatgcgatgacagaagtgatgacctgaaggccatcagtaaatttaaggacctcaccccaccgcgtttcagtgatgtggtcagccaccaggatgatgtcagcgaagaatggtcacaggttgactacttatccggtcccaccttgcaggttttacgtacccgccagtcgcccgatggctgcgaggatggcagttactactacctcgtggatatgcaggaaaaaaccgtccagccactgatgaatgcgctgtgtattgccaataacatcaaactggaataccaggaggtgacggacccgtataccaaagaaaaatactttgagtacgcccatgacggcaaactgatggggcgactgctgataccctcaaaccctgagaaccaggaataa

SEQ ID NO: 433168 - DNA, 237 bp, Serratia marcescens; identical to SEQ ID NO: 194899

SEQ ID NO: 433169 - DNA, 702 bp, Serratia marcescens
atgacacaggcagaacgccgccatgaccggctggctgtcaggctgtcactgataatcagccgtctggtggcaggggaaacgctgagtgtgcgtaagcttgccgctgagtttggtgtgtcggtgcgcacgctgcggcgtgattttcgtgagcggctgatgtatctggacctggagtatcagtccggatattgccgcttacgcactgcgggcagtgagacgcagatggtgcccgacgtgcttatctttgcccaccgcagcgggatggccggtcttttccctggctttgaccgtcgtctggtaaacgcactgctgatgtgcgatgagtctccctgcgtaatcgcacccgccagtccggctccttcgccatcaggcgcattgtctttctggcgactgattcaggccattaccgggcgcaggcgggtgactctgattgccgaggggcagcgctgtgagcggctggctccctgccggttactcatccaccagcaggcctggtatctggtggcagagcacgacggacatatcgccgtattctccctggatgagatccatctggttcagcccctgcaggagactttccggcgtaacgacagtctgtgtcgtcttgttgaagacccgggctttattcagtccttaccccattttcgctttatccagcagtcactgcttacgtttgttccggccgacagcccaccagaatag

SEQ ID NO: 433170 - DNA, 822 bp, Serratia marcescens
atgacccgtctggcttcgcgctttggcgcagcaaaccttatccgtcgcgaccgcccgttaacccgtgaggagctgtttcgcgtggtgcccagtgtgttcagcgaggacaaacatgaatcccgcagtgagcgttatacctatatacctaccatctccctgctcgacagcctacagcgagaaggcttccagccattctttgcctgtcagacccgcgtgcgtgaccccggtcgtcgtgaacatacaaagcatatgctgcgtctgcggcgtgaggggcagattaccggtaaacaggtaccagaaattatcctgctcaactcccacgatggcactagttcgtatcagatgttgccgggactatttcgtgcggtttgtcagaacgggctcgtctgcggtgagtcgtttggcgaggtgcgggtgccacacaagggggacgtggtgagtcaggtgattgaaggcgcgtatgaggtgctggggatttttgaccgggtggaggagaaacgggatgccatgcagtcgttgctgttgccacccccggcacagcaggcactggcaaaagccgccctcacataccgctttggtgaaaaccaccagccggtgactgaatcgcagatcctctcccctcgccgctggcaggatgagagcaatgacctgtggaccacgtaccagcgtattcaggagaacctgattaagggcgggctcagtggccgtaatgccaaaggaggacggtcacatacccgtgccgttcgcggtatcgacggggacgtgaaacttaaccgggcactgtgggtgatggcggaagccctgctcacgcaactgcagtga

SEQ ID NO: 433171 - DNA, 864 bp, Serratia marcescens
atgaaaaattctgaaggtttgaagtcatttcagcaatcgctttccggcctaccgcagtgggtaacagagcggattctgcaacaaattaaccagttaactgactacgagccagtgatcggcattatgggtaagagcggtgccggtaaatcctcactctgcaatgccctgtttgccagtgaggtatcaccggtcagcgatgtggccgcctgcacccgtgaacctttacgctttcgtctgcaggttggcgagcgctatatgaccgtcgtggatttacccggtgtaggcgaaagtggcgctcgcgataccgagtatgctgcgctgtatcgcgaacaactcccccggctcgacctggttctgtggctgattaaggccgatgaccgagcgctggcggtggatgagcacttttatcatcaggtgattggggaggcataccggcataaggtgctgtttgttatcagccagtcggataaggtcgagcccaccagcggtggggggccattgtccaaagagcagaagcagaatatcagccgtaaaatctgtctgctgcatgagctgttccagcccgtacatccagtgtgtgccgtgtcggtccgtcttcagtggggactgcgggtgatggccgagcgaatgattaagtgcctgccacgtgaggccaccagcccggtggtgtcgcaactccagccttcctttcgcacgacggtagtccgggaacaggcgcgtagcgattttggtgaaaccgtcggtgctgtactcgatagcatcagtgcctttcccctgatacccgccccggtgcgggtcgtcattcaggccgtgcgcaccaccgtggtgtcagtggcccgtgccgtctgggatttcttcttctga

SEQ ID NO: 433172 - DNA, 192 bp, Serratia marcescens; identical to SEQ ID NO: 144091

SEQ ID NO: 433173 - DNA, 333 bp, Serratia marcescens
atggcgaaagcgttccaggaggcgatggcgcgtgatgatgcgttagggctgaccccggatgaaatcgccttctatgatgcgctggctgaaaatgaaagtgcagtgcgtgaactgggcgatgatacgctgagaaagctggccatcgaagtgacattgaaattgcggcagtccaccaccgtggactggcaggtgcgtgaaagcgtgcgtgcccgattgcgtattctggtgcgccagacgctgcgtaagtataagtatccgccggacaaaacgccgggcgccgtggaactgattttgaagcaggcagaagtggtgtcgaacagctggacagtctaa

SEQ ID NO: 433174 - DNA, 297 bp, Serratia marcescens; identical to SEQ ID NO: 78958

SEQ ID NO: 433175 - DNA, 621 bp, Serratia marcescens
atggaattatatcatggttcacatggtgagcatgtgctcgcctataaaaaaaatattgaacgagtcgtcaatgatgcactcagtgaattccccagaacaatggcattacgtgttgatgtacattacccccccattctagacagaggtgatactgtttgctgttttcctaatctagagcctggtgccatatcccgtttccgtaatgcattaaatgccatgttggaggccaatgagagagccagagccgccaacggtaaaagaatatatccaaaccgagttcgtcatgtttgggtaagggagttttccgaagagggaaaatgtcattttcatattggtcttttttttaacaaagatgcttattaccatttaggtgattatgaggctgaaagcaatttaaggatgatgattgtaagagcatggtatagcgcactgggattggaactggatgattatccgggattggttcactaccctgaaaattgtcgttatatattagacgtcaatgattttaactttgaaggagaatacaataaattactgaatcgtcttgactacctggctaaacttgatacaaaagtatacggagatggcgaccgtagcttcggctgcagtcgcgggtaa

SEQ ID NO: 433176 - DNA, 1554 bp, Serratia marcescens
atgattttacgccgcgtagcattgtttagtttcctggtttttggcggggcatgctatgcggcgcctgctggcgaaggtagcgttacggatccgaccaatgattttgatgacataaacattcaggatcccaattgtgataagcgtgccacagagaaatattcggctaatgaatataggtatgccatgttcacgatgtgtgaaaaatatgtcgatgggaagatggttttaattctatgggtgaacaagtatcaagattacagtacgggtttttggtacgattgggaagatccttataagttgagcctgttggttggcataaaacatgacgaaacagggcgagaaagtcagcagatctttcagttatatggatttggcagggataaacgattcgtcagggtgataccaacaccaaggtctgggaaatatacgtttactctcaacgcgaccgtacattctgataaaataggcagcagtaatgatatctatgttcgtctaagtaaagtcgtaaatattggtcccgatggcgctaatgttttaatgaagctgacggatgcgatagaaaaaaacaaagatgcgccattcgtatacacttttgataaagaccatcagataccaatgcgctcaggcattgacgagtactatgccaataaccaaaatgggacgctgctggttattcccaatgtgaggaaattggtgccgtcattgctgttggacatgaaaaagcggacatcgctacggtgcgaaaagaatgacaatgcgtcaacggacgatggggttaaacaatctaatgaaatttattaccctgttggtgcatggggaaggttggcttttcccgatattgtgctgaacgttaactattttgatatcaggccacaaagacgtggcagtacctggataagtaacggttgtgcaacgccgcttggtatgtactatgacaatattaaagacggtgcaacgcagccggagctggaaaccggtgactatttccccgggctgcgtcatttcgtcgatgagcataataaagctgcgccggtcgacacacttttttgggaaatgaatcagcctggtattccgttgcacattgtaaataacaccgatcggtttagtactgaagccacgcgtttggccgataggctaagcaatatgagggctcagtttgtggccttttctggaacctcgctgattccacggcgtgatgacggcccagaaggtcagccggataacgggccggctcaaacgacccggattgccctgggttaccataacaagcaggatcgtctctatatttttcacggcggtgcctaccgtgacggtgttgaccgcgaggatctgaccgcgttgttccgggcattggaggccaagatggcggtagaactggacggcggtggttccgccgcattggttatcaaaaacggcattgcaaaatggggcggcggcgaagcgcccaagagcagctgtcctaactctggcgcttggtgctcgccgataaaacaacccgacgggaatgcccgaccggtgccttcctggttgggaatcgaactgagtcggccctga

SEQ ID NO: 433177 - DNA, 465 bp, Serratia marcescens
gtggcggatatcacctacttgccgctgagaacgggaacggcgtatgtcagcctggtaacggatgcctggtcgagaaaaatcgtggggtatcatgtacatgacagtctgcatacccggcacgtcgcctgcgcgttcaaaatggcgctggccggcagacgcacgacgttgccgctggtgcaccactcggacaggggtatccagtactgctcacaggaatatcaggcgttacatcagagatatggcatcacctgctcgatgacggacgggtatgactgttaccagaatgcgctggcggaacgggtaaatgggatacttaaaacggaatacctgctcggcaggccagaagacatcgtacaggcaaaaaagatggtcagggagtcggtgaacctctacaacgcacagcggccgcacctgtcgctgaaatacaaaacgcccgatgaggttcatcgggcgttatccggctga

SEQ ID NO: 433178 - DNA, 1083 bp, Serratia marcescens
  misc_feature (969)..(978): n is a, c, g, or t
gtgcgccttttcatcacgcttttgctcggttgcctggtgtggcaaccggcgctggccgcccccgtgccgaccgagaaccagctcaaacaggagctgaagcaggcggaaagcagcaaaaacgcgccgaatcaggcggagaccaccgaggcgctgcaaagcgccctcaactggctgacggagcgtaaagagtcgcagactcgctccgaacaatatcagaaggtgatcgacgatttccctaagatgacgcaggagctgcgccgtcagttggtgctggaaagcaacaagatcctgccgaacggcgacgatctgccggccgccgagctggaacagcagatcctgcaaaccagcagtctgctgctggaacaggcgcgcctgctgcagcaagagcaggatcgcacgcgggaaatcagcgattcgctcggccagctgccgcagcagcagaccgatgcccgccgcgcgctgaccgaagtgcagcgccgtctgcaggcgcagcccgccaacccgaccaccccgtacgcgcaggccgccctggccctgctgcagaccgaagccgcggcgcgcaaagccaaagtggacgagctggagctggcgcagctgtcggccaacaaccgtcaggagctggcgcgcatgcgcgcagaggtctataaaaagcgccacgagaaaatagacgttcagctgcaggcgctgcgcaacaacctcaacgcccagcgccaacgcgaagcggaactggcgctggaaaaaaccgagcagttggccgagcagaacggcgacttgccaaaaagcatcagccaacagctgcagatcaaccgcgaattgtccgccgcgctgaacagccaggcgcagcgcatggatctgatttcgtcgcagcagcggcaggcggcggcgcagacgctgcaggtgcgccaggcgctgagcaccatcatcgaacaggcccagtggctcggctcgtcgtcggcgctgggggaaacnnnnnnnnnngggggaaaccctgcgcgcccaggtggcgacgctgccggagatgcccaagccgcaacagctggacggcgacatggcccagctgcgcgtgcagcgcctgcagtttga

SEQ ID NO: 433179 - DNA, 201 bp, Serratia marcescens
atgagcgaaggcggtgagagcctggcggccataaaaagtgtgcgggcaatttttctcgacgtcattttgcgtggccaggaattttttctgagaaatctctccgccttgcgcaacaatcgtttacaatttgccaaatcccggtcgcgcgtcgtttttgtaaagtttcgtatttttagtaggttaatgacgcgcgactcttga

SEQ ID NO: 433180 - DNA, 702 bp, Serratia marcescens
atgacagcaactgatgttgaaaaatcatcaagacttcttaaattagttgagtccatagcaatcacacccgatgatgctaaaaaaatagtgaaccaatacaaaaaatcggtgcttgctgcaaatccaaagctccaagaattggaaattcagaaaattgtcgcaaaaaaaatcgtcagccgttattcaagttactctagtatttcgggtggcgtaacctcattaagtagcattattcctggggtaggtacagcagttgcagttacagggggtgctatagcagacacatcttattgcatgaaaaatcaagttgatatgtgtatgtgcctagcggaagcatttaattgggacattagcagtgaagatgctaggcaactatcatttttaatagcagcaggtggtacactagaaaagctcggaagtgaaactgtcgtgaagatagcatcaaatgctggcgtaaaaatgttgaaaatgtatttaaaaggctctgcactaatcgtcattaaagaaatgttcaaaaaaataggaatcaacttctcgcgtaaagccttagaaaaatccctaccatttggagtgggtgttgttattagttcatcagccaactacatgctagcaaaatacgtcggcaaggttgccacaaaatggtttacaattgaacaagaaagccgtaacaacgatttagctactaccgataagaacatatag

SEQ ID NO: 433181 - DNA, 513 bp, Serratia marcescens
atgacttctcacgcgcccgctttgcaccgcgagcacagccacgtttttgacgatggtaacccattggctgaaagaaacaccagatgggcggtaatactcaccgccggtatgatggccatcgagatagccggtggctggctgtttaactcgatggcattgctggccgacggctggcatatgagctcgcacgcgctggctctgggcttgtcggtgctggcttacggcgccgcacgacggctggccaaagacagccgcttcagcctcggcacctggaagatagaagtgctggccggttacaccagcgcggtgttgttggtgctggtggcagcgctgatgctgttccagtctgcacagaggctgatgaatcccagcccgattcattacaacgaagccatcgccatcggtacgattgggctggccgtcaatctgctttgcgcctggctgttgcgcggcggcggccaccaccatcatcacggggatgaccacgatgatggtggccgcctgggcctatag

SEQ ID NO: 433182 - DNA, 1404 bp, Serratia marcescens
atgacggctctcgcagcggagtttttcactttggatgaagttaacagactcaagatcattcaggacgtcatcgaccggcgtctgacaacacagatggcagctcagcagcttggtatctccgaccgtcagtgccgccgtctgcttgcgcgttatcgtgaagatggtccgcttggcatgaccagccgccgtcgtggtaaatccagcaacaatcagctgcctctgggactggccgcatacgcgctgaatattattcgcgagcgctacaacgatttcggtccgacactggcctgtgaaaagctgtctgaggttcacggtgttcatctttctaaagaaaccgtccgtaaactgatgactcaggccagtctttgggtcccacgtaagcaacgtgcgccaaaaattcagcagccgcgttaccgccgtgcctgtgccggtgaactcatacaaatcgacggctgcgaccaccactggtttgaaaaccggggacctaagtgtacggcgctggtttacgttgatgacgcaaccagtcgtttaatgcagcttcttttcgtgaaatctgagtctactttcacctattttgaagcgacccggggctatattgaaaaacatggcaagccgctggcactgtacagcgacaaagccagtgtattcaggatcaacaataaaaacgcaaccggcggcgacggcgatacccagtttggccgtgcgatgcatgaactgaacattcagaccatttgtgcagaaaccagtgctgccaaaggccgcgttgaacgggcgcacctgacgcttcaggaccgcctggtcaaggagctcaggctccagggtatcagttccatggaagctgcgaacgcatttgccgaagagttcatgaacgattacaaccgtcgtttcgcaaaagcgcctcgccaggcgtttgatgttcatcgggaactggatgtcgatgatgatcttgatatggtatttaactggcgtgaagctcgtaaagtgtcgaaatcactcacagtgcagtacgacaaagtcctttatctgattgaagacagcgaattcagtcgtcgggcgattggtaaatacatcgatgtctggcattacccggatggacataaagagctccggcttaatggcgtgtcacttccctactccacctatgacaagctttctgaaatcgatcagggggccattgtggacaacaaacgtctggggcgggccctggaaatggcgcagctggtccaggccgagcgggataataaccggtcgcagtccgttccatccggcgacggtccttcacgcaggcgtaaagcccccacaacgaagaaatctcagcgctcccttgatcaggacgatatgttcaatgccctggtgaaacttcagtcacgctctgaagagatatttggaaagaaaccgatttaa

SEQ ID NO: 433183 - DNA, 705 bp, Serratia marcescens; identical to SEQ ID NO: 105724

SEQ ID NO: 433184 - DNA, 321 bp, Serratia marcescens; identical to SEQ ID NO: 105723

SEQ ID NO: 433185 - DNA, 1290 bp, Serratia marcescens
atgttactggctggtgctatctttttattcacgctcgtcctggttatctggcaacccagagggctggggattggctggagtgcctcactgggcgcaattctggcattgctgactggcgtcgttcatctgggggatattccggtggtctggcagatagtgtggaatgcgaccgccacctttatcgccgtgatcatcatcagtcttctgctcgacgaatccggcttctttgaatgggccgcgctgcacgttgcccgttgggggaatggccgggggcggctgctcttcacctggatcgtcctgcttggtgcgatggttgcggcactgtttgccaacgacggtgcggcactgatcctgacacctatcgttatcgcgatgctgctggcgctgggattcagccggggggcaaccttagcgtttatcatggccgcagggtttatcgctgacacggcaagcctgccactgattgtctcaaacctggtgaatatcgtctcggcggatttctttaagcttggtttctcagaatatgccgccgtgatggtcccggttaacctggccgcgattgcggctacgctggtgatgctgcatctgtttttccgtaaggacattcccgccgtttacgacgtttctctgttgaaagaaccgaaagacgctatacgtgatatgaatacctttaaaaccggctggctggttctggtgttgcttctggtgggattcttcggactggagccgctgggcgtaccggtcagtttggtcgcagccgctggtgcattgcttctgtttgctgttgcgaaaaaagggcatgccattaacaccggtaaggtgctgcgtggtgcgccctggcaaatcgttatcttctcgctggggatgtacctggtggtctacggcttacgaaatgccggtctgacccactatctctcttccttgctgaatcagctggcagagcagggattgtgggcggcaacgctgggtacgggcttcctgacggccttcctgtcatcagtgatgaacaatatgccgaccgtgctggtcggggcgctgtcgattgatggcagcacagcgaccggtgttatcaaagaagcgatgatttacgccaacgtcatcggcagcgacctggggccaaaaattacccctatcggcagtctggcaacgttactgtggctgcacgttctgtcgcagaaaaatatcaaaattacctggggatattacttccgggtgggcattgtcatgacaatccccgtgctgtttgtcacgcttgcagcactggcgcttcgtctgtctttcactttgtaa

SEQ ID NO: 433186 - DNA, 426 bp, Serratia marcescens; identical to SEQ ID NO: 23459

SEQ ID NO: 433187 - DNA, 828 bp, Serratia marcescens; identical to SEQ ID NO: 105721

SEQ ID NO: 433188 - DNA, 1479 bp, Serratia marcescens
atgttgctgtcctcgacgcgtaaggactggctgggtaacgtccgtggtgacgttctggccggtattgttgtcgcgctcgcactcattccagaagcgatcgccttttccattatcgccggtgttgatccccaggtgggcctctactcggcgttctgtattcctctcgttatggccttctttggcggacgtccggcgatgatttcgtcctccaccggtgcaatggctctcctgatggtgacgctggtgaaagatcatggcttacagtatttactggctgcctccatactgaccggggtattccagctgatagccggatatctgaagcttggcgggctgatgcgttttgtttcacgctcagtggtcacggggtttgttaatgcactggcaatactgatttttatggcccagttgcctgagctgaccaatgtgacatggcatgtttatgccatgactgcggcagggctggggatcatctatctcttcccttatatcaacaaaaccattccttcaccgcttgtgtgcatcgtggtgctgactgggattgccatgtggctgcatctggatgtgcgaaccgtcggggatatggggaaacttcccgacagtctgccggtcttcctgctcccggacgtgcctttaaatcttcagacgctgctcatcatcctgccatattctgcggggcttgcggtggttggcctgcttgagtcgatgatgaccgccactatcgtggatgacatgaccgacacgccaagcgacaaaaacagggagtgcaaagctcagggcatcgcgaacatctgcacatcctttatcggaggaatggcaggctgcgcgatgattgggcaatctgttatcaacgtaaaatccggtggacgcggacgactttcaaccctcacggcgggcgtggtgctgctttgcctgattgtgttcctgcgcaactgggtctcccaaattccgatggcagcgctggtcgcggtgatgattatggtttccatcgggacattctcctggcgctccattgccaacctgcggacacaccccctttcaaccagcgtggtcatgcttgccaccgtcgcggttgtggtggcaacacataatctggccttcggtgtgctgaccggtgtactgattgcttcgctcaattttgccactaaagtatcccggttcatgcgtgtaacctcagttctggaggggacgagccggacgtataccgtcaccggccaggtattctttgcatcagcagaccgctttacgagccactttgatttccgtgaagcgattgagaatgtggtgatagacgtttcacatgcccatttctgggacatcacgtccgtcagcgccctggataaggtggtcattaagttccgcagagagggcgccggggttgaagtacgtgggatgaatgaagccacccgcaccatcgttgaccggtttggtgttcacgataaacctgaagaagtcgaaaaactgatgggcggtcattaa

SEQ ID NO: 433189 - DNA, 1404 bp, Serratia marcescens; identical to SEQ ID NO: 248052

SEQ ID NO: 433190 - DNA, 867 bp, Serratia marcescens; identical to SEQ ID NO: 142970

SEQ ID NO: 433191 - DNA, 999 bp, Serratia marcescens; identical to SEQ ID NO: 142971

SEQ ID NO: 433192 - DNA, 1359 bp, Serratia marcescens
atgttggtcaccatgtcagataaagagatccaccgtttgccggtaatacaggcagtttgcgaaaagcgtctacggcgtcgcgatgcagcttcacagcttggcatctcggaacgtcaggcgcaacggcttatcaatcgttaccgggtttctggtgctgaaggacttgtcagccgtaaacgcggccagccaagcaaccgccggttgaccgaatcgcttaaactacgcgtcctcaaactgatacgtgaaaactacagtgactttggacccacgctggccgctgaaaaactcagggaacgccatgatatccggctttcaatcgagaccgtccgcaactggatgacgtctgacggactctgggtcccgcatgctcgtcgcaagtcacgggtttatcagccccgacatcgtcgtgattgtctcggagagcttgtccagatagacggctcccatcatgactggtttgaaggtcgtgcgccgaaatgctgcctgcttgtatttatagatgacgctactggccgcctgatgcatttgcggttcagcgagtcagaaacagcctttgattacatgctggcaacctgggaatacattgagcagcatgggaagccggtatcgctgtacagtgacaaacacgcaatatttcgtgtcagcggtccggagaaccgcaataccaccgttacccagttcggacgtgtgctttatgacatggcaattgagctcatttgtgccaacagctcggaagctaaaggccgcgtggaacgtgctaatcagacacttcaggatcgactgatcaaggaaatgcgccttgaaggcattaccggcattgaagccgcaaatgcctggctttcgaatttcatcgaagacttcaaccgtcgtttttcgcgtccgccaaagttccccaaagatttgcatcgtccggtacaggaaagccccgatgagttaagagacatctttgcctggcatgatgtccgtaccgtgtcgaaatcactgacattccagtacgataagatcctttatctcatggacccaacagaagaaaatagccgtcttgccggtgaaaaaattaaagtactggattatcccgatggcaccctcgccttccactatggacaccggatcctcaagtgccaggcatttgataagctggcctgtgtcgaccaggggcagattgtcgataacaaacgtctcgggactgtactcagactggctcaggtaaaacaggatgagcgggaaagcgaaggcaaacgggaacgaagcaaaaaatcgcccagccgtaaggctcaggtgcgcgtccaggaacagctccgggctatcaatcccgttctggcagacccgagcttgtttgtggcaagttcaaagcggtag

SEQ ID NO: 433193 - DNA, 789 bp, Serratia marcescens; identical to SEQ ID NO: 142972

SEQ ID NO: 433194 - DNA, 696 bp, Serratia marcescens; identical to SEQ ID NO: 142973

SEQ ID NO: 433195 - DNA, 1314 bp, Serratia marcescens
atgaataataaattcaaccgtgcaattgagcacttgattaaatcaacttcctcagaagaggtcatcaatgcaattcaggcagtggaagatctttttagtttagcatggctgagtaaacaagaaggacatagactacaaaagttatgggccaggcgggatgtcctgtccacatctgaattatactctttagggaaatctataattaatttgagtgttaacaataagaaatggcttgatggaactgctaaagagataaagaaggatactgataattcacatggtttgcttaccgaaatgataataatcgggtctttgtcaacaagcaacgggacagtttccccttgtcctaaatcatttaaaatatacgattatacagttgattttgaaactggatttagacataaggtctctataaaaaattatgacataaccaaacatgaaaaagacttcaatacaagaagtgaagtaattcggtccacgttcaaaaatcatcttaaagctaggaggttgtctggaagattaacgattctactagagcatgatatcctaacagatgaacttacaagagaaatatgctttttcattgcatttcaaatgaaagattatggtttttacccatttagtaatggaagcggaggtattggattccatgaaataactgagtttgataagaacagactagttagtccttccgatacaatacttatcattgcaaagcaccacttcaatgaacagaggaatatcatcgataaaatagatgaagcaaatgacaaactcttatctgacccagacgactcaaaatcattaaaacaattagtaattcggttgggttcgacagctaacatagaaatgatcaatgaccacttgaccaacttaggggctgattgggagagatgtgggtttgacatgtactttctgtttcaacctcaggttgtatccgatattgaaaaaaatagcacaatgatcacgacatcaattaagagtggggtcaaaggtttttttccttcaacctcagatattaaaaataagcttgaaaatatgaaatgtctaaaaatggaatttggcattggtgcaataagctctgaaagttcacccatgattctaatgattaatgatactcaaacaaatgtttcgatacaatcacactatgtatttcagaaaggtgatgtatatctccgggcagaaaaaaaaggaagcggttatgaaggcagtctagctaagatggctccaggtattatcacacatgctgtatttgataatatgacaatatctccaatttgttactcacaagatgatagagtattaatcatataa

SEQ ID NO: 433196 - DNA, 819 bp, Serratia marcescens
atgaataataaaatacctaacaatgtaattggcgcggtgtcttcagtactgggtgagcattattttagccattcaactttaaattcactgtttatggaatcgggcgcacctggtgaggtgcctctaggaaactgtgaaacaaaatgcagcaattggcttaaagcttgcaatgaagatgactcagtagatgcaatttcagtactggggataattatccaaaaatatatggatttacctccaaattcattctctagggcaggagctgggtctacagtcgaaagtggacaaaaaagaataattgatgctttatccaagaaccaattagtctacagactcaatggatttataactaagtctgggtctactccgatttctaagacgttagaggattatctaaagtctggtgactattcatccattgaaaatgagtttcttcgtgcagtggagaatattcaaaccgatccacatgcatcagtcactgccgcatgcgctataattgaatctgcattaaaatgctacatagaaaaattcaatttacctatgccacaaaaattgaatgttgcaccactttggtctgtcgtacagccagacttggaccttaattccgatcccactttagcgggtgaccagcacaaaattttaaaaggaatttcatcactaatcgacggtattggcgcattccggtcacatatagggagtgctcatgggcgtggtcaaaatcctccgcagatagtagttgccgaagctagactcgcagttaatgcatctcatactttagttgtatttataatggatgttatccatgcgagtaaattttaa

SEQ ID NO: 433197 - DNA, 147 bp, Serratia marcescens; identical to SEQ ID NO: 142975

SEQ ID NO: 433198 - DNA, 831 bp, Serratia marcescens; identical to SEQ ID NO: 248056

SEQ ID NO: 433199 - DNA, 639 bp, Serratia marcescens; identical to SEQ ID NO: 248057

SEQ ID NO: 433200 - DNA, 1347 bp, Serratia marcescens; identical to SEQ ID NO: 142976

SEQ ID NO: 433201 - DNA, 270 bp, Serratia marcescens
atgaccaaaattctgcaaggcatgcccgggacagcccacgagctgatcgaaatgctggccggtgtcctgctcaagtatgaacctcgtttgcagtcactcaatgtgaccctacttgaacagcaagtaccaggtgagttgcgttacgccatcgatgcggaactgagaggtattggacttgtacggtatgggaccgagtttatgccagagggaaaagtgatgatcaggcacttgaaacaacagcagcatctggaaaaccatcaatttatctaa

SEQ ID NO: 433202 - DNA, 1452 bp, Serratia marcescens
atgtctgtgaatactgaaacacaatcggtgcaggggaacactactgtacttgagaataacccagacagcgtgtatgcctcgctgtttgaaaaaattaatctgaatccagtttctcgcctgggtgacattactgaatatcaagacgacagcgtcatggccgatgcctcggcagatgagcgagtgaccgcagccattcaggtttttatgcaggttatttcaaaatcaggccaaaaagttgagaagcttgataaatcattgcttgattcgcatatcgcagagcttgattatcaaatcagtcgccagctcgatgaagttatgcaccacccggagtttcaacgcgtagaatcactctggcgcgggcttaagcacacggttgatcgcacagatttccgccagaatgtaaaaatagaaatacttgatgtttctaaagacgatctgcgtcaggattttgaagacgctccggagattatccagagcggtctttatcaccatacttattcgatggaatacgatcaaccgggcggagagcccattgccgcaatcatttcgtcgtatgagttcgattcctccgctcaggatgtagcgttactccgtaatatatcaaaagtttcagctgccgctcatatgccgtttattggttctgtaggaccaaaattcttccataaatccagcatggaagaagtcgcggccatcaaagacatcggtaactattttgacagagctgaatatatcaaatggaaagcgttccgtgactctgaggactcccgctacattgggctgactatgccacgtgtgttgggccgtttgccgtatggtccggataccgtcccggtgcgcagtttcaattatgtggaggaagtgaagggacctgatcacgagaagtatttatggacgaatgcatcctttgcctttgctgccaatatggtgaaaagttttatcaataatggctggtgcgtccagattcgtggccctcaggctggcggtgcagttcaggatctgcctatccatctgtacgacctcggtaccggtaatcaggtaaaaatcccgtccgaagtgatgataccggaaacccgtgagtttgaattctcgaatctgggattcattccgctaagctattataaaaacagagattattcctgtttctttagcgcaaactccgcccagaagcctgcgttgtacgacactgcggatgcgaccgccaacagccgcatcaattcccgtctgccatacatcttcctgttgtcacgtatcgcgcactacctgaagctcatccagcgtgaaaatatcggtaccaccaaagaccgtcgcctgcttgagctggagctcaatacctgggtgaaaggtctggtgaccgagatgaccgatccgggcgatgatctccaggcttcacacccgcttcgcgatgccaaagtcatcgttgaagacatcgaggatacaaggttatgctcttag

SEQ ID NO: 433203 - DNA, 498 bp, Serratia marcescens; identical to SEQ ID NO: 142977

SEQ ID NO: 433204 - DNA, 837 bp, Serratia marcescens; identical to SEQ ID NO: 118201

SEQ ID NO: 433205 - DNA, 396 bp, Serratia marcescens
atgtctaacactaacaccaattttgagatgaccgggatcctgttagggcaagaagtccgtaaacgtaaaactcctcaggagaagatcgccattatccagcagacgatggagccgggtatgaatgtctcccatgtcgcccgcctgcatggtatccagcccagcctgctgtttaagtggaagaagcaatatcaggaaggcagcctcaccgccgttgcggctggagaggaagtcgatcctgcttctgagcttactgctgctctgaagcaggtccgggagcttcagcgccttctgggcaagaagacgatggaagttgagatcctgaaagaagccgtggagtacggtcagtcgcgaaaatggatagcgcacgcgcccttgttgccaaaggacggggaatag

SEQ ID NO: 433206 - DNA, 921 bp, Serratia marcescens; identical to SEQ ID NO: 142978

SEQ ID NO: 433207 - DNA, 516 bp, Serratia marcescens; identical to SEQ ID NO: 248040

SEQ ID NO: 433208 - DNA, 1428 bp, Serratia marcescens
atgaaacgtaacactcatgatcaagaaaaagacctgaaagatgtgggtaaagctccatctttgatccacaaaacattgttaatagcatcgaccatttatgatcttaaatatctggctcaggttttaaatgatgaaaatggcagtaattggtcccgtgcctcgcttaagcgtcaggttaaaggaaagcctgagcattgtgagctgagtatcactgatggacgttatctacagtctttaattccttcccgacctactaattacgaggacaggaaatttagctttatcgatttgtttgcagggataggtggactacgaagcggattcgatgccatcggtggaaaatgtcttttcacgagtgaatggaatacttattccagccgtacttaccgggcgaactggtattgcgatgagaacgagcaccgcttcaattcagatatccgtgacatcacgcttagcaaccggcccgaagtttctgatgaagaggcatacaagtttatcgatacatctatcccggatcatgatgtacttcttgcggggtttccgtgtcagccattcagcattgccggtgtcagtaaaaagaactctttgggacgcaaacacggtttcgagtgcgacactcagggtacgctcttctttgatgtggccaggatcatccgggcaaaacaaccggcaatttttgttctggaaaacgttaaaaatctgaagagtcacgataagggtaatacttttaacatcatcatgaaaacgctggaagagcttggctacgacgtcgcaaacagcgaaagcatgggcgcggatgatcctaaagtcatcgacggccgtcatttccgaccccagcaccgtgagcgtatcgtccttattggttttcgccgcgacctgcgcctgaaagacggtttttctctaagagacattaaagacttttatccggacaagcgcccttctctctccgatttactggaaccgacggtagatagtaaatacatcctctcccctaaactctgggagtacttatacaactatgcaaagaaacatgcagcaaaaggcaatggttttggttttgggcttgtagatccttccaatgttaatagtgtcaccagaaccctctcaagccgctatatgaaagacggatctgaaattcttattgatcggggttggtcccatgagctgggagagtctgatttccataacccggacaatatggatcgtcggccacgcatgctaacgccacgtgaatgcagcaggcttatgggcttcgataaacccggggaaagtgttttccgtatacctgtgtccaatacacaggcttacagacagtttgggaactcagtgatagttgatgtctttgcagccgtcgctaaattgttgaagtcacgaattgattatgttgcttccttgcgattgcggaagtcatacgatgaagtgtgctga

SEQ ID NO: 433209 - DNA, 168 bp, Serratia marcescens; identical to SEQ ID NO: 376307

SEQ ID NO: 433210 - DNA, 1320 bp, Serratia marcescens
atgagccaaaaattcgcagtgatgattgcttacgacgacgatccaaacgtcaaaaggtattcacctgactttcaaacgcaggatgagtttgctaaagggtggcagtcggctcttaaaaaagcacaccacacctcaggtcaaaaatcagtcatcacctgcggatgtcgtggaaaaggagaaaagcgactttatgttcgtgctttaccgaacggtgatgcctttattctcgtcaaagccgctaacacgggcattgagcatgatccttcctgtgtattcttctcccttgatgcccggcataccggcctgaaaggatatgcgagtggtgtggtccggattacaaccgaaggtgatatggctgtaaggctcggtatcggtatgacagagaaagatcctcctgaaaaatcagaagtgcctcccctgccccatcttcagcgaccagaaggtggtcaggcctcaatgaccctcctgggcttgcttagtcttttgtggacagagtctggtctgaatgtctggtacccgaaaatggcagggaaacgtaacgattcactggtacggtatcgtctgcttgaaaccgctaaacaaattcgtaccggcagagcctgcataggtgaccatttattcattggtgtacctgacccgaaacaacctgtcgctcagtcgcagattcagcgtctttcatcacaggcgatgagtgataaacgtctcatgctcctgtcagttttacctcgctacgatgctgaaaagcatgagaagccacttaaatttttacccctgcggaattttggggggctaccgctgatttttttcaattcagaaggccattgggacagcgtaaagaaacgattttcatcggagtacgcagcatggaaatccggagcgaaaatagttgtctttgcgttgacgtcaccagctgcggtaaccggcagaggcccttctgtaagagctcatcaaattgtgctgatgcacgttagcgagaactggatacctctggactcctcctatgaggcggttgttgcagaaaagctggatgcagagcaccggcagtacgttaagcccatgcgttatgatgcgagtattagtgaggtgttccctgacttctacctgctcgacacaaaaagcgataagccgttcccgatggaagtatttggtatggccactcctgcttatctggcccgaaagcaactcaaaaaagattattacaaccgtgaatatgggccttatggatggtggcactgggatgcgaccacagcatctgaaactatggtgctgcctcattttccagattcacgcaaacctctttcaactgacacacctgcttaa

SEQ ID NO: 433211 - DNA, 204 bp, Serratia marcescens
atgtcctacatgctttcgctaagcgaacagacaaaactgaacgctttcctgtcagggatcctagatgattacaagactggggttatcactcagatacaagctgttggtaaaatcggtaacgtgttttctgctctggaaagtggagactcaaaaaaggtagtgcatttgttgactgaaggacgaaaactcctgccgacgggctga

SEQ ID NO: 433212 - DNA, 1206 bp, Serratia marcescens
atgatgatcgaaaatgataaagaaaaaagcctgaacgatgctaccccgccagaggtgcagaatgacatccgcagcgaatccactgaaaaatcaaaggaaatgggtcgttcaaggcactcatctatcgcgatgatcgattacttcaatgcaatcgaacgtctgtgcaaagagaaagaaattaacccggaaaatatcgatctgagcttcaaagttcactggctcagaaacgctgttggcggctcgtttgcaaggtcacaggagatgttcgcggagtaccagaagtatgttaaagaggttcctgaagaggcccgttacctggatatacccgatgaggtaaaggttgcactcggcgatattatctcgtacatcacctggcactaccgtagaagctataccgcaatacagaatgatagtgttaaaaaagctgaagcacgtagcatgcagctggaggaggaggtaacgcagctgttacagcggcttgagcaaagcgctaccgatatggatgagctgaaacttgagaatcaggcgctacagggtcgattagagatccgggacagtaccgtcaaggagttagaaacaaggctgaatgttgccgaagcagaactcgaaacctgccatcaccagttagatagcacacggcatgaattaagcctcgcacagcagtctaatgactcactctcccagcaactggctgaacgtaaaacagagatcgctggtcaccttgaatatcaaaaaaaactgaacgaagagatcaactctcagcgttctgataatgctggtcttttaagacaatgcgaccagttaagtcagacagtgtcagatacaaaggcagagagggacaggtttgaacaggaatttattgctgcacagaccctttgttctgagctgaaaagtgcactatccgggaaggagggtgacctggtggcggtgaatgccgagcttactgaactccataaactaaacgagtcgctgagcgccgacctgaataaagtaactttggtcagccagggctatgaagcggaagtggctgaacaaatcaatgaactcaaaacgctccaggccaaagtaatgaagctggaagcttccctggaggcggagaaaacaatctcagaatccctaaaaggcaccattgatacattgactggtgcaatggcagggggaggtactggaaagtcaaaacagccgcgtagcagaaaaacatcatga

SEQ ID NO: 433213 - DNA, 819 bp, Serratia marcescens
atgactcataaccagggttctgagccagtaccggcgagccggacagggcggctcatcagcgcccgggatatggccatgcagaaattcgaagaagggatgcggttaatctcggaagcgtcggaactgtgcggtttctctctcttcaccagcagaattatgcagcccaacgcatttggtcttccgtcgtcactggatcgcaccatcgaggaggggcgtaaggaaattgaccgtaaaacgtggaaaaggctctttgaagaaacaggtatggaccggtactggaaccataagcaaaaagaagcctttaacgaatccctacgtacggatccgcccgtcgcttccctggagattgttaagggaacattacagcatgcactggctaacagacgagacacgcttgcagaaggtttcgttgatgttctcaacaagctagaccgaagtttcaaaagcaatgccaggcaatatacaatgccaaaaaagcttgttcttcgggggatttttcctggtgtgaaagtgctgaggtacaacggtttctcgcaggacaatcacttttgtttacgcgactttgagaatattgtatgcatctgttctgatactccaacacctgcaaccggcggtgggctgagtatggtcgacaggctgacggccatgagaaatacagaattcacaggcgaggtcagtgatgagaatggctggcggtgtcgcctgtttgagaatggaaacgttcacatttgcatcgacagtatctcgcttctgaatgctctgaacgatcttatcagcatttattttgcaaaccagcttccggccgcaggaaaaaaatga

SEQ ID NO: 433214 - DNA, 666 bp, Serratia marcescens
atgatctctgaacgctcagtacacttaatcacttcctgtacaaagggcaagaatcatcagggccacgtctggccgacattggacatagatccaaaacaaactccggacgacgcagcatatgcctggagtaacattgtagacgacgccagaagtaatcaggcggtaccggcgttgtccttgtattcaggtaatcactggtctacggcaaaggaaattttaaactcaaccagaaatctggagttgtggataatctctgccgggatggggtttttaaatagtcgagatcgggtgccctcttacgaggcgacatttcatcaagtaccattcaggcatgatctctggtggaaagcccttacaaaatcactaggaaagcataaccgttgcgcaactataagccagttaatgcagtccagtccgaatgatgaatatttgattgcggcttcgcctgtttatattgctgccgtccagaatgacatcctgaagggcatcgagagtttgactcatcctcttacgcaactaacgatcgtgacatcaggggcatatgctggcccacttgaagaatacttaattaagagttcttcaagaatgatgaaagacctggagtgcaatatggtgtgcctgaatataaaactggctcaatacatacttaaaagtggtagtcgttag

SEQ ID NO: 433215 - DNA, 405 bp, Serratia marcescens
atgtctgaagcactcaaatcgttaaacaatattcgtactcttcgcgcccagggccgcgagctgcctttagaagtacttgaggaaatcctcgaaaagcttaatgtcattgttgatgagcgtcgtcaggaagaatcatccaaagctgccgaactgcaagctcgtcaggagaaacttgacgccctgcgtaagttaatggaagaagatggtatcaacccggaagagctgctgggctcattccaggccaaatctacggctcccaagaaaagccgtgagccacgcccggccaaatactcatttactgatgaaaatggcgaaacaaaaacatggactggacagggccgtacccccaaagctctggcagaacaaattgcagccggtaaaagtcttgatgatttcctgatctaa

SEQ ID NO: 433216 - DNA, 204 bp, Serratia marcescens; identical to SEQ ID NO: 26577

SEQ ID NO: 433217 - DNA, 858 bp, Serratia marcescens
atgaaaatgacgaagccaaaaccggtaagccggaagaaaagaccgtttattagtgagcttgcagagctgggtttatcgggagaaattctttcaattcgaactgacggcatgcaggggacgctcatacccgatcttaccgcaggggtgagtgaagcaggccgtgtgaaaaccggcaactgggtaatctctgacaagagaaccttcgaccatgtcgttttgtgtgttgaaagacaagatgagaaccatgatgtgttcgtaggtaaattcatccagttacatgtagccgctaataagagcctaaagatcgtcgaaatgggcgatgtgaaactggtggccataactagctcgattcctaccacttttaatggggggattaggagatataaaggggttacgtatgtgtcactttcccaaacagctcaaaccactatcgacttcccgaagcgtatctacaaagagggccaggaatgtacttctgtcaccagtcctgaccaaggccctttcgcccgggatgttaggttgaattgctacgggcgatgtgttgtcaccggcgtaaggtccccctggcgtactgaggccgcgcacttaacgccccgtcatgaagaaggcattcccgacgtaacgaacggaattttacttcgccgtgatatccatacactgttcgacaatgaccattgcgccataaaccctgacactatgaaaatttacttcagccgggaggctcgggagttggatgatgatctcctgaaatggcatgggaatgagatagagacgacacgcatgcaagttccggttaacatcgaaaaccttcggatacgatggcaaaaatttaaggctaaggatcgtcagcgtaaataa

SEQ ID NO: 433218 - DNA, 816 bp, Serratia marcescens
atgagagagccaagaccccgccataccttgcaggtcattcgagtgccttctctggaggttcaggatctggggctgaccagctttgacagctggcttgacgagaacggttatgacaaaacgaatgccagaaataaccgtaccatctgggcgagagaaggcggatggcatctgaaacgttgcagaaatctgaaaaccggcacggacgatttctggtttatcgctttcgatggtaaaggcggaaacatttacccgctgaaaacccaaagagactaccgggctgcatatcgtaagctcgaagccgaaggatatgcgcctgcggttatcgagcaaatgaccacaggcgcagcatataacctggcctatccacgttccagccttaaacaagctgagacggccaccaacgagccgatgcgtaaacctgacgtagatatcatgggtgagcactgcgagcgtatagtgacgcaacgtagtggcgtggcacagggtaaattcaaagctctgctcatcgagaatttcgcgggccgttgtgcggtaaccggttgggttaatggcggtgtcctggatgcggcacacattgaacatggaacccggtacaatccgtctaacggcatcctgatgacaccgacaatgcatgcgctgtttgatgccgatctcatgggcatagatccggccaccctgaccgttcattttaagccaggcattgagctgggcgagctgttcgaaggccgtaaaatcacaccgctggtgtacgatctggacttagagcggctggccgtacgctgggcaggataccagggcctggctcaggaacaatga

SEQ ID NO: 433219 - DNA, 411 bp, Serratia marcescens
atggctattttagcaatcattgcagttatcgccctgggtgggtacgcctacggatttattaaaacccgtgagctgagcgctttgcgtaaagaaatgaaactatacgtggatcgcatggaagcggcggagctggacttacacgcaatcagaagtgtagcggagcaccggttgcacggtgcaggtaaacagtttgccgacctttacagccgtatcgacggtgcaactgtgacgctgacacccgaagatcagctgttactggcaacgatgccatttaatattcaggatgtagaagacatcgtaaacgagcgcggtccaaagacaattagcggccgtccattctgggaagttgagccaggcccgcatgactatgaatatggcccgcaatatccgtatttcccagaccagcgctag

SEQ ID NO: 433220 - DNA, 207 bp, Serratia marcescens
atgactgaagaacaaaaaagaatagagcgggctattgagttggcttgtcgttacggcggaaccgatgaaatgcatcatctgcaatgggtggtggatcagatggtaagagaactggctggagaacgttatgctcaaattgtagctgatgccaccagcggagaagatgggcctgatacttacaaatggagtgttgggatcgcgccttaa

SEQ ID NO: 433221 - DNA, 1326 bp, Serratia marcescens
atgagccgtaaacagcagcgtctggcaatctggatgaacggaatcaaagtcggatactgggaaaaaagtaaaggggttgacagcttacaataccttcctgaatggagtgctgacgaacagggaaggccgctgtcattgtccattccttttactcccgggaaccaggtctggcgtggaaatgtggtacgtgactattttgataatttactcccggacagcgaaggcatacgcagacgtctggcaatgcgttacaaggccgatagcctggagccttttgatctgctgacggagctgggaaaagactgcgtgggcgcgatacagctgcttcatgacggagacgaacccacagatttatattccgtgaagtatcaccctcttactgaatcagaaattgcggcaactttgcgtaataccacggagacattgctaccgggcaggccagaagataacgacgacttacgtttatcgattgccggtgctcaggagaaaacagccctactgtggcatgaagatcggtggtgtatgccggagggtaatacaccaacgacgcatatattcaagctaccgctcggacttgtggggaacatgaaagccgacatgagctcgtcggttgaaaatgaatggctctgctcggtacttctcgaacagtacgggctccccgtggcaagaacgcagattgctcactttgaagatcagaaagcgctggtggtagaacgttttgaccgaaaatggtcaggagacggacaatggatcattcgtttaccccaggaagatatgtgtcaggccctgggcgtttcgccattacgaaaatatcaggcggacggcgggccaggtatatcggaaattatggaagttctgagtaattcagaccgcgctgagcatgacaaagcgcagttttttatggcgcagataattttctggatgatggccgcaacagatggccacgctaaaaatttcagtatttctattgggccacagggacgatatcacctaacaccactctatgatgtgttgtcggcatggccggtgatcggtcatgggaacaatcagatatcctggcagaagtgcaaactggcgatggccgtacgtggcagtagcaactattaccagatatatcgaatacaacgacgccactggatcagacatggtgagataaccggcctgagtaaacagcagacagaggcgatgatagaggaaatcatcgccagaaccccaggtgtcattgaacgtgttagcgggcttcttccggaccagttcccccagcagcttgcggaaagtatttttgatggaatgaggcagcaatgcaggcgcctggctgagaaataa

SEQ ID NO: 433222 - DNA, 297 bp, Serratia marcescens
atgatcaataatgaatacccgttaaacacgctcaaccagctgcgtcccttgctcattggttttcgcaaggcgaatggcctgacgcaaaaagacctgtccgaaaggttaggcgtcacacaacagacatactcacgtctggaagccaaccctgccagtgcgagcattgaacggctattcaaggtgttttccgtcctgggtgtaaaaatcagcttctcctcgacggccacctcttcagatagtaagcagacggaagaaacgcttaaatcaaactcacctgcacgacaggagaaatggtaa

SEQ ID NO: 433223 - DNA, 1389 bp, Serratia marcescens
atgagtcagtctccttatgatgatgagctcagggccatccgttatattcagctccgtggtcaggatatcacgaacgctcacgagacaattaacagtgatatagagagccttaaggcacagttgaccgggctaatcagcggcactgaacttgatgaagcggagcatctggcgcttaaagaacatcatctgcgagaaatgaccccctcagatactgccatgcattctactggtctcaagaccatatatagcgaggctaaccagcgtgtatgcggtgatattggactggccacaatactctccacggatgacctggctgtcgtagatgcccggatccagaatcatattaaagaatttaatgatcgctacgcactcgacgcctgggattatgctattgcctgcggatgcgggctcatagcatccatgctggatttactttgcgtcagagccccgccaaaacctacggtgagctttacgacagaagtggatggtattttcaataaacaggtgcagaaagccttcaatgccattttgccggaggacctgagtacaaaactctcagatttgttccctataggggcaccagacagttcgatcagcagcgatttagtgggtgcagccggtggcgttttgtctcccacaaatcaccgcttaagagctttatcacacgaccccatactgggcattattttcggcataaaggatatgctgaacgggacctgtacggtggttcagaatggacagatcgtggtttatccttccagtaaaggcgttaccgacgaaaccaatattttcaggctcatcgccagaatgtttggacacctggcatcggatgttaatgccccctcagcaaaaggaaaccgtggcatgggtttaccggctccttttatggggttacttcgtatgcttgaggggatccctgtggggagttctaacttcggcaaacaaatagagtacatgtatgtcaacgggtatgactttcgtcagtttatcgtgacaagtattccgatgaccataatggaagttttgatgcgggttttctatgtggcgaaacaggtatcgctgggaaaaggagcttttggggagaccttactggataccatgcctttgcggctaaatccgcgcttccggatgatgcttgccctgggttatggaacttccagtgctgttaacgcaggtaaaatgtatattaccggcaatattctcaatgcgaattacgcctcctggatggggttagcctggaatggttttcactcactcaagtggtccctttatcagcgacacttaaagctttgggccggtattgaaaaggcggaactggaacggcttcagaacaatatagacagcatcgaggcattgaccatcagagcaggaaacttgccagtcaagtaa

SEQ ID NO: 433224 - DNA, 570 bp, Serratia marcescens
atgatttcttcatcacttttatggtgctttttttcacctaccacacagcaagttatgaatacgaggcctgtaatggacgctaccgaaactgaagagctcgaaaaaattcgcaagaaggcaatggatgaagttacaagtgctcttcaggcgcttgaaaataagttcccgggtattactgagggcgcagcagcattggcggggtcaggcgtaggcgctgcggcttccttcggtgctctctatacgcttggtacaacgggagtgtcagcagcaggcataacctccgggctcgctacagcagggtctatcgtcggtggtggtatggttgcaggcattgcggtattggccgcacctgtagctgtgttagggattggcgggtacgcgatagtgaaacacaaaaaaaatacgaaactgacagccgccctcagtcaggccattcaaaagctctatgaagtacaggaaaggttaatgtcgaatgcggagttttttaaggcagaaattgctgggatcaaggcaacaatcgacatgcttactaagaaagctccaaaaggtagcctggtcgcggtgaggtaa

SEQ ID NO: 433225 - DNA, 648 bp, Serratia marcescens; identical to SEQ ID NO: 248041

SEQ ID NO: 433226 - DNA, 393 bp, Serratia marcescens
atggacgataaagagcaatttacgaatcttgtggcaaagcatgcctccggactcaccgaagagcagctggccggttacgatgcctgttccctggatggtgaatgcgtcacgccttcatacgaggttttccgggggtatcgtacccgccataccctggatgaatttctggagatggccatatcgctgaatgccatccacccggatgaatatttaacggatatgctgcttaagcctcatgaggtgatcggcgctctggccgatgaaggcgaccagctgaacaacgccaccccggtttatttcttcccggataccggcgtctatgcagtggccgtcagtgaaacccgggtgctcgatgcctggctttgctggccatgctacccggcgaactggtaa

SEQ ID NO: 433227 - DNA, 282 bp, Serratia marcescens; identical to SEQ ID NO: 248042

SEQ ID NO: 433228 - DNA, 207 bp, Serratia marcescens; identical to SEQ ID NO: 248043

SEQ ID NO: 433229 - DNA, 132 bp, Serratia marcescens; identical to SEQ ID NO: 248044

SEQ ID NO: 433230 - DNA, 330 bp, Serratia marcescens
atggaagaaatagtcgactactttaaggactcgaaaatcccggtatatgttgtatttattaccgatggcgggatcagcaagacccgggcgattaaagatgcaatcaggcgttcagccaactaccccatcttctggaagtttgtcggcctgggtggttcaagctacggtatcctcaaaaatctggatgactttactgaccgccgggttgataacacccacttctttgccatggatgatttcggttcgattagcgatgaaaagttatacgataatttactggaagaattcagaccgtggatcgatgaaacaaaaaggttagggatcctttaa

SEQ ID NO: 433231 - DNA, 1368 bp, Serratia marcescens
atgaaggcccggcacctggtgatgctgtcgctgggcggcgtgatcggcaccgggctgtttttcaacaccggctacatcatctccaccaccggggcgctcggcacgctgctggcctacctgatcggcgcgctggtggtgtatctggtgatgctgtgcctgggcgagctgtcggtggcgatgccggaaactggcgcttttcacgtctatgcttcgcgctatctggggccggccaccggctatgccgtagcctggctgtattggctcacctggacggtggcgctcggctccagcctgaccgccgccggattctgcatgcagtactggttcccgcagtcgccggtgtggctgtggtgcctgatcttctgcgcggccattttcctgcttaacgtggtgaccacccgctttttcgccgaaagcgaattctggttttcgctgatcaaagtggtgaccattctggcgtttatcattctgggcggcgccgccatgtttggcctgctgccgatgaaagacggcacgccggcgccgttcctgcataacctgaccgcttccggctggctgccgcacggcacgctgccgatcctgatgaccatggtggcggtgaacttcgccttctccggcacggagctgatcggcatcgccgccggtgaaaccgagaacccggaaaaagtcgtgccgctggcgatccgcactacggtgatccgcctgatgctattctttatcggcacggtcttcgtgctggcggcgttgatcccgatggatcaggcggggatcgtcaaaagcccgtttgtgctggtgtttgaacgcatcggcgtgccttacgccgccgatatcttcaacttcgtgatcctgaccgccatcctgtcggcggccaactccggcctgtacgcctcggggcgcatgctgtggtcgctggcccaccagcgcaccctgccggcctactttgcgcgcgtcaatacacgcggcattccgatcaacgccctgaccttcagcatgctcggcggcgtgctggcgctgttgaccagcgtgatcgcgccggacacggtgttcgtcgccctgtcggcgatctccggttttgcggtggtggcggtgtggctgagcatctgcgcggcccactttgctttccgccgcgcctacctgcgcagcggccagccgataagcgccctgaaataccgcgcgcccggctacccgctgacgccgatcctcggctttgcgctgtgcctgctggcctgcatcgggctggcgttcgatccggagcagcgcattgcgctctactgcgggctgccgttcgtcgccctgtgttacctcacctatttcctgacccggcgcgccggacaaaaaaccgctttgggagaacaacatgtcggttaa

SEQ ID NO: 433232 - DNA, 1113 bp, Serratia marcescens
atgaagatcaaagccatcgttaccagcaaagaaacaccattctcattgcaggatgtcaaccttagggaaccggatatcgatgaagttctggtacggatcattgcctccggagtttgtcatacagatgccgtagtcctccggggggatgcgcctcttccgcttcctgctgttcttggccatgaaggcgctggcattgttgagcgcgttggctcagcagttacagaggttgtaccgggggatcatgtagtaattggtttctcatattgcggatattgcgataattgtagatctggtaagaatggagcctgtgaggattttgtccctttgaattcatctggtgtgaatggccatcatcgaactcctctatcaacaatggataacacgcccctatccttgttctttggtcaatcttcattcgctgcttacagtacgacttctgctaagaacgttgtaaaagtggatcgcgatgtggatctacgcctgctgggccccttggggtgtggtttcatgacgggaagtggcaccatactgaacgccttaaagcccgaacctggtagttcaatcgcaatatttggcactggcgcagtgggccttgctggcataatggcagcgcaaattgctggctgcagtaagattatcgcgattgatatccatagccaacgcctagagctggcacaaactctgggcgctacacatgtggtcaatagtatgaacgaagatgctgtggctcgtattgttgatatctgtggcaaaggtgctgatttttcaatggatactacgggaattagtgctgttcagatacaggctattcgatgcttacgcgtttacggcaccatggcagcggttgccgtaagtaataacgagatctcgctcaacttagccacagacattgttgacagagggcttacaattaaaggggtgctcgagggtgacgctatgccccagatatttataccaagattgttgcagttttggcgggagggcaaatttccaatcgaaaaattgatccgtttctataagcctgagcaggtggagcaggcttttgctgattcgaactcaggagatgtcattaagcccgttcttgtatttgatcactcatatatgcctgtgtaa

SEQ ID NO: 433233 - DNA, 885 bp, Serratia marcescens
atgaaactagatcctcgaatagtagtgcagtttgtagtgattgcagaagaagcctcctttacacgtgcggcaaggcgtttgcatgtagctcagccctggttatcgggacgcattaagaggtttgaagagcaactgggcttttctctatttgttcggaatgcccatggtattgaactgacgagtaagggggccgcattgcttgaggtggcacacagtgttgagttatctatgacagctactgagtctgtagctgccaagttacgacgcgcaaatcaagagcgttttagtattggcatgcctccatacagttaccagattgcctctaggaatgaaattataaatcgcttctctaaactgaaccctggtgttcatgttgaacttgatgttggctggtcgccttcattaatagagaaagtgttgtcgggattgttggatttggcttttgtgccaggcgatatatgtaacgaagagctcgaagtaacaagactctgccaacttcgaattgaactgatgatgtcggctaagcatccgcttgcaactaataaagaattgatttcatccgaccttaagcagtacacggttcttgttttcaatagggcgcttaatcctgcattgttcgattctattttttcgccgtgggaggctattggagtcaatcttgttccatttgtcgagctaaatcaggatgtccttgaacgtgtacattcatccgagacaattgttattgcctgcttcgacttgaaggatgacctactcaacaaggacgtgcttattagaaaaacgattgtggacagcagcttagttccattttcgttggtccgtagggcgggctggtgttctcctgagtgcaataattttttagctcttgctaaagaccttgagtaa

SEQ ID NO: 433234 - DNA, 498 bp, Serratia marcescens
atgaaagcgaaagagaaatttgagcagcttaaaacagcgaaaaatctgaatgaccaagtgctgttggcgttttatgacacactcccttcagtgtcgattggggaggctctgggccgttggaaaggtggtgatttccagactgggcactggtgtaatgcaactatgaccgaaatgaattggtatggaaaatggtatcgtagcaaactggatgcggttccgcttgtttgttatgacgagcaaggtcggttgacctccaataaaagcatgaaaggagaagcatctctctgggagattgaattccgcggaaaaatttcaaccaccatggtttatgatggagtgccgatcttcgaccatttacgtaaggtagatgaaaacaccctatttggtgttatggatggtaaggccttcgaatggccgtaccctgatattattgacaatggtaaatattatttcttcttcctcgagcgggttgatagcttccccgttgagtttgtctaa

SEQ ID NO: 433235 - DNA, 426 bp, Serratia marcescens
atgataagctatgctcaaataatgaaagagattgataaaataatatccttttgcatggtaaaaggggttcagcctcatgagttgattacatctatatttgaaagtgaatatcaacacgttgaaacttataagaaaggtgaactagttcattttatcttgacttattcagatgctcatgatgatggtgttagttgtgtcaaaatgaaatatatttataacaataaacaacaactattatccgtagcgcaaaaaattgattcttcaagttataaaattcagtgggatcgtaatgagaaacttgaagcgatgcttaataatttgaccttgaagttacctaatgatagctcggttattgaacagctaagagactcaatccctgatgactataaggtgatattctctcctcatctaaaaattgcttgttaa

SEQ ID NO: 433236 - DNA, 1860 bp, Serratia marcescens
atgtcttacttttttaacacagcggtaaacattgaaggtaatacaaaacttagagcgccacaaattgaagcttatataaaaataaaagaatttttcaatgatgaagaaaataaagaggctttagtagttttaccaacaggtactggtaaaagtggtttaatatcaatagctccatttggtgtttctcgtaaaagagtcttgattatcactccggggcttattacaaaagatagtataagaaaaacacaagaggttcttgctgataacttttgggttaattttgacattgtgtttagtagtaaagatattcccatagtcaatgagtatctaactgaattatcagacgaacatctgttaagtagccatattgtttacactaacattcaaaagataatatcttcgcggggtgcaggtctaattaatagagtgcctccagatttcttcgacttcatcattatagatgaagctcaccatgctcctgctcaaagctggcgtgatactctccattatttttcgaatgcaaaagtattacatgtgactggaacgccatacagaggtgataatcaggagattccaggtgtaaaaatccatgagacacctttatctgaagttatgagagataaatatgttaaatggttaaggaaagaaactgtcaatgcgcatgaattattttttacaacaccggagcaaccaggagtaaaattatctaaagagcaaatattgatgctcaaagataaagaatggattgaaaaaagtatagctttgtctaaagaatgctctttagatgtgattgaccatagcattacaaaactcaaagagttaaaatatgcctctcaaaaggtcccccataaaattttagctgtgggttgtagcatagcgcacgcagaagatttatttaattggtataaggacagagggatgacttctgtcatcgtgcatagtgaaatggagccgagtgacctttctgatgctctaatgaaggtagataatcatcaatgtgatgtggtcatttccgttaatatgctaatggaaggctatgaccataagtatctaactgttctagcgatatttcgtccttataggagtcttaatgctttcgctcaggttgttggaagaatattacgagctatacctgattctgaaataacgcattttgaaattgataataatggtattgtgatctttcatgaggaaattggcctaaacgttatgtgggaaaatttccaaaaagaggtggagaaagcgcgtagagcaactgtacgcgaatacacttttacagacagagattacgttgaacgaggcaatgagttagccggtgttgaaagcgaaagcgtgtatgtaagtgatcaagattcttatttaaatgatgttgattttaatgctctttttgaacaaaaacgtcacgagataagcgactcggtaaatcaacaaatagaaaaaatcaaactggcaggcgtagatcttcccgacgatgcactagaagcattgcgtcagactttagctgaaaaagaagttcagaaagctgctgaagttattgaccctgagttgattgataaaagacctcatcaagcacgaaaattaatgagagagattctgaaaacacgtactcaagacgcggtttctaatttactgattgataatggtattggtgaaaaaacttcagagttgtatgagacttttagacgtcatgtgccttatttaaagacaactgatgctaatgatggtatcttagtaagatacgtatttataaaactgtccagcgcttatgggccagttgataagcgagataacaaaacccttctccagtcaattaatgatttagataaggtgctcgcagaagttgagaggatgataaaatga

SEQ ID NO: 433237 - DNA, 2166 bp, Serratia marcescens
atgattttgattgtcagcagcaccgaggcgattcaggtgattgccggtggtgataccgtgctggcgacaaaagactatgttaccgacgcgattaccgcgcatgagaaaaccagaaaccacccggacgccagcaccacgacgaaagggctggtgcaactgagcagcgcgacaaccagtgccgacgaaacgaaagccagcacgcctaaagcgttaaaagcggtcaacgatgccagcatgaagaaggccgcgaacctctcagacctgaccgacaaggccgccgcgcgcggcaatcttgcgctgggaaccgctgcgacgaagaacgtcggcactgagggcggcaatgtgatggccgtcggtgcgtttggtctgggcggtgagggggcgggctatgccatgacctcggatgccgagttaatggcagcattgaaagcgcgaggtagctgtttcttccgcaacaccaaagatgtcaccatggtaccgacctgggggccagggatttttacacgcacgggtgatgccaatggcctttttgcgattaatcctttcaatgggagtgttacggctgctgggttcaccgatgcgaatttgacatcaccgagaattaacgtgctttacgggacggcaaataaaccgactgccgcggacgtgggagcattgaccgatgctcaggccgcccagaaatacgcgctgcgctctatcaaggtgaacggcaagccgttgagcggggatgtcaatctgttggcgggggatgtcaacgcatggaataagaccgaagctgatggccgctatgtgaagcgcaccggcgacacgatgagcaacacgctaaacctgccgcgcgtagcatttcccagcgagtccgcgccgccggtaaatgccgacgatgacctgacgcggccgaacgggttcacgctggagcagttggcggcccaatcgaagggttatccgctgaatgaagagctcggcaacctgctgaccttcaaattaaaccgttatcgcaatgtgcagtttgcgattggctccggcaatacagatttttatttacgctcgatgcgtgatgacaacccggaaacagcccggaagtgggcgcgtgtttacaccaccgactttaaaccaacccttaccgatgtgaaggcggcggatcacagtaataattttgctgcacgaatgggggtttctcgtgtattgacggggaataatgcgccgacatctgccggggtatggagtgtagaaaacagttcttgggcggcggtgccgtgggggtcggttttgtgtaccaccaatgccagcgatctgtctactgcgtcgggtaacggcaagtttcaacattacttgcaacttgcacatgaggcgggcggtaaacccggattgcgtgcggcggtaaacgttaacgggacgtttagtggttgggactcggtgatgatgagccggggcggaacgtttaccggtgtggtgaaaaccaacgcagagatccaatcaacaagctccgataactaccggctgatcggcggtgattacggctcgttctggcgcaatgacggcaacgcgttgtatttgatgctgactaatgcaaaagaccagtacgggacgtggaacagcctccgcccgtttaccattgacgttaaatcagggcagagcacatttgcgcattcaatggctatcaatgacagcctgactgtcaatcgctatatccgcgccgacaaaaacgtatccgtaggtgaggatttgtacgtcgaccgcaacgccacggtaacggggagcctgaaagtaggagccagcacacattccggtgatggcaacattttaggcagccgctggggcaataaatggctgtgggatgccattatcgaagaggtgagcggccgcgttgattggaactcattcaacaaccgaactcatgttgccggtgggcgcggcggttggtggtacaaggacgaattgacaggattcattattcagggaggtgtgatgaaccgtggggctaatttgacgagagtcggattttcgcgtgcgtttcagcgtgagtgctttggcgttcaaatgacgttgggccagctctggggggagtcgaataataatattgaggtgcgcgatttggggaatgacggatttacggcttatatggctgaacgagaaacaaacgcctacttttgggctgtgggggtatga

SEQ ID NO: 433238 - DNA, 432 bp, Serratia marcescens
atgatgattagctacggatacagcgccagtacgacgagtttctacgttctcgaagagcgtgaaggctatgaaaaatataataactggccggacgatgtgaaacctgtcgctgccagcgtgtgggaaaaatattgcggtcagtggcccactggcaagatgcgcggtgcagatgagaatggtgatccgtgctgggttgatattccgccaccaacaaaggccgaacagcgggaaacagctgaacgccaaaaggctcaaagactggagaaggccagtaaggcgatcgccccgctgcaggatgcggatgatttggggatggcgacggaggaagaagccgcgcagctcaagctctggaaaacttaccgggtgcagctcaatcgcattaatccgcaggatgcgccggagattgactggccggtggcacccggagcctaa

SEQ ID NO: 433239 - DNA, 183 bp, Serratia marcescens
atgcaccagcggggtgaaacgctgattggcgcggcggtatccagcggcgccggtaccggcatcatcggcggcaccatcaccgccaccgcattggccatctttttcgtcccgctgttttatgtgttggtgcgccgtatgtttacccgtcggcccgccaacccgccgtcacaggcaggagaataa

SEQ ID NO: 433240 - DNA, 174 bp, Serratia marcescens
atgttaactttaccgctgctgaccggctgtatgtcgctggatccgcactaccagcgcccggtggcgccggtgcccgccgaccgcgcgcgccaggcatttggctgcgcgcggtttttttatggaaagtgtaaagaaacagaaaacccggccggcggccagaactcgctgcggtga

SEQ ID NO: 433241 - DNA, 855 bp, Serratia marcescens
atgatggagatggactttaaaatgcacaatgatctgggtctcggtttcatttgtaaaaatgcaagaacatcgtcaaagccaacgttaagaaaagttacttttccggtaagcgcatatgaaacgtctaagctttctttaaccggttttcaatgccccacagcctgtcgatttcctttttttgtgctatgcatgataatccataaccatctttcgtctgcatgccctatcaaccaaaatgaatgttcaaatcatatatcgcaattttctatcgacattaaagtacaagattggcttagccgttcaagagtagcgttcattgatttccataatctaagaaatacagataaaaccacattaataacagtggaacatcttgaagctttacttactgttatgtcaactactcttgtcgcttacgctccatattcaaaaaagagacttaactttagctttctaaattcatttactttatctaaaacttctcaaagttacacattaactttcccggtagttctcagtcagcttttagatgctcttggcggtttcattcaggaatgcataaccgaaaaattgttaaaacgacgaaattcgaatttcatggtttacgagtatcttaaacgttcaggccagagctctcataaagtggaggacattaataacgacttacagcttaaaactctaaatataagacttatgagcgtccttactgggctttctcagcaaggactcatttcatttatttgcgaaggaaagaggggcgaccggagaatagaagagcttcagtttataccttatgttcaacgaactcaccctgaggtattaacttttcaggaatggattagcccagttgattaa

SEQ ID NO: 433242 - DNA, 774 bp, Serratia marcescens
atgcctttcatcagccatcactacccacacgatcatagttgccggtgggtagaaccctttataggcggtggtgccgtttttctgaacatgtttgcacaaaatgcattgcttgcagatagcaatccagacttgatcaacctatacaggactattcaaagacagaaaactaactttataaatcaggtccaaaacctggcggataaaacctttgtcgaaaaggactactatgagatgagggaccgtttcaacaaaacctgtatttctggtcaaccgcttcaaagagcggctttgttttactccctgaatcgcctaggctataacggtatgtgccgctataactcagaaagaatctattcagtgccgtgggggaaacatacagaactgaagcttgacctcaataaaatagactacctttcatttcgtctttcaggtattgaactgatcaccgctggttttgaggagactctggccgcaaccggtgaaggagatcagatttattgtgatccgccatatgacaaaacaagcaaaactagttttgtcagttacgatggtaaaccgttcagccaatgcgaccacgtgctgttagcaaatatgctcgttgacgctcacagaaaaggcgctgctgttgcgatatcaaatagcctgacaccattcactttgggcctctatgaagagcgtggattcgtcatacacagactcagcgcttaccgatccgtaggaagtaagccgaatacacggaaaacggaaacagaaatactggccgtgctgaaatag

SEQ ID NO: 433243 - DNA, 1089 bp, Serratia marcescens
atgagtgttttactgacagaacctacacagcaagctaatgacaaggtctttaaaacggcccatgttgccttttcagtagttactggcacaggtcgttacgtcactgggcttaaacagttccgtgatgcaaaccctgaactttgtactgaagtaagtgaccagaaagcatgggctatccacccttcagtaattcaggtcacgccaggcttcaactcccgcgaaatgggaatgggtgacgattactataagctccctgaggtggaagaacacatctacaacatcaagaatgcctacattcgaggtgactatgtagaccctatccgagtacgtgtcattgatggggtaccttttgttcgccaggggcactgccgtttaaaagccgcaatgatggcatgtgatgaagatcatgacatcacaatcctttgcgttgagattaaagaagatgaaattggctgtgagctcgcgaccattgatggtaaccgtggtcttgcgctttctcctgttgcgcttggcgagtcctatcgtcgcctacattctcttgctggctggtcactcgaacgaattgctcaacgtgaaaataaaagcccgacgacaatcagttctcttatccgcctgacaacttgttctgttgttatcaagaaatggattcatgctgacgctatttcgtatgttaacgtgctttcactgatcgatgagctgggtgaaacagaagcaatttcacgtatcaagaagatgatcgcggaacttgagcaggccgatgcgaatggcatcacggtgaaaaaaacccaacatggtcaggtacgagtcagaccttcagacttcaagccagcacggattccgccggttattgccacaaaagccgtagaaggcgtcaaactcatcaccaccagcttattacagaaactgggggatattgaattgccggagctgacagattcaagtgctgacgaagaaatcaacattacgttgaaccgcagtactctggagatgctgagaaatctttcaaaagagatcacagaatcagagaacaagcagcttcgccgtgcggagaatcgtcaggcaaaacttaatggtgagaagccaaaataa

SEQ ID NO: 433244 - DNA, 1689 bp, Serratia marcescens
atgtcatctcttgattctgaagctaaacccgataatgcaggtcactgcgtactggctttaacaacctctcatagcctggttagctcttctgaaaaatttcttccagatatgcgcaaagagctcggcattatcgcggatcttgttgagtcctataatgatgaactctgcttgttgaaacacatggctgtccagttcaaaacccacaatcaccagaaactttattcttatctctcaggctacaaccacagcatctctgaagcggatgccttgttcgcagaaaacgctctgagatctgaatactggaaacgcgttatggcactcactgatgttttgcctatcatgtcggatgccaaacgtaacgaatgggataagcagtttacagccgaccgctatattatgccgcctcaggtgatccctgatttcacagctgacgctgtagtaggcacagtcgttgctttgcttaatgaccgcaatcaatttattaaagaaagggtttacgacgtcttccagtctctgagccgcagtcacaagacaaacaaagcttttgggttctccacccgcatgatcactaccggagtttgcgagccgtctaaatacccctggcagaaattaagggtggattttaaagagtctggcatttcaccactgagcgagctccgcgttatatgcgcattcttccgtggcgaacaggtgaaggcgatccataacaccaaatcattggttgaggcgttggtcgaacatgaggggttcagaaaatggatctgcatcgatggcaacagtattcgtttcagggtttacaaaaatggatcaatgcatattgacgtccaccctgatatcgccgagcggcttaacaatattttatcagctatcgtaccgctggcattacctgccgaccgcatggctcatagcaagaaatctttggaggcattcccagtacttaagcagtgcatcgactttgatacccggatgcagctttctgaactgatgtttaaaaatgacggggacaataaatggagttgctggacatctttagggtctctcgccgaacgcaaatcttcgagtgttgccgctgacacccttcggttcttaggggcaacagtaacaaaatacgatgtgacattttcctatgatccgtgtgaggttattcgttacatcggccagatagaggagatgcctgatattgtatcgcatcagttttacccttcatcttgccgaatcagcgaatatgtatcttccctgcttggtgcaggggaaggggataccctcctggagcctaatattggccatgcggatttgcttaaatcattccctgccggtgtgatcgtaactggcatcgagcttgatactttgaattgccttatctcccgggctaagggatacgatacgacagaagctgacttcctcacatggtctaagtctaatcaacagaagaagtttgattatgtcgtgatgaacccaccttttgccgataaccgggccaggctgcatctccaggcagctgcatctcatctcgcaaccgggggagctttagcagccgttcttccattatctcttcaggggctcgataaccttctgggggaagaattccggacggaatggatggacgtttttgagaacgagtttgaaaacacgaccgtttcggttcgcatcctgtacgccgaacgtattcaacaagaggaagtcctatga

SEQ ID NO: 433245 - DNA, 177 bp, Serratia marcescens
atgagcaaccaacccaccagcctaccagaagaagatattgagtttgttatggatacctttcagaggagcatgggtaaatccaaacctgtcagggatactcaaatagagggcgagaaaccgcaaagtaaagagtccgcaaactcaactgaaaaccccggttatgaagaattctattaa

SEQ ID NO: 433246 - DNA, 627 bp, Serratia marcescens
atgttatacatgctcttatgctgttttctgatgctcaatagtacattcgtaatgttcagagcaatgtctgcaataagtaaaggatccgctacagaaaatcgttctgaaatattgctgatagtcctggcaacacttggtattgcatcaccattcattgtcgcaatgattactattaatgaaagtatgacatctaaaacagtaacagatttttctttgggtgctcagtggtccggaatggtttcagcggtagcgttaatggggttatatgctcgacgtgtttggaaagagaagaagtccttatttactggcgctttcctggcctcttccttaatggcctttatttttactgacagccttgttttcgtatcccagaaggacaccggcgttctggctactttcgtactcgataaaaacgctggagatattgattgtagtcgcccggctatgattgtccattacagtaaaggtgttccaacggactggcgttgccctaccagtatcatgttgatggcgtattcttcatctccttttttaccctggcctgagtatagccatggtaccagccagtctcttacggttgttattgatacatttatggaaaacgctgttaatctcagcaaaaaataa

SEQ ID NO: 433247 - DNA, 2457 bp, Serratia marcescens; identical to SEQ ID NO: 157048

SEQ ID NO: 433248 - DNA, 1089 bp, Serratia marcescens; identical to SEQ ID NO: 142991

SEQ ID NO: 433249 - DNA, 1005 bp, Serratia marcescens; identical to SEQ ID NO: 31749

SEQ ID NO: 433250 - DNA, 2973 bp, Serratia marcescens; identical to SEQ ID NO: 56202

SEQ ID NO: 433251 - DNA, 558 bp, Serratia marcescens
ttgcaaggtcaacgcatcggctatgtccgcgtcagcagcttcgaccagaacccggaacggcaattggagggtgttcaggtggcgcgggtgttcaccgacaaggcttctggcaaggacacccagcgtcccgagctggaaaggctgctggccttcgtccgcgagggcgacaccgtggtggtgcatagcatggacaggctggcacgcaaccttgatgacctgcgccgcatcgtccaagggctgacacaacggggcgtgcgcatggagttcgtcaaagaagggctgaagttcaccggcgaggactcaccgatggccaatctgatgctgtcggtcatgggagccttcgctgagttcgagcgcgccctgatccgcgaacgtcagcgcgagggaatcgtgctggccaagcagcgcggtgcctaccggggacgaaagaaatcgctgaacagcgaacaaattgccgagttgaaacggcgagttgcggcaggcgaccaaaaaaccttggtggcccgtgacttcggcatcagccgcgaaactttgtaccagtacctgcgggaagactga

SEQ ID NO: 433252 - DNA, 213 bp, Serratia marcescens
atgaacgcaaacgccccgaacactgccagttgcaccacctgctgcgtatgctgcaaagaaattccgctcgatgccgccttcaccccggaaggcgcggaatacgtcgaacatttctgcgggctggattgctatgaacgcttccaggcacgcgccaaggccgcgacagaatctgacattgcacctgtccctggcggttcgcagccgtcagattga

SEQ ID NO: 433253 - DNA, 237 bp, Serratia marcescens; identical to SEQ ID NO: 77389

SEQ ID NO: 433254 - DNA, 366 bp, Serratia marcescens; identical to SEQ ID NO: 25794

SEQ ID NO: 433255 - DNA, 1686 bp, Serratia marcescens; identical to SEQ ID NO: 77387

SEQ ID NO: 433256 - DNA, 426 bp, Serratia marcescens; identical to SEQ ID NO: 25795

SEQ ID NO: 433257 - DNA, 276 bp, Serratia marcescens; identical to SEQ ID NO: 25796

SEQ ID NO: 433258 - DNA, 396 bp, Serratia marcescens; identical to SEQ ID NO: 77384

SEQ ID NO: 433259 - DNA, 456 bp, Serratia marcescens; identical to SEQ ID NO: 25798

SEQ ID NO: 433260 - DNA, 2421 bp, Serratia marcescens
atgaaacatctcgcttttattactgctgtagccggactcggtatgtctgttcaggccccagctcagatatatgaatcggcctttaaagacacgaacggtattgagatccacgccccgtcttctcgtcttatgcttaatccggcatcaccggtaactttgacacttatttcaggtcttgatcgtttcgttaatgtcaaagtcacgaaagacactggaactgtcattcttaatactacgactacacggacgggtgtatcagaccgactaacagctgctgacggtagtgagttctacggcaaaaaagtaactttgcctgctttgggtgaaggcaaatttgtcgttcagataaacgtcttagatctcaatcagaagcctgtagcgacctataactataactggctaattgatgtcacccctccagcggcaaatgctcttaccgctaatactggttctggctctaccgctggtgacgtgtggaagcttggattagaggcaacggggcagtatgacttcacctcttcgggcgtaagtgatgcaaatggtattgataagggcctaatatatttttacaggcaggacggtagcctctacagcactacacagatgcagtatgacgtatccggccaaaagatgtaccacacttactctaagaattcagttaagggaaccggaataccagacagcaacctggatgaagactttactgcaaaagttgttatcttcgataacgcaggtaatagccgaacgctgccaactcaaaaatttcgctacgacaacacgctgggtgagatgacactgtgggccgttcatgatccaaatacgtcttccagcgtcgtacccggggtttctaattatccggcttacaaagccggtatggtcgttaacgaaaaccctattcgattagtctaccggatcccaaaatctaactaccgtgcttattcagaaggtgggcttcagttcatcaatcaatattccgcccccaaagagatagctgtagacagcacttatgcttatgttgaaatgactcttccctatggctcaattaatggggatatggctcgtatggcgaactttggccagtggggagggtattatccgtcatacagcctcgttctaaacccatctgcaaaccaaacgcctgcatttgcgggtacctgggtagatttcctcgatgataaggggaactgggttaagtggaaggattttgagagtgtggcttcatcacgactgccaattaaaatttcccgacttcgttttaacgttgaagcccggccctttgcacaagagatcggcggtaaggcgacctgcaccattccggcaggaaaaacctcgtgtgaagcgcctgagacgtttgatatggccttgggtacccaaggctacaatagaatcctttacttcgttcgcagcatcagcaatcccattttgcggtctgagcaatggattatgacacgctggaacaataaacaactgccggtaataaactcgatatcatatgacgagactaacaagcagctggatgtactggcgtcacttgaaggcgatggtaactggttcgactcggtctcattgagggaattttatctttccgataagaacactggtacccggatgtcacccacaggagtaatcaaatctcgtatctcaggtaactacacgattgcatatgatttatcccgtcagtctgaaggaaaatacaacgttgaggtcaacatcagggacttcttccagaaccagaccaataaaactttcggagaaattgctctggataacacacctccgacagtggccataacattcgacggaaagccggtaaaagacgatacggtagtgtacggcctggagaacctcaggattgctctggcagataatctgacaaccccgaggataacccgtcttcagctcgtaggtggccccacagctgataacgttgagcttacgtggtcaccggcaggcaaagatacatacatgcctgagtatccgaggctgttcccaaatttcgaaccatctgaaaattattcaattagcgtaacagttgccgatagtcagtcgaataccaaaacctatactcagaagttcagttatctaccgaataaccttgtgcagttacataatctacgcacattatcggttagttcgcctctcaaaacgacagatggcttaccacttgcgtacttgtccactaacattctgcgtaagacaaatggagaaattgctaaaggggtccagaacgcaacgctgactgtgcggaaggatgcagccttcggtattaaatttaatggggcacaggcggctccaggcgagtcagttgaggtgcaaatagatatgggccagggggataatcttctgttacccgtttatccttccgaaaatgggaaagttggcacctcagaattcatgattcagatcgacgagttgaagtaa

SEQ ID NO: 433261 - DNA, 612 bp, Serratia marcescens
atggtaagcacaactggaaaaaatatgttttcaaagcctatgagcactttcacaccagaacgtattgaacaaattttggaatttgccgagggtagtaacccaagcgaagcaatgagtcttagagctgacgaagttgctgtactggcacgtattggaaaggcagttatgtcgattgcttctgtttatcagtgcgagttttgccaccatgacgcaaccgggcaacttcagtggcactgggaagatgtgaacaaagctttttatgataaatacgatccagacagacgcggaagacgtcgaatcctctataccgccccgccgatgcctttagtttcggctgacctgcttaacatggcttcatctgctattgaagacttgctcactaacaaagacagaagtggtgcgggaatgtggaatgacattccagaacagctacgacgcgcagcagaactggtaatagataatagccgggccgctgaaatagaagcgatgctgatgcgtctttatgtagaatgtgacaccggtgagcgcagaggcaacggcagtcaatctggcgtagcaatgccttcgtggcaaaccgttgaagaggcacgtgtgttgctgggggtgaaatga

SEQ ID NO: 433262 - DNA, 264 bp, Serratia marcescens; identical to SEQ ID NO: 26605

SEQ ID NO: 433263 - DNA, 762 bp, Serratia marcescens
atgcaaatctcaactgaagttctgaacgtcttatctcgctgccgtgctgaagggaactttcttttcctggccgaccagctcgaccgcagcatttatgttaagacaaacaaagtgctggaagctgccggtggcaaatggaaccgaaaagagcaggcacatatttttacggcggatgcagctgagcgtatcgagcaaatcattctgacaggttcggtcgacatcccacgtgatttgttcaatttcttccctacccctgagaatttagtcacagatatggttctacgcgctgaaccagctgccggggaacgtatactggagcctgagtttggtgatggccgcattctgaaagccttaaaactggcggctccggatgcattgattaccgggatcgaattgaacgatgagcgattccttgcagtgaagaacgatagtgtccttagcacaggggtcgagctggtgcataccgactttcttgggtaccagcccgatgaaacatttgatgttatcgttatgaatccaccattccttaaacgctctgacgttaaacatgtcatgcatgccatcgcaatgctcgctaagcgaggtcgcttacaggctattctgtcagctggggtattgttccgggaagacacactgacaaaagcgctcagggagcgagtcaaacaacttggcggacaaatttcgcctcttccggatgatacatttagggagtccggaacaaaggtcaaaacagcccgccttgaaattgatcttcgccgctaa

SEQ ID NO: 433264 - DNA, 765 bp, Serratia marcescens
atgtctaaattagtatctcctcgtgaattgactgatattattaccggattactgcttaaacctgaactccttggtgagctggactcaccagaaaagtatcagatgtttatggcagatttaggacgcgtggtggccgaacattgtggaggtcaggtaaacagagtcgtattgccaggagcagaaggtacagtgccggatgggttaccgcttaatggccagccggtacgttatctcggaatcaaagagagcattcctcacctaattgtagagcctgatgcttccttaccttcgctcgctaaaaacgtctggatgtatgcagatcctgaaggctggaaagaacattttggagctgaggaagactgccttactcctgaaatgatgcagctgttccgtaaaggtatccaggctcttcagaatgagcatgacacccctgaaattagcctcacacttcaggactggcgcctggaggaggaaacactaccagaagaggacagtcaggcctatcaggtcagcgttaccgggcaacataacatccactgtgaagttgtgaataaggaaggtgacccctgttttggtgtcatgttcgaaatcgatcagggtgtgcctgccttacacatcaacaccggcggggatatgttgctccacattcattgtgcccataacggactcgttctgactcctgatgcaagcgatcagcgctttgataaggctcccgtcgatcgcttctcttataacagcccatccctgctgttatctgccgactaa

SEQ ID NO: 433265 - DNA, 438 bp, Serratia marcescens; identical to SEQ ID NO: 26609

SEQ ID NO: 433266 - DNA, 189 bp, Serratia marcescens
gtggccaaaaataacaacagtctcaaacagcatgttttcaatatgctgtcggctggcagcgaacttaaacaagtgaagcgttttctcaccagcaagcgccttaaagcccgccaggcagtatcaatggtccacgagcaggcgattgctgtacagaacactgagtacatgaattatccggcttatagctaa

SEQ ID NO: 433267 - DNA, 2391 bp, Serratia marcescens
atgaaaatcaaactagccctgcttattgcatttgcaggtttcagcgcaggagcttccgctgaaatcgcagaattcagctttaaagataacctgaacgttaaaaagaccgtatcgccagcatccgtatggattaatccggtaacgagctttgacgttgccgttatttccggtctggatcgttatattacgctcagtctgctgaaaggtggcgggagcctcatctggagcacgaaaagcagcctggttaccgtagatgaccgcaccacatcttcgacaggctttgattattacggcaagactctgaccgtaccagcgatgggagaagatagcttcaccctcagagaggtgattaccgacttgcaagggaaggaggtctcccggcaggattacccgcttgcaattgaccgaacgcctccagcaacgggtaccataagttatacgagaaatgggtggaactttggcagcgaagcgatcttcacttcagtaccagccggtatgcagtacgccagcgtccaggcactggtctttaatggactgagtgataaaggttccgggcttgctaatgctgaatatttcataaccgatgccgctggagtggagcgtaaaaagccagcggaaattaatacagtggaaggtagcgtaaccgttcaagtcgccgacgcaagcagcaatgccctggcaccggaaaaccgctctgaatataaagtggggatctacctttatgacaaagcgggaaacaggagcgaactaagccgccgaagcgtaattgatcgggttaagcctgacgatatcatccaggtgcaggacgccactaccggatcatgggtcacctatcagtctggcatgaccgtcttccagaaccctatttccgtacgtgtattaaggaaaaaaagtgactttactgctgttaacggttccaaatatggctgggcggactcgaatttccaaacgtccgatagtacttataatatttatacattcaaatacatatatcccaatgtgggggatacttatcatgaattccagactctggcgggaggagtaagacgaattcatcataactccctcaacttcactccagccccggcgatggaaatagccccgaagatagtggctaaagagatgtaccggagtgataccagtgagtggttaactcaggcctcaatcagcgttaaaaccgccaccattagccgcataaaggttaccgcagaaccccgaccatacgtgcaaaagttcagaacggtaaaaaatgcagcctggttctgcactattcctgtcggacaaagttcatgcgagatgacggttaacttcaactacaccagtgacaaaggatttgagtatctgcacctttactcgggaaaagatggtgacagcatattcgatgcgcttgctggtaattttacggttatctgggataacaacccaccggtggttaatgtcgctcaggtaaacaaggcctccaagacaatcactatgacggccaccgataatgatcgtgtcaacgcctggaacatcagctactgggataccaaagttttcgaagccacccttaaaaatgcccggggagaaactttcaccctgaagcctgtgactgtcagtgaaagcgattataaaaccaaaaacgccactttctcatacgctggtctaccggacggggattatacggttgttagcgtgtctgccacggatcttgttggaaacacaggaaccaaaacgcttaatgcaccgctgaaaattgactcaacgcttccggttatcgcgttcagttttaatggcgcagacgcagaaggaaaactggttaaagggcttgagaacctacgcataagcgttactgatgcctctggggatgcttccctgatatcgcttcagctcgctggtggacctaactctgaaaaggtcacccttgcattcacgccgctatccaaggatgtctttattccggaataccccagaatcttccccaatactgacgaatcgggacagatgtatcatctggaggctctggctattgacgaatcaggtaaccggaccactaaaacgcttaattttacctaccagcctgctaacctgattatgctggataatctcaagacgctggccacagccgtagcactgaaagcaacggacaacacgccgctggccatcatccgaaccagtgtgttgcgacgtcaggacggttctatcattaccggacagttaaacggaaccctgactgttcagaaaaatgcccagttcggcgttacggttgccggagttacggtccagcctggtgaaactaaatcgctgtcactggatcttggtaatggtgaagagcgcacatatcccgttactcccgctgtaagtggtcaatctggcacggccacatttgctatagaattccctcaaacataa

SEQ ID NO: 433268 - DNA, 471 bp, Serratia marcescens
atgaccaaatattatgatcgcagtggaattgaaatctccagcgcaaaaatccgctgtgttgattctgtaaaaggtactgcggaatatacttttcgtattctttgcgataaatgcaatggtcggggagagcgtaagcatttttataaaagtcgctgtatggcttgtaaagccacgggttacagcctcgaaacgacccgcactgcttacacgctgaatgcgctgtaccgcattaatgctcaagctgcccgcaaagtgtcagcatccttgcaaaacgagcgtttgaggactgaaagcgcccaaagctctgcgttcactgcatggtgcagatctcatcaaaaaatggttgatgcaatcacccagcaatccagcagtaataattttctggaaagcctaaagtcttctttaacccaccagcgtcagttaagtgataagcagctggcagtcgccgcccgcattttagggattcattaa

SEQ ID NO: 433269 - DNA, 297 bp, Serratia marcescens
atgatccattcatttaaagacagacggcttgaaaagttcttccgtaatggaaaaacaacggcaggtattccttctgaaattattaacgcgattctgtgtcgacttgaaacgctggataatgtccagagtgagagggaattattatccaacagcttgcgttatgaacgcttaagaatgacgtcaaaccgttattcctccattcgagtaaactctaagtatcgattattctttgaatggaatgatggcgcacataatgttcatttgtcagcacatgactataaatcgctcatccattaa

SEQ ID NO: 433270 - DNA, 1146 bp, Serratia marcescens
atggacgcgatgttttatatccaggccagtactaaacaacaggcaagttacatatttagtaccctttccccgaagcctactgcgaactgccagcttacagatttgcagaatgagacggtcgtcccatccataagcccgatttcgctttcacttaacccctggtcgatcaattctcagtcccgaacccgggaattgcgtatggccacgcatggtcttaccctgatctgtgcagtcacggatgagcatacccgtcagatagtcgacttttgcgataaccttggacagcagatcaaggatccggatgacaaaagtgcctgggtaaagctcattaattctgaatgcgctttgcttaattctccgcgtctctatcccgttctgctggagcctgatacaccgactcaatttgaaatctttttgccagctccggaagatggcgatcacgacaccgttatagccaacgttgttcaggaatgtttcggtcatgaatgccggtacagagtaacggacaaagcttttgcaatgtcggaaaagccagtcatcaggctggaagctcatttcaatgacaaacgcgaaaaggttttagaactgaccttttcctgtttcaatctttcactctcagcgtccgtgcatgaaaaccagctacgtcagattttgttactttgcgaagactttggcgtaaggcttcagggtagagcaggggcatcctgccacgttaatatgcgcagtgcttaccgtcgtcttgctcatgttggcaccggctctcgtccaggtgatgacagtgatgtgcgggtctatacctcgttaaaagaagaaaaagatgttaagaggctgcttgataagtcaaccaggggaagtgtgcttgtaccggcgaggcacgggcagcagtttaacggggtcttagtgaatgccacacccgcatcggccactactggtttcatttacctgtcgcatgattttccggaaggccagtttatgatgacagccgaggtgttgcatgttggaataacaccgggcgggatctactacattgaaacactggacggataccggtttatcgtaacagcgtttgaaaagggattaatgaacggtttaagggagtttttggctgtaaatgaggactactttaaatcttaccgctggtcttag

SEQ ID NO: 433271 - DNA, 378 bp, Serratia marcescens
atgaaagcgttagacgtggtttcaactcaactcaactttattaatctgttggatcaggcaggatatgatctttcagaaattgttgtaaaacgcttcagtgctgcaccaacctttaacgaagggcactggttgttcattgcagagcaggataaccgctacattgaagtggtctgtattctctctttagcttcagaaagcggaaagcagcatgttgatgtttttattaatatgttcgaagacccgattgatgatgttatttcacgaaacattgaaacaaaaacctttgcgacgctttataaatacattgaacgtataccttttactccgggcgtaaagaaagaattcttgagcagtattgagaacatcaattttagttaa

SEQ ID NO: 433272 - DNA, 429 bp, Serratia marcescens; identical to SEQ ID NO: 142995

SEQ ID NO: 433273 - DNA, 258 bp, Serratia marcescens
atgtctgaaaaacactttatcgttaagatccagaaccgtaacggcgaccatgagaaaagctatgttcgtttactcgtcagcgattgtgagaaaaatgcttgccagacggcactgatttccgagtgtgctggcgagattgaacagctgagttttgaagacggtggggtttacgactacaacggcgaaaatcactacagtgtcaggagctgcgtggaggttgctccagaagatgttgcaactttgcaacgcttcctttaa

SEQ ID NO: 433274 - DNA, 609 bp, Serratia marcescens
atgaagagctgcttttctgatttacccgttaaagacggcacgtccggaacctggaaactggacacattcgaaattaccgcagataaggcgatgagtctcgcccttcgtgccgagtatacaggtaatacagacgagtttatcccgcccggtagatatcggcgcttgtccaacggctgggatgtggtgatgtccaataccccgatggagatcagaacttgccaagattttttagagcgagccaccgggcgcgtgctcattaatggtcttggtctggggatggtgcttcacgccattcttcaaaaagacgatgtaacccatgtaacggtaattgaaaaagaacaggacgttattaacctcgttgcggcctcgtttgcaaacgatcctcgcgttgaaattatccatgctgatgcagtgatgtattgcccaccagcaggcgtcacgtacaactcatgctggcacgacatatggccagacttcgcaacagctaacctcgcacagatggataagctggaaattaagtaccgggacatctgtggatggcagggctcgtggggcagggaggagtgtgagcaaaagctcattgagtttcaaactcttggggctgattga

SEQ ID NO: 433275 - DNA, 1134 bp, Serratia marcescens
atgagcacgatttctacggatttaattgcacggatctacgcagcctccgaattgccgttgagcaacgacgaactttatcgcgaagtgcagcgtgaaactggcatgtcggatgccgaattgcacgaactgaaagaatttgggtcagataaaaccagaaccagcggcgtcaaacacaaagtacgctggtttcagcagactctccgtcaggctggggtcatcgaacgcgttccagaaaaacgtggcgtctggagatacgcctctaagacgaaaacaaacctgcacgagtcatgggaaaagctctgtgttgtcggtttctcaactgctcttggggcatcggtttttggaaacgcctatgccttcttcagcaatatcacagagcaaattcatctttgcctgacctcgccaccttacctccttcgaaattcaagagactacgggcacggaggggggcgtggcgagcaggcttatattgactggcttctgcgtatcctcgaaccgatcgtgaaacagcttgtaccgggcgcaagtgtggcattgaatatcactcaagatagctttaataggggcaggccttcacgttctctgtatctggagcgtctgacactggcattatgtgacaagctggggcttgagctcatggacaggcttcagtgggtgaatcgcagtaagcccccatcgccaacgcactgggcatgtaagcaacgggtgcagctctgctcatcgtatgagcctgtgctgtggtttaccaatgatgcgagtaaggttcgttcaaacaacttacgtgtactgcaaccgcattcagaggagcatcttaaattgcaggcagcaggcggtgaaaatcgcacgaccttttatggtgatggggcgtaccagcttaaaagcggatcctttggaaataaaacagaaggaacgatccccaagaatactttgttttacggcaatagctgcgctgatacgagattttgccattccattgcccgcgagctcggttttccgctgcatggtgcaacgtctcctaccaagcttgcagcgtttctgattgagtttttgacagagccgggagatcttgttgtagatcccttcgctggcttgcataaagtccccatcgcagccgagcgacttggcagacgttag

SEQ ID NO: 433276 - DNA, 258 bp, Serratia marcescens
atgaatctaaacgaacaaagcacgagcgctgcgacgccagatttgagccgactttatctcatttccgggcgcattatgtttgatgatgatgatcaggcctacctggtcgaagccgattcccctggtgatgcagaggaggctttccggcattatattgccgacagtgccgatgacttagaaaaggtgattatagtttcctctacaagtttcgcttcagctcacagcagtcgcgtaatttttcggcctaccgtaaattaa

SEQ ID NO: 433277 - DNA, 834 bp, Serratia marcescens
atggactatcaacactggctgaaagccgccgccgcgcgtttgacccacagcgacagcgcccggcgcgacgcggaaatcctgttgggtttcgtgaccggcaaggccagaaccttcctgatggcgttcggggaaactcagctgacgccagcgcagcaacagcagctggagacgctgctggcgcgccgcgaacgcggtgagccggtggcctacctggtgggcgagcgcgaattttggtcgctgccgctgtcggtttcgcccgcaacgctgatcccacgcccggataccgaatgcctggtggagctggcgctggcgcgcctgccgccacaaccctgccacttcctcgatctcggcaccggtaccggcgccatcgcgctggcgctggccggcgagcgccccgattgttcggccatcggcgtcgatgtgcagccggaggcggtcgcgctggcgcagcacaatgcgcacaagctgaagatcgacaacgtccgatttctacagggcagctggtttgcgccggtggcggggcaacgcttcgcgctgatcgccagcaatccgccctatatcgacgccgccgatccgcatttgtcgcagggcgacgtgcgcttcgagcccggcagcgcgctggtcgccgccgatcatgggttggcggatctggccgccatcgtgcgccaggcgccgcaccatttgcagccccagggctggctgctgttggaacacggctggcagcagggcgagagcgtgcgcgcgctgctgcaggccgccggattttccgctgtcgccacccaccgtgattatggcgacaacgaccgcgtgacgctcggccaatggccgggataa

SEQ ID NO: 433278 - DNA, 1035 bp, Serratia marcescens
atgaaaaatagaaaaatcaaaacgttgcttgttacctgcgccgtggccggcgccgcgttgctggccatcgccggcaaagcggaaaacgccgataaaaccttcctctctgtcgccaccgcctccaccggcggtacctactatccgatgggcgtcgggctggccaacgtctggagcaaccggctgaagcaccaggggatacaggtcaccggccaatcctccgccggctcgatcgagaatatcgacctgctgcaaaaagacgaggcgcagttggcgattttgcaaagcctgatcgccgtcgaagcctatcagggcgtgcgtaacttcgacggccgcgcctacggcgatctgcgctccatctccatgctgtggcccaacgtcgaacacttcgtgatgcaggaaagccgggtgaaagacggcacgctgaacgatatcgccggcacgcgcttttccgtcgggccgcaggccagcggcaccgaacagtcgacgatgatcatcctgcagggcgtcaacctgaccaagaagtcgctgtcggcggaatacctcggctacggcgacacggtctccgcgatgcgcgacgggcgcctggacggcggcgccctgcccgccggggtgccggccgccgccgtcaccgatatgtatgccagcggcgtgccggcacgcatcctggaagtcaccgacgaacagctggccagcatcaacgccatcgccaactcctggttccgcttcgacatcaaggcggagacctacccgcgccagcccaaggcggtcgccaccatcgcacagcccaatattctggtggccctcagccggctcgatgaaaagctggtgtacgacctgaccaaaacgatgttcgagaacctgccggaagtgcaccaggtacacagctcggccaaatacatctcgctggaaaatgcgctgaaaggcgtttccgtgccgctgcacctcggcgcctatcgctactaccgcgaagccggcgtcgagatacccgattatctgatcccgccggaagccgccgcgctggccgccaacccctaa

SEQ ID NO: 433279 - DNA, 339 bp, Serratia marcescens; identical to SEQ ID NO: 433034

SEQ ID NO: 433280 - DNA, 897 bp, Serratia marcescens
atgcacaccggtcacgctctgcttatcaccttactgtcccttggcctctctcccagcgcctggtcctctgccgacaccgggcatgccaacagcaacgccaacagccgcgaagtggccagcgcgctgggcggcctgaaaaacaaaacctacgaactggaacaggcgccgaagatccgcgtcgccagcttcaatatcgccgccggtaaggtcagcgacatgaccgccatcgccaaggcgattcgcgcgatgaacgtcgacgtggtggcgctgcaagaggtggataagctcaccgcccgcagcggccgcgtcgatcaggcggctgagctggcgaagctgaccggcatgcaggcggtgttcggccgggcgatcgacttcgacggcggcgaatatggcctggcgtttctgtccaggtatccgctgcacgacgccgtgatctatccgctgccgtccggccagcgcgaacagcgcatcgccttcagcgccaaggtcgacgtgccggagttcccggcgccgatcaccctgttcaacactcatctcgataccaaggaagatccgacaatgcgcttggatcaggtgcgggagctgaacgatcgcaccatcgaagtgcgcggtatcaagctgctgttcggcgacatgaacgatgtgccgggcagcgtgacctggctggaattgagccgctattggaacgacatcatgcctaacgggcaggatggccgcagctggccggcggaaaatgccgagatcaaggtggattacctcttcaccggcaacgcgcagcgctggcatctggacagcctgacggtaccgaacgccagcggcgactggaacggcgtgcattggccggcggtgagcgatcacctgccgctggtggctgaaatgcgtctgaccgagcaataa

SEQ ID NO: 433281 - DNA, 1473 bp, Serratia marcescens
atgattgatacccatttcccaaccgtgataagacccattatgcggcactcgctggtcacgttgtttcagcaatcgccccacaccgccggtacgctgcgcgatcgcctgtgcggcgcattgcggcaggccatccaccaaactgcattgagcgttgggcaacgcctgccttccagccgagtgctggctggggatctgaaactctcaagggtgaccgtcgaagcggcctacagtcagttggaggcggaggggtatttgcagcgccgcgtcggccagggcacctttgtggcgattatcatcgccaaatcaccaccgccggcgaccgctgccggcataccgcgcctttcgcaacgcggccaacagatcgtacaaaccggcggctgccgcgatccgcagcagccacgggcgtttgccgccggctcgccggatctgcgtgcgtttccgctggccttgtggaagcaactgaccgcacagcgcctgcggctacagggagaaagcctgctgcgctacggcgacccgcagggctatttgccgctgcgtgaagcgattgccgcccacgtcaatcaaacgcgcggcgtgatctgcgatgcacggcaggttatcgtgctgaccagttcgcagcaggcgctgcagctgatcgccacgctgctgctggacagcggcgacagcgtctggatggaagagccgggttacaccggggcaagaaacgcttttatcagcgccggagccgccctgacgccggtcgcggtggacggcgacggcctgcgtgctgacccctccttgcccgaccctcgtttgatttatctgacgccctcgcaccaatacccaaccggcgcagcgctcagcctggcacgccgcttggcgctgctggcgctggcggacaggcagcaggcctggatcgtcgaggacgattacgacagcgagtttcattacgacggcctgccgataccggcgatgcagggcctggatcgccgtggccgggtgctgtacctcggcaccttctccaaatcactgttcccttcgctgcggttggcgtacctgatcgtcccgcctacgctggttgacgcgttcgtcaccgcacgcacggtgtatgacggccacagtgcgcagctgatgcaggcggtcaccgccgaattcatccgccaggggtactttgccgcgcatatccgctacatgcgccagctctaccgcagccggcgcgatacgttgctggcggaagttcacgaaaaactcggccacttcgccacgcccgctcccgccgccggcggcctgcagctcagcgtctggctgccgcccggccaggaggcggcgctcagccgacaggcgcagcggctcggcatcctcacgcccgggctgacggcgcaataccagacggcgcagacgcagcgcgacggctggctgctgggcttttcggccctgacgccgggcgagatccgcagcgccgtcgagcggctggcgcagattgccgtagcttag

SEQ ID NO: 433282 - DNA, 321 bp, Serratia marcescens
atgcagctgccgcgcctcatcgaaaacccggacgggatggggttggcaccggacggcgcgctgatcgtgccggaaaacgcgatccagagcggccaggggcggatcctgcggatcccttcccccaaggcggcaggcatgcaccggattgagatcttgcgcgaaggcatggagtcgccggtcaacctgactatccccccacaaggctgcgcctttgtcagcgaatcgcgcatccgccaccgcctgctgcccggccatgaaaccgaagtgcccgacagcttccgcctctatcaactgcctttgcctctcaccgccgcgcaataa

SEQ ID NO: 433283 - DNA, 714 bp, Serratia marcescens
atgattatttaccttcctatttattacaagcagtttgatattcatacgagcactgggaaattagatctcgctataacaatgcttctgggttttcatcatctctggtatttggtcgcgatgtttgtcggaggagtacttttatttttgaccagaaagtcaaatatgaacgttatgttggcaatttcatttgcattgataatatgtggtgtacttatacagtattacttaaaaatccatgggaaacagctaactcaagaccgttacattcttattaacttataccgtaattttctatttatgggattcccttttatgttcattggtcattatttacgaacccagaaaatagaaatcaatcaaagaatcgctatctctatagcagcgctctctgccttttgcgtaatctttgagtcgatctattactattctattggtgacatactgcctatagatacgcttttttccgtatcaattttagcaccagctcttttcttaatagcaaaaaacatcaatatcaaaaaaagcgtgaaatcgatgtcaacaatagcaacagctgtttacctaacacatcctttcatcataaaaatcgtatcatctgatagattcggaatctctgagagtatgtataccatattcttacttagctctgttttttctattttacttgccatcatcctttcaaagatgaataaaaagttcaagtatctactctaa

SEQ ID NO: 433284 - DNA, 663 bp, Serratia marcescens
gtggaattaatagatatattcgcgttgttctcgtgtgtactcctggtggtgtgcggtttgtattatggtgcggcatttgtcaggcgcaaaaactacctgcttggcgtggaatttttgatagttggtatttccgcgacaaactttacgaccttcatcgctaccggctggcaaaccaactacgatgttgccatttttcttgatgccttttcccgaggtgtcggtgtgccgattgttggaacgcttggcttgatggccgtgacgcatggctacaagccgtcgccggcgaaggatttcatcttgttcttggccgctttcagtgtcacggctatttacttcctgtcgacggcattcaaaccgtggctgccctatttttatgtgctgatgtgggcgctgtacacattgtatctgctgtatttcatttggtgtctggtgcgtgccggcgaattcctgcatgcgctggcgactctgctgggggggggcgcaggggggacgattgcgctgaagtatgacttcttcccgatcctgggagatggcacgaagatggtctttatgacctgtgccttccttacttggtcttacatgatggcgcagttattctatgcttattgcgcacttcagcgctcaatgaaaacctctacgcacactatggttcattctcgttga

SEQ ID NO: 433285 - DNA, 1368 bp, Serratia marcescens
atgaatgcagggaacaaagcatcttttggtggcgttgcaccattgaagtttcgcagcctggggggctgggtggagccgcctgccgacctacagccctcgcttgaaggggatgtgaaggctgatgtcatcgtggtcggtgccggatttgccgggctatcgactgcgctggagttgagggcgctgggggcgcaggtcatcctgctggagcaggagttcgccggcttcggcgccagtggccgcaatgccggctacctgctgggcagcatgggaatcgagtacgagatgttcgtcaagcggttaggtgtggcacaggcgacgcagttcgtcaggttctacgacgaggcagtgccctacgtggaaggtcgaatgaaaacgttaggtattgactgtgattacaacccgtccggtgtgttgcgagcaggtattcatctcagccaggaaaaacgcctgcggcaaaacatggcattgggtcaaaagttaggggcaaagacccgcttcgtggacagttccgaaatgcgggcgcggggaattccgccggcctttcttttcgccgccgagcagtgtggtggcacgttgaatcctgggaagtatgtcggcggtctgcgccgtgcggctatcgaggcgggggtgaaattttacgagcgcacgccattgctctccttcagcgagggttcgagcattgtctgcaagactgcgcacggtagtgcgaccgctccggtaatggtattggcggccaatgcttacctcccccagctaggcgtgctgcgcaacaaggttgcagcgattcgggtgtcggcgatagaaacgcaaccgctctcgccgcaacaacttgctgctctgggatggcagggaagagaggggatcatcacgccgcactataccatggagagtcaccgcctgacggcgcacggcaccatggtattgactgtcaagaagttgggctatgcctatggttcaaagacgcccaacatccccgatcaaggtgcctatgtggcattggaacaggtactacgcgcacgctatccggccttgcacgacctaggtatcaagcattgttggagtggttatgtcagcggcgcctatgacttcctgccggtactcggcgcaatgggcgaaaaacaaaatattttctataccaccggttgctcgggccatggactcggcacccaatcgtttatcggcttgcttttggccaagcaaatcaacggcaggacgccagagctgttggctgcgttgcaccacaagacgccatccatgctgcctgagcccttgcagtggtgcgccatacagtccgcgtttgcggcggctaagttgatggatgactggatcgataggaaagtacgtaaagatattgccataaaaggctga

SEQ ID NO: 433286 - DNA, 1092 bp, Serratia marcescens
atgctggcagcgttccggcgcgccaatcgggcagaattgttgcactgggcaaatgcgaatctgcagcgccccggagaacccgtgcaaccctacgtgtctgctgacattctggacacggcccgagagctggttcataggggcgaaggggagctgctgatgaagatcgcccgatcgacgcaaaacgcagcttgggagctttggatggcgcttgcgtttaaccttacgcaagatcccatagagctaaaggaattcctcgaagtttcgttgcgctcgatctcgacattcatcgacagcaacatgtgtacattgactcaaattctcctggaggaaaagagagctcagttccatgagggttctatcgacaaacgcagcctggtcagccggttgcttgatggtggaaacgtggatgttgagcaattaggcaggcaactgggttacagtctttttcagcggcaccgtgcctgtctaatctggagcgagatcgaggatatggatattcgccgactggagacaatggcgtatgcggtggcacatctcatgggttcgacagctcccctcatcgtcttcgctggccctgcgaccttatgggtttggtgccatacgacaaaagtattggatttaaacgaactgcaagatattgctcggcgtttcccaacactacgagcggccatcggctcaccgatcgcaggaataggcggcttccgccgatctcatctggaagccttgaccacccagagattattagggcgattaactggtgcgccggccgttgctacgatagaccaggtgaggatggtgtccctgatgacccacgacgcccgtgcggctaggcagtttgtcttgagaacgctcggacgcctagcgacagattctgtggtacttcaacgatcgctgcatgctttcctggccaacggttgtaatgtcacccagaccgctgaagcactgcgtacgcatcgcaatacattgctgcgccgcctggatcgcgctcagcatctactgcctctccagtttgccgaccaccgtattcaagttgcagcagcccttgaactgttgatttggaatatcccgctgaatgacgaggaaagcagatga

SEQ ID NO: 433287 - DNA, 888 bp, Serratia marcescens
atgaatacacgaaaactctcgacgctcagtagtgatgcatcgatcgatcaggtggtagaagtcatcaagcgcgacggcggggtcataatttccgactttgtctcaccaacagtgctgaagtctcttgccaacgagctggacacttacctgaatgccacaccttttggcgtggatccctacttcgcgggtactcagactcgccgtatcgcccgcataatcgggcgaagtgataccgccgtggaggtggcactcaatccgctgttcatcggtgccgccagaaagatcctacaaacacccacccacgtttgggtcggcaatgaccgtgcagagatcgagcctgatattcaactcagcattactcaggctattcagatcgccccgggccaaggccgccagcctctgcatcgtgacgatgccacgtcgctctggcgccatccacagtatggccgtgaagcaaggctgcaaatgatgttggccatttcagaattcaccgaagagaatggggcaacgcgtgtcattccagggagccatctatgggatgacgagcgtatgcctactcaagaagaaactgtcgctgcagaaatgaaagcaggttccgcgctgttatggatgggctctgtgtatcattgtggtggctccaataattccacgtctcctcgcactggactgacgatggcctacgatttggcgtttctgcgtcttgaagaaaatcacttcctttccattcccgttgaacgcgttcgtcaacttcctgctgaaatgcagcgtctactgggctggagtgccagttcgacactgcaggggtgggtggaaatcgatggccaaatgcgcgatccccaggaacttctgaccatgtcgaacttctccgaacctggaaaagggttctga

SEQ ID NO: 433288 - DNA, 594 bp, Serratia marcescens
atggctcggataagtgctagagagcggagacaggactttattgaagccaccatcaaggtgattacggaacatggcgtggctaatgccactacgcggcgtattgcggaggcagcaggttctccgttagcctccttgcactatgtctttcacacgaaggacgaattgttctgtgcagtatacgagtctcttattaacatgcctcagaagtcgttgcagaacatgccggaaaattcgacaacagcggaagcagtgggagagatactacgcagtctggtcaggtggttcactaccaaccctgacttggcaactacgcaattcgaattgttcttctggaatcttcgtaacaacccggacgtagcaaacaaaatttacaccgcctctatcgaagcgaccaagcaagcgatcgtgagtattaccgctacagaactaaaaccggccacgttaaccgccattagcaatctactgatcaatctgttcgacggcttgttgctgagttggtcagcccatggcaaccttgaacgtctggaaaaagagaccgaaacagcttgccgagccgtcaagctgctgatagccagctaccagaacgctccttga

SEQ ID NO: 433289 - DNA, 1527 bp, Serratia marcescens
atgccctctcatactgatcttcctcttgagccacttgacgtattgatcatgggagctggcgtgtctggcataggtgcggcagcctatctgcgacgcgatcagccgcacaaagtcattgcgattctcgaatcccgtgaacaaatgggcggtacctgggatctgttccgttatccgggtattcgttcggactcggatctgtatacctttggttttgactttaaaccctggacgaaagccaaatctctggccgatgcgtcggacattctcgagtatctgcacgaaaccattgatgaatatgcgctagctcccttcattcattataagcagcaggtgatctccgcgaactggcaaacggacaaaggtttatgggctgtacaagtcgaggacggttatacggctaagatccgtgtgatcgaatgccgctggttgttcagtgcaggcggttactatcgttacgatcaggggttcagtcctcgttttgaaggcagtgagcatttcaaagggcaaatcattcacccacaacactggccagaacagttggattacaccggcaagcgagtcgtcgtcattggcagtggtgcaacggcggtgaccttgattcccgccatggcggacaaagctgccagtgtaaccatgctacagcgcactccctcctacatcatcaatcagcctgcgaatgattccgttgcagcttttctacgcaagattctaccggaacaaacagcttactcactgacacgctataaaaatgccaagattactttggctttctggggattttgccaacgcttccctaagctctcgcgaaaactgcttctttggttgacccgtaaggaattgccgaaagactacccggtcgatgtgcattttaatccgccctacaacccatgggatcaacgtctttgttcagttcccgaaggcgatttgttcaaaactatcagcgcagggaaagccgacgtcgtgaccgatcatgtcgaacggttcaccgaacacggtgtattgctcaaatcgggcaagatgcttaaggctgacattatcattactgccacggggcttaacgtacaactgtttggcggcatcaccctatacaaggacggcaaaccggtcgtgctgagtgaaaccatcgcctacaaaggcatgatgctctccggcgtacccaattttgcgtttgcggtgggttacaccaattcatcctggaccttgaaagtttgcctgctgtgcgaccatttttgccgcttgctgggtttcatggaacgcaaagattataacgtttgcgagcctaaagcaccggatggtatcaagactcgccccttgttggacttcggagccggctacgtgcagcgcgtactggacagcatgccacgacagggaccacgcgaaccttgggtgatgtcgatggattattttcgcgatatcaagttattgcgccgtggaaaagtggatgataagcatctctcgttcatgacagtaagccattcccccttacatgccgacatcgaactgcagcagcaaggtagccacccatga

SEQ ID NO: 433290 - DNA, 876 bp, Serratia marcescens
atgagcaccgaccacttctgtgagttagcgatgcaacgcaagctctgctatcgtagccacggctcagaagacgctcctgcggttcttcttatcgtcggtttaggactacagttgacctattggccacaaacgctgattgccgggctggttgagcgaggttttcgcgtcataacattagacaaccgcgattcgggcaaatcgttctttactgacgtggcgcctcccacgatcttgcagcagttgttccgtaaacggacttccggttataacctggctgatatggccgaagacgtgatcggtctcatgaatggcttgaaactagaaatggcgcatgtaatgggtatgtcgatggggggaatgatcgcccagacactcgctgcccgctatcctgagcgcatcaggacactaacctccattttctcgacaaccggctctctacgcgtaggccagccagcatacaagactatcttgcatctcgtgcgccgtcccccccggaatcagctggaaagtgttcggaattatctggacataatgaggcttattggttcaacgctcgagtggaacgagaaagcgctgcgtgactatgccctggaagcctgggaccgaggtggccgtgaggcgagcaacgtaggaaccgccagacaagttggcgccatcattaattccggtgaccgcaccgcggagatacggcgaattcgttgcaggtcgctgattattcatggggagaaagatctgatggtcgcaactaatggtgggttcgccacggctgcggcgattcgtggctccaacctggttctcttacctggtatggggcatgactttccgacctgcctgtcgggcacgctgctatccctgttggctgggcacatgcgctaa

SEQ ID NO: 433291 - DNA, 1074 bp, Serratia marcescens
atgttaaatgtcagtgacaacagtaaaaatgaaagtatattgctagagtataagaaaatggaatcggtttaccataaattttcagcaaaggttgaggatattttattacacgcaattaaaggcataaagattataaatgtaaacaaaagagttaagacattagaaagcctttcggataagctaattaagaaacagtctaaatacaatgatataaacgaaatcacagatatcgtaggcgtccgagtaattacattattctccgatgacgttgatggcgtggcgagaatagttgaaagtgagtttgacgttgatattgaaaactctatagacaaacgtaaaagtgagtctcctgataaatttggctatatgtctcttcattatgtaattcagatgaaaaaaaacagaaccaatttaccagaatataaagaattcgctggattaaaagcggaaatacaaatcaggacatcattacaacactcctgggctgagatggaacatggccttcagtacaaaaatagtgacgcgctaccgtataaaattagaagacaactatcaagcttatccagtttattagaaactgctgactctcagctggttcttctcaaagattttgaaaatgaactgatcgatgaatcaacgctatcgttaaacaaagaaaaacctgaaaacgtcgcactaaacaaaataacgcttcctttattctttaaagacaaaaactcaattatctataaaatcagggacgagtttttgaacaataaatccgacaaagaactcaacgtcccaggagtggaaaaattagcagattttgatcgcgaaggaattagaacactagactctaacctgtcattttttgcatcatgccttcatgactttgaaatattcaatttccaacaactctatgatttttgcaaaaacagatcagatgtcctacttaaccactcggataaaataaatgaggagattctacgtaaacctagcgcgataaacattaataatttcttctttatgtttttgctggcttgcatatatgacgaactaatcaatgggaataagattgatgataaatcaaactga

SEQ ID NO: 433292 - DNA, 528 bp, Serratia marcescens
atgcagatatgcagacttaactacaacgatgcctctccagaccgccgcgtgctgaaactccacgtctacggggtggggacgtttccggtgttttcaggcaagccgagtatgctaaatcgtcctgattgttctttcagagacaaaggggcgctacccccggggcagtattggattgttgatcgccctcatgggagtatacgaaaccagctggagtcattaggtaaagacatatggcatgggacaaaccattctacgtggcttggtttgttcagtttccaaacgcttaccgataatttgtggattaatggacaagatcgaggcggctttcgcattcatccattgagacctaatggcgaaggagaatcatggggttgcattaccttctaccatattgctgattttaatcgatttcgacacgtactcgtccaacgtagaaaattcaaaatccccggctcacgtgtaggtatcatgtcctatggtagggtagatgttacgggttcaactaactacgaggcttgcgatgtttaa

SEQ ID NO: 433293 - DNA, 252 bp, Serratia marcescens
atgtttaagaatttgatgctgtttgcaacttgtttcatagcgtcgttttttattcttaacaaaatcccggtgcttaaaaatctggttgatatgactgtaaatcaggttggtgattggatgaatgccgctaacatagcgaaaagtgatggagagtttgatccagcgtttctccccgtggtgataacctatatgttgctcgcgacatttattttaatggccgtcgtcaaacgcttaatgcgtaaaccccgctaa

SEQ ID NO: 433294 - DNA, 1023 bp, Serratia marcescens
atgaacaacagcaaacataaagtcattgaagtggatactaatctagttgaaattgaaaagggatttaatccccgagaggcggtaatcggagatttgtgttacgaacaagaacctgtcaaatcgatgattgtgtcaatcaaacaagcctttaaggaaggaaggcaggttgatatgatcaaggtcgtaaaaagaaaaggtaaatatttagttcgtcaaggtcatactcgttttcatggcttaaaattagcaatttctgaaggtgccaatattccaaaattatctgttatcctaatcgattataaaaacgaaattgaagaataccttgagaacctcgatggtaacagaagcaatgggctaaatccggttgggcaagctcatgcattagctcatgctgttagtctcgggtattcggttgaagaactagcaatgcgatatcagcgttcaactaccgcaattcgtaatatgctaaaaatccttgatatgccattagagcttcaacgtttgattagcctaaatctaatcaaaaaaacgctcgccattgaaataatgttaaaatattccaacgatcacaaaatggttttaaaacatattgagactacaacgagcaaaattgaaggcatacctgaacacaatgcagctggagcaggaccagacaccttaaataaaggcgaaccagaaaagaaaaattcggcagtcactcgtaagactttgggtattaagcgcctctcgcataagaaaacagaacggctaaaatctgaatttcttgagcttgtggaaagtacacatacggaatctataacgaatactcaaacagaactaaaatttggtagagatagtgcacacttgttcaaaaatgttgatagtaaaaatgtaatattttctaatgatggtgttcaaataatcttgaatgatgaaaagctaaatattttattgtctttacttaacgacgaaaatacagcaatcattgtttctaaaccaaaattagaagagcttctggaaattcgagatctccttaaggaataa

SEQ ID NO: 433295 - DNA, 876 bp, Serratia marcescens
atgattaaaaacaacgagttaatccatccttttgacgtaaccagtaatgaatcaggtaagacttatcaactgacgcctaactcgtccaagtcggttcagcccgtggccctgctgagattgagtgtatttacccctgtcggcacaaaagaaaaccgcgaccgaaactttgaagttgatgcctctgatgagctttcgtgtatggaaattgcaagatcggagggttatgacgacatcaagataactggtgtcaaactatctatgtctaccgactttaagtgctggctcgggatcatcatggctttcagtaaatatggttttacttccgagaagattaccctgacttttaacgagtttgcgaagatgtgtggtatcagttcaacaaacatcaacaaacgaactcgtgcgcgctttaaagagtcattaatgaaccttgcatcggtagtgcttgccttctcagactctcgtagtggtcggttcacagtaacgcatctggtgcagaaggctatgattgatccaaaaagcgatactgttgagctggttggggatccttctatgtgggaactgtatcgttacgaccataagacattgttaagccttcaggttctatacattttggctaaaaaagaagctgcgcaatctctctatatttattttgaagcaatgccagctggtacgttgttcgttaatatgaaacggttgagggaaaggttgcttcttacaacccctattcgtacgcaaaaccagataattcgcaaagcaatgcgggaacttgaatctatcggatatctcgattatcaagaagttaagaaaggtcgcgacatacaatttcagatcttcaaaagaagccctaagctggcccttgccaaacaaggttga

SEQ ID NO: 433296 - DNA, 354 bp, Serratia marcescens; identical to SEQ ID NO: 118080

SEQ ID NO: 433297 - DNA, 789 bp, Serratia marcescens
atgaaaatgctaagtggcattaacatcccttttttcaaaaaatctaaaaaggatgaaaacggtgatcttgagcagtcatacgtaaagaaagatgaaagtgctaagggacgttttttggacattaaaaaacgatttagcccacaagctgaagcgtcaggtgctggaattacatacagcgccctgattaatcgtgatacaaaacttatccgcattaatactgtttcaatagccgtcattgggttattggttgcaaagattctttttttcactgacccagtgacgattgttacccctccaaacatgaatgaagagatcacggttgttggtaacaaagcatcggaatcttataaaacacaatgggctctcttttttagtacccttttagggaatattaatccaactaatatttcctttgtgacggcctatgtcctcgatgccctttcacctgaactacaggctaaaacgagtgagtctttacaggagcagataaatatcatgcaggctcgtggtgttgagcagacctttaagcctaatgatatttactatgatccaaaaaatgacatggtctatgtctggggtaccaaaacgactcgacttgtaaatgttcctgacaaaactgaatcatcgaaatggacttatgaatgggttctcgggatgaaaaatggacgcccaagaattgcatatgtaaatcaatattccggaacaccgaatattaaaaaaattacgataaacggcaaagagcaactggcaacgctggataatccgccaccgtctacaggtaacaagtga

SEQ ID NO: 433298 - DNA, 1272 bp, Serratia marcescens
atgattaaaaaaaagggcttaggcttcaacgcaattaccgcattgatcatgctcacgacttcgaactgcgtaatcgctgaagaataccaattgccagcaacaattaataacccggttgtaatgccagttggcgctgacggatttcagaatggagctgcaaaagccattattccgggtcaagctggttctgaacaatcaggtgcacaaacaaaccttagtgaagccggtaatgcgcagggacaaaaacctacaactgatctccctaccgtgcaactttccccagccagcaatgcttctcctgcggtaagcgctattactggagcattatcaaataatcctagtctccccggatttgacgcacagacccgatctggtgcaattgatagctatgggagaccaacaggtacctcttcccagcagaatgcaaccaatgcgaccgccacgtcaaaagccgatgaactttatgtcgaagctcgtaaccgatataaagaagttcagcgtgtaaatgtgccgcctggtgggaatgtggtactgccagtttcacgaggacttcaaaacagaatatctaccagcttcaagaatgcttctgtcagcacttctacccctgctgaagaggcaagcatatttgttaatggtggcgatgtctttatttcaactaataccgataaaccaatcgggattatgttgtctgaagatcaggtacctgaatcgacctataacctgaccctggtaccgcttgatgttcccggtgcgatgatttcagttactacatctttaagcccatctatgcaagccaaacgtgaaacctcattggataagcaaaactatgaggaaatgttggcccgctcccagtcagaagaactggctccaacggatccaaaacaagacgatcataaacaaagaatcattgatttattgactcctgtggctcttggtgaggtcccttcaggattcagtttacaacaggaccgactttctcgtattcctgcgtcagagcagtcaccatgtaactttaatatgtatgcaaagctcggtcagagactggtcggctcacgtgaacttattgatgtaattcttgtgaaaaacgataaaccatacggtcaaatcgttgctgatcagcagtgtatggcagaaggcgttattgcaagtgctttatttgataaagcatacctgcaaccgggagaagaaacagagctttacatagtccgggataaattgttcaaggaacgcgaggcccgggttacaaccagaccaagtctaatcagaaaataa

SEQ ID NO: 433299 - DNA, 1356 bp, Serratia marcescens
atggacattaaaaaggcctgggaaaataagaccgtcagactttctgttattggcgctctgctggtagtgattgtttatattattagccagtctattttttccacaccagttaagaaagaaaagaaaacacagaaaaaagacatgcagaccaatttgttgttagatgattcgcaaatgaacaaattgagtaatgaagaaagccagaaagtatataaagaaatggttaagcaaaaccgacttgaccaaaatgcggcgaaagaggaccgcgaaaaagcagaaaaagcccaacaggaaactaaagcccaagttgcaagtttaacttctcaacttcagcagctgtcgcagcaaattaatgatatgcagactaatcgaaacggcaatcgtaacttggatgctggtagttcgcgtaaaacgattaatgagcaggcaccggcagctccttatcagcttaatgctaatgcgccgattaatggcgtaagccctaattacgcttctatcacacctacgcgtaatagcccaatgagaacaatcacacaaagttccattaagactaatggtaccgatggtgtcattcaggttatgcccgtgtctgaaaacagaatcaaggaaggcagagaggtcattgcaggagataaagcgcctactcggactgtacgaggtgatggtactgcgccagttgatagcaaagcgcggcatgctgcccgaaaagatgaaatgtttcttccggcaacatctattatcactggtgttctgattaccgggcttgaagcgcctacaagcctttcttccaaatcagaaccaatgccagtaacgatgcgtattaaaaaagatgtcatcatgcccaataatttcactatggatttgcgtgactgtaaccttctgggttccgctgttggtgatctggcgtcacagcgtgcttacatacgtgccacttctatctcttgtgttaattcaaaagggaaagcttttgacgtaaaactggaagcatatgctgtaagtgaaaatgacggaaaaaatgggatccgaggcacgcttatcagccgaaatggtaacgcaattgcaggagctgcatttgccggtggactttcttcacttgccggtagcttaagtcccagtaaggtatcttcacttaacatcgaccctaattcacaggctcagtatcagtcccctaattttggtgcacttggggcattagccggggctggtgcagctcaaggtggtcttaatcgactcgtcgattactacaccgcaattgcagaacaacagtggccaatcgtagaaattagccctggccgagctattacatttgtcgttcagaccggaactacaattccaacgaatctgaccagtcgctga

SEQ ID NO: 433300 - DNA, 483 bp, Serratia marcescens
atggatagtttagaaaaaaaagaatcgactgaatcagctggacctgaaatcactaaaaaaatggtgcgagaaaggacaacaaaaaaaattaccttcgaaattgatattgaaaaaatattgaagtatttatttttcttcgcctttgccgtattggtcattatttatggttataaaggctttatgaatgtttacgattacttcaataaacaatcccagccttcgtacaagattgcagtgcttgacatgcctgaattacgtaaggaatttttcaagcatcacggaggccgtactgctgaaaatgatagatctcaattcgaagaatatttcagaacattaatgaagatctaccgtgaccgtggctatttaattattgatgcaacgcttgtcgttactgtaccggatagtgttgaaatcgtcacttatatggaacttgaagatagctctgaagcggtacaatcaagttcttataatgcaaagaagtag

SEQ ID NO: 433301 - DNA, 858 bp, Serratia marcescens
gtgaaaaagttacttttccctttaatggcggctttcgccattatggcgaatacggtcacttatgcttcagagcaggtcctaactaatagtgatgctgctgcgttaatggcaaaggcaaaggaaggtggcgtttcacccagtcagatctcgggtgtgttatcaaaaatgaaaggatataaacctaaggatgccatatacattccttctggtggtctatacctctttcaggacgaacgttcgcagttaatggcagtaacgaccgatggccgatactcccttactgggggaagccttgttgatgtaattaaacgtaaacctgttctgactgtagaagaaatcaggaattcctattttattagtcttgatgaggcccccttccctctggaaactgtagcgtccattcctctgggaaattcaaagcttaagagacaagcagccattttcataacacttgattgtgacggttgcatggaacttgttaagaaattttatgcagatcgggacaagtatcggatagatattgttttagtaccctcacccggtgagccaaaagaagagcttagaaggctctggtgtagtaaagaaaaaggaaaaataaacaacctcgatattcttcgttggctaatgggaagcaaatccgacattgaaaaaagattgctctctcaaaaagaagcagaagaatgtccggcggaacctttagtagcgtcattgatgctcgcaggaatttataaattgcagggtgtaccttcagttgtcagacaggatggtttggctggtaatggcataccaaaagatttcgactactggttgaaccaaagcgttgaacctctcttaaaaaatccatttgagtcaaattaa

SEQ ID NO: 433302 - DNA, 951 bp, Serratia marcescens
atgaacatcaaaagattggtactcagtgctctggttgtaggtacatcctcatatcttacggggtgctccatcgggagttccgaatccgaatgtccaggcattgaaaagggcgttatctgtaaaggtcctcgcgaagttatggagttaactaataatcgagatgatctgtctgcacttgcgggggaagagtcggcctcgggaaaggagaaatcggctgtcaatgacagccgctatccaactgaaattagccctccaggggaagtcaaatatccacagtctactacccttaaaaatcagcctgtggcttattcaaaaaccgaaattaagccagttggtcagttacctgtcatgtacgataaaactttaaaaatgggtgcccctacttcatccattggaccacggcctatttctggtgtaccggttaattcaaacgtaaggatgactagcagttatagcacttcctcttcagctggtaaccctttcgttcatccggctgcggaagtcgttaaacaaacaagctatccggtttctgctggaaatgccccacgctacgttgcacctaattctgatatcagccctggtaaggatatgtactctctttacaatggccagcccgttaaccctactctcaaccctgggcagatccagcaataccgttcgcaaggttataaacaagctgtagtggctcctgaaccacttgctgttctgcaacaggggaaagtaatgagaattacttttgcaccttataccgatgataacgatgcgcttaatcttcccggctacgtttatgtcaacgtaaaaccgcaaacatggattgctggcaagaattcgacctcaaacccagctcgcatagttcctttagaagtacaggatgctgcccgggaaaatatgcagcagcaacaaaaagcaactaaagctgtctcttcgaacggcattgttagacaactgtaa

SEQ ID NO: 433303 - DNA, 2682 bp, Serratia marcescens
atggaagctatcaataattacaatagcggtttaaatcgccatcaattaggtgggtttatccctgtttacgatcaattagcagggactcactattttttgattgatggcaacagattagggtttatgtttatctgtaatccatcacctggagtttttgataatcagcaagatgttcttgctgaaatgttcaaaatggatttccctacagatactgtctgtcaaatatctctgactgcattgccagacctgactttacagcttagtgcttggtcagctgtgcgaggtgggcgtatgactgggaacgataagcttaaagcagatctgcttaatggttatcagttggactactacgacagaagtatgcataagcctttaaaacctgatcatgataaccttatgttgagggattttcaggtatggatctcgctatcgattcctttacagtctgcccttcctaccgagctggaacattcgcgtatcgattcactttactctgaacttgtaagtaagttaattacgattggactgcatccgtttaaggtcgatgcagaaaactggctctattgtatagataaggtcgtaaaccccggaaagaactcccggtgggctgaaggttttatagacgttaacactatgaaaaggcttaatgaacaagttaacgttcccggccgtaagtatacagtcacagaaaatcatttctcatcagtcacacaaagtgacgacgaatctgagcatcgttacttcaaacaactttccgttgtaaagtttcctgaatacgtcaatttcggttgtatgtatgagttagtagttaactggatgcatggacgtaagacaattttcagcccatttatgatcactcagactgttcagtttgccgatccgctcaagttgtcaaaagaaaacgtccgctacaaagcaatcactaataaacaggcaagtataccttcagttgtcacattctgccctcgcctgcgggatatggataatgactacatggccgtaactcgcgagcttgaggatggtgcaaagcttttaagagggtatcttactttcactgttatgggtagtaatgccaattctgtgcagacagcagctaacgatctcaaatccttttacctcgaaagccgggtcaaagtagcagatgattcctttatcgttttcccgtcatttatgtcatgtctgccaatgtgcaatgacccaaagacaattttcgaccttgaccgttccgaagtagtgagcaacaccggagcggctcatatgacaccgatctttgggccctggaaaggtaatacagatagaccagtactgagtttagtttctcgtgaaggtcaactcatgggacttgatattttcaagacttctgcaagctataacatggttattggtgcaacgtcaggtgcagggaagtcattctggacagcatatctaatcaataactatcttggagctggaccgcgatctaataacctcgttcattatcgctcaacatttaagcattttttagaaaacgaatacccagatgatgatcctgatggtgctcaagtatttgttgtggacgtgggccgttcttaccaggggattgcggaacaatatacaaacagtcaatttattgatttcggtaaaacccctgacttcaccctaaatccctttgccttcctaactgacatcactgttaacgacgatgtatttaacgaagcacctgaatttaccggtgaatcaacttcaaacgatgcagaaaaagacaaagttgctcagaccataatggttttgaatcagctaaaaattatggcttcagagaaaggccttatcgatgattatcaacaatcagtgatgcttcagcttattgcagaagagtaccaggaatccagaaaatcaggtcggaccggttcaataaccggctttgctctgcgttgcaagaagcatgaagacaaacgtataaaggatattggggagcaactcggagcatggtgcgaaggtggaatttatgggcaccggtttaccgatacgttgcctccaatcaacttcgacagcagatttattgttttggaactggaggagctaaaaggcaccccacaccttcagacagttgtattaatgtctatcattcaggctgctcagcatgcaatgttcatcaaaaaagatgggcgtcgtcgcttgttcatccttgatgaagcatgggagtacattcgtcctgataattcatcaggtgccggaaatcaatcaaaccaattcttctcttccttcctcgaagcggcatggcgtaggttcaggaaaacaaactgcgctggcatctgtatcacacagtcgtttgaagattattttacttcttctgttggccgggccctgactgctaactcgccttggaagataataatgaaacaagaaaaagaaagcattgaagcaatgaaggctaataaatatttttctacttcagatgcagaatatgaacgtatgaaaaatattcgtacagtcaaaaaggtgttttcagagatgttagtcaggttcgaaaacttccaggagatctgtcggttatacgtagaccggaaaatggagctttgttttactacggatagtgctgacaggagtaaattatgggaaattcaaagccgcgagaattgtagctatggcgaggcaatagaaattctctatgctcaagaagtagcagcgggtttggccgcgtag

SEQ ID NO: 433304 - DNA, 1179 bp, Serratia marcescens
atggtttcatcaagagtatctgtttctgatgatagtgttgatggtgttgatagactgatctacaaccactgtttaaataaaaaaaatctctctgatttttttgggaagtcacgagtaacgttcaataaaatactttcggacttagaagaaaaagaacttgtaggtgcacctatttatcaaaacaaaaatcatctttacacccgctgggatgttcaaaaaataatggatgccctgggttatcccaagtaccgcgatcattactttagcagagctattgttactcagaatcataaaggcggtacagggaaaagcactacatctgtagctttagcagtagcagctgctttagatctacaactcaatgcacgtgtattaatgatcgaatgggacccacaaggttcgattggaagcagcatgattcaaagtgtctcagaagatgatgtcttccttacagcaattgatgcaatccttggaatttatgaagaaaattctgagtataaaaaatatttagattcaggattctctgaagaagaaatcatcactaatatgcctttttcaacgcatctgccaaacttggacgtaataacggcatttccgacagatgctcgttttaaagataaatactggcaatgttctagagaagaacgaacgtctttgttactacgtttcaaggaagttatcttaccggtactgaagcagaactatgatttgattattatagacactccacctgaagattcacctttgatctgggctgctgacgaagcggccgatgggattcttgtcgcagtgtcaccacgtgaatatgattacgcctctactacagacttcatgcttacaataagtgaaaggtttaaacaatcaccaagtaagggcgataatttaaaatggttcaaagttcttgctgtcaatgtagatgacaaaagtccatatgaaagaatagttttggataaattaatcagaactgttcaggaccttttgatgtccgctaacataaaaaattctgaagcatttaaggcagctgcttccaaagggcgtacagtgcttgatatcaaaaaatcagaggaactttgttccgcaaagcaacttgatgtcgcagaagaatctgtattacaggtatatcagcaatttataaatgaaataaaaagtttttcagctaagcaaggagttaacgcatga

SEQ ID NO: 433305 - DNA, 981 bp, Serratia marcescens
  misc_feature (812)..(821): n is a, c, g, or t
atgagcgatgagcaacatatcgggaatgataaatctcgatatttaaacgcaccaaagcggacagaagtcggtcaccgttcaggtcttgcgggtttgaaaacagcacctcgcataaaaaagatattcactcttcataagggccggagacttgaagcggaacatgtgattgttccagcccagagagtggagaaggagaccttagtccatccagcgaacccacgaaatcaagaagcccttacagattattctgttagagatattcttaagcagattgaagaaagaggggtcgataccgaagggatcgctgtaaaaagagatggggtttatttattaatagaaggaagtcgcagacgtttctgctgtataaaggcagaaaaggatctccccctgtgggttcttccggatgaactaaccgaagatgatataaattcaattatatccgcagcacaaacatctcgaaaattctcatatagagaagttgggtttcaatttatcaagaaaatggaagaaaaaggattttctactaatgaagaactcgcagcatatcttgggattagtcatgtatcggtagccaaaagaatccaggcggcccgtattgacgaaacattgatctcattattcccggattatgaaggaatcccaaactcctattatagtcgcttggctcgtttacagaaatatgtgcaaaaaaatctatttcctttagatgaagtaatagataatgttaaagaggaaacaaaagatttagacattggagatatccaggttgcccaaaaagttgtaatggaaaaaatcacacaatctgtggaaannnnnnnnnnaacaagtgatcttattaattttgataacaaagataagtatgcaagaatcagtaaaaacaatactggtagaaaaattcgcattgaattcaataggataaatgcgggttttattaaggagctagaggagttcataaaagaaaaattaaaagtatcagaataa

SEQ ID NO: 433306 - DNA, 1785 bp, Serratia marcescens
atgggtaagccaacagaagagcaaagacctgttatcgagaatgctagcgcaaacaatatggtgatagcagcgcctggatcaggcaaatcgttcaccatgatagaagcggttatatcgattctcaaaaagtatccatatgcaagaatcgggatggtgacctttactcgcgctgcaacaaacgcacttgcagcaaagttacaaaagcgattaagcaagaaggatcttgaccgggtgctggtggatacttttcacggactcgttaagaagcaactggacatgattcgctggccgggaaagatgttgatagggccagcacagagatctgtcattcaccgggctttgaaagaatccggtgtaacgatgaagtttgctgaagctgaattcgttattgatgctatcggcagagaaatggatacggatgtgatttcagtacggcataacagacaacagatccatttgtttaatacctatcaggcgttatgccagaaagaccatgtagcggacctcaatgctctttcaaaatttgttgtcggtcaaatgcattcgggaaaaatgcgcacgttagatttgacacatttgatagtagacgaagttcaggatactgactctatacaattctcatggatagcattgcatacaagagctggagtctatacgagtatagttggagacgatgatcaggccatctactccttcagatcctcaggaggagtcaaaatatttcaacagtttgaaaaacacttcagacctaacatattttacttaaacacatgctttaggtgtgaacctgaaattttagaggtggccggagcactgataggaaagaatgtttaccgttatgccaaagagttacgctcggcaaaaaagggaggaggaaaggtcacttttcgttcatatgtagatatggaggaacagatacagggtattttaagccttataaatcaggatccacatggatgggcaattctaagccgcaataatgctcacttggatgagctagaaagtttgatcgaacagccagtaattcgttacggaggtaaatcattctgggatgaaaaagaaacaagcgatgtgttaagccttatggcttttttccgacaatcaaatgatcctcgcttgatgaagagagtattggcattgtttggagaacaggaatcagttttggatgaagtggcattgagtatgagaggaagaaaagttacttttggcgaccttgccatcccggaagacagttctctcgaaacaaaaacattacattcaaacttcgtgcgctttacccaggaaagtactgataaagttgagatagcaaaacgtttcgccaaccttacgaaatggatggaatcgtcgtcaatcaagatgaggagtaataaaggtacagcaaccttaacaaaaattgctttagacacttgtaaacagtgggcagaaaagactggttggatgaatatgatcaatcgtgctgctgcaatgtcattaggccctaggaagaaggacgaggaatacagcccagagaaagtagttctctcaaccttgcatggttcaaagggtcttgagtggaataaagtaataataatgagttgtaatgcggatcagataccaagtaaaagatcagttggggaggaggcaatagaagaagaaagacgtttgctttatgttggatttacgcgtgcagaaaagcaactttttgtaatgtggtatggtgacccttctttctttttaagagaatgcagtgaagaaaagataaaagaagcagctaatattcgaatttctccagtttatacagaataa

SEQ ID NO: 433307 - DNA, 873 bp, Serratia marcescens
atgaaacttttacgtttagtatctctggtctcttctgtcgtcattgttttttccctatcgggttgtgccggtgacaccggcactacgccaggcaccgctctgaatgcgtacagtcacggccagtactggcatgctaatgcaaatgattctgtcgccaagaatgcctattcgtttgctggtttcgacgttaattttaaggagcaagaggttactcctggaggggatgccgacaactttctttctaagtatctcatcaatagttcgatgggctacgtaacaggcggtctaaaaggttttgggatcatgagcctcggctctttgtacagttcttctgacgccgaatacatccaggtcaatcaatacctagtgttcgtccccaatccaaaaaaattgccttacaatgatgaaagtttggtacgtgaaggagctaagtatgtttttgagcatacaaaagcaactcaggcctcatttggatacaaccctgaaaaacagaaagcagctctggccgcctgtaaaattgatatggcagtcgtcaataaatggagtacctgtgatctgccttctaagcctgatgctgatgttttccctacagattcaatgtacagctttcaggcgattcgccccgcaacaggaaccgaaattcctcagctaaaccttcccgctggtgattacgctgtaattcgttatgtgttcatcccatttaaaggaaacgaaacaagcgctgatttttcgggtatcattttccgctctgatagcccaaatacaacaactccagggggtgttgcagcctccatcaacggaaaagattattacctttttaccggtgaatacggtaaaaaaggcttcccagaaaaaacattgaaagccaagtaa

SEQ ID NO: 433308 - DNA, 3189 bp, Serratia marcescens
atgaaacttagaaaaacgatagcttcaactattattgcatcaatgattgccaatactatgagttgggctttttatatctctctcataaatatggtaatgactcctcgtatttatgcggcagacgctatatttgaccagctcgaaagtaactttaatcttgctaatcctaacgcaaatcgcaatgcgacaaccagtgctcaggacattgttgagaagtacaagaatgcggattcaggcgagaatgtcagtgggaagatcaccgagaaatacgtgggtaaagccgaatccgctaatcttaatctcggaaagtatggggcagggaactcaaatgaaagtgtcatgaaaaatgccgcatccgatggaaagtccattggtagcgccgtacaactgccgagtatgtctggagggacaatcaattcaaactataccaaggaaggggcaaagctgctctctcgggatgctaatggcaacattggtataagcagtaatcccaatactactcctggaaccaaaacaaataccggagagattttcagctcagagcaaaagcacagcgatattaagttcaatgccgcagatcgttatggggatgaggatggctttgtaaacgatataaagaatcggaaaagccagcttttcgatgctcagagttatgatggcgtagcctatcgcaccctcgtaaatgctaataaggacaacccagcatcgtctataaagcctaacgaccccatgtttaacgcggggagaaatgagatcacaaatgctgttgctggtactggcaactggcttcagaactgtaatgttgagaccaccaaaaaaacagtaaccacacactatcctgattacaaagagttctattgtaactcgcctaagcaagataacttcagcagctgcacgataacccgagacttctctgtacctgtatatatttcaggcggtaacggagacatgtcgatgtgcggcgataattgtgtgcgtatatggtttggtcgccgagatgacaactactggagtgacggtgtatttgataacgaactgacattaaaattccatccggatgcaaaattggcctcagcaaagattgttaatgcggagtgggatgaccacatgagggtaactcttgatggcacgcagatctttgctcacatagatggtgaatatcgagaaagtgactatccagctccaaagggatcttgggagttaaaaaaatcgtggaaactcgacaaggtttacgatgtgactgataaggtcagaaaatcggtgtatgaggagcctgatcgcgaagtgacaatggcatccagagtatgggttggtgggaaaggtgaagggtattttgaggttgagctgacgtttgaaaatatgaagctcgaagataagcacgtccaggaaccagctggatgttacgatgctgtacaagctccgaacacattctgccgtttcgatcggtttaaagatatggatgttggcacaaaacggcttccggaaagcgtgctttcattggcaaagcctctgtatgaaggtgataaaggatttcttacctggaagacaaaccttgaaggctatttttgtgatccattggccaaagacaaaatttgctcatatgacgctagtggaaaaattatgaaagatgctaatggaaaggatctctgttacaactatgaagaaattaagagtatgcctgatgcatgtagtacttataaaaatgatgcagcatgtgtactcgataaacaaacatgtgcagagggttggttcgatgagggcactaacagctgctacatgtatgaacagaaatacacctgtgacagaggtaaggatgtagttcgtgaggttgaatcttctacaaatgcctgtgttggcatgatcccatgttctggaggaacatgcgaaactgggccaaaggaagagaacaacgattttggaaaagttgcggcttattcaaacatggttcagtacatgcagggcgaagccaaatgcgaagaccctaacgatgccaattcctgttctgtctttgaaggaaaacctgaatggtgtggtcgttcagtaggctttgtaaatggcctggcaaagacggactgctgcgaagcaccgcagggaaccgcaggagcacttgaaggtatcatgcttgccggatctatgatcagaaacactaactggaccagagttaatgctcagctaataaaatggaccggcggtgatacaggtacatgggcttctatgtccaatgcggtcggtgagtggactgcatcagctggtaaaacagtagggcaaatgtggaacaacgtcacgagctccttaacgagcgtatatgaaaacgtcgctggtaatctaagcagggcagttgggtcttccgcaacttctggaggggcaggaggtgctggccagttggcacaggaaacaatgtccagcttcggtataggtcagcttaagcagatggcaatgaagaaagcctacgaattgctaccagatacagttcgtgactttgtctttaagaacgttgctactaccggaggagaggttgtcttctcggctgcggttcaaaactttatgcttgcattaaacgtgatcggttggatttatacagcctatcaggtcactaaaatgcttttagaaatgttggtagcatgcgaccagaaagagatggaagcttctattcataagaatcaaaaatcctgttttacattagatacggaacgatgcgtcaaatatctgaatgttggtttcacaaagaaatgcgttaaaaaagcaacagacatgtgctgttataattccatgttgtcacgcgttattatgcaacaagcttatccgcaattaggaatagaccctgtcgcctctaattgcgtggggctatcaataaagcaaatacagcaactggatttcgataaaattgatctgacggagtggattaatgatgcagttcaggtaggagaagttcctgatcaatattcaaaattctccgaagaatcaattgtggaaaacttaccattccagaatgagaactatcaacttccatcagaacgtaccaaggaagcaatgggcggtgaagaaaatatgataaaggccagacaagaaaatgctcaggctataaaagaggaaaatgtagattgtagctatttacctcgaccggccatatgtgaggtaggttcaactacgctggatccggttacgggcaagcagttgccgaaatattga

SEQ ID NO: 433309 - DNA, 1161 bp, Serratia marcescens; identical to SEQ ID NO: 142989

SEQ ID NO: 433310 - DNA, 1512 bp, Serratia marcescens
atgcgatcttttaatgtaaataaaaaatatttaccaatacttcctggacttgcgttatgtgcagttttaagtaatacaaatgcaagcactgagtatcaacatgatgctgacctaatcgctcagcaagcaaaagggcttggggcacaggctaaaggtgcacagcagccagatggggctcttagccttgatgctacgctaaaatcaccagatgtgcagaagtacatagcgcaagctgaagcactcaaaaaaaaccaggacctgagcaagcaaataaaccgtggttacgtccccggtatgaatgcggatagtgttcaagcagttatagaccatacccaggctatcagggcccaaagtaataactctgaagctgtcaacgatataattagaagacgtgatgaaattcaggaaaacgccagccttaatgaagcggctctgaaagctgtggaaaataagccggaagtcatgcgaggacaatctaaaaatatcgaaaaattgtttggttcctcgggcatcacagctgctgacttcgaaagaaaaatggatagcacacgtgaagaagcactatcaactgaaaatggtataacgatctttgcttcatttagcttgccggattatgtactggaagaccttctacgtacggcctcagagcataaagctcgtgtagttttcaatggtctaaagaaaggaactactcggctaccagagacacaggcagcaataaaccaaatgattgtcaaaggaaaatttgaatctcctttgattacaattgatcctgatagcttcagtcagtatcaagtaactcaagtaccgacaattatttctagggagcaagctcgttttgcaaaaatggtaggctccttcaacgttgagttttttcagcgagaacttgctaaaaaacccgaccaggatattttcccggttgctggtaccacttatcccgttgaagaaaagagcatcattaaagaactggaagaacgtgcacaaaaatatgactgggaaggtgccaaaaaaagggccgttgctgacacctggaaaaatcaatggatggtcgacctccctcctgcccaggaacacaaagaatttttaattgaccctacagtgagggtcactcaggacgtaaaagataagcagggccgtgtaatagcttccgccggtgagttgattaatccactttcgagatttcctcaaaacctgacgatgataattttcgatccactcaatccgggccagctggtatgggctgagcagcagtatcgacaacgtctgggtagtggaaaagtaatgccaatgtttacccgtatccaaaaagataatggatgggatcacctaaatgatttacgtgaaaaatttaacggtaaggtgtttaaagttaacgaacagattatctcacgctttcagattaaaaacacacctgcgcttataactactgaccaagataaattccggatcaccctgtttagcgaggcagaagtccgtggtatcggagccccaaatctttcagaggaaaaataa

SEQ ID NO: 433311 - DNA, 513 bp, Serratia marcescens
atgagcgactacatacctaaaaagagagggctgcttatactggattggtatgtcccccttaatattttattgctgattctcgttatgtgtgtctttttcacccgttatacatttggatacggtttattgaatgggtgcctgcctgctgatttttatatgattgatcattcggataaaagttttaaaactggtgaactcatagcatttaacatgccgaaatcggtacgttttatcccagaaaatgaacgagtcataaaaattgttgccggtgtgggcggtgacaaacttaaagtaacaatggatggggtttataacggggacaaattttttgaagctaatgcacgtcgtatttcaaagaaatacaatattccgtccattttgattgaaaaagaattgataattcctgaaggcgaagttttcctaattgggcaaaccgatcactcatgggattcccgtttttggggaacagtaaagctgaattcagtaattgggaaaacatatgcgatcttttaa

SEQ ID NO: 433312 - DNA, 4305 bp, Serratia marcescens
atgagaaaatcaggtttaggtttagccctgttcttttctttaattgctccgattaacgcggtctatgccgaagcgattatgatttcaggaaagctacaggctgatttgccagccgtatcctttgacccggggccgggcgactttgttgcatacgttaattctaacactatcactgcctcaggtgctggcacagcctgtaatgtaacggttgatgatcgagcgacttcctctgttgataacctcgtttgtttttttgagtggttacccaataccttgggatttacttctaacggcttcactctttcaggcgttcccaacaccaccggtgatttaaaactaccttacaagatttcttacttctctggttctgaacggaaaaaagttgaaatagtaaaaggtgaatattcaatcaaaagtgtggcaccggtaaaaccaactatcaccggtcttaaatcatccctgaacggattagtctatgacggcttttctttcaaatcgtatttaaaggatgaagcgatcaaagatatcgctgtttctgttgaaccccgcaattatattcaatacatctcaataggttcaggctccgcctgtgaggtacctattggcggaacttcctgtaccattgaagttggaagcattaaggccagtgatacagatgaacttttgggttcacgtgatatcacaattacagcaaactctaagaataattatttcgcacctcctgaatccaaaaagcttgttgttaactgggattatcggcctcctgtagtagaccatacactttggaattttaccgatgaggctaaaacaatcaaagtaggtggccaggacatctataccggagccaaaaccgttgctgtggccgttaaggtaccccagcaagaaacagaaggtgaatggtggctcccaacagctatgtcgctcactatgactccggatggcgtgtttaaaccgacgactaaagtgactttagatgatggcactgagattgatttcaaacagtcctgggcaacccctttacgtagaactttacagccggtaagtggacctcaaaaagtcggtgatgagtacctctatatcttcgacttaacggatcttataaacgggtcctacgcagcgacttttacagtagaaaatacgagcaaaaactcttctacgtacactgagcctgaaagcaaactgatgctgtctgataacccaacgctcatggttctcaaagatgggcaggtattaactaaacgagcacccgtatacttcctgaacgagattatcgttgcagctttccaggggcaggctggggttgctgatataaaatcagtaacaatagacaacaaagtagtttcgttaacacctacaaattataaaggtatttactacctgccggttggagacgatttagcagttaattcggatcacgagattactgtggtggctgaaaacctttatggaaaaaacgtaaatttcagtaccgtgttcacttatcaacctactggattcactcttaagaatctggaaaaaaacgtaactctttactcgcgtgtacgtcagtatacggacctgcttagtcaaacagctggtgataaatgcactctgtttaccacagaggaaaatgcgaatgcttacctcgcctggtacggggaaaaatcagatgttacagcatgctaccctcagtggaacaatgtccctgatgggttggagttctattttaaaggacgtaccccgggtctaactggattctttaataaaacaggtgagaatctgctcgactatcaggtctatatgattaacgggaagggctctaaagcggtttctgcaaggaatcgccgaactctgaccacacaattaccatacaacccgatcatctcttacaaaaagaataaagtcatagctggcatcaatccgaacactgctctggcttatacgaccgggggggaggccgctcgaatattagcgaaggtggtaccagctgacgttacgatgatcgtctctcaaaacggctctgaggctgtcaaaacgtcatttaaaaatcgttcctcaaacaacgatgcaacgacctttgtacaaagggttaaggttgctgctgcaccattgtggacaaagaacgtctttgacatagctgtagaatactcaaaggatccagaattaagaactacagacaccctcaacgtatatacggtgcctgatttcaatattcgagcatcgatggaagtggatgacaaaaaaacagccacatctcttgaagtgcccttaaaggtaacagtggggcgttataacaattccacacgtaaaagtgcatttgaccgtaaaacaatgggagaatgggacgtcacgatatactctcaaaaaagtgtatacggcaaagatccagaaacaggccgttataaaactacatacgaaagaactgcgctgactgaagcattgccggtcaatgatgcgggcattgtcgaaaccaagattaaaattgaaaatatggatctgggtaatatgcgtctggttggtgtggctaaggtcagatcgccattctctgattttgaaatgaaacgtgagaccagtgctgtaggcattcgaatctataaaggtgaggaactggagggtaacctgtcgaaaagccttattatcggaaggatcccacttagtactctggtaagcttcaaatctgccagtacggctaactctgatgcactcgcccccaccgaatggcagcagtcctctgataatggtcaaacctggaccatgctttccgacatgaccggaaagagaagtgtaagtatcaaaaagacagaagtaggaaagtggctttatagggcaaaaatgaccaataaattcacatccaaggtttcctacacagatgccttaacggtagttacctacaagcagcctaagctcagtatagatgtgacagacattcttcagggctcagatgtacctgtaaccctgcttgataacgatgaacctataccagcaggcaccgctgaggttctctggtcagaggataaagtcaactgggtgcagggagatacaacttacactgtggcttcagctgataccctaccgtctacgatttatgcccggatgcgttaccttgattccgatgaactggcagaggagtcttcatggaaggaaacgtctgctcggttggcagccgcaaaacccaagcgcctttctgtctcggtaacgggggtttcaaaggtagaggttggtcaaaaagttactttggaaggtaagttcacgaaccctaacagtaagtaccagaatggtaataacgtagttgaagaatggaaaacaccggatggccacacatttaagggctcttcactgtctgttacccttactgagcaaatgttggataaacagggatatgctgcttttgaatacagcgcatggttagcggacaataaggagaatacggtttctacccgtagagtttctgtcaaatcgtgggtttataaattccccgagatgaaaataagctccaaacttaaatacgacatggcaccgaccaccctacgcgttgcgttgagcggtattaaggatggagactatccgggtgttacttattcccgtgaatggatttacgacaaagagaatctggtaatcactaaagatgaaggtgacaccaaagaatttacaattgaaaatcctggcaaatatacattgatggttgttttcaaagataaccgcaacaatgaacagcgtatcgaaaatacctttgttgtcgatgaacaaacgccaatgaacgttgagatgacacccaagttctctaacaaatatatgagagctccactcgatgtaaccttaaggtcaaacatcaagctatctcattcggcggactcgatagatacggtcacatacaaggtgaacggtgaggtaatacccagcggcaaaaattattgggctcaactgatttcgggtttaaaagaaaagaaatacgagataacaattgatgttgttagtaaacttggacagagaggttcagcatctgttgagtttgatgtcgttaaaaacgcagtgcctaattgtacattgagctacacggaaaccaacctaagctggagctttaccaataaatgtgatgatactgatggaaaaatggttagatatgaatggttcatcaacggcgaattaaggaacgttttcggtagtacggctacactttctaaaaaccttaaccgtggtaagcaggacataaaagtaattgcttatgatgatagtggagactttgcaacgcagcacgtgacagttttcggaccggctgaagaggcaagtaagtctgaaaacactgtatcaataccaagcagtgagtaa

SEQ ID NO: 433313 - DNA, 582 bp, Serratia marcescens
gtggttttatcaaaagtgactttttatatggcaacttcagacctctcatttaaaaaccataatgtaaaagcttttggtcaggatgcagcccttgtcattgagatgaacaatgaagatgttagctcatctaaaccttcacctttttcaaatgagattgataattattatcttacattgcacgtcgctccgaggaacgcaaaaaaagattatgactggggctcaaacagttctgtacttctaaaattgtcgacgaatgaagttatgcagatggcatctgtatttcttagaatcatgcatactttaaagattgataagaggaaaacctcacatcatggccacgtcgtatacaaaaatataagcgttaccccaaacgagaggggcggtttgttgttatccgcagggatagttccagtcgataaagacggcttaaaacccttcatgcacatggtccccgtctcacaaatggactgcgttaaaattggcctctacatacttggatatcttgctcaaaaaacgccctgggtaagctccgagtctataattaccgcgcttcgcttatctgaagccaagaattcaaaatag

SEQ ID NO: 433314 - DNA, 1047 bp, Serratia marcescens
atgactcgtattgcattagcgccttcaaagatggttttgcttatgtctttggtaattactggtgcccacgccagccctgagcaacccctaataaaagatacgccctttgtatcaggccaggcttataagaagggtttcttctggtatgacgatcctgctaaaaaaagcgaagctgaagaagaagaggttttgccaccaaccggtactgctagctctccttctaaagaggaaaaggtagatttaaattcaaaatggctaaaagagaatatgcctcgactgttaacgcaggcaatggataaccctaccgcagaaaatctatcacgttattacacggcgcaaaggttaatgctggatatcagtacgcgtttttctgacaaatcaaaagattattttcttaaaaacccgatgatgtctgaaaaacgcaggcaaccagtggaaaaggtagcactcgatgctcaccgcactgttgttgaaaaaaatcagcaaacggtaatgaaagatatctttactaagtcaggtttatttttctttttccagagtacttgccagttttgccacgaagagagccaaatacttcaatttatgcagaactattattcggtagatattcttccaatcagtatggatggaaggccattgcataatggcctttttcaggattttaacatccccaatgcacaaattattgatcaattcaaaattcgagaggtacctacaattttcctggtttcaaaggatgggacatcagctcagcgcattagtgaaggcatgatctccgctgatgaattaaagaacactattatacttgccgcgaagggcatgaatctgatcgatgacgcttcgttccagtcaactctagatattaaaaggcaatataccatcggtgatgatggcgttattaccgttaataaatccgaaatggaatcagacccattcctacttcaaaaaataatggaccaaaaactcgaaggctatgacatgcctacggccgatccggtcaattatctcaatgctggcggcagttttggaggcacttatgcgcagtaa

SEQ ID NO: 433315 - DNA, 1416 bp, Serratia marcescens
atgcgcagtaatgccgttttcaacttcaaaaagttacttttgtctctttctgtttgtgctgcaattttagccccgactgcaaatgcagacaacgcaatgcgtaacattttcaatggcatgatgacgtctaccagcccggccaccttttccacagcaacccgtacaggcatagttggcgggtcaatgtcttaccgaacaacaaacgttaataccaaccttgtttccatgtcgtttccaaaagcttctgtcggttgtaacggtattgacgtttttcttgggtccttcagcatgatcaacggggaccagcttgtgcaggtggcccgtggtattgcccagggtgcggctatatatgcttttaacgttgctgtttcagctatttgtgctgactgtgctgcaacgattaatgacatccaaaacaaactgcaagcgctaaataaatttgcgaaagattcatgcaatgcaacttactctttcctttctgaaaacgtgggtacgccaagccagttcgcgaactcagttagctctggaccagcctcaattctgggatcgattaatggtctcattcctgattttggctcatcgatgacaaagtcacctgaagctgtcacttctcaggttaaagcaaaggatcccgaagagttcgctgaaaaattcagtggtaacctcttctatatgtcgttcatggatattgataagggaacgatgaacatcggaggggtaacggagttatccggttataaactggcagaacaacttatgtctctcgtgggtactgtcattatcaactgggatagcaaaggcgaaaaagcgggaatggaagtccgcccgtctaccatgactgtcacggattacataatggggccaccagctggcggatcaattaaaatgctcaagtgttctccggcaccagatccatcatccccacgaaaggctcagtgccttgtcatgtcagaagttaatgacggtggttttaagggattgaaggataccatttctgatcttcttttaaacgtacagaagaaaatcatcaacgacgttcgtgtttcagatgatgaattacgcattatctcctatatcggcatcccgaccattatcgactctttgcaaacattcgaagcaccggaagggtacgcatacattcaggacatcagcactattgctgcgacgagcctcgtaattaacatgttacgccaggttgaggccaaaatttcaaccatgagcataccgagtgagtcgctgtcgggtaaaagggatgatctcaaccgattaacagacaatctctcaaaacaggttaaagccgcctatgagctatcgcacagccaggtcggtaccagctcagacgtcatttcaacctgggataaccgtcgcctgcaacggaaggctttcactgaaagtattcgtggcacacgtaactga

SEQ ID NO: 433316 - DNA, 3954 bp, Serratia marcescens
atggattacaacatatataccctgggtgatattgattttgtctggtcggcttttaccggtattgccctaatcttttctcaatatactggtgtaaaagagttcctgaccacggccgccgttgtagcaggtgtgagcctattctataaaacgtggctatggcttcaggctccgaccaaaaatgaattaccgtttttctcctggtttttggggttgatccttttcatgatggcaatggttcgagtggatgtaactattgaatctgtaaagtcgggagaggtcagaaacgtcgacggaattccaatttttattgctgcgatggccaccgtcaccactaacttaagccagggtttgctgaaggattataaaacagcgtttgatccgctttctccggtggacctgtctgcaacaactctggacgatgacatcaccctcggtccgatgatccgattcgtgaagtttttgcaatggggcggcgatagccagggctactgttccgcatttcctgaaccggccagcgggctagggccaatgaacgtatgtgctaccgttcagtctcttgcatacaactgcctgaaggctacccaaaactcaagcgcaaatattgccggtaaagaaactatttttaacgatattttctcagctaatctggcagatagcatggaccggattaatcaggcgatgaaaggcgcactgaagaatgcctctgccagtattgttggcgctaacggttcaaaatctggtacgtgtgatgaggtctggtcaactgtgaaacaggttaccagtacagctgaagctcgccagactatttcccttataggacagacaaacggcatccttactccagacgaagcaaatggtgcacctaccggcgcaagctttacagatgttatggcatcagcaaatggtatgtacggtaaggctattggttcgtatgacgccaccctgaacctgttcataatgaatgagctcagaaatggcgcaagcaaatataagaccccactcggtctggcttccgatatgcagttgtttgaggcttctctgaagcgaaccaacacaatggcttcacagggccagttgtggttacaactttcgggagcagcaatcgcattccttgagatgtttgcttatatggttgctccatttgctttgcttatgctgctggcgttaggtggtaatggtgttgccgctgcggcgaaatatttgcaacttatcctcttcgtgaatatgtggccgcttacggcagtaatggtcaacgcgtatgtgaagaaagtcgcgacggccgacctggatacctggagcaccctcaacagccagaataatgccgtcacgtggatggggctcccagggcttgcggaaacatacagttcatacctgtctgttgcttccgcactttatgctctgattccggtactcacattattcctgatgacacagtcgattcacccgatgatgaatgcggttaagggagtgacccccgatgcgccggtggatactggtcatgtaacgcccaaagtatgggatggccctaacagcggtaaatcttcatttggtgacgtgacacgaaccgccttaaccagtaccggtcagggatacagcgatggcggcgcagttgattcaagtaatttccgtcttggaatgtggaatgctggttcaagtatcgctaacagccaggggcaaggatcagctgtaacctcatcagttatgagtgcggcaagtaattcattccaggccggttacagtcagatgagtgaaattggaaggtcaggacagtcgagccagcagttctcaaccaacctgcaaacaatgaagcagatctcggataagattggtgcctctgtagcagaaggtattgcaacgaaacatggggtgagtgcgtctcagatggccagcattgcttcaaatgttattctcaacgctgggcttaatggcggtgttggaactggcaatggagccgggctgaaagcggctgtagcagggcaattgagtagcggtgcatctaagaccaatacaggcagtgactcgctttcaaatgacctttcaaaagcaatcacgaatcagcttagccaggattctgcgttaactgaccagttcagtaaagcggcgtctcaggtaagcagcgatcagatatccaatactaatgcgtttaaagaagcatcgtcgaaaatgaaccaggcgacacagacgatggcgcaaaatatttctacatcggtttcgactaacgcaagctccaatagtggaatgagccttgattctaaacaaagcattaacctggacaggttctccgattctattcgcaacaaaaacttcagtgatgatgatgtaaggaattttgctcgtaagaatgggctggatgagaatgcgtttatggagaaattcaactcctataacgataccttcaaggccagtaatcagcttggatcgcagcttcaacgtactgacgcgcttgtggctgcaacacgagatttcagtgagcaaaaaattgcgattgataccgcccggggagagacggccgaaagtaataaacaggatctccgtgaaacctccagcctgcttaaaagtctggtttccgacttcggtggtaatgcacagcagctgctacctatcaccaatcagctcgacagaatttcaggcgacgggtcaggaattaatactatcactcaggcacaggatagaactcctgacagcgtaaatacgtctggcgtgatgagtgcgtcacgcgtaggggaactgggtggaagtgtagattcgcaggctaaactcggtctttcctccaacgctcaggacgcgacacagcgtgtccctggaaaaagtgaagctggctttactccgtataaccttgataacgcgggcaaaggtgatattcagggaatacataacaacaacgtgggccgcacttattctgatgaagaaaggaatgtgcttagttctctcgaaacgaatggacctgtactgaataatcagggtgtagagaaagtcgtcaattcgggtcaggatgtcagaaatgcagaaggcacatttaacgatctggaaaaggctaccggaggtcgggtggttggtgatggaatggatcaacgagccactgctttgaacagtatgtatcagagcgggcaagttcgtggcttatctaataacactgataactactttagtcgtgttgccaacaacccgaacttaagccgggacgataagcgagctgaattggcacagcaagctgtctttacctatggtgccagcaccatggctaccggtgccgaaagagagcagctcaaagcggatacccagaagatccttaatgaactgggtaactataacgttaactggagtatgaatgacgttaagagcatccatagcagtttcaacactcataacagagctgatggttcacttgagtcagtcgtacgggcaaacctgggagaaggtgggtcgggcggtggtctcgttggtaaccgcactcagaccgtcacagatcgcttggttggggaaaagatagaggccaacactgagcggggcgcgatttctggtgcgctactcgggggccagcaatttgtttcggatacgctaaccagcgttggggcgaaaccggtaaatgagatgcttacgggagcgggcatccttcaaacccagacatcgatagcaaatgatgcttctaaccctgcaaatatgcctgattctctccagggtaaggtccttaatcacatgcagatgtctgatggtgtcgcagcagtaagtgaccggtatcagagtattagcagcgacggcgtttcgacttatgcgaatgcagcgcagaactctgaaagggctatccggcagcaattgacggatgaccctcgctttgggcctcagaaagcagatgaattcattcagtacatgaagtcagagctgagcaacacaaatgagccttaccagtcacgtgtcgataaagcggatcagtggcttaatgaaaataaaaaataa

SEQ ID NO: 433317 - DNA, 507 bp, Serratia marcescens
atgaaagatttaactcaactactcagcagcctaaaaagtttgatggttgcagatgactaccctttagccagcccggtagccccggaagtcttgaaagacttaatctgcaatccgcctccagtggagtgggcagatcacaaaaagagcgcctatatagatatacagaaactcattaaaaccaagtttgattatgcccaagtgtttaaagctatggatggttttgagtacaacggacttacgttttataaccttgttcaggcagagaacgaaaatctattgtggtcaaatatttacatacgcaactttgaagcacgagacaatgaaatctacgttgacccaaatctcacagataaggtgttaatcggagaagatggcatgtcacttttcgcttatagttttgcagacgactgctttcagataagagacaaagcatctactgattatgttattgaatctcatacagagtttgatagatttttgtcttcactgattcaaaccgtcagttga

SEQ ID NO: 433318 - DNA, 1062 bp, Serratia marcescens
atgctgcatcactgtcaggctaagtcactggatgacatataccttgaggatattccccacatcatacatccggccacggcggtacatgacctcgaagataccgccctgccaaaccggatttttcaggaatggaatttaccgcagggatatacacagtttgtcagccggtatcaccagttccaccatcaacgcccctggctcgcttaccgcgatacgcttgacgacatcagatacggtaagatcgttctgcttagaaaagacataaccggcaataccgggccgggggttatatcaaatggcaacctacgcaatgacctgcccctgtccctctttacccgtctgcgcgatatcatctctcgtcagttgaaacgcccggggtattacgttcgatcaacgacaccagcacagcacgcccaatcaacaaaaaccattaattccaaagcggctggtcgtcttctcgcagctggcgggctttataatggaaatgtggagggatttcgacatacggctgaacaacttggcggcgaagctgttgaaggctatgaccaggtattgaacgaaacaacttcaggtatgctggttgcagcggcttcacttctggttatccgaaatccaaggtctgcggatgaattgacaagttatctcggcaagtacaagaaagcacacgttttgctcgatgatatgaatgttagcgaattgaactacatgcgccgagacagagctgaatatttagctctccgtggacaattcaacaatactgtacgccctaacttccttaaatcactttcagaccacccagatgccctggctacgtttgaacctaacgatttgatgaaacttgcaacaggcaaggtcccctctgggtggcaggttcaccacaagatccctcttgatgatggtggcacaaacgctatagacaacctggtacttattcagaattcaccatatcattcagcactgtcgaaagcacaatccatcattacgaaggatctaccgtataattcaagcaccagagttttatggccatcgccgaacggtgttatctacccggtaggaaagtaa

SEQ ID NO: 433319 - DNA, 558 bp, Serratia marcescens
ttgtcttcttctgcaagaaatttatttaagattctctcttctttcttgatccagaaaaaacctcttcatgaagaagtatgtgttcatgaagaaacaacagctggtttatgggcccctctccctgattcgcatgtcgtgcttttcttagatttcgatggggtttgccacaggtgtaaaaatgaaacctttgagcgaatgccactgttagagaaattgctggataactgccctgccatggtgattgttatctccagctcatggcgtgagtgcgctaatacaagttatctgaaatctcttttccggatgccttatagagacaaaatcataggtgcaaccggttcggtatatttaaaacacggacagactggtgtgcgggctgccgagtgtgaggactttgtcttttcacatcgcgttaaagcatttatctgccttgatgacgacgaatcattatttccggccggttatccgcatttgcacaaaaccgattattacacgggcctcaccgaatctgaccttgcagctcttaacgcaaggtaccatcagctcatgggacgctga

SEQ ID NO: 433320 - DNA, 540 bp, Serratia marcescens
gtgtttacaccaccagcagatgatgtgaaacctattcccgttcctgatgagatttacactcagtgcattacggatgccgcccgctacttcggaattgatgctgaactggtttttacgttgtttgacaatgaaggcggtaaggttggtactttcagaaggaatacaaacggcacttatgatattggcccaatgcagatcaactcatccaatctgcctgaaataaaaaagcatttcccgacggtaacgtggcgggttctggcttacgatgcttgcgcaagtttctgggttggaacatggtggctctacagaaaaattgttgatcgcaagggcaatgtgtttgaagggattgcagattacaacagcaaaaccccaaaggtacgtgcaaagtacatatttaacttcatggtaaagtacaatcgccggatccagcagcgtaacgggatgggtgagctttatcaatggacccaacaacctcctcgatacaatggccatatagctaaaaatgtcccggagcaaaacccgactcctgttgttaaataa

SEQ ID NO: 433321 - DNA, 750 bp, Serratia marcescens
atgaaaaaaattattaaggcatcggtattacttctttcattaagtaccgccttcacgatgaatgccgagccggttaatacaatgatactgccagatgcagcccgggataagctcaaagccattgggctttcaatcgagcacgtcgaaccctcgccagtaaaagatatttttacggtgatttccagggagggggtaagttacgtgagcaaagacggagattacatctttaccggaagcttattccacgtgaaaggtaaagatgtggtaaacaccactgagcaggccattttaatgggcgtccgggaattcgcatccaaaacaaaatccatcgactacaaatcaccaaacgaaaaataccggcttgctatctttaccgatataacctgtggatactgccaaaaactgcatcatgatctgaagtcttatcttgatgccggtatttcgattaagtttcttgcattcccacgtgcaggactgaactcggtagtagccgggaacatggccaaaatctggtgttcagcaaagccaaacgaagctctggatgcagcgatgaatccggtttcaactatcccggaaggacgtcctgatgaggcttgcttaaacattatcaaatcgcatttccaggtggcctcaacaatcccgctgcaaggtactcctaccatggtgacactaagcggcaaaccgcagttatttacggggtggctgagcccggaaaacctggtgacccaaatgggcgctgcgcaaaagtaa

SEQ ID NO: 433322 - DNA, 273 bp, Serratia marcescens
atgtcatcggtacaaatggatcaaggtgaacaactaaaggaactctctggtgttgcgaccacaggtgacaccatctctaaaaagatggaaagctacctgggaaataaaaagctcaaggtaaacaccgacagtacccgcaaggggccgggtaataccaccatcaggcctacagatgagctcgccccaacgaggcaactaaaagttatccggcccgaattggtaaaaaatcccgattcgcagctcgtggtagctttcaatgagcgcctggcctga

SEQ ID NO: 433323 - DNA, 306 bp, Serratia marcescens
atgacggggtggcttctgtgcatcctgggttcagggtatgtcagtatggcactggaacagcctgaaagcactgtgttactcagtctgctgctgttgtatgttatgtcaggcattttactgatgcaattccagtatatgtattcagagcgaagcataggctacaagttctacctggaagtgcttatgaatgcagctgccagtactcaacataaagaacagttacagtatctattcattaataagcccaattccatcacgatgggcgatctttaccgactttatgattttaatgggggagggcgatag

SEQ ID NO: 433324 - DNA, 612 bp, Serratia marcescens
atgattaggcagggctttatactcacaaccgcaatgcttctgagtggatgcggatatcatttcgcaaaccaggtagatgcgtacgatctaatgcctcgtcctgttataaataaaaggtttcagatagtccctccggacgaaagtattcagtccagaatgttttcaggccgttttgctgatggattagcaaaaaaaggagccattatttcctctcaccagccagattatgtgctcaggttccgaatcagcagctcacaggagaacatgcagtatagcgagcagcttcttactggggtgacaggctacgttgtagataaaaagacaacgagaactgacaagcatggcgaattgcatactgactatgactacaagccagtcgatggggtaataggcactgagacgatgtcgcagatgcactatatgcgacagctggatgtcgaggtatacccgtcagcgaaaggagcaaagcaggttctgaaagtgagtatgcaaagcaatgcacctgtgccgtcagacagcaatgcttattcagcaatgatcgacgcctttactgataaatttgatgcgccgctgcgttccggaaattatgttgcagtgatcccctggaactga

SEQ ID NO: 433325 - DNA, 810 bp, Serratia marcescens
atgtctaaagaattttatttaaaaccgatggccacgattttaatttctgcggtaattgctaccgctgcctcggcgttaatcacggcaacttattttaaaccgaaggtgctcagtgaggaagaaattggcaaaattgccgctacttacctggtaaaaaatccccattatttagtggaagcaggtaaggcgctggaaaatcagaacgtgagtgcctcagtggaacgaataattccatatgcgccagctctgctggataccaaggagacgccaaacatcggcccggatgacgccgacgtcgcggtaaccgagttcttcgactatcagtgtatttactgcatgcgggttacacctgttgttgaatcggtaatgaatcagagcaaagatgtaaaattcttctttaaagaattcccgatttttgcaggttcaaaacctgtatctgccatgggggccgctacgggtctgcacgtctatcagaatttcggtgctgaagcctatcgtaagtaccacaacaacctgatggctgtggctcatacctttatgacctctcaacgcaaattcgaactcagtgactttaatactgtggtggaaaagtcagggtttaacagcacgttttctgacagggaaaaaaaccggtatgaaaacgtgatctccggcaacatgcagctgggcgaagcgctcgggatcaccggcacacccggcttcatcattatgaatatgaaaaagccgaatgcggcgactaccacatttatccccggggctatggacgcagcaactttgcagggcgcaatcgaaaaagctcgcggggcctaa

SEQ ID NO: 433326 - DNA, 1209 bp, Serratia marcescens
atggatcccaagctgtctaaaaagccgctcatcatagccagcaataatgattcgtccgtcattgcaatgaataaactggctaaaagcgttggtattaagcgtgggaccccaatttttaagtgcagggatttgattcagcaacaccggatcgaagtccggagctcaaactttactttgtatgaagactactcaaatcgcttccatgaaacgctggaaagcttcgcgcctcaatcgagtcgatatagcatagatgaaaatttcatgttattgaaaaacatgaacaagataatagattatgaagattacggccggatgatcagaagtacacttcttcataatctgtcccttacctgtggtgtgggttgttcaagcaccaaaaccctggctaaattatgcacctatgcgagcaaacgatgggcagctacaggcggggttgtagttttgactgatcagaccaggatcaggaagctcctgagccttatcagtaccagagaaatatggggtattggtcgaaagatcagtgaacgcctgtcggctttcgggatcatcactgccggtgatttttataatagcgacgttcgctttttacgtaaaagctttggcgttgaaatcgagcgtacctggcgggaactgcatggcgaaccatgtttccggctgcacgagtcccctcctgtcaggcaacagattatcgtttccagaagttttggtcagcgccttaatgagataggcaagctacatgaggcagtttcattttttaccgcccgggcggcagagcagctgcgcaaggatggctcgtggacccgtcaaatcacagtcttcattcagagcagcaattatgcgcaaggtgaaaaccgctacagcaattgtggtatcgagccgcttaccgctacacaggacacccgcgatctggttgatgcagccatgaccatcctgaaacgcatttacagacccgggatagcgtatgcgaaagcaggggtaatgctctccgctatgactgacggcacagagcaactcagcctgtttgatgcgcgcccggccaggcctggcagtcaggcactgatgaaagttatggaccagttcaataaagaaaagcgcggagctctgtttttactgggggaaggcattcaacaggattttcgtatgaagcaggccatgctatcacccagatatacgacccgctgggatgaattactcgttgtaaaagcgtag

SEQ ID NO: 433327 - DNA, 435 bp, Serratia marcescens
atgtctgttatccttgagcacattagcaacaagccttacgaaatggcaccttttttcagtgatttactgagctgtggagtgatgagtccgtgcgccgggcatgaagataatgaattaaatttgcatgaatatgtagtccgcaaccgcccctcaaccttctttgtcagggcggcgggcctcagtatgatcaatgccggtatcaatgatggagcaatactggttgtggatcggtctttaacagcacgacacggctctatcgtcgttgcgctggtggatggagagtttacggtaaagatcttacacacgtatcctgagctgcttttgatgccttctaatccagcctataagccgatacgtgtaaatcccgaatcccttgagatatggggcgtcgtcacctttgcactgaatcagttcagccatgtacatgcacgttga

SEQ ID NO: 433328 - DNA, 1221 bp, Serratia marcescens
atggacgaaaagtccctctacgctcatattctcaacctgtccgctccgtggcaggtaaagtccctttctctcgatgaaaatgccggttctgttactgtcactgttgggatcgctgaaaatacccggttagcctgtccgacctgcggtaaatcctgttctgttcacgatcaccgtcatcgtaaatggcgccatcttgatacctgccagttcaccacgattgtcgaagccgatgttccccgaattatgtgtccggagcatggctgccagacgttgcctgttccgtgggcagggcctggcagccggtatacgctgctgttcgaatcgttcgtgctctcatggctgaaaatcagcaccgttgatgctgtaaggaaacagctaaagctcagctggaatgcggttgacggcattatgacccgggcagttaagcgaggtcttgcccggataaaaaagccattatctgcccgtcatatgaatgtggatgaggtcgcctttaaaaaaggacaccgttacataacggtgatctccgatcgcgatggccgggcgctggccttaacggatgatcgcggcacagagagtcttgccggctatcttcgcacacttactgacgggcagttgctggctatcaaaacgctctctatggacatgaacgcgggctatataagagccgcacgtatccacttacccagtgcggttgagaaaatcgccttcgaccgcttccatgtagcgaagcaactgggtgaggtggtggataaaacccgccagaatgaacatccacacctccctgttgaaagtcgtcgtcaggcaaagggaacccgcttcctgtggcagtacagcgataagtggatgaccgaatccaggcaggaaaagctgatatggctgcgtgcacagatgaagctgacgagccagtgctgggtactgaaagagctggcaaaggatatctggaacaggccatggagcgaggaaagacggagtgactggcagagatggctggcgctggcggccggcagtgacgttcccatgatgaaaaacgcggcgaaaacgataggaaaaaggctgtacgggatcctgaatgccatgcgacacagtgtctcaaacggaaatgcggaggcactgaacagcaagatcaggctgctgaggataaaagccaggggataccgaaaccgggaacgctttaagctgggagtgatgttccactacgggaagctgaatatggcgttctga

SEQ ID NO: 433329 - DNA, 1089 bp, Serratia marcescens
atgtcgcatctgatgctttcccgtcacgggatctggtactaccgtagggtctaccttacacctcggaaacgccgtgaaattcgtatttctcttcgcacacgttccaagcgtgaagctttgctccgtgtggagaaatatctcacctcacaacctttccactgcgttccgcagtccatcccggcacacactgcaaccccgtctgcttccttccaacaaccacaacagaaaaagcctttcaagagcctgaagagcgagcttgataagtacaccagggctaaaacaggagaggttggtgaacgggaaatactgacgatcaataggtgcgtaaatgcatatctgaattctacaaaagagcctttcagcaaacgaagcgcggcggcgtttgttgatggccttgaaggttcagcatccaccagaaaccgttacatcaaaaagaactcggcgtttttcaaatggcttgcaactcgcacggatgatgagattcgaaacccatttgaggggatgggtgttaaggaaataaccgcaccaatggatcgccgtccagcatacacgctcaacgatctgaaacgattgcacattgctttacatggcgtgaaggattggaagcggtggatcattctgattggtcgctattcggggatgaggcagaatgagatctgccagctttaccacaatgacatgatgaaagttgacggagtttggtgcttccgtgttgataacttgaatccgaatcagacgcttaaaacggacagttcgcgccgattcgttccgatcaattcgcaactgctgacacttggtctacttgattttatcaaagaaagaaaaggacatctgttccctgagctaacattgcatcttgggagctatggtcactatttcagccgttggtttacgaggttcagaggcaagcatagcctgcctgaatatcattcactgcgccactatgccgccacaacatttaaacagaatggcttccctgaacagttcgcctcacaggtgctcggacactcgaacgcaacgatcacgtacaaccgatacgggaaggggattgctgttaggacgctcgtcgagttaattgaggtactctaa

SEQ ID NO: 433330 - DNA, 954 bp, Serratia marcescens
atgccaactcgtagaatcgcttatgcatactacgatcctgattggattaaaggcgagcatacgcttctcgccctcaaaaggaatactgtcgagccgcttgcttattcactgtctatgaaaggatatattttttgtccttcttgctatgaacatataactcgagtgcctgccgatcctgacaagggcatgactacgaatgaagttccggcctattacaaacaccttaaagatgataatgcgcctttctgtagtttgagatgtggccccattcagtacaaaaaatatgcatctcaagaggatgcaaaaaaagccgttgaagatgaagagattatagtcataagcggttttctcgagtctcgtcctgataacaatccaaggatcgattctgagggcagcgaggtacctgtcgattctcattttgagagaaaaaatggcaaagaggtttcattacctatttcccgccatcatggtgagtctttcaaggttccgagccatgtaactagtgtccagtctttatgcgttaatttcgatcataattattaccgtgagatttaccttgttggcgcagatggtaaagcaaagcgctacagattttgtgactcactaaaagaaatcaatgacataactgagggttcttctgatccagcattcttttttggtacgttttggaaaattgagacgtttacaggccatagtaatgtctggttaaagatcaaccaaggaacatcatttagggatttcagagtacgtatcactaatgataccgctgaagggagaggattttttaatgataaaaatcgtgggaggataactgttttttatagtcgagtagatgaggtcggcatgggttatatgacaccccagttagggtggggggaggtggcacttttgcctgcaaaatatgatgattttttaatcagtgattatgcgtcatctcgtaaggacaatcattaa

SEQ ID NO: 433331 - DNA, 672 bp, Serratia marcescens
atgaccatgccttactgtatcctgcataccgaagctgattcagatgttgtacttaatggactgggcttttcagaaaacgatattcatgctgctctgacatctgctttgtacgagcgccgcaaatccagcaagcttcacccagctgtcgatgcagggttccgtttctggagtgaaatggttgccgcgacacgccgtgtactaattggtaagggtaacggctggtcccctgaagtggtcaagcgaatggaaatggtcgctaactcagcgagaggggttaatctgattatcacctctggtgatagacacaccgggcgtcctgatggattgccgaaaaccaaaaatgccaaaggtgaggcaacgcgctcgattgttcacaacaatcctggcacagttgatatgttccagacggatgctttgtattcagtcaaatctgaaatcactccgatagatagcactcgcacttatatcgtcctgtactattatgatgcggctaacaaagaggttcgctgcgaggtgtcttatccggtaggaatggtgaatcaggacggatttgcccgcgtaagcgcatggagtgagcgtattattttgagtcctctgccatttgaaggtgcggatattttccctgatgaggatttcaatgatgacatatcaattactgttgaaagcaaatga

SEQ ID NO: 433332 - DNA, 1113 bp, Serratia marcescens
atgagtaaccctgttgatgacggtaaacgtctttttaatccatcccggctcaagctggcacggatcagacgcaaactgaccctaaaagaactggcagaaaagatgggactttccagccgtattgtaattgagtacgaaaaagcctattgcctatatgaacccacgccagagacggtccaggcgtacgccagggctctgaaatacccagagtccttttttttcggggatgatgttgaagcaatcgatccactgacggtttcattccgttctttgcgcacgacaaaagccgccgaccagcatgcggcaattggggctggtgcgctgggagttatgctgagcgagtatttcagcacccgtttcaccctgccgcagcctgaattgccgaatcttcgcggaagtgagcctgagatcgctgctcaggcggtgcgtgaagcttggggtattggcaagaagagcatcaccaacgttgttcatcttttggagaagcacggcgttaaggtgttctggctctcggaggaaacggcgagtatcgatgcattttcgttctggaaagatgatgtcccttacatcttcctgaacactcgtaaatcaggtgaacgcagtcgtttcgatgcggcacatgaactcgctcacctagtgctccaccgtcatggtgacgtcaaggggcaagatgcagagcgtgaagcggatgcttttgcgtcagcatttctgatgcccctggaaaacgtgatggctgttaagatgacgttgccgacgttcgacaaaatcgtgcaattgaaatcgctctggaaagtctcggcgatggctctgattgtcagaatgcgaaatctgaacatgcttacagaatggcagtacaacagtctgatgcgcgatgcgacggcaaaggggtatcgaaccggtgagccgggaggaattgagcgtgaaagatcgctcattattgaaaaaatgatgaccgctctggctggtaacggcattaatctgactcaattgagtgatgagcttaacgtgcctcttgatgaactgagtagcctgctttacggtgtggcggcaattagtggtggtaatagcggaacatcaagctcactgtcaaaggcctctctccgtctggtgtga

SEQ ID NO: 433333 - DNA, 1308 bp, Serratia marcescens
atggcacttccaagacaaaaactcaccttcgagcgcattcgaaaatttgctttatctgaaggaaaaacccaggcatttctttgggatgcggacgtaacttccctggcatgtcgggcaactcgcggaacaaaagcttttgtgttccaaagcgtatatgcgggaaaaaccattcgcatgaccattggcaacattaacgattggaggattgatgatgccagggccgaagccaggcggctgcaaacattaatcgatactgggatagatccgcgtatagctaaggcagaaaaaattgctgaagcggaatcacagcaggctgaatctcgtaaaacgaaggtaaccttcacaagcgcttgggaagattaccttgaagaattgagaaccggaatcagcgcaaaaactaaacgcccatattctactcgatacattgccgatcacattaacttgtccagccgtggaggggaaagtaaaaaaagaggccggggcccaacctcggctggaccattggctagcttactcgacttaccgttatcggaactaacaccagagaacattgccgcatggctaagtacagagagacaaaatcggcctaccgtcactgctcatgcctaccggctgttgcgtgcatttatcaaatgggctaattaccagaaaaaatatcagggaataatccatggcgatattgcacaagatcataacgtgagaaaagtggttccagtatcagcgagtaaagcgggagattgcttacaaaaagaacagttaaaaatctggttcagtgccgtacgtagcctcaataatcccattgcatcggcctatctccaagtacttttgctcaccggtgcacggcgtgaagaaattgcgtcacttcggtggtctgacgtagatttcaaatggtcaagcatgaggattaaagacaagatcgaaggcgaacgtatcatccctctcactccttatgtttctgagctgttaagtgcgctagcgcaattcccaaattctgacgtaaataaggagggttgggttttcagaagtaacagcaaaagtggcaaaattattgaaccgcgttcaggacacaacagagcgttagctcgagctgagttaccacatatcagccttcacggcttacgccgtagttttggcactcttgctgaatgggttgaagtgccaaaaggtattgttgctcaaattatgggacacaaaccaagtgcactggcggaaaaacactaccgccgtcgtccgttagatctgttgcgcaaatggcatgaaaaaattgagaggtggatcttacagcaagcaaatattgtaaaaaaataa

SEQ ID NO: 433334 - DNA, 894 bp, Serratia marcescens
atgaatgttgtcgcggaaaaagtttgcattttagtgataatctatggaaaagagctggttgactcaactacactgtcttcgttattaaaatttgattgctctttatttgacctggtcgtcataaataatgggccagaggctttaagtgatcgtgattttttttatcatgatcttagcgcgagttttcgctcttttgagttgctgaacaagactgagaacatgccacttagtattgcatataacagctttatcgattcgcactccaatgcacaaaaatatgttttcctcgatgatgacactgaggtgacggaaagttttatatcccgtctggctgacactggagcttcatttgacgttgaagtacctaagatcgttgcaaccgatggctctcttgagtcgggaagcgttcagtatccggtcgaagatggcgttcctgtcgtagaaatcagaactgttaatgcgggcacagttttctccataggttcaggtttagtcctgacccataaatttattgaaaaattccgaactgcttgtgtgcctgtgtttgataaccactacgcgttgtatggcgtagactatagtttgttcagaaacgtacgaaaacttttagctaaaggagttccttttacctttacgagcttttcttctataactcattctttgtcccgtttgcaaaaaggaacattgagcgagcatacaaaaagggaacgcttgtatgacattatactgtcggcacggcactaccccgataaatcctatattaaaggtcttatcaagtcactcgttcacgctagtcttcgtcttgatttttcattggttgttcatattatctctacttttgtcaaaggttaccatccaagatgtaagccatatatcaccactgagaaaaaataa

SEQ ID NO: 433335 - DNA, 414 bp, Serratia marcescens; identical to SEQ ID NO: 31404

SEQ ID NO: 433336 - DNA, 972 bp, Serratia marcescens
atgaagaacgacaggactttgcaggccataggccgacagctcaaggccatgggctgtgagcgcttcgatatcggcgtcagggacgccaccaccggccagatgatgaaccgggaatggtcagccgccgaagtgctccagaacacgccatggctcaagcggatgaatgcccagggcaatgacgtgtatatcaggcccgccgagcaggagcggcatggtctggtgctggtggacgacctcagcgagtttgacctggatgacatgaaagccgagggccgggagcctgccctggtagtggaaaccagcccgaagaactatcaggcatgggtcaaggtggccgacgccgcaggcggtgaacttcgggggcagattgcccggacgctggccagcgagtacgacgccgacccggccagcgccgacagccgccactatggccgcttggcgggcttcaccaaccgcaaggacaagcacaccacccgcgccggttatcagccgtgggtgctgctgcgtgaatccaagggcaagaccgccaccgctggcccggcgctggtgcagcaggctggccagcagatcgagcaggcccagcggcagcaggagaaggcccgcaggctggccagcctcgaactgcccgagcggcagcttagccgccaccggcgcacggcgctggacgagtaccgcagcgagatggccgggctggtcaagcgcttcggtgatgacctcagcaagtgcgactttatcgccgcgcagaagctggccagccggggccgcagtgccgaggaaatcggcaaggccatggccgaggccagcccagcgctggcagagcgcaagcccggccacgaagcggattacatcgagcgcaccgtcagcaaggtcatgggtctgcccagcgtccagcttgcgcgggccgagctggcacgggcaccggcaccccgccagcgaggcatggacaggggcgggccagatttcagcatgtag

SEQ ID NO: 433337 - DNA, 213 bp, Serratia marcescens; identical to SEQ ID NO: 31409

SEQ ID NO: 433338 - DNA, 207 bp, Serratia marcescens; identical to SEQ ID NO: 31408

SEQ ID NO: 433339 - DNA, 840 bp, Serratia marcescens; identical to SEQ ID NO: 379997

SEQ ID NO: 433340 - DNA, 852 bp, Serratia marcescens; identical to SEQ ID NO: 10372

SEQ ID NO: 433341 - DNA, 816 bp, Serratia marcescens; identical to SEQ ID NO: 6090

SEQ ID NO: 433342 - DNA, 804 bp, Serratia marcescens; identical to SEQ ID NO: 6089

SEQ ID NO: 433343 - DNA, 837 bp, Serratia marcescens; identical to SEQ ID NO: 22759

SEQ ID NO: 433344 - DNA, 540 bp, Serratia marcescens; identical to SEQ ID NO: 19206

SEQ ID NO: 433345 - DNA, 285 bp, Serratia marcescens; identical to SEQ ID NO: 31406

SEQ ID NO: 433346 - DNA, 495 bp, Serratia marcescens
gtggcagtgcgggttctcgccgccaccggcatggatggccagcgtatacggcaggcgctcggcaccggtcaggtgctgggcgaactcggacgccagcgccttctgctggtcgagggtcagctcgaccggcagggcaaattcgacctccttgaacagccgcccattggcgcgttcatacaggtcggcagcatcccagtagtcggcgggccgctcgacgaactccggcatgtgcccggattcggcgtgcaagacttcatccatgtcgcgggcatacttgccttcgcgctggatgtagtcggccttggccctggccgattggccgcccgacctgctgccggttttcgccgtaaggtgataaatcgccatgctgcctcgctgttgcttttgcttttcggctccatgcaatggccctcggagagcgcaccgcccgaagggtggccgttaggccagtttctcgaagagaaaccggtaagtgcgccctcccctacaaagtag

SEQ ID NO: 433347 - DNA, 609 bp, Serratia marcescens
atgtctaatgatgtttctcagtcgaaaggttatgaccgggatgaatataacagactgatgcaggttgatggtcaggttatgattgcccgttttgctttgcaacagttctgggatactcattttattggactaataacatttgtatctgagtctataacatcgagcctctataaagcttatcaaacttttagtgatattagtttggcttgctataaactgagtgaatattcttattcacgttctatcaacagtgaattgacccttaatatttcacttaaagaaaatgacttctgtgaggacctatctgattgctatatggaagatgaggctttaccttctggtagggtaatttctcgacgcaacaatgactccataataagtatttatgaaagctatgctgcggcttcttatattccgatgattgcatctttggaagtctttgatgaatacggcgaagtggttactgacctctgccataccgtttatgtttcagagttaaccggtgggcggattaaaatccacgaccgtaatgacttagtatctgaagttttcgataacctaagaaatttaaatcttgcagttggagattcagtttcacaagctgcttga

SEQ ID NO: 433348 - DNA, 276 bp, Serratia marcescens; identical to SEQ ID NO: 283195

SEQ ID NO: 433349 - DNA, 591 bp, Serratia marcescens
atgattggagaaagtatttttgactgggtaatttacggaatatccattttgatatttgcttcagcactaattgaaggaaagacaactcgctacccagcactttttttctatgggagtttaattttaatgttaatcctgatagttgctggaggccttaactggtggttctacaggtcaaaatatggcgcagtaatcgttatcttcacagtggtttctttactgatgactcgattccgcctggtcatatataaattaagattaagaaagttagtttcagaaatcagatttcgtataaaaacgggttttcgtataattcttgttttgtcggataatgaggatgagcgtaatgttctgctgtctatgcttagcaacgtattgccagagcaaacgcttattcacacgcgtgatgctctcggacctcattcaggccctatcctaaaagctcttgagctacatcatcaacagggaacaggttacatactcgtctgtgaacaacaaatctcagcgcgtacgtggttgagtatcgtagaaaatgggaaacctgatacatctatagctgttaattttcattcgatcccagaaatggagtga

SEQ ID NO: 433350 - DNA, 537 bp, Serratia marcescens
atgagtactcaaaagcaactttccagaactaccggcactgaacgtatgtttaaggaagagctggcgttatccttaatttgttgggttttcaccagtccttttaccaactggaccgataaagtcttcagtggtattgaagttccgtctgaaggaccgtcatcattacggggtgagacagaaaaattctttcgttttgtcgttaatgaagaaggctacgacgcaggaagggctgctattggtcttgacctatgttgtttttcacttccgttgtgtttgttcccggacgctgccctgtctgaggaagagattatgagtaagttaaccggagaagttatccatgggattcttctttccttacctgagtttattgatatgccagaagtgctcgcttaccaggtcagggatgaaattcttgcttttaacactcgctgtggagacgggatctttcatggttggaacacggcttcagaattgtggaagtttgaaatctttccccgcaccaccatcatgatgcagcatacttcggcaatacattaa

SEQ ID NO: 433351 - DNA, 963 bp, Serratia marcescens
atgagttatgacgatttgccctattttcgtgaccagattctggaacgcatcgactcgctcaagtgttttctttcgaacacccccccgatgatggcaaacctgatgactgtctccaccgtatctcgaacagaagagcgcctgaagcaggttaaacccatcagggttagtattaaagacgatgcttcggttgaggaaattattcaggcacttactgacatctgtgtggatgacatagagtcattacgtcatgattccaccaaagtaaccactaaatacccgggtctaatcattgtcccagaaagagcagatcttcttgaaagcttgatcacttctataaacgaagcaaaaaatgattttgctgcggcaatgaggcgtatcgataataaaaagaatgtccgttttgataaagtgcacaagaagctcccgggccttgtcgctatgcactcaacaagaaatatccttttcatcaagtcccagcttaaaaaagttactttttcatggcggctaaaccgaaaccaggaagttaaaacagcagagcaacttgtgagtttgttggagcgcaggagagcctcagaagtaaaaaatgtagcaactaccaatttgaatgtcgtgtctaatatcgataaggctttacaccgtcttgaatttcacccactgaagcagggcgaatcttatcgcctttgtcgaactaactctttccctgttccgattgctcacatttttgcatttaggcctgaagggcaggaacgaaacgggaataaatatgctgagactgattattcagtagtaaaagcatccttgcccattttcgcagcaggcaacatacctcaattaaaaacgctctctgactgggctcctgaaaacagccagggtccgtccaaccaacggaagctgagcctgaaatatacagaactcgtgccgggggctgagctgggcattttcattgtcagccccgaaaattaa

SEQ ID NO: 433352 - DNA, 906 bp, Serratia marcescens
atgcaatggatttccacagccagccagaaaatcgatgagcgtctctatcgtgtctgcgtctgggtaaaaaaatatcacgctgatgcgattaaccgcgttgtgctaaccgttgatctaagtaaagcccgacatgaccctgacgaggaccaggtaagagcagagctgctgtgcggccattattttttgcttcgtaaggaaaacgcttcgaactctgcgcctgacgatcaaaagtttgctttcctgcctgacgggcgcaatctgtgttggcagaccgcaaccccggtgcttcaggatctcctactcaataaaaacgttcctgagtcgctgaggttgcttacggactacatacatatgcgtctggccaggctgacaatggtaccaatgtccggaaccatcatgaacgaggctctgctggacagcatcagctgggttaaggtggatttgacctacttctggcagtacgaacagctcagctctcatctgggacccatccagataacccacaaggcactagtacgcttcgggcacctggcaaagaatgatgaaaactccagtgccataagaatcctgcgtcagcgtctgtcttcagaattcttacatgaatttcagatggctgaggatgagctaaagcgcaaacagtcgttgatgggcaccatggacgtgaaaatgctgtttcatgctcattaccccagccagaagatgctggtggctcgatataaaaatggttgggtaatggtggattgttttctgtttcaccataccaaacctaagaaaaaagcaaaaaacaaaacaactgtggctaagcctcaactaaaacagactaaaagagaagggagtgaaaatggaactgggcattatggtgtgcatcgtgttgttactctcagtggcggcggcgtggatcagtaa

SEQ ID NO: 433353 - DNA, 330 bp, Serratia marcescens
atggtgtgcatcgtgttgttactctcagtggcggcggcgtggatcagtaataagacagttgatttgctcgaaagattctatttcaagcgtccgctgagcatggagtacgcggcatggctacgtgtaatgtgtgcgggcttgctattagtttttattcaggttgctccacaatttacactcctgtatacccttaaacttgtcacgcttattaatcttggaatccagacaatgaaattaaatggtgtgtacaaatataaaaggacgggaattttgcctccgggaggggcactctctaatctcaccagacttaacccgttcaagaaaaaataa

SEQ ID NO: 433354 - DNA, 1176 bp, Serratia marcescens
atgaagaatcaatcagtgatcagacagttttcggaaagcgaattgcatcagcagctggaaacgttcggcaaccatgataaacagctttcacgcttgatccgttacttttcccatctgagatacaacacagctaaaacctatctgcactggctccgagtatggaatgaatggtatctggcgaatgcccggttgcatgcagactggccagtaagttcgctccccgtgtctgaggacgccctgcttgcgtttatgggacatcttgaaggcaaattgtcacgaagcagcataaacagctgtcttcaggctttaaatagtatccataaaaaagggcttaacctgcccgggataattacgtctgaagcatggtacatgctggaagccttaaaacaatcggaagcccgggagcgaaagacgactaaacaggcaactccctttcttattggcgatctcaaggctctgataaagttacgcagtactacaaactcagttcgtaaacttcgtgacctgtgcctgatctggacaggctttgaaacactgctccgttcatccgaaattcgccgtatacgtctgaaagatctgtctctggatagtatgaccggtgaatttaacctgacggtataccgaacaaaaacgaacatcagtacacttcttacctaccggctgacacgacagttaactaactgcctcttgagattgatgaaccttgtgaaaatggatcagcacagtcatccggatgaataccttttccaggccgtgaatttccatgatacaggctatatgccacccggctggaagcttcggagtaaagggaatgagctatctgaccttcttaaacgtcataacctaccctatcgtgctaaacaaagtcttctgaacgatgaagatgaggaagacactgtggacgatgccggtatgctcagcaaaaattcccttttacgggcatttaaagagatgtggaatgagctttatccaaatgagactaaaactcgttactggacagggcacagcgttcgtgtaggcggtgcgatacagctaaatattgaaggttactcgctaccacagattatggaaatggggaactggtcgaatgaagaaatggttatgcgctacattcgcaatattgaagctggtaaaaaagccatgatcaagcttatgcgaaatgcctttgatgaatag

SEQ ID NO: 433355 - DNA, 1083 bp, Serratia marcescens
atgcgtaagagttacacatttggtattccatttggactccagagagaatcaggactctttttagatattacagaggtcagccggggtatcgactgtaactgcatctgccccgcttgcaaaactgatctgttagcaaagcagggggaggtcaagctttggcatttctcacacagtactgctgtagccggtgactgtgatggtctgatggaagccatccggggaaaaattattgaagtcatcaacgagcaccaggttcttggtttcccaaatcttctcgctggcgacgatggtgggccggtttcactgaatgaggttagtggaagcggcagtatgttcggaggcacagctgatctgttcgtaaaggttaatgatttatgtgtggccgtctttctggacagggatcgtagcatttctgcgaagttaacctttgaccaccttcatccttccgaaagagttgccgcattgcgtatcgatcttccagatattgaatatgaaatcagtcaggtgcagctcgggcgacgtaaaacaacatacagtgagtgcattgaaagcctgatcattgatgagaccagttcccgggaatggctatatcatccattaatgcatgaacttgaatctgaacctcttcaggagtatcggggacgggagccttcagaggaagggcctcttcttcagcgccttgctgactgtaagatgaaattgcctgatatccttccgggcagtcataacgcgttagtcaggttacagcaggatacgattgtatgtctttgtcggttaacggttcgggcttatgacatcgctcagaccgatgaatttcctttgttccttcgctatttcaggttgcactgcctggaaaacagcgaacatgtcagttacgaaagactgatctgctggcaggaaatgatttcaaaaacccaggaaggccagtccttgacacaaaacgaacttgaatatcttcatgagattgtccgcatcgccttatacaatcaccggcttaacaatgtcagtatttcagatgttaaaaaccatgacacaggaaaggagagcggcagggtagagccacaaaactattcactcttataa

SEQ ID NO: 433356 - DNA, 672 bp, Serratia marcescens
atgagatatcccggtggtaaaggcaagtgctatcagcgactcatcaacctgatgcctgtgcatgagacatatattgaaacccaccttggtgggggggcagtgatgcgcaacaaaatgcccgcaaaccgtaatatcggcatcgatttggaccaacaggtaatagacatctggcattctgacgatggcgttgcctgcgagcttgtttgggatgatgcagtatcttatctcagttcattccctttccaaggtaatgagctggtttacgcagatccaccatacgttcagagcacacgcaaacgtagcagaatttatcgtcatgaatatacggacgatgaccaccgtcagttactagatattctcgtcaagcttccctgcatggtcatggtgtcgggctacggaaattcaatttatgatgagctcctcagcaactggcgttgcgaacggttcaacgccaagacacatgctgatgttcgtcaagaatgtgtctggatgaattttgatataccagacagattgcatgacactcgctacatgggcagtaattatcgtgaaaggcagacgctggcccggcgccgtaccagactttataaccgtatcgagcggatggaacccgcagaacgtaacgaattgatccactggctgaacgccagatatggccaggagacagtatga

SEQ ID NO: 433357 - DNA, 846 bp, Serratia marcescens
atgacacaacgtggagcagtcttcattggacaagcagttgtcaatctggacttcccggctccggatcaggatattctgcctggagttccatggggtagaattgaggcattcccatctccggcatactgggcttatcaagtgctggcccgtcgccttgaggttaacgctgtcaattataaactggggaggaccctcaaagaagaagtaggggcatgcctgttgggcggacatggaattcctgctgcagttgggcttgcggcattcaataagctaaaaaactgtggcgtatttaacgaagaaccaccaccggaaggggttatctatgaatggctttctcaaccaattgaaactgatagtaaatttgtgcattatcgctttgctagacagaagtcacgctatctctcagcagcactgaacaaactcaacactgaggttcctccaacagactcggggcgcgtgcttagggattggctgacctcaatacccggcatcggacataaaactgcttcctggatagcccgaaactggctcagcgcaaatgatgttgccattctggacattcatattctgcgggctggcctactggccggattcttcccggacaatctgacggttgagcgtgattatctaaaactagaacaacttttccttgagttcagcgaagctatgggcgttaaggcatccgagctagatgcactaatctggtatgaaatgcaggcatcttcaagcaccgtgttcagcctactcgaaaattttcgagataagccacttgcaaaactacgcccccgctcagcgcgaacccaaaaccgccagtccagtacccatcaaacggccttccagttttaa

SEQ ID NO: 433358 - DNA, 687 bp, Serratia marcescens
atgatatcggatatgacttggatcgatctcggtagtcccgttcctcgggagcaaccgttcaattatcaacctgttaattggcatgctggggaaccgcttttcctgacgcctcctcttgagaatgaagtgttccccgcatttagtgacgtgatcaacagtcgcagaactcggaggttttttagccgagtcgacccgggccaactttcccactggctttggttgaccaacagggtcatggctatagggcactcttattatgggtttccactttcgcaacgccctgtgccttccgctggggctatacatcccattcatattgttctctctctacctgatcaggatgggtggcaactgtacctaccggatatgcacgcgctgaaacctctgcttgccccagaacagacccggtctgaaattcgtgacgaattgtcgtcagttattgatatccagagtggtattgctatcaggttaatcgctgaaccgggaaagatgtcggcaaaatatttgcaggcagatagcctaatctggcgcgacgccggagttttgattgctcaaatggcacttgttgccgaagcgctggcctgtaatttctgcccaatgggtattacaggccaggattggtgcaccagattaaaactggaaggccgtttgatgggtactggactggcggttttgggttcgcgctga

SEQ ID NO: 433359 - DNA, 606 bp, Serratia marcescens
atgaaaaccgcactcttgctttcaggtgggatggactccattgctattgcatggtggaaacgtccggatattgctctcacgctcgactatggccagtatgccgctgaggctgaaatcagagccgcttctgttacctgcaaatcccttggaattgaccatcatattatccgcattgactgccgttcactggggtcaggagatatggccggtaccgacgcggatccgaatgcgccgtccagcgactggtggccgtatcgtaatcagatgattatctcattggcagccatgaaagctatcgctcttggcgtcactcacctgtggataggtactgtaaaatcggatggaacccatctggacggaacccaaggctttgtcagtagaataagcgatcttatggcgttccaggaaggtgcgatggtcgtagaagccccggcaattgagttatcaacatctgagctgatcaggctttcagatgttacgccaggaggccttgcttgggcgcacagttgccataaggcaaacataccgtgtggtacttgtcgggggtgcaataaatatttccaggttttggatgatatcggatatgacttggatcgatctcggtag

SEQ ID NO: 433360 - DNA, 1230 bp, Serratia marcescens
atgagtagcgacaatggtaccatcacaatagccggggggacttatcatgaagtctgccttcatccaggaaatcaccaagtttacggctctgccggaagggctgcgtccgcattggcaacattcggtgtaaacgttgaactttgtacctatgctgatgatgttgtcggttcggtaattcgtgatcgggctcattttgaaaatttcacgttaaatgtacactcggtacaggaatccgtcacgtttcactatgagcatggactagcggaaccacgcatatttaaccagccagataatccttacccgtcaatgatgataacggcgccctatgttctccgttatggaatgcttgaaggctctgctgtcgtagacgctgactatgcggtttatgacccccagaatgtgactaacccggagccattcacagctaatggctccaaagctcaacatctggcactgatactgaattgttatgaagcaagagcacttagcggaaaaagcgagttgtctgaccaacaacaagcggaatttctttataataatggtcatgctgaagtcatcataattaagcaagggccagccggcgctctcatttttgatcgcggtgtaatctcgcatattcctgcatatgagactagctatatacacaagattggctcgggtgacgtgtttgttgcctatttcgcatatgagtggatgattaataaaaaaacagcccatgaggctgctaatcaggcttctcttaccaccgctttctactgcgaaaatggacttttcccatcatttgtaggattggcagagttcaaccctaatcctatcaagctctcacaaaattttatcgaaggcggcaacagaaaagtctatctggcgggccccttttttacgctcgcacagctgtggcttgtagaacaagcacaacgtaatttgactgctcttggaatggacgttttttcgccttatcatagggttggacacggaactgctgaagaagtggttgaaaaggatctcgatgcgatacggcaggctgatgttgtttttgcaataggcgatgcgctcgactctggcacaatttatgaagttggttacgctcgggcaagggacattccagtagtgttttatgcagaaaatgaatcggaaggagatcttaaaatgatggaggggtcgggatgtattctcagtactgattacgtcacggcaatctataaaacgctctgggtggtagctcaaaaatga

SEQ ID NO: 433361 - DNA, 855 bp, Serratia marcescens
atggctgtaattcctctgttagctagtggtgctttcactaatgggaatccaccggtagtagtatttgataagtttgcacatgcaactttgtcatatcataaagctattgttgctgataatactcgcgtaattacgattgagcacaacgatattgatgctcttgaatccatttgccagcgtcattctgtcgttgcatatgttgctgatggtgtttattcaatgggggggagcgcgcccattgaacagcttcgcagtttgcaagataagtatggtctcttcttgtatatagatgatgctcatggtatctcaattcacggtgtacatggtgagggatatgcgcgctctcggttttcaaaacttcttgataacaagacaattattgccgcatcgttgagtaagggttttggcaccaatggtggatttcttatgctagggacgagagaacaggagatgcttttgagacgttacgctataccacatacattttcaatgggacctagtgttccgtctgttggtgccgcgatatcgtctgcaaatattcatagaacacctgaattacatgagcgtcaagagcgcctacgtagcattatagcccatttcgataaacaaatatcgtctgaccaggctggagaatatctaccaatacgaatgattacaatcggtgatgaaagaaaagctattgactgtgcatgctggctacttgataaaggttactttgttgtccctgcactttttccaagtgttcctcgaaatcatgcggccttaagaatatgcctaacgtcagatcatgataggagtgagattgaaggtttgtgtactgagataaaaaactggttgctccttccaccatattag

SEQ ID NO: 433362 - DNA, 804 bp, Serratia marcescens
  misc_feature (745)..(754): n is a, c, g, or t
atgctacataagtgtttcctatcacaaatagacaaagccagcagtgattttccgtgtgcaacagccatcattgataatgacaaagaatatagcttcgcagacatatttaaatggtcaaataatattgctagcaacctatgctctaaagggattggtgagggtgacttcgttgcgatttacatgaatagatccctcgaatggatggtgtcaatgttaggtatactcaagtctggtgcagcttatgttcccctagaccctgaatatcctatgagccgaattgaatattgtcttgataactgtggtgctaaagctgtaattgtaggcaaagatcaaaaatgcgtgttaaaagattcgctactaattgattctcttcttgaagataataatcatagccatacaccgaggccaagaaatgagaactctcctgtctatatgatatatacatcaggatccacaggaaatccaaagggggttgttgtacccttcagtgccttagatcatcacatgaattggtttgttgacgcctttgatttttcgcaaagtgatatttttctccaaaaaacatcttcttcgtttgatgcatcggtttgggaatacttggccccattaatgatgggttgcaaaatggttatatctaaatcttctcctgaagaaatattcttgaaatgtaaaaaattttctgtaacagtactccaattggttccaaccgttctagatttcttagttaaaaattacgaaatcagcnnnnnnnnnngaaaatgctattctgcggtggtgaaccattatcaacccgccttgccttag

SEQ ID NO: 433363 - DNA, 990 bp, Serratia marcescens
atgctattctgcggtggtgaaccattatcaacccgccttgccttagctgtgcatcgtaaattatccattccagtcattaatctttatggtcctactgaaacaactgttcaatgctcatccttttgctttatgcctaatgatgctgttaagagtaaattcgttcctataggaaagccaataagtcaagtgcattttgaattatctagtaatgatgatgacgatattggcgagttaacaattgaaggaccaactgtaagtgatggttactatagattagaatcaaagacctcccaatatttctctacaaactttaataccggatttcgtagatataaaagcggtgatttagttaggaaagataaggatggtaattaccattttgttggtagagtagatcaccaagtgaaactaagaggactgagaatagaattgaacgaaatagaagatgtcattaataactttgatgcgagggtaaaatcttccgtcgttcgcataaacagcagcggtcaattagtagctcatatcaacacaactgaaaatgcattagactttactaatcttgcaaaccatataagacaacaactgcctgattacatggtaccaaacttatttttcatagagaatgaaatacccacattgccaaatggtaaattagatagaaacaaatttattagtaaacttaacgacagtgaccatggcgataagactactatagacaacaatcattcaattgacaaaaatgatatttcagattttattcatgctcaatgggaaaaattgctttcgactaaacctacagaaaccagtcactttttcctatcaggaggtcattcacttagcgcaataaatctagtcatgcaaataaacaaacaatttggaaccaaactgccaacagtatgcctgcttacctcgcccaggatctgtgacttcatcaaaaaagttgagtctgaagtagctgaaataattaacaaaaaacctgaggggatataa

SEQ ID NO: 433364 - DNA, 1419 bp, Serratia marcescens
atgtcaacgaaaaataatgtcccaattgaggtgctttccagtaatttatacaaggggttaaccacacctgaagcccttattggccgctattactccaattatttatctaattgcaattacaacgccctcatctctgagaaatataaaaatattattgatgatctgaatagtccacattgcgattacaaagaaagaaattttggaaaaccactttatggaattcctgttatcgtaaaagacaatattcatgttaaaggtttttataacactgctggaacggcttccctcaatgatttttccccatctgaagatgccaagattgtagaagcaatcaaatctcttggtggtatagttatagggaaatcaaatatgcatgaactttcccttggtgcaacctctcataatttcctctttggacatgtcaagaactccagagatccatctctcattgctggaggctccagcggcggtagtgcggtcgcagttgctttagggtattctcctctcgcaattggtaccgatacagccggttccgtcagaatccctgcagcattaaatggtattgttggctttcgcccatccataaatcgttattcgacacatggtattacacctgtttccccctcccgtgatgtgcccgggttgctcgcacgcacagtgaaagatattaagtttattgacagtttactttgtggtttgcccacaaaaatagaatctaaaaaacggcctgtacgtaggattgggttactcaaagacttattttttaccggagctgataacaacatattgtctgtcatggaagaaagagtagagatccttaaatataatggatttgaatttattgagttggaatctcttgaaatacagagtttaaatgacatcgttagtactgttattggtttttacgaattctggcctgctttagagaattacttaaaaacatacgttccagaaatagatatggaaacgctcgtaaagaacatttcttctagttatttaaaggagctggtcgtcaacttcatgtcaccaaaatcagactacagaatagacgatgcgacctatatgaatactataaagatagaaaggcgcgatctaatcaagaaatttgatagcctttttgcagataacaatctagatgcgatagctttccccacaacagtcgcatttgcaaccaaaatcaatgccaatgaagatagtgccctattaaataatgagctagtttcttcaaattatgcatatttgaaaaacactctaccagcaagtaatgctggacttccggccattacaattccgaccggtcgagtcaatgacaaacttcatgtcgggtttgaattaaatggattgccaggacgtgatagagaattactttcattagctgaagaagtggagagaatcttttcgaactcaaccaccccataa

SEQ ID NO: 433365 - DNA, 336 bp, Serratia marcescens
atgaacactgcatcctgtttaccgattgaagtccgtaccgccgttttccgccgcgccgtggcgcaagcctatctggacacctgcgccttttaccgcgtgagcctggggtacacgctggacgagctgcagatgacgattgccctgcgtttggaagggcattttgtgtgtcagtacggcgcagaggatggcatggacatggcgtgcaccatgctgagtgatatggtgcagccggacgttctggtggccgcgccgcgcctgaccgcgctggggcaaaagatgatggacgagctgtgctgcgagcgcctgtcggcggcacagcatgccaccgtacactga

SEQ ID NO: 433366 - DNA, 264 bp, Serratia marcescens
atgaacaccctggccgaccgctactaccgcgacacctattaccctatcccgcacgccgattttctgcgtcttcagcatgcgcacgccaccggcgtgctgttcctcgacctgctggataccctcgacctcggcgggcagcgccccgatgccgtgcaacagacatcgttcgcctcggtcattgccttgctgactgaccagctcggccacgtcgtccaaacctgtgaatcccaaatccttgcccgcatggaggccaccgccgcatga

SEQ ID NO: 433367 - DNA, 2001 bp, Serratia marcescens
atgaaattagatcttaaatcatcaccgcgccatattaagcgtttacagaatatagcaaaagtcattagcggcttaggcgatgtaagagttgtaatagacgacaataccaaaggaccgtattttgatcctgtaaataaagtttgtgttttaccaaacggcgattatagcgatgatgactttgtcagtctgattgaaggttttacctgtcatgaagctggtcatggtcgctataccgtcagtgaggtttacagtgacgcctttaatagtgttctcaagtcatctgaagggtttacacgcttcgatgacggaatgaatgcagagtttgagagcctcgctgagaaacgtaaagcttatagcagggcaaaacgtcttaccgggcttataaatctgttcgatgatgtacagatggaagagaaggttggtaacgattatccggatgcaaagcggcggcttgcagccacttacgcactgatggttaaagccggaaggatgactcctgatatatcttctcgtccggaaaatcctgtcctatttattgagtggtatctgcttaactcattgcgagtacaagtccttcagcaggcaggtcacaaagaaacactcgatccgttttttgactatgcccaaaagatactttctccagtaatttctgatgttgaggaaatttttcatgatgctcttggttgtgaaaatactcagggctgtgaatcccttgctcgtaagaccctggctcttttagagagactgcgggatgaggcaagggaacaacagcagcagacagagcaggaggagcaggaggcatatgatgaatccgagaccgataccgaatcagaagataaatcgcttacgtcgactgatagtcgtgaggatgattctgaggacgatagtgaaggtcaggcagatacttccgataacgctgatcttgctcaagagggatgttctgagccttcagaacttgctgaagataacgagggaaataatgaacccaccggtggcaatcccacaggtgataacattattgaagacgatactgatgcgattaacccttccgagagtgaatcagatgaagccagttcgactaacgttgaagatgaaagtaacttttcatcggctcaatgggagatactggcagatttgttggatgcctttcttggcagtgatgatgatagcgaagattatcacgatgctttggctaaagagattgaaggtattgcatcaaaagtatccgatgacgtgaaagccgaattcggtgcttctgaatgggatatccctgatctccttatcgatttgaatgtttacaatgaggctttgtctctgagtcattcaatcggtagcgacttgtctgttttacagcaggttaaaatgcgtggccgaaacaaaactcatgagcgtggaattaccttcgatggaaatcgattaattctgtcaccaatgggagttcgtgatgtcttcagaactcaaagcgaatctaaaaatagagggcatgttggcctcgtattagttcgtgatatttcagcgtcaatggctaatgacgaaagatatattcatgccattaagtcagatcttgctttatcgatggccgctgaaagtttgtcaaaaatgcatgtctccaatatagtctttcccttcaaggaaagtgaatttgagattatcaaaacgtttgatcaaagcgttgaggaatctctatcgaaattcactcttggatgtaagggttattatacccctacgggatcggctttaatggcagctgttgatctgttacttgacagccaattcgataggaaaataatttttcttataactgatggttatccgaataaatcggaatttactatcggcgaagttatggaaaaggctaaatgtaatggaatagaaatcgttggtgttggtattaagactgatgaaataattggttttgaaacggacactttcgtaacagttgatgatacttctttattgtctattgaagtcagtaagctagttcatcaaatactttcttaa

SEQ ID NO: 433368 - DNA, 222 bp, Serratia marcescens
atgactcagataaaaacttaccgtgtagaacatgaaaaagtcggtgcgatgcataaagtccgtattttcggacgtgttggtgaagttataagcaatgatagccctcaggaaagaatcctccgcgaagtcactatagcggagggtaatagccagcaggctgcgttacttgtagataactacatacagcgtcttgagaataatggcttcacgactgaagcataa

SEQ ID NO: 433369 - DNA, 1233 bp, Serratia marcescens
atgacttatgcatccccggctcttcgtcgtaatccacaggaagtatctgaacactttattaaactcgttcatgctcgaattgctgaagtgtctggctggaagtatatattcgaaagaatacctgctttcaaagacgcttgtgcaaaagccccgagccaggttccttgcccgtttactggcgcagggaaatcgaagtttcgtttccgacaaaaagacctttataccggatgtgcgatccataatgactttccggtaaatgagttttgcgacggaattgatgttctggcgaaatattatgaattaagtaaaacgcagacttgcaaaaagattctctcagattttttcgggatggatctgcatgctccgttaactgacgccgacattgaaaatgaacgacgctataaatcagcagttcgtgccacagaaactcttgaccgagaggaagtggcaaagcgaatgcgaaaacttgatgtgatgtatcactataccggtgaaatcaagcctaatactcctgttgctttgtacctccgtaatcgtgggatctcccgcttactgagtcacttaccaaaggatttaggctttaataaccggatctactattgggataaagataagcagaaatcgattatctatccgggaatgattgcgatctatcgtgacacccgaggtcggcctctgactattcatagaacatacgtagacaaaaacggtgataaggcacctgtagaaaatccaaagctgatgatgaagcctcctgccgatatgacaggtggctcaattcagttgtttgaccctcactatgattcaggtagttcgacctggacactgggagtggctgaagggatcgagaacgcgctttctgttgtagaagcgacttcaacaccatgctgggcagccagctccgcatggtgccttgaaaacgttactgttcctgattttttactgcctccgccggatgtaaaatctataaacttttatatctgggcggataaggatattgctaactcacaaggcactcgtgccggtattgaagctgctcagcgacttcaaagccgcatggttgagtttttggctaaacgatatcccgcatcaaagctgacaattgaagtcttcgaaccagcacaagatattcctgatgggaaaaagggtatcgactggaacgatgttctccagttaacagggcaggatggattcccgattcactgggctcctgaatgtcttaatcagctgtaa

SEQ ID NO: 433370 - DNA, 522 bp, Serratia marcescens
atgaattttcaaactaacgaagtttttaataaatttgctgctgttataaaatcgcgcatcgtcaatgaaccatcgtcatgctatttgctgcatgataatgagatagatataacgattttgaaacatagcatattagaaaatgacagaaacctgttgtacgtagttcgtccttcaggaacgtgtttgttgcgttgtgacaaatatttctatccgaaatattatcttcgttgccgtggagattataagtcattcatatatgtccatcttgatctacatagtggtgaagctaaagaaatcacatgggagcaagcagacgatatgctgtctagtccaggaaaacccccattaaaagggaatcttggacaatttgagtatataaaagttgtggttgaggaccttcgtattcgaggttacgctgattatcttcctgcgtataatcttgatgaccttcgcctttttgccttacaggacgaccgcccatcccttgtcagatacattgacaatgtcatggcaacggtctga

SEQ ID NO: 433371 - DNA, 879 bp, Serratia marcescens
atgaagttagctacggacctggtaaaagctattttgattagaaatggcgttgaaccagtaaatataagcgaatcatctaagttatctttgaaacaaccactaacagaacttaaattcagtttatatttgcgaactgaacatttatctcacttcctacccggttatgtttattctataaaagaatgtccactgtcatatgacatcggaatcgaaattcagaaaatcttcgaaagtttacatttgttaaacgaagaatttgaatccctcggttttgtttctgtatggatagaaatgcatcaaagcatttttgaacaaattcggttcaagaaaagtaactttacttttcgggaggaagaggtcgagcttgctaaagggcttgtatgttctcacaattctctaataagtaatgcggcctatttctggcttcagcactttgaggagtttatgatttatgttcgtaataagcttatcgacctctttcgagaggcctatgacctgatccttggaatgcagcaagtatttttcattcggaaaaaggaagagttgctgaaaactataagttatggcgatgacctgtatgaggtgaaactcatggcggctgagcttaactctttcgaacagaacttaaagtgttctggatcgataattacaaaatctcaagcatcggcatatattaaacgcatccgtgagtttgtgcgttcggggtggaggcagggcaatatagtctgccatcataagcaaagtaatcaaatctcatcgttgtctttaccgatgtacttgaaagatacgtcaggccgaagtgctcgaaagcgagtaaaaagccttatatctgctacagtttgtggtaggaataaagatttaggtcttacagatttttaa

SEQ ID NO: 433372 - DNA, 366 bp, Serratia marcescens
atgaaaagaattaaaaactattgtgaagatgatttttgttcgattattgttgactttaattcaaaaggttcttctcatttcttggaaaaagtattcccaacctttactttggatgactacttggattttattttctacctttttaagacggataagagtcatccgttgctcaggattatttctcccaaaaaaataattctagatgatacggatgatcttcaatttgggtttactataaaagagttcaaggccaagcatgttagcttacatgaattatctttaatgttggcggagagaaatgctatttcttttgctcttaagaataataaagaattacaggcggccagggaaattaaaagactctaa

SEQ ID NO: 433373 - DNA, 1134 bp, Serratia marcescens
atgaaggggatgcagaagataaagcgaggtaaaaatttctctggcgtagtgttttatgcattgaggccagcttctcatcataaaactcccccatcagtaattggtggcaatatggatggaagcaatgccggagagttgattgcagaattcaatgcgactaaagcgcttcgcccggatgttgctaaacccgtctggcacaattcgcttcgcttgccgaaaaacgaagcgctgacagatgctcagtggtcagagattgctgatgattacatgtcccgaatgggcttctctgaaacgcatctcagatgctatgtccttcatgatgatgcggccggccagcacatccatatcatcgccagtcgcatcgaactcagttcggggaagctctacttaggtaaaaatgagaaccttatcagcacacgtatcatagaagagctggagcaggactaccagttaaccagaaccaaaggaccgaaagcttctcctgtagcgccctcacctaaacccaaacgtaaaaaatcacgtaatgaaacaatgttagaagagagaacaggcgagaaatgtgcaaagacgatcatacaagaagctatagatacgctcataaccagcaagatttccgaagaaagttttgtgcagcagcttgcagctcagaagataaaagcaattcccaacagggcttcaaccggaaaaatgaacggtttttcgtttgagtacgccaacatttcattcaaggcttctcagcttggtaaaaagtattcatggaaaaacttagagccattcatactcattgatacaatccaaacgatggaatctaatgcaacagattttttttgggcagtgaatgcggaagacatattgcttccattacctgaacgacccaaacctctattagatgaatatttagatacgaaaacaataacagctaccaatagttatatgaatatcgctatgagatggatagaagcaataccctggttagataacatagtcggtatcgtaaagagcttgaataatcctttctttaaacacaaaaacaaaccagcactgatcttttctgcttcaccaatttctatagacctaccatctcttccttctgttaaaaatctgaaaaaaaacgttttcagaccaaaaatttag

SEQ ID NO: 433374 - DNA, 579 bp, Serratia marcescens
atgaaatacttcatgatgaagcgtgtactggtagcaatctttcttcctgttgtcgttgcttattttggtggtactaaagtaatgaatgtgtattgggttcctctgtttttcgtcagtgcaatgcttctggctacagcatatggcaaatatgttgtcaaaaagaataactcatccactttcaattattttaatgataataatgatgggatctatcttcataaattcaatgaatgtgaaatccggttagacaaaaataagaaagaggttttcctcaaaaatgaggaaggtgcaaaaacgtattcttttgatgatatcaaagagtggagctacaacattacatacggtggtgaagtggcaggtgctggcttaagtagtatcagagagaacggtaaaacattaggtcaaaacctctcagaaacaggtttatttattcgtgtaaaagacgttcgtaaaccagagtggcatatcaggttctatccccgtaatagcgcttttaattcgcataatggcttgaatgacctgaaagcgcagctcaatcaatggatggagatctttgatcagaatttgaatgcagcatga

SEQ ID NO: 433375 - DNA, 420 bp, Serratia marcescens
atggaaaaattaaatagcatggagcgttttctaattctttttgaacgtttcgtgaagaaactcgaagagtctggattgtctgagtcagacatattagaaaaatcttaccttttctgtgtgggtttctatatcaagtataaaaatgacattgataatatggagttagctaatagagatgttgttttatcttttatgcttacctcttattactgctttattaataacgttgaaaaaagagtaatcgatgctgataaaataagaagaatgtgtggattactcattcacttcatcatgaagaacaaagctaattcagaaactgtttttataacggaaaaaagaaaatatgatcgttctgtattggcaaggtcattaaaagaaagaaatctcaactatatggcgaactataataaaaacacttaa

SEQ ID NO: 433376 - DNA, 399 bp, Serratia marcescens
atggcaaaacatttaaatagaagagacatcaattatatacttaattcaatcacggagtggaacatgaaagagaagctgacatgggataatttgtgcaaaaaggtctcaagaaagatcggcaaaactcctacaaggcaatccttatatacacacaaagaaatcgtaaatttatacacggctaaaaagaaggctatcaggcagaacattgatctcgttgagaaaccatccaacatcaaggatgcatatcaaaagctttcaaaaatggaattgaaagttgcggaattatctaatctaaacaagatacttcaagagactatcgttaagctacagtacagttgctatctcaaagggataaaagaacatgagatagaagaaaactttcccatcattaaaagataa

SEQ ID NO: 433377 - DNA, 1818 bp, Serratia marcescens
atgactgttttaatatttaaaccatcaaaagatgagcaggataaaaatgtggaggaatttattgttttttgtaaaaagctatttaaccatcagaagaggaaatacacatggaatgataatgtttgggatggattgggaacattcatcaaattaaaaacaaaacattgggataatggtaattccatgaatgcagaatttattgattttgcaaagtcttatattgtctaccagagagggctgtcaaaaaagagaaatttaaaacgagagatgtgggttttgaaagctattgaagcatcattaattaagttaagtggcagggcatgtattactgactgtaatactattgtttttaacttggctgtaaatatccttcaaaaaaattattcggaaagcactgcatatggagcttcaatagaactggaaaaattttcggcttttcttcttgaaaagaaattagtcaaagacttttttataggatgggtaaatcctttaagattgaaaagggttgagaattataaacccctttcagaggtgattggtgaaaaaggaaaattatccaaattatcagccatagaagcattagcctgtattttttcgaaggaagattcagaactaagcgaaaaggatcagtatgtaagttctgtgttcgctctcttgatgtgtgccccaagccgaatttcagagatccttgcattgccagcagattgtgaaattatagaacaagataaagatggtgttgagcattatgggcttcgcttttattctggcaaagggtatggagcagacattaaatggataccaaccgtgatggtgcctgttgcacagaaagcagtatcaagactcaggagactatcagcgaacgcaagagccatcgcgttatggcatgaaaaaaattcaactatttttagactacctacctgcccagatgtagatgaagaacaacctttaacaaatgtccaagtatatcaggctttaggctacgaaattaataaaaaatataattatagttgtaaacttaaattgaaagcgttatttttaaatgataaggaaaaattcttacatagagattattcatatacattgaaaaccctatttcaaagcattcgtaattcactcccgccagatttcccattttttgacagggagaaagagattaaatattcaaatgctctttgtgttattaatggatgtcaatttagtgaggataaacaaaccaacttttggcagattcataaaccttctgttgatagtgtaatcatggaagttggaccaaaaaataaaggaggaccgaatatattcgaaaagcatggttttttcgatatctgtggaaaacctctaactttacatagccatcaggcaaggcatttattaaacacatttgctcacctcggtggtttatctgatttcgatatcgcaagatggtcaggtcgcaataatctaaccagcaatagagattacaaccacatttcagaagagcatatgaaaagctataccatcaacataagcgaacagaagcaaagcactattgaaccgacaatgggaactgattgtgagatttctttctcagaccctgatcccggtgtgcatggggcggtccttgctacagaacatgggtattgccaacatcactacgccattaaaccatgttccaggttccctggcttagatgacacaacaggtagcggcagcaccgagctgaccgatcttgtagacaagctggtatatagaactgaacaggataagaacgatggagtgtatggtgcagagcaatggttagaactacatcttaggtataaacaaaaactcaataaaaaatga

SEQ ID NO: 433378 - DNA, 345 bp, Serratia marcescens; identical to SEQ ID NO: 95526

SEQ ID NO: 433379 - DNA, 234 bp, Serratia marcescens; identical to SEQ ID NO: 95529

SEQ ID NO: 433380 - DNA, 228 bp, Serratia marcescens; identical to SEQ ID NO: 95528

SEQ ID NO: 433381 - DNA, 210 bp, Serratia marcescens; identical to SEQ ID NO: 119697

SEQ ID NO: 433382 - DNA, 270 bp, Serratia marcescens; identical to SEQ ID NO: 143064

SEQ ID NO: 433383 - DNA, 921 bp, Serratia marcescens
atgaaagccttaacaaaattaatcgaagccatccttgccaaaatgggtttcgtcggtgccgaggttgaaattataaaactggattctaaaccatatcgaaatatccgatttgtggcagatgttccagtaagatcttttctacctcatttggtgaaatatcttaagggtacagaccatctttactgtggtaacgatgatttgcatcctcttttcatttattttaccgatgcgtctacattaaaagcaggccctgtaaatctcgcgaactttcgttttgaagtttctatagcttcaactcatttacgactggtctcagagcaacctgatttgcttattaagggatttaaccgggataatctagaatacgtttattaccgctcagatttggcctctaaggatcttatactaggccttgttgaacacggttctcctttcataaaacatctacatggacttatacaaaagcgaattttaaacgagttctctctgattttttctctttttgagaagattttagaaagcgcgaagccacaaattcttgcttgcttccatagtgttgaatatgaaatgaacgtaaaaataatagccgaagctatacctgaaactgtatctaatcagatagtcacatctgattatctagttaattctttatcagatgcggacaagtttataaatcatgttcgtcgctatttagcaggcagggtaatgaagaggcggatatacgctgaattagatgtttgtgaagaaacatcgaatatttcaatagtgaacttaggatgctttacgtctcctctgctcgttacggaatatcaaatgtttaagccacactcttcagggctatatcgaaaagctataaataactccttaaaacagttcaaaccagaaatgcatgtaccttctgaagaactcttttataattaa

SEQ ID NO: 433384 - DNA, 939 bp, Serratia marcescens
atgtttaaagaatctgaccacatggaatttgttagtgcctttctttatcaaaatttaggccttaatattcccgctgacgatataaccgttcaattatctgatacttcgttcgacaaagtaacctttgattacgatgtagatatcaataatttgaattgtatgttggatctctacatatctgagctaataaggcacaacgcatcttactccgattctattcttttgaaacaaaaaataatttattttcttggagtatttaagaatttcggattttttacgtttgatattcgcggatatagtaatactttaagcccagttaaagttattgatattgtttcaatgattattaatgactgtgaagagttatctaaagctaattcttctactgatgctataagaaatctttatctcgataaaatgaaggtggatgggaaagtgttagttgcgaaatttgcacttaaacagttttttcattccgactttggtgactttatctcatttgtcgagaaaagaattacagattgtcttaatgaaactttaaggattatcaaagctgttgaacatggctttgtacgtgttgggcagcataagataaatcgccgtattaatgatgacttaaagttatgcattgatttcaatactgatgattatccggcaaatatgccagatatatatattaagtttaacgatacatttgatgggaacggggcgttatattgtgacaatgatgccctcatatccctctataccgatgttgcttcaattatcaatgtgccggtgatgatggaagtaagattgatcaataaaagagggcatgttgtctgtgattcttcgcattcaacttacgtatctctcgaaagtaatgaccgatacagagtaactgatcgcacattactaataactgaagcttttggcgattttcgtaacgcgtctcaatga

SEQ ID NO: 433385 - DNA, 1404 bp, Serratia marcescens; identical to SEQ ID NO: 95499

SEQ ID NO: 433386 - DNA, 633 bp, Serratia marcescens; identical to SEQ ID NO: 95498

SEQ ID NO: 433387 - DNA, 1059 bp, Serratia marcescens
atgtctaatgccgctatgaagttaaatgaaacatcttctgatgcatatgaaaaattagaagctcttctttccccagatgttataaagttaaaacattatgtggataaaggtgagtatcttttagttctagcaaaggacctttttggtattccagaaatggatccaaagatggctgtgcctgttttcaaaactaaaacctcgtatcgagctccgctgaacaaagactacataccaaatccccgaatacttgaacaagtggttaaactgcttatcagtccggatatagatttaagtgtgtgtcttaaaggtgagtccggttctggcaagactgaaatggtaatgtacattagccacatgatgaattggccgctgacaattaagcagatcaacagcaatattcgagttgatgagcttgaaggtgagcgcagtcttaatggtggtaatacaggttttgtacacagcgatttggttacgggatttcgtaatggtcacctcattcttctggatgaagtggacaaaatcgatcctgatacggcagcaaaacttcacatgcccattgaacgtaagccctggtcactcagtgctaatggtggtgaggttataactgctaatggctacacgcgatttatgggtactgcaaacacaaacatgagtggaggcgctcgccggttcgtttcttctcaacgtcaagatgcagcttttataaagcggttcttgatagttgaaatggagaagcccgacaaagttgctttaaccaatgtgcttactaaacgatatagctctttgccttttcaggtcattgagaagttcgtaagagtagcgattgcagtaaatgactctggtacagaagacagtgtgatggatattcgtcaattagtagcttgggttggcacgtcaatgacgttaaaaacctttagtcttcttgacactttcaaaatagcttttgcttctgctttacctttacatgtggtcgatcttgttcttcaagctatagatctttctcttggcgaagacaaggataaatcgctggagtatttcacagcaaaaaagtcgagttag

SEQ ID NO: 433388 - DNA, 1629 bp, Serratia marcescens
  misc_feature (1582)..(1591): n is a, c, g, or t
gtgtattcccgtactgaaacaattaacgttgcagctcgttatacactaccaattcacaatactggtacgcgaggcttcttacctattgcacagattaagaattctggtaatggtgcaggctttatgaactttacaatctatggtgcaaataactatggatatagtgcttcaaacgtagaccaagtagctattagttgttgcaatctttccagtatgacagctgaaaccattactcaaatcgttaaacacgtaacagtactgcaatctgctgttagtcgccttcaaataggtttatctccagttgatatagctgctggtatttggaacgtatatttgattgcaactaacggattctatagcggtgttggtatggaaatcggtaatgtcgttggtggtggttctttcattactggctttatgaacgatcgtataatgcctgcatggacaactacagtaccggacaatttactaaccgttgctccagaaaatgcaataacaagtactagcgtaattcccgttacaaatggcggtactggagctactacagcagcagcagctgcgactaatttaggtttaggcactactgatacagtaacgttcaagaatctaattcttgcgaatacacaaagtcctacagtaacattacagaaagcaattattagtagtaactcttcagaccaattagtgatgagttcaccaacaggcgtattcattcgtccaaatggtgattctaatacttcagtacaaatgcgttataacaatgacggtactctagtattttctggtactgctattacattaaacggttcattggcaatgaatggcggtattacatcgaataatagtattacactaacgaatggcagtactgacactgcatttactaccaatggtgctaaatttcgagcaaatccaagtggtgtcgcagttatatccacaacctcgtcaattttcctacgtccaaaaggggatactgattcgactgtacaaatacagtataaatctgatggttcaataacctgtgaaggtagttcattgtcagtatctggtgtattaactgccaaatcattgaacttaacaaatgcattagcagtgaatcaaggcggcacgggagctacatcggcagcagatgcacgtactaatcttggtgttgcatatggtaatactgctggaacagtcgcacaagggaatgacagtagactgaacactatcgacggaaaaatcggcggtgaaatcacgggtgcaatgggtgttaatggatcagggaatgtaaatctaaccgatcagggaacatttatactatggaatgaagaacgtggtaaaggttctggttcgatcgttgttaaccccggccaaggaacagaaggtactttcaaagttcgcttggtcaacagtgccaacacacaggaatactcaagatttgaattcagacgtgacagcaccctaacaattccaaatggtatgatctgtgtagctggacgtgtaagagcatttgcctctgtaggttcaacatacgtaactatagatgttgatggtgcaaataaaggtattaacttctttgattctgataaacgattaaaannnnnnnnnntttacccgtccaagaaggaaaagcactctcacaactaa

SEQ ID NO: 433389 - DNA, 696 bp, Serratia marcescens
atgcccttgatccgaaaagccttccggcggctgcattatcccgtcgatattatcgcccagtgtgttcgctggtatctggcctatgccttgagcctgcataatctggaagaaatgatggcggagcgcggtattgttgttggccattccatgctccatcgttgggtcatccgtctggtgccgttactggataaggcatttcgccgacataaacgtgccgtggggtgccgctggcgcatggacgaaacctacatcaaagtcagagggcagtggaaatatctataccatgccgtcgacagcacggggcagaccatagactttgtgttgatcgccaaacgggatgccgccgccgcactgcgtttctttcgcaaggccatccgtcaccacggcgaacctgaagtggtgacgatcgataaaagcggcgccaataccgccgccctggcaacgttcaatgccgacaagccggctgaagaaagcatcaccgtcaggcaaagcaagtatctgaacaacttagttgagcaagatcaccgcaatatcaaacgccggatacgacagatgctgagattcaaatcgtttcgccgtgcacagacgctgctggccgggatcgaactgctccacatgatacgcaaaggacaatatcaacatccacaacatgatggattgtcacccgtggaacaattctatttgttggctgcctaa

SEQ ID NO: 433390 - DNA, 279 bp, Serratia marcescens
atgttgaacgggtgctggcactccctgccgagccccccccccgcacaacagtgcccccgctgcgcccgggcactgacgcgacgcgagtggcaggtactgacgctcctgaggtgccagcagtccgtcggggatatcgcccggcatctgggactcagtcccaagacggtttatacctacaaacgctgcaccatgcacaaactgggttttacccgtaacaccgagctgtatcactggctgattaacggtggcctggacactgagagaaaggaaattgcatga

SEQ ID NO: 433391 - DNA, 1215 bp, Serratia marcescens
atgagtgatttttatgttaagaattttatttttgaggatggagaaagatactgcttattgtttaatagagaaactgatattccgatgtattatgagaatatgtatataacagtagaggtgagaaaccgaactcactcggtaaagacaatggaagcagtaagcagaacattattgttattcaagcaatttttaaaactaaaggatataaacataattgaaagagtaatgggactggaattcctgaccatttatgagatagatgaattattatattatttaggcttaaatcatacgagtaaaaaaattgtaaaaattacgcatggaagaaggcagcctgtaagtgtaaaaactaagtataaccgaataaattggatcagtaggtatttaaattggctttcagagtatcttcttcacaacaagaaagtggatgttaaaaaaatcaatgatttcataagaacgataaatagcaaaaaaccaaaacttggttattatgatgactattatacatcagaaccaaaatcccttgatgaaaatcaaaagaagcatcttttttctgcgataaatgcatcctctcttcaaaatccgttttcaaagacagttcgcatcaggaatgagttaatagtaatcatgttgtacatgttgggtgtacgagcaggggagctattgaacattcgtttgcgagatatagatcttgaaaacagaacgatcaaaatagttcgtcgtcatgatgatctaacggataacagaatcaagcaacctttagttaaaactttgaacagaaacatttacatgtcagactggcttgaaagtaagatctacttttacgtacaaggtgaacgacaaaaatacataaagaagaacaaacatgattttttgttcatcacccaagggaattcaatcaactcaggtctgcccttaacaatagctgcgtatgagaagttgttcgagcgaataaaagggattgatagcttaccaaaggatttctcaggacataagttgagacatacgtggaattatgaattttcaaaagaggtaaggaatgcgacgatagaatatggaaatataaatgaagaattaattagatcttatataatgggatgggttccgaacacaaatatatcgaaagtgtataatcaaagattcatgaaagaaatttgtggtcaaattcagaaagcgatacaaaacaggatgtataaaacactggaggggttttaa

SEQ ID NO: 433392 - DNA, 579 bp, Serratia marcescens
atgaagatattatcaaaaccattttttatcggattagcaacaaccataggcgctgttagtgctctttacgcaatatatttcggtttctatcctaatgcaccagatatgcaaaggaaggatgatataataggaacctggagatcattcgattcatatactgcccaaggaattatagtaagttcgaagttaaagacatcttatttctcaaacggaaagtacaatgtgagcggcgaaatgtcttatagaaccgataaaatcaataatgataatttgttcgtatcctatagagttaatggtgcaggcgaatggcagatcaatgataaagagttagttatctccctcaacaatttgaaatcaaaccctaacaaaattatttataatggagaagaagtcgatattcagaacctatctcttgtggaaaaattcacaaacaagaagtttcccgctgttgaagatatgatggctgatggtgcaagtcaatcgtatagaatcatcattgataaccacaattacaaaaaattcgatgtgataaatccctttggaaataattttaacatggaaatgtatagagagaagtag

SEQ ID NO: 433393 - DNA, 216 bp, Serratia marcescens
atgtctcaatacaagatagaagaaaaaatcgattacgcgcccgatggtactgtcatttcgagacaatgggaggtttaccatcaagacgggcgacttgttaaaggtgggctggagtcggaagagatggcacagcatacagttaaaatttttgaagaaagagctgaattggataaattaaaaatttccgataatcaccgaaatgactcaaaaccataa

SEQ ID NO: 433394 - DNA, 762 bp, Serratia marcescens
atgtcaactcatggcttggattatgatcaacactcacataagctatatgtgataaaccatgggcatagagagtctgtagaaatttttgacgtctccttgctcaatggaaaacctagtctttcctgggttggttgcattattgccccgccgggtgcagagttggatgcggtctcatcgctaaatgataatggcattgtagctactaacatttggaacaaacatgacgaagagaaaagaaacaagcttatcaataataagcctggtggagagattttaaaatggtcacaaaaggaaggctggagaaaaatagaaggcattgatttcattagtgcacccaatggtattttatcttcaaataatggagaaactatatattcagcgatatggggcgggggctatattttaaagataaaatgccaggacaatatcgcaacatcaacaaagaaactacagcttgaatttcaccctgataacattaagtggtctaaaaacaaagacaacatcgttgtttgcggacaaaaaatgccaatgaaagatttattgaccgcaattgaactattaccagattatgaaataccatttcaggttgatattgtagacacttcacttttaacgaaaaaaacgataatatcagacaagatatacaatagcttctgctcagccactggagctattgaaataaataatgaatattggctgacgtcatttagatgcaaaaaaatagcaatttacaagaaggatgatttaaataacagcaattag

SEQ ID NO: 433395 - DNA, 162 bp, Serratia marcescens; identical to SEQ ID NO: 248050

SEQ ID NO: 433396 - DNA, 606 bp, Serratia marcescens; identical to SEQ ID NO: 248051

SEQ ID NO: 433397 - DNA, 303 bp, Serratia marcescens
atgaaaaaaagaaatttcagcgcagagtttaaacgcgaatccgctcaactggttcttgatcagaactacaccgttgcagctgcggccagtgctatggatgtggggctttctaccatgacgcgatgggtaaagcagctgcgggatgaacgacagggcaaaatacctaaagcctcccctataaccccggtacagattgaaatacgtgagctgaagaaaaagctacaacgcattgaaatggaaaacgacatattaaaaaaggctaccgcgctcttgatgtcggactccctgaacagttctcgttaa

SEQ ID NO: 433398 - DNA, 141 bp, Serratia marcescens; identical to SEQ ID NO: 36145

SEQ ID NO: 433399 - DNA, 792 bp, Serratia marcescens
gtgttcaacttcgaaggcggctgctacgccaagaccatcaagctgtcgccgcaggcggagccggaaatctatcaggcgatccgccgcgatgcgctgctggaaaacgtcaccgtgctggccgacggcagcatcgacttcgacgacgccagcaagaccgagaacacccgcgtctcctatccgatttatcacatcgagaacatcgtcaagccggtgtccaaagccggccatgcgcgcaagatcatcttcctgaccgccgacgccttcggcgtactgccgccggtatcgcgcctgacgcctgagcaaacccagtaccacttcctgtccggcttcaccgccaagctggccggcaccgagcgcggcatcaccgcaccgacgccaaccttctccgcctgcttcggcgccgcgttcctgacgctgcacccgacgcagtatgccgaagtgctggtgaaacgcatggaggccgccggcgcccaggcttacctggtcaacaccggctggaacggcagcggtaagcgcatctcgatcaaagatacgcgcggcatcatcgacgccattctgaatggcgacattgagcaggccgagaccttcacgctgccgatcttcgggctggacgtgccgaccgcgctgccgggcgtcgatccgtcgattctcgatccgcgcaaaacctatgccgacgaatcgttgtggcaggaaaaagcgcaggatctggcgcagcgctttatcgataacttcgccaaatataccgtcaccccggcgggcgaaaaactggtgaacgccgggcctaaacggtaa

SEQ ID NO: 433400 - DNA, 399 bp, Serratia marcescens
atgaaccagtatattaaacgcacacaacgcgattactctctatcctttaaattagccgtcgtcgaacaggtcgaaaaaggcgaaatgacttgccgtcaggccacagaccgttatggtatccaaggcaacgtaaccgtcatgaactggctgcgcaaatacggtcagcttgactggcaaacctctccttccacccaaaagtgcggaggcaacatgcccaaactccccctgacgcccgaacagcgtattaaagaacttgagcagcaactggctgaatctgaaatcaaagcccagttcttcgaagctgtcgtcaaagtgatgaacaccgactttggcgccacgctgacaaaaaagcagctaaccgccttatcgcgcaaacacaagtaccgggactcacagtaa

SEQ ID NO: 433401 - DNA, 291 bp, Serratia marcescens
atgtggaaagaagtattagtgtttatattgaatacagataaaaactctaaattctatgagcatatcaaaaatatttccccgcttgatttggatattgcattgcttggtgattatcttcaggttttcaataaaaggacaaaggataatgttgttttggatgaaattgaacactggtacgcagaaggtaatattccgttcaaggagagaattgaaaacttgagtgttattggcgatggagatgcttggtcttatttttatgaagatgaagatgaagatgatgctattttttaa

SEQ ID NO: 433402 - DNA, 123 bp, Serratia marcescens; identical to SEQ ID NO: 237381

SEQ ID NO: 433403 - DNA, 177 bp, Serratia marcescens
atggccatccgcaaaaccatgaccgccagcggcaggggcatgacctacgaagcgagccgcagcgaggaggccagtcacgccgacgtcgcatgggccaccatgcatgccctgctgaatgaaccgctgaccgccgccaacggccaaccgtctaaatccattctggacttcaaccgatga

SEQ ID NO: 433404 - DNA, 1845 bp, Serratia marcescens
atgggcatctttagctataaggatctggacgaaaaggcgtcgaaagcgctattttccgacgccttggccatctctacctacgcttaccacaatatcgataacggcttcgatgaaggctatcaccagaccggtttcgggctgggcctgccgctgacgctggtcactgcgctcatcggcagcacccaatcgcagggcggcctgcccggcattccctggaatcccgattccgaacaggccgcgcagcaggcggtgaataacgccggctggtcggtgatcagcgccgcgcagctgggttacgccggcaaaaccgatgcgcgcggcacctactacggcgagaccgccggttacaccaccgctcaggccgaggtgctgggcaaatatgacagcgaaggcaatctcaccgccattggcatctcatttcgcggcaccagcggcccgcgcgagtcgttgatcggcgataccatcggcgatgtgattaacgatctgctggccggcttcgggccgaaaggctacgccgacggctacacgctgaaggccttcggccagttgctgggcgacgtggcgaagttcgcgcaggcgcacgggctgagcggagaagacgtggtggtcagcggccacagcctcggcgggctggcggtcaacagcatggcggcgcagagcgacgccaactggggcggcttctacgcgcagtccaactatgtcgccttcgcctcgccgacccagtacgaagccggcggcaaggtgatcaacatcggctacgagaacgatccggtgttccgcgcgctcgacggcaccacgctgaccggggcgtcgttaggcgtacacgatgcgccccatgcctccgccaccaacaatatcgtcaacttcaacgaccactacgcgtcggacgcctggaacctgctgccgttttccattctcaacattccgacctggctgtcgcacctgccgttcttctatcaggacggcctgatgcgggtgctgaactccgagttttattcgctgaccgacaaagactcgaccatcatcgtctccaacctgtcgaacgtgacgcgcggcaatacctgggtggaagacctgaaccgcaacgcggaaacgcacagcgggccgacgtttatcatcggcagcgacggcaatgatctgatcaagggcggcaaaggcaacgactatctcgaggggcgcgacggcgacgatgtcttccgcgatgcaggcggctataacctgatcgccggcggcaaaggccacaatatcttcgatacccaacaggcgttgaaaaacaccgaggtcgcctacgacggcaacacgctttacctgcgcgacgccaaaggcggcattacgctggcggacgacatcagcaccctgcgcagcaaagaaacctcgtggcttatcttcaacaaacaggtggaccatcaggtgaccgccgccggattgaaatcggactctggcctcaaagcctatgccgccgccaccgccggcggcgacggcgatgacgtcctgcaggctcgcagccacgacgcctggctgttcggcaacgccggcaacgacacccttaacggccacgccggcggcaacctgaccttcgtcggcggcagcggcgatgacatcctgaagggcgtcggcaacggcaataccttcctgttcagcggtgactttggccgcgatcagctgtatggcttcaacgccaccgataagctggtgtttgtcggcaccgaaggcgccagcgggaatatccgcgactacgccacgcagcaaaacgacgatctggtgctggccttcggccatagccaggtcacgctgatcggcgtctcgctcgatcacttcaacaccgatcaggtggtgttggcctaa

SEQ ID NO: 433405 - DNA, 897 bp, Serratia marcescens
atggtagaacgtattcgtctcgcgccgcaggggcctgaattttcccgcatgatttgcggttactggcggttgatggagtggggcatgtcgccgcagcagctgctgacgttcatcgaacagcatgtcgaactgggcgtcaccaccgccgatcacgccgatatctatggcggctatgcctgcgaacaggcgttcggcgacgcgctgcgcctgaagccggcgctgcgccagtcgctggagctggtgagcaaatgcggcatcgccaccaccgccaagcccggcaacccgatcggccactacatcaccgaccgcgaccatatcgtacagagcgcggaacagtcgctgcgccatctgcataccgactacctcgatctgctgctgatccaccggccggatccgttgatggacgccgacgacgtggccgaagcctttgttgcgctgcacaaaagcggcaaggtgcgccatttcggcgtctccaactttacgcccgcgcagttccagctgctgcagtcgcgcctgccgttctcgctggcgaccaatcaggtggagatctcgccgattcaccaaccggctattctcgacggcacgctcgaccagtgccagcaactgcgcatcaagccgatggcctggtcctgcctgggcggcgggcgcctgttcaacgacgccgagttccagccgctgcgcgacgagctgcagcgggtggcgcaagaaatcggcgccgagaccatcgagcaggtggtgtacgcctgggtgatgcgcctgccgtcgtcgccgctgccgattatcggttccggcaagattgagcgggtgcgttcggcgctgaaggcgcagaaactggtgctgaaccgccagcagtggttccgcattcgcaaggcggcgctggggtatgacgtgccttaa

SEQ ID NO: 433406 - DNA, 879 bp, Serratia marcescens
atggcggtattcgccaccgtggtggcggagggatcgctggccggcgcggcgcggcggctgggcatgacgccgtcggcggtcagccagcacatgcgctcgctggagaaggcgcttggggtgccgttgctgcatcgctccacccgccgtctggcgctgaccgaggccggggcggcgttttaccccggctgcgaggcgatgctgcaacaggcgcagcaggcggagcagcggctggcggaattgcgggatacgctggtgggcgagctgcgcatcgccaccccggtcggcatcggcggccgatcgcttgcggaggcgctggcgccgctgttgcaggcgcaccccaagctgacgctgcgggtgctggcggacgatcgcatcgtcgatatgatagagcagcgggtcgacatcgcgctgcgggccaaccgtcaactggcggacgccaatatgatcgcgcatccgctgacggcgtggccgatggtgctgtgcgccgcgccgcgttatctcagccagcatggggtgccggaaaagccgcaggatttggtgcagcaccgctggatctccagcggctacagcggggcccatctggacttgctgcaccagtccggccagcaggttaagctgcggctggcggaagggcagatcgtcagcgagagcatgaacgtgatgcgcgcctttacccgcgccgggctgggcatttccgttcagccgctgtatgaaattggcgacgagcttcagcgcggcgagctgttgctgctgttgcctgagtggcggccggcgccgctgcggctgcacgcgctgacgctcgagcgcaacgtgccggagaaaagccgccaggcgctgcgctatttgctgtggggtggtgatcgtttctggactgtctga

SEQ ID NO: 433407 - DNA, 1638 bp, Serratia marcescens
atgtggttacgtcaacgcttacggtgcaacagcctcggttttaccctcgccaccgccctgttcttcactctgtttcaaaacgcgttattcctgcatcgcgcctggtcgtatatcaccttcgatagcgtccacagcgtgattttcgctgccagcatgccggtggtgatcttctgtgcgctgaatatcatcttcagcgtgttgaccgtgccctacctgcgcaagccgctgatcatctttttcttgctcggcagcgccgcagccaactatttcatgttcagctatggtgtggtgatcgacggcaacatgatgcaaaacgccttcgaaaccaaccctcaggaggcgacggcgctgctgacgccgcgcatgggattgtggctggcgctgctcggcattctgccggcggtagcggtctgcttcacccagattcgccagactcgcccctggtggtacatggttggactgcgcgccgccaacgtcatgctgtcgctggcggtgatcctgatcgtcgccgcgctgttctacaaagactatgcttcgctgatccgcaacaataaaagcgtggtgaagatgttgaccccttccaacttcgtcgccggcaccatcaagtttaccgaacagcgttacttcacccgcaatctgccgctggtcaagatcggcgaggacgcgcgcaaagggccgctgatcgccgggcaggccaagaaaacgctggtgatcctggtggtgggcgaaaccgcccgcgccgaaaacttctctctcgggggctatcaacgcgaaaccaacccgcgcctgaagcaggacaacgtggtctacttcaagaacgccagctcttgcggcaccgaaacggcgatctccgtgccctgcatgttctccaacatgccgcgcagagagtacgacgcgactcaggcaacgcatcaggaaggcatgctcgacgtgctggcgcatgccggcgtcagcgtgctgtggcgcgataacgacggcggctgcaaaggcgcctgcgaccgggtgccgcacatcgacatgaccaagctgaaactgccgcaggactgcgacggcgaggtttgcatggacaacgcgctgctgtacaagctgaaggactatatcaatagcctgaaagacgacggcgtgatcgtgctgcaccagatgggcagccacggcccggcttactaccgccgcagcacgccagaattccagacattttcgccgacctgcaacagcaatcagatccaggactgcagccatgaacagctggtgaacacctacgacaactccatcctgtataccgacgcgatgctcgatgccaccatcaagctgctgcggcagtatgacgggcggttcaataccgcgctggtctatttgtccgatcacggcgaatcgctgggggaaaacggcatgtatctgcacggcacgccctatgtcttcgcgccgagccagcagacgcacgtgcctttcctgatgtggatgtcggccgactatcagcgcaatttcggcatcgatcgccagtgcctgaacgcgctggcggaaaagggcgacgtttcgcaggacaacctgttccacaccctattgggcatgctgaacgtacagacccgcgaatatcaatcccagctggatatcctgcagcgttgccgcaacgcggcgtaa

SEQ ID NO: 433408 - DNA, 801 bp, Serratia marcescens
atgtttataatcggagagacaaccgctgaatgggtgagagttttactggcagcaattcttatcgcactaactatttggcgctgtggcggcttatctgttttattcagaataatactcagagccataggaataaacttcaaaaaagggatactacagaaatccgatgatgaaatattttacacacaaaagttcgcattacttaatggcgtaaaagtcaagaatacacaagacgcaaaatcaatagcaaagggattattatcagggcagttatcacgaggagattttttcttcacgacattctttggcttcgtaggaggaaaaggcaatagatttgagcaatggctcttattcatcataggggtaactgttatcgccttaaccttattcatgctaagcggtctccctaaggaaggttacgcagcttacacatacaatgaaaccaaattacaaatttctgtcaacgacataaagataccaaaacccaacactaagagtgaccaaataattaatagagagggatgtataaacatagtcaaaaatcacccgcacgatatatatcgcgcggcatgtgaatacatcgttctagacagcaaggaaaaacaagaagagttagtcgaggccataacctcctggaataaaccaagaatgtttctattcatactgttagccgtaagcggcaccattactatttttggtgtgtttggagcaataaaccataataagattagcaattttttgctgaaaaaccgaaagcaaatcaatggagagcataacactactattcagcaagatgatatataa

SEQ ID NO: 433409 - DNA, 864 bp, Serratia marcescens
atgaataagttacctaggccggagtttcgtgattatgtagctataggcaaactaactaaaaataaaagattaaaagactatgttcttttgtctacacaaacatcaaatttgattaatgcatatcgcatatatcagaggaatggtgggtttctattgaatagaccatatcctcctttgttggctgatgtaaaaacatctctgattaattactataaagcacctccggcgagtcattctataataaaaaagctaagagatgagaatagtacttctctttgcccaatgtgtggctcaatgcatcgggggacattggaccatgttctaccaaaggctatttggccagaattttctttactaacgagaaatttagttcctgcatgtaaatgcaaccagatgaaaagtgcagtgctgggtttgaataagaatcatagaatgttgcatccatattatgatgctatattgaaagagcggctagttaaggctgggtttaaaaatttaggtgagtttccggacataagtctggagataacaaaagacaatacgcatccgttttatgactcaatagtgtatcacgttaataatgttgttttgaagaatgacatcctagggtacctttcaaaaaggtgggagtcattttacctctatccaagaatggtagttagggggataggtcctcacttaaaaaatactcgcgatatatctaaggttttaattgatgaggtaaggctgttggatgattgtcacggagggaggaataattggaactcggtttttgctgcagggttacttaccgctgaggttgttaattggttgtggcttgagttaaaaaatccgaatcgtgatgttaatggtaagctggtataa

SEQ ID NO: 433410 - DNA, 1641 bp, Serratia marcescens
atgatgataagaatagacaatgagaaatatacgttgtttttttctgaaaaaagaaatgttaacccagttggatccgttagttatataatgatctatccagactatgataactggaatgattttggttttttaagtaaaattcaaattgaaatatatagtaaagataaagatgagtattatgcggcgcctgcatttatcggttttattgggagtaatgccactgaaaatggtaagaaggagttagttaatagagttaggcttgccaattctggaaataaaaatatttcaatggatgattgttttgtaatgcttagaaccatgaatgactaccgtaagttggtagatgtttttggggtaaaagaagccaagctgatagctcatgtatatagagatgttctatttaaaagagcgagaaaacaggacgaaaaaaatcgtcttgcttttttatcgacaaatatattcactcattcgtttttaagaaactcagattcatatttcacctataaaaatgcaaaatctatatttaatgggttgaggaaagagaatgttgatgttctctcaaataatatgaaaataacctataaaatggctggtcaggagggattgcaagagtatgaatttagctttggatatgatggtgttttgccaaaaagaattgcaataataattggtgaaaatggtgttggaaaaagtcaaactctgagtcagattgcaaactctgttgttagaggtagagggaattttgtcgaatcgataactaataatagattggagatcggtaggcttctaactttcgcgccaacaagtgatagtggtattacttttccaagtaataaaataaaaaatccgcatacttggtataagtttttttcttttggccgacaaggagcttcttcaagaagtgaaaatatcaatgatctaatcgttcaactctctcgtagcgaagagagaatagcagagagtagtaggtgggagatatttctaaatgcaataagcctcttgaatcctaaagaactctatctatcgtgcgtttcagataatgaaaagctaataggtattcatgatctaatggactatagtgaggataagagacttagacttcaaagcatagtaaatgtaaacagtgagcctaagagggtaatagatggtaaggaatataggttaagtagtggtgagatgtcctttctaaggttcttcgcacaactaagcctatcgattgagaatggtactcttttgcttttagatgaaccagaaactcacctacacccctcatttattaataagttttcggcgatgttggatttgcttttaagtcaaacaggatcagtagctattattgctactcactctgtgtattttgtgcgggaagtactcaaggaacaagttactgttctacggaaaaaagatggttgcataattgctgagaaacctaggttgagtacttttggcgctgatatcgggaatatatcatatttcgtttttggagaaagtgagcctacccatctccttaagatagttgaaaggaatatacttaagaagtataagaattgggatgatgtatataatgcgtacaaggatgacttgtcgataaatactcttacttcacttagagagtctttcttcagtaagaaggagcggtaa

SEQ ID NO: 433411 - DNA, 1023 bp, Serratia marcescens
atggaaattttaaagcgtgattcaaacagcattaatattgcctccttttgggagggtttttcattaggcaaatttaattttgaccctccttatcaaagggatagtgtttgggatgaagaaaaacaatctttctttatagatagtatactacgtaactatccaatcccccctatatttctccaccaaaagattgatgataatacagggaaaattacgtttgaagttgttgacggaaaacaaaggctcacagcgattgttaatttcattaatggacaaataacatcggcaagtgaggaagaggatgatgagttgaccggggtgtttttttccgatttatcaacatctaaatatgcggaagtaaaaaaattattctggcgatatcagatgccaatagagtacatcgatactgaagacgaaaagataattgatagcattttcgatagattgaacagaaatggtgagcgacttaacgggcaagagttaagaaatgcaaagtatcacgatactgatttttataaaaaaatcgtcgaatactcacagcgtgactattggcaaaagctgctcgaacatgttgataaaaagagaatggaagacaaagagtttgtatctgagttgatattcacaatccttgagaatgaagtatttggcgccactcaagacataatagatggtctttatgagaagtattgcacaaagagtggagataaaacaaatgaagcgttttccatctttgaaagaacaactgattatttggtttccatgaatattgatttcaagaatcataaagcaagtggcgttagtcatttatatggaatattcagttacgctctttattgtaataatcatggtgttcctgtggaaacggcgtcaaataagctatcctcttttttggatagtctttgggaaaaagatatacaacataatgaagaattaagaagggaatataggaaatcaatgagctcgagtaccaaaagcaaaactcagcgctcacgtagaattgaagttcttttgaatttactttaa

SEQ ID NO: 433412 - DNA, 1050 bp, Serratia marcescens
ttgagcaacgaacaaaaaaagaaagttgggttaatgcttgggaatggattcactattgacctgcttagcaaaatggaaaagcttgatataattgatccctcagatctatttaaatatggcgatatggttaagtggcccgctactggtgaacccggttttctttctgctcgatattgccccaatttatggcaattaggtgcaagagcgggtctaaaccgtactgcatcatatcagataatagaagagttaattacagtaataaatttatatgcaactctgcctccagaaacattaaagaagaaaaatcaggaaagtcacaccccactttcaaatatttatatttatgcctatcaagagttagtttcatatttaagggagcttttcattgattacaatgaaaaagtttcttctgaagatctacgtaagctcgaaagtggttggcgggactatttgatgaaactggataaaaatgaaaacatagagcgggttgatattataacctataactatgatatttatcttgagcgccttcttgatttgcttaacatcaggtttgatattccaaacatatcagacggaaatgctaagtttaagatatacaaaccacatggttctattagcttcctatatgatgggtatatatccaaggataactacaatatccaaaaggagttgtctttaaataatggggatatatcaaaattcgaatgtcgacatgaaaacttgagcatgtatatgcctttaatcccaataataccaccggcaggagaagcacatcgatatgcccaaaactgggccaactctattaaagagtctattgaagcaacgatggagtcgtacaatccaaacgatgacttcttcatttgtggtatttcatattggcatgttgatcgcgcagaaattgatgcaataatccgtaaagttaatagtgacgttaatgttaggatgatcaatccaggaaacgttgatggtttaagtgctatacttggaatggtatttaatagctatgttcatcattcatcatctgaagccttaaaggagcttgcctaa

SEQ ID NO: 433413 - DNA, 570 bp, Serratia marcescens
atgattaatcaggatacgaaagctgtaatcgacagaatgctccttgcctacggactcaagacaaagctggcgctttgcgaagcacttgatatcaccgcgagcgctttggctaaccggcaactacggaatgcgtttcctgctgaatacgtcctcaagtgcgccttagatacaggggcatcgttgcgatggctgacgtacggtcaaggtgagatgtttgagcagaacgtaattaccgcgccatctgcactagcagttccaagtaaaaccctgatagataggcaccttcatgaaggagatactttgttattagataaggagtttcttcctgaaggaatcaaaaatcctcttttaataattgatggcactttgcagtacattgccacccagacttatgatgaagtttatgatggaacttggcttgtcgatatcgatggcaatatcagcattcgagaattagtccgtataccgggaaataaaatacaggtttccgaccaaaaacactcgtttgattgtgcccttgaagatctaaaaactttagctaagatattaattgtttgcactccagcctaa

SEQ ID NO: 433414 - DNA, 312 bp, Serratia marcescens
atggatcggttagacgagttggccatcttcgtggcggtggtgcagcagggtagcctggcggcggccgggcgcaaactgcggcgctcggcgccggcgatcacccgggcgatcgccgcgctggaacagcgtttcggcacccggctggtggagcgcaccacccggcggctggcgcctaccgaggcgggcgtgcgcctgctggagcgcgcgcaacagctgctgcaggattatcaggcggtggtgcaggataccgccgaagcgcagctgagcggcttgctgcgcgtcacctcgccggtgcagttcggccgccgctaa

SEQ ID NO: 433415 - DNA, 912 bp, Serratia marcescens
atgggattttccacgaaccaatctggagtgagttacaatattggattgggctacaacagcggccgctatacggacaaacccgacaagatcgccacgcttaacgttcagattccgctaagcaaagggcaatcaaacaactggatgaactatacctcgagcaagagcagcaaaggcaaactcaatcagcaattaggactaagcggcaccgcactggaaaataaccagctcagttataacgtctctgcagctcaaagcggtacccgtgacggctattctggcaacagttcggcttattatcgcagtagatatggtgaaataggcgccggatacagctttgataaagatgtgcagcgaataaactacagtttgcgaggcggcgccgtggttcatcgcaacggcattacattatcccaatcgctgggtgacacaatcgctttagtcgaggtgccaaatgcaggcaacgttgaaatcatcaacagtaccggtgtcaccacagattggcgaggctatgccgtggtgccttatatcaacagttatcataagaatagaattaacttaaatccgcagtcctttgatgattcagtagaaatagagaacaacagccaaaccgttatcccgacgaaaggcgccattgttgtcgccaactttgcatctcacataggaaaccgaattattttcaaagtacatcatcgtgggacggagattcctttcggcgcagttgccacattgcgcagcgacccagggaaatcaggtatcgtcggcaacaataacgctgtctatatgagcggcatgccagacgctggaacaataacattgcgttggggagcgggaggaagctgccaaggaaattacagcatagagcctaacgattctgcctcaagagttaagcagattagcttgcaatgtgaataa

SEQ ID NO: 433416 - DNA, 249 bp, Serratia marcescens
atgaagcaaatctggttctccgtttgtttattgacgggcagcctgctctattccagcatcgccccggcgcagccaactgcgtccggggcgttattgcaacagatgagcagcgccagccgttctctcaattacgagctcgcctacatcagcatcagcaagcagggaatcgagtcgttgcgctatcgccatgcggtgatcggcaacgtgccgctcggccagctgctgcatatggacggcccgcgccggtaa

SEQ ID NO: 433417 - DNA, 774 bp, Serratia marcescens; identical to SEQ ID NO: 427658

SEQ ID NO: 433418 - DNA, 1854 bp, Serratia marcescens
atggataatcaccacatgatgatcgaggggctgatctacctcggctccgccgcgctgttcgtgccgatcgcggtgcgtctggggctgggctcggtgctcggctacctgatcgccggctgcatcattggcccctgggggctgaagctggtgtcggacgccgagtcgatcctgaccttcgccgagatcggcgtggtgctgatgctgtttatcatcggcctggagctggatcccaagcggctgtggacgctgcgcgcctcggtgttcggcggcggcagcattcagatggtgggctgcggcctggcgttgagcgccttctgttacttcctcggcctcaactggaaggtggcgctgctgatcggcctgacgctggccctctcatccaccgccattgccatgcaggcgatgagcgaacgcaatttgacgccgtcgccgatcggccgcagcgcgtttgcggtgctgctgttccaggatatcgcggcgatcccgctggtggcgatgatcccgctgctggccagcagcggcgccaccaccacgctgggcgctttcgtgctgtcggcggccaaggtggtgggcgcgttgacgatggtggtgctgctcggccgctacgtcacccgcccgctgctgcacttcgtcgcccgttcgggcatgcgcgaggtgttcagcgccgtggcgctgttcctggtgttcggcttcggcatcctgctggagatggccgggctgtcgatggcgatgggggcgttcctcgccggggtgctgctggcgagctcggaataccgccacgcgctggagagcgatattcagccgttcaaagggctgctgctggggctgttctttatcggcgtcggcatgtcgatcgacttcggcacgctgttccatcacccgctgctgatcgcctcgctgttgctgggctttatgctgatcaaggcagcgctgctgtggctgattgggccgctgctcggcgtgccgaagcgccagcgcggcctgtttgccattctgctggggcagggcagtgaattcgccttcgtgatcttcagcgccgcgcagctggccggcgtactgccggtcgaatgggccaagtcgctgacgctggcggtggcgctgtcgatggcggccacgccgctgctgttggtgatcgccgcgcagctggagaaaaatgcgccgaaagaggagcgcccggcggacgtcatcgacgacgaaaatgccagcgtgatcatcgccggcttcggccgtttcggccagatcgccggccgcttgctgctggccaacggcgtacacaccgtggtgctggatcacgatccggaccatatcgaaacgctgcgcaaattcgacaccaaggtgttctacggcgacgccacgcgcgccgatctgctggaggccgctggcgccgcccacgccaaggtgctgatcaacgccatcgatgacgtggaagacagcctggcgctaaccgagctggccaggcagcacttcccgcatctgaaggtggtggcacgggcgcgcgacgtcgatcactggtatcagctgcggcagctaggggtggaaaaaccggagcgcgaaaccttcgaaagctcgctgcgcgtcggccgtgaaacgctggagctgctggggctggacgcctatgaggcgcgcgagaaggcggacacgttccgccgctataacctgaagatgctggaagacacgctggagaattatcaggacaccgagttccgcatcgccagcctgcagcgggccaaggagatgctcagcgcggccatcgagcaggatcagaatcggctggcgcgggtgcagcagaccggctggcgcggcagtatcgatggcaaggcgccggaggacgaggtggtggaagccaaaggataa

SEQ ID NO: 433419 - DNA, 765 bp, Serratia marcescens; identical to SEQ ID NO: 6031

SEQ ID NO: 433420 - DNA, 501 bp, Serratia marcescens; identical to SEQ ID NO: 83644

SEQ ID NO: 433421 - DNA, 840 bp, Serratia marcescens; identical to SEQ ID NO: 6027

SEQ ID NO: 433422 - DNA, 828 bp, Serratia marcescens; identical to SEQ ID NO: 28366

SEQ ID NO: 433423 - DNA, 789 bp, Serratia marcescens; identical to SEQ ID NO: 52481

SEQ ID NO: 433424 - DNA, 648 bp, Serratia marcescens
atgcctcgggcatccaagcagcaagcgcgttacgccgtgggtcgatgtttgatgttatggagcagcaacgatgttacgcagcagggcagtcgccctaaaacaaagttaggccgcatggacacaacgcaggtcacattgatacaccaaattctagctgcggcagatgagcgaaatctgccgctctggatcggtgggggctgggcgatcgatgcacggctagggcgtgtaacacgcaagcacgatgatattgatctgacgtttcccggcgagaggcgcggcgagctcgaggcaatggttgaaatgctcggcgggcgcgtcacggaggagttggactatggattcttagcggagatcggggatgagttacttgactgcgaacctgcttggtgggcagacgaagcgtatgaaatcgcggaggctccgcagggctcgtgcccagaggcggctgagggcgtcatcgctgggcggccagtccgttgtaacagctgggaggcgatcatctgggattacttttactatgccgatgaagtaccaccagtggactggcctacaaagcacatagagtcctacaggctcgcatgcacctcactcggggcggaaaaggttgaggtcttgcgtgccgctttcaggtcgcgatatgcggcctaa

SEQ ID NO: 433425 - DNA, 270 bp, Serratia marcescens
atgaaaaccgccactgcgccgttaccaccgctgcgttcggtcaaggttctggaccagttgcgtgagcgcatacgctacttgcattacagcttaccaaccgaacaggcttatgtccactgggttcgtgccttcatccgtttccacggtgtgcgtcacccggcaaccttgggcagcagcgaagtcgaggcatttctgtcctggctggcgaacgagcgcaaggtttcggtctccacgcatcgtcaggcattggcggccttgctgttcttctag

SEQ ID NO: 433426 - DNA, 861 bp, Serratia marcescens; identical to SEQ ID NO: 5314

SEQ ID NO: 433427 - DNA, 558 bp, Serratia marcescens; identical to SEQ ID NO: 7707

SEQ ID NO: 433428 - DNA, 3006 bp, Serratia marcescens; identical to SEQ ID NO: 10984

SEQ ID NO: 433429 - DNA, 1056 bp, Serratia marcescens
gtgaatcaaaagaatccatacctacagctttctgacattgagtcagtagaaggtctttcgccggagttcatctcctggcttgaaagccagtcccctaaagaatcaccccagcagctgcttcttgatgaagccaccaaacccgtgcgcaaaacccgccgtcgtcgcggtacgcactcaacggcgtgtctctgcccggaacccagctggtaccgaccggacaatttcaaaaagctccctggccagcttggccatgcctacaaccgccttgttcgccgcgatcgcaaaaccggcgcgttaagtctgcggatgcggatcagccgccacccgtattttgtgcagctgcgcgagcaggccggccggaagcgggacttccgcccggagcgggagaatctgcttgatgccatcgtgccgcttatggtcagcacggttgaccgggcaactcatatagacactatcaacctcagaaaaatggcgtggcagctcagcgaaaaggacagtgaagggaacgtgatccggaaggtgacggttccgcgggtttgccggctgctgcagcacatgatggagtacgggttactggagctgcccgaaggcgtcacatgggacccgtttaaccgcaagtggttccccaagcatgtcgtgctgacggaacggctctggaagataattggcgttgatctcgataagctgtatgcggagcaggccgaacaggtggccgctgaagcggcaggctggataacccgcgatgagcatggtcaggcggaagaaatctctgtcaaagcggcgcgccggcgctggtatgagaatatgatgcacgccacactggttcgccggcgtgaagccgctcagaaggctaagcgcgagaagaagctgaaagcactggcagaaatgccctatgacgaccgggcttacgccatgtccgttcatctgatacggacgctgccgaaagacgaactgcacgcgctgtcgcctgatcagtttacccagcgagtacgcagccacctgtatcagctcgatctggggctggagagggaatccggtcctcctgattatcactga

SEQ ID NO: 433430 - DNA, 249 bp, Serratia marcescens
atgctgtgggaggaagtagtgaacagagttactgagcgccaggaacagaagagtaacccggagttccagagagagtaccggaaccgtatccgggaaacacacgaccagttaaacctttatctccccaaagatgcaaaaagaatgttgatagagatcacaaaagtgaaaaagctcactcaggctgaagttattgaatttcttgttaaaagctattatgacggattaaaatttgacgattcggaagagtga

SEQ ID NO: 433431 - DNA, 654 bp, Serratia marcescens
atgaaaggatattcgtatactgttgtcgataacaacatggctaaatcaaaaggtgttggctactatctgtcacgcctgtctgtagccataagtatagttattttaacaataagtcttccgttgactgtatattctggctttcttactttaggtggaagcctgacattggcgtggtttgttgctctacttgttttcgatgccatgctgatcacatatgttgtacgccaggtaaaaagtaagggagtcaaaaaggtcgttgcaggcatgagagtttatggatgctttaatccatcggctaaagaggaacaatacatgccggctcagaaaacatattttggtatagatatggactccggtgttgttgggattgctgccctttatgctgtacaggcctctattaagcaaaagagaattttgtttgaggccgagacaattgagtcttgggagtatactgatagtaaacttgtcgtgaatcttcggaaccgacatgtgcctactgttgaaataatcttgctcaatgccggcctagcatatcgccagctggaaatgttaactaggatgcatgagcaacataaaaaatacaggggtgaaaaatatctccagtggcgaaagactatgcttgatgaaggttggatgctaccacgaacgtattga

SEQ ID NO: 433432 - DNA, 2196 bp, Serratia marcescens
atgaataagtcaagaaactcattggtcgcattgttgccgctatcgcttttcattaccccggcatattctgcagatctgggaattgatagtattacagaggctgctaaacggtctggtgatttgtcacgtcagatgctgcataccgtttttggtgaagtggtaaataatcctttcagtccgtcaggtgatgggttgttaaataacgtatttttcacagtgaatgaggttatcgccatattagcgctgatttatatggcgataatcagtattaaaaaactacatcaggcagggcaacttgggaagtttatagagggtgatgggaataatgccttcaattttgttaaaacaacattcggctggctccttttggttccaactgttgttggatggtccgttgcacaactgctcttcctgtggtgtgggtcaatcataggtgtaggttctgccaatgttattgcagataaaacagcgtcggaactagcgagtggcaaagctgtttatataacgccagttatgccagaaatggcttctgtggctaaaggaatgttcgaaatgaacttgtgcgctcttggtgtcaatcaagggttagctcagatggaggcttcaggccaacattatgaaagtaatagccagatgaagtttaatactggtgattctagttactcaatttcagttgacaatggttctgctgtttgtgggactgttaaattaccacaaaaacctacaggttggacttcggtattctccagtggttacgctgattctgtttatgcagttcaacagcaggctacagactcgctttggagtaagatgaagaatacagcagagcaatttaactctgcttatatgtctaaaatgcgttccggagatgggcagctgcctgacgttgaaactgcaattcagacagcagcaagagattaccaacaacaagtacagcaagctgcagacaatgctgccggaagcaatgatatgctccagaaaatggagtcggatataaaggaaaaaggctggctatatcttggtatttattatcataccctggcaactgctaacactgagctgaaggacgttgctaatctgaaacctattgtatcagggataagtggtgatggtgatgtaggttctacggactattataaaggtctgttccaggcatatcattcacaactgaaaaacagtacctacactccccctttaggtactgctgataatgctttagctcagaacattgacaataaaggcatcgaagaagcggcaaaaagtggtgatgcagattcgttgattaccaaaattttcaactttaatgttacttcatggcttgccactagaaactacggcactggcgatggatacagcgatgtaacgaatcccttgttgaaaatgaaagccattggtgattacacgatgtttactgctgagagtggtctagctgcttggggagctgttaatgtcgcaatgagtgttgcagatggtaataacgctgctggaatgggggcgggattacttaatttcttcacttcaggtaaggatattattaagggtgtaattaaaactgcggctccgatcgtatacatgattttagtcgctctgttctgtatagggttaacgctttcaatttggcttccatttgtgccatttatctattggtttgtcgcaatggcggattggttagttactttgctgactggtatcgttgcatcttcattgtgggccgctacccatattaacattggccaaactaatgaggaccggtcaacgtatggatatattttcctgatagatgtgatgattcgaccactgttgatggtaatggggttcatttttgcatcattggccattgtggctcttggtaccgcgcttaactatattttcaaaacagcaatggaaaatgtacaggcagattcaacaactggcctttggtcaatgataggtatcctttttgtttatgcaaggatgtgtacaggtatggttgctagggtatttgcattacctgcaaggatgcctaactacgtcatcagctggattggtaacaagcataacgattcaattcttggtgatatgcagaatcatgttcacgacctgtttgctgcatttggtcgtggagctaaaaatacaggtggacgtccttctgggccgaagaacttcaacccaaccaatacggttgataaagacaaagatggtatagcgggggcgtga

SEQ ID NO: 433433 - DNA, 597 bp, Serratia marcescens
atgacagacgaaaataaaacaggggaagaagttacaaaatcccccggccgcatgaaaaaagcggtttatcatattaccggaattagtgatattcagtttatgtggaaatcactaagggaatctatcagcctgctcaatgagcgggcttctttcgttaagaagcaaatcaaaaatttggaagctccggacgaaaaatcagcttcgaatcagtcgtttgaggatgttgttaaaaagagttctatccccttagaacagcatctagctaaagccggtaagtataaaaaatattggttatgttgcttctttatagctgtttttgttgccctgtttttaatcgctggctgtgtaaaattgattgttaatactgaatacaatgtaagccttctgaaggtgacattaacacttggtttaatgtttgctgtttgtatctactcgttcgtaaaagcaatgacttatgaatttttaggttggcaattacggaatgaggcccattctgaagaagaattcggtacattgagacattttattaacgataacggtgtgcgcaatacatttaattttgaacaagctggccagattcggggggcgcatgaataa

SEQ ID NO: 433434 - DNA, 1209 bp, Serratia marcescens
atgataaaaatcggaaacgcaaaacggtcagtgatggccgtttcaattctggccttcagcgtacagtcagcatttgcctatacggtcaacgttaacagcagcattcccatctcaacgcaggttatgccggcgttgagcacagctaatggcctgttaggtaacatccaggccacgctgataaacattggtacggcgatcagccagcagggtgatcgccaggcagcattaatgcagcaggtggctgaaactaaccgacagttcgaagttgagcaaaagcgtaatgaccggctgctgcaggcacaggataagtaccgtgttccggatgatatctgtgcgcagtctattggcggtggcgccgcgggggtatcctctgcggccgctggcggtcagcgaacgctgggaagcgccagttctgcgaaagatgttaaggccatttttgaagtgccggcacgcgcaactgacgtggacgcatcttcaacggccgaagttcacagccagtactgcgacagttcggattatgctgcatttggcgggacttcattttgcccaagtgtatctgacatgccgcgggcagatacgtcgctgagctcgttgctttatggcgccggcaaagaaggcaaggcacctgatctgacgtttacagatgagcagacagatgcggcgctgcgctatatgaaaaataccgcgttgcgcagtgctggtcgtcagctgagtcgtggggaagttaaaggtgccagcgggcgaatttacctgggcatgattcagcaataccaggcgctcaccgacgcggccgcacaacctcagatggaaatgatcgccaactccaaaccgaacccggccactgatgccgcgcttgcagatgcgcgcaaagtgccggaagtcgaatcctatttccaggcgacggccagtaacagggcgaaacagcttaaccgtatgtctgccagagagtttgaggaattcgaagtaggtcgccgttacagcaaccctgcttaccaggcgacgttgaccaacaagaacaccgaagatttgatgcgtgagcaaatcaatatcgccaatcttaacaactggttagtgctgaaaaccaaacagcagctggagaaacaaaatgtgctgcttggccagatcctggcgaacgacgcatatcaaacatacaaaccgatgctggcagcacagctggagagtgtgaacgcgggagtatccagaaaatga

SEQ ID NO: 433435 - DNA, 3051 bp, Serratia marcescens
atgatttctttctttgaggatgtgatcgaaggtatctcacgcaaccttacgtcaaatgactcgttaaaatactgtgatttgacaacggttgtagggcttacgtcgcaggatcgcgttgagcatcctgaaatcagggctccgtacattctgaccacgaagaacaacgattttcttaccgttattgaggttcagggcgctaaatcatcgtttgacgagaagtcgtttaatgacttcattatgcacctttcaaactcgttgtcgaattcctttattaacagtggccataagctgtctgtggtgtttgagcgcgactttaccaagaaccaggaagagctgaataatgtttataaaccgcaggtagcagcaatagagcgcctgcagatagacattaaagacctgatcgccgatgacgcaaaaaaaatcgccgcccattacagtcgtgaacgcgcttacatcgtgctgtatacctcgaaggggatgattgcgaaggatgaacttaaaaacgaacaggcaaaagctgccggcgtactgaaggatatcccgcagactcgcttcagtcagaacccaatcgaatttcagcttgaaggtttgaagatcacgcatgacgcgatgctgtggcgcctgattggtatgcttcagggggatgatgagtcggggatggggcttctggttgatgtcctcgatgtcaaacacgctggcgcaatgatgcgtcagatgctgttccggaattcaacatcagaaaactggtaccctcgcacgccgtttgaccaaaatctgcgaatttatggcgccccccggaaagacaatatcgactccgtgctgccgccgcggctgaatatccagatcatggaaggggaactggaagaagatggtggcctgatttactgcgatggtaagtattacggctcggttgcccttgagttgccaccacttcaccctgtcaaatttaagcagttattcaacgcgattaaccggaaaatcccgtaccggataaaatatgactttatgggtgggggcaaaaaagctctgttctggccatcagtgatcatctctttccttcgtttcattccttcactcggtaatatcgcgcgtgatatggattatgtccgggcccagagcgaaaccgatccaacggctatcatggccatcaactttgccacctggggtgacactaaggatgaagccaaacgcaacctggcggctttaactaaggcgattgaaggctggggtgtatcaggtgtgtccaagacgtatggtaatccaggtagcgcactgattgcatccgttccggggctgacgacggccacacctggctcattgcattatccgccgttgagtgaaggcttgcggatgttaccttttgaacgtccggccagcccctggcatggtaaaggcaatatcaacttcatcacgctcgatggcaagctcttcccctatcaaatcgccagtcccctgcaggagaaatttaccgatgtcatcaccggtgttcctggttccggtaaaagcgtgctggctaaccgccttaacctgagttcgatttaccgggctgataaaaaactgccttatctgaccatcattgataagggctacagtgcaaaaggtatcgccgatctgattagcgctgagctgccggcagagaaacgtcaccagattgccagtatcaccctgaacaatgacgagtcgcactgtattaacatctgcgatacgcagttaggttcaaggtatctgacgcagtttgaggaagtattcttaaagcagatgcttaacgcattctgtattgatccggcaattggccagccgccggatgcaatgagcgttggccaaatcgtcagtaaggttgtatcaaacgtatacaaagcaaaagcgcattcaagtgctaacttgtttaagtataacgacccggtgattaatgaagctctgaaagaatcaggtctggataaagagctcggtgaagactggtttgaaagagctacatggtgggaagtcgttgataagctgtttgccaaaaaatatcttcatgctgcgacggttgctcagcgttatgctgtgccaaccattcacgattttattgctgaactacaaactgaatcatttaaaaaccaatacgctgacgtaaaagttaatgggagtgagcctgtagtaggcttcgttgcacgttgtttccaggctgctgcagctgagtatgccattttctctgggatcacagtttatgatttcagcccggagactcgcattgcgatcctggatatgcaaaacgtcctcggtgacagaacgacacctgcaggtaagctcaagtccggcattatgtatctttttgcgcgccagatggctgtgcgtaactactacctgcctcagtctgcagaaaccttcattcctgctttaccggagcagtacagggcatatcaccaggcgcgcatcagggagctttcagaagaggttaaacataccttttatgatgagtgtcataactttgccggcatcgactttattcaaaatgcgctgaataccgctgaccttgaagatcgtaaattcaacgttcgtactgcgttctcgtctcagtatctgagccatatgccttcgagcgtgcttaaaaccatgaacagcctgtttatgatgcgcctgacggaaggggatgaagagtatctgaagcaactagagatcaacatcccggccgatatcctgcgtcgtttcagacagcttccgcaaggggtttatccggacggaagtggtactgcatttctcggtatttttaaaactaaacgtggtctaatttgccacattctgaaaaatacattaggtccaaaactgctttgggcattgaactcttctgcaaaagacagggcgttaagggatgtgctttatgaagagctgggaacgaaacaggcaagggaagtattagcaaatagattccctatgggaagtgcatcaagtatcatagatgaaatggtggtcaatcagggtggtgagcgtgattcagaagaagaatcacaaactatggcgatgaagctcgctaaagaaatcatttctgatgtgagaaggggattcagatga

SEQ ID NO: 433436 - DNA, 495 bp, Serratia marcescens
atgaaagattttaagctcaccaggaatgaacaacctgccagatgccagttgtgcgggataaagagcaaagatgttttctccctcgcagaagatggacagaaagagagaatgctttgctctgtatgcctgtcactagaacacccggagaaaatgaagctagagactcaaaccggacttctgctgaagagaaatacaaaccgaaaactctacagcctgttgtttcgttcaattgcaaaggcggaaaagtcaacggacgattcttaccgtgaaaaggcgcagaaacttaaacagatattgctcagcacaactgacgtagttctaaacgaaaccggcagtgatgatggatacgatttactgcacctgataaaaaaacaccatcagttacttcccatgaattttgacgatgagtttgtcacttctgtcgcagagtcagacgaattgccggatgtaagtgactggaatgaaatttacaagggtaagagaggttttaaatga

SEQ ID NO: 433437 - DNA, 390 bp, Serratia marcescens
atgaaaattgttaaatttatcaaagacaaggcattatctgcatccatcgcagcgtatcagctgcgcggaacggtagcaaaatcgttagtggtattgcctctggcattactgagcaaagaggctgcagctgaaacgactgtctgggagaaaatcaataccttcacggaaggtcttgccagtacccagccaggtctgatcaccggcggtaaagtcattggtgtcgtgttctttattgtcggactggtctctctgttcctcaaaaacaaacgcgggaaagatatcagtggcagcttcatcttctggtcaatggttgtgggtgcctgtctggtcggcctgaccgcatggatctcttctgttggttcaactgttggcgttgacgcaaccctgtaa

SEQ ID NO: 433438 - DNA, 531 bp, Serratia marcescens
atggatttagaatcggtattaattcaggttgctaacggtggtcaggaaccgctgacaaggctaatcataggtgtcgctgcagtcgttgggatcatcggtgttattggatatctgatgagcctgcgaaagcaggccaggcattctacaaaaggtgttgaagttggcagaatttttgccggtatcatcttctgtgtatgcctcatcacgctgaaagcacagatgaactcaggcggtgccactttaggatttggcgatgtcagcttcggacccgtcagttatgcgagcgaatctacgtttggcatgggagctgcagcagtcaacgcagtgctggggattgttagaattctcggtgcatactttttttacaggggtattaaggggttgaaagactcttaccttgagggccatacggagctgtcagcttcgggtactagaggggcatccattgtgaaaattgtatgtggactacttctgatgttcgatacacaaacgctcgatgcgttgcagagcacattaaacattcactggtaa

SEQ ID NO: 433439 - DNA, 705 bp, Serratia marcescens
atgaatctgtttgaagatgacaataaaaacgaagcagctcctgcccaggaaccggtgtctgctaagcctgctgaaaagccaaaaccgacagtgacgccagcagcaaaagcgaacaaaaagccgctaaatatcagcgactatgcatggattggtggtatcgctgttatcggtattctgcttttagtctggttgtttgggggctccgatagtgacactgtgcctgcggccgggaatggcacgatccagtcttcagggcaacgtcagaacgtacaggctgcccctgccgggcaagattctggtgacttccgcgagcaaatttccgggattttgctgcagcaaaaggaacggctggacgcgatagaatcaacttctaaaaatggaatgatgatcctttccagtcagttacaaagcgctaatgaacaaatcaaaaacctgaacaatcaggttcaggaactgaaaatgaaagcagctggttatgggccttcatttgctaatcagagtggaacagtttccggcgaaacgtcacaggcattacctttgttgaggggtttttcaattaatgatttatctggcgatcttgcttgggtaaaatacaaaaaccagacgtatgctgtgaaggtcggtagtcaacttggcggagtcaccattacgggtatcgatactgaaaatagaatcgttacaacaagtaaaggtcttatccgctaa

SEQ ID NO: 433440 - DNA, 1350 bp, Serratia marcescens
atggctacagataaaggcaaagaaaccagaaaaatgatgctctacgtcggtggcgctgctgcagtggtggcgcttctgggagggtactggttgtttggctcatcagatgagccggcaacgggcgggtcgcaggtgaaggctcaggggctggaagggaaaacaggcagggaaaaagccaatgatcctcaatacaacaagctgttgaatgagtggaatgttgataattcagagaaagcggcgctcacgggggatagcttcatatccacgttgtcagccagtaatccggtggccgttgattacggcaccaaagcaccgccgccaaaatattcgtgggaatcgtcagcaaagccggcaggcgataacagtaaggcgaatgatgctgagcagaaagagcgtgagcgtcaggctaaagcggtggctacgttactgcagaaaatagaccaggccagaacaccagttgtcacgggcgttgctcttgcaacccctctgggtgcggagggaaatgacaagaagggcgggaccttctctgggtggaccgattcggtctatccgcagaacaaaaagccggatgctgaaaaacaacagggggcgaagaataaggtcaaagataagggagcccgacttgtatcggcttacacgctggtgccggcggtaatggatacggcgatggacagcgacgatcagaacagtattgctattgcccatgttcctacgggagcgcaggccggcgccaaattctattccggccaaaaccgtcttgccggcgatggtattcgaattcacttcaccggtatggaactgaacggggtgcagtgtaaggtcgatgcgtatggtgtggcttccgactcgttgcgcgcggccgtttcctcaaatgttaataaccgctggttcagccgtattattctgccggctgtcgctaacggattaggccgaactggtcagctgtatgcggacagcaattcgcagatgattatcactgacggcgggaacgcataccgctcaactggcacaccgaacgggaaggctgtagccggtactattattggcgggatgggtgaacaggcagggcgtgtcctggccgacgatgcagcccgcctgccggttaagcaggttacggttgaccgtaatcagctcataggcatccagtttgtcgcgccggtatatgaaagcgactgtggcgagaatatggaaaatgcttctgcagagcaggcgcagcagcaagcgactccgacactcaccagtgtgccgcctcagcagatgccacagccaccggctccaaattaccctcagcaaaactttcccagctaccctggctacgggtatggctccagtaacccgtattaccgttaa

SEQ ID NO: 433441 - DNA, 1152 bp, Serratia marcescens
atgaagattaaactgttaactgtacttatggccgcactgttttcggcaaattctgtatctgcagctgatgcaccgactggtaatggatcgccgcagcaaacggcgccagctgtgcctggtggtgatattgctcaatggcagcaggccagttccggattgcccgtaaaccagcaggcacaggtgcaacagccaccacagcaaacagcacaggaacagggtcagcagcaggcgcaaggccaacaaccacaggcacagccccagcagcggccaacgactgcactgcctcctgcgcccatgccgcagattcctccaccacagcagcaggttactcatgttaatccgcagacactggaagagttacctgcacctgttctgcagcagatccagcctattacccctggtcaggtgcggtctgcccgcagcgcaatggaagatatgagcgcggcggccaaaacctcaccattaacgccgatcccacgaatttcaagccagacggtatcactgtcagctggcgcatccattccgcaggtacgggtatttccaaaccaggcaaccacagtgacgttttcagatgcgaccggacacccctgggtattaggtgcccctccatataattcgagtccctgtgcatctggtggtgagctgtgtgttggctatattccaggatcggcggtattcacaatccagccgaccaatgcctatgccagcgggaacatcacagtgcttctgaagggactggccacgccggtcataattaacgtgaagggggcagaaccctccgttaaatcaaaaaccgttgatgttgattatcgtttggatctccgtatcccgaaacgcagtcctgacacaccggtttataccgctacgcctgagaaaaaaatctcactctatgacaagcaactccagagcgtactcgacggcatcccgcctgaagatgctcagcggttgaaactgaaaaacgcgccagggagtaccaaagtctggcagatcggtgacgagctctacgtcagaagtaacatgcagttgcaggatgagtttgaaaaaacgctttccgctatcgatggcactcatgtgtacgtgctgccggcaacgccagtgctgactttttcggtgaatggtcaggcgcgtgacgttgaagttgagctgaattaa

SEQ ID NO: 433442 - DNA, 714 bp, Serratia marcescens
atgaaaacacaaaatggtgaaaatattatggatcaaactgactcggatcaaaactcagtcgttgatgatgacagcaacgcccttgctccagctctggctgaagagagtaaccgaacggtacaagaaatcgtatcgaaacatggtctaaaagtaattttgattcagacgctaatcatattagtcgcaatcattatcatcggtcttcaggggtactggctacaccagaaaaaaactaaatatattgcaacgaatgggggcatgatcacagaagtacacccaaccgatgaaccggcttacacagcggaagaggtgatggactttgccaaccgtacaatgatcaaatcgctttcactgaactttgtgaattacgaaaaccaattaaccagcgtccgtggcgattttagcgctgaggggtacgttagtttccgtaaagcgctgaccgatagtggactgctgaaagatatcagtgaaaaacgtctgaacgtaaaactttccacaacaccaggaaccctgatcacggaaggtcttatccgtggcaccaaaacctatgcctggcaataccgcattccggtgactgttcagcttgttggtcaggctcaggactacagaccacaaccttacgatttgatggttcaggtacgccgcgtcaaagaagacgaagatccacggggtattcaagtagcgcaggccattctcaaaccccggaactactga

SEQ ID NO: 433443 - DNA, 639 bp, Serratia marcescens
atgcattcccgttccatttgtaactaccggaagagtcctttcgggattttatcgaatagcttgccggttcgtatttcaacgcggcggtgttccgccgcggttagtaaacgcataaattctgtggcaggtagaacatcacgttttgagtctacatacgtatcaagcgaatcttcattcatgaaacgtctgacagtatgcagccagtcttcagctgatttcatattttttgagctcatcgtcgctcatctcggcaaacgctgcaggtcggcgaccttttcctgtccaggttatggactttccatcaacttcgatccggtacttcacttttccaaaagtggatttacttttcgtggacggaccaaagagattttcgaagatctggagagcttcatcagccgtaatattgtgttcttccatgaaccgctttgtggctgcggctttctcttcagtggccttctgttcttccttaaatttctcgatcattccctgtgcaatgtcggaccacatattaatgagttgttcaaggttttctggcgggattttgcgcaaaacggcggtggcttttcgtcgttcgcacatgataactgcacaggattcgtaatcattatgttcgctcatgtatacctcattgttcattaa

SEQ ID NO: 433444 - DNA, 537 bp, Serratia marcescens
atgatgaaaggagagaacagactcatgcaccagtcgcaaagtcagcgcctcggccataaaacaaaaaccctactcgtagcagtagggttttcctgcatttctgtgagctcatttgcagccacacagacctgtgcagcatacgaactggcaaaagctggtgctgatgctgcctataaacaggaagttgaacggattaacaacgccgctaaaagtgaatccagtacatctgattctctcggacagtgcctggggtcgctatcggtatcactaaaaatccctcagtttccgtctatcagcgacatcattgataaggtgaaggatgaggtatgcaatacggttaaatcgaagattaatgagaagtgggggagcctgactaatacgacgctggacccgtggtcaacgatttcatcccgactgccagatacgtcaggtatcctgcccaacgcatcttctaagaatgtgcaattaaacaatccggcagctgcgagtggaagtggtgaggatgcaaacagtgatgcattcccgttccatttgtaa

SEQ ID NO: 433445 - DNA, 3213 bp, Serratia marcescens
atggcgaaacctgaaattgcaactgaaagaacccgtctgagtattccctttgacgatcgccaacgtgcaatacgtgcggccggcaaactggctgatggcagtaatgctctggactacgtgaaggaagaaaaggtgtggtatgcacagccgggggccaacctgagccggctgaaagagtggatttttgaccccaataaggtgatcgaagaaccgcccctggatattcaagccattgaagatgaatttacggcgtggcttgaagagcgcggtgccattatcaaagaccctatagagttcgatggccagaagcattatgtcgatacagtggacggtaaagctggttcaagaaagggggtgtatgccgcctttctggatggccgacctgcagggtggtacagggactataagaacggtggtgaaattcagaaatgggtatctacaggcgcagcccctaaccctgaacaaatggccatgctccgtgctgatgctgcggcaaggcgtgaacaaagagctgcagcgcaagcggataagtttgatcagaccgctaaccggttgatggaagaatataaccggcttccggatgccacgggagatctggcatacctgaaaaacaaacaggtcattgccgctaacggccttaaagctgatgagcggggcaacgttgtgatccccctgtttaatgctgatggtgagttcaggacccttgagcgcatctggtccgacggtagtaaacaccttgaaaaagacggccaggcatgggggagttttttcgttgtgggtggccaactgaaggatggtgacaacctgctttatgccgagggatatgcgacagcagccagtatcagcgaagccatcaatcagcctgtgatcatgacggttaatgccggcaacatggtggaagttgctggccgcctgaaagacgcctttccaaacagcactcattacttccttgctgacaatgacatttataaagacgagaacgttgggctagaaaaagcgacagaagctgcagagctgactgccggccatgttctggtccctgcctttagcaacccgaaagaagggcttactgactacaacgatttgcatgtctctgaagggctggagcaagtcagattgcaggtagaaggagccattaatcaaataaacagggtagacactatgccgactgataacccgaacattactgacgttaatcacagctcgactgacagcgctgccgttgcagctcctgaaaaaaccgcgccggtggccagcgcccccgcagctgccgaaccggaggaaaccgcgccggtggccagcgcccccgcagctgccgaaccggagcaaaccgcgccggtggtcagcgcccccgcagctgccgaaccggaggaaaccgagccggtggccagcgcccctgcagctgctgaaccggaggaagtcgcgccggtggccagtgcccctgcagctgctgaaccggaatacgccgcaccaacagatcgagacggcgatgatgaagagagtaatagcgccagtgatcttgaggcgtatgccgctatgatggcctttggcggtgaaacaactgactccgctcagcaaaagcctgaagagatagcgcccagcgaacctgtagctaataccgccccggctgaaaatgaaaccgaggagaagaaaaaagcaaacgaagaactggaaaacggcatacgctgggcaaccaacgataatgcagaaacgcccccaaaagaacgtatagacctggaagggttaattgcccggtttgggtacagagcagagaaagactatacggcgtatacgcttgatggacaggatgcgttttacgattacggctcacatctgcgtatggctacccctgaagccagccagagtgacgagatgatcctggcggccgttcttaccgcggataagcaacatcatcgtggtattgaaatcaccggcagtgacgaatttaaagagcgagtgtttaaccttatcagtgaatacaacattgaggtgaaactgactaacccagaacaaagggttaaattgctcgaactcaaaaaagcaaatgaaacagcaaaagaaacggcaaaagaaaatgttgctgattcaaatgcgaataagcaggaaggggcaaacgaaaaggcaaatacatcagttcagcagaatggaatgcgctgggaagaatcggcctctgtacagccgaagaagcagaatgcatctgatactcaaaaggaggataaagctgcgggtgaatcctgggagaaaggcgttatcgtcgcgcatggacgtgctaagtatgagtggaaagatgatgaatccatgaactactttgtcaccctcaaaaatgaacatggagagaagacactctgggggaaagaccttgagagagcggttaaagatgctggtgtagacaccgaacgtcttgttacagtcagaaagctgggatttgtggatgttgaggtgaatgcacctgtccgtgatgaaagcaacaagatcgttcgttatgaaactatccagaccaaacgtaatgagtgggaagtaaaacctgtatacccacagccaacagcagggaatgaacaggcctataagccttctgaactggttccgtatgatgctgcaaccttccagaagctccgcacaacaattcagcagattaccggtgttgatctcagccgtgaggccgtgcctgaaaaagaactatattggttcctgccgaatggtaagccagctcctgaaagcatgacaaaacccacaggctataaactccctcaagagtcaaaaaccgcgggtacacctttgctgatcgcaccgcataaaaaaggcgaacgcccggattattaccttgttgagtctcgtaaaggattcatgcaggggatcgcaaaggataaggaatctggcgagtaccatagcgtaattggtaaagtgaacaagcgtattgataaagatggaaactggaaaacgtatatgacactttcagcaatcaataaaaattctgaaagtggaattgttttgcacggatacggccatgttgatcagggaggtaaaaacctgctttacaaaaacacaattgcaaatgaaaaacagcctcagcatttacaaccggcctcagatgaggtaaaaaacaaaacagtaatgaagcagctttttcatccttctaatgctgcaaaaagaaaagatgatgaaaggagagaacagactcatgcaccagtcgcaaagtcagcgcctcggccataa

SEQ ID NO: 433446 - DNA, 261 bp, Serratia marcescens
atggacattaacaaatggcgttatgcaggccggccactgacggtttttggtgtgcctgttatctcgtttcttgtgtacttcatctggtttccgttcccgtcagtaaaaacctttgttatctgcacctgtgtggttctcttttactttctgctggccatgatgggctacacgttaccggtgctgtaccaggtcattctccgggttatccgcgggaaaaaacttaccgggcggccgtggtggtaccggcgctctcagcgataa

SEQ ID NO: 433447 - DNA, 1164 bp, Serratia marcescens
atggaagcattcaattttgggccaacgctgacgccacagacgctggaacgttttctcgtacactgctcaaacaatgaagtgtccgatattctgttgcagggcggagataaaatctgggtagaacgtcatgggcgccagttgcccatgacatcttacccgctcgacaacctggagctggaacgtaccgttgataaggtgttcggtcaggagatcaaagggacgctgaaaagtgctgcggtcgttaataccgctatccagctaagaggtgatgaagcgggcacgattggactcggccgcggcgaaacccgccggttccgcgcgaactttactcaggccgatatttataaaacagaagcggcaatgtctctgacactccgtgttctgaatgaggttattcctcagcttaaacaaatgggtattgagccggacctgtttaattctctgttgccggctgccggcctcggactgatatgcggcgagacgggatcgggcaagtcaaccctgatggccagcatcttccagtattgcggtgaaacgtaccaggaccggaaaatcatcacggttgaagatcccatcgagtatcgcctgggaagtcgagactggattgcgccggcgccggcacagtcacagattgggcgcgatattgattccttccacaattttatcactctctccgggctccgtcgttctccgaagattatgggggttggtgagctccttaaccgcctgtcatttgaagctgctgtactggcaggtaaatccggccacttttgtcttggcacactgcacgtcaaaacggtcggagaagccatttcccgatcattgcagaactatccgccggaaatgcgtgaagctgccgcctttgacctgctgagcatcctttcttacatcatcgtgcaacgcttgcttaaaacaaaagacggccggcgcaaggctgtccgtgaatatctcgtcattgataacagcctgcgccgcaaactctatgacgttgattacagcaagtggggccgctacatcgacgacctgttgatcgctgaaaaccgcagtctgattcagaacgcctgggtaatgcaccaggaaggtttgatcgacgaagcggaagtcatcgaggtcgcaggatatatggactatctggcgttaaaagagggcaagtatggacattaa

SEQ ID NO: 433448 - DNA, 780 bp, Serratia marcescens
atgaaacttaaactgatcgtgcttctgacgttaccgctgcttgctgcgaacgttgcacgcgcggacgactccgatgttaaaggtctggattactacatggacccgccaagccaaagtgacgatgaggccgatgttactggcagtatgctaaacgacgcagcgcataccattggatttcgcggcggtaaggcagaacgcgctaaagaaattcgcgccgcgctggaaaatcagcgcagcaatcttgattacatgtattcgttccagccgttgatctcttctgaaggctacctgccaccggtcattgctgaagctaaagacgttgcacacattaccaatgagcaaatccgaacggccaaccgtgcctacgacattgttgtgccggcacgctttgtcagtaaccctccgacctggaaaagctatcttctgaccggactgatggcgcagcggatcgaattgccagagccggcggcgatgccgaaagacggcaaacaacgtgatatctggaaaaaggctgtcgcgctgggctggtctgacggccgccaaaaagctgatgagatattcactgctaatttcaatcgcctcacacgggattacaccggcatgttgcgctacagcacgctactgcagcagggcatgattaaggctccagttatcacacagcagcagcaaacagttacaggggataaaaaccgtctcatgctgggtgataaaacgaaacgtatgaagcagcaagctgagtttgacatcaacaaacgcagctggaaaccgaccatacgttga

SEQ ID NO: 433449 - DNA, 501 bp, Serratia marcescens
atgaaaatcaaaatgcaaacggtcctcgcggccgtttctgtgttagctcttgccgggtgtgcctctcaaagcgaaaaggaaaaacaaatctctgcacagcagctggtagatcaggaattgcgtgagcaagccattaagataaaactcgcacaggatgagctttaccaggctggagccattaacaggacccgttacaaattccctaccattatcaatgcaaacagtcagtatgttcgcgtgagctggcagggtgatgcttacgaattactggagcaactggctaaacagcgtggccttcaattcaccagtcaggggatcaagttaccgcttccactcaatatcgatgttggtggttcgaaagttacgtttgaacagttgctgaccctgatccgacaacaaacgcagtaccgtgccaccatcaaccagaaacccggtgaactgcagctgctttacctcacaccatcgaagaaaggttcattcctcagagggacccgcccatga

SEQ ID NO: 433450 - DNA, 1980 bp, Serratia marcescens
atggtgatacctaaaatcattgagggccgaagggataaaaagtccagctttggtcagctgattaagtacatggcagacaagccgtctcaggagttgactgatactgttcagcctactcctgagacggctttagctgttaaatcggatatgttcgaagggttaaacaattatctgacccgtaagcagaaagtgatcagcacaccagttgatgttgagccaggtgtacagcgtgttgtggttggtgatgttacctgccagtacaataccttctcgctcgatggtgcagcacaggaaatgaattcagtttctcagcaaagcacacgctgtaaagatccagttatgcactatgttctctcatggcctgactatgagaagccgaatgatgatcaggttttcgattcggtgaagtttacactggcatcgatgggcatgtccgatcaccagtatgttgctgctatccaccgggatacagataacctgcatgtgcatgttgctgttaaccgcatcaatccccagacctataaagcagcctcatcgagctttaccaaagacactcttcatcaggcgtgccgcttactggaattgaagaatggttggtcccattcaaacggtgcatatgtggttaatgaccgtcaacagattgtccggaaccctcacagcaagaaagagcggggcaactggcgttcactcgatcgcatcaacaagatggaaaataaagagggtgttgaaacgctctatcgctatatcgttggtgatgaacaggtaggcggtagtcgtcaaaacctgatccatgtttcagctgggcttcgtgaagccaaaagctgggatgatgtgcataagacatttgctgatatcggtcttcgtgtcgaaaaagcacaggggaaaaagggctacgtcattacccacgaacatcaaaaccagaagacggctgttaaggcgagtctggtatttaacaaggcgcaatataccctgaagtcgatggaagagcgctttggtgaataccagccttcacatattgaaccggccaaagtatcggtatttaaaactgcatatacccctggcgcttatcgacgggatgccaataaacgtctgcagcgtaaaattgagcgcgcagaagaaagaatgctgctcaagggtcgctatcgcgcctaccggaacaatttaccgatatattctccggataaggatcgcatcgccgatgaataccggaaaattgcccaacatacccggttggtgaaaaataacgtccggcattctgtttcagatcctcataccagaaagctgatgtacaacctggctgagttcaaacgcctgcaggcggttgccaatctgcgtcttagcttgcgtgaagaacgcaacggtttcagggcggctaacccacggctttcttaccgggagtgggtcgaacaggaagcactgaagggtgataaggcagcgctcagccaaatgaggggctttgcctattcctccaggaagaaggagaagtataaacagcagctggttgagcagatcgggttcaaccgtacctttaacgccatcaccagtcatgatcgtgatgatgtggccgtaatggcctcagcacgtcatggcgtcaaaccacggcttttgaaagacggtactgttatctttgagcgcgacggtaaaccggtagcggctgatcgtggtcatattgtgctgacagaaagtaatggaatcgacaaagagaaaacggctgatcttgcaattgcattaacgattgctggtaaagccaaatctgtacgtgttgatggtgacggtgagtttaaggaactgtgctgtaatcgtatcgtcgatgcagctgtgaaccacaatcaccctgtcgcgcagggcattaccttcactgatgccgctcagcaggcgtatgctcaaaacgagaaacatcgtttgattcgtgagcaaaataatagtaaaaatgaaatgcaattcagaagtgaaagcgacgacaaattcaatccgaagtaa

SEQ ID NO: 433451 - DNA, 564 bp, Serratia marcescens
atgccgaaccggataaaatcgacccaggctattcgggtgattttacatgatgcccggcacgattcaattgctctgcctgccaggcccttcgatgctggctttcaaacctcgccgatggtagaattcaatgaggtatttaagtacgggacaagatgtgtttttggagtaccgccgacacgcggcggccgtccaaaaacgtcttggtcagggcaagccccgacaccccctaacgaggttagctatctgatgagccgtagcgagagcagaaaaacagacgatcgaattcaggtgagatgttccacagaagtgaaagctaaactcaccgaaaaggcccatgaagcagggcttagtcttagtcaatatcttatcaaatctgggcttggaaagcgcattcaatcgaaagggaattacaatgcacttgccgctcttgtaaaaataacagcccttcaaaaacatttgtttaacgaaggtgccggggttcatagcaaggagtattcggagattctgatcgaggtcaaaaaggccgcacagaaactgcaacaggagatggatggtgatacctaa

SEQ ID NO: 433452 - DNA, 366 bp, Serratia marcescens
atgcctgcaaaaaagaaagcattttatagcagtgaggacatcggaaaattcaaaagcattctcgaagacttgcctgatgtgacgtcagaaaggcttgagaaaaagcacgtactcgatgagcttaaatctgacattaagaagctgaaagattcgaaagggtatgaagataaagagatactgaaattcctcaatgatgcgggtttttcagatgtaacgttacgcgatatcaaggacattactgccggaagagttggaaaaaaacgaaccagcaataaccgaaataaaatcactggtgttgacgaaacccagcgcacacaaaatggatctaccggtcagaatcctgacgcttcaggtccgcagcattaa

SEQ ID NO: 433453 - DNA, 537 bp, Serratia marcescens
atggcgaccttatacccttatgaggtttatacccttattgtgtcagaattaatcgtgagccattttaatgatgtcgctatggtatatccgggaagcgaagaaattaaaaagaactacgacagtgaattaagtgctgtacaggtagttaatggcatcagagaaaaactgattgaagatggtgttatacagtgcgaacagtgcccactgctatccgagtgggatgagaacaaggttatcaaccagctaattaaagattaccgcctgattctcaatcgtgactatgaactaaaccgtgttcgtcagcagctggccccggagctgatcgcacagatagaaaactggaaagagcagaagtattccgattctgcgaaggaatacgaggtgctctatgaaaccatcaacatcaacggaaaggaggttacaggcaaactaaacgtagttgcagtaagtcgctttgatgctgttttcatcgtagggcagcgtcacgctaacgataactttttggttctggatgtgaaggaggtgatgaatcattga

SEQ ID NO: 433454 - DNA, 312 bp, Serratia marcescens
atgaatatcagtgaacaatatcgggtggcggtcgtcagtaccggccatgtaaaaaaagaagacgcggagctactggacaaggtctgtaatgatgacttgtccggtcaaggtttgttctggatcgagaaaaatcgctatgggtggatattgcgtatttctgctactgaacaatggcgagtggaattaaccagggcggggatcagtgcaagtgctttggataatatagccgcgctaaatggtgccgggttcgactggatttggtttgaccgggatgcagaacaggtgccagaactgaccgtttgggagtggtaa

SEQ ID NO: 433455 - DNA, 435 bp, Serratia marcescens
atgtggaaacgtggcgaaaacaaagtgattctgatggggcgtgctggcaaagatgcagaagtgcgttacaccccaaacggaacggccattgcgagcctgacgctggctacagaaatcagctacagcgacaacgaagggaaggagcaaaaagaaacggaatggcatgatattgtcatttttggaaagaaagccgaagcagctgggaagtacttcaaaaagggtatgatgctgtattttgtcgggcgcattcgtaataacaaatggcaagggacagacggcaaaatgcgcagcaataaggaaattgttatcgataataacggcgaaatgcagatgctgccgggagctgggccacgtaacaccagtgcagaaggccagggaggcattgaaaatcatgatgaaccgccgttcccggatatgaatgattacccgcagtga

SEQ ID NO: 433456 - DNA, 222 bp, Serratia marcescens; identical to SEQ ID NO: 21631

SEQ ID NO: 433457 - DNA, 285 bp, Serratia marcescens
atgttaacactaactgatattcgcgccagcaatacggtgctggttacggaatttggcggcgtgcgtgctgtgcatttctgcctgcacgaaaaactaagcggtagcgacaacgatctgtggtttccgcttgccaatggggccgacctgttcgaggcgctggaaagcattatgtgcatcaattttgccgctgctaacgttgtctcgctggagttcctgcggcagaacgggaagtgcaaagactaccggatcacctacaacaaggccaaattcaagccaatatgttag

SEQ ID NO: 433458 - DNA, 441 bp, Serratia marcescens
atgtctactgaactgaatcaacccgccatcactgcacgcattatccccaataaccgccgcatggccttcctgccacgcctgttcggcgcctggtatctcacaggtgaggccggtgtctacaaccacgcacgcactctctgcgccgattatcaaggcggttcctgggagttcgtcgaactgtcttgcggtagcggcttcatgtacccactgagcgcagagcgcttcacggtatcggttagcggcaactggttcgaaggggaactgtccgcagaagctaccggtatcgtgctgaccctgttcaccctgaaccgcatgatctggcacgcacatgaagaaggctatcagcacatctgcgacatgctgatcacccagcaggaaaagctcaaattatatgccgaccagcacgccgaagccggtttgatttaccgcgcgattgactga

SEQ ID NO: 433459 - DNA, 306 bp, Serratia marcescens
atgtcccagaatgaagcctattatgaaacgctggccctgattgaaaagggggaatggtgtttcggcagtatgaacgaagagaacgaagagcgggcaatcaaggccgctaagacgctggcgctgtttgcgcgcctgaatgagcagggcagcgacggacacccggtttccgaaatcatcgttgattttatcgctaacctgatgcacctgggggaagcgataaactttcgtgtgctcgatgaggaaaacacggtgatcccgttagccaggatcgcagccgtacactttaacgctgaaacaaagtcttag

SEQ ID NO: 433460 - DNA, 411 bp, Serratia marcescens
atgcacggtaacgtaaatgaaatttgcgcaaggcttctcgatagttttgaaccacagcagcggatcagccttctgatctggactgctgaagatgtccatgactgcaccagtgatatgagcctcactgatgatgaggccgaagccgttctggcagaaatcgcggaatgcagtacacacagccgttatggcgtcgggaaagataccgtctggagcctggcgaagcaggtgcgcgaagatgccgcccgcgatcgaaagattgaggttaatgcagaagcactgcaaaaagtcgtggcactggcggcgcagtttgtccggctggaagagatccagtctggcgaaggagctgcacgccgactttatccgcaggagtctgaggcgctggactgtatcactcaggcgattaacggctaa

SEQ ID NO: 433461 - DNA, 231 bp, Serratia marcescens
atggcggaaacagtttatcaggcgcggaggcgtttctacctgctccgttttcggcgcagccgtaacccggacacactggaaaaaatgtatgaatccatgcgggatcgtggacaggtgccgccggaggacaccgaggcttttgaggctgccgccgaccaccgccgcgcagagctggcatcggggcgcatctgggataagatcccgccgcatgtctggcagtatgtaaaataa

SEQ ID NO: 433462 - DNA, 339 bp, Serratia marcescens
atggctattcaatcccttcagttccgtaacggctccgtttctcttggtgatgtttttgtttccagctggggttatgagcagacaaatacctgtttttatcaggtgatcgccctgcgtggtaagaaaaccgccgtactgcgccgcatcgctgcgcagcaggtgaaagcagacagtgcgatgtctggcgagttaaagccggtattgaacgactttaaaggcgaacccgtgacccgacgcatccgtgaaaaccatgagcatccgtctgtcagcattgacgagtacgaacaggcttataagaccgatcctaacgaaagccatttttacagcacctggggctga

SEQ ID NO: 433463 - DNA, 861 bp, Serratia marcescens
atgtcatctaaaaatactctcccgtcggtcgatctgatgtcctgccagcatggcggtgaagtgatcccatccattgctattgagcgcatcatctcgttgcgggatgaaggtatccgcgtctatctcgacggcatagacaagctgcgaaaagcgcgcgatctgatgcagcaggccggaggctgtcagtacctgtatgactacgacaaagccgtagagagtgccatcaaatggagcgacaccacgccagatcaggccgaaacggctatttcccgcgttatcgacggaaaaatctgggatcggctgatgacggaaaccggtatgtatacgctgatgagcaacaagcagcgtcaggaatgggatcggcaggtggcaggcaaagaaatgccgccgataacgctggataacgttatgagtacgttccggcacctgaacgcaagcaaggctgataccttcacgcaagggctgattgatatctttaaatccctgtcgtgggattataaaaccaataacccctgcatgtttggcaagcgtatcatcatcgcgccgttgctcgatgtctggcgcagtggctgggtgcgcttcagctcagacgggcacaccaaaattgacgatctggcgcggccgttctacgtgctggacgggcgtaacgtgcctgattaccgtgtttctgacggtgccagactggatgcctttttcagtgaaaaccagttcaacggtaaggtgttcgagtgtgaatacttcagcgtgcgatattacaaaaagggcagcgcacacattacgtttaaacgcccggatctggttgagaagatcaataatctggttgccagtcactatcctgggatgttaccccctcgcgtgtaa

SEQ ID NO: 433464 - DNA, 180 bp, Serratia marcescens
atgagtaaagcactgaccccctcccagcttaaagctgaactggacacgcagaaagatgcgctgctgaaggcgtgcctgtatgccctcaacgaaatccctaaccgccgtttaagtggtccgtatcagtccacgtatgcgctggctgcaaaactcgatcaactgcttcagagctgcaaataa

SEQ ID NO: 433465 - DNA, 1284 bp, Serratia marcescens
atggatactgataactattttttcagagtaccggcgacacgcggaatacagggcggcattgaacaatacatgctgacggttcctatggtcgtgttacgtcgtattcttgcaatggacaatgatggcgatgttatggatcgcagccagcgagaagcgaacaaaacgcgggccaaaaaaatacggaattatgttgccggcgcaacatcaaaacgagccccctatattttgccgtcaattaccggaaatattgatagtcatgttgaattccttcccagcgaactctcgccggcagtgggaattcttaaaattccgatggacgctgatttaaaattattcgatggccagcaccgtgcgctgggtatttttgaatttgtacgcgattattccaatacggaagatacgatcagcttgttgcttaccgttggcctgccacttgagttacgccagcagtttttcgctgatattaataacaacgcgagcaaaccggccgcggcgatcagtatggcatataacaacaatgatccggtcaaccagctggcaatgcatctggcccgaaccgtaaccgggctggcgggcacagtggattttgaacacaacgtggtcccggcgaaaagctcacggctgatcagctttaaggcgctgaacgatgcgaccaaaaaaatgctcaacctgcgggccaacagcattccctcgacgcaacagcgtgatatggcagaaaggctctggacagcctgggcgcaggcgatgcgctggaatgacattgcccaggatgatatcgctgcggagtaccgtcaggaggcgcttggcctgcatggcatcatgattaatgcgatcggtatggcaacggcaaggatgttacggcacagaacaccagaaagcatcgagaacctgctggcctgtgctgaaaacggtgacaacggttttcattatcgggagtcgtttgtacctgagtgctgggaagggaagtgtgttgatccggagactggcaccattaaaaccgacaggcgggcgctcgaagcaacggctgaagcgttgcaaaagctgatagatccgttcgcagatgcgctgtggttgcgtgcttatctgccagctgaagaggcgagtgatacggcattactgaaatatgcagctgacatcgagagttataagcagcgcacagccgtgccgatgatcaatatcgtggagaagctgaaggcgctgggtgacggcgaaccacagttcagagcgtcggtgctggcttcccgtgaggggctaagccgctatctggccggggctgaaggctga

SEQ ID NO: 433466 - DNA, 267 bp, Serratia marcescens; identical to SEQ ID NO: 220068

SEQ ID NO: 433467 - DNA, 510 bp, Serratia marcescens
atgtcctattatatatttgtggccgggcaaggtgctcaggtcccctaccgagggaaatatatgaaattttcagcagaagaactcaacattatccgccaggcggacgccattattgccggtaaaattaccaccacggattttatcaccggtgccgacgccgcgcgttccttgctgcggtttcgtcttgctgcagaaccacgcgaatcattctgcgcgttctttctgaactgccataacggcgtgattgcgtttgaagaactgtttaagggcactatcagcagtgtcaccgttcatccccgtatcatcctgcaacgcgccctgcatcataatgccgccgccgtggtactggcgcataaccatccctccgcttccactgaacctagtcaggctgacaagctgatcacagaccgtctggtgcaggtgctggggatggttgatgttagtgtcctcgatcacctgatagtgggcggcagtgatatttactcttttgctgaacatggtctgatttga

SEQ ID NO: 433468 - DNA, 363 bp, Serratia marcescens
atgaccatgcaatcagaacttgtttttactggtcctatgctcaacgtcgttattgctgaagttaagcgttttaattgcccgcttctttttgtcaaagatcatggcgtgtatgtgatggcggcgaaaggtgagaaaaacagtaatgggatgcacaatgtctgttacgccaacggtttcaatccggatacaacggattttgacgagctctgggaccggatgcgtgatgcctgtggtggagatgatttttgcgaatcactggacctcgatccgaggtcgattgaacttctcagccgtaccaaacccatcctgaaaattatgctttcagagacagaactggaagttattgcagggggacaggaataa

SEQ ID NO: 433469 - DNA, 264 bp, Serratia marcescens
atgactgctctcaattctcagcaacaggctgatgttgcccgctatatccgggaacatggcaataaaaccgttatttcccctgaatggtcacttatttatttctcgctgtgtcagtgtgaattacatcaatcgcatgaagccattatttttcataatggccgaccagcagggctatttcttctgaatgaaacaggcgagctcaccgaattatatctgctggggtcgctttctgacattctcaccgccgctgcggtcagcaaataa

SEQ ID NO: 433470 - DNA, 411 bp, Serratia marcescens
atgatcaccacacgccgaatgttaatgctgtatgcctgccttgtgcccgtagccctgacagggtgtgatctggctgattatttcccgaatgtgccacaacccgtgcccgtgattttgcccggctatcaggttgatatcgatggccatccggtccggatatcaggatttgatgactgtccgcgggataaagatgaagcccggcacgcagctgcacaagatgagaaaggctgcattgtgctgtctgcagagcgttccgaggtgaaggtcagactgtatcagccagccggcgccgtcaccgaaacctggcggatcatccgggaaaaagacgctcaccagagcgatattattcgcctgcagcgcccgaacggtgcgcttgtgatgcaaaatttacaggggaaggagtctccttaa

SEQ ID NO: 433471 - DNA, 480 bp, Serratia marcescens
atgattaagatggttagcgtcgttccgcagccggaaacagtgaagacgctccgggaaaaaatgggcatgactgaaaccgcattaggggctgtcatggggtacgaactgcgcgcctggcagcgtaaggaagctatcagcgacgatctcagccagtacaacaagaccagtcttcgcccaggcgaatataacatgctgatgctgatcgccggcgtgcatcctgattaccgcctgaacagggcattcagtccggatgatatggtcaaagatcccgccacggccgaagacgttcgccgcctgcgtctggcgctggggctgaagcacgctgaaattgcagcgctgtttggctataaaccggcgtcatggcagaccaaagaaaaggctgctcagcgcggcgtaaagctcaagaccggggaattcaatttcctgttacttctggccggtgagcatccttcactgcagctggttgagaaggtgaaataa

SEQ ID NO: 433472 - DNA, 246 bp, Serratia marcescens
atgaaacaggtctattacaacgaaggctggagcggtccgaacaagtatacgtttgaagtttatcagctggagaacgggagttaccgggcgctggcccgcaaatggaatggcaaaatcaacaaggtgcagcaggaaacgcagtacctgtctgacacgcgggaggggctgaagcaccaggactatccccgcacgcgccaggtgaaaatttttctgaattcagacttctgggagaagggtaatgattaa

SEQ ID NO: 433473 - DNA, 564 bp, Serratia marcescens
gtgaaaaaatatttactgttaacactgaccctcatcgccggcgccgtgacagcaaacccggtaacagcggccggcaatattgccggcaatgttcaggtgcaagctgcgactgaagtgaaaaccgggttttcacccggcgggaccgcattaaatctggttctggattcaatcgaccacgcgcagcatgagattcttgttgccgcgtacagcctgaccagtcgtcctgttgccggcgcgttgcgtgccgcaaaaaaacggggcgtatcggtggtggtggtggccgatcgcaaagcgaacgacaaccggtacaccgaagtgaactttctggccaataaccgcgtggcggtgcggatcaacgataactacgaggccatgcatgataaattcatggtctttgaccgccgcgccgtcttgaccggatcgtttaacttcagcgccagtgcagacagtcgtaatgcggaaaatgtggtgctgatcagcggcgcgcctgcagtaactgaagcctacgttaacgagttttcccgtttatggggcgaaggaaaggacgtggctccacggtactga

SEQ ID NO: 433474 - DNA, 444 bp, Serratia marcescens
atgactgataaccgtaagtgctcgttttatatctacccggagcgcaatgcggcggaccgggtagccgacggctttcttgagaaactgcctcagaaagagcgtggccgcgcgatgcgcgccatgatgctctgtggtgccgcgttgatgaagcaggacgaacgcctgccgttcctgatcgctgaatttctgacggagagcacctcgatgcaggatattcagcggatcatcagcagtacgctgccgcagcaggatacaggagaaatggcgcgtctggttgaggcgtttctgcaggccaccggcggtggcagcaatacggtgtcgccggcaggcggcgctgcgccggaaaacagtcccgccgtgactcccgaaccggcagcaccggaggataagaatctggaagaaacccgtaagaacgtccagcatctgttcccggatgatgattaa

SEQ ID NO: 433475 - DNA, 975 bp, Serratia marcescens
atgcgtatttttgttgacgacggttccaccaacatcaaactggcctggatggaagacggtgcggtcaaaacgttgatcagtccgaacagcttcaagcccgaatggtccatgacgttgctgacagattcatcagtgccggcttccgccaactatgaaattgacggggaaaagtacagctttgaccagctgagcccggatgccgtgcgcaccacggaaacccgctatcagtacagtgatgtgaacgttgtcgctatccaccacgcgctgatgcagtccggcattgaaccgcagccggttgacattgtggtgacgctgccgctgggcgagtacctggatgagaacgatcagcctgatatggccaacatcgagcggaaaaaagcgaacgtgaagcgcgcggtggccgttcaggggcgtgagagctttaccgtgcgtaaagtcagtgtactgccagaatcggtccctgcaggcttcagtgtgctgaaggatctggacgatctggactccctgctgattgtggatatcggtggaaccacgctggatatcgcgcacgttcgcagcaaaatgtccggcttcaccaagacgcattgcgatcctaaaaccggcgtatccatcatcaccgaagccgtaaaacatgcactggataccagcgtgagcacccgtaccagttcgtattttgccgaccgtctgatccaggcgcgaaatgacgaaacgtttctttcccgttacctccagaatgctgaccagcgggcccaggtgatgaaggtactgcatgagcgggaaaaagccctgacgcaccgtgtcaccgattcagttggccgctttgccggcttcacgcacgtcatggttgtcggtggcggcgccagcctggtcgccggcgcagtgaagcaggccacgggggtgagtgacgatcgtttcttcgtcagtgataacccgcagttcgatctggttctgggtatggtggcaatgaagggctga

SEQ ID NO: 433476 - DNA, 741 bp, Serratia marcescens
ttgaacactttccccctgcaaatttctcagaattcacgtagcgacgccatcgggaccgggcgcgtgacatatgcctacttcgattatgccgatgcgctggcgctgcgggagatggccagccaggctgatttacccaaatacctgctggccccggaggtgtcggtgtttctgcggtatgtgcctgacctgcgccagcaggtccttttcgataccctctggaacacgggcgcgcgtattaatgaggcgctggcgctgaccggcgccagctttcagcttgacggttcccggccgtttgtccggctgaagacgcttaaacagcgtcagcgcggccgcggcagaccgggcaaggatgaagaggtgttccgtcttgttcctctgaccgatcctcaatatgtcaggaaggtgcgtgaatttctgaccaccctgcgtattggtaaacagcagctgctctggccggtgcagagcgataacacgccgcgtaactggatcaggaaggcactggacctcgcaaaacgtgactctgtcacttttagtatccctgttacctgccacacgttccggcacagcttctgtatgcacctgatccagcatggggttccgctgaaagttgtacaggcttatgccgggcattcccggctggaaaccacagaaacctacacgcgcgtgtttgcgctcgatgtcggccgtcagtatggcgtccggttcagcctgccagacagtcatctaacgctcccggaataa

SEQ ID NO: 433477 - DNA, 249 bp, Serratia marcescens
atgagtggattgaaaggccgccgaatcagcgcggatatgtttgctatgatgttaaaagtacctgtcggggagctggtttttgcagcccggcacaaccagccgctacacggacaggcgctacctccttacgggatcggcggcgggaaaagctggagctcgaccgcctccacccgcagtatgacgtttgatatgcaggatgcggtcgatttcagcgagaaatttcataaaattcagtcgcctgacggctga

SEQ ID NO: 433478 - DNA, 486 bp, Serratia marcescens
atgaaattcaaaggatacgtcgccgccctgccggcactgttgctgacagggtgcgccatgctccccggacagcccaccgattatgaccgcttctgtaacgtctcaggcatcgccagccacggcgaaacctaccgtgtcagtgacagccaggatttctggttaaccccgaacggccgctatctcagccaggctgagtacagcagtccggcagatacgcttcagaaactgacgggtgtggtcagtggtgaagatcctgaccaggtgcggaagaacgccgtcagggtaagggtgttccgcgtcgagagtgaaaacagccataaaggtgcgtgcctgcctgtgcgttatgacgataatggcgcacagcgtaaaatggattcactgactaacggccgccgtatggtggtattcagtgaagatgagggtcagtctggccagcagatttacaacaaaagccgtggtacaggattcagttacaggttgttatga

SEQ ID NO: 433479 - DNA, 588 bp, Serratia marcescens
atgaatgagtccatccatgttgtcggctcttttatccttgcgggtatcctgctgtatggcctctggctgggtacacggcgacgccggcgccggcacgaacggaaacaggccagcgcggtacgtgtgatcgataaaattaatacgtttccgcatttcgggcagaaaattgcctatctgcgcaagattgacccgtttgtgttcgaagagctgctgcttgaaggctttgaacgccgaggctttgaagtgatccgtaaccgccggtataccggtgacggcgggattgatggccgtgtgaagattgatggccagacctggcttatccaggccaaacgctataccagctatattgccgttggccacgtccgtgacttcagcgacctgctgaacgccaccggtgcccgcggctttttctgccataccggcaaaacgcgcgaaggaaccaaatcgctcattcgcggagacagccgtatgatcctggtcagtggccagaagctgctagaccttattgccaccgatgcgccgtttattccgtatccgggataccggccaccggccgaaatggttcatcctgaacaggagacaacatga

SEQ ID NO: 433480 - DNA, 249 bp, Serratia marcescens; identical to SEQ ID NO: 95962

SEQ ID NO: 433481 - DNA, 462 bp, Serratia marcescens
atgatgaagaaaccacttattgccggcatcttgctggttgtggcgcacaccgccggcgctgcgcagggtgatgataccgatctgcagcagatttatacagaggcgggcattcaggggatatgcagcgccgggatgctggctgtgccggaagaggccagggatgaagttgtcccgcagaacgtcagacacctcttggttcagtgtgcccatttcgacgagcagcagttgcgccggcatgccgacctgccagctcagacatttagccactggcgtgaccgcaatgcggtccttaatctgtcgtctgaccaggtatctgatgcgctctggctgtcagcgtggcgtgatttccgggcacaactggcctcggcctacccggccacgacggaaaaaaaggcacaggggaaagaggccgtatccgccagcatgaagcccggcactgagcatgggagtgcggcggattga

SEQ ID NO: 433482 - DNA, 549 bp, Serratia marcescens
atggatatcaactactacgatgaacatcaggaagaatttgaggcggttaaactggcgctgaagggtgaaatggagaggatctggggctccatgctgaaagaaagcggggatagcctggatgatgaagccacgtacctgaacctgtttgaagaactgcagtacaccttctctccgtccagcttcagtaagctcaccccgtcgcaggatctggatgaagataaaattgccgcctttgtggccagaacccgcggctataagtacggcatcacgatcaaagcccggccaggccatctgcagaaatggctgaaaggccgaatccagccacttgaggacgcggctggcacaaacctgtgctggatcgacacagccaccattgtgcatatcggtgccggtcagcagttcgacgatcagtattacctcaccgtgaccacaaagaccggacagagctaccgcgtgaatgatctccgtctgcctgggcgtcttctggaagccgcacaggaaaccctgttgttcagggcgctggattcaagcactggcggtaatttctga

SEQ ID NO: 433483 - DNA, 405 bp, Serratia marcescens
atggctcagcctatggtgcttcttggtgctgcacaccctgtagcgggttatctttttcttgaagtgatccctgacagtgaggttggctacgttgatatatatcagctgaccgatagtctttatgtcggcgattatctggtcatcaatcatcgggactggcggcggcgcgtacctgcatatgacggccggccgtgggatgaatgggtgatccgcgaacacttgtcccgcatagactggtattcgaataacaccattcagaggttatgtcagaggcacaatctgtcatgtgctgacctgcacaaatggggagaaaatgtggcgcgttgggaggatgttccggtgatggttgcgcgtgaagaagacgacgtgtccatcactcttctttcagggtttacagataactga

SEQ ID NO: 433484 - DNA, 720 bp, Serratia marcescens
atgaacatgcgaggcattctttttgtactgccactgtgcgccgggctcctggcgggctgtgataacaaacaggaagcgctgcagtttgaagccgcccgcacggcggcgctgaaggccgacgatccgtttctggcgctggactcgttcgaacagcagtccggcgactacggccgggactgcgactcgctgggggcatttctgtttggtaattttgctcccacggttaaggcctgtcaggcgcggtatgaggccacgcgggatatggtcctgaaagcagttgaaaagggttccgtgccggcactggtgtttctgtttgacccaagcagcaagacgccggatgtgtatccgcgcgatattgatccacagaaggccgggcaggcggctgagcggcttgttgcactggcagagtcggcgccggtggacagcaaaaatcaggcgttgctgatgcgtgccggcgaagtactgcaggcgggccagtacgttctgcaggattcccggagagcggcggccctgtacgtcaaagcctggcaggcaggcgatcagcgtgccgcgggcgagctggtcagggtctatcgctttctcaaggacagccggcgtacctatttctgggcggtccggagcaaagacgtgctgcagctggacagccgggaccagctgaccggagatgagatcagtgcaattcagaaacttgccgcggacagttcacgtaccgacatttga

SEQ ID NO: 433485 - DNA, 585 bp, Serratia marcescens
atggccaccaagcatattaatgacgagctctggcatcgtattgaagttctgaccgtccgggcaaatgccagacaaaacctgatccgcccggtcaaagaagcggacgtgcttcatctggtcctgcagcgtggcctggagctgctgacagacgacgatctgcttcagctgggcaagtaccgacggcccataggatttgtgctgcggcggccgggtatggagatgctgaagctggatacactgagtatggctgacgccgctactatcctcatgcgcagcggaccggcaacgctgtgcatctggagtcgtgacgatatcctgcggcaggccagtgaagcggtgatccgcgaacggctaccggaaacggccctgctatcggagggggatgaccgggcccggttccagacgctgctgcctggcgtctggaatgccgcgaaccggggcgaaacggccgtgatatccctgcgtgctgacaatgcggatctcgctattgcacgcatcactgacctgatgtgcgaatccctgctgggttacaaggggcagcgggcataccgggcgggtgaaaacgaacagggagaagagtcatga

SEQ ID NO: 433486 - DNA, 159 bp, Serratia marcescens
atgatgcgtcagggggtgatttccgccgttatttttttactgctggcaatggtggtcatgatctacatgccggaggggtattcagcgattacctgggccataggcgcagttgtggttgtgacgctgattttaattcgtgcccaaaaaggaggggattga

SEQ ID NO: 433487 - DNA, 345 bp, Serratia marcescens
atggaatatgaagcgtataaggttcgcggctacggctttggactgaagaaagagatcaccggcgtgctgggtcgttaccccacgcaggaagaggcgcagaaggtcgcggacgactacacgcaggcctgcctgccggataacctgccggacagttacgatatgggcatggtccggccggtcgttgccggcgaacctgctgccctcgatccggacgtgtttcgcggtccgggcacgccgttcatgaaggatgccggccagttaagcacgggtcacacggtatgcctgggcaaagcggcagatggaaaacgcttttatgtcggcggggagcattccggtggccagtga

SEQ ID NO: 433488 - DNA, 1275 bp, Serratia marcescens
atgaccggtttttttgaacgtaaaaagcgggccaaaaacgcccagctgaccgtgcgtctcgatgagcagctgaagaaacgcgccgaactgcgtctggaggcaatggggatgaccgccacggaagcagtggagcagctttaccgcttcatcgccgatcacggccggatgcccgtcacggagcgtatcgtcacatttgacatccagtcacagcgcggccgcgccatcgccctcaatcccgccgacgctgtgaccgaaaacacccggcggtttctgcagtcgctgggagctatggaagtggtctgctgcgatcccgctgcatttgaacaggcggtactggagtacttcagcctgtatgtgcccgaccaggctgcctgtttactggccggtgtactgaacgtcacgttcatggttaatgccgccagtcgcgtgaaagatgactggcatgacaggctgctgtccctgttgcagcgcgactttgatttcagcgaagaacagtcagtgacgttcattaacagcatcgtagacagcgaacatgtcgatcctgccatcgtcagtcgaaataatacggcctggcggagcggaaaaagcaccgggtccggcgccggcgctgaacaggccttactggataacaccaacgtcagggtcttctatccctccggggaagcgcccgtctccggcgagatcggcgccgccgtcctgcagcgtttcctgacgttcctggcggagcggggcgtcagctgcagcgatccgcagagactgaccgaaagcgccggccgtgcatggagcgtgcgtgaaaatatgatcgggaatatgcccccggacatgcagcaggccataaacgatggcgtcatttttgaggccagcgctgacacgccggacttttcccctgagctggcggcggcgtttggcttcacacaggcccaggcagaagcggtgctgaaacccgccctgaccgccagggatctccccggtttcctgcagcgctttctggcgttcctggccgaccggggtatcagctgcagcaatccccggcggtttactgaaaaggtcacggaatacgccagccatgagggaccgcaccggcttattgcaatgttgatgtcgcgcatcagggatgagggggtcagttttgtctttcacaatgaatccccggacgaactgccgcgcctggccgcgtcactgcccggcgaactggccgataccttcgggtttacgggatggcaggcaacaacaatactgcgtcaaatccagccggcacggccggggcaggattag

SEQ ID NO: 433489 - DNA, 273 bp, Serratia marcescens
atgaaaacgacctgttatgcggacggcatcacggcggcaccactttccccgcaggagtggcgggcactgctcagggcgaaaggctggaagcagaaggatctggcccgccgctggaatgtgtcagaaacctggatcaggaagctggccaataaccccgatcggggcacgcactggaacgatgcctgccggggtctgcccgatattcgtgcccggcggcccggcgaaccgcgcgcggcaggcacagacgtaccagagccggaaggccctgaatga

SEQ ID NO: 433490 - DNA, 684 bp, Serratia marcescens
atgaaaaaacgtcttcacctcatcaccacctgtacccggcgcaaggcggtcagcgtggaggataccgtttttccgggcgacgcttcccttaatgacgcctttgacggctggtacaggctgatcgcccaggccgcccgccgtcctggcaaggtgctggaaacgggagagctttaccggggcgcacactggctgcgtgcccgcggtatcgcggcgcggtggccgggcatcgagctgtgggccatgtcggccggtctggggctgcgccaccataccgatccggcggtcgcgtatgaggcaacgtttcacgctatgcccttcgcgccggcgaccgtctggggctcactgacggcacggcccccgctggcgggccgctgcgcctccctggctgagctgatgcaacgctgcccggacgatcgctttgtgatcgccggttcacccgtgtatatcagcgcggctgagcaggatattctggccggcgtgcccgcactgcatgatgcggccgctcagctgattatcgtgacctcacagggctatcgtggtccgctgcagccgtttctgaaaagaagccgcgcggacatgatggcggccctgaaatcgaacatgacgtgcctgaatattgcctgcgccggcgccctgattgacgccatgatgcaggcagacgcccggcaggcggcgaccatttaa

SEQ ID NO: 433491 - DNA, 219 bp, Serratia marcescens
atgttcagcatcatttatcacgccggcgctgccgtccttttcctggtcatgagcctggcggccggcgccggcctcctgcttcatggccatgaatatacgacaggtcatttctggaacatgacggggctgtgcattgtgtcaactctcgtctggatctgggctgtagctcaggcaaaagaagcctggtacatttcacgaaacatcaaaaaaggactctga

SEQ ID NO: 433492 - DNA, 210 bp, Serratia marcescens
atgaaagatgaaattcggcacgaaaaacccgttgaagtgaatatacagctgacacacagagaagcgcaggctctggcgcaactggttaagcgtctgggattcagtgactgccgcggcctggcgacgtcagatattgaggcatatctgatgatggatggaatcaaccagatcatgaaagcactggctgaagagggctatgcaccacgataa

SEQ ID NO: 433493 - DNA, 639 bp, Serratia marcescens
atgttatacatggctttatgcagttttatgatgatcctggcgctaagtgagatgttccgcacgatgacggcgatcggcaatggcagtttcgccggcaaccgcttcataccgctcgccttagttctgttaacgctggcgctggcatcacctttctttgccacattttatacgctgagccggcctgtttcgatggatgcactctccaggctgtccgttggtgcgcagtgggcaggtatcgccgccgccattctgctgtgcatcttgtatggctatcgtgcctggaaaaacggccgtttctggtataccggtgcggccattgcctcagtggtgattgccgttatttttgccaacagcctgcttttcgtgtccaggcccgatgccggcatcgtggccacttttgtgctgaacaacgatgacagcaatgacgtgcagtgcgaccgttcggtactgctggttcattacaacaagggaacccctacggagtggcgctgcccgaccggtatcatgttcatgtctgatgcgtcaacaccctttcttccctggccggattatcacggcgggcggagtcagcatctgacgacagcactggatcagatcacagacagcgccatgcgccttgacctaagccagaaaccataa

SEQ ID NO: 433494 - DNA, 321 bp, Serratia marcescens
atgaataagatgcaaagtaaagccccctcgatgcggctctccggtgtgcaaaaagacgtattgtttgttctgtatggtctggcagaacgtcagctggcgggcccgttcccggcgatgcagcttttcagcatcctcaataagggacgcctccagcccgttgccgataccaattttcgtcgttcctgccatacgctgaaccgtcacggcctgctcagcaaataccgggataatcagtcactgacgctcgcgtttgggctgacagaggcaggcctggagatcgccagagaggtttatcacaaacgcctgacggagatggaataa

SEQ ID NO: 433495 - DNA, 849 bp, Serratia marcescens
atgaagaatgatgagctggccacacgacgcgaagaggcgatagccggcgatcggtgcttcacgaaagggcgcctgcgcgatgaattcagaatgaagccggctcccggtgctgaaccggtgaaatggtacaaaagcgcctatggcggcaagtacgccgtataccgcattgcagactgtgttccgatgcgggaaaaacggccgccgaccgagaagcagcagcaggccggcctgcgtctttccgtcctgtcccggcttaacagcaccagtggccggatggcacggcgggcacacgactggctgagtctggcgccgctctttctggataccgaaacgacggggctgggtaataccgcagaagcgctggaaatcggcctgaccgatgcggccggccgggtgatatttgatacccgcctgaagccgacggtcgccatcgaggcgcaggccgccgccgtgcatggtatcgatgagccggcactcagcggcgcaccatcctggccagatgtggcgatgcagctgcgccacgccatcggggtccggccagtgattatctttaacgccccctttgatacccgcattctgaaacagacggccgccgcacatggcgatccggccgactggctgggagaactgacagtgtattgcgcgatggagctggcagcagggtattttggggccaccaatcgctatggcaccatttcgctggccagcgcggccagtcaggcagcattgacctgggaaggggaggcacactcggcgatcgccgatgcacggatgacggccggggtggtgaacgccattggcgcataccatctggcattgctgcaggagcaggaacggctgcaggcctga

SEQ ID NO: 433496 - DNA, 1305 bp, Serratia marcescens
atggggtgtggttacgttcactgtcatgagacaccgcccgtgtacgccttaatcgatgtcaattcgatgtactgcagctgcgaagaagcgttccgccctgatttacgaggtcgccctgtggtcgttctcagcaacaacgacggggcgcttgttgcggtcaatcgcgcggcgaaagcgctgggtgtgcgccgcggggagccctatttccgctgccgccgcctgctggaacagcataacgttgccgtattcagttccaactacaccctttacgcctcattctccgccagatttgcaaccgtggtggagagtctggcgccgcggacatttgtttactcaattgatgagctctttgcggatgcctctcatatggatggcgtgatgacgccgcaggcgtttggtcagcttttgcgggctgaagtgctgcgccagacaacgctcacctgtggagtcggcgtcgcgccaacgaagacgctggccaagctgtgcaaccacgctgcaaagacgtggcctgccaccggcggggttgtggcgctcagtgatcctgcgcgactgaaaaagctgatgagcctggtggcgtccggcgatgtgtggggcgttggccatcgtaccgaaaaagggctggcggcaatggggatcaaaacggcgctggcgctcgcagagatggatatccgtcttgcacgccggctgtacggtgtgacgctggaacggaccattcgtgagctgcgtggcgaggcctgctttgccctggaggaaggaaccggcgcgaaacagcagcttgttgtatcccgttcgtttggagcgcgggtcacgcaactggcgcagatgcagcaggcggtgactaaatatgccacacgggcaggggaaaagttgcgccaggaaaaccgcctggcgaaggtggtaacggtctttatccgcagcagtgcttatgacgcaggcggtgtgccctacagtaaccaggctacggaagtgcttcccgtgccaagccaggatacacgcgacatcattgccgcggcgcagctggggctgtcgcgtatctggcgtgagggcgtgcggtatgcaaaagccggcgtgatgctcagcgatctgcagggatatgaaacccagctggatctgtttgcgccggctgcagtgcggccggggagcgaaagactgatggccaccatcgacaaaataaacagggaaggaaggtcaaaggtcttcttcgccggagaaggtattgatccggaatatgccatgcgccgtgaaatgttgtccccggcctacaccacgcagtggaaggatattcccgcggcgtttatgcgataa

SEQ ID NO: 433497 - DNA, 435 bp, Serratia marcescens
atggcgctggatctcgtttatccccggccttcagtggaaggcgacgcactccctttttttgccgaacccgttgcggccggctttcccagcccggcagcaggctatgaggccaatgaacttaacctgcatgattactgtgtgcggcatccggccgcgacgtacttcttgcgtgtgtccggcgattccatgcgtgatgcgcgcattcatgatggcgatgtgctggtcgtcgatcgggcagaagaaccccggcacggcagcatcgtgattgccagcatcgataatgaatttacggtcaagcagctgcagctccgcccttacccctgcctgatgccgctgaatccggcttttccgccaatcaggtttgatccggaggcgctgcagatatggggtgtggttacgttcactgtcatgagacaccgcccgtgtacgccttaa

SEQ ID NO: 433498 - DNA, 654 bp, Serratia marcescens
atgattcagtcacgtaataaatatctgcagttcatgctggttctgctggcagcctgggccatagcctggggggccctgtttgtcatggggcagaccgttctgctctatgggctggggaaaaatacgctgttcttcattcatggtgctgttctggtgtacctgctgtgtgttttcctggtataccgccgctgggttgcacccctaccggtcgttggccagctgcgcaacgttggcgcaccgtggctggtcggtgcgatggccgtggtgtatgtcggtgaatttctgctgggtaaagtgctggacctgcccgctgagccgtttatgacgaaactttttgccgataaatccatacccgacgtgatcctgacgttgctggccatctttatccttgccccgctgaatgaggaaacgctgttccgggggatcatgctgaacgtcttccgttcacggtaccgctggacgatgtggctgggggcgctgataacgtcattgctgttcgtcgccgcgcacagccagtatcagaacctgctgaccctggcagaactgttcctggtggggttgattacatcagctgcccggatcagaagcggcggcctgctgctgccggtattgctgcatatggaagcaaccgcgctgggtttactgtttggctga

SEQ ID NO: 433499 - DNA, 351 bp, Serratia marcescens
atgaaaatgaaaacaaagattgctctggcactggctacttctctcatcagcagcagcgtctttgctcagactgttactgcacctgaaaccaacacgctattgaacaatatctatgtacagcaaagtgaggctaatcagcttctcaaacaactggtaggtaaagcaccggcatcagagatcacgttgacagatgcacaaaggaaaacctcctgcctgtatgaaagccattactacagcagtggcgcacgacttaccgtcggaaaagaaacactccgctgcaagctgagtggcgaaatcccgacatgggaaaatgcgaatgagggaaacattgtctcagtcgaaggcaaataa

SEQ ID NO: 433500 - DNA, 396 bp, Serratia marcescens
atggttgacgcaccgccctcaatcccgctaccaacctgcatggttgaagcagcacagatttatcacattcctctccgtggattcctcgccttgtggctgactgaaggcggaaaaccgggaatgaaaaataaaaacaaaaacggcacttacgattacggcgcattccagataaacaccatctgggcgaataagctggcgtccgattttggcgtgaaagcggagcagctgcagcatgacttttgcgcctctgcaatggccagtgcctacatcctcaaatacaacatcattctcgaagggggggatttctggcagggtgtcggccgctatcactccaacacgccggcgcgtaaggcctggtatatcgggaaggtttaccaaaattctctgaggttctga

SEQ ID NO: 433501 - DNA, 1308 bp, Serratia marcescens
atgcaaaaccatccacaacggaaagggggaggggatgatggcctgatgattatcggggcccttctcatcatgatcacagtgatgtggtttggctttcgtgattatgtgatttacggagcctgtcgcctgctttactggatctacggtgtactgccggacgccattacaccgggtaatgcggccgagcgccgggacatgcttctgtcggcggcgcggtataaccaccaggtttcgctgtgggactttatcagcgtgatgaacgacacggccagcgtgctctttcccctgttcattttaatcatcgggctgttcgtctgggttatctcgcgcaatccttactaccgtctgacccgtaaactgaccatccggaacctgccctgggtgatggtaaaaaactatccggggatcgcccatatcctcgcccggtttggccacctcgatcagctgctgctgaatgaagatccggaagaagcacgcagcgcgcagtcacccgttgagtttgcccaggaacataacctgattgataccgctaaacgccgcctccgtaaaaaagccgcacataaggtcttcctgtcacaggtaaacctggctcccgaaggggcggccctttccctggcgccctgggaaaaagcactcgcagcctcgtttgtacatctgcggtttatgggcgaccggccaacggctaaatccattctcgacgatctcaaccgttcctgcctgcggactaaagacggcttccctgattattcgctggccgccgggctctggaccgtcgccagccagtgcgaagcgttccgagaatttgcaaaggggcgccgcagctcccgttcgctactctacgcgctgttcgatgatgacctgcagctgccatccgctaatttccggtggctgaaaggcgtggaccgcacgttatggtatgcactttcaagcgccggccgcgggaagttcttcattgagggaggtggcgttattgcctggagtcagtgcgaaagttaccggctgacgctcgatgaagaaaaggcggcgaaattcccgccgaccgtgcgggcggccgtgctgggccttgagctggatctgctccattaccgccatattgaccgccgcgatcccgccattccggtcgctcactggcaggaagacgttataccgccatttgcatttgaatctgatgctgaagcggaagacgagccggctacgccgcctgcagctccgcacgacaccccgaacaacagtctgcgactgacagacgatgaaccgacgccggctaaacctcagccggcaacccgtcccgatcacctggaactctaa

SEQ ID NO: 433502 - DNA, 951 bp, Serratia marcescens
atgaaactcaccgtaaaaaccgatcgcaacacactttatctttccgctgacggaaactaccaggaacaagccctgcactccttccccctgtcagcctgtcattttggacttggccatgatgccggcagcggccacatcctgacgcacaatacgttttctggtgaagcggtgcagctgttccgctttgaaaacgaatatcaggccatcgaggcactgaacaatatccgtaaaaagctgaaacagcagcgcggactcaatgccgtgcgccggctgtctaactttatcttctggccagtcgccgcgctgggctttatcgtctccatcaacggcgcgttgatgaatatgcatcagccggcacagccattgcaggcaaactcgtatgttcccgcgccggctctgcagcagccagccactgcgccggagcagctgcaggttcaggcagcgcctgaagcccctaaaaaactggctgataacgacttgctgtcactgaaagatgccgtcaccagcggacgctttacgatctcgctttcaaccgggcataaacacaccctgtatgtgttttccgatccgatgtgcccgcactgccgcgcgctggaaccccgactgcaggaactgagcaaacgctataacgtcgagattttccccgtgtccgtttatggcgacctgcgctcgatggtccgcgccgctcctgtactcgataccgggaaagatacccgcctgaaaagctgggaagacacgattaacatgggatacaccaccatgaacccgaaaattgacgatccgaaaacagccccggataccaccggcgcccgcctggttgacgcgaacaatatggcatttgcgaaattcgggtttatcggcaccccgtccatcgttgccgattcgggtgatgtgatcccggtttccgtcgtcaaagacgatgcccgcctgcagcaggcaataggagaataa

SEQ ID NO: 433503 - DNA, 2106 bp, Serratia marcescens
atgcaacaggaatctgtagacagtaaaaaagtcatccgcccagatggttcgttcatggagtggtttctcaccccgaacgtacagtttggcctgctggccatactgaccgtgctgggtctgtttctcccctttaccatgctgctgagcatcctcatccttccgccgctgatggtggcattcacggatcgtaaattccggccaccgctgcgaatgccgaaagactgcgaaatgttcgacgacaccctgaccacggaaacccaggcggaatatcgtctggggcccattcgcatcccgcataaggtccgggagcgaaagaaggcaaagggaattttatatgtcgggtatgagcggggacgcctgttcggccgcgagctgtggctgaacatgacggacctgctgcgccacatggtattttttggtaccaccgggtcgggtaaaaccgaaaccttttatgggtttatcgttaacttcctgctgtggtgccgtggctactgcctctcagacggtaaagcagataacaagctggccttcgccacctggtcgctggcgcgccgtttcggccgcgaggatgattattacgtccttaacctgctgaccggcagtattgacaggttcgtgaacctggtgaagcaggaaagcatccccgcgcaatccaactcagtcaacctcttcagcgttgccccgccaaccttcatcatccagttgatggaatccatgctcccccaggtgggcggggattcggcacagtggcaggatacggcaaaagccatgatgtcggcgctgatcaatgccctgtgttataagcgcgcccgcggcgaactgcttttgtcacagcgcaccattcagaaaaacatgtcgctgccggcaatggccgcgctgtacgttgaggcaaagaaaaacggctggcacagcgagggttacgccgcgctggaaagttatctggaaaacacaccaggcttcctgctggccaacgcggaatacccggaaacgtgggaagcccgcgccttcgaacagcataactacatgagccgtcagtttctgaagacgctctccctgttcaatgaaacctatggccatgtttttccggaagacagcggcgatatccggatggacgatattttccacaatgaccgtattctcatcgtcatgatcccgtctctggagctgtcacgcggtgaagcggccacgcttggccgtttatatgtgacgctgcagcgaatgaccatcagtaaggacctgggctaccagctggaagggaaaaaagaggaagtcctgctcactcacgcgctgaataatcaggcgccatacgggctgatttatgacgagctgggccagtatttcaccagcggtatggatacgctgagtgcgcagatgcgttcactggaaaaaatgggcgtattttcctcccaggatcacccgtcgctcgcccgcggcgcgaacggcgaggtggattcgctgatcgccaacacccgcgtgaaatattttgagtcgattgaagaccggaaaacctttgaaatactgcgcgaaaccgtcggccaggactattattcagagctctccgggcaggaagcggaacacggcacgttttccaaaacggttcgggaaggggatctgtatcaaatccgtgaaaaggaccgcgtaaacattcgtgagctgcgtaagcagaccgaaggtcagggtgtgatttcttttcaggatgccctggtacgcagcgcggcattttacattccggacaatgagaagttttccagcgagctgccgatgcggataaaccgctttatcgaggtattaccgccatcgccggcgacgctgtacagcatctatccggaacgcaaggatgatgaactggcggaaagcaacccggatgcaatgcgattcccgccgatcaagctgttcggctacgacaaagcggccaacagcctgctggaaaaaattgaggtcttctacgagctgcagtgtggcgcaatttcaccggaggaaatgtcggtgtgcctgtttgaactgttcgctgaatggcttgatggaacggaaacggacgacgtgctttaccaccaggaagacgatctgttcccgatgatcggggtcgtctcagaattcggaaaataa

SEQ ID NO: 433504 - DNA, 1212 bp, Serratia marcescens
atgacctcactcacggtcaggacggttcaggctctcatcaaagcaggagaaccggggaagtttggagatgggcgaggcttgtacctgaaagtcccacaaaaaggtgaggcgtattggatgcttcgatacacaatcggctctaagagacgagaactcacacttggcaaggtatcccatctatctctgtctgaggtacgtagcctcgctgaggatactcgaagaaaagttgccaccggagatgatcctattgctgaacggaaactcaatcgccctaagcaactcacaactgtagatggattgtttgaagactggcacaaagacctggttaagcggttgaagcatccacaaatcccagaaagggtatacaggaaagatatcgcccctactattggtcaactttctttgacgaagataacccccattgatgtcaggtcaattctgcaaaaaattacagatagcggaagaccaactatttcaaatgatgccctactctacatgaagcaactcttcgaccatgcaatcaagcttggattattgttaaacaatccagcttctgcgtttaaggtcaatgatgcaggtggaatcgaaaaaagcagagaaagagcattgagtctggaagaaattggtcaggtgtttaaagttttcagagaacactctgacagcttctctcgtgataactaccttgcatgtgctctgctactactccttgctgttcgcaaaagtgagctaaccgaggctccttgggcagaattcgatttggatgagaaaaaatggtctttacccaaggaaagaagtaagtctggtgtaggaatcgtcatcccgcttcccccgctcgctatgaagattcttgaagagctaaaggtcagagcttttggttctgattatgtctttcctaaccgcagatccagtaagaatctacacatgggaaaagacacgctcaacagagccatagcgaagctgttcggtatcgagcctggcaggaagcagcagccaccaaatgttatgggtgatattgaatatttcacagtccatgacttacgaaggacttgcagaagtttacttgcatcactgtctgttcccccacatgtcgcagaaagatgtctgaaccacaaacttaaaggagtcgaagggatttatgacagatatgattactatcaagaacgaaaagaagctcatttaaaagtgtcgaaatcacttaagtcattgatttag

SEQ ID NO: 433505 - DNA, 315 bp, Serratia marcescens
atgatttatgtcaatgcgcgattcttaacgcaggatttgacaggggttcagcggttcgctcaggaaatatgccttgcgctgagtaagattaggcatgatatcgtttttgtctcgccacctaacattattcaccacgatatcgcgtcgcaattgaatgttcaggtggtgggtaagaaaagcggtcacttttgggagcaggtagagcttcctgcttttttaaagaaaaataaaagcccgcttctaataaatctttgcaatacggctccgatcttttatcgtaataaaattcatcattttgctgtacaagttgtctaa

SEQ ID NO: 433506 - DNA, 852 bp, Serratia marcescens
atgcaaaattggtcagccgcgcataccaaggaaatcaagaagtggttagatatcgatacttatcgcagatttgaagatctgactctcatacagctttatcatgaactgcttgcaaggacattgttcttcaaaccatatcatgaagaatttgaagcagaagccgtaagactctacatcgacaggatcttcagtggcaacccctttctcatcacagaaaagcatctcggctatctcacaagagaggataccctttaccagccaccacacttctttctgacaacaactgaaagattggcgcaactaagtattgtggggctgcgaaattcacttttcttttgggatggcggtgatgagtactcggttaaccgtgaattcctcgaaagccctgtatcagagtccctacctcgcctgttcagagatactgtcatggtcgaaatcgacttggcgaatggaactgacgaggaaatagctgaatccctgaaagccgcactacctcagtggcgtaaggtcagaggtatcgaggctgacactactgactcgatccgcttcggttatggaacgattaagaaaatcatcaactacagactgataccactaattgatatcctagtatggtcaaacctgcataaggtacgtatatcagaaaaccgcctctcgcgtctgctgtataccgatgatgatgacgaaagtgatacccggatgaaccaccaaatcagggatacggacagaccacttgctttgaaagctgcgagtataccgttcatccgacagtttcatctgtttatcaacaagaacagccatttgaaaaagatcagagtttcagaggtgatgaaaatctctgattctgactga

SEQ ID NO: 433507 - DNA, 372 bp, Serratia marcescens
atgctggcagaagccatgtgtaagcatatgaatttcacctatgcaccaagtcaaactcaatactggaatcatggttacagtaccgaaactgattacatctatgtcactactggctctttagcttatgaacaactcaaagtcataagtgaagaagtgggaactgaacgcacactgctaatctgctgcaaggcctttatgactgagggtgccgatttccctaatctgacactagtaaaaattccgcgcgccattctgagtaaatgcgaatgggatcaagacgactacagctttacgctaaacgtactttctgattcagaacaatctgacgaaattgactacgatgaagatactgaaggcgaagaacaattatga

SEQ ID NO: 433508 - DNA, 561 bp, Serratia marcescens
atgctgcgtaaaaatcccagcggccatctgccgcaggtctcgccgctggcctacatcgatcccaccgccattatctgcggccgggtgatcgtcgaagatttcgtctacgtcggcccgtatgcggtgatccgcgccgacgagttgaacgccgctggcgacatggagccgatcgtcatcggctcgcactccaatattcaggacggcgtggtgatccactccaagagcggggcggcggtcatcattggccgttacagctcgatcgcccaccgcgccattgtccacggcccgtgtcgcatcgacgatcgggtgtttatcggtttcaacagcgtgctgttcaactgccacatccagtccggctgcgtggtgcgttacaacgcggtggtggacggcgtgacgctgccggaaaaccgctatatcccctcgaccgagcgcgtagggccggacagcgacctgtcgcgctatcgccaggtcgatcgcggcgcgctgcagttttcggaagaagtggccgccaccaacgtcgagctggtgcgcggctatcaggcattacgcaatgaattttaa

SEQ ID NO: 433509 - DNA, 279 bp, Serratia marcescens
atgatagccctaggctggatggacgaagacggcaatccggccgatcccgacgcccttaaaacgcctcagcagggggccgcgactcaggtgtgggccgccacctcaccgcagttgcagggtttgggaggactttactgtgaggatggcgatattgccggtatcgccgcacacgacagtcaggcgctggtcggcgtgaaggaatacgcgatcgatccggaacaggcgcagcgtctgtgggcgctttcggcgtcgctgaccggtgtcgatgccttcgcctga

SEQ ID NO: 433510 - DNA, 168 bp, Serratia marcescens
atgaaatgttcggttcatatcgccaccggcgtagacggattcatcgccaacgcgggcggcggcatacccttgttcggcgccgctggccccgagcagcgcctgctcgccgtcaccccatcggacaacggcttcgcgcaagcacgttacgcggttcagcgcgaatcgtaa

SEQ ID NO: 433511 - DNA, 3189 bp, Serratia marcescens
atggcagagcaagatggcggcagcctcgtctatcaagtcgatattgatactgcaaaaatgattaccgggagccgcagggcctctgtagttctcggcgagatggagaagcaatcaggaaaagcggacgccagcctatcgaaacttgaacgtcaggcaggaacagcaggggcaacattgggagcgctgtctcgagtagccgctgctgttacagccgctctatcatttcgtgaggtattgtcatatgccgacgcatggacaacgctcaacaacaaactggcgaacgcagtaagggctaatgaaactcttgctgatgtaactgagcgagtctttcagatcacccaagatactcgatccagcctgaacggtactgcgacgctttattctcgccttgagcgcgccacgcgaagctataacacgtctgctgacgatcttgcgaagttaacgacgattatcaaccaggggtttgtcgtatccggcgcgacagcgcaagaggctgaaggagcgattgttcaattatctcagggcttagcttctggcgtgctgagagggcaggagtataactctgttgccgagcaaggtagtcgcctgtctattgctctggccgactcacttggtgttagcatcggacagcttcgcgcgatggcggcgcagggtaaattgactactgatattgttgtaaaagggctgctttcacaaggtgacgcgatcgggagagagtttgccaaaaccacgatgactgtcggccaggcaagccaaattgccggcaacaacatcactaaatttattggcagttcaacaacggtaaaaactggtgtgatggtcttcaacgatgccattattaccctgagtgaaaacctcactgccgtctcaaacgttattttggctatctctgcggttattggttcgcggtatgtttctgcattaaccgctgcaacagcagccacgatagcgaatacagcagcagcggttagggcagcgattgcgcagggttctctacgctcagcacttcttgccgctttaaccccacttggcggcttggttggtgcggcaacgctcgcatctgcagcgatattctatttctaccaacgtgctcaacaggccaagcaagaagcgatagatttcgcagataaactcgatggcgttatagcaaaaatgcgccaaatgaatgatgtgcaactgactggcaccattgccgatctgaacacgtcattaagggctcaggttgagcaattaggtgaattacaaaccgctcatcaagaaaacattaaccgtttatataatgctcagcaggcgctaaataatgcggcagagggatcctgggcatataactcagcgtcatcggcagtagccgaggctcaagatcaggtagcacagtctgctcgtgatgtagatacggcagaaacaaagcttagccgaaccaagagcacactgggcttagtccaggcccagctaagcggaaaactagaacagggcgttgatcttctgcgccgagatggcgaagaggctggcgtagcagctggcatgatgaatcatctgggcaacgctattaatttcgcaagcagggccaaggataaattcaactcgcaaagcctcattgttgaacggcctaaaaatgttcaggactatctggacaagctgaatgatcaggttgagattcagagcgaacttaacgacaggaaacgcgcccagcttaaagctgagaaggacatcagaacgctcggcggtagcgatcaagacgtactgctagcacgcgaaagggccggtgccgagttcgatgctacaaaggcgattcaggagcagaagaaggcaaccaaggaagggatagcggaaggcaagaaatcagccagccaagcggaaagcgttgcccagaagctggcaaacctgaaacagcagtccgaacttgcggcggactcaacaagtgagcttagccgacagcaggcgatcctgaccgcacagcaatcactggggaaaggagctacacaggcccagatcgctgaggctgctgcttacgctgccaaaaagtgggacaccgccaatgctatcaaggcgcaggcggccgcagagaagctactcccggaagtcaaagagaacgccagctacgcgcaggacgtgaaggatttaaacacggcgttggcggctaagaaaatcagccaggagcactacaacaccacggctgagcagctggagcaacagcatcaggttaacttggcaaaaatccgggctgaagccgtagtaagtcctcagcagcaagccgccggcatggttgacccagtgcagcagcttgccaacgagaatgcgcagaagttggcgcttatccagcagttcgagactgagaagggtgtgattacccagcgcggccttgagttgatgagggccgcgaatactcagtacgaacaacagcggatagctgcacagtgggagatattccgcaatcagaacgcaggaaatgaggcgctggctgcgtcatttgatgcattcgccggcaacgcgtccaatgccttcactggcattatcaccggcagcatgagtgcggaagaggcagcgcgttcgcttggttcaaccgtccttaatagtctggtgaatgccttcgtgcagatgggggttgattgggttaaatcggcagttatgggctcaacagcgcaaacatcagctattgccgccaccacggccgcgcaagttgcgggaacggctacgacgacagcagcgagcaccgctgctgctgctgcaaccacaacagcctggacgccggcggctatcgttgcctctatcggttcattcggtggtgccgcagcgattggtatcggcgcagttgttgcggctatggcgttgtctagcagcctggcagggaagcgtaagaatggcggccctgtaaggtcgggcagcatgtaccaagttggcgagggcggtctacctgaaatttaccaagccagcacaggtaagcagtacatgatccccggtgacaacggcaaggtgatcagcaacaagcagatgactgccggcggcagtgcgtcgccaaccatcatcatcgaaaactactcatctggtgctggggtaatggatacccaggctagcaggggggcggatggtggcgatgtagtgcgcatcgtgctggcggatctgcagcagggtgggcaaatcagtcagggaatatcccggtatcaccaggcgcctcgaaaagccactgaatag

SEQ ID NO: 433512 - DNA, 699 bp, Serratia marcescens
atgcggagtgttattgcacttagtcttttgatggcttctagtgcggcagtggctagcggaaagttagtttgtgagtatgcgattggtgatttgtctacacccccaaagcttctcattaaaggtaatgctagtgtgattttcgatgggaaatctttcacagcatataggtcggatggttcttatgtcgtaaccccaccgctgactgaaaagaaagatgcaatgatttttcttgatgataaaacaaaagtatttgctgccagcattgataaatcaagctttgctatttctgatagaataagaaaaacaacagaacaatggagtaagtgcaataatgatgttaataaaaatagtcaagaagaaacacaatctgatgttaaagagcaaatgaaacgcattgtttccatcccatggggcggtaaagaggctaataagtttttcttaaaagagactcatctttttatgcttttgcaatgcggatgggctggtagtgttgggttttcaactggttcaaaaccgttggttatgcttggcgattcatattacccagcaaatagttcttcatttaaaaatggagagtactctataacattcaacggcggatcgatgagggtcgcatacaatccacaaaaggtaagtggttacatatctgattcaagaagctttacaccatgtgccgtagttcgccttggagatgaataa

SEQ ID NO: 433513 - DNA, 837 bp, Serratia marcescens
atgggtacattgttgttgtcagccattctggttagtggctatatcttcacagttacgtcagtatcatccagatataaatttaagcgctccgatggttggggcgcttacttttatgtagcaacgtggggcactggcttttgtatcataagttggattatctgttcatttatggggtttgttggactcatcgactttatggctcaggtcgtagggttaaacaaagataatgcaaaattgttaatcccgctttctgctgatgctgtcgctacagggaagagtttgaagatcgcgatgtggatcgtcggcactgtcgtgcttgccactgtgtgtggattggttaacaaggcatggcacgcatttggagaccgaaggtttaaagcgcttgctaaggccgcgagaaaccaccctttagaaacattggcgatcgaggcatctgccactttggctcctgtcatctttacgcttaagtccaaaaagttttatgttggatgggtaattcgtccaccactagagcatgggaaaatcgagcacatggccttcatccctcttctcagtggatacagggataaggataccttgaagattatcgtaaccactaactacgatacccactatgagagcatagggctttttggtgatatagccgatgtagaagggccgccaaagataaatagtaatttgacatttaatgatttccgagtggtttgccctgtatccgagattgaaaatctctcattttttgactttcagacttacaaccagtttaaaattcaggaagaaagagaagagagaggacagcgccgatctaggcctcgaatcattagggctaaatcatag

SEQ ID NO: 433514 - DNA, 204 bp, Serratia marcescens
atgtttggtttctcgttcaaaggacggtcgcacaagaacgagtctgtcgacagacttgcaaatatcctcatcgataaccaggataggctgaccatcgatcgtgatggagtgatcagcatcaacctggagaatgaaaaagttcggcaggagatgaagcgtcagcttcagcacctggcgcaagtggaacctgtaaaagccaggtga

SEQ ID NO: 433515 - DNA, 510 bp, Serratia marcescens
atgaactatccaaccgtagcagtaaacggcgtctcagttcgtgttgatgaagaggggcgctataacctcaatgatctgcatgctgccgctgtagcagaaggtaacgccacggagtcacagcgcccaagcaacttcacgaaaagcaaatcaatcaaggagtttgtgcgcgaactgaccgccgctacaaaagtagcggcgcttaaaacggttaatggaggccctaatcacggagtctgggctctggagttggtggctatcagatatgcggcatggcttagcgcaaagtttgagatcaaggtttatcagacgttccaggcagtgatccgcaatggtattgatgccatgtctcgcttgaacaaaatagaccacatcatcaagaccgaatccaaggaaataagccagtgcgccagccaaatggcgaagtggggtatcggcggtcgaaaacgcctccttcacactgcccgagaacgtgttgctgatgaagtgcagatgtaccttcctggcttttga

SEQ ID NO: 433516 - DNA, 237 bp, Serratia marcescens
atggcgattgtaaaaagtactattagcgcattaaacgtgacggtggtttatcacgttgctggtgaaacaaagacgtttagtgaatccgttgtcgcacaaatcgttatcgaccgttacttgcaacttgaatgcggcgataccgtcggtctcttcgtgccggtaggaaaaggtcagcaggtcaacgcgctgaatatcgaatggtttgagattgagcgcattatggcgccaaaggagtga

SEQ ID NO: 433517 - DNA, 165 bp, Serratia marcescens
atgacagaacaggaattgaagaagtttatcttctctgaaacggttgcacttatagcggccttagcctcaaggcaatctggcggttacaactctgccattcaccattttgacgaaatttatgatgaattgatgaagagagctagagataaaaacctccgctcttag

SEQ ID NO: 433518 - DNA, 204 bp, Serratia marcescens
atgattattgctaatgacctgaagaatgatccaagtaacaaaggttgggttttgggatggggtgttgttcgtaataatccctggagtcttgtaggcgttttctcaagcaagcaggccgcagagactaaggctagtgaggttggtgatggacatgaagttaaatatggctcccaccgcttagggtccgacgattttatgtcctaa

SEQ ID NO: 433519 - DNA, 222 bp, Serratia marcescens
atgaacccagtacaaattgcagtagatgcggttggcgggcaaacggcggcagcgaaaatctgcggtttatcggtggttgccgtccacaagtggtacgccaaaggccgattgccgcgaaccgaatacacaaaaaaaacggattacgcccagcgacttgctgcggcatccaaaggcaagttcagcgccgaatggttgcttcacgaagccaatccagacagctga

SEQ ID NO: 433520 - DNA, 774 bp, Serratia marcescens
atggttaaaaaagatgaactgaaagagaaattcacagaacgcttgcgcgctgcttgtcttgaagctggcgtaggtggacgtgggcttccaaaacgaatgaaagacgccctagctaaacaggggatttccataactgagccggggatctggaagtggatgaatgctgccgcaatccctgactccgtaaacattcttgcattgagccgttggcttcatgttcgcccggagtggcttgaatatggacgcggggagatgaaagagaatgcccaaggcaaagccgaccctgaagcaaacattccacccgaggaagaatgggaaagcgttgacgcctgggatagtagtacccctctccctacggatgaggtggaagtgccgtttttgcgagatattgaactcgccgctggggacggaagttataacgaagaagactataacgggtttaaattgagattctccaaagccacgctgcgccggataggcgcaagaacagatggtaccggagtgctctgcttccctgcgcgcggtaacagcatggagccaaacattccagacggttccaccgtcgcggtaaacactgacgataagcaaatagtggatggtaagatctacgcaataaaccaggacggctggaagcggttgaaaatactttaccgtgtcggccctaaccgcataagcatcagaagctttaacgatgcggagcaccctgccgaagaggtagatctggacaaaattgaagtcataggccgcctcttctggacatcaaccatctggtaa

SEQ ID NO: 433521 - DNA, 159 bp, Serratia marcescens
atgaacactactcacgatatgggcaacaacgaaacagtaaagaccggcgttttcccaaacggcgacggcacgtttaccgcgatgacgttcaccaaaagccgggattttaaaaccgcagcaggcgcgcaacgctggtttgctcgccagatggccgactaa

SEQ ID NO: 433522 - DNA, 444 bp, Serratia marcescens
atgatggcagctaaaaccaaatacttcgcaatcgacgcaaacggcgcacgccacacccgcaccacagcacgcacctacacgcatatggtggttgtttgtcacaacctggagaaaagccgccagggggcatcatccaaagaggccaaggcgagccacgctcgcaactatgactaccacgcccgcgaggcaggccctaaccctcagttccgtcactcacctgagcacatggccgagcacaagcgaatcgcagccatggaccgcgatcactacgttgagatctgcgtgctggccgacattgagcgcatcaacaaggcaggcaagggcgaatacgccgaccagtggcacgatttcggatggtgcggtcgcctggatctggcgcagaagctggccgcgaagtgggcacactacggcaaggttgagattctggaagcccaggccgaataa

SEQ ID NO: 433523 - DNA, 213 bp, Serratia marcescens
atgcaaaccaataaccagcgctgcgaacactgcggccagacccgcgacgtagcaaaacaagctgtgagcattcagcgctatgaagacggcagatataagtccgtgagaatgctcgtctgcgccgatacctgcgcgccggtgtacgtcgtccgccagaacatcagaactttgcagcgccgtcttcacactcagcagcggaggccaacatggtaa

SEQ ID NO: 433524 - DNA, 144 bp, Serratia marcescens
atggtaagcctcaacgcccgtattcagcacaagtacgacctgaccgggggcgatttcgcccctaaacgccaccacggcaaacacctcttctaccttctcatttttaccctgtgcctgctgactgccggcgcggtctggagttaa

SEQ ID NO: 433525 - DNA, 786 bp, Serratia marcescens
atggctaaaaactcaacggaggcctacggcgccagcggtaaaaccaacgtgctgatgttcgagccggaaaatctgcacctggtatccgataaagcgcacccgctttacgacgaacgcatccatctgcctctccatgaaccaacggtgcttagcatcatgaagttgggggtgattgagccgatcgttatctggaaagacccagagacaggccgctcctgcgtcgttgaaggtcgccagcgggttaaaaacaccctcgaagccaataaacgcctgctggaagaaggcaaaaaacctcttctggtgccagcagtggtcagacgcggatcgccgtttagcgttgctgaggtgatgattagtgcaaatgaaatctttcaggcagacacgccgcttggacgagctaaaaaaatggctgatgcgcttacgcggggccacgacgaaaaagatttagcgctgatgtttggcgtcggtgtgcagacgatccgcgccacactcgccctactcgatgccactcaggccgtgaaagatgcggttgaatctggcgacattaccgttacccaggcgcgccagctggcgaacctcacgcccgacgaacagcgcgaaaaagtgaaagaggttgaagcggcaaccgccggcaccaaaggccacgaaaaggcacggcgtcagcgccaggtgattggcgatgccaaaccccgcatgaagtccagaaaagaaatcacgaaagccctggaaggtgcgagcggtgattacgctcaggcgctccgctgggtgctgggagacgaagcatga

SEQ ID NO: 433526 - DNA, 633 bp, Serratia marcescens
atgaaagagcgcccagtgattttcaacggcgagatggttcgcgccattctcgacggccgcaagacccagacgcggcggattgctaaagctgacaactccaatcacttgcttggctgcccattcggccaggtaggcgatcggctgtgggtcagagaggcatatcaaggcccgttgttcaacttcgaccagatggagacttatctcgaagacacctccaaattttatcgcccggaattctgcgagtaccgcgctgatggcggcaggacgccggaatattacgacgctgacgataacctgcgccatggctggaagccatcaatccacatgccgcgctgggccagcagaatcacgctggaaattaccgccgtgcgcgttgaacgcctgaacgatatcagcgaagaggatgccaaggctgagggtgttcgagcgatcgaaaacaacttcggcaatggccctgcctattgcgattacttgctgcctaatttggatgacgctgctgagtggtacaaccgcgcaagcgacagctttaaaagtctgtggaagtccatctacggcgaagaaagctggggcgctaacccctgggtctgggttatcgagtttcgtcgtgtggaggtgcgtgatgccagcaaatga

SEQ ID NO: 433527 - DNA, 525 bp, Serratia marcescens
atgggaacgtgcagctgcagcaccgttgcagtcttccaactgggtggcaagtcctctgcttgtcgtgtggcgctagaggcccgaatggagatcatgacgatgcagcagaccgttggaatcatcgctccggtgacagcgctagggaggtggagcgtggctaagctgactaaggcgcagcgcgcagaattgcgggagaagttcggcggccggtgcgcgtactgtgggtgtgagcttggtgataaatggcatgctgaccacgttcatccggtaatccgttttgacgggaagatgctgcacctggagcgtgacgagataggaaatctttttccggcctgccatccatgcaacctgcataaacactgcaatagcctcgatgattaccgccgaattatcgatgacgggcgtcgtgaatttctccgctcaggtaaaggtaaggcactcgttcgcatgggactggttgaaatgaagtctgacccggttgttttttggtttgagcgggccgaggcccaggagaaagcattatga

SEQ ID NO: 433528 - DNA, 276 bp, Serratia marcescens
atgagcaagctgacaaagattttcgttaccaaatacgcgctgagcgcggggccattttctgtgatggcagaaatcaaagatgaaggcagcatggcttcgtggaaaggcccaggctactggaattacgcacacgggaaagaattctggctcaccgaagaagaggcgctggccgactgccagcggcgccgagaagctaagctggcatctatcgacaagcaagccaaaaaactgcaggcgatgacgttcacgatcaaggagctggcagatggacaataa

SEQ ID NO: 433529 - DNA, 309 bp, Serratia marcescens
atggacaataagctgagcgaactgaagcgcctgacgcctcgacagattgcagtttaccgcgaccgagtcgccatatctgacagcgattacgaactgatacctgtacacaccggcgacctgcgcgccctgctggcagagctggaagcgaagctggcgcggtttggtgatgttcgtcagcactatctggctggttacgatgacggccattctcgcggcctcaatgccggaaggctctacaaagaggacaccggcatggttatgcatcggcatgccagtgctaacgcatatgccgtagaaggggatgagtag

SEQ ID NO: 433530 - DNA, 747 bp, Serratia marcescens
atgacactaacgactgagcagttgagagcgcgcgcagcagcatatcgcagagatgcagagaccctggccgaacttggtgacacagcaagttctcaacggttgaatgagtctgctaacgcatttgacgagctggcggctaaccgggaggcgcagccggtggcgatagtggagagcagtgattacgtcacagcagcccaaatcgcaggcgatgaaccacgcagtaaggcggtgaaagaattgtacgaaggtgcgctggttatcgggcagcacctctataccaccccgccagcgctaccggttcaacactgggaggatctatgtcgccagaacccaaatatgagcattggtgacgctattatcagagccgcgtggtggaatcactgccgcgccgagctgctgaaaagcgccaccccgccagagtcagcgccagccaacgcgcaagctgtagcctgggaaatgcgctactggagcgacggttacaacatctggggagactgggagcgcatcacagcagaacagcacgcagagatgagcgtgaagtactcagcggacaacgattacgagtttcgtgtgctgtacgatgcaccgtcagcgccagcagtgccggaggaggctacgactaagaatgttgagagattggcacattcccacctggacacatatcagcttgacgaggatgaggcaaaccttgctgccgacatctggaacgcctgccgcgccgcaatgctgaaaggagaacgaccatga

SEQ ID NO: 433531 - DNA, 327 bp, Serratia marcescens
atgcgatgcgttcctgtcctgctggccgtgctgctgaccgcgtgcggccagcagccggccgaagacctggccgcgaccttggccgccgaccccgtgcggctcaaggcgctgcgcgcccaatgcgcaaccgaccggcaagccgcaggcgaagacgcctgccgcgccgccgccgaagccttccggcggcggttctttgccggccaaaccgggccggacgaataccggacgctggccgaactgccgccgattccgcccagcttcgacacgcccgacgacgacgcgcaggaaggtgacgcgccgccggccgcgccggaggacacgccatga

SEQ ID NO: 433532 - DNA, 1032 bp, Serratia marcescens
atggaacttcgacatctgcgttgcttcctggcggtggccgaagaactccactttgcccgtgccgccgagaagctgcatattgaacagtcgccgctatcgcgcgccatcaaggaactggaagaagagttaggagagcagctttttgtccgcaccagtcgcagcactcgactgactcgggccggcaagctgttcttggatcacgtgccccgtgttttccttgccatacagcaggcccgcgacagtgtgaaggctgccgccaacggcttccatagccaactgcgtatcgccctttccgacggcattacaccgtcgcggctgccagcactgcttgcactctgccgccaagaagaacccgaagtcgatttgcgattctttgaagtcccgctgtcccaacaaatcaaaggacttcatgacgacttgtacgacgtgggttttgcccggtcagatgaagtcggggaaggcattgccgctttggccgtatggaacgatcccatgatggtggccgtaccggcacgacatactttattggcccacaagcgcattccgttggaagaagtgctgcgctaccccctcgtcctctgcgacccgcaggcttgcgaaggtcacgcgcgacaagtggagcgagtgctacgccgcgtggacatggaaccgttggtagtggagcgggtggcgtcctgcgatttgatgatggcgcttgtttccgctggtttcgggctcgggttgacgggctatgcgcatatagcggccagccgcgaacagggcgttgtcgcacgaccgctggcgggccgctcgccgatgctgacgacatatttgctgcgcctggagggcgagccttcagacgcgctgacccatttcatcgagcgcgtacaggcgatcgaatcccctgaggctaaccgtcccgcgccgaatatcgaccctgacccccggaggaacccaagccatgacaaagacgactccgctcctgctggccgtgctgctgtcggcctgcggcccatccgaggccccgaagcagaaggacattccaaccgttga

SEQ ID NO: 433533 - DNA, 1464 bp, Serratia marcescens; identical to SEQ ID NO: 352509

SEQ ID NO: 433534 - DNA, 3153 bp, Serratia marcescens
atgtcaagattttttattaaccgacccaactttgcctgggtgattgcgatcttcatcaccctggccgggctgttggccatcccgtcgctgccggtggcccagtaccccaacgtcgctccgccccagatttcgatctgggccacctatcccggcgcctcggcctcgacggtggtggattccgtcaccagcgtgatcgaggaagaactcaacggcgccaaggggctgctgtactacgactcgtcgaacagctccaccggtatcgccgaactcaccgtcaccttcgcccccggcgtcgatccgaacatggcgcaggtcgatgtgcagaaccggctgaagaaagcggaagcgcgtctgccccggtcggtgctgacgcagggcatccaggtcgaacaggcgacctccaactttctgatgatctacgccctgaagtacaagggcgacgatgccggcaaggatgcggtgcgcctgtccgattacgccgcgcgcaacatcaacaacgagatccgtcgcgtccccggcgtgggcaaggtgatgtatttcggtaccgaagcggcgatgcgggtgtgggtcgatccacagaaactgctgggctacggcctgtccgtggccgatgtgaatgccgccatcaccgctcagaacgtgcaggttccggccggcagcttcggcgcgcgtcccggcaacgccgaccaggaactgagcgcgaccatcgcggtcaagggcatgctctccagcccggaggaattcggccgcatcgttctgcgcgccgacggcgaaggcgcgaccgtcaagctctcggacgtggcgcgcatcgaggtcggattgcaggaatacaacttcgacgccctcaacagcggcaagcaggcggtggccgcggccgtccagctcagcccaggggccaacgccttgcagacggccgaagccgtcaaggcccgcctggcggaactctcggcgggattccccgacgacatcgaatacacggttccctacgacacctcgcgtttcgtggacgtcgccatcaacaaggtcgtccacacgctgatcgaggccgtggtgctggtgttcctggtgatgttcctgttcttgcagaacttccgctacacgctggtgccgaccatcgtggtgccggtgtgtctggcgggcacgctggcggtgatgcacgtcctgggcttctcggtcaacatgatgaccatgttcggcatggtgctggccatcggcatcctggtggacgacgccatcgtggtggtcgaaaacgtcgagcggctcatggccgaggaaggtctgtctccacgcgaggccaccatcaaggccatgggccaggtatcgggggccatcgtgggcatcacgctggtcctggccgccgtgttcttccccctcgccttcatgagcggctccgtcggcgtcatctacaagcagttctcgctgtcgctggcggtgtcgatccttttctccggcttcctggcactgaccttcacgccggccttgtgcgcgacgctgctcaagccgatccccaagggacaccatgccgagaaaaaaggcttcttcggctggttcaaccgttccttcgagcgcctgacccagcgcttcacgctgctgaactcgcaactggtgcgccgcagcggccgcaccatggttctctacgggctgctggtggccgtgctcgcgttcacctacacccgtctgcccgaagcgttcgtgccggtcgaggatcagggctactacatcgtggacgtgcagctcccgccaggcgcgagtcatgcacgcacgtccgcgacggtcaaagagatcgacaagtacctgctcgatcgcaagccgacgaacaacagcctcatgatcatgggctacagcttctcaggagccgggcagaacgccgcgctgggctttccgacgctcaatgactggtccgagcgcggcaaaggcgaatcggcttccgatgaagtcaatgccttcaatgcccatttcgggagctatggcgatggcacggtgatggccgtgaacccgcccccggtggagggcctgggcaacgccagcggcttcgtgctgcgcctgcaagatcgcggcggcctgggccgtgacgccctggtcgcggcgcgcaaccaactgctggagcaggccaacagttccccggttctcgcctacgccgtcatggaggggctggaagatgggccgcagttgcggctgaacatcgaccgcgagaaggcgctggcgctgggggtcggcttcgattcgatcaacactgccatctccagcgcgtatggatcggccacggtcaacgatttcgccaacaccggacgcatgcagcgcgtggtggtacaggccgatggtgccaagcgcatgacgcccgaaagcgttctccagctctacgtgcccaacgccaagggcggccaggtgcccctgagcgccttcgccagcgccgcctgggaaatcgcgcccgtgcaagtctcgcgctacaacggataccccgccttcaagatttccggcgatgccgccccgggccacagcaccggccaggccatggtcgaactcgaacgcatcatgaaggaattgccaagcggcatcggctacgaatggagtggcctgtcctatcaggaaaaggccgccggcgcgcaggcaccaatgctgttcacgctcgcgatcctggtggtgttcctgctgctcgtggcgctctatgagagctgggccattcccgcttcggtgatgctgatcgtgccgatcggcgccctgggatcggtgctggcggtgacggccctgggtatgtccaatgacgtgtacttcaaggtcgggctggtgacgatcatcggcctggccgcgaagaacgccatcctgatcgtggagttcgccaagagcctgcacgaacagggtcgatcgctggccgaagcggccatcgaagcggcgcgtctgcgattccggcccatcttgatgacctcgctggccttcacgctcggcgtcgtgccgctggccttggcgaccggggccggtgcagccagccagcatgcgatcggcatcgcggtgatcggcggcatggtgatggcaacgctcggtgtggttttcgtccccgtgtttttcgtccgggtcctgtcgttgttccgccgccgcaaggaggccagcgaaggaacagcacctcgccagcaatcgctcgaaggaggcgaggcatga

SEQ ID NO: 433535 - DNA, 1179 bp, Serratia marcescens; identical to SEQ ID NO: 352507

SEQ ID NO: 433536 - DNA, 591 bp, Serratia marcescens
atgacgactacctggaatgagaccggaaatgacaggctcttggcatcgctggcgctcgcgcttgtcgatcagccgagggcatcccttcaagaacttgccaaagccgtcggcataggcaaatccacgcttcatcgtttttgcagcacgcgggacgaactggttgagcggatggcgcagcacggcgcgtatcgccttatcgaagcggcaaaagcagccaaattggatcaggactcgccgctggaagcgttcaagcggttgaacacgacccactttgagcagcgcgaactcgcgacgttcctcctttaccactggaaggccgccgaggcgcacgaccccgagcgacagtgggagtcgtcattggatgcgtttttcctgcgaggacaacagcagggcgtctttcgcatcgacattgccgctcattcattgaccgaggcatgggcctccttgatgattggccttatcgaagcggagcggcatggccgaattgcccgtttgggcttgcctgcccttgtagagacattgtttcttcatggagcgtttgttcccccgccgtcctctgccgtggcggcatcacaccagacgacggcctaa

SEQ ID NO: 433537 - DNA, 321 bp, Serratia marcescens
atgagttggttgtatctgataagtgccgggctttttgagatcggctggcccgtgggcctcaagatggcgcagaatccgggaacgcggctgacgggcattgccgtggcggtcatgttcatgggcatcagcggagtcctgctgtggctggcgcagaagaatatccccatcggcactgcctatgccgtctggaccagcatcggggcggtcggcacctttgccgtaggcattctgttctacggcgatgcaacctcgcttgcacgctacctcggcgtcgcgctgatcatcgccggcgtggtgacgctcaagctcgcttcccactaa

SEQ ID NO: 433538 - DNA, 144 bp, Serratia marcescens; identical to SEQ ID NO: 352505

SEQ ID NO: 433539 - DNA, 192 bp, Serratia marcescens; identical to SEQ ID NO: 352504

SEQ ID NO: 433540 - DNA, 1272 bp, Serratia marcescens; identical to SEQ ID NO: 352503

SEQ ID NO: 433541 - DNA, 609 bp, Serratia marcescens; identical to SEQ ID NO: 352502

SEQ ID NO: 433542 - DNA, 264 bp, Serratia marcescens; identical to SEQ ID NO: 352501

SEQ ID NO: 433543 - DNA, 1131 bp, Serratia marcescens; identical to SEQ ID NO: 349104

SEQ ID NO: 433544 - DNA, 1683 bp, Serratia marcescens
atgaactcgaaaaaatgcctcgcatccctgattgattctttgggggagcatgccaacatccgagaaaccatcgggcaaatcgacatttccgggcatgtctctcctgaaaaatcggacgatttcaagcaggccttcaaagatttctcggaaaagaaatctgaggcttggtcgatttctatccgtgatggcgaattttccgagatctccacagatgccattgcgaatgaggatgtcacccttgtaatcaagaagccaataggaggcaggattttctttgcgtcactagcaggattctcggcagccttggaagacaaggcgctgacattggctagcgagctattggtgccaagttcttttaatggattcaaaaccagaggattttctgtcctgccttgggatggtgaacctttgcctggcttgccgtgcttggagcctgattcagatgcaatcgaccctagaaaaggcgtagtacgagacttgaccggcaacactgttccggcagacccctatcgttggatactagtaggtcatgacggcggcggcgagccgtggaatatatggaagactctggcaactaaaaatctggcaacactacttgtttcggatgtctggaaagaagatacaacgaaagtatccatcaatggcgcgagaaagcgcactttctcactcggagaaaaatgccaggatagcaacgcttactcgaaaatatgccaagctgccgattggatacttgtaaagcaggacacggaagcccggcatgaagttcttgtgcgacgtctttcttcgattgtcagagactccgactccaatggagtcgcggagtggctaaccgtattgcctgaatctctgcaagaagcccttgatggggctcggcttgatcatcgcgcctatgtgagatcaaagtcagcagaaacggtaaaagctatggccgacctcagaaaggcggttggagaagatgtttcgcgtatcgtagagcgcattcatagactttctgcaggttttgtgattggtctggctgcactggcaacggggctaggtgtccgccttacattgctgacctctcagaagaacacctgggcagttgctgggataattttctgctgcgtcgtactagcgattacatgggcaagcattgttcttcagcatcatgttagctctaaatcattggtaaatgagttgcgcaacatgaggcgttggcataaaaacattcacatagcactaacccggtcggactatcgagagttggcattacatccggtgcttgatgccattcgcctatataagaaaacagcgaagtccaccattaatggaatgattgccgcttcatttgtttttattgccctttttattattaccccttttttctactcggcagaacctgttggcgccaatgataaaaatagggagtcgcaatcattacttaattctgatattgaagagtcggctttaaaagttagccctacccagagagagggcagaaatttggaagtagctccccctacagggcaagagtcaaattcagaagacgacaaagccgtacaagatacgagcattcttgatgataagcagagcagctcttcccaagatgtatttgaggccggagaaaagggccgaagccccgaaaattatattagccctcgctcggcgaacgacaccgttcctacacccgctacgatcatgtga

SEQ ID NO: 433545 - DNA, 510 bp, Serratia marcescens
atgtcgcaactgtccttttcctcgttcgataacgctttgctggtgcgtgacgcccaagggcgctacctcccggcatcggtggatcaaattcttgaagctgcacgccaggccatcgagctgaagatgcagcgcggtgctgagttcacttccccggcgctggtcaaagaatacctgcacaacaagctggcaggtttcgagcatgaagtctttgcggtgctgtttctggatgcacgccatcggctgatcgagtaccgggagatgttccacggcaccatcgacagtgcatcggtgtatccgcgtgaagtggtcaaggaggcgttgcggctcaatgctgcggcggtcatcctctcgcacaaccatccgagcggaaatcctgagccaagcaatgccgaccaggtgctgacacagcgactcaaggaagcgctggggctggtggaggtacgcacgttggatcacatgatcgtagcgggtgtaggaacggtgtcgttcgccgagcgagggctaatataa

SEQ ID NO: 433546 - DNA, 696 bp, Serratia marcescens; identical to SEQ ID NO: 349102

SEQ ID NO: 433547 - DNA, 321 bp, Serratia marcescens
atgagtcgcaaagatacccctcaaggcaccgacaacgtgctgctggatctcggtttcgacgatgcggaagaattgtcggcgaaggccgcgctcgcgctcaaactcaacgaactaattgaccagcgcgacctgagccagaccgaagccgcccacatcaccggcatgacccagcccaaggtgtcccaggttcgccgctacaagctccagaacatttcgctggagcgcttgatgcaggcgctggtgtcgctggatcagcatgtggaaatcgtggtgcagccggcccgtcacgagtacgcgccaggcattacggtcgcggcctga

SEQ ID NO: 433548 - DNA, 366 bp, Serratia marcescens
atgatagagaaacgcaagctcctgtactgggaaggctcatcgaagaaggacttcaaggagtttcccgtccccgtgcagaaggacatgggcgtgtcattgttcgtcgtccagttgggcggcacgccggactcggccaagccctggaagggactcggttctggggtgtacgaattggtggaagaccatcggggcgacaccttccgtgcggtttacacagtgaagatcggggacgcggtgcatgtgctgcatgcgttccagaagaagtccaagtccggcatcgctacgccgcagccggatgtggagttgatcgagaagcggttgaaggcagtgctcgcccgctacgcagcgaacaggagaacattatga

SEQ ID NO: 433549 - DNA, 1200 bp, Serratia marcescens
atggcgaagatcaagctcaccaagtccgcagtcgatgcggcacaacctcaagacaaggccatcgaactgcgggataccgtggtgcccggcttcctgtgcaagatcaccccggcgggccgcaaggtgttcatgctccagtaccgcacgaacgcgggcgagcgccgtaagcccgccctgggccaatacggggaattgaccgtcgatcaggcacgcacaatggcgcaggagtggctggccgaggtgcgcaaaggtggcgacccaagcgcggccaagaacgccgcccgcaaggcaccgactatgaaggagttttgccacaccttcatggaggactactccaagcagcgcaacaagcccagcacgcagcgcggctaccagggagtcattgaccgttgcatcatcccgatcatgggccggatgaaggtgcaggacgtaaagcgcccggacgtggccacgctgatgaagaagctggcctacaagcaggccgaggcgaaccgcaccttcggcgtgctgcgcaagatgttcaacctggccgaagtatgggggctgcgccctgatgggacgaacccatgccgccacgtcccgatgtacccacccggcaaggaaacccggctcatcgtggacgatgaactggtgcggatcttccgccagttggagtcgctggaggcggaaggactggagaactacgtcatcccgctggcgattcgcctgcaattcgagttcgctgcccgccgctccgaaatctgcccgctggagtgggactggattgatctggaaaagcgccgcgtcgtctggcccgacagcaagaccggcggcatttccaagcccatgagtgaggaagcctatcggctactgtccacagcgccgcgccgggaaggttgcccctatgtcctgccgtcgccgaatgacccgacccggcacatgacccacggcgaacactatggcggctggacgcgtgtgctcaaggccgctggtgtaccgcacgtcggcacgcatggcatccgccaccgtgcgacaaccgacattgccaattcgggcgtgccgaccaaggtgggcatgaagctgacgggccacaagaccgtggcgatgttcatgcactacgtccacaccgaggacaagccggtgcgtgatgcggccgaactggtggcgaatcggcggctggcgattacgggtgcgcgccgcacggaggaaatggcgatatga

SEQ ID NO: 433550 - DNA, 1023 bp, Serratia marcescens
atgctagatgaaagagatgtgcttggtccggttcctaatcgtatacgtataggcattcctattgttaatgagcggttatttccgtttggttcggaaaaaattgaatattttgatggtgctataagagatcaattttctccctcgcataactatatagcttacgtgccgaaaggagtagtaaggaatcatgggaaacctttatattttcattatactaagcttgatagtttcaagaatatattaagctctggggctttctgggcatcggagttgggtaaaatgaacgatgcccaggaagtaacctacgctaaagatagacttattgaccaattatctaacattatgcaaaaacaaagtgtgccgttagagatgagaaggcgtttggtaggggaggtaaataaattctttatggatgaggtttgtcaagggttatattgtgtttcgttaagtaaaagaggaaatttacttagtcagtgggttaagtactctcaagaagagggtgtttccttcgcattgaatacgcagttgatagacgccattcctaatcactataaaggggctaaatgtataggtgttatctatggcatgaaagaacagcaagttatcttgcaggatcttgctagtagactgttttccagtttgatgagggtctcaagtgttcaaaacgtgcgtgagctattaattaacgaatataaggaagagctaagctatatagtatgtgccataaaaaacccgtcctttgcagaggaggatgagttaagaattataattcctcgcgatagcaacgagaaatctgtaagagttcgaccagagggaggtggcacatacttagaattgaattttattaaggtttataatagagccccagttatagatttacttatagagtatgctttttctgcaccaactagagacgaaaagaaagctttaaataagatatataaaatcctgtcatataagaaaatcaaattcggatttcttgtcggttcaggttcttcttacatttggcccggtacaagatag

SEQ ID NO: 433551 - DNA, 288 bp, Serratia marcescens
atgaaattgattttgagattataccatgaattacattcgagaatcgaacggcatctggtagcacaggttaaagccgccggcggcaccgcttataagttgacgtcgtccgggcgtcgcaatgtgccagaccgcctggtgctgctactgggtgggcgcgtggtgtttgtcgagtgcaaagcgccgagtgcacagccacagctcgatcaggtgcgcgagcacaacaggcttcgcgcgctgggctgcgaggtggtgattttggacagtaaaaatctggaggggagattgtga

SEQ ID NO: 433552 - DNA, 711 bp, Serratia marcescens
atgtttgaagctgcaatagatgatcttcgttctagggctaaaaatgcaaagactatgtctagaattgttttcattatttttgtttttttgtctggctccgcattcttaattgtttttagcaatgtcattgctagtactaatattatgccttcagtggcgaatgaagttagtaaaacattgaggaatatatcagatgcctctgaaaaaattgctagcaatataatcccttcgaagtcattttatagtgacatagaatcatcgcaaatagaaacctctaatcaagaaggtgaaaccaatagcgataaggctagggagccatacagaaagggggcgcatggcacattggatggaacgtcgttagggggacttggggctttgggagctgcagcagctctttgggatgattacatcgactattcaaaaggtaaggctgttacaggttcaatagtgactgttatctactccatgctttctacatttattttgatttatctgatgcaagttactcttacctttacgcgatactatgcacagctggccgaactctatgagtctcaagcatttgcgttgattgctgctaatggcgatatttctgttgccgtagaaataatcaagaacttttcgtctagagatattcctctggggaaatttcccgtaagtatgtatgagaaactgcttgagattgcaacaaggtctgctgataagaaataa

SEQ ID NO: 433553 - DNA, 741 bp, Serratia marcescens
atggcgctcaaatatccatacccaactgattctttcccgcagttcttagttgaatgtggtttcaacattactgatatagaaaccaaagctggtcatagttgtttcaggttaagcaacggggccgtcgtaagtttttatcaaacaggcactattctggttcagggggtgccacaagcaaaattagaagtagaaactgtgatcaacgaaagattgggtattgcgccttctcagcagcccattacccccacccacatggagtcgccgaaaaagattttcatcgttcatggccatgatcatgcagcgaaagagcaacttgaacttatactgcataaacttggacttcctgaccatttcattctgcaaaataccggtggcacggggctcactattattgaagagcttgaacgcgagatcggccaaggtcagagagaaactcgcttcggtatcgttctgcttacgcctgatgatatgggctactcaaaacgagacggtgaaacaaatgtgcaagctcgcgcacgtcaaaatgtcgtgctcgaaatggggatgctattatcctctcttggtcgaagcaaagtggtgattttgcaaaagcaacatcttgaacaaccttcagatgcaaacggtatactgtatcttaattttaacgaccatgtgcgtgaaacagttcccagattaattcaaagattacgacaagcaggattcacatttagtgaaatgcaagtagccagtgcatcgtcctga

SEQ ID NO: 433554 - DNA, 147 bp, Serratia marcescens
atggagttggggctggggttcggcggcggcgtggcggcattcgtgacgttcgcgctggtctacgggcttgacctcgaagatctggccgatgccgcgctgccgaacatcccgatcgccatacagcgagaggcgcagagttggtggtag

SEQ ID NO: 433555 - DNA, 627 bp, Serratia marcescens
atgcgtcaggccgttgccgttctcatgccccttgccggcattgacgccggccgagacgctgatgccataaccgccagagcctgcgccgatgccgacaccgacgttgccgcctttgctgctgtttttgccgacggtgctttcgcggttctgcgccgactgcagggtaatgtcccgcgccgcatcgagcgacagatctttgcccgctttcagctggctgccggtgacgacgatatcgccactttgcgcgttgtggttcttgccgctcgccgttatcgacaggttttgcccggcggtgagcgtgctgccctgcgtctggcggctgtcggtgcgggtttcgcttttcgacgattggctgccgtaggaggcgctgatgcccactgtgttggtggcgccctgcgccgcaccttcgtctcccggctgcaagccggcagcggcgtttttcgcctccgccgaggcggtcagcgcattatcccgctcccaggcttgtgcagcctgcacgccggacagcgccgccttggtgttttgcagcgcgttcaggcgcccatcgccttcttttcgcgcctgctgcgccgagctgacggcggtgttgagcgcgccgcccacggtgcccgacaatgccacgcttag

SEQ ID NO: 433556 - DNA, 957 bp, Serratia marcescens; identical to SEQ ID NO: 432837

SEQ ID NO: 433557 - DNA, 1206 bp, Serratia marcescens
atgactcaatacgcttccccgattttgacatcactgcttgataccgatgcttataagcttcatatgcagcaagcagtgttccatcgctatcccgcgatcagcgtggcggcggaattccgctgccgcggcgacgaactgctgggcgaatatgccgacgagatccgcgcgcaggtggcgttgatgagccggctggcgctgaccgacgccgaattcgcttatctttcgggcctgcccttcttccgtcaggattacctgagctggctgcgaacgttccgctacgatccgcagcaggtcaccatagacaaccgcgacggcaagctgcaaatccgcatcgcaggcccctggcgtgaagtgatcatgtgggaagtgccgttgctggcggtgatcagtgaagtggtgcaccgtcggcgctctccgctggcgacgccggaacaggcggtggcgcatctgcaaaccaagctggctcagttcaagacgctggcgggcgatctggatctttcgcgcttcaagctgatggacttcggcacccgtcgccgtttctctcaaggcgtgcaacaggccatcgtcagcaccttgcaggccgaattcccgtacctgtcgggcaccagcaattacgatctggcgcatcagctcggcctggcgccggtcggcactcaggcgcatgagtggttccaggcgcatcagcaaataagcccggtgctggccaacagccagcgcgccgccttgcaagcctggttggatgaatacccggatcagcttggcatcgcgctcaccgactgtatcaccatggatgccttcctgcgcgacttcggcccgcagttcgccgaacgttatcaggggctgcgccacgattctggcgatcccgtcgagtggggtgaaaaggccattgcccattatcaaaagctgggcatcgatccgatgagcaaaacgctggtgttctcggacaacctggatctggaaaaagcgctggcgctctatcgccatttctaccagcgcatcaatctcggcttcggcatcggcacgcgcctgacctgcgatattcccggcgtcaaaccgctgaatatcgtgatcaagctggtcgagtgcaaaggcaagccggtggccaagctctccgacagccccggcaaaaccatttgccaggatcaggcgttcgtcagggccctgcgcaaggccttcgatctgccgctggtgaagaaagccagctga

SEQ ID NO: 433558 - DNA, 186 bp, Serratia marcescens
atgaaaattaaatacgcaatctatttttttaccctgtgcctgatgacttccttctctctgttcatcgtcgatgagctgctcgaagcccataccgactaccgcgcaatctgtacaaaattgatcgcgccaaagaaatctccgaagcctttcaggctgccttgcaggcgcaccgcctcaaacgcttga

SEQ ID NO: 433559 - DNA, 324 bp, Serratia marcescens
atgcggccagtcggtgaacgccggaacctgaagctccactgtaaattctggaaactgcaggagttgggtttctcgtactgggagctggattggacgttcgttagcgatccggataagtggagcgcgcatgagatggcgaagacgctggccaaactggaggcagagagaaaacggattgcggctcaggcagagcgtgaccaggcgttagccaacgggcagcgtttcaatgatgctcatgcacaagcgcagaccggtcagatggagaacgtatcggctgaaatcaacgccttgaacgagcaaatgctgcagactattcaggagtaa

SEQ ID NO: 433560 - DNA, 819 bp, Serratia marcescens
atggcattaatttatcattactgtaacccacagacctttttgcaaatcatagaaaggaaatgtatctggttgtcttcaaccaataacatgaatgattttgctgagggtgagtggtttattagtgcagtgaagaaaatgctcgaaagtaaacaagatgagtatggtaatgaatggtgcaatacagtatgggttcagtttttatctaatattgggccgaaatatatcacctgtttttccaaaaatagtgactcccttagccaatggagggcatatgcacaagatggtgagggagtagctataggatttgaggatagtgctttgggcgctgagggagatagtatacatactaatgtttccccaaaaatgagcttgtgtttaaaggatgtaaaatattcgagtgctcaagaaatttttaatgagcttacaagtactgcagagttagtcagaagttcagataccaaggaattatctaatagtgcattcacattttccgcgatttgctcttccttagcaatgctcactaaaaacccggcatttaaagaagaaaatgaaaggcgactagtttattctgctttagtgatggtgagacagatcgatggctctgtcgaggttatgaatgcattaagtaatattagacatagaatatctgatggttatttgacctcatattttgagttggaattttctccggctgatgaaattaaagaaatcgttctcgggccgaagaataaatttcataatacagatatatcgaattttttaggaatcaactcactcggacatgtgaagtttagacgttcttccgctacctatcggtaa

SEQ ID NO: 433561 - DNA, 1773 bp, Serratia marcescens
atggcagatttagcatctcaacctacaccgatacagtctgtatactcttggttcgcagacgataaattactggttaataggcgatatcaaagaaaattagtttggactaccgaagaaaaacaaaaattaatagaatcaattataaaaaaatacccaattccagcaattttattagccgaaagagaaggacaccctgggacatttgagattattgatggattgcaaagacttcatgcaataatgtcatttatagaaacaggctacaaaacaactgatggtaaaaactttgatttatctcagttcccaactgcaaatatgagagcgcaatcaggtgtatttcaagccagtacagaacatccactgatagaaggggttgaagttagaaacctattggactataccctagccgtatcaattatgcggaatgctacggagagagaaattaacgatgtatttgatagaataaatacttatggacatcgtttaagcgaccaagaaagaagacaatctggtgtgcagaataaattttcaacacttgtaagagaaataagctgcactgtcagaggagacgtttcccgtgcaatactacctctagatgaaatgccttcaataagtatcgatctaccactaatgaaacatgggtatgacgtgcaagctgaaaatgttttttgggtaagtcatggggtactcagatcgactgatttgagagatagcatggatgaacagagcatagctgacattgcagcatgtataattggaggagatttaatagaccgttcaaaagatgctttagatagaatatataacgatgaagacggtgagtttcatagaattaacgcggctcttgatgcatatggagaaaagagatttagtgaagagttcttgtattgtatcgatcaaataactacgacatttgaaactggtggtcatacaaaactgagagatcatatttttagcaagaggacaacaaatcctttcccttcaatatttgctgtaattgtttttgcataccatgaattaataattaaagaaaataaaaaaataagcaattttgagatgctaaagcaaagtttaaaaaacatagcagataagattgacgcaggcagaggcgcagggatgagtgaagctagaagaaggaacattaaccttgtcaaaggtgcaataagagattcatttatagataatgataaagcgccaccaatatacaatagccactcgataatggatatcgaagggataattagaagatctgaggctgagttgccatcattcgaattaaaacaaggtgtattgagactgcacggtattagagagctagatgaaaccgttatgtccaaagtaatcaatacaatatgtgcaatggcgaacaatgggaaaagcaatggaattgcaggtaaaatattaattggtgttgctgatactgaagcacatgcagatagagttcaagaactagatgatattagaccggtgaaaatcggcggtagatatgtcgtcggcattactagagaaatgagaattttacagtatacaccagagcaatatgtttcaatgtggtcaacggctataaggaactcaacattaagtgaaccacttaagggaagtgttctaacaagcattgattatcatgactttcacggccttggtatcttgattattagcgttcctgagcaaaatgaaatttcatcaatcaatggtaaagtctactggcgtgatgtggaaagtactgaagaagcgacagggttgaaaatcgccgatatcgctaaaagattttag

SEQ ID NO: 433562 - DNA, 237 bp, Serratia marcescens
atgactcagacctatacggtggccgattatctgctcgatcgtctggcccaaatcggcatccgtcatttcttcggcgtgccgggggattacaacctgcaattcctcgatcacgtcctcgcccatccgcaaatcacctgggtaggctgcgccaacgaactgaacgccgcctacgccgccgacggctatgcgcgctgcaaaccggcggccgcgctgctcaccacctttggcgtcggctag

SEQ ID NO: 433563 - DNA, 870 bp, Serratia marcescens
atgcactattccccggaagcgctgcacgcgtttgtcgaagccgccgccctcggctcgttttccgccgccgcgcgcaagctgcgcaaaagccaatccaccatcagcaccgccatcgccaatctggaggccgacctggcattgacgctgttcgatcgcagcgcgcgccagccggtgctcaccgccgccggccgcaaagtgctggggcatgtgcaggcgatcctcgccgccagcgagcggctcgacgcgctgagcattcaactggcgggcgaggtcgaaccgcgcctgagcatggtgttctccgatacctatcaacccaagcatcacgatcaattgatgcaacaattcgaactgcgttacccggagattgagctggagtggatgatcgccgaagatggcgacgttattgatctgctgcaaagcggccgcgcgcatttgggcatggtggaagtgcaaaaaagctacccgccggatatcgccttctctcgtttgccggaacaaaccgacatggggctgttcgtcgcccaccagcatccgctggcgcaggccgccgcgccgacgccggagcagttgtccagcacccgacagctgatcctgaacacctacaccggcgccgaagcggccagacaaggcggcctggtttggtcggcgcccagctatctgctgctgctggagatggcggaacaggggttcggctgggcggtgttgccgcactggctggtgcaacaatacggccacaatatgctgaccgagctgcggccgcgcggctggccgaaaatgatctcggtggatgcggtatggtcaaaactgaccccgccgggcccggcggggttctgggtgctgaagcgcctgctgggcgattccctgccttaa

SEQ ID NO: 433564 - DNA, 1611 bp, Serratia marcescens
atggccactcctttgctcgctattcaggatctcagcatcgccttccgccagggcgacaccgtcacgccggtggtcaacgaactctcgctgcaaatcgcgccggcggaaacgctggcgctggtaggggaatccggctccggcaaaagcgtcaccgccctgtcgatactgcgcctgctgcccgcgccgccggtggtttaccctgccggcgacattctgttcaacggcgattcgttgctgcatgcgccggaagcggcgctgcgcaaggtgcgcggcaatcagatcgcgatgatctttcaggaaccgatggtgtcgcttaacccgctgcacaccatcgagaaacagctggcggaagtgctgatgctgcaccgcggcctgcggcgcgatgccgcgcgcgcggagatcgtcgagtgcctggagcgcgtcggcatccgccaggccaaaagccggctgcaggactatccgcatcagctgtccggcggcgaacgccagcgggtgatgatcgccatggcggtgttgacccgaccgaaactgctgatcgccgacgaacccaccaccgcgctcgacgtcactatccaggcgcagatcctgacgctgctgcaagaattgaaacgagagatggacatggggctgctgttcatcacccataacctgaatatcgtgcgccgcctggcggacaacgtggcggtgatgcgccaggggcgctgcgtggagcaaaacgcccgcgcgcggctgttcagccggccgcagcatccttacacgcagcagctgctggccgccgaagacgtcggtgaaccgctgccgttgcctgccgcggccaacgggcgccccggcgacgagcggccgctgctcaaggtggagaacctgcaggtgcgcttccccattcgccgcggcctgctgcgccgcacggtggattatcactatgcattgaaatcattgagtttcgagctgcgggccggggaaagcgtggggctggtgggggaatccggctcgggcaaaagcaccaccgggctggcgctgctgcgcctgttggcctcacaaggcgccatctggttcgacggcgaaccgctgcatccgctcacgatgaagcagatgctgccctaccgcagccggatgcaaatcgtcttccaggatccctattccgccctgaacccgcgccttaacgtgcagcaaatcatcgccgaggggctggaagtgcaccagcagcttagcgccgagcagcgggaacagcgcgtgatcgaggtgttgcaggaggtcggcctggatccgcagctgcgccaccgctatcccaccgagttttccggcgggcagcgccagcgtatcgccatcgcgcgcgcgctgatcctgcagccgcagctgctgatcctcgacgagccgacctcttcgctggataaatcggtgcaggcgcagatcctggcgctgctgaaatcgctgcagcaacgtcaccggctggcttatctgttcatcagccatgacctgcaggtggtgcgttcgctatgccaccaggtcatcgtgctgcgacagggagaagtggttgaacagggagactgccgggcgattttcgcggcgcccgccgccgactatacccgtcaactgctgcagttggcggattag

SEQ ID NO: 433565 - DNA, 720 bp, Serratia marcescens
atgtccgtgcgcattttcgctgctctggtgctctcggcactgagtttcggtctgcgggccgaagccctcaacgaaagctacgctttcgcccttctcggtgaaccgaaatacgccaccgacttcagccatttcgactacgtcaacccggcggcacccaaaggcggcgacgtgcggctggcggccatcggcacctacgacaacttcaaccgcttcgctacccgcggcgtgcccggcgaacgtacgatggagctgtacgatacgctgttcaccaactccgacgacgaacccggcagctattatccgctgattgccgaatcggcccgtttcccggccgacatgcgctggatggagttggatatcaacgcccgcgcccgcttccaggacggcagcccgatcaccgccgccgacgtggccttcaccttcaataaattcatgaccgaaggcgtaccgcagtttcgctcctattacaaaggcgtcacggtcaaggccatttcccggctgacggtgcgcatcgagctgcctaaagccaaccgtgagcaaatcctcagcctgctcagcctgcgcgtattgccggaaagcttctggaaaaaccataagctcaacgaaccgctcagcaccccgccgctcgccagcggcccgtataaaatcgccgattaccgcctcggccagtacatcacctaccagcgagtgcgcgactactgggccgcaacctgccggtga

SEQ ID NO: 433566 - DNA, 273 bp, Serratia marcescens
gtgcagctgattaacgccagcggcgacatgcgcatgcctgcgggcgggcaggtgaaagccgcctgccatatcctgaacggcccagacaacgcggttatctggctcacagaaggctacgccaccggcctcaccgtgcactgccttaccggtgagacggtctgcgtggcactgagcgccgactacctggaggccgtggcgcagcaactgcgcagccactatccggacgcacggctgctgctggcggctgataatgatcggaacggtaccgggtag

SEQ ID NO: 433567 - DNA, 330 bp, Serratia marcescens
gtgctgaccaccattgccgggcgcattcgcgcgcagctgcgcgagaccgatctggtcgcgcgtctgggcggggatgaattcgccgtgctgctggcgccggtacacggcacggaagatgtcctgcagatcgctgacaacatcatcgactgcatgacgcaaccggtcattttgccgaacgacgaggcggtcattacctctctgagtatcggtattgcgctgtaccctgatcacgcgtcgacgcctcagggtcttttgcacgaagctgacgatgcgatgtatcaggcaaagcatcgttataacggaggctggcggctggctatacataaataa

SEQ ID NO: 433568 - DNA, 564 bp, Serratia marcescens
atgaacggtcaacgtattggttatatatggcttagccactctgccccctctctggaacagcagttagagcaaattatggtggaaaaattttttactgataacacatcagaccaaggtctccaacagccagagagagatgctttgttcctttcagtatgcaacggggatactgtggcgatttatagtatggacaggctggcttgtaacctgaatgacctgtaccagcaggtgtacaaactgacccataaaggtgtaaccgttgaatttattaaagagagtttgacctttaccagtaacaaatccccaaagacaaacttgatgctatctatcatgagagcatgtgcagaatttgaacaagttatactttgcaaaaagcaacttgaagatatcgaacagaccagaatacatggaggctatcgcggtagaaaaaaattgctatcctcagagcaacaggctgaattgcagttacgcgcgacaaatggtgagacgaaagcgcagcttgcccgagagtttggcatcagtagagaaacactgtatcaatatctgaaacgatgcgggcgatag

SEQ ID NO: 433569 - DNA, 1179 bp, Serratia marcescens
atggctaacaaagaaaagataaaacatcttgaaatcattctgaaagttagtgagcgatgcaatattaactgtacgtattgctatgtgtttaatctgggtaatgatctggcaattaattcaaagccaattatttctcatggcaccattaaaaatctgagaggattcttcgagcgtgcatgtcaggaatatgagattgaaacggtccaggtagactttcatggcggcgagccgctaatgatagggaaagatcgttttgacaatgcctgcaaagaacttgtttcaggtgactataacggcaccagactcaaccttgcttgccagacaaacgccatccttattgataatgagtggattgatatattctctaagcataatatcagcgttggtatttccatagatggtcctaagcacattaatgacaggcaccgtttggatagaaaggggcgcagcacctatgaaggtacggtaaaagggctggagatgttgcaggcagcctggagagcggggcggttgatcgatgaacccggtatcctgtgcgttgccaatccttcggtaaaaggcgctgaaatctatcggcattttgtcgatgtgctgaaatgcaaaaaatttgatttccttattccggatgaaagccatgatacctgtacagatccggaaggattgtccgatttttattgctcggctttagatgagttcttcttggatgcggataaagaggtatatgtacgctacttccatacgcacattcaatccatgttgagtttagaattcagtccggtaatgggagtgagtaaagcagggagtgacactctcgcttttacggtcagttccgatggcgagctttatgtggatgatacgctcagatcgaccaatgactctatatttactcctattggtcatattcaatctttaacactctctgaagccctgacgtcatggcaaatgcagaaatatctgagtgtggataatcagctgccagaagtttgtattgactgtatttggaaaaaattgtgtggcggtggacgccatattcaacgctattcctcagccgatgattttaaccgtgaaactgtgttttgtccgtcgataagaaagatcatgagccgcgcggcttcgcatttgattgaatcgggagttactgaggatataatcatgaaaaatttagaggttaactcatga

SEQ ID NO: 433570 - DNA, 864 bp, Serratia marcescens
atgataaaacggctttccttactggcattcttgttttccagcatgagcatggcagagtcatctgctgattttgggcgtttgcgatatgatgaacgtgggttaccgttaattgatgttcggatcgataaccgccttcataccttaatgctggataccggcagtggggaagggatgcatctttataaacacgatcttgacaatttggtggctaatccgagtctggaggtgactgaacaagcgcctcgacagttgatggatgttgccggtggggaaaataacgtttccgcctggaagattagcaggttatttatttcaaatattcctttctataatgttgaaacggtaagtttaaaaccatggggattaagcatcggtggcgatattcccgtgaatgaagttatggggatggggctttttcgtgaacgcagagtactgatggattttaaaaatgatcggttaaaaatgttgaccgacttgccttctgacataaaaaaatggtcatcttatcccattgaatcaaccgcatctggattgcgcgttaccgcctccgcaggcgacaagcctttacatttgattgtcgatactgcggctagccattctctgctgttttccgaccgcttgccgccagggctccttttttctggatgtcgcgacatcgaacctgaagcatcgaacctggattgcagggtgacaaaaatcgcttttacagatcgtgaagggacgactcgcgatgacctggccgttgttacccttggcgcaacgcctcaggaactggattttgacggcttgttgggaatgaagtttatgcggggacatcaggtgatcatcgatatgcctgaacgcctgctctatatcagccgttaa

SEQ ID NO: 433571 - DNA, 1095 bp, Serratia marcescens
gtgttgctggtgattattctcctgttatttacaacttatgcaaaaagagtccctgtaactgggcgcgtgatctacacgccttccgccgcggaagcggtattcaatcatgaaggcataatcggccgtatcgaagtccgtcagggagaaagggtgaaaaaaggggatgttattgcaacgttttcacgcgacgtcacttatgcggggggaggaatgaatcaggcgttgcaagatgcggcgcagcgtcaactctctgaattgcaaaagcgtgagggagaacggcgtaaagagggggaagaagagcgcctgcgtttgcgtgagaaagtcagcgccaaagagcgggaaatggtggcgattcaagctgcggccgaagccgaatcggagcgcgtcgtcggtttgaagaaacggatgacgctttatcaacagctgttacagaaaggtattacgaccgtacaagagaaaattgagcgggagaacgaatatcataactctattgcacagctgaatacgcatcgaatcaatatcgcgcgggtgaaaggagagctgttgcaattcgtggatgagctggctcgctctgaatctcaagaaaaacagtctattactgacattcagcagcagaaggtcatgatgcaacaacaggtgattaatgcctctgcggtcgtggagtctcgggttgtggctccgctagatggcgtcgtcgcttcaatgagcatcttggaaggaaagagagtggctgcgggagccattgctgcggtagtggtgccggaaaacgcgcgtccgttcgttgaaatgtggattccgccctccgcgttgcaggaagtaaaaacgggccagcatgtgttcatgcgcgtcgcatcattaccgtgggagtggtttgggaaagtgtccggtacggtcgctgccatcagcacgagccctgaggccctaacgggaaataaccagcgttttcgcgtcttgataacacctgatgtgggcacgcgtgcgcttccggtgggggtggacgtggaagcagatatattgacgacgcatcgatgcatctgggaatggctatttttgccattaaaacaaggtcttaatcgcatttcggttgagggttga

SEQ ID NO: 433572 - DNA, 2124 bp, Serratia marcescens
atgtttttttcctggcaaaaaacgccgctgatcctacagtcggaaatgaatgagtgcggtctggcctgtttggccatggtggccggctatttcggcaaacgcatcgatcttgcttcggcgcgtactctccacggagcaagcagccatgggatgacgctgcgagatctcattaccgcgtttgaacgagtgggaatgacggctcgcgcttcacgcgtggagcttgatgaactgcgctctatcagccgccctgtgattcttcactggtcattcaaccattttgtggtcctgttgaaagtgacacgtcggggcgccgtgatcctcgatcctgccattggtcgacgcaacatctccttgcgcgaactttccgataagtttaccggcattttgatggaggcctggcctgcggagaccttcgacaaaaagccactggaaatgaatgttacggtatccgatctcttccgcggcgtacgggggttaagacgcatttttaccggtgttttgatgctttcggttttggtggagctgctctcaattgccgtgcctgccgcttcacaatttactatcgatacattagtgcgttcatcggatcgtgaagggatattttttgttggcattgtggtcatttcagcattactgattaagtccgccttttccgtggtgcgcgcttggattttgatgaaccttcgctatacgctcggcgtcaaatgggccgaaatgttctttaatcggcttatcaggctcacgctgtcattttttgaaaagcgccatactggtgacattgcgtcgcgcttccagtcgttgaccgccattcaggaagcgttcacggccgatatggtcgcctccctcctggacgcgattgtgattgtcatttcaatggctatcatttttagttattcaccagtgctcgctatcggtcccctgatcgccgcctgtgcctatgctgccttaaaagcgggtcttttctccacataccgcaatcgtaaaatcgaacatatcgccttcgaagcggtgcaatcttcccatttccttgagaccattagagcgataggggcgatcaaaatgttgaatttgacgccggttcgccgtcgcgaatgggtcaaccatgtggtcaacagtacacatgcaggtaaccaactgtttaaactcgatttgctgaccaacacggcggctgtactgcttgtgggtttttccgggatttacgtgctcagcgtcggcgccataggattcgataaaggtattacgactggtgccttgttggctgtgatgctttatgccgatatggtgatgacccgcacggtgaagttagtcaatgcggtttcagacttctgtctggtatccatgcacagtcagcgtctgacggacgtagctgtttcgcctgtggaaagggatgaggtggggcatgtgtcgccacccttgaatgggcatatagtgatccgcaatttggcgttccgccattcccagactgagcgcaacatcttcgaggggatcaatcttgaggtcatgccaggggaaaatgtcgcgattgtcgggccgtccgggtgtggtaagtcaacattcctccatgtgttggcggggctttacgaatctaccgaaggggatgttttcatcaataacgtggagatgtccggcatgagcaaacgagacattcgtgaacatgtcgcttttgtcatgcaggacgacaaactcttggccggaaccatacagcagaatattaccggttttaccgcgtcccctgatgtggaacgcatggttgaatgtgccaaccatgccgccattgatgaggaaatcagcgcatttcatcagggatatgattcgatggtcggtgatattggtagtacactttctggcgggcaacgccagcgtatatctatcgccagagcgctgtaccggcaacctcgtgtgctattgcttgatgaggcaaccagcgatctcgatattgataacgagaaaaagatcactcgcgccatcgggcaattgccaataacccgcatttttgttgctcatcgccccgaaatgatcaggtcagcggatagggtctttaatcttcatctgaatgcttgggtaacgcaggaaaaccgaaccaccgccgcaatgttgatcgccgacaaggttcgctcaagctga

SEQ ID NO: 433573 - DNA, 750 bp, Serratia marcescens
atgcgaagtggcaaggtgacgtacacggcgctgaaaggcatctgtgatcgtcttggaaatccggctgcgagcagtatcacaccggctttcctatcagaatatcgctcacagcgacttgcccagggcagaagtaaagcgacagtaaatcatgaaagagacaatatcagcggcgtctttaccgtattgattgaactcggccattatccagcgcctcaccctctaactggtttcagagcattaaaactcgaagataaagagatgggctatcttcgcaaaaaccaaatcgcacttttgcttaatgaactcagcggcgacaacctcaaggttgtaaagatatgccttgccactggcgcgcgatggatggaagcggcaaccctacggcgttctcacctttcaatgaatcgggttaccttctcaaaaaccaaaaacgggtacgctagaactgtgccaatctcccctgagttgtacgaagaaatatccgtaggcgagcaggagcccctattcccgagtgttagttatgaagaggttcgagagctgatcaagcgtgtcgctcctgatttgccggaaggccaagcaacacacgttttcaggcacacgtttgcaagtcacttcatgatgagcgggggcaacattcttaccctgcaaaaaatcttaggccaccgtaccatcacgcaaacaatgatctatgcgcactttgccccggagcatctaattgacgcggtaaaactcaacccactggttgccctatga

SEQ ID NO: 433574 - DNA, 345 bp, Serratia marcescens
atgaaaaagattttaaccaccacattgttagcagccttattcttttcccctgtctcttttgcgaagcctccccaagttatcgaaaagtcagaatacaagggccaatggccgtttagcttcaaagaaggtgcgcttcagtgcatcaaaggcggcgctttcgttcttgattacgacagcgggaaaatgtacgccctgacaggcctggcccgctctattgccagtcgtgtcggcgccctgcctttagagcctgattctgaggtttggctggacgacccaaatgatccgggttccaaaatcagccttagcgacatgacatccaaggcgttagccctctgtgatgaataa

SEQ ID NO: 433575 - DNA, 249 bp, Serratia marcescens
atggatctcgcactcgcgtacctgacagaaaaggggattaaaccccgaatgaccctgaaagaatttgccgagtttttcgaaatggatttgcggcaagtgcaaagtgacgctgaaagggcttatctaccaatagccccgcgctcactgcctgggcgccgtgaattactgcaagttaatatggtggcctattacgcccgcatgtatctggatggctttaaccatttagataaagctgcggcattcgggtga

SEQ ID NO: 433576 - DNA, 204 bp, Serratia marcescens
atgcatcatgcgataattcagctcagcgcccacaccagcatttaccggggcttcagtatcaccaaattacccaggaagaaaatgaccccggtcactcgctatcgtgtcagccagggtgatcagtcatacggaaagtttgatgctcaagctgaggcaacacgctatatcgataagctgtatctttctaaatctgaaagtgaatag

SEQ ID NO: 433577 - DNA, 264 bp, Serratia marcescens
atgaaacagccttaccgtattctgatcgacacattgttgcttcagtaccacaccaaagccaccaatctgcacagcgcttccgctgtggcgccagaggttcgccaggtatcgctgaacgattacgccttccgcctgtgcatcggcctgaccggtctgctgagtacggcagaggccgctggagatggcccggccgctgccgttatcgatagtttgatcatgcgctgcaacaacggcgatattccgctaccagagcaaaggcggtga

SEQ ID NO: 433578 - DNA, 210 bp, Serratia marcescens
atgactcacacagccgaaaataaagagttggtaaaaatgctgaccgatgcccgccgctctgagcggttacagttgcttgagctattagaaagcaagattgagcgtttggccgctgataaaacaacacgcgaccaagtgatcagcgcattgaagtattggattaatgttcgccgctctacagaagcacacactacaaggaaggggcaatga

SEQ ID NO: 433579 - DNA, 168 bp, Serratia marcescens
atggagcggattgtcggttatgacccaggctacggcgatcaggccgccgagtgcgtatttctgcgcgatcctatcaacggcacatttacgctgctgtcagcaaaaacggtcgagcgtatagagtcacaaccgtggattagatatgacgggtgggtctatcccgaatga

SEQ ID NO: 433580 - DNA, 2229 bp, Serratia marcescens
atgaaggggaggcatattgcccgcctggctctgcgcgacattattcggcgggatctgcctttcatagatactgtgatagaccagcatgctattcagcctgtcactgaggacgcttcaacgctgaccggctgtgcctttgaacacctaaacccgctgtatcactcgtttgctaacctgaatgccctgaccgaacgttttaaccgtcttccagatttcacgcgtgaggacgttgatttgttggcgaaagacatcgctatttacatgaacagcgtgctcagcgaagtcaatgataactgcgaggcactgagcgacagcaaggccgcgctgttcctgtatcatgaggcggccaaccttgcacaggtacttcatgtgaacccgccatactggcgtaagttttgccggggcaatctgtgcacctatgaagcggccaccgccatcagcaaaatgaaggatgggcggtattgggcgagaaacctgcgcaactatgccacccgctggcgggaacacctgcatatcgcttttggtgatgttaagcgtggtgcatcgccttattgcagcaagcatcatgttgatgagtgggacgccaggcgaaaacgcagccgcatgattatgagccggctggagcttgaagacgaagagaccaaagagcgcctgtcactcattgagcagatcgataaaagcatatcgaatccggcgctgcgccgcgtagaactgatgacgcgcatcggcggctttgagaaagtcgccaccgactccggttatgccggcagcttttttacgttgaccgccccgtcgaaataccacgcttacaccatgttcgggcaccgcaacccgaagtggaacggcgccaacccacgcagaacacagcgatacctcaaccggatttggcaacagatccgcgccgagctggcgcggcgggagattgaggtattcgggctgcgtgttgccgagtctcaccatgatggaacgccacactggcacggcttgttgtttaccgcgccggagcatgtggccgagctgcatgaagtcatggaagcgtacgccacgcgcgaagacgccgcggagttgcgcggtaagcacggcacacagccgcgtttcgagatgaaacctatcgatgagagcatcggcagcgccaccggctatgtggtcaagtacatttcaaagaacatcgacggttatgcgctcgacggtgagaccgacgacgaaagcgggcgcccactcaaagagaccgcgaaacatgccaccgcctgggcatcttgctggggcattcgtcagtttcagtttttaggtggtgcgccggtgtctgtttggcgcgagctgcgtcgcatgcgtaaccaggcattggccgacaagatcaacccgctatttgcacaactgcacaaggccgccgacgccggagactggcgtgagtacacccatttacagggcggcgcgctcgtctctcgcaaagatttggcactccgcgtgtggtaccagcaggaaaaccagccgaacagttacggcgaatacgcctctttgatcaaaggcctctacatgccggcggtgaacataccgccggtagtcacccgtcttcacagttatcggatcgtgaaaatgaacgcgaggccttcgggcgacgcggggttggcccttgacctttcgggcgcgtctgcgccctctaggactcgtgtcaataactgtaccgaggtcaaaaaacaaccagtttcgcagggggatccaccactagatcacgagccggaacagctcgaaataggccaaaaatcggccagcaggcgcaaacagcttgccgacagtcttcgaaaccacaaaccggcgcggaaaaagtccccagccgaagagtttgaggcgctggcttatgccattacggcgggcgaatgcaccgaaccggatcgtcagcgtgccgaaagttacctgcgcgccgcacagtcactcaggcagatggatgaaaaggttacgccattggtcgcaagcgtcgctgagcaggtgttgcgctgggcgaagattcgaaaagtcaccgtgagcgagcatcaggctaatcagctggcattggggaaagaggtcaccgtgctggataccgtttatcgggcgaacccgattaccggtgaactgatcgttgttggcatggatcagcagtggcgccagtcactcgccaaacacaaaaccgcagatctggtatcgcgctggcaggctttggcgagaggtagggttaatgccagcgctggggcataa

SEQ ID NO: 433581 - DNA, 366 bp, Serratia marcescens
atgacgaaaacagcagcagtaaccccgaacaccatggagatcgccgggcagccggcgatcatcagctacgtaccagagatcggcgcgttccgcggtaagttcctcgggctgtcgggttactgtgatttcgtttcggacagcattcaggggctgaaagccgagggggagatctctttgcgcgaatacctggacgattgcagtgccgcagggatcgagccatacgcccggcaagagaaaatcaagacgtttactctgcgctatccggagtctttcggggaacgcctgaaccaggcggcggccgaaaatgaggtctccgtaaatgcctttattgtcgaaacattgaatgagcgaatgaaacacgcgtaa

SEQ ID NO: 433582 - DNA, 1092 bp, Serratia marcescens
atgggccgcaagcgcaacaacaaccgccaaagtaacggccgtccggaatggatggcaaacgaggcggccaacacagtcaccgctgacgctgctgcagaacaacaaccgctcgagggcgtggagtcattttccttcggtgaagcctccccgatactggatcagcgcgacctgctcgactgcatggagtgcgccaagaacggccgatactatgagccacccatcagcccctacggcctggcgcgcatgttcgatgttgccgtgcatcaccagtcccccatcatcttcaagcgcaacgtgatcatgagctgctttaagcctcacccgatgttgtcgcggcaggatgcatccgcctttgtgctggattacctggtcttcggtaatggatacctcgaacgcatcgacagcaggctcggccgccctatgaagctaaagcactcgctggcaaagtacacgcgacgcggtgagaacctggatcaatactggtttgttacctattacgcagaggatcaccctttcgcgcctggctcagtctttcacctgcgagcgccgagcattcaccaggagatttacggcacgccggagtatatggcggtgctgcactccgccatgctgaacggtgaggctacgctgttccgacgcaactactatatcaacggcagccatgccggtgtgattgtttatctgaccgatcccgtcgccaataacaaggatgttgagaagctcaaatcgtcgctgaaagatgcccgcggcggcggcgctttcaagaacctgtttgtctacgccgccggcggcaagaaagacggcctgcaaatcatgcccttcagccaggtatcggcgaaagacgagtttaccggcatcaaagacgccacccgcgatgacatgctcgccgcgcaccgcgtgccgccgcaactgatgggcatgctgccaaacaataccggcggcttcggcgacatcgagaaggccgccaaggtgttcgccatcaatgaactgtatccgatcatggagaacctcaagcagctgaatgaatggctgggtattgaggtgttcgacttcaccccctacgcgttggctgaatcttcaaccccgcagtaa

SEQ ID NO: 433583 - DNA, 1722 bp, Serratia marcescens
atgaagcagattatcgatcaccgcgacgaagccaaaagcctgtattggcaggcctatagcatccctcaaatagccgagcgcttaggggtgagcgccaacacgctctattcctggcgccgccgtgatgaatgggacaacacaccgctgttaaagcgcgtgcaggaacgcctggacgtgcaactgctgcgcctggtggaaaaaggcgaatccatcaacagccacgacgttaagcttatcgacctgttcggccggcagttggagcgcttttcccgcgatgagaggaaagcgcaggaacgggccacccggaagaaaacgccgaagaaccacttcacccccgaacaagttgaggagctgcgggcgctggttctggactcactgtatgagcatcaaaaacgctggtacaagcagcgcagccggcgtaaccgcttcatcctgaagtctcgtcaaattggcgccagctggtactttgcgcgcgaggcgctgctggatgcgctggaaaccggcaccaaccagatatttttgtcggcgagtcgcgcccaggcgatgaacttcaagcacttcatccagtttttggcgcggcagattggcgttgagctcaaaggcggcgacaccatcatcctgagcaacggtgcaacgctgtatttccttggcacgtccgcggcgaccgcgcagtcctataccggtaacctctattttgacgaggccttctgggtttccagcttcctgaacctgcgcaaagtggccgccgggatggcaagccataaaggcttgcgacgtacctacttctcaacaccatcaagcgaagaacacgaggcatacaccttctggacgggagcgtttcacaacaagggccgcccgaaagagaaacaggtcgaatttgatactacctaccaggcactgaagaacggcaggctgtgcggcgacaacatgtggcgccagatcgtcaccattgatgacgcactggcgcaaggctttgacagaatcgacctgcaagagatcctggatgaaaacagtccggaggatttcgaaaacctgtaccgctgccgctttatcgccaaaggtgagcgcgcattcgactataacgccctgattggttgcggcgtcgacggctacaaccgtgatgtctggtcagactggaacccctacgccccgcgccccctgggtaaccgcccggtctggattggttacgaccccaacggcagcagcggaaaaggcgacagcgctggcttgacagtggtcgctccgccggccgttcccggcggtaaattccgtattgtcgagactatccagctacgcggcatggagtacgaagaacaggccgatgtgatcaaagccctgctcagccgctacaacgtgcagcacatcggtattgatggcaacggcatcggtgatgcggttcatctcttggtgttgaagttcttccccgccgcagaaaagctgctctattcgccagcattcaagcgcgcgctggtgatgaagacacaaatggtgatccgtgccggccgtctggaatacgacgccggcttcgggcaggagctggtgcgctcgtttatgaccgtgcggaagtttgtcaccccaggcggccagatctcctatgaatccgaccgcaccaacggcagcaaccacggcgatctcgcctgggcttgtatgcatgccctgattaacgaaccgatcggcagcgatgccggcggcactgaagacagttttgttgaggagttttaa

SEQ ID NO: 433584 - DNA, 846 bp, Serratia marcescens
atgacgaagtccaccaaattcttccgcgttgctgtcgaaggcgacaccctggacggccgcgtgctggcccgccaggacatcattgatatggcggaaacctatgatccaaaggtcaaaggtgctcgcgtcaatattgaacacattctctccctcatgccggatggcgttttttctgctcagggggatgtgaccgcggctcgctatagcgagatcggtgatggcgctctcaagggcaagttggcgctggaggttcaaatcgaccctaccgacgagctggtcaagaccaaccgcaagcggcaaaaggtgtacacctcgatcgagatgcacccgtccttacctgcgaccggtcgcgcctatctgtgtggcctggcggtcaccgacaacccggcgagcttcggcaccgagatgttgaagttctgcgcagggcaagaggttaacccgctggcctcccgcaaagagtcaccggagatcttattctcggcagcccgtgaagttcagatggattttgaagagatgagcgatccgaccagcgaaagcgggaagaacttcttcaccagcatcatgaatttgctcaccggtaatacccggcaattcacccaggatgccagcgaactgcgccaggcggtgacgctcattgccgaaaagcagcgtgacaccctcgacaagctggagaaatacagcgcgctggagcagaagcacggcaaattgcagcaggatttcaccacgttgcagagcgattttgacacgctgaaaggccagcttgacgcccagccgaacaattacacccagcgcccgccggcgattggcggtgacgataaatcgaatgccgagttagccgactgctaa

SEQ ID NO: 433585 - DNA, 1059 bp, Serratia marcescens
atgacaatgcgaaacgaaacccgtgagttgtgggacaaatatatcgcgcgccaggtagagctgaacggtgtgaccgtcggcgccgtgacaaaagggttcaatcttgccccttccgtcgcgcagacactggaagataaaacgcaacagtccgacgaatttttgaagaagatcaatatcgttggcgttcctgagcaggaaggcgaaaaaatcggcctgggcattaatggcccgctggcgtcgaccaatgactccaccacggatcgccgtgttccgcgttctgttcacacgctggaaaataacaaatatcgctgtgagaagaccaacaccgatacgtttatcagctatgcgcaattggacatgtgggcgaagttcaaggacttccagacccgtatcaccaaccagatcatcaagcgacgggcattggatcgcatcaccgtcggttttaacggtacaagccgcgcggataaatcggatctgaacgccaatccactgctgcaagatgtgaatattggttggttgcagcagtaccgtctgcatgcgccgcagcgcgtgatgaaggatgtcacgatcaccagccgtgacgacgaaaacaaggtcgttgccaaaggcatgtacggcaacgtcgactccctggtttatgacgccaaaaacaacctgctggatgagtggaataagcgctcgaccgagctggttgtcatctgcggcggcaacatcgtgacaagtaaagagttttcgatcctgaatgccatcagtgccagtaacccaaactcggaagcattggccgggcagctgctggttgccagtaagaaaattgccggcctggacagctacatcgcgccgttcttcccggatgggacgctgtttattacgccgttccagaacctctccatctacttcatggatgacaaacatcgccgcatgatccgcgaggaaccgcattacaaccgcgtggcgacctatgaatcgtccaacgatgcctatgtcgttgaagactacggttttggttgcctggttgaggggatcactttcgccaaagctgaaaccggcggcggtgcataa

SEQ ID NO: 433586 - DNA, 912 bp, Serratia marcescens
atgctgactccagcacaacgacattttcaagaaaccatggcagcccgccgtggcgaacaaaacaccttcggtgacttcaccgcttacgagcagatgctgcaccggctgcgcatcgataaggtgaagctccaaaatatccagtcggataccgccaagggcgccgtcaagcgcaacctgatcgccgattatcagggctgggtggatggcgcgctaaacgcggataccggccaggctgacgacgtgctgaccaccgtcatgatctggaatatcgatgccggcaacatcgaggaagccttgcgtattggcgagtacgtcttgcgccacggcttgtcgatgcctgatcagtacaaacgtaccacggcgaccgccctcgttgacgagatttgcgatccgatcttgacggccttcagccgtgatccgcgtatcgcaccggtagatcaggcgctgctgctgcgactggacgccatgacgacggacgaagatatgccggatcaggtgcgcgccaagctgttcaaggccatcggctattgccagcgcttgcagccggcgacctgtgaatcggcgctcgcctaccttcagcaagccattaccttgttcaacgggatcggcgtgaagcgcgacatcgaaaacctgatgcgtgctatcaagaaaggcgccagcactgacggacaaagcgacggcggcaccggcggtgatgctgataacgcgggcggcgccggttcatccgatgccaatgccggccctgacggcggcacgggcaatgcttcgcagaacccggagacaacgaagaaacccgcagcaccgaagaaacccgcggcgccgaaaaagttggcagcagcgaaaaagccagcggcctcgaccagggcacgcgccggcaaccagaattcacgctcggtgaaaaccaagcagtaa

SEQ ID NO: 433587 - DNA, 495 bp, Serratia marcescens
atgagtctcgttgcgcccaaagaaattaacccgattgagggagacgcacccgaccttgacgacggcggcgccgtggtcaagtccggggcgttctggccggagatcaccctgcgcgatctgcgtaccagcatgcgcattaacggcaaggtgacaaccgatcggttgatgcatgccactacagaagccgttttgcacatcaatgaccagctgaaggaataccggctcggccaggagaaacagggacacgcctcactggaggacgtgccggcagagctgatcaacgacgtatcgccgctggtctatcgctatcgccgcgcggtgtacagcatcaccaaggcatcgctgactgagcgctatcgcgatattgacaccacccgcgacggcgagaagcacgcggaggcgctcagcacgcagatcgacatgctgtggcgcgatgcgcgttgggctatccgcgacattctcggcgaggatcgcggcctggcggagttggtctga

SEQ ID NO: 433588 - DNA, 204 bp, Serratia marcescens
atggaggtcaaggcgttgcagggcgataccgttgatcagctgtgttaccgctattacggcaaaacacagggggtgactgaggcggtattggaggcgaacccaggtttgtgcgaaggcgggccgtttctggccgccggtcaggtgattacgttgcctgacatcgccaggcaggcgcgtgaggacatcgttcagttatgggattga

SEQ ID NO: 433589 - DNA, 396 bp, Serratia marcescens
atggcagagccattaaccatcagcaccggcgtagcgacgagtgccgtcaccgggatcgcgatagcgggcatggtgccaggtgctgaccccggcgtcatgatcggcgcatttgccggtgccgtcatattcgtattgtctgcggcggattttcccttgtggaagcgggccatgttgttcgtggtgtccatgttggtcggcatgtatgccgcagagctgagcgcctcgatagtggcatcgctgctgactacgttgttgcgtgagtccatcacggtacaaaagcccgtcggcgccgtgctggccgctgccgcggcggtgcgcattctgatgatgttcagcgccaggccaagtagcaacggatccatattcgaccgctttcgcggtgggggtgagaagtga

SEQ ID NO: 433590 - DNA, 216 bp, Serratia marcescens
atgtaccgccgccagggggccgcctatcggtttgccggcgccgggtttgcttatgcactgatcgttgcctgcgccgctgtcgtgatccgcgtggtgaccgggcattacctgtttgctgattgggcggagacgctgatcaatctgacgttatgcgcagccgtttacaccgcccgcggcaatgtgatgcacctgttccggaggaaggtcgatgactaa

SEQ ID NO: 433591 - DNA, 390 bp, Serratia marcescens
atgactaatttctgcttcagcccgcgcagcgaaaacaatctgcgcggcgttcaccctgacttggtgcgtgttgtgcgccgtgcgctggccttgtccgatgtcgatttcggcatcactgaggggctacgtacgccagaacggcagcgccagctggttgccgccggtaagtcgcagacgcaaaacagccggcatctgaccggccatgcggtagatgttttcgcctacccgacgccggcaggctcctgggagtggaagtattacgcacaaatttcagccgcgttcaagcaggcggccgccgagctcaatatcccgattgagtggggcggtgactggaagacgctgaaagatgggccgcatttccagttaccgcaccgggactaccccgcatga

SEQ ID NO: 433592 - DNA, 381 bp, Serratia marcescens
atgacgaatgccttggcgatgctcaagaacggcgggttactggcgctactgctaagcaccctgtgcctgatgggttacagctcgctcctgtcgcaccggctggagtccgcgcgccagcaggccgcggagctgcaaaaaagcctggcacagcaggccgggctgattgccaccctgcaaacgcaggatgcgcagaaccgcgcgctgatggcagcgcagcagcagcaggagcagcaactgcggcaacagagcgatgaatatcagaggaaataccgtgaggcaatcaaaggtaatcgctgcgctgctgagcgcatgcctgatgctgtgcttgagctcctgcgcccggccgccggtgccgcaggcggtgcagttgctgccccctga

SEQ ID NO: 433593 - DNA, 330 bp, Serratia marcescens
gtgcataaaccgttcgaatgtgagtttatcgccgaaattggattaacgggcaaagcgcggggccgccggcagtggttcaccggcaagccgattatgcaggtcgaagtggtgcaggaagtgaagagcgttgtcggcactcaggtgaccggccgccggtataaaaccatctggcgagatgccaccttgagcgaatctttccagatacagcatcgcgtggggttgatggtgaagccggacgatgaaacgcatgaggtcaagcgaccagcaccgccaacgccgccgcctcgtccccacaccctgaatgagaaggtcaaggagcccccatgctga

SEQ ID NO: 433594 - DNA, 495 bp, Serratia marcescens
atgctgaaagccaaactgatgcgcgacatcattacggagtttcacccgtggtttaagacgaatcccgacgcgctggaggtgtatgtcactcgcggcaaagtgatcgccaccggtacgccggccatgtcgttcatgtatcagtacgagctgaacgtgctggcaatggattttccgggggatttggacaggttgacgatccccatcttgagctgggcccgtcagcatcagcccgatctgctgtttaacccggaacggcgccgcgatggtattgattttgatgccgacattcttaacgacgacacgatcgacgtgttgtatgtcatcaaggccaccgaacgagtgattgtggcgatggaagagggggagttggtgattgagcatctggccgagccgccggtttacccggagatcctgaaagcctgggatgtgctggtgacggggccaacggatgagtttcacctgcaaagaaaggggaaggcgttaaatgtccagtga

SEQ ID NO: 433595 - DNA, 642 bp, Serratia marcescens
atgtccagtgataacgcgctgttcatgcagttggagcaggagctacagcgcctggtatccacggccaaacccagctaccggcgcagcatggcgcgcaagctgtcgcgtgttatccagctggatcagcaaaaacgcattcgcagccagaaaaatcccgacggctcggcctatgttgcccgccggcgcaaggtgttacgcgcgcagctggggatccgttttgtatggaaaggcgaggagcgcgtattgaagaattggcgcgccacgcgcggccgtggcgggcggatgatcaccgggcatgacgaagaacgcggcgcggtgcgctctttctaccgcaaggatattgagcgctatctatcgattgaccgcagcgagacccgcaagacaagccggcgcgactaccccatgtttcggcggttacgttcggcgcgctacctgcgggcaaccgcaacgccgtcggctgcggtggtggggttccaggggcgtgcggcggccattgctcgccagcatcagtacggcctgacagggagcatcaacgaattggcaaaggttcgttatccgaaacgcgagttgctggggctgtcgccgcatgaacgcatgacgcttatcgatgtgatttaccgtgatttgttggaggggctatga

SEQ ID NO: 433596 - DNA, 630 bp, Serratia marcescens
atgaccattgccgaattgtaccggctgctgtgtaacctggtgcgcacgggggtagtggcggaggttgacctcaccacgcagcgttgccgggtgatctcggggcagttgtctacgacgtggctcccctggttaacgcatcgggcggggcgttcgcgcacctggtgggctccttcggtgggagagcaggttgttctcctggcgatcggtggggagctcagcacggcttttgtgctgccggcactgtacagcgatgcatccccggcgccgtcggcatcggcggatgcctggcacgtggctttccctgatggcgccattatcgaatacgagccggacaccggcgcactgtctgcgacgggcgtcaaaagcgcggctatccaggccagcgacagcatcagcgcagagagtcagcaggtcaccgtgaaggcctcggtcaagattatgctggatacgccagaggtggagtgttccaaccacctgagcgccaaaacattcagcgtgacagaagggggcaagatgtccggtgacatcacgcacagcggcggcatgttctcctccaatgggatcgtcgtcgatgaccacaaacacggcggcgtacaaaccggcggcggtcagacaggaaaacccgaatga

SEQ ID NO: 433597 - DNA, 351 bp, Serratia marcescens
atgagcacaatgaaatatctcgatatggatatgcaggccggcggacggctgaccgacggccagcagctgcgccagtccatccatgacattttgctgacgccgctgggtagccgggtcatgcggcgccaatatggctcggccctgttcgcactgctggataagcccaacaatccggccatcgagttgcagttaatttctgctgcctgcattgcgctgtatcagtgggagccgcgcttgacgccgacgcaaatcactgtgagcgcggcgggcgagagcggaaggcggctgattgtgaccggccagcagaaagaggccatgaccgtctttaccacggaggtgcccttgacatga

SEQ ID NO: 433598 - DNA, 912 bp, Serratia marcescens
atgagcggaaccattgatctgtcgcaactgccaccgccggacgtgatcgagacggtggattttgaggtgctgctgagcgacatcaagcaatacctgatcgcctgcttcccggaggaagaacagccggccgtacgccgtgcactggcgctggaatccagcatgctgagcatcacctgccaggcgctggcgtatcgggagatgttgttgcgccagcggatcaatgaagcggcgcgcgccaacatgctggcctttgcgctgggcacggatttggagcacctggcggcgctgttcaacgttgaacgtctgaccatcgtaccggaggacggcagtaccacgccgccaacgccggcggtgatggaagcggatagtcagctgcgccagcgcgtcccgcaggcgatggagggaatgagcgttgccggccccatggctgcctatgagtttcatgcgcgcagcgccgacggtcgggtcgccgatgccagcgccatcagtccggcgccggcgatggtcaccatttctgtactgtctaccgaagggaacggcacggcagatgatgcagtggtcgccgcggtcaccaaggcgctgaatgatgaagaggtgcggccggttgccgatcgcgtcaccgtgcaaagcgcgcaggtgattgagtatcgggtcgatgccgtggtgtacgtctatccgggcccggaaattgagcccatattggaggccgctgcgcagagcctcaaccagtatgcacgcgaacagcgccgattggggcgcgacatccggctatcggccatctatgccgctttgcatgtcgaggggatccagcgcgtggagctgaaaagcccgcttaaagacatcgttttagatcagacgcaggcggggtactgcaccgaacagctgattactttcgggggctacgatgcgtaa

SEQ ID NO: 433599 - DNA, 528 bp, Serratia marcescens
atgcgtaacagcttgttgccaccgcatgcaacgccgttgatgcagcgcatcgagcaggcgtgcgagaaggcgacaacgttgccggtgccattgcgcacgctgtgggagccgggcacgtgcccgccggcattgctgccttacctggcctgggcgttgtcggtcgaccgttgggatgccagttggagcacagaggctaaacgcgatgctattaggcaggcctatttcatccatcgtcacaaaggcaccattgcggcgctacgccgggcggtcgagccgctgggctatctgatacaggtgatcgaatggtggcaggatggcgaacagcccggcaccttccgtgccgatattggcgtgcatgaggaagggatcacggaagagatgtatcaggagctggagcgagtgatcgccgatgccaaaccggtcagccggcacctgatagggctgacgttgatccaggacgtgcccggaaccctgtacatcggcgccgccaccatcgacggcgacgtcatcacggtttaccccggataa

SEQ ID NO: 433600 - DNA, 2595 bp, Serratia marcescens
atgagcaaatataaggcgatagtgacaaccgccggggccgcaaagattgccgcggcatccgctggcggcaagcaactgaaaattacacatatggcggtgggtgacggcaatggcgtgttgccgacgccaaacccggcacagacgaagcttatcaatgagaaataccgcgcgctgctcaacacgctgacgatcgataaatccattgataaccatatcattgccgagtttattatcccggccaatgttggcgggttctggctgcgagaaatggggctttatgacgatgccggcacgcttatcgcagtcagtaacatggcagaaagttacaagccgaaactggaggaaggcagcggccgcacgcagacgctgcgcatggtgctgatcgtcagcagcaccgatgctatccagattattgccggcggcgatactgtgctggcgacacgcgattttgtcgacgacgccatcaaggcgcatgagaagacccgcaaccacccggacgccagcacgacagcgaagggcctggtacagctgagcagcgcgacaaccagcaacgacgagaccaaagccgccaccccaaaagcggtaaaagacgttaacgacgccagcgtcaagaaagcggccaacctttcagatctggcagataaagccgcggcgcgcggcaatcttgcgctgggcaccgcggcgacgaagaacgtcggcgtcgaaggcggcaacgtgatggccgtcggcgcgtttggtctgggctcgggttccaggcatcgtgatgatgcttactgtaatcagggcgaaatttaccgcgttaataacatctccaaaaacgcaccaggcaatcaggtttatggcgtcttgagtctgccgtgcgacggaggcccatcaggcggctatctggcggtgcaaagtaacgctgatgcctttattggccgctcgactattcctgccaatggggtgacatggtttcaggtttataccactcggtttaaaccgactgcggccgacgtaggcgctttaacagattctcaggctgcgcaaaagtacgcgctgcgctccattaaggtcaacggcaagccattgtccgctgatgtgaacctggtagcgggtgacgtaaacgcatggaataaaaccgaagccgatggccgttttgtgaaacaggcaggcgatacaatgagcggcccgttaactctgccgcgtgtcgtgttcccgaatgagaataccgccaatgccgataccgatgtaaaccgtgagaacggctttaccgttgaatcattggttgccacgaccaacaagggttatcccgtgccgggcggcatgggggtgttgtttaccggcaaggtgaacgaattccgtaacgttcagtttgcggtaggctctggcgaactgtcgttttatctgcgttcactgcggaaagatagcccaacatcaacacgctgggcgcaggtatataccacggattacaaaccaaccatcgcggatgtgaaagccgctgatcaaagcaacaattttgccgcgcggatgggcgttgcccgtgtattgactggcgcagaaaaaccgacatcgcccggcgtctggagcgtggaaaacagcagctggacgcccgttgcctggggttcactgtacgtgacaaccaatggcagcaatttgagcactgtttccggcaacggcaaatacattcactatttgtttatcgctcacggcagcgccaataagttctatattgcggcagatgtcaacggatcgttcaccgggtgggagagttacctgccgagaaatggcgggaacattaccgggccggtatcgtcaaccagttggttatcggcggcctcggttgcggcgaaatatcacaacatcccctcaggaggggcaccggagggcagcggggcatattctgcgcaacttgattcgaaagcgccgttctatcaggaaaacttcgactgggatgtgaacagcggcggtcactacgtcccattggttaaggggcgctgcaaccgcaaaggacagggttacccgactgcggtgagttttggatacttgcttgaaaatacgccaagctttgcgatgccggttattcatgcgaagggggataacggagaagcaatctggcgatttgatccaaactccaagcaattttacgcccccggtaatgtgcttgcaggccaggcaattttgcataccgatggcaatatcacgggcaacatctggggcggctatctcagcaactggctgaaccagaattttaacggccgtgttgattgggggacgtacaaccgtgatgtcggggcaagggcaaccatcgactatgtaaacacccgttctgctgtcgccggcggccgcaatgcatggtggtacaaggacgaagtgacggggttcattattcaaggcggggtggttaatcgcacggattatgcaacccgcgtcaatttcccgcgtggttatgcccgtgaatgtttcggcgtgcaattaacgctcaccaacacaaatgggaactggttcggcgacagccgagttaatattcaggcgcgggatctggataacaacgggttcaatgcaatgatggacggtcaggagcaggtagtgctctggcagtcggtaggagtttga

SEQ ID NO: 433601 - DNA, 267 bp, Serratia marcescens
atgattgccggcagtagaagaaaaaaccccgcggattgcttcgcggggttttgtttatgcaggcggcaggggccaatctgtttctggcgcatcctgcggattgatgcggttgagctgcacccggtaagttttccagagcctgagctgcgccgcctcctcttcggtcgcaatcgccaaatcatcagcatcttgcagaggggcaatggctttaccggcaacgtcgagcagctccgctttttttcgctcggcagcggcaaccagcgttga

SEQ ID NO: 433602 - DNA, 438 bp, Serratia marcescens
atgatgatggtttatggcatgttcgtgttcatgctccaaagcgccccctatcagtcactagcgcgcacgtctggctttcgccatgtcaacaacgagcgcatcggcagatccgcttcctggcagtatattggcgctggcgaagatgcgatcacgctgagcggctctctgtaccccgaagtcaccggcggtgacgtatcgctagaggtgttacgcaccatggcttacaccgcccggccctggccgttgattgaaggcacgggcgtcatctacggcatgtttgtgatcgacagcatcaccgaaacccggactgaattttttgccgatggcaaggcgaaaaaaatcgagttcacgctgtcgctgaaaaaagtgagcgaggacgttcgcgaaggattggccgatgtcaccgccgatgatctgctgagcatgatccccggttaa

SEQ ID NO: 433603 - DNA, 3150 bp, Serratia marcescens
atgacagaccgcaacctcaatattcgggtggcgctcagcgccgccaacaaactatccgggccggtcagcgcagcccaacgcagcgcggccggtctcgcgtctcagatcaaagccacccagggcagcatcaagaatcttgacagccaggcgaaaacctttgatcgcctcaacgcgtccatcaacaaaaacgccgcggcctatgaagcagccaaagccaaggcgaaaagcctgcgggccgagtttggcccgctcaagcaacagaccgatgagcaacgcaaagcactggcggcatcacgcctcgaacgtgaccggttagggcgttctctcgacaaagaaaagcaaaagcttaatgccgtcacggctcaaatgtaccgccatggcgtctcagtacgtcaaagcgacagcgccaccgcacaaatcacccggcgaaccgaaaactacaaccgccagttggccgaacaacaacgccgtcttagcgcagtaacccgcatacaagccaatgttgcccgcgccaaagaaatgcgcggaaaactggcggcaggcggggctgcggcaacagccagtggcgccggtacgctatatggcgcctcgcggatcatgatgcccggtttcgacttcgacgaaggcatgtccggcgtacaagcattgacgcgcatggacaaaagcgatccaaggctgaaaatgctgcgagagcaggcccgcgccctcggtgcatcaaccgcctacaccgccacggatgccgcatccgggcaaaaattcctggcaatggccggtttcacccctgaatccatcaagcaagcactgcccggcgtactcaacatggggcttgctggggatatgggactcggcgaggcatcagacatcggctctaatgttctgacgcaatttggtatgaaagctgatcagatggatcgcgtttctgacgttctgacagctgcatttacccgaagcaataccgatctgcgcatgctcggcgagacaatgacctatgccggccctgtcgccgctgacctggggattagccttgaaaatatggcggccatggctggcgcaatggcagataacggcattcgcggcagtatggcggggacagcgcttagagcaggcctgacgcgtttggtggcgccggccaaagccgggcaagatgccctcggcgcgctaggggtcaaagtaaatgatgcgcagggccgtctccgagccatgccggagatactgaaagacgttgcgaaaaacattcaaaaatttgatcaggccagccaggcgcgcatcaagaaagatatttttggtgaagaagcaatggtcggcatgggagccgtactcaaagcggcgatgaatggccgctatgatgaacttaacaccgcgctggaaaatgccaagggcgaggccgataaagtcgccaaggtgaaggtcgacaacctgaaaggcgatgttaaacagctggtttctgcctgggaagacctggggatccagatggaagagagtgtcgactctccgctccgcaaattgactcagagattcaccaacctgatcgccagcgtcggcaaatggatgaaggccaaccctcaactgacctctgcactcatcaccgccggcctggtgattggtgtcacagtaaccgcgctcggcgcgctggcgctggccgctgcggcactcattgtgcccttcgcgctgatgcgcctcagtttgtttatgctgaccggcggccgcggcctgggggcgctaatcccttcagcaaaaggattgaccggcgcgcttggccgcctgctcccctctttgtccggtgtcggtcgcagcatcaaagattggcccggcgttttccgtggcggtctgatggcgctgggaaacttacgcagccggatcgcgctgttgggcagcaatgccttgatggggctaacacgcggcgcggcaacagccgggcgcggcttgttcctggcatttacccagcctggcgccgcgctggctgcactgggtaatggcctgcgcgcacttgcaacgggtggtttcgggacgttgttcaacgttgttcgcaccggcctgaccatgttagggggtggcttctccctgttgctcagccctatcggtttgttggtcgcggctattgtcggcgcaggcctgctgatctggaaattctgggaaccaatcaaagcgtttttctctggtttctttaccggtctggttgaaggcctggcgccgatcaaactggcgtttgaggctgcatttgcgccgctggcgccgatattcgatggcatcggcagcgcgatcggcaaggtgtggaactggttcaaaagcctgcttgagcccgtcgaaacatccaaggaatcactggagaaatgcaccgccgccggcgaaaccttcggcaaggtggtcggcatggctatttccggcctgatgtggcctatcactcagatagccaaaggtcttggctggattctggagaagctgggagtcattcctgatgcggcccaggcagcagctgaagcagcaaatgccatggcgccaaaaaaaccgactgtatgggaatgggatccagttctcaagaaaatggtggcacgcgactgggtaccgaaacctcctgcccccatagagaaatcaggtcagacagctaaggataaaacctcggcaccccagccagtcaagaataccggtgatactgccgaacaggtttacggaaccgccgtctatggcagcgcggcagaccgaaaaggcaaaaaatccaaagccgccggcgccgcagcttcaaccacagccgggacgccggcggcagaggtgaaaaagctgggcgacatcatcttcaaaaatcgtccgccggtgacagctatcgatggcgcctatcaggaaccgcgtttgcaggtacagcgcgaatccttgcttgcccgcctgaagcgatcagcggtcagcctggcggatagcgtgctgccgccgaccatacagccagcactggcggggatccccattcctgaaacgccggtacgctcatttaacggtaaccgccaggcggtcagccgcgacaattacacgttcgaagtgcattttcatggcgtggacatgagcgatcaccgggcgttgggtgaactggtgaaagacaaactgcgggagctgatgcgcgaaaacgacacgcgccgccgttcccgcctgagcgataaggagtaa

SEQ ID NO: 433604 - DNA, 321 bp, Serratia marcescens
atgtctaaaattatcccgctttccgtcgccatcaaacgtactagcggcgaagaaatcaccgaagtcaccattaccgacaccatgaagcaagtaggcgccctgcgcggcctgaagctctatgacgtcatgaccagtgatgtcaattcgctgatcactctcctgccgcgtgtcacctcaccgcgcctgaccgaagtcgagttggcttcaatgaacattcaggactttgccgagctggctgccggtgtggcggattttttggcgccgagctcggaaccggaagcgacagcctcggacgacgcgttatccgatgcccaagcgtag

SEQ ID NO: 433605 - DNA, 513 bp, Serratia marcescens
atggggatgcctaaaaaactctttatgtttgacgtgtttattaacggtcaaacgtatctcggccaggtcgaagaggtcaccgtacccaagctcacgttaaaaaccgaggattaccagggggcaggaatgccaggatccgttgccgttctcatggggttggacggcggcgcgctcgacatggaagtcaccatgggcggcctggagtcagatctgctcaaaaccttcggcggtacgctcgacagcctgcaactgcgcttcgcggggtcatattacgacgacgctaccggccaggctgtagcctgcgagatccagacacgcgggcggtttaccgagctggattgggggtcggcgaaggccggggataatacccagcacaagtacaccctgaaaaatgcctactgcaaggtaagcatcaacaacgccgaaatctttgaagttgacctgctcaacctgatttggaaggtcgacggaaaagatctgctggagcagcaccgcaagaacatcggccactaa

SEQ ID NO: 433606 - DNA, 1191 bp, Serratia marcescens
atgtccgcattgttatcaatggcaacggcttccgcttttcatcatggcgcgtcggtcaacgaaaccacagaactcggtacgcttatccgcgatattgatacctctgtgatcggcgtggtgtgcactgctgatgatgctgatgccgctacgtttccgctcgacacgccaaccctgatcactcgcgtaaatagcgtgctggggaaagccgggaaaaccggcacgctgtacaccacgctgaaagcaatttctgaccagtgcagcccgaaggtggttgtcgtacgcgtcgccgaagcgaaaaacgccgataagacgcaagaccaattagttatcggcggcgtcagcgacgaagggcgctatacgggcctgtatgcgctgctgacggccgaaacccacacaggcgcacatcctcgccttctggccgcgcctgggctggataccgagcctgtagcggcccaacttggtgtgttcgcggaaaaactccgggcgtttgcctacatcggcgcgcacggccaaaaaaccattgcggaggtgaaaatctaccgcgagacattcagccaacgcgaactgatgattatttatcctgacttcattgcctacagcagccagtcaggacaaaacgaggttgtcccggcaaccgcctatgccctcggcttgcgcgccaaaattgacagtgagcaaggctggcataagtcgctgtctaacgtgccgctggatggcgtgctggggatctctgccgacatctggtggtcgcttcaggggaaagacaccgatgcggacgatctcaacagtcacaacgtgaccacgctgatcaaacgcgacggctttcgcttctggggtaaccgtacctgtgatgcgcagacctatttctttgaggtctacacccgtacggcgcaaatcctggctgacatgatcgttgaagcgcactttgcctacatcgataaaacgctcacgccatcgctgatcaaagacatcgtggacggtatcaaccggaaaggtaagcagctggtcaccgctgggcggctgctcgggtttgactgctggtatgacccggcagacaacccgaaagagaacctgcgcgacggtaaggcgcacatccgctacaaatacacgccggtgccaccgctggagaatctggagttgacccagaccttcaccgatgaatatttcgccgtcttcaaccagcagggataa

SEQ ID NO: 433607 - DNA, 1122 bp, Serratia marcescens
atggaatttatcgacaaattgctcactgacgattatgtcaggcgtccagggtttgatttacttatcggcggggaaacggtcacggaggtgaaccgccggctactgtcgttgaccgttaccgataatcgcgggtttgaggcggatactgtggagctggtgatcgatgatgctgatggcaaagttgccttgccgcggcggggtgttgatgtctcggtgtccatcgggtgggagggtgagtcgctggtacataagggcatcttcaccgtcgatgaagtcagccataacgggccgccggataggttaacggtcaccgcgcgcagcgctgatttcagagaggattttaacgtcaagcgtgagtatagctggcacgatgtcaccgttggtgatgtcgtcagcgcgatcgccggccgctacaatctgaagcccggcgtcagcagcagcctgaaagacgtggagatcgaccacgccgatcagacaagcgagagcgacatcagttttttaacacggatggcggagctgctcggggcgatagcgaccatcaagaacggcatgctgttgttcattgtgccagggcaaagtgtcagccgaagcgggaagccattacccagcatcaccatcacgcgcgccagcggtgacaggcatagttttcgcgttgcagacagggatgcttacaccggcgtgcaggcatattggctggatcttaactacggcaaaaagcctgcaacagctatcaagcgtcgacggaagccggcaaagcaaaaaacaccggcttccagtagccgggagggtgattacctggaaggcgcggaaggtaatgtgtttgtgatgcgtcagaccttcagaacagagcaagccgcccgccgtgccgcagcggcgaaatggttgcaacttcagcgcggcgccgcagagtttggcattacactggcgcgcggccgtccggatatttaccccgaattgcatgcgaaggttgccgggttcaaatcggtgatcgacaacgcggattgggtgatcgcaagagtggtgcataccgtaggagagcagggctatcagacggcgttggagctggaggtcaaagtcaaaggcaccgaaatggagtctgccgacaaaacagccgatgagtga

SEQ ID NO: 433608 - DNA, 252 bp, Serratia marcescens
atggcgttcagatgtccgcgttgtggcgcagtagcaaagactcgcaccagtgaagaaatgagcaacatcacccggcgcagttaccaccagtgcaacaatatgctgtgtggctgcaccttcactacaacgacaacattggagcggtatatttgtacccctaacccgcccgatctgtccgatggcttcaggattccgcggcaagccttccccagcagccattacggtacggatcaactccctctgaacctgtaa

SEQ ID NO: 433609 - DNA, 192 bp, Serratia marcescens
atgaactactctgatattgctgaaaggatagtgaaagtgcttgtttcaccggtaagcgttgtgggattggcttcacagggcagtgccgataccgatttctatacccgcaatcaaaaatttgagcatacgcatttctttatgttcatgccgccgagccaatatccccattggttcggcggcatgctccgttaa

SEQ ID NO: 433610 - DNA, 1068 bp, Serratia marcescens
atggctgtccgtaaaaatcccgctggcggctgggtttgtgaactttatccaaacggggcaaaagggcaacgtataagaaagaaattcgccaccaaaggtgaggctctggcctttgaacagtacacaacgcaaaatccgtggcaggaagaaaaagaagatagacgtacattaaaagatctggttgacgcatggtatagcgctcacggcatcaccctaaaagacggcttaaagcgccagcttgctatgcatcatgcttttgaatgtatgggcgaaccactcgcatacgattttgatgcgcaaatgttttctcgatacagagagagaagattgaaaggtgactatgcccgctcaaacagggtaaaagaggtatcccctcgcacccttaatcttgagctggcttactttcgggctgtattcaatgagctgaatcgtctcggggaatggaaagcggaaaacccgctaaaaaatatgcggcctttccgcacagaagagatggaaatggcatggttagatcgggatcagattgcgctcctgctcgcagaatgcaaacgccatgatcaccaagatttagagacagtggtgagaatatgcctcgcaactggcgcgcgatggtctgaagccgaggggctaaagaaaagccagctagcaaaatataaaatcacctacaccaatactaagggcaggaaaaacagaactgttcccattagccaagagctttatgacgcactaccagttgataaaaaaggtcggctctttagtgattgctatggcgctttccgatcagctttggaaagaacagacattgagctacccgccgggcagcttacccatgttttgcgccatacttttgccagtcactttatgatgaatggtggtaatattttggtcttacagcgcgtgctggggcacaccgatattaaaatgacgatgcgatatgcgcactttgctcccgatcatttagaggatgccgttaagcttaacccactggcgacaagtggcgataaaatggcgatagaaatggcaaataaagggcaatcgctggcaaatagtggcaatgtatgtcaatga

SEQ ID NO: 433611 - DNA, 576 bp, Serratia marcescens
ttgatacttgatactcaagtgaataatgacgagttgctggatagaatttgtcaagtgtatggttttactcaaaaaatccagctagcacggcacttcaatattgcagccagctctttgcaaaatcgttatacgcgaggcactgtttcttatgatttcgcagtgcaatgcgccttagaaactggtgcgagcctgcaatggctgctgacagggcaaggctgccaatacgacggtaagccgtccccaacggatccgagaacgctggactatttcactcttagagatggaaaacttgaagaaaattcaccattgagtattgacaccaatttttttagcaagcgaatgtcaaaaggtattgctgttcgtgccgacgggaaactgaacttcatcgagcaagatgcttcactttctgatgggctttggctggttgatatagaggggactatcagcatcagagaattaactctactaccgggaaaaaaactacacgttgcaggcggcaaagtaccgtttgagtgcgggatcgatgagataaaagcgattggtagggtagtaggaatatacagcgaggttaattga

SEQ ID NO: 433612 - DNA, 321 bp, Serratia marcescens
atgctacaacctattcaacttttcaaaatcctgtcggatgaaacgcggctcgctattgtcatgttgctccgagaatccggagaactgtgcgtctgtgatatttgcgcggccacctctgagtcgcagcctaaaatttcgcgtcatatggccattctgcgcgaagctgaactggtacttgaccgtcgggaaggcaaatggatccactaccgcctgtctcctcacattcctgcttgggcagctgaaacaattacaacgtcttggcagtgtctgcgggaggatgtccggaaattgttggagcaatccgcctgtatctcctgctga

SEQ ID NO: 433613 - DNA, 1386 bp, Serratia marcescens
atgactaagtataaggcgtatccggagtataaaactacaggtcttggatggctaacggagatccctgaccattgggaggttaaaaaattaaaatacctgggccaggcaattataggtttaacgtattccccggatgatgttgtcgacgaaggcgaaggtactctggttttacgttcttctaatgttcaaaatggtaaattagagtttttagataacgtttacgtcaggaaatcaattccattgcatttgaaggtaaaggatggtgatattcttatttgtgctagaaatggtagtcgagcattaattgggaaaaatgcaaaaataactaaaaatgctgaggggatgacctttggtgctttcatgtcaatatttcgcggtagctataacaattatttatctcatgtgttcgcgtctgcattatttgaataccagtccggttcatttttaactgcaacaataaaccaacttacgacctctaatttaaatagttttgaaataccattaccaccacaaacagaacaagatagaatcgtgaatttcctcgatcacgaaaccgcaaaaatcgataacctgatagagaagcaacggcaactgattgaactgctgaaagaaaaaagtcaggcagtgattagctatgccgtcactaaagggctaaaccctgagatgccgatgaaagattccggtgttaagtggttggggaaagtgccggaacattggagtattataaaattaaagcatttaattgatagctttgaacaagggtggagtccccagtgtgaggcccgattggctgaaaaaaatgaatatggtgttcttaaagtaggctgtgtcaactctggtaaattcaactcattagagcataaggccctgccttctaaccttgagcctcaaaaaaaatatttacttaaaaaaaatgaccttcttatatcaagggcaaatactaaagagttagtgggaagtagtgctgttgtagataaaaactatgataatctaattctttgcgataagttgtatagaataaagttaatctcttcagttaacccttgttttatttctgaatatattcggacgcctttcgttaggaaacaaatagaattatcagcaagcggtgcaagccattcaatgcagaatattgggcaagatacgataaaggaacttttcgttgcactaccacccgaaaatgaagttcaattattaattgattttatcgagaaagaagccaatgtatttaatacattgactgatttatctcatcatcaagttgcgctactccaagaacgccgcaccgcccttatctccgctgccgtcaccggtaaaatcgacgtacgcgactgggttgcacctgatatgcaagacgctgaggagccacaggagaccaccgcatga

SEQ ID NO: 433614 - DNA, 2067 bp, Serratia marcescens
atggatatcgttgccgatattgaagcaggtaagctgactctcgatgaagtgatcggttctctggccgaatataaagactattcgcattcagagtgggatcgtcgttaccgtgaattcacggcgtcacttcagcaaacgccgacattttctgagcccgaaacggatgatctggttaaacggctttggtacgagcgtgataacgggattgccagtattcggcagggtgttccatcgttggctgaattccaacaaagcctgccgttgttcagagagctgaccgagcgcattcgtcgccagcctgatgaacaaacttaccaatatgtagaagtcgctttgcagcaagccaaggagagcgggcagctcaagcggatgtattggagtttgcggaatcgcgtctttgcggcgtttacaccggcaacctgcaccagcacggtggacgagaatgcattcaccaaaacggcgacgtttctgaatgatcgattttccctggcgctcgcgcttaccggaaattggctgcaaaaaaaccatgaactgaagaatgcgattaacgcacggttacctgatgcggacccttactatgtcaacatggcaatctggcatctttacgaattgctgcgtgagcgcgatggcgagcagaagcaacaggaagtggctaaccatcctgcagtagaaagccataaagtcgtgagcccgcagataccgcagcactcacctgtgaacgctatctactttggtccaccgggcaccgggaagactttcgtcttgcagcaaaagatgaaggagtacaccacccaagcggcctccgctgactatgatgcttggttagattctcgtctcgaaacgctgaactggatgcaggtgactgcgttagttttgttagatcttaatagaaaagccaaagttcgtttgctgattgagcacccttggttccagcgtaaagctctattgaatggccgcagcagtaatctatcgcaaactgcgtgggcaacgctgcaatcctttaccgtgccagagtctactacggttgaatataaaggccgccgtgagcccgcgattttcaataaaacggcagagagcgagtggttcctggttaagccgcagctagaacaagtggaagaccttatctcgctttatgatgagttaaaacgaggcccacaaaccgcagaggcgattcagcgatttgccgcagtcaccttccaccaatcctatggttatgaagagtttattgaagggatgcgagcccgtgcagatgacaatgggaatatttcttaccccatagagccgggtattttcatgcggttatgccagcgggcgaaggccgatccggcgcatcgctatgccatttttattgatgagatcaatcgtggcaatatctccaaaattttcggcgagctgatttctcttatagaaatcgacaagcgggctgggatgagcaatgcaatgagtttgcagctgtcttatagcggccaactattcagcgttcctggcaacgtagacattattggtgcaatgaacactgcggaccgttcgttagcgctgatggataccgcattgcgtcgccggttcgattttattgagatgatgccggatctttcattgctcagcggggcgaaagtaaagggcattgagcttgagtctttgttagagaagattaatagccgaattgaggcgctctacgatcgtgagcatactttagggcatgccttctttatgccagttaaaaaagcctgtgatgcgaaggatgatgacttggcatttaaacaactaaaggcggccttccagaagaagatcatccccttattgcaggaatacttctttgatgactggaacaaaatccgtttggtgctggcagataatcagaaacaaaacgacagcctccaattcgtgatggagcaaagcgacgatctggagattctttttggtgccgatcatggtttacggcgccacgatcagcaatcaaccgcctacgaactgaaagcgtttgagcatgaagtctgggatttgccacaggcttatcgtgcgatctatcaacctgaagaagccaccctggctgtacaaaatgggtaa

SEQ ID NO: 433615 - DNA, 951 bp, Serratia marcescens
ttgaccctggaaggtctggcgctgcggcccaacgccagcatcggcatcgcgcactacctcaatcagggggaaagtgcggaacagctgctgcgcagcgccacctcggcgatgatgtccgcccaccgtgaaggaaaaaatcagatcctgttcttcgagcccagcctgacggaacgcacgcagaagcggctgacgcaggagagcgagattttgcacggcatcgagcagcggcattttacgctgttcctgcagccgcagatcgacatgcagtccaacgaggtgatcggcgccgaagcgctgctgcgttggcagcagtatgacggcagctataccctgccggccgacgttattccgctcgcggaagagctgggcgtgatcgtgcctctcggcaactgggtgctggaagagtcctgccgcatcctggcggactggcagcaacgcggcattgcgctgccgctggcggtcaacgtttccggtatacagatgcagcatgaggcgttcgtcccgcatctgaaaaacctgctggcgcagtatcggatagacccgcgcaagctgctgctggagatcaccgagacggtgcgcatcgacgatctcgaccgcgcgctggcgctgctgcgcgagctgcacgatctgggattgtcgatcgcgctggacgacttcggcatgggctactccagtctggaatacctgaaccgcttgaaatccctgccgatcgatttgattaaaatcgaccgcagcttcattcaggggctgccggccgacgatgcgatggtgcgcatcgtcagtgcgatctccgaagtgctggcgttgccggtgatggccgaaggcgtggaaaacgccgagcagcgcgactgcctgctgcagcacggcattcgcagcgggcaaggattcctgttcgcccggccgctgccgcgcgtagcgttcgaagccgagttttgccgcgcggcgccgtaa

SEQ ID NO: 433616 - DNA, 2604 bp, Serratia marcescens
atgagccgggtattgagcctgctgctggtgccgccggtgcgtcaggcggtgcagacgcgctaccgcggctatcgccgcaatggcgcatcggcgctgaccgcctttttcgccacgctgctggtggcgttgggctggctgctgctgcgcttcgagtcgccggcctggcagcgcgtgcgtaccggccgcgcttactggttcccgcatctgtccgccgaacgcccgcgcccggcggatgcgctgcgttatctgctgcaggggctgtggctgctgctgtttcgcagcggccgcgcgccggtgcagcgcgactatttcgccggttggcgccgcctgcagcagcgctatgccgactggctgcagggcctgccgcagcggctgaagaacgccggcgtggaacagcgctcggtggagcgcctcggccgcatgaaccgcggcatgcggcgcgcgctgtttattctggtcagcgtgctggcggcgatcctcgccatgctgtgcatctcgcaaccgttcgatctgccggcgcagttcgtgttcgtcctgctgctgtgggggatcgcgatggtggtgcgccgggtgccggggcgtttgcccgcgctgatgctgatcgtgctgtcgctgaccgtctcctgtcgctacctgtggtggcgctataccgccacgctgaactgggacgacccgctaagcctggtgtgcggcctgttgctgctggtggcggaaacctacgcctgggtggtgctggtgctgggctatttccagaccatctggccgcttaaccgccagccggtgccgctgcccgccgatagcgccagctggccgaccatcgatctgatggtgccgacctacaacgaagatctcggggtggtgaagcccaccatctacgcggcgctgggcatcgactggccgaaagagaaggtgaatatctatatcctcgacgacggaaatcgccccgaattccgggcgttcgccgccgaagtgggggtgaaatacatcgccaggccgacccacgaacacgccaaggccggcaacatcaacaacgcgctgaagcaggccaccggcgagttcgtggcgattttcgactgcgaccacgtgccgacgcgatccttcctgcagctgaccatgggctggttcttcaaagacaaaaagctggcgatgctgcaaaccccgcaccatttcttctcgccggatccgttcgagcgcaacctcggccgcttccgccagacgcccaacgaaggcaccttgttctacgggctggtgcaggacggcaacgacatgtgggatgcgaccttcttctgcggctcttgcgccatcctgcgccgcagcgcgctggacgaaatcggcggcatcgcggtggaaaccgtcaccgaagacgcccacacctcgctgcgcttgcaccggcgcgggcacacctcggcctatatccgcattccgcaggccgccgggctggcgaccgagagcctgtcggcgcacatcggccagcgcattcgctgggcgcgcggcatggtgcagatcttccggctggacaacccgctgctgggcaaggggctgaaactggcgcagcgcctgtgctacgccaacgccatgctgcacttcctgtcgggcattccgcggctgatcttcctcaccgcgccgctggcgtttttgctgctgcatgcttacatcatcttcgcgccggcgctggcgatcgcgctttacgtgctgccgcacatgatccacgccagcctgaccaactcgcgcatccaggggaaataccgccattcgttctggagcgaaatctatgaaacggtgctggcctggtatatcgcgcggccgacgacggtggcgctgttcaatccgcacaagggcaaattcaacgtcaccgccaagggcgggctggtggaggaggagcacgtcgactgggtgatcacccggccttacatgttcctggtgatcctgagcctggccgggctggcgttcggcgtttggcggttggcctatggcccgacggacgaggtgatgacggtgatcatcagcctggtgtgggtgctgtacaacatgacgattctcggcggtgcggtggcggtggcggtggaggccaagcaggtgcgtcaggcgcaccgcgtggaaatcgccatgccggcggcgatcgcgcgcgccgacggccatctgtatccctgcacgctgcgcgattactccgacggcggcgtgggcattgagatgcgggtggaaaacgcgttgaaagacggcgacaggctctcgctgctgctcaagcgcggccagcaggagtacagcttcccctgcgtggtgacgcgcgccttcggcaacaaggtgggggtgcgcctggtcgacctctccacccgcgaacacatcgatttcattcagtgcaccttcgcccgcgccgatacctgggcgctgtggcaggacgggttccccgaagaccggccgatcgaaagcctgcgcgacgtgctggcgctgggcttccgggggtatgtgcgcatggcggactacgcgccgccgctggtgcgcggtctgctggtcggggtcacctcgctgaccgcctgggtcgtgtcgtttattccgcgcggcgtcggcagggatccgaccttgggtcaacaagaaacagtgggttag

SEQ ID NO: 433617 - DNA, 612 bp, Serratia marcescens
atgaagaaattgacttttttatatactattttgtttctgacatgcaccgtacctcacattgtaagtgctcaaacaacattagtagctgaagatgtagccaaaccaaacgctacaaattctgcagtagactcgtatataaaaaaatcggaaccagaagaaaatgcaaatcagaatttgcagtcacaaaaaatctcggcattaagttcattgtctgatgagcaaagacaacaaattctctatctgcaagagaaagttaacaagcttgaaaacagcagtggccttaattttgccgtatggagtgggattttattaacttctgtcgcagttattcttactgttttaggtatcgtgatggcgctgttttcattcttaggttataaaaagatgatcaaaagtgcccaagatgctgcagaacgtatttctgtaagtaaagcaacggaagtatcggagagattagcaccagatgtcactgaaagtgtgttgctgaagctaatggatcaaggaaatttcgatgctctaattttcgagtcagttcaaaaagtaacctatcgtggaattgcatttgcttctggggatatgctcgaagaaaatgaagaggagggagggaaatga

SEQ ID NO: 433618 - DNA, 1131 bp, Serratia marcescens
atgtttttattagaagatttttttgattttaaatatatacctattctctcactaagtctctccgagatggaggcattagagcacctcccagaaaaagataaagatttaatcttgccaatatttccattgaaaggatggatgagttctcaactattagagaattcgctaaacaaaataagtaaaaccatctcaaataggaaatggatagcatattttgataacgaatatttatctggaaacaagaagtttctgcttaccggttcttaccctagagaagtgtttaatcaattggctgaattaagaaaaccaaatgatggatataaaaactggtacgaatttttaaaagaaattccagaagctataccaacagttttccttgatgatttatcacaacttgaaagtcagataacgcagctgattagcttaaaaagagggctaacatttgtgttcgaagtaaaaaaattagctcttacatcttacaatgaaattatcaataaaatatcgcagctaaaaataaatgatattttgtttgtgtatgatgtaggaacgattggaaatgattacaatgattactaccagcctttgtttaacctaataagaaaaacaaaagaaattattccatttgcaagagttgccatatcaggcacctcgtttccgtttaatttcgcaggttaccataaaggtgagaactcaatttatgaaaggctattatttaataaactaaagaactctattaatttttatcctattatatactctgatcgtggaagtgctcgaattgaaaaacaatcaggaggaggaaatcttccaccacctaggatagattatgcattaaagaacgattggcgttttattcgacgtgagttccgagatcctaaataccctgaggatggtgaaaaagaacatctttattttctttgtgccaatgagatcatgcagcaagactattggtctaagagcttacatttgtggggaactcagatgattgagttgacatcaaaaaaagaaaaattcgggataaatactccgcaaaaggcaacagcagttcgaataaaccttcacctatatactcaattacattatgactatgttcttgaggaaattgatactgatgaagattgggaagattga

SEQ ID NO: 433619 - DNA, 702 bp, Serratia marcescens
atgagtaactttaacacctttgagaaagaaataaagaaaattgttttaaatcaattatttgtcaagaatgaattatatagaaacgtcacggtaattaatgaattaacaattgactcattctcaaggagagtagatcttgctgtcttaactaatcaaaaaataatagcttatgaaataaaaagtgatgcagatagcctatataggctatctgggcagatagaaaaatatcgtcaatactttgataaggttattgttgtttccactccaaagcatctagagaacatattaaatctggtcgatgatgatattgaagtttgggaggtgagagaacagaaagtgaccattaagaaaagaggaaaaacttctaagattaggaacaaggctgactatcttgatttgctaagagtacaagatatgagaaaacttgctaatgcctttgaaatatcaatcggaaaagggaataaaaaagaaataaagggaaagttgataagtaatattaataaaatatcatacgaaagactaaagctatttgtgataaatgttctatcacagagatataaatttacatcagatagttttttagacaatgttaatgcaaaaaaaagagtgactactaatgatttgattttccttagtccttactctaaaaaacagaaccaatactctatagttaaaggaagtgtattggaacaattaaaataa

SEQ ID NO: 433620 - DNA, 1191 bp, Serratia marcescens
atgcgacttaacaacttacaaatccgtaatgccaaacccacccctaaaccttacacgctgagtgatggcttgggcttatcccttttggttgagcccaacggcagcaaaaactggcgctttcgttaccgctttgccggtaagcccaagatgatttcatttggcgtctatcctgccgtttcgttggccgacgcacgatcaaaacgcgatgaagccagaaaactggtcgccgagggacagaaccccagcgcggttcgtaaagagaaaaagctggcgcagctatacggggatgcgaacacctttgaagcgatcgccaaggagtggcaccggtcaaaattggcgacatggtcggcgggctatgctgcggagatcatgcgtgccttctgcctcgatattttcccctctctggggcaacgtgctatatcgacgataaagccacttgagctgctcactgtgcttcgcaagattgaggcgcgtggagcgctggataaaatgcgcaaggtcaggcagcgctgcggtgaggtttttcgctatgcgatcgcgacggggcgtgctgaatataacccggccgccgatctctccagtgttttacctggacccaatacgacacactatccgttcttgactgtcgatgaacttcccgatttcttgacggcacttgagggatactctggcagcttgttggggaagttggcgacgaagttactgatgttgaccggagtcaggggcgtcgagctgcgcatggcgcagtggcaggagattgatctggataatgccctctgggagatcccgttgaagcgtatgaagatgcggcgggcccaccttgtgccgctatcgacgcaggcggtggccatccttaacgagctaaaagcctacacgggccattatcgttatgtcttcccgggacgggcggatgtgaacaaaccgatgagtgatgcgtgtatcaaccagctcctcaagcgtatcggttatcacggtcggctcacaggccacggcttcaggcacatgatgtccacggtgttgcatgagcaggatttcaataccgcctggatagagatgcagctcgcccacgtggacaagaacgccattcgcggtacctacaaccatgcccagtaccttgagaagcgtcgtgacatgttgcagtggtacgccgattttatcgcgggcctggcccagcggcctcaccgccaataa

SEQ ID NO: 433621 - DNA, 264 bp, Serratia marcescens; identical to SEQ ID NO: 428071

SEQ ID NO: 433622 - DNA, 570 bp, Serratia marcescens
atgcaaataaccactacactcactcttacagttgcagaagaaaacgaaatatctgcgatattaggttgtgacgttgccgatctaaatgctcgtcttaattcgtgcctttctgcctctatccaagagtacttagccatgtttcgtgggcagaaggtatttaaacgtgggagcgatttgcttgagtatcgactgtttctgctcatcgaaacggcattcaatggcgcaatccccgacgaacgtacagtcagcagcctgtttcaaacaacattgacagaaagtcgagcacttattcgatcggtgatttcaaaatatcagtatcaattgaagtcacacatcgaacaaactctcagctcatcactaagggcggctggccgacagaacaacactcaagattatactgtagttattaatagccaaaacgtagtcgatgaattaaataaggctcttgctgatattgatggaagtcttgcgcctgttggaaagaagagggggagcgtatctacatatgaaatatcaccttcttcctataatcgcctttgtgccaagtttaacgtacagccgaaaccctga

SEQ ID NO: 433623 - DNA, 297 bp, Serratia marcescens
gtggatttctacagcggcaccggcgcgcggcgccaaaccgatcgcgccttccaggcggcgggcatccgccggcacgtcagttttgaaatcgatcatatcgaatggttggagaatctggtgcggcgcggattggcggcgggcatcgtaccgatctcgaccgcgcaacgcctaagcacgctggtgtcgattccgattgaagacgggccgcgacgccaggtgtattgcatctggccgcagcccttgtcaaacgccgccgcacgttttttacagttcagcggcatcgatatggcggggtag

SEQ ID NO: 433624 - DNA, 1134 bp, Serratia marcescens
atggccgacgatttcagtagccgctggcaacagctggattgggacgacattacgctgcgcatcaacggcaaaaccgcacgcgacgtggaacgcgcgttgaccgccgacaagctgacgcgcgacgactttatggcgctgatctcccccgccgccgcgccgtatctggaaccgctggcgcagcgcgcgcagcagctgacccgtcagcgcttcggcaacgtcgtcagcttctatgtgccgctgtacctttctaacctgtgcgccaacgactgcacctactgcggcttttcgatgagcaaccgcatcaagcgcaaaacgctggacgcggcggagatcgcacgcgagtgcgaagccatcaaggcgctggggttcgagcacctgttgctggtcaccggcgaacatcagagcaaggttggcatggactatttccgtcagcacattccggctatccgccgccacttcagctcgctgatgatggaagtgcagccgctggcgcaggacgagtacgccgaactgaaagcgctgggcctggacggcgtgctggtgtatcaggaaacctaccatccggccacctatctgcagcaccatctgcgcgggcagaagcaggattttcattggcgcctggccacgccggatcgcctggggcgcgccgggatcgacaagatcggcctcggtgcgttgatcggcctgtccaacagctggcgcaccgactgctacctgctggcggaacatctgttctacctgcagcaaacctactggcagagccgctactcgatctcgttcccgcgtctgcgcccctgcaccggcggcattgagccggcgtcgatcatgagcgagcctcagttggtgcagctgatctgcgccttccggctgttcgcgccggacgttgagctgtcgctgtctacgcgtgagtcgccgtacttccgcgatcacatgatcccggtggcgatcaacagcgtcagcgccggatccaagacgcagcccggcggctatgccgacgacgtgccgccggagttggaacagttcgagccgcacgacggccgcacgccacagcaggtcgccgaggccatcagcaacgccgggctgcagccggtgtggaaagactgggacggttatctgggacgcagcacgcaataa

SEQ ID NO: 433625 - DNA, 675 bp, Serratia marcescens
atgaacgatttagagctaaatatttattttgtggcatttatagatatcttaggtttcagctcaatggttagccatgattgtgagagggcatcttctgaaaagaaattcctgacaaaactcaatgctattcacaatgaaacaaaatcactttctgacactattcctggaattgatgttaagcaattctcagattctatagtattatctactccatactcaaaagatacagtgttatttcaagagtttgttgaggtggtttgtaagtatcaataccatttattgatgaaagggattctgtgtagaggtggtatatcttatgggaaacacttttcaaataaggactttatctttagtaatggtctgattgatgcttatagaattgagtcaacgatagctagaaacccaaggattatagtttctaatgaactgatagagttgtttcctttaattgttgaacaccatatgctagctagagagcatgatggctattattttcttaactatctgcttgccaatacagcagcagagaattgggatcttattaaggctgtagttccgaataaaatggtggaaaactcatctataagagagaagcatatctggttattggagctttataataaactatatcctaacagtattgtacgcttaacagaaagattcactttcagttag

SEQ ID NO: 433626 - DNA, 1068 bp, Serratia marcescens
atgaccaaaatagtcactctttacaatcataagggtggagtctccaaaactacaacctgctttaacttagcacatttcttggctgtaaatgggcatcgcgttctggctgttgacgccgaccctcaatgtaatttaacagagttaatgttggctcctcgccttgcagcactagatgagaaagaaagagtttctggggaggaacaaaaagttgagggcaccagtttacttgatgtgttgaagccaagaataaatggggatgttcctcaagtagatttggatgcagttgaagtcattaatataagtgattgtttgcaactgctgagaggagatgtttcgcttagtgacattgaggactctttagctgaggctcacatacaacgattctcgaacaaagttcatgagaaaagaacatatgttgcattatatgattttttaaagagatatggggataaacatgatattgactatatattaattgatgttggacctagttctggtgctttaactcgttcttgcttcttggcctgtgatggatactttatcccaacggcacctgacaggtttaatgttcaagctatagggactttgtctgtcataataagccgttggattcgtgaacatcaacaagtttataatgattttattcagattgatatgaacgttgcaaaagggaaaccgaagtgtttaggtgtaatattacagaactttaaaataagagggggtaaaccaaaaccaagttatagtatgtggatgaagaggattcccagtaaagtggagtcctcactttttcctaagttgcgagaattcaatgaggagaatctggatctaacgagcgcattgtctggagataaaattatagctgctcatattcgagactttgagagccttgcacctcttatgcaggaagttggtaagccaatctttgatcttagccaagatgatactcgtgttatggatggggatagtggcaggccttggagtggttccgtgtgggatagtgcttcagagagaatgaaggattaccatgctaggatttcacaaatagccgggaatctggagttgttgtga

SEQ ID NO: 433627 - DNA, 210 bp, Serratia marcescens
atgagctgggcgcaacggctcaagcgggtcttttccatcgacgtcaccacctgcgcccactgcggcggcgcggtgcggatcgtcgccagcatcgaggaacccaccgccatccgcgccatccgcgccatcctcgcccacttcgagaaacacggcgcgctggagcaagcgcactaccggcccgcagcgcgcgccccgccgccggccgcgtga

SEQ ID NO: 433628 - DNA, 420 bp, Serratia marcescens
atgctccccggccagcctgcgcaccatccagaaataggccggatagggcagcagccgcatccctttcatcagccaggcgagccggcgcgggaagacgatctcgaagccgctgacgcaggctcgctggagggcgatgccggcaaggtcggcggcttctcgctgcatgccggcgtggccgcggaagcacacgaaagccacaagctcgaaaagctgtgccgctacatcacgcgcccggcgatcagcgagcagcggctgtcgatctcaccgcagggtagggtgcggtatcagctcaagacgccgtggcgcaatggcaccacgcatgtcgaatgggatgcggtggacttcatcgccaagctggcggcactggtcccgccacctcgcgcgcatctcacccgcttccacggcgtattcggggtctga

SEQ ID NO: 433629 - DNA, 738 bp, Serratia marcescens
atggtccatgccgccgtcagcaaggtcggccgcctgctcgacggtcccgacacgatcatcgccgctctgtccgacgccgtcggccctgccggcaccatcctcgcctatgccgattgggaagcgcgctacgaggacctcgtggacgaggacggccgcgtgccgcaggaatggcgcgagcacatcccacccttcgatccgcggcgctcacgcgcgatccgcgacaatggcgtgcttccggaattcctgcggacgacaccgggtgcgttgcgcagcggcaatcccggcgcctcgatggtcgggctcggcgccagagcggaatggttcaccgcagaccatcccctcgactacggctatggcgagggttcgccgctggccaggctggtcgaagccggcggcaaggtgctgatgctcggggcgccgctcgacacgctgaccctgctgcaccatgccgagcatctggccgacatccccggcaagcgcatccggcggatcgaggtgccgctggcgacgccgaccggcacgcaatggcgcatgatcgaggaattcgataccggcgatccgatcgtcgaaggtttggccgaggactacttcgccgagatcgtgacggcgttccttgccggcggccgaggacggcagggcttgatcggcaccgcgccatccgtgctggtcgatgctgccgcaatcacggctttcggtgtcgcctggctggaatcgcgcttcggctcgccctcatcctga

SEQ ID NO: 433630 - DNA, 165 bp, Serratia marcescens
atgcgacaggcgcgtaatctgacgcagttgttcggctacgatgaaacggtgttcttcgttgcaaataaccagagggttagaaatttccaagccatcaagacggtttaccgtcgtttgcagcatagaaaactcactgcacaatgccaaaaactgtttaggaaataa

SEQ ID NO: 433631 - DNA, 216 bp, Serratia marcescens
atggtcgacaccattcgctgtacgataatcccacatgcggattttatgcaacaaccatttagccaaccgcccctttatcccactcatgagattagcttcgcgcaggtactgatgctgcaaatcccaagcgtaacgtattggagagtggacataactgatatgcaactggtcagggccagtcaacacacctttagctaccgcatgactactggataa

SEQ ID NO: 433632 - DNA, 192 bp, Serratia marcescens
atggctacgacccttaccccgactcatcctacattctgctttttgtttgcggccgtgcgccgttctgcgttgactgcttcgccccgtatcgtgcgcaccgtggcggattctgagcacaacgctcgccgcgtgctggcccgtgattatgtgttgtcctttgccggtcgtctgccggttaaggcggcagcatga

SEQ ID NO: 433633 - DNA, 450 bp, Serratia marcescens
atgagcaataacccattcagcagcgtagtgaaaaactcattacatagagtcgatagtgtcgttaaagccgctagagatctggaagagtatttagttaaagcctctgaggcgctaaacgatactatcactggcccacaaacaatataccttacaagtgacgatgcgaaatcaactgcgcgcttcaatgcatttcttagtttcatagataacaccaatggcgtggacaaaaacaccaataaaaacatatcaatttgcaatggcttgacgggagaattggttgccagatggaaagtcaataaagaggcaactgaaatgaccattacaattggtaaagtagttaatatatatccggttaatgagactggttacataaacgcaatcagcgatattcttgagtccagcgaagttatgactcaggctgttaaactaagaaacagtactacgatataa

SEQ ID NO: 433634 - DNA, 936 bp, Serratia marcescens
atgaaaatgaccttttggaatagcgggataaaagcaacgaagggcaatcgcggagaatatagctacaaaatactggatgctgttaatagcatattcatttcaaaaaatagtgatgttgttttcatgtgcgaggtagaccgagagttcacgtcatccccaactgtattaggctatttaaatgaaaaaaaaataaacatcattgatgcatgcgatgaagttaaaagcagagtgaagtttgacatttgcgctatgtacgacccagtaaaaatagacgtgaagctcgaaaagtacatagtatataataacttacatgatgagctcgagcacacgggaaataatattaaagtcggggttatctttacccttaaatataaggaaagcattgaatccaattgtgtcgctgttatagtttctcattggccttcgaaaattaccccagggtatgagtttcgccacaaagaggctgcagagaaacttagggataccgcgcaagaccttattaaagatggatttcaagtggttcttatcggtgattacaacctttcaccggatgagatcataaaagatacgcctctacaatcctacaataataagttttttgcaacaaggagcagtttgagattatacaatcttggtttccatttccttgaacagcattctgtttgttgtagaaagattaatattcctttagagcatgcacatggttttggcacattcatatccagtagcaatcgtgcagttgaaacaggatgtgcaacctttgactacgctcatgtgggttcatcattaattaaggatggtccttggattatcaatgaagaagatacgcgtattttcgccaaccaagaaattattgatatgatttacggcaacgcctctcatcttgaccacttaccaataatcgtttcactcatggagaaaaaaaatgagcaataa

SEQ ID NO: 433635 - DNA, 534 bp, Serratia marcescens
atgaaagaaaccttaaaaaacagtgttaaatcaatattctcagtgttaatgattataatggcgggcactacagcggggatgttatttataaaagcagatatcagcccattaaacggtgccacctccattattgatatacaaacaagtcttgcgcagatgggtttggaatatgaggatcgagtaaataaattaaacactatgctaagcgcacaaaaagatatagttagtgcgattgaacaaatgaaaccagaacaaatagatactgccgctttaaaagcactaagccacagagtcgaaatattagaccaagagttaaaaaaactgagtgcggcaattagtgactctccggaaaaaagcttagccattcctatgatgagaagagacattagttctctagaaaaacagatcttgacttcctctgcaaacacacaaatacaattagaaagaatgtacgatttatttaagtggatatgcggaaccgtccttctaggtatgttgggcatggtattgaatcacttctactccaagaaatga

SEQ ID NO: 433636 - DNA, 660 bp, Serratia marcescens
atgcaccacacaacagatcggatcattgcgaacatcaaccacctgatgcaaaagcacagtgtcgccaccgtagcagacctggctaagctgatccgcgttccgcagccaacgttccatcgtcttatggctggcgaaaaccaggacccaaaatacacgctgctaaaacgcgtggctgactacttcaaaatcagcgtctccgacctcgtagagaaagatctgcgcaacgcgtcagcaggcaatgtcacaggggcagcagaagaagtgtcctttactcgagtccctgttatgggcagtgctcagctgggcagcgcaggccactgggttggcctcgataatggcgatggcttcgttaactggccatcacgcgatccggaagcattcgcactgcgctgcaaaggcgactctatgaagccccgcataaaggatggcgaatacgtggttgtcgagcctaaccacggttatttgccgggtgatgaagtgctgttggtcacccgcgatgagcaggtcatgatcaaaaccttcctctaccaacgtgacggcgcggtgcttgtcatgtctgtaaatgaagaacaccctcccctcagattcccagtcagtgacgtcgtgcgcatccagtacgtcgccgggatagcaaagccctcattacacggaacgtattga

SEQ ID NO: 433637 - DNA, 210 bp, Serratia marcescens
atgcagcaactaacatcaaaagagatcgtgaagttcctgattgcttcagggatgacgcagatcgacatccgccgcgaaacaggtattagccaagcgtccatcagtcgcattttgactggcaagctggccgacccgcgcgtatctgtcgcccaggccctacgtgatttgcatgacaaagttgaagcccagtcgaccgcaaacaaggcgtaa

SEQ ID NO: 433638 - DNA, 2157 bp, Serratia marcescens
atgccaaaacaacaattatggggtgccgcgccggatgattggttccatttttcgttcgtgcttgggctgacccccgatctactgccggttgtgtcgcgccctgatgcgccgatctcaccgaccagcaaactcaagaccaccggcaagacgccgagccattacaacgggcagggcatggttgccggcctgaaggactggaccgcgcgcaccagcaccgatgacgacgtcggccgctgggcgaagcaacccgactacggcatcctgctgcagacgcgcaccgtccgcgccctggatgtggacgtgtccgacccgattgtcgccgacgccattctcagcgcggtcaccaccatgatcggcccgctgcccaaacgcatgcgcgccaacagtccgaaattcctgctggcgttccagttcgaaggccagatgtcgaaacgcatcctgcgcaccgaagccggcaacatcgagttcttggccactggtcagcagttcgtcgcgctgggcacacacccgagcggcgcccgctacgagtgggacggtgggctgccagacgagatccccttgctgagcgccgacgacttcgaagccgtgtggtgcatgctggagagcgtgttcggcgttggcgaaaccgtcgtcgagaaagaagggcggctgcgcgaccgcagcgcgcgcgacgctggcgccacggacgagacggccgactaccttgatgcgaacgactggacactcgactggggcgcaggcggtgagcgttatatccgctgcccatttgaggacggccacagcaccgaaagcgccgacaacaccgcaaccgcgtatttccctgcgggcaccggcgggtttgagcaggggcatttccgctgcttgcacgccagctgtgcgcaccgcaacgacggtgacttcctcaacgcgatcggcatccgcgacaacgacttcgacgtgatacctgttgcgccgacggaaaagccgccgctgccggcgttcattcgcaacgagaagacggggcagatcaaggccaccatcgacaacgccgccaaggcggtgatgcgcccggacttctgcggcgtgcagatccgctttgaccagttccgcgacgaaatcatgttcgcgcccgagaacagcgaccagtggcagccattcgccgacgccgactattcgcgcctgcgcatcaccctggagcgccgcagcttcgaggcggtaggcaaggagctgatccgcgacgttgtcatgcttgcggccgacgaacagccgttcgacagcgccatgacctggctcgagtcgctcaaatgggacggcgtgccgcgcatcgacagttttttccagcactattttggcgttgagccctcggcatactgccgcgcggtgtcgctctatacgtggacggcgctcgccggccgtgtactggcgcccggctgcaaggcggacatggtgccgatcctcgtcggtcctcagggctgcgggaagtccaccggcgtggcggcgctgtcgccggatccgtcgttcttcacagaaatctcgttcgccgagaaagacgacgacctggcgcgcaagatgcgcgggcgcctggtggcggagattggcgagctgcgcggcctgcacaccaaagagctggaatccatcaaggccttcatcacccgcacgcacgagaactggatccccaaataccgggagttcgccacgcagttcccgcgccggttggtgttcatcggcaccaccaaccaggacgagttcctcgcggacgacaccgggaaccgccggtggctaccgctgcgcgtcggtagggtgctggtcgagcaacttaaaacagacgtcttgcaactttgggcggaggcgagggagacgtttaaacgccttggtggcgtccagttccacgacgccgaggtgctggcggcgggtgaacacgagcagcacacgattaaggacgcgtggctcgaaatcgtcgagaactggcttgatgctcccgacagcctgaccgacgaggttccgcgaacacgcgattttttacgcgctgctgatgttttgcgtgacgccatcggactggacccgtgcagcatcgggaaacgcgaagaaatgcgaataagtaatgttttgcaaaattgcggatacaaacgggtttatcggcgtgtcgacgggaaagggtgcaaggtctgggcgctatag

SEQ ID NO: 433639 - DNA, 345 bp, Serratia marcescens
atgaacaaccctcacagctggcccgactggatcgagctgctgcagtcctggtggcgcggagaaacgcctatcgggggtgtgcttatgtcgatcacgatcaccattctgcgcgttgcctacaccggcggcggttggcgccaaatgctgcttgaaggcgcgctctgcggcgcgctgactttgacagcggcgtcatgcatggggcttatcggcttaccgccggcggcgactatcgccctgggcggcgccattggcttcatcggcgttgagaaggtgcgcggcgttctgatccgcgtgctgaaccagcgtttcggcgtcagcgacgacaacagcaaaccgcaggcgtaa

SEQ ID NO: 433640 - DNA, 249 bp, Serratia marcescens
atggaaattatcggaatgactgatgtgcaagccatgaatctggagatcttccgtctggtcatgagcgacaccactgccgccagcaacgaaagcgatcgccttgctggcgagcggctgaaatacgaactattccgggacagctacgccaacgcgtcgagtgatgaaagcattgtatcgcgtaccgaaattgcaatccgcaaggcgactgaggcgctggatctgttccaactttctgcaacagagcaatga

SEQ ID NO: 433641 - DNA, 828 bp, Serratia marcescens
gtggccgatgataacttaactaccccggtggtcatccaagcgacccgtatcgatgcaaccttggtgcctcaatcattcacccccgtgtaccgcgactatgtggttaaccaaggaacggatatggggaaagttgcgggtaaagcgaacgaggcgggccagggcgcttacgatgctcaggtcaagaatgacgagcaggatattgtgctcgataaccacgaagtgaggatcaccgccgcggaagaaacgctcgttaaccatgagcagcgcattaccgccgcggaagccacattagtaaatcacgaacagcgtatcaccgccgctgaggctgagcttgccgatcatgagacacgcatatcggccaatgaagcagagttggcggaccacgaaacgcgaatcacgcaaaacaccaacgatatttcggctttaggcacccggatgggtaccgcagaaggcgatatcgataccttggaaaccaactcggtatcgaaggcggtttcaacgagccagtctgtgcaggctacgggcggctcgttcctcgtgggcaacgtcgcaacgcctaccacggataagttgcaggttggtggcaacgttaacgtcagcggatcgtacaaagtggcgggcctgcctgtcctcggcgcgcgccaaaccggctggactgccgcaaccggtacggcgaacaaaggggcgttcaacgctgacccgtcgtttaccgtcggcgccacctattcgcaaacagaagttcaggccttggccgacgcgctcaaggctgcgtgccagcgcatcaaagcgctggaggacatggcgcgcactcacgggatgattaactga

SEQ ID NO: 433642 - DNA, 447 bp, Serratia marcescens
atgtataaacttattatttgcttggcaatcgttttgactcctgccacagttacagctacggatctcagtgaatctaaggtatcctcgctggcgaaatgcatcgggtactcaacatctttcgataaaaagacgttagacgagaagcgaagctccttaactatgatattcaagtcttattttgaatccgttcatgctcttatgaaaactgaaggatgggtttctagccaaaaagacaatttattccatgcgctgaatggcaaagaccagagccctgatttctacgcggggtatatcctttcaggtatcgtccaagcggaacaaacttccataagaaaatatgctgaaacacgattcaaagagagcaatggcgtcggcgacctaggaactctttggaatgaagaggcggtgaaaagattcaacgaatctaactgcgcccttattaaatag

SEQ ID NO: 433643 - DNA, 252 bp, Serratia marcescens
atggaagagttagagacgcagtttcatttacgtttgccgaaggaaacacacggcaaagttaagcagcgcgccaaaatgaacggccgctcgctcaacgcagagatcacgctgataatcgaagaagcactggcgcaaccgccgaaaataaccggctttcgcgacgacgccgaacgcctggcgcacgaacacgccgagcagttcaaacaggttgtggtcgaaacgttaaccacgatgtatcgaaaagacgaatga

SEQ ID NO: 433644 - DNA, 2211 bp, Serratia marcescens
atggctaattctgtcattccaactgcggtagttgcgttgccgtacaccccgttcactgctgccagaaagttcgctgcggtttctaacgggaaagtatatttaggcaaggtggacaccgacccgacaattgtcgaaaaccagatccaagtttttctcgaaggtgaagacgggtcgtttgtgcctgtggcgcaaccattgaagctaaataccggtggttttttagttaacaatggccagatagcaaaattcgtagtgaccgaacgtcatgcgatcgctgtatatgacacgtttggtgtacagcaattctatatcccagacgccacccgatatagcgaaggtagcagcggggataactcaatttttagtcgcacgttgcgggttcctgaaccttttattccggttctgcctccagctgcatctcgcgcaaataaagttttgggcttcgacagcctaggcaatcctatcggggtgttaccgcagaccggcagcggcacggaactggcgatagacttggcaaacaaaagcgatccgtttaaaggcgccggcatggttggttacaagaaaaccacggttgccgcggtgctagacacgatttccagcgtcaaactatcccagacaacaacgaacggcatgtattcggcatggccgcagggtaaggtgttcagccacaaaaacagggcgttctgcatgtttaacgttggcgaatcccacagcagcaagccgttgggcgtttatcaacagatctcacaggacggggtcagctggtcacgcttggcaccacgtatttctgcgtcgacgacagatttagctacgtggcctcagggtgtttctgcgtggggcgccggttctgatggcgataatatctgggttgcagctcgcttccgcagggtgtcggacgaatcgctgagcaagtgcgtgctgtataaaagcgttaacgatgggtcagtgtacaccccggtgcttgaccctgttccgctgtacgattcaaacgggtttgctcccgtgcttatgcattcattcgcagcgctgcccaacgggctgttggcatttggctaccacatgtatgactcggaagtcggcattgctactatcgacccggtgacgctggaggtggtcaagcacacgatgttctctaaggaggacatgggtggaacgccgatgcttgtagagccgacaattcgcgtgtacggcactcgggttatcggttttcttcgcacccagaataatgcagtacgcaaggcagtaatgtggtacagcgacgataactgccagacattcacaacacgcgaaattgacggcgtccctgaccaatcccctgtaacgtcaatcagctaccaggggaacacttatgtgttttactgcggtcgctatcgcaatggcaatagcaacagtgcgttgacggatagcccattgctaacgatgcgtgtaggcaccgacaacgatgctgtgaatatggcgtgggaaaactttgttgaaatccctgtcgctgccgtaccggctttgtacaacgatgcagggccgtcaggcactggtgtgcaggatgtgtgcgtgcgcggctctaaaattgtcgtttgcctgtcagcaaacatgggagccaacgttgatcaggctgaaattttctcggtcacattcgacatgagtgaacgccggaaaagcaactttttcctttcggaagaggccttcacaaactcaacccgcgccaccgatttttctgccaactacctttacgggagtgtaaatattgtcaccgttggcggcgtagccggcactctgcgcatgaacggccaggtcgttatccaggatcaggatgctgcggtacgttgggggtccgtcaacgcagcggcaagtaagctacacgtgttcaataacggtcctttccctgggtatctgtcagtggaggcggggagtacaaacgtcacgctttgggggagctccggtgtaaccgaaatccgggcgggaactgcgcttgctaacgcatcgattaaattggatacggtgaccaaacgcatctctctgtcaaaccccaataacacagggggagtggctcttgaagcgaatggcacgatcgcattcagcgcgaattggcagcatccgatcaagattgatggtggtgctaaacaaacgtatgaatgggtatcgggcaccggtaacaagatgtacaaaaaaggaactccgcctacttccgatagcgacggcaccattctctactag

SEQ ID NO: 433645 - DNA, 399 bp, Serratia marcescens
atgggaatgatgccaaaatttgccagcccggcagcagactacgttgagcgccgcttgagccttgacgagatctgcatttcaaaaccgagcgctacttatctgctccgtgccgccggccaggcgctggcggtcggtatccacgctgacgcgttgctcgttgtcgattcgtcggcgacgccggtgcacggtagcattattgtggccgcagaggagggcgtgcatgtgctgcgccgcctgcgcctctatccgtatcgcgcgctcgagtttctcgatggctcaggccgggaaaccgaactcggcaacgaagattcggaagagggagtccaggttttcggcgtggtgatgtactgcgtgaacgacatgcgaacctgtgaatgggacgatctgcctgttatttaa

SEQ ID NO: 433646 - DNA, 606 bp, Serratia marcescens
atgagcgataacagcgccgttcaaccggacatgccggccgtctccagcctgcccaaactgcatcaaaagaacagtcgactcactgttcttttttttgtgttcttattaattctggggatcgcgttcgccggggtgaacttatttaacgacgtcagcgacgccggcgccgtctataccagttacgttccgtttttattattggggctggcgctattgattgcgctgggctttgaattcgtcaacggcttccacgataccgccaatgcggtcgcaacggtgatttacacccactcgctttcgccgatggtcgccgtggtgtggtccggtttcttcaactttctcggcgtgttgctctccagcggcgtggtggccttcggcatcatttcgctgctgccggtcgagctgatcctgcaggccggcaccggcaacggtttcgccatggtgtacgccctgctgttctccgccatcatctggaacctcggcacctggtggctcgggctgcccgcctcgtcgtcgcatacgctgatcggctcgattatcggcgtcggcgtagccaacgccctgatccacggccgcaccggcaccagcggcgtggactggggctag

SEQ ID NO: 433647 - DNA, 738 bp, Serratia marcescens
atgcaggatcacaaactcggcacctttcgatttcaagaagtctaccgagcttttgatttctgcttcgctgcacataccggtagaacaaatcagcggtttgcccgtagcggccaacgcggccaacatttcgtggttagtgaagtcagcggaagcgaccttataaccttccatgccgtagttttccaacacttccaggctcttcagatcccaaggagtacacagcggggtcagccccttctccttgcaataatcgaacacttcaatcagttcttcattgctgagctggaattttctcagcagatccagcgtgtactgtgcgccaagatcggcggatttgtctttatcgttgccgcccttatacaaagagctcagatcgcgcatttggaacttgacgcaatcggcgcccgcgtcaaccgccaggtcaaccagatgcttagccagcttaatatcgccattatggttgttgccaatttcagcaataatgtaagtcggcgaggtttccgtgatagtgtgtttgccaatcgtcaggcctttttcgctttgcagcgcaacggcgaccaaacgacgataatcatcaaccagcggcagaacgtcaacgccattcgaaaacagcgattcgatctcattgcgtggcgcatccacttttttatagcggacgttctgattcatcacttccgacatttcgcggctcagatcgaagtcgccgttagtgatccaacgacggaaatcaccgtctga

SEQ ID NO: 433648 - DNA, 804 bp, Serratia marcescens
atgattataaatgaagatgttataaataaaattttggaaggaacattttccatagatgcatactctgtgatttttactcaaaaaaagaacgcccctataatattaaaaggtagtggttctatttatcaggataacaatggaaatttaaaaataaaagtgctatctgaattaaaaggagcaaattcattatatttcaacggtccttttgcagaggctggaattggaaaggttattgatgactgttattatttcgaaatgaaatgtatagattttgaatataatacatggttatctaatcatttggatccatttgcgggcgctaaacattatgatgaaggtttggtaattgatgctaatttgtcaatgataaaaaccacctttataggtaatgaaaaccttaactatactagattcataatatctcctggcaaggttaatttcccttcaaatggatttactaaagtaaataatagaaatgattttatagttagcacgattgagttggatgatgttaaattagaattaaaaagctacgatgattatctaatagttcttttctcaagtaaaatgacatttgaaaaagagatttccgttaaagtaatgcaagccctaaatattgtttctgggaataaacttcatgaaacaatttatcaagaagactttaatggaaaagtgcatacagtaatacgtagtggtatgttagataataaaggtataatattaaatcaaccaattaaaacaaccggcccatatcaatttgatgatttttcaggatttattagatgctacgttaattttttttag

SEQ ID NO: 433649 - DNA, 546 bp, Serratia marcescens
atgatttttcaggatttattagatgctacgttaattttttttagcggaaaaaatgataattttttcaattattggtggaagatatataagtcatgggccgggagtatagaaaactcagcattgtctttaactgtttcaattgaaggggttttaaatgaatatttcaagtcttatatggtaacggaagaggattttatagatgaagcaaagaaaacaaaaataattatagaggatttgttaatagatgaaaggataaagagtcgactggttcaaaatttaaatggggctggtagaggaacaccgaaaaatgcgctgtataaattagttacaaaaggggtgatatcaaaagatttagctgactgttgggttaagctaagaagcaaatcagctcatgctgtagaaattaatgggaatgcaagagaacaatatatctacgattacatgaaatgtttagagttattttacaagttattatttgaggttgttggatataaaggtaaatatatcagttttagtcagcctgggtggcctttggttcaggcttaa

SEQ ID NO: 433650 - DNA, 732 bp, Serratia marcescens
atggggcggccacttgctacagagttcaatgtcctgttgttcacaaagtacagaaaagcgcggctagagggtaaatatccgcgaactaatcgtgtgcagcaagtctctcatcgaacgatgaatttagagttcgcctactttcgagcaatgttcaatgagttgaagcgattagggcattggaaaggggaaaatcccattgaaaatgtgactgaatttaaaattgatgaatcagaaatggcatttctatctcaggatgagattcaacgcctactgacagagtgtgaaaatagctcatctcgcgatttatctatcgtggttgaaattgcgcttagtacaggcgcgcgatggtcagaagccgaagagttgcgacgttcacaggtaactaagcacagaatcacattcaccaaaacaaaatctggcaaaaatagaactgtcccaatcagtgaaactctttacgctaaaatcccaaaaaatagcggctcactattcagttcatgctattcagcattccgttctgccattaagcggactggggtggaactccctgatggtcaattgacgcacgttttaagacatacatttgcttcacattttatgatgaacggcggaaatattttagtactgcaaaaaatactcggacatagcgatataaaaacaacgatgcgctacgctcacttttccccggatcatcttattgacgcaataaaactcaacccattaaataacaattaa

SEQ ID NO: 433651 - DNA, 582 bp, Serratia marcescens
atgagcgaatttgaagacgactatcactattggatgcggaaacgacaaaccgttacagaacagcgcctccacccaaaccattggtttaacagggcatcagacttaagggcttctgctcacgttctatggttatcgatagagtctaaagatcttcagcagagaatgggatacggaggtggtttttcacttgaagttgcatgtagccccgtataccacatgctttgtggtttagctttggagctaattttaaaagcagtgatagtccagcagtcaggcaaagtgccggaggttcatgatttgaatcatttggtcagcttggcgggtatatcggttaatacaaggcgcaaggaattattaaaattctatactgccgccatcgtatggactggccgttatcctgtcccggctagatgtgatgatgacaagcttaaaaaatattgggaattagcttccaacgtacttacagagccagcgaaaggatttggcgctttaaaagtgcgcaggagaaatggtgcgtcagattgggataattttcaggcgatttatggtgagtttatggagaaattcgatttcggaaagtga

SEQ ID NO: 433652 - DNA, 771 bp, Serratia marcescens
atggatatccaatgtagggaacgtatcaaagaagaatttcgtgattgtgtttctagaactctcctgcgattacaggctgaagcaacaaaaatgcccttccatgaagcgcttctgagcaaagaagctgttttctggagtcgtttcgaacgctcatttagtacaagttttgggcaaagtgtcatcgaacgagtatctaaacttgtcgctgaatctacaaatgcagtaaatgtaacggctcaaaagcaaaccatcttcgacattgatcaagtctatctgaactcaattgaacaccatgtatcacaattaagagttaaaggctctggtgtaattgcccgttgggaagatgatgttcgcgaagtattaaatacaccgcagagtggaacgagcgtacaagttagagtgatttcagatctctattttttacgcgatggcattgaacactttttctctataaagacagttaagccaaatatcgatcaaacagcagaagccaaaagggatttgttaaaattaaaagtttacaatcctaactgtaaaactttctttggcctttactataacccttatggtgaccaacgttctctttatagttgggggccacctatgaaaatctttaacttccatacagacgaatgtgttcttttaggtcgagactactgggatactataggtggggaaggaacttatgagattgtaatcggtttggcgcaatctgttagcattgaaatgcaagacgtgattaaacaatatggtttaagaaacatgtcatag

SEQ ID NO: 433653 - DNA, 1398 bp, Serratia marcescens
atggattttctttcgttatggaaactaaaagtgagtaccacaattacagtcaatgaagccgccacaattttaggtatttccccacaacgagttaggactctttgtcgagatgggaaggtattagtagcacgccaatcaggtaaaacatggcttattgatgagggtagcgtcaataagttgaaagcacaatctcaattagatgatgagaaatgtactcttgaggttaagcgacctattgcattaagtttctttagcggtgctatgggtatggatattgggttagagaaagctggttttcatactttgctcgcttgtgagattgataagagtgctaggaaaacaattaaaagaaataaacctgatatagcattgattggggatatacgtgattatagctcacaagaaataatggagcatgcaggtttagaacttggcgatgaagttgatcttattatgggaggcccaccctgtcaggcattctctacggcaggtaagaggttgggtttagaagatgagcgcggaaacgttttcttaaaatatttagacgtcatttttgatattaagcccaagtattttgttattgaaaatgtaagggggttattatccgctcctttaaaacatagacctcataatgagcgtgggattgattttcctccattagagaaggaagagcatcctggtggagttctaaactatatatttagattaataaaatcatctgggtatagttgctcatttgaattatataatgctgcaaattttggcgttccccaggtgagagaacgagtggtcattatttgctctcgcgatggaagaaaagttccctatttggaaccaacgcatagccaaaatggcgaaaacgggctgccaaaatggaaaacattctcagatgctgtttctagcttgactgggattacgcatactcatattaactttcctgaaaaacgcattaaatactataagcttcttaagcctggagagtattggaaacatctgcccgttgaaacgcaaaaagaagcgctaggaaaatcgtttttctcaggtggcgggaaaaccggttttttaaggcgtttagcttgggataaaccttctcctacgctagtaacccatcctgcaatgcctgcgacggatctcgctcatccagtagagttaagaccgttatcgatagaagaatacaaaaaagttcaacaatttcctgatgaatgggttatagaaggtaagctactagaccagtataaacagcttggtaacgctgttcctattggattgggttatgctataggaaataatatactcaaattcgaacaaggtgtttctataaaaagttatgataactttaaatactctcgttataaaaacacatcagatgtagagtttgaacgagttttcaataagtag

SEQ ID NO: 433654 - DNA, 750 bp, Serratia marcescens
atgatgaaacaaggacgaaatgagggggtatggcgtcgggcggtgttgcgtatgcctggcgatatgcaggcgctgacgtgctcgatcgtgccggcgcatccgtgggtttatggcgtagggcggcaagaggcatctggtagttacctcagcccggccaacgccgtggattacctggcgggcaagttggccggccagggggccgaaatcaccgccaccgtgtttatgatctgcgcctactcacacgccgagtttatgccgttggtggcgtcgctgtcgggggtgctgccgctgccggcgttaaaccaggtgcagcgcatggcgcagacggcggccacgcaggccgttacccggatgcaactgcctgggaagatgggcggcggcttgccggcggcggcggcgctttcgacccctgcgcagcgcctggcgctgaatgcgcagcgcatcgcagaagccaaggcgggcgcggcgcttggggcgagcattggcggcttgcagtccgcgttggccggctttgccgaggcccgccaatccgccctggcgatggtgagcgaggccatgacggcgttacagggaaaaagcgcgccggcgtgggtgtttacggcgaaaggggccgccgccagcgttggcgcggcgatgaaaaaggatgttccccaccaggatgcggtttttaccctggcggtgttgttcgtaggcaaggatttagggcagttggaggcgatgatccatgacgatagtcacgctggcgcttaa

SEQ ID NO: 433655 - DNA, 3144 bp, Serratia marcescens
atgtcacaaaccgcgatcacctttgcctttgagcaatggaaagcaaaagaagccgtgaacggttcccgcgtggtgctggatgagttcgttttcgccaacgtgccgggcctcgatgccagcaagccgatcgaccgcaaagaagggatgccgccggcgggccagattgtgcaccgccaggcagtgaacaaaaccggcgtcgtgaacaacaacgccgtggtgtattcggtcaccctgggcaccgaggtgggcgattttgacttcaactggattggcctggtcaacaaggccagcaacacggtggcgatgattgttcatgcgccgacgcaacgcaaggtggccaaccatgccggccagcagggcaacgcgatcacccgctcctttgtgatggagtatgacggcgcggccagcgagacggcgatcaccacgccggcggaaacctggcagatcgactttaccgcgcgcctgggcggtattgatgaaatgcagcgcctgattaaccgcgatcactacggtgccggcgcgttctttggcaatgggttcctggtggccaaggccggcgcgcagtatttcgtgacggcgggcaccggctatgtgggcgggctgcgcgcggtgctggcggccaaccaaaacattaccgtgacggccaagcctatcaaggtgtgggccgatgtgagtttgcagggcaatgtggtaagccagtgggcggcagcggtgaaatttaccgttgcggcgaccgcagcggattacacggataaagccggctttacgcactatgtgtttgcggtggccagtatcgacgccgccggcaacattaccgacctgcgcccgcaaggctcgctgtccgaccaggccggcaatgatgcctacttgcgcaaggatgataatttggcctccctcaaggataaggcgaaaagccgggggagcctgggcctgggcaccgccgccacgcgcaacgtgggcgtggatggtggcgatgtgatggaggtcggggcgtttggcctgggcaggggggcgcggcatcgtgatgatgcttattgtaaccagggcgaaatctaccggttaaacaacacctcgaaaaatgcccccggcaatcaggtttatggcgtcttaagtctgccgtgcgacggtggcccgtcaggggggtatctggcggtgcaaaataacgctgatgcttttatcggtcggtcgaaccctcccgatcaagtggtaacttggttccaggtttacaccacgcgatttaagccgaaagcgcaggatgtggacgcggtatcggccacgcagggcggcgagttcaagaaggaaatccaggcatccggcggcgtgacggtggcaaatagctggagttctaaaccgggcgggcttttccctgggaacggggacggggccagctatgaaacctgcaatgtggatgtgaaaagctggtatggcctgggttttttcaatacctgcaaaggggaagggatccaggggcgcacggcgtttttgaacgtgcgcaccgggtcattctcggccaaggggcggatcactggcgcatccgtgtgggatggtaacgcccgcgtttactcgccggcgaacaagcccacggcggcggatgttggtgctctgaccgatgcccaggcggcacagaaatatgccctgcgctctatccgcgtgaacggtaagccgctgagcgcggatgtgaacttgttggcgtcggacgtgaacgcctggaacaagaccgaggcagacgggcgatatgtgaaacaggccggcgataccatgagtggccctctcgcattgccccgcgtggtatttcctagcgagggtatgcaggcattaaacgccgatagcgacctaacgcggcctgatggttttatgctcgaacaattgggggataaatcaaccggttacccactgaaaaaaggcaacctgggcaatttgatgacgttcaaactcaacaaataccggcatgtccagtttgcgatcgggtcaggcaatacagaattttggttgcgctctttgcgtgaggatcagccggcgacggccaaagcctgggcgcaggtctataccacggattataagccgactattggcgatgtgggggccgcagacaaaagcaacaattttgccgccagaatgggcaattcccgcgtattgaccggcaatagtgcaccaacgtctccaggtgtgtggagcgttgaaaatagttcctgggcggcggtgccgtggggatcggttctgtgtacaaccaacggtagcgatctgtctactgcgccaggcaatggcaagtttcagcactacttgcagctatcgcacgaaacgggcggcaaacctggcttgcgtgcagcggtcaacgtcaacggcacgtttagcggttgggatcgggtaatgatggccagcgggggaaactttaccggtcaacctatcgcgccttcttttgccagtacacccgaagtcaggccaaacggtgccggggcgtatgccgaccagttgagtactcaggctccgttcttccaacctaactggcaatgggatgtgaacactggcggggtatttgtgcctatcgccaaagggacatcaaccattaaggggcggggctacccgacggcagtcagttacggatatttgagaaccggtaacaatgagtttgctcaccccgtcatccatgcgcgcggggataataactttgaatgcatttgggatttcaacccccaggatggggggattcggagcaaggccggcgaattcgccaccagagaatgggtaaatcagcactgcccgttcccggtggggtatgtgatgctgttgggcaataatgtcgatcctcgcgcgatctaccccggtacagattggcaagatttgaacggtacaggttatgacgggcgagttatcagccttggctatgatgctatgcaaaccggcggtagtaaccatgtaacaatcggtgcgcacaacctgccggatcactcccaccggggtggtatgcgtggcccaggggcggaatacggtagcactgtctcgggaacggataacgatggccgtcacactctcaacatcacaacgggaacatacactaacagcaatggtaatgaatttgtccgcaacgagccgatcaacgtcaccaacgcctatgtgcatgttcgtggctggatgcgtgttgcatga

SEQ ID NO: 433656 - DNA, 345 bp, Serratia marcescens
atggccaaaggggtatggttgggcctgctggccctggtggccagctttgccggcggctggcaggccaatgactggcatcgggatagcttggagttggccgtaaaccgggccgcgcagcgggccggggaggaatcccgccaggcatcggagaacgtggccagccattcggcccggcagttggaaagcaagctggaggcgttgcgcgatgctcaaccgaaagagatccgcaccgaagtggttaagccggtatttacccgcgtttgtgtgtctgatgagtttgtcaggatgtataacgacgccgcagataaagccgaacgtgccatttcaggaaagtttgctcgttaa

SEQ ID NO: 433657 - DNA, 303 bp, Serratia marcescens
atgcaggagcatgagaaaaatattctctggttgttgatgttgggggcggtgatcgccgtggggcaagtcctgagcagcgaggaacccattaccctgcggttgtttgtcgggcgcatcgtgttgggatcggccacctcgatggcggcaggagccgcgcttatctgggtgcctgggctgtcgccgctggcgatagtgggattaggggccgcgctgggcatcgccggccaccaggctgttgagctgtggttgcgccgtaagggaagtaatcttttgaaagggaaaggaaaatatgactctgagtga

SEQ ID NO: 433658 - DNA, 504 bp, Serratia marcescens
atgagcaagttagagacgctaaccgcgttcctccaggccaatttgccggcgcgcgtggccaacctggaatttaacagcgacatggaagaagtgagctttatcaacgcgcagaaggatttggggctgaaccaataccaaatggcggtgatggagtacgaggcggtgttgtcctgggggcgcttcccgtatcgccaatttgacccgcgcaacctgtgcgcgctgttgctggcctggctgattgagaacgccgaccaggggctaattgaacaggggttcgaaccgactttgccggagctggcgatcgtggtcacggacgataaaaccgcgttggtggaaatcgcgctcaagatggccgagccgctcacgctgacccaggacgaagaagggctaatccctttcgacgggaagcgatggcgattggccgatccggaaatttggtgggccctggaagggcgcgtgtatggcgtgggcagcaccggcgcgccgatcggtgaaacgccgtga

SEQ ID NO: 433659 - DNA, 840 bp, Serratia marcescens
atgtcagattcgcaattaatgacgaactggatttgtgtttgcgccgaaggtgacacggtggacggccgcgatattaaaaggcaatggatcatggatgccgccgaactttacgacccgaatttgtataccgcgcttttatggccggaacactcccgaaattacggtaatcgggggcgggttttggcggcgatgtgtcaggaaggcgatgatgggattatgcggctgtatgtacagctttgcccgaacatctcactgatgcaagccaacgcagaggggcagctccttttctgttctgcggagttcaccccggacggcaattttcgcggaacgggaaaaagttacctggaggggctgggcgttacggattcaccggccagcgtttacacggagcgaatgcgttttagcaaacgccacaaaaataaacggtatggcgcattaaagccgctggcttttgatgaggtcaaagaaattaaagaggaagtgaagatgtcaggaaataaaaagaaaggctggcgcagtatgttttccattgaggaagaaccgcagcagccagaaatccccgaagatggcgataaattgcaggcgctggcggaagccttggccgagattgaaacgcgcctttctgcgctggaaggtaaagccgcagaaactgcaaccgccgttgaagaagtccaggaagatgtggataccgtaaaagaagttgtggataccaaagaatttaaaaccctgcgcgataatatcggcggtatcgtgaaaaacttcagcaagctggacaagcgcgtaacccaattgccgagccgcaatccgggtaaaggtcgccagccgttcaaattcctgtaa

SEQ ID NO: 433660 - DNA, 1941 bp, Serratia marcescens
ttgtggcagttggacaagaccgatcacaagtggcgcagtcagtacctgggcgaaatgccagattacctggcgggctactttggccgccggtatgagcagcttttcaaaaagggcgaggacggccgacgccgcgccaatgcatttttgcgcaccacggtgggcgaaaatatattgccgcgtctacagcaagttacccagcgatacgaaacccgcttccatacagcgggttttatgcctttcccctttaatgatgatctggcccgcttgccgaccctgggccgcgatgagctgcgcaacctggcgcaccgcgtggccgattttctggcggccagcttttccgactatatcgaccgcaaatttaccggccaggccaccacggataaagaaatgcgcgcccgcacctgggccgcctatcgcaacctggcggggctgtgccaacaggtgggcacggagccgccttactggcggcaggcaaccgggcgcggcatcaacctggcgcaaatggaatccggcttattgcggatgatggccccggagtggtggcgcgcgcggttgaagcgtcgccgtgatctgatgcgtgaacacctggccattgcagtgggccaggtgcaaaaagccgcgtcggcctatgtcagccgttcaaccctgggcgagtggatagagcagaagaaacgcaaccgcgaatttttcaattcgtttgagctggaaaacgaggacggcgatcgggtgtcgctggccgacatggtaaacggcagcaatgccaaccctgcaattcggaggtgtgaacttatggtaagaatgcgcggttttgaagatctggccgctgaaatggggtgtgtgggcgagttctacaccataacggccccgtcaaagtatcacgcggtgcatagcgccggcggttttgtgtcgcagtggaacggcgcaagcccacgggaaacgcaaaaatacctgtgtggcgtttgggctaaggcccgcgcggcgatcgcgcgcgccggcattcacgttttcggtttccgcgtggtggagccgcaccacgatggcaccccacactggcacatgctgttattcatgctgccgggcgacgttgaccaggtgcgcgatattctttgctatcacgcccgcctggcggagtctgaggagttgcagaccgctaaggcgctgaaagcacgtttccacgttgagcctatcgacccggcaaaggggagcgctacgggctacatcgccaaatacatttccaaaaacatcgacggttacgccctggacggtgaggccgacgacgaaaccggcgagaacctgaaagacatggccaaggcggtaagcgcctgggcaagtcgctggcgcatccgccagtttcagcagatcggcggcgcgccggtgaccgtttggcgcgaactgcgccgcctgcctggcgatgggcagatcattcccgatcaggatatggacaacgtgcgttttgccgccgacgtggggaattggtcggcctataccgagtttcagggcgggccgctggtcgcccgcaaagatttgaccgtgcgcctggcctatgaggtcaccgagcgcggcaacgtctacgcggaagatgtgcagcgcgtcacgggtgtttattctcctcgcttgggggaggagtcggcggtttgtacgcggttggtgaagtgggcgatcgtgcctaagttggccgaaagcgaagcggaggccggtttacctggcggcaacgccgccccttggagttctgtcaataactgtacgccagaggaatggcggcgattatcgagggagttacagcgacgtggttttgccggcgatcagtatgagatagagatactcaccaggggcagcgccctgcggatatacggcgaccgggtgttaaaaatgcgtaatggacgcctggaggagttggccagcgatccggcgtgtgagttgtggccaggctggaatgggtag

SEQ ID NO: 433661 - DNA, 723 bp, Serratia marcescens
atgagcaattcccggaaagtgatctttctttatgacgtcacagggctgatggcacagccgtggcttgatgcgggatatgaatgctggtgctttgacgggcagcatcctgaaggggtcacgcgcactgacaaccatgtgaaagtcgggatgtggttccatgccgctgacaaattgggacaggctaaaaagatatcagaccttgtcggggatggtgttgtgatggttatcgggttcccggaatgtacggatttaacggtagccggcgcgcggcattttgagaaaaagcgactggcgaatccgctgtttcagattgaagctgccgagcttgctgatcttgtgcggattgttgggctggtcacgggggctgcctgggcattcgaaaacccggtaggggtcctgtccagtatgtaccgtaagcctgatttttcgttccagccctgcgactttgcggagtatctgccggaagatgatcagcatccactttacccggaaatttaccccggccgtgatcgctacaacaaaactacaaatatctggtgtggcgggggatttgttaaacccaaaccgcgccgtcttgagccggaattcccgcaaaacccaggctggaagctttgcggaggtaaatccattcgaaccaagaatattcgtagcgctacgccgcgtgggtttgcgcaggcagtttttgaagcaaatcagcaaattatgctggggcaaaatgcgtga

SEQ ID NO: 433662 - DNA, 240 bp, Serratia marcescens
atgccaactatcggccaagacattagcaaccgcgccgcgcgcgcctcccttaaacatgcgctcgacctggcgcgccgcgaagcccaggcggatgccgccgtgaagttttccggccacttagaccgtatggccacctcaatggccaaccaagagttatccgccgttgagatcgtggagctgctgcgccaggacgcagagaaatggaaaaacgaggggctttcatgtgctgggtactgctga

SEQ ID NO: 433663 - DNA, 408 bp, Serratia marcescens
atgaaaatcatcatggtagaaaagcttgggcttctggacgattttgccgcgtggggtgttgctccaaattatgctcgtttcttcctggccaagtgccaagaggttgatggccagatcgcattggagccatttgtttttaatgactcagtgcatctgaccaatccacaccaatggcttgcggcgaatactgcattttggtgtcgggcataccgtgaagccgaaagcagtaaggaacaagcggaggtgctggcatcaatccgcgccattttctttgttgcgggtatgttaggccagggggctattaccgttcttatccgccgttggtggtgtgatacgtatgatttgcatggcttgccggccccgaatcaggcgcagctttcaatgatgatctctcatcacctcaattaa

SEQ ID NO: 433664 - DNA, 390 bp, Serratia marcescens
atggcaaatcatgaacattggttagcggtatgtcgcgccactttaaatggccaccacagcaaaacccgcaaggtgtggaacagccttagcccgtcacgccgtggtgtgttgctccacgctgccggcatgaggtcgctgttttgtaattacgcctgggacgatttcagccagcgcgaattgcgccaactcaagcgcggcatccagcgcttgcgcgtgatgctggatatgttcgccggcttcaacgatctggattttcgtgtagcggtgccgggtatgccggagcagcgcaagccaaacgctgaaaagaccaggcaacaggataccgccgcgcgcctgcaatcccgtgcggatctgctccagcgcattaccgcattacatgtaaaacactga

SEQ ID NO: 433665 - DNA, 1362 bp, Serratia marcescens
atgagaaagctaaaagagaacgggaaaaaactatttattcgaggctggaaaaaccacttggatgatgtttttcgtgggaaagagaaaggatatctcaggagaaaaaacgaaagtctaaatgtagtgataaaagatgaattttgctcagtgcaaaatccaattgtttcttttgttgagaaaatttctaataagaaagggattgaaaagcgttttttcgaaaaggaacgaataaaaattccacgcaaatttagtttttatgataatccagaagaatctcttttatttattcactctgtaagcaaatcaattagcagaggtgaaaggaaatcagttactatagactatgaatctgcgaagtatcactgtcttggcgctgaatgccttcttggtttggtagttactgaggcgaggaaatctaatgttaactttgacagtaatgtaatagttaacgggatatacccaaagaaacagtaccaccgagaaataataaagagtatcggtatagttaaagagatggatgaagctaatccaggcttgctgaaagattttactaataaaaatgacaatcctaaacagagagtgtttaaagtcgactcgattggcaaagaagatccttcggctttcgctcaggataggaaaaacaaaacagcagagagtttctctgcttatataaataaatgtctaaatgatcatgatttaaaactcaaagatgcagcggaaaaacacctcacttcatgtatgggggagttaattgataatgctgagcgacattgtgggttaagtcaaaggcctagatggtttgttagagggtatgtaaataataatgcgctacacccggtttgcgagctggctattataaattttggacaaacaattgcagagacttttgataacctccctgaagaccattattcgatgagtatacaagttaaaccatatgttagtaagcatttgaataaaaaaggtatgttcaaagaagggctggtgacagttgctgcattgcaggggcgtgtaagttgcaaaaacattacagattcagatagttctggcactggtactatcgaactattgaagtttttccaagatatgcatgatagcatggtaaggattagaggcatcgagatggataaacctgagatgtcattgatttctggaaaaacacatatagcttttgatggtcgttatccattgatttgtaagctggaagatgatgatgagagtgaaatatactcttacccatttaaccgagaaggtcttgcaactgcgccggatcgagcttatcttaaagagatgaaaaacgcctatttccctggtgtgatggtaaacattcgtttccctcttcaaaaaacgaaacaagtttaa

SEQ ID NO: 433666 - DNA, 744 bp, Serratia marcescens
atggcagggtggcctgtcatttttttagtcatttcatcttgtagtttaaatgctgagacctataatacagaaaatcctgtaattaactataataactcagctaaaggttctatctatagtatagataatggaggtgtctttgaacaggaaactccagatggaaaagtcatacttcaaaaaagtattaatagttcattttcgccatcatttctttcaaaaagcgtgtctcagtatgcaagcgggcattactcgttaggtgatagtgatatttacaactttattaaagttcctgagtcaaaccctgactattgggctatgtgcatttcaattctagctttaatctcctcgattgctgttccttttttaatcaataaaaaacagagaaaggatgctatcaatgaggggttttggctgcgagaggttattttccctaaaatcaatacgctaatgttcgatttctgtaatgagctaaaagctagttttaacctttctcttactcaatttgtgcagaaatatagttcggatttatcattgaggcttggtgagttaagagatacttttaatatgtttcactgcttccctaatcttcaggaaagaatagactccttggatgcaatatgtgatgagcttgaaaatgatattgacaatcatcagtcagagagtattgaaatccgtatcagtgatgtgtctaaatttaacacaaaaatgcttgccaaaatgctagatatacataggcaagtgtga

SEQ ID NO: 433667 - DNA, 756 bp, Serratia marcescens
atgttatataaatatgttgggcacaatgatcttgaaaaggttatatattatttaaagtgctttgttgaacatggtactatatttgcgagtcggcctattttttttaatgacccggctgaatttaagataatatttgattttgatgccaaaattgaagttataaaagaaaagtattttttagacaaccataaccattcagatgtcgattttcagaaatggtatgacagttttaatgaacaagctaaatggtacatgggatattcaactagaaatgaatatctcactcacaatggtacgatctgtttaacaagggatagtgataattatcttatgtggtcacattatgccaattctcatacagggttctgcatagggtttgatgacagtatcgttaactgtattgatgattgtgccgtttttggtgacgtcaactataccaattcaattccaaaattcaattatttcactgaggatttagtgaaatttttaaaagcaatgttcttccataaagggggggcgtgggcctatgaaaaagaatttagaatcattacgaataaatggggtctaaagaactttgataaaacattaattaaagaaatagtgataggctgtcgagcgccaacagagcttcatgattttgtttgtgaattaattggtgctggtattaatgtgagtaagatgaggctatcccaggatacttactctttgaaaaaaactccattgcagaaagatttttattttcaaggggacgcttaa

SEQ ID NO: 433668 - DNA, 630 bp, Serratia marcescens
atggctcgtacttatccaacagaatggaaaaagttttgcagaacaataagcacacccgctggctttaattattacacccaaaagattaataaaaatgtctctttaggtgatttcaatagattttcggctaggtattctttggcaaaagacttcatgggcatagatattcaaaatgctactatgaaaaccaagcttggctatgaggcattaatgaatgctctacttgtttggagtgttgtggagtattactatataatatttaaaacacaatccaattcacattatgatcttttaacatataataaaagtgaactagctgccattagaaataaatttaatgcaattggacttgacgtagacaaattctataaattcataagattgcattgtgacagtaagcacgcactcaatatagatgagttcttaaataatcgcgattataatcccgtaaggctcttatcagctattcgccacgtattttcccatgggacattaaccgctaacgtgagtaatgttaagtctgcatcagtaaactcaatcgtcaatatcctaaaggcatgtattttaagtaaaatagacgatgaattttcatcgatagttaaatcccatccgaattatttaatcgcatag

SEQ ID NO: 433669 - DNA, 1032 bp, Serratia marcescens
atgcaatattttgaagtggatacgttttatgacgaggtccctacatggactgctactgctataagtctgggttatcggtggaacctgggttgcggtaatgctcgccggatcggtctgttgtctatgccgtgcgagtcggaggctgctggtcttatcgctctgggcgccctgcggcgtgatctggagcgtacgacggcaaaccacgtggatatgcacttcgattttctgctgcgaacatgccgcgagcgtattgccgcgagggtgcgatccggggcgtatcctgaagagccctcgtgggatgtgcgtgactccgttgatgatactcgctggcgttttgttgcctttaatggcgagttaggtgccattgttctcgagaaagccacataccggcctttcgtcaaaaggaagggcaaaagcatccctaatccgcacggggtctgcacctgttacatcatgcgtggcaacgccatccgctggcagttgcgcgattgccccttgccgcagttagctcatgacgggaaggggttggaatactccaagtatcgcgatctcccgggctgcgtcggccctatcttggaagcaaatctgcgtcagtcctatgatggcttggtcttggttgggcagggaggggcgcgtgactccagctatatgcaaaagctttatgctgcgggtttcgcaacagctgaccgcaggtttccgctgggcgatctgctgactctgcatcacactgagcggcaatacatacggcgccttcgcttcctcaacgagagagtgcatcaagacgaggctatacatgcggcctggttagtggtggccgatggcatatcggcgctgctctgtgcggagaaactgttcccctcgagcgacatcattggtgtctgcaaccgtgatgcatctgtcgactcgatcctccagctcaaggactggttgaataatatcagccgctactacaaagatagggacgccagcaattgtttgttgggtgaaatgcaaaccggaatgcagctgcgtgtgctgcaacgaaggatgtga

SEQ ID NO: 433670 - DNA, 1608 bp, Serratia marcescens
atgattatcccgacaaccgcgcgcttgcagtttctagatagaaatccgccgttccaagagctctttattggcgagtctccgcttttttccgcgatccgccaccatatgcggatactttattcagcgctttaccagccagatagcgatccttacatgaacgagtcggtcttgctacttcgtttcgagatgcagaagtggctgacatcgcctttgatacccgatattggcctctttccccgctgtggccttgccgatgctactcagattcgccggcagtggggggaacatgccgcacaaaccgttggactcctgaaagacctgattacctgttacgctgaggcgggttctgtgcttaatgaggagttcgtccggttattcatcgaacttaagtgcgaatatgggaaagacaacgtcaggatctggtgccagcccaaagaacgcgacctttttcgcaagctgctcgaaggggtggtcgacctcaatgatgggggattcgtaagcacacttgcagagtaccgcaagatccctccggcagatgcgttgatccgattcggacctttgcgcacgcgtggcttcggcagtgcgccggaggcattgattacttccccatcataccgtcggctggtccgctttgtctggtcagggctggcagatgaggaaggatttgccgatgacccggtactgcccacctacaattatctgaccagcctgcgttcagtccggaccatcatcagcgagaatcccggaacgatgactgtggcttctacggctgaacaagttgatgatcttgtgttccttgacaataagacgtccacgggcaaagccttgcatcgatgtgtgctagtggagtttccagctgagtacggggtacttcttcgtccgggttcccgcttgctggtattcagtccccatcgcaccgacattggggccattggttacagacagattaatgaagtagaagcagatgattacctgctgattcacgatgctgatgctgaccttggtgaggttagtgtcgatgcctctaaaacgccactggctgccctctggaaaaaggcgctggctgatgcttggaaacgacatcccaatatatgccttcagaaaatgcagcaagccggcatcgatctccaagatctgcatcgtgcggtccacaaatggaaagaaagcaatggtactgtgataccggcgccactacgtaagaggcatttcgaagcattgctgacaaaggtacttgatccggatcttattccaccgaaggtggttaatggcggaactgttcttggatggcgtcgggcgtggagagaggtcgaggcctctcgggttaacgcgatacaacatggagcggttgagcatgccattgtaaacgaacaacttactgcggagctgcgtagagaattgcctgctattcgcagtatgctctcgttagtatatgtatatcctcaccggcttgagccggaaagtggcctgaccggcagcgtgttatttaaacctgtgattagtatttccccggactttgctgctccggcagaggtgctggaaaaactgctcaagctgccgattgctgaacggtatcgcgcaggcttaggaggcgaacatctgtgcgcatga

SEQ ID NO: 433671 - DNA, 1713 bp, Serratia marcescens
gtgcgcatgattcccggatttatcgacgagacttcaccgcccggtgagattgacctttaccggaaactcgaaagtgcccggtgcaactggaccgttatccattcgctggatctggcaccgagcaaccataacaggcgcaccgaacttgactttgtgattgttattcccgacgttggcattctctgcattgaggtcaaatcgcatcgagagattggctttgacggcgatcactggtacccagaaagcatcacaaaatcgccgttccgccaagcagaggatgcgcgttatgcactgcggcgccggctagtggagcggttagcgatcttttctcaagtcccagtgattcattgctgtgttttccctcgggcagattttaccgtgccgcccaatctgtcggttagtccatacgaggtgatggaccgttaccggtttgatgcctgtacaacgggtgatgcgctgtgtgaagctcttaaaaccatggccctgcggctcatcaatgcggatccaacgatcaccctgatgaaggcaccactgtcagggccgcaggtggaagatttcgtcagtttctgcttccccatccgcacgcgccggccggaaaagatcaccgaaatttgctatcgcgaggaggagcttgagaagctattgcgcgaccagcaatacccggtgcttcgtttgacggattacaacccgagggtgcttgttgaagggggggcaggaacaggtaagtcactgataggtctcggcgtagcacggctcaaggcggctcaaggtctaagggtaggttatctctgttttaacaggctgatcggtcaatgggccgcgagtcagctagaggaagaacacaacccgcttttggtcgggggctctgccttaagcgtgttgatgtcccttactggggtaagtgtgccggaaaatccagacgatgatttctggtccggggtagcgctggaggtccaagaccgcctcacggatccatcctgtgcgcatgatgctcagttcgactatctggtcatcgacgaggcgcaggatattctcgggcgcccagacctgtttgactgcctccgtctgcttatagatggtgacctagatggcggccgcttccttatgttaggtgacttccgcaatcaggtactgactcgagcaacggcactggaggtccccctggctaccgtgcggaaaaattcagcccgctgggtacttacggaaaactgtcgcaactacaagaccattggccagttcgcattgaagctctctcaggcagacagtgacacctactccggttacctacgacagggtggtagcctgaatgcatggaaccttgagctgtacaaggacgcagcggatcaaatccgcaagataatgatatgtatagattcagctttggccagcggattccgggaggccgacattacggtgctttccttcgggtctgaacgtcgctcagtgctcccattgcttcgcgaggcctgcaaccgcgcattcgtcgccgccggaaactcgagcacaaagggcatacgctactccactgttcctgcctacaaggggctggagaacaaggtcatcatcatcacggatgtaattccatctgacagagggttcgaccgcagccgtttctatacgggaattacccgggcccaagagcggctctatcttttttatcatgcgtcgtgcgcttcactgcttactcaatgggtcacaagtgcggggaaataa

SEQ ID NO: 433672 - DNA, 3708 bp, Serratia marcescens
atgaatagtgaacgatctgccgagattgaatttttgcgcggtgagctggtagggcccgcgcgcgtaatcgaagacattccaactaacggtacggttattattgatgcacaaggcagcttccggctttccggggaagctttcgggcccctttattaccaatgcgtagacagcgacgttctgcaggaaatcgtccactaccgtggcgaaacacctatgcagcgttatggcgcgggccttttgtacccgcgtaaacacatgcaggggatggtaattgacgatcatgcggaccttggatcatccgccgggcaaataaacgacggtgagcagggcgagaacgcatcgactgagacagtgctggcagtggtttccgatccggagatgtcgactttgcctgcaatttttgacaacggtgacccagcttcagagagaggtggggcggatggcgatgattttgaggttggcagtgacgatatgtaccaaccctcagtcatggggattagcttctgcctggaggagagtgaaggcgagtttgtcgtgtcgcttcccactgcgaaaaggttcttttggcagttaccagaggctgccgcgttcccagtcaatggaaggtatgaaccctgtatcaaagtaacgaccaacgagaatggtgaacatcgagcggaggcgtggcggcgtgtaccggctacaactgatgctacgtgtgaacgatttctgttggctagcctaacaccgggaaaaaccgagtcaaggagcctaagcttgccaggtgggcttgctctacagatccaggtttttccacgacgcatgaatagaaagtggattgtcacatgcgtactgcgcaaccaacaggaagcccaagcggccaagagcaaagcagatcagatccgaagtatcctttttcaggcgtatttcgaggtgcgggtgaaagacggtgctgtctttagccgttaccctgaaggagtcaggccgtttgaaaagctcgatggtgacgagaaaacgctctccctgctgtaccgtgaccaagccacttgggcgatcggacacggctgtgcggcgggatggaatcttgtcgaagggggaacaccggatgctgttttcgcggatgtgatgccagccgtggaactaccgagtatgactcctgacatcacggaccgcgaggggaaccctgtcatcctatctatgcgtgatctggcggggcttgcaaccttttcaccgggagctcagggttgggcgccactcgatagtctcgcgcaagagtatgccgcttggattgatgctcgcgaggaagacagcgagaagctgtcgccccagttgcgtgatgaagctacaaggcatttggatgcctgccgccaaagcctcaagcgcatcagacacggcattgcgatcctgcaaaccgacaccactgcactggaggcgtttcgcctggccaaccaggcaatgctgctccagcaggcagcgtccaaacagatctctcgtcgcccgctagtcctccgcaacagcaacgtggtcgccgatgaagtaccagaaggacagccacgcacaccatgggaggtgtggattgatggctccgaaaaacagggcgtcggcaaatggcgagccttccaggcagcgttcttgctgatgagtatcgccggactggttgaggaacgttgtgatgaccgggaaattgtcgacctgatctggttccccacaggcggaggcaagaccgaagcctatctcgcagtcgccgctttctacatgttccaccagcgcttgatttcgcgcctggatgatgaactacgccgcgatggtaccaatgtattcatgcgttataccctgcggatgctgaccactcagcaattccagcgtgctgccagtctgatctgcgctatggagcaaatcaggatgcgtcgggaaaaggaggctgccagctcctcgctagggacctcccgcttcacacttggactttgggtcggtggtgatggttcaccaaataaatgggctgatgccagcactgcagtccgcaaatatgactcaggagatgtgacaggaaatccgttagtcctgacggagtgcccttggtgccgaagcacaatcggccgactgactcaagccgtgtccagtaaaggcaagaagaacaagaacagcaatctggccggggttgtcggtggaaagcagccgtacttgatgtgctctgacattggatgtgaatacggtggcgaacgcagcagactacctatcgaggttatcgacgaagccatctacaaagatccaccatccatgttcattgggaccgctgacaagttcgcaatgatggcttggaagccggaaaccggcgcactctttggcttggatcatgacaaggaaggggcggtgattcctgtcaggcgccccccgggactggtgatccaggatgagtttcacctgatttcagggcctttgggtacgatatatggcttgtacgagggtgtgatcgagcagctttgtagcgcaaagaacaggcgttatctgataaaacccaagataatagcttcgaccgccaccattcggggggcggcagagcaagtacgtactgtctatgcccgagagaagctgcagctattccccaacccggggctggagatgggcgactcgttcttcggccgttacgccaagggcaaagacggacaactgaaagaaggccgactctacctgggaattcacgccagcggttaccggtctttcctgacaactcaggtccgtgcattttcgactgttttgttcagagcgtggatgttcgatgacaacaagaaagatgcatggtggaccctgctggcgttctacaacagcttgcgtgagctgggtggtgcccagaccctgttccagtctgacattgctgcgcgtctaaaggactattcatcgcgttatggactcaaaggcggccctcaacgctacctcaatactgtggaagagttgaccagtcgtcagagtcaggcacagctggttgagttaatggatcggttggcgctcccttgggatgccaaggacagcttggatgcctgtcttgcgtccaatatcatcgaagttggagtggatatcgatcggctagcgctgatggctgttgtcggtcagcccaagtcaaccgctcagtacattcaggtgactggccgggtaggacggcgctggtgggaacgtcctggactgattctgagcatgttcaacccggggaagagtcgcgaccgctcgcactttgagcagtttcatagttatcaccgccgtctctatgagcgggtcgagccgacttcggctacaccattttcggtcgaagccgtggaacgcgcactggcaggcgtaatgctgctgtgggcacggcagcggcatgatgtcggatcgcctggtgaggccttcggtgactatacaaactatttgaatgaggcgcttgagctgctgcttgaacgatgcggggccatcatgaaggatcaaccagatgaattggatcgagtatgcgaagccatgcgcaaagtacaccgtgaactcctcaagaagtggcaaaccaatccacaagagtggtcggcgtatccgcaaaagaaagatggagagtatctgatgctatggacaggtgagttcgcgactagggagcaaaaacgaaaagggatacgggttctcagcagcatgcgcaatgttgacggcactgcccgggcagcaatcagcagcaactatttagacgaggagcatacaaagcatggccagtga

SEQ ID NO: 433673 - DNA, 1923 bp, Serratia marcescens
atggccagtgacattcggctggggcaattgattgcacccttcgggccgggaagcatttacaccgacaagaacggtatacctaatataatctgcgggctggacttctggcatcagcagagggatgagaaaggtgactggagcgaggatgaggccgccatgcgcaggcatgtgattgacgagcctcgactatctgctttgctcaaggttccacaattccgtcagccaccagagtactgtcgtgacgaccaaaatccggggttatcggggctggaaatccagactcaccgctttcctacttggtatgtcgacagctacagcggaaaaatgcgccgtttcaacctagaaacccggaaacttgcccctctcgaaaactacaaaaaatcaaattggcggcccgtgcgtttcatcaatgtctgcagtaatgggcatattgcagatttcccatggaaagcgtggtgtggatgtacctgcccaggggatagcggacttgtacttaatgattccggcggcccggatctggggtccgttaaagtctcctgctccatatgcaaaaaatggaaaaccttggcgggagcaatgagcatgggacgcgatccggacagtggtaaaatcgataaatccggacttaagtcggcagggatcgtctgtagtggcgagcgtccatggctgggcttggctgcccagccatgtcaggaaccccctgtagcagtgctgatcaaccagtcgaacatctattttggaaaagtgctgtcttcaatctatctgccggatatgagcagcgaacagagcgttactgatattcagaaagttctgaggaaaaacgaagatgaactgaccacgatcaaagccctgcttggactgcatcgacgttcaatggcattggatcttctccgtcagattctgagtcctcattatcccaagctccctgatgacgcattgattttgcaggctatggattcactcagccaaggaacctcgtcggctggaggcggccctcagcctgtgatggcagaatcagagtctcagacataccgtcgggccgagtacaacgtcctgcgcaatgaagtaggttttggggttgacgacgaactaagggtaattccaagcctggttcctgatggaatgaagcgctggttcgggcggatcaatctagttgaaaagctgcgggaaacccgggttttttgtggctttgacaggcttatacgggaaacggagccgttggctagcatgccgaactccgctatgaaccagcttttccttcaccttccgaaaccagaactccagtggctgcctgctatcaagaattatggtgaaggtgtttttgtcgagttggatgagggcgccatcagcaattggcttgcagagaatgccgagtggcttgcacaccggctggaccaagcgtttgtggcacgcatggctgacgagaaaaatctgataccaccgaattacattacgccgcaatgggctgcacgataccttctggttcacaccttggctcacatcatgatcaatcagatggtgttcgaatgtggttactcctcagcttcgctgaaagaacgcatctttgtatctagcgatccagaggcaccaatggcggccttccttatttacaccgcagccggggattcggaaggtagtctgggcggtctggttcgtatcggccggcctaagcttttcgagccgatggttctcagggccctatcccgggcgtcttggtgctctgctgatcctgtctgttcggaggatttgggtgggacgggttcacgacgggtcaacaaagcagcctgccatgcctgtgtgctattgccggaaacagcatgcgaaacagtcaacagcgggttggatcgcgctatggtcattgggacgccgcatgcaccgcatcatggattcctatcggaattgattaaaggggtttccatctga

SEQ ID NO: 433674 - DNA, 822 bp, Serratia marcescens
atggaaagacatcgcccacacggtcgtaccgtaaccacattagaatcagatgtacttaaacttcgagcactagaaatggtgttagtgattttctatgtggaaaatctgaaggattttattatcagttctgtcagggttacaaaacgcctaagaaaaattcttgatagcaagaaacccacaacaagtgacaaagagcaaattagttttaaagaagcacataaattactcattttagaaggagtcatcacacaagaagaaagcttacaactgagagaaatgattgactaccgtaatactataggccatgagatccacagaataaccatagatgttggagcttactctcatcttgcaaagtatgacctccctaacgggcataaaatagccaaatataattattcagcagtgcaacacgtacaagatcttagaaataaagtagaaagaaaaatgatggaaaaatcattttgttttgaactatcctttgacactctggcatttaacgccgcagagcaaacataccttaaagagattaaacgattaaggaaaaaagttaacgatggggttgataggttgaatgttactatagaagctacaaataaaataataaaaaacattcctcgtaatgttatggatgttatacaaccaggacatccgaaaaacacgaaaacgaatggtacattcagtcaggaaggtataaaaggaatgttcatgctttatgattcaaaagcaactcctctggccgctgcttatataatgaggatatcataccgtacagcgtcaaaatggtataagaaatggagtgaaaataggtgtggggtataa

SEQ ID NO: 433675 - DNA, 123 bp, Serratia marcescens
atgcatggtaatgccatcaagatctttcgtttcaaagatgcttttgcggatacgcaaatgaccgttagtaaaaatgatgacgcgaagtcgcttaattctcgtgctatattgctgaataagtaa

SEQ ID NO: 433676 - DNA, 1254 bp, Serratia marcescens
atgttctttgcctacaataatggcgttactgcaacggcatcttctgtgctaacacgaaggctttctaatggtgcattggctatataccatatcaaaaacttccagatcgtgaatggtgggcaaaccacagcatcacttctctatgctcgtgatggtttaggtaagaagcttgaccatgtttatgttcaggtgaagctatcggtagttgatgaaatgcgtttggctgatgtcgttccgcgaatttcagagtacgccaacacgcaaaataaagtttctttagctgatcttgcctccaatagtccggtacaaattcgaattgagcgtttttccaaagagatctccgtaccacaaaaagccggtgagttgcatactagtaagtggttctatgagcgtactagaggccaatacaaaaacctctttgcctataaaaccaagtctgaacgcaacaaactcgagttgatgtacccgaaaacaagactcgtgacaaagacagatctagctaaatatgagttgtcttttgatgggcggcctcattacgttagtgagggtgctcagaaatgtttcaaccgctatacgacattggtactcttgaaacttggagacggcactttacttagtgaaacatggtttcgcagagcaatggctaaagcattactattcattggccttgatgaggccattcagaagtcatcgtggtatctgatggatagaggttacaaagcccaaatagttacgtatacgatcgcagcctgtgcgaatgagtttcgtataagaagccaacagatagatctagatcggatatggcgagagcaaagtatcccaatctcattgcttggctggatgcttaaagaagcgaggcaggttgcaaaaattttgagatctccccctgacaatgtcaggaacatatcggaatttgcaaaacgagacttttgctgggagttgtatgtgaagggaaaaatcggttcaccggatgactctattcttcagttcggcgtttctattgaagattacaatgatgaaacaagacaaggcagtcgtgaaacagctaggcgattagatattgacttcgatattaaggtaactggtttggtacatcgagcgaatgacatcatcattcaggctaataaaattggtgctgcatctccccaaaacataagtgccttaaccaaggttgctgcgggtaatttaagtctatccaaaggggagaaaaccgctcttaagtatctgctggagcggttggaaatcgaatattaa

SEQ ID NO: 433677 - DNA, 756 bp, Serratia marcescens
atgatgagcaaacgtcacgttatcggcctgctggctaccacttcgctgctggcgggggctttgacccctgcggcgaatgccgccatcgcgctggatcgcacccgggtggtgtttgatggcagcgtgcagtcggtgagcctgagcgtcagcaaccagaacaagcagctgccgtacctggcgcagggctggctggaagacgagcagggcaacaagatccagagcccactgacggtgctgccgccggtgcagcgcatcgagccgggcaagccgagccaggtgaagatccaggcgttgccggcggcgaagatgctgccgcaggacagggagacgctgtactacttcaacttgcgcgagatcccgccgaagagcaacaagccgaactcgctgcagattgcgctgcagacgcgcatcaagctgttctaccgcccggcggcgatcgcgccggaacgcaatgccgcgccgtggcaggagcagctgacgctgaccaaacagggcgacaagtacatcgtcaataacccgacgccgtattacgtcactatcgtcgatgcggccaggggcaaaggtgtggccagcccacataattttgaaccgtttatggtgccgccgaaggggcagataccgttgacggtgagcgcctccagcgtaggcggtagcccggtgctgacctacatcaacgactacggcggccgtccgcaattggcgtttaactgtcgcggcgggacttgttcggtggcgccggagaaaaaatcgtcttaa

SEQ ID NO: 433678 - DNA, 981 bp, Serratia marcescens
atgagaaaaaatcactcgcgccaaatgctattttttgtggctgtcttgttatttacgggaaagatacacgcctttacctgtgtctctgatggtgggattattcctcagggcggttccagtgagccggttcctgtaaggattcatgttgaccctaaattgagtagcgggaaaaaccaaatggtagatgtttccagtgtcatttgtaaaaataatgctgacgatcgtggttgggtggatatgctttttattgattctgtagatgtcgtaaaatctgacctttttgatgtcacgaaaggtgttaccgttaatggtcgggactatgatattaaagggagcggatataagtttaacgatctaaacaatcaattattgaagttaggtggtggcggaatgggtcaagtacccatggaaatgtatattaaattaagtaagaaaccgtctagggatattgtaatcaaggagggcgagatcctggtaaggatgaatatgctccagataaacaatcaacctgggtgtccgttatgcggttcttataaatggaatttagttgcaaataatgacgcctacttcgcgacaaccagttgcaccatcaatggtgccaaacagatgaacgttgattttggcccgattagtcaagacaactttaccactagcgtggacagtgcagtgattaagcagaatcagaatctcgattattattgcgaaggctctaatgccagtcaggatatcgcggttcgtttagtcggcaatacaagtggattttcctctgaggcaattcaaacttcaaatgcgaacattggcattgccatgctgtataaaggtaaggtcataaagcccaatgaaatttttaattcaaaaattgtgaacggtatgggcagtgacacgttgaccttcgtaccgataaaaaagaacgttccttttaatgagataaatacggggccattttccggttctgcaacgttagtgttcagcgtaccttga

SEQ ID NO: 433679 - DNA, 534 bp, Serratia marcescens
atgacaattacgcacaatacagtgaaagaagaagctgaaatgttgaagtcaattgtagatagcggtgatataaaaatcccggatttttgggcctgtgcttggccaggattcgcttttgtcctgtggttagctgtctggccggcgtttacttttggtttattcactacgccaagcgaaggtactttgctcgcaatgggttttggtgcgttttttgggtttattatcagtatcggtatttttaatgctcgcagcctttatttatcgttaccagagtcatttcgaaagaattcgaaaataatcacgattcttaataagaaggtgatggcttatctttctatttttatagtaataaatgtgatggcgggtttggtgtcagaaaacagcaaggcaggggctttgcaataccttttcccaacagttgtttcattttgcattttggcgtttattttttctgccgacataggtcgttatcgcctgtctgcatttaccgccgctctggagcttatcaaatcccgcaaacagggaggtgagtaa

SEQ ID NO: 433680 - DNA, 417 bp, Serratia marcescens
gtgaataaatcagagcgtcacatcattactgttgagcagagcgcagtgtctcccgaacagcgtattgccagcgcgcgtgcggaatacaagcgcgacagcgcgcggcttatgatttttcttcgtctgacggtgctgttttttgtggcggccgtcgcgctctggatggtcagccactggtggtttggggtgatctttaccgacagtcacccagcccccgattcacgcatgttttacgtgatgaatatgtggaacgtactgatgtacttcatgccagccatgtttgccgcgctgtccgccgggtgcctcgcggtcgcactggtctttgagagtctggggctgtttagcctttataccaccctgctgtggcaaaagtgctgcatttaccgtcagtctcgcctgcaccgggaggatgcatga

SEQ ID NO: 433681 - DNA, 177 bp, Serratia marcescens
atgagcggcaacgtgaatatggacatgtttggcacgcccctacagaagttgttttcactgatgcaactgaccctggttatcgcggggctcatggggctcgtactgctgttatggctgctattcagggcgttaatgccgaaaagagggcaaacaaaacgcgggaggaaaggcaaatga

SEQ ID NO: 433682 - DNA, 378 bp, Serratia marcescens
atgtttgtgacacgtaaacgttttattgcgaccgagaatcagctgcagagctgtcgccaattgctggccgcgcgccacggcgagttgatggccatccgccaggcggcgtcggcaaacggtgggatctacaaatgcattcttgagtgccgtgaggtagcccacgagctgcgtgagccgctgcctgccgaccagcacggtctcagcccttatttgttcgacaagctggcgcttatcgacagtttgctgagcaccctggcagcgttattaccgccgcaggatgaagcacgtcccaccgcccgcatggttgccgctggtgatgttcgagagatttatcggggaacgcagtgggcgatgcattgccaggagcgtcgcgcatga

SEQ ID NO: 433683 - DNA, 1011 bp, Serratia marcescens
atgtcgattaagaagctcgatgacggtcgttatgaagtggacgtaagaccgaatggccgcgacggaaagcgagtcaggcggaagtttgacaccaagggggaagcgcagatttttgagcgtcacatcttggtgacgtatcacaataaagaatggttggacaagccaacagaccggcgaaaactcaccgaactgctggatctttggtgggactaccacggccaaaaccaggagcatgggaagcagtattacggacatcgccaagtgataatccgtaacctgcaggagatgggggtaactcgggccgaccaattaaccaaaaaggtgttgatgacctacatatccagaattctggcgagtgggttaaaggcaaagacggttaatcggcagttggcagaattaagcggcgtcttctccgttctcatcaagtgcgacgagtatcacggggaaaacccactttcacaggtcagcgccttaaagctgccagaccctgaaacgacattcctaaccatgcaagagatagatcggttgttagtgcgcctggacaatgaggaacgcaaagcggccctgcttagcctaagcaccggggcccgctggggtgaagtagttaagctgaaaaatgagcatattatcaacaacagggtggtgttcgtgaaaacgaaaaactcaaggaaacgagtgatcccaatctcgccagagctagcggcactcatcaaaacagatcgctccggccctgtcatccaggccgactatgcaacattccgccgcaagctgaaagacgcgaaaccagaccttcccaggggccaggctacgcacgtcctccggcacacgttcgcaacccacttcatgatgaatggggggaacatcatcacactgcagcggatccttgggcatgccactattcagcagaccatgacttatgcgcactttgcgccggatttcctacaggatgccgtaaccctgaatccggtcgccaaaatgtccacattgcgaccacaaggcagcgatagttag

SEQ ID NO: 433684 - DNA, 300 bp, Serratia marcescens
atgtcaatcacgcaaaatgagaagttgaagctcatacgggagtccgagcggctgaaactaaaggaggttgctgatttagttgagattaattatcacacctatcacggatatgagactggaaagatgaaaatgtctatggaagccggaatgaagttttttaagcatccaaggtttaggaaatatcgagactggttcatgttcgatgaaaccaatcccgaggccggacaaatcgctccggttctctctcttagtgggccagacgcaacaacgtctacccaatccggccaaaagaatggctaa

SEQ ID NO: 433685 - DNA, 375 bp, Serratia marcescens
atgcaagacgaggctaaaactctggacgtggaagagctgatcgaaagtcagacgaagcgcaagaaagacgcgattcgccttgctgaaaacccttctgatctgctgtctgctgaaggattcgcgctgtacatcggcaagactcgccgagcggtggctgatatggctcgagacggtaagttaccagcgttttacatggctgacccactgaagccaggcgcacaagctgagctgtggatcaatcgcaaagaatgggacaggtacgcggcccagttggcggaaagcgcaccggaagagtggcacggatggaaagaccgcatcagcgccgggaagccgaagcggggccgtaggcaaaggcaccaaggggccgcagcatga

SEQ ID NO: 433686 - DNA, 249 bp, Serratia marcescens
atgagcggtggttatcgctcattggatgcgcttgtgcatgagttggttactcatacgctggtcaaggtcagcgaacataccagcgtttaccggggattcagtatcaccaaattaccccggaagaaaatgaacccggtcacccgataccacgtttggcagggtgatcagtcttacggcaagtttgacgctctggccgaagccgtcggatatatcaacgggctttatgagcaaaaaggagtgacggtatga

SEQ ID NO: 433687 - DNA, 252 bp, Serratia marcescens
atgagcctgacattcttcgcagcagccaacaaagtgctgaaaatgtacgccttacgccaggaacgtgccagcgctcaggctccggcgcattcgcctgcagagatttattgggcttgtgaaatgcttgagagcatcgctgccgctgccgcttatgcgggaagcaaagaggccgtatacctccgcgccaaggcagcagcctggagcagaacagaaatcaccccggagctatttgtcgaagaggaagcagagtaa

SEQ ID NO: 433688 - DNA, 222 bp, Serratia marcescens
atgacaaccgcacaatgcccatcgctggccgccatgctgatcaacgggcagcaggtcacacaccgccgccatacccgcggctggattgaagccccggacggtcgccacttccagccgaaggccagcgaagtgcaattcgtgaaggggtgccgcactccattcatggccaggcctaggaataaggcccgttggtttgccaagttaatgggcatttttgcttga

SEQ ID NO: 433689 - DNA, 483 bp, Serratia marcescens
atgagccagcaacccacccatagtgaaactttccacctgtacaacagctatttccgtgagcatatgacctctcgcttctaccggcatatctttaactttatctgttttgttcaggtcgttctcggcagcacattcatggctaatattgctgcaagctggtttgctggctttaccgttacactactttccgcgtacatttttgtttgtaaacctggcgagatcgccagctccgctaaagctcaagcattgcggtatgaacgtctcattcattctcttaacgaaacagatgctcaatcgttaaaagattcagtatctaaattggctgaggacgacacagaaactccggggagtttgctcaatcccgcctatattcgagccgcaattgcaaccggctgcgccaacgatgatatttattcgcagtgcgacaacctaacccctttagaacgcatctacagctttatcgctggcggtattccaaagtaa

SEQ ID NO: 433690 - DNA, 303 bp, Serratia marcescens
atgagcattcaactgtggaatctaggcgtttatcgccaatggactgaacgcgaggataataccgttattgatatggctgggaagtattcgacggccgaaattggcaaggctgttaatcgttcgccccgtgcggtttattgccgggcgcagtttctggacgtgtcacttagataccatgcaaggaataaatatgcgccggtgtgtcagcaattaaagcgggacggtaagacgttaacccagattgctaaatcactcggcatttcttgcggtgccgcttcctattatctcaattcaaaggtctga

SEQ ID NO: 433691 - DNA, 648 bp, Serratia marcescens
gtgaatatcaattttaacaaattatcctgccttttaagtgaggcggttatagcccttaaacaaactggtcttaatgtcagcctggccgctgatctggaaaaaatgaaaccggcctgtgaagccgcagccatgagggaagacaattcgcagccggtggcagaggtgcgactggttgatgatttttgcggttgctgtcagcacccggatgttgagtggctcggccagcaggggagcctttttcctgttggcacgaagttctacaccaccccgcctgcgccggtatatccagagcggctaccgtgtcctgtacgtctcatgccgggtctgctttttgggaagggcgttcccacggaaagcatgctggatgctctcaacaggcgtgaagattatgaggccgaactggagtctatgaccccagaacaacgagctgaaaatgacgctcgattggaaaagctaaaggcattaattcccctgcctgcgccttccgggcatcaattggtaccggttgaaccaacgccggaaatgatcgccgctgcgatgaattgcgacgatgtgcaattcaacgacgacgacactttttgcgttaacttcggcaatatctacgccgccatgctggcagcagcaccaggggaaaagcctaaatgctga

SEQ ID NO: 433692 - DNA, 2694 bp, Serratia marcescens
gtgacggttattcacggccgttatgcgccaactccgccgcatccataccccggaaacgctgagacgtttaccggggtttactcatggaatgcgccccgcgcggccattgagccgccgccgggactgatccgaaaagacgaattggcaaggctccggcttgccgaacagctggcccatgcccaggaaacgctcaatcgtcagcctggcctcgtgcaacgcctggtgcgtgggaagatggactggatagagcgcagcacgaaaaccaaagtagaagggatccggcgagccaataactttttggtgaaaacattcatcaagagggtaatgccgcgccttaatctgattaatgaccgtatggcggtatccgtccaggccattgataccgcactattggcgaaagcgtttaacggcctgccaagcagtggccgcaagagcaccgaaacgctggctcgcgcaatcaccgattttattcgtagcgaaatcgagttgattattggcgaggatgaatttgccctcaccagcgccgatgatgtacccagcgaggtttacagccagcggttgcttgatgcctacagccgggccgcggtgatcacccggcgtttccgccgaacaccacccggccaggccacctttgccaaggctgatatcaacgatgaagacattggcgatattctcgacaaattggttggcgatatcttccgcatgtgcagtgaaaaatggtggctcaaccagctgaatacccacgccaaacgctggcgtgaggggctgtttattgcgttggcagaagtcagcaagaaaaaggggaaagcagcctatgccagccatgacgcccgcagcaatcaccgtgaacaaaagcgccgcaaccatgagttcctgcaagaaatggaactggaggacgatgacggcgaacgcacgtctctgcttgataaggcctatgccagcgtagctaacccgacaatccggcgtcatgagttgatggttcgtgtccggggttatgaagaggttgccgatcagcttggctatgaggggctatttctgacgctgacagcgccctcccgatatcacgccaccacccggcacggttaccacaatcataaatggcgtggtgcattacccaatgagacgcagcgctattttacgagcatgtgggacaaaatccgcgccaagctgggccgcaaagggctgggctattttggcgttcgtgtgaccgaggcccatcatgatgggacgccgcactggcacatgttgcttttcatccatccagaaaaccgcgcggccatccttggcatttttgaagattacgcccacgctgaggatagcggtgaattgtccagcgcgcgggcgcgcaaagcgcgttttcattgtgaaatcatcgacaagaaaaaaggctcggccaccggctacatcgccaaatacatatcaaagaatatcgacggttacgccctggacggcctgctggatgatgagacgcataagccgatgacggaaagtgccaaagcgatcggggcctgggcttctctctggggtatccgccagtttcaatttttgggttgcgtcccagtctctccttggcgcgaactgcgccaactcaacgatcacgatacagcgatggggctaagcgtggagtgcgcgatcgtccatgatgccgccaacaagcccgattgggccgggtatgtcatggcgcagggtggcccgttcgtccggcgcgccgatctgaccgtgcggccctggtatgagcaacgagagcagccgaacgattacggcgaggtagtcaagcgtgtgcgcggtatctacatgccggagatcggcgaggactgcccgatcgttacccacatcaaagaatacaaaattgtccccaaaaagcgcgctggcgatcctgaatccaaaaggccggggttggctgttgacctggtcgttgacctggctgttgacgttgggggcacccctgtgccccctcggagttctgtcaataactgtacggggtcacaaatttttaacaactcaccgccgaatgaggttgttgttcaagattttgccagcatgacagaaaaggaacggcgggccttgcttcagcgcttgcgtagcagcccacggattaaggcagaaagcccgttgatgcagatggtacaggcgctgtccataccattgacggatgaagactggccgcgggtgcaagccgcaaccagcccgccaggtatttgggccgcgagagttgacgctgagagagaagccgctgcgcgcgcataccataagattgcgctgcagtgggatgagcaacaacggttaatggcccgcaaggaaaccaccggtgaatctatgctggcccgagagttgagcccgctggagtaccagcttgatggcttcgcctgttcaatagggttgtcactgacggcggcacaattgaaagcgctggccgctggtgcggtcttatccgtcgatggtgtacgctatcggggccgcgccgatggatgtttgtaccaggaaaaagccgttgatgttcccgatccgctcgcacacctgcacgcattatgggaacggcaggtatcgccgcaatcgcgtcaggtaggcgaacatctgagaaaagcggctggcattccgccgcagagctcacgcgagaggtatagtgcgctggttgaggccgcagaaaagcaatttatctcggcattgccccctgatgatgggccacagttgtga

SEQ ID NO: 433693 - DNA, 276 bp, Serratia marcescens
atgaccagtaagacggttgcggtgaaactcatcacaggcagtaaatggagtaatcacggttggaaaaccgcgcgttgcatctatgacgagagcatcattgttgaagggaatatattcccatttccctgtgaggggggctatgcccagattgtttcctccggctgggtcatgcaagagaaggaatatcaacattgttatctcacttttaagcccttgaccgcttatgagataactcgctgggaacaggaaaacggtaaggcactaccaattaaataa

SEQ ID NO: 433694 - DNA, 327 bp, Serratia marcescens
atgagcacaaatacgctaaaatccgctaaatacgtggcattggcatgcggggtagtaaacatgcgcatttttaaaattcattgtccggagtgcggcgctccggcgattatccgtaagacggaatggaagaataaacagttggccgatttgtattgcgcctgcaccgaagtggaatgcggccacacctttgtttttaacgcgaccttttcccactcgctcagccccagcggcctgaccggcaacaacctggtcaaagccctgctggaaagactcaagcccgacgagcgccagtttgcgttagacctgctgcaaggccaggccggataa

SEQ ID NO: 433695 - DNA, 1065 bp, Serratia marcescens
atgaaaaagaatcgacgcaacaaacagcagaagcgcccgcagcaggctacggacaagaacttcacgccgacaccggggcgcggcagcgtgatcaccttcggcgagccggagccaattcttaccaccggcaccgactatcacaacatctggtatgacaacgaaagcgaccattggcggctacccatcgaccggctggccctctcacagctgcccaacctgaacggccagcatggcggcgttctctacgcacgccgcaacatggtggtcagcggctatctgggcggcggattgtcgaccgatgaactggaagcggcgacgtttgattatctgctgttcggcgacgtggcgttactgaaggtgcgcaacgtctttggcatggtgatcgacctgatgccgttgccgtctctctatctgcgccgacgcaaaaacgatgattttgtgattctgcaggagggcgagccgctggtttataccccggacgatatcgtttttctcaagatgtacgacccgcgccagcaggtctacggcctgccggactacatcggcggcattcattcggtcttgctcaacagtgaagcaaccattttccgccgccgctactaccacaacggcgcgcacatgggctttattctctacgccaatgacccgaacatcaccagcgaagtggagcaggagatcaaggaaaaaattgaacagtccaaaggcgtcggcaacttcaccaacatgtttatcagcatcccgaagggcaaccctgagggggtaaaactcatcccgatcggtgaggttgccgcgaaagatgagtttgccaacgtaaaaagcatcaccgcccaggacattcttaccgcccaccgcttccccgctggcctggcgggcatcatcccgaccaacggcgcggttatggggagcccggaaacggcgcgaacgacctacggcaaggacgaagtcaccccgctgcagcgcaaaatcatgaacgccgtcaacaacgacccggagatccccgagagcctgcatttggggtttgacctggacacttccggcaacggcaatgaaaagggcgaaaaatga

SEQ ID NO: 433696 - DNA, 1662 bp, Serratia marcescens
atgccgttggagtcggtagaagaatcgctggcccggcgtatcgatcagctctcgcgccgcgagaagaaaaccgcgcttgaactggaagagatgcgcgacctggtggtgcagcacgtcaagctgatggcccagcgtaataaacacgccgagaagatggcggaaatccaggcgcgcaacgtggcgacgttccagggcggcggcgctgacgcagaacccggcgagggcggcaagcgccgctacaagaaaaacgacgtgtcgggcatcacggcggaaatgcttgacgccgccgcgcgtgagcacctgtttgactatcagctgcattgccgggcaaacaaggggcaggacttccgcttcctgctgaaaagccgccaggtcggcttcacctattattgcgcctgggaagccttcgaagacgccgttttaaccggcgataatcaggtgttcttctccgcgtcccgcgcccaggccgagattttccgcgaatatatcgtgcagatcgcccagaagcatttcggggtaacgctgaccggcaaggatatccgcctgagcaacggcgcggtgctgcgcttcttgtccaccaacgccaacacctcgcagggctttaacggccacctgtacggcgatgaggtgttttggatcccgaaattcacccggctgcatgaagtcgcctcagcgatggcgacacacaacaaattccgcactacctacctgtcaacgcccagcgccaaaacgcaccaggcgtacccggtatggacgggcgaagcctggcgcggcgacgaccccaaacgcaaggccgtggtattcccgaaagtcagcgaactgcgcgacggtggccgactctgcccggatggcatctggcgttatgtcatcacgatggaagacgcgatcgcgggcgggctgggtgtattggtcgatatcgaacggctacgcaacaagtacagcgcaaccgcgttcgccatgctctacatgtgcgagtttgtcgacagcaaggacgccgttttcaagttctcggagctcagccgctgcgaagttgaggcggggatctggcaggactttgaccccaccgcagcgcgcccattcggcaaccgtgaggtctggggcggctttgacccgtcccgctccggcgacaactccacgtttgtgattgtggccccgccgatgtacgagggcgagcgcttccgggtgctggccgtctatcactggcaggggcttaatttcagctggcaggccgagcagatcaagcagctcatgcgccgctacaacatgacctatgtcggcatcgacgtgaccggcatcggccgtggcgtctatgacctggtgaccaaattcgccccgcgtgaagccacgccgattctgtatagcgtggaaagtaagtcacgtctggtactgaagatgatcgacaccgtggagcgccagcgcatcgaatggagcaaagacgcccaggatgaggtcagtaaagaacgcgccgagattatccccagctttatggctatacgccgcaccacgaccgccagcggtaacgcaatgacgtttgtcgccgaacgctcggaaaccaccggccatgccgatgttttctttgccatcgcgcacgcagtgatcaacgaacccctcgactacgaatatgagcgccccagcacctgggcctttggaaaagccgcatga

SEQ ID NO: 433697 - DNA, 1083 bp, Serratia marcescens
atgccgcaagcgaatattacaaccgattggatttgtattgctaccgccgggccgaccgttgacggtcgcactatcgaggcccaatggttgcacgatgcggcggaaacctacagccgcaacacctataccgccatgatttggccgcaccatccccagtatgagctcggcgagcgtgagtttacttgcaacctgggggaagtcgatgcgctgaaagtggaagaggtggacgataaaacaaaactctacgcaaaattaatcccgaatcagtttctcattgaagccaaccgcatggggcaaaagttatttacctcggcagagttctgggaggatttcggcgggagtggccgagagtatttatttggccttgctgtgacggatattcctgccagcctgggtactgaaaaaatcacgcttgtttttgacggtgagcaatataacggcgcacgcggcaacgttgaaactttcagcctgggaaaaatgaaaaacaataagccgtccatgtgggggcggctattttcaacccgcaaaaataaaagttttgcggcagacgacacccaacagcccccgcagggcgaggatgaaaccaagatggaagaattacgcgatctgattgaaaagatgctgaatcgcattaaagcgctggaagatgccgccaccggtgaaaccgtcgaagacccggaagcggcagcggccgaagtgggcgatctggcggaagaaatcgccgaagtggccgacgaagtggcggagcttgccgatgaagtcgccgaaaacccggaagacgaagtcctggccgaagagttcagcgccgccaaggcaaaaatggccgcgctgaccaagcgattcagcaaccaaggtaccacggaaaagagcacgcgccgcggtagccgcgccggtcgtcgtcagggcaagcgcaccactaacctggctgcgaagcaaaagggcggcaaagacggcggattggctggcttgaaggacgacatgaacgagatcctcaagcagttcaacgcgctggccggtaaatcggcaaccaaagtaccgggcaaggctccgggcggctccgaagaaccgttccaatacctgtaa

SEQ ID NO: 433698 - DNA, 1014 bp, Serratia marcescens
atgttattgacaccacaagctgaaaagctgatccgcaagtacaccgcgggcctggcgaaatcctacggcgtgccggatacgtccaagtttttcgcgctgaccgatccgcgcgatattcagttgcgcaatgccttgctgcaacggtctgaatttctgcagctgatcaacacccaaaccgtggaacaggtacaagggcaggtggtcgccaccggtaaccctggactgtttaccggccgtaagaaatccgggcgattctcgcgccggatggataacagcgggaacgaatacaaactcgccgaaacggattccggttcgtacctggattacgtcacgctggtgacctgggcgaacgcgggcagcgaagacgagtttttccagcgtattcaggcgttcagcaatgaatctttcgcgctggatattctgcgcatcgcgttcaacggtacccatgttgccgaagataccgacccggacaaatacccactgggcgacgacgttaaccgtggctggcataccatcgtcaaagagcgcagcccggagcagattgttaccggcgacgtcaccatcggcggggcaaatgccgacttcatggggttggatgcggcggtcactgacctgatccacaccaacattttcgaaccgtaccgccaagacccgcgcctggttgtgctggtatcggctgacctgatcggcggcgatgcaaccagcatgatgaaccgcatcgacaaaccgaccgagaaagtggcggcgcagttgattaaccgcgaaattgccgggcgcaaggtctacagcccgccgttcatgccggaaggccgtctgatcgtgaccacgttgtcaaacctgcacctgtattcccagcgcggaacgggacagcgtaaggctgagtgggtagatgaccgcaagcggtttgagaacaactatctgcgcatggaaggctacgccgtggaatacgacgagctgtacgcgggctacgacaagctgaccatgaaagttgaagagccaggcaccgggggctaa

SEQ ID NO: 433699 - DNA, 705 bp, Serratia marcescens
atgaaaatgacaccttgccagcgccaccgtgcccgcatccgggcagagcaggcgctcaagaatcgcgagccgatttgcgatagcccggtcagtctgcatgtgcaaatcagcgagcttgaccgtgacgttgagctgttgcgtgagctgccgagaattgccgaccgcatcgagatgaagcgtgaccaactgctgcccaagtggttgccggtggctgagcgctatctcagcgacggcaaggtgttcagcaatccggtgtttgcctactgcacgatttggctgttcgacgtaggcaactttgaccaggcactggactgggccgacattgccgttgagcaggggcaacagacccctgacaacttcaagagctcatttgcggcgttcgtggctgacacggtgctggaatgggcggaagaccaagcggcaaacggccacagtattgaaccgtatttcggccggacgtttaccaacatccgcgagaaatggcggctccacgaagagatcaacgccaaatggttcaagttcgccgggctctatctgctgcgcgacgagaaggggaaaccccgcgccaccgcgatcgccgatgtagatgtgttgcagctggctgacagtctgctggcccaggcagaggcctttgataaaaacgctggagttaaaacggcccgcgagcgcatcaccgcgcgcatccgggcgttgactccagagtaa

SEQ ID NO: 433700 - DNA, 474 bp, Serratia marcescens
atgccatcaccaacactgggatttagcggccgaacgattggctacagtgatatcccgatcattaacggcgtggcgttctggcctgatctcaatctcaaagagtttcagcaatcccgctctattccgccggatttgccgccggataccgctgggttggccgtactcgcggcgattgccgaagttaacgacgatctggccggagtcgtcagccgacaccagggcgcagggcatgccacggcgcgcgatgtgcccggtgcaaagatgggcgaagaaaatcagcttaccgcgcagtacaaaaaggcgatttatgcccgcgctaaggcggatttgctcggcgagtttccgaccatcgggcggcgtgaaacgcacccaggccaggaaagtgccgaaacgcgtgaaacgctgcttgctgaggcggcactggtgatccgcaacatgcagggttaccggcgggtagggatttatcaggtatga

SEQ ID NO: 433701 - DNA, 504 bp, Serratia marcescens
atgagccagatagagagcatgaccgggtttctggaacagcacatgccacagcgcgcgatgcagttttttgaaagcgcgatggaggacgccaccctggtgtattcggtcaaggcgttggggctgggccagcgtcgcttaggcgtattccgctataccgcccggctcagttgggacaggttcccataccgcctttgcccgcctgcgctggtgtacgcactggtgttcgcctggatagatgcgagccgaaacaacctttatgacgagctggccctgggtgagcccgcggttgatatcgagtttgacgaagagaaaaccggcacgctgtcgatcaccctggagctggccgacgagataacgataacgccggacgaggcgggagaaatcccgcttgccgggaagcgctggcgactgtcttacccggagatccacaccgcaacatccggctatttgtacgcggcggcagagaacggcgcgccgctgggtagtggtgatggcgagggttga

SEQ ID NO: 433702 - DNA, 708 bp, Serratia marcescens
atggcgagggttgaaggtgggctggataaacgccagctgaaacagctacggcagacgctggcagcggcagacctgaaaccccggcagcgccagcgcttgttatggcgcatcgccaagctggggatcatcgttgccgccaagcgtcaccagcgtgagcaggcgacgccggacggccagccctggccgaagcgcaagcgcggcaagggaaagatgttacgccagctgcccaaactgctgcatgtgcgggaaatgccagaacgggaagcggtgcgcatttacctgaaaggcgggaattaccgcaacaacagcgggccggtttcggcggggttgatcggggcggtgcaccaggatggtgcctccatcccgatgagcgcggacaaaatgccgcggccagaccagcgcggcaagcccgcgctgctgagccaggccaaacggctgcgggcgctgggttacaaggtgtggaagggcaagcggtacgtcaaggcgagctcacgccaaatcatggaaaccatgagcatggcgcaggccgggctactgataaaaaaactcaggggcaagccgacgaaatcgacctggaaaattgatattcccgcccgcgtgttcctgggcgtcagtgataccgaatttaacaatattcttgcccgtcagctgcaggccattggctttggctggaacgttaacgcgcaggatatcaaggggaaacagtaa

SEQ ID NO: 433703 - DNA, 1164 bp, Serratia marcescens
atgacatggcccaatgtaacgattaatcagctgaaccagcgccagggcaggatcaacgaggtagagcgtactgttttgtacgtcggccccgcggaatccggtgacggcgatctggtggcgctcaattcccagtccgatattgacacggccctgaccgaagccagcgccgtgctgcgcgaagtggtgcgcgcggcaaaagtcaacgccgggcaaaactggcaggcctatgcactgttagtacaaaaagatgccgcgccggcgacgtggccggcagcaatcgagaacgtgcaagacctgatttcggtcgagggtgtggttgccgtcacgcagctggccgacgccaaagagggccgcaccgcgattgaggcgtattccgcactgcgtgaaaccctggtcagcaagctgggccgctgggtgtggttcgcgttgaccgtcgccgggccgctggcgctaccgggtgaaggcggaaaggccggggtgacctgggccgattatctgaagttccaggcagagctcgccaaggatattgccgcgcatgcggtgcagctggtgcccgccctctggggcaacgaggccggggcgctgggcgggcggctatgcaaccgcagcgtcaccattgccgacagcccggcacgggtgaaaaccggtgcgatcgtggggctgggcatcggcagtagcgatctgccggttgacagcgccggaatggagctggagttagcgcagctgcgtgcaatgcatgacctgcgttattcggtgccgatgtggtacgccgattacgaggggatttactgggccgacggcctcacgctggacgtgaagggcggcgattacccggtgatcgaatacctgcgcattgtcgataaagcggcgcgccgggtgcgtatccaggcgattgccaaaatcggcgatcgctcgctgaacagtaccccggccagcatcgccagccacaaaacctatttcagccggacgctgcgcgaaatgtcccgcagcacgcagatcaacggcgtgacgttccccggcgaggtgaagccaccgaaagcgggcgatgtggaaattagctgggctgacgctgagacggtgcatatctatttagttgtgcgcccgtatgaaagcccgaaatcgatcaccgtcagcatcatgctggacacgtcactggaggcgtaa

SEQ ID NO: 433704 - DNA, 456 bp, Serratia marcescens
atgtcatctcgcatcgggggcatggattttgatatcaccctgggtaccgaaattatccatgtgaaaaccatctctttggatatcaccgacaacacggccgcggcgcaaacgcgcggcgtgccagacgggcacgttgctggcgatgtcgcggccgaaggtgaaatggagatggataccaagaatttcaaaaagattggggccgtggcgcgtgcggcgggaagctatcgcgctatcccgccgaccgacattcttttttatgccaacaccggagacgaagagctgaccgttgaggcgttcggctgcaagttggtgatcacctcgccggtcggattcgacccgaaaggcggcgagacagccagccacaaggtgaaatatttggtcaccagcccggattttgttcacgtcgatggcgtgccgatcctgtcggaaaacgacgtccgcgatctgattgggtga

SEQ ID NO: 433705 - DNA, 294 bp, Serratia marcescens
atgccgaacggagaaagcacgtttttaaagctgctgctgctcggggctgtaatcgggttgggcaaggtgctggtcgatgacgcccggctaacccttcgcctggtgctgggccgcatggtgctgggttccgctgtatcgctgattgccggggtgatcctgatccgatttcccgatattgacgagctggccctggtggccgtgtctgcggcgctgggaattttggggcacacggtgattgagtcaatgctcaaacgctatgtcgaaacgaaaatgaaaggggctgataaatcatga

SEQ ID NO: 433706 - DNA, 339 bp, Serratia marcescens
atgaaattgagcgaaaaacaacagctatttacccagctgattgcccagttgatcacctacgccggtgaccacggcatgcggttgacattcggcgaagcgtatcgcaccccggagcaagccgcgctgaatgccaaaaagggtaccggcatccgcaacagtctgcacacccagcgcctggccgtggacttcaacctgttcattgatggggtgtaccagaccgacagcgccgcatacctgccgctgggcgagtattgggaatccctcggcggctcctggggcgggcggttttcgcgcccggacggcaatcacttcagccttgagcatgaaggggttcggtaa

SEQ ID NO: 433707 - DNA, 378 bp, Serratia marcescens
atgatctcgcgcctggttggggtgtttctgatcggcgttgccgccgggggctggtttgtgacggtcaccacgggcgaggaggaagaacgccgggccgagttccgcgacgagctgcgcgggctgatccagggtgtttcctctgagtcggctcagcggctggaggccaaattacaggaattgcacggcaatgaaatccatacggagcgcgtcattcataccgaaaccattaagccggtgtttcgcaacgtttgcgctactgacgagtatgtgcggctgttcaacaacagtgttgaccaggccgagcgaaccctatcaggcaaacctgatagcacggtgcccggaaaacctgccgcgcctggcggggccaacgggcaatga

SEQ ID NO: 433708 - DNA, 276 bp, Serratia marcescens
atgagcaaagaaaatagcggcatcattaccctgggcatcggcggcgttgatgtgaaatttgccccgacgctgcaggcgtacaacaaatgcctgaatgagtcggcgcgcgccgaggacgtcgtgggggcggttgccacctacctgaaacgcatcgttgtgccggagtcccgcgacgcgctggcaacgctgttgcttacgcctggccttggcgcgcaaatcgccgaaaagattaacaaggtgttcgcgccgacggtcgagattgaagtaaaggaatag

SEQ ID NO: 433709 - DNA, 2085 bp, Serratia marcescens
atgaaagaattggcctttttgttgagcctcaaaaacaacctgagcgccccgttagggcaggcgcaaaagtcggttgagagtttcgccaaaaagtccggcgacgcctttaaacaggttgcgaccggcgcggccggtttgtggggtgttgtccagggtgttaaggggctgctgggcccggccaacgaggtgcagcaggcgcttaacgagctctccacccgcggcgtcggcgaagactccctggaaaaaatgtacaaatcggcccagcgcttcagcaccgcttacggcaaatcggcggcggagtttatcgcctccggtaccatcattaagagtgagctggccggactggccgacagtgagttacctcgcgccgcggtggcgatcaacaccctggcggtggcgagcaaatccagcgctgagcaggcggcgggctacatgagcgagatggcgaacaactaccgttcgaccgtgcgcgcgatgggtaacgtgccgtttgccgacatgatggcgtcgaaaggcgcatacatggtgaagaatttcggcaccagcctggacgagatccgcgagttggtgaagtccagcaagggcaccggcacccaatatggcgcgggcatggacgaacaattggccgtgctggggctgttgagcaagacccagggcaccgaggccgggggcatctacgattcattcctgaaaagcgccgttgagggtggcaaacagctgggcatgagctttaccgacgctcagggcaagttactgcagttccctgacattctgcagaagctgcaggccaaatttggcgacaccatcgaaggcaacgtgaaggcccagaccacgctcaataaagcgtttggcgagggggcgcaggcactgaccgccgcctggggccaggcggacgccctgcgcaaacacatgcgcgacatgggcaacacccaggggctggacagggccacggagatggcggcgaagatggcgaacatctgggagcgggtggataaagtctgggagcgcgtccgcgtgtctatcggcatgcgcctgatccccgcaattcaaccgatgatcgattacgccatcaatgccggtacccagtttgccaagtggctggacatgttcccgaatattgcccgctggattggttacatcacgctgggcaccctggcgctgggggcggcaggagccgccgctaatatcgtagttggggtatcaaaatttgtctggatggggctgaccggcatctggaaggccgcgaccgttgccgcgcgggcgctgtggtgggttatcaacctgaaggcccgtgcgctgcagatcgcccgcattgccgcgattgcgtacagcgccaccatgcgggtgctgcgcgtcacgctgctggcggtgacgatggcctggcgtgtgtctaccgcggcggcgctgctgcagcgtgccgggctgatggcggcatctgtcgccatgcgtgcttatggtatcgcgacgatgttcgccgccgtcggcatgcaaatcttgatgagcccgatcaccctggtgattgtggccgtggccgcgctggcagcgggcatctggtatgccgtgcagcactgggacgagctcaaggcggcgctgatggacacccaggcgtttcaatgggtgatgcagattgccaccgtagtgggggccgtgttcggtgcagtctggcggctgattaaggtcggctgggggaaagtggtcgagtattttggcgggacgtcgccggttgaggcgtttctggggtttgtcgacgccatcggcaaagtgtttagcggcctgtgggattggctaatccagtcgttcggcaagacctacaactggattgtcagcaagctgaacatgatccccggcgtggatatcgacctgaagccggtcggcgatgccgcgccggacgtgtcggggctggctggcccggccggattgaatgcgccgacgcttgagcgcggcggtatcgccaagaccatcaccagcggcggacagagcaaagtcacggataacagccggaagatcggccaggtgaatatctacccgcagaacggggaaacctttgacgcgctgatggagtcgcgggagctggctgcaggatga

SEQ ID NO: 433710 - DNA, 354 bp, Serratia marcescens
atgaacaccgaaccgaaatatatcgacctgctgatcaccgatcgcaattttacgctggattccggcaatgagccggagctctgcaacaaccgcgtcagcatcgcgcaggacgtggttcacatgattattgagtccggcatcgttaaagagctgatcgccgagcgcagcccggtgctgcgtgctgacatcatgatgcagatggaattactggtcgagtccgacgatcggattgtaccgggtaccgtcagcatcgccgacggccgcaacggtgactacttcattgcggccgacacctacgatttcgggctgctatcgctgatggataagttggggacagatgaacaacaagcctaa

SEQ ID NO: 433711 - DNA, 1185 bp, Serratia marcescens
atgaacaacaagcctaatccagactatgaagccatcctggccgagcagggcatgccgaccacggaggcccagatacgcgatgaatttaacgccatcgtgcgtgacgaggggctgatcactaacacctcgcgtatgtcgccgttctggcgtctgattacggcgatcgttaccgcgccggtgttgtggctcaaagacgccctggtcaatacggtgatgacaaacctgttcctggcgacggccgagaaaaagtttgttgacctgttcgcctgggcggtcaacctggcgcgcaaggatgccaccgccgccgtcggggccatccgattcagcaaagtggacgcggggcgagaaatcacggtgccggtgggtaccgttatccagaccgagcgaatcaacggcaccatttaccggctgcagaccactgccgacgtcaccatcgccccggggacggccagcgcgctggcgccggtggtcgctgagctggagggcagcgggtttaacctggcgccaggctattaccgaattttgccggtggcggtcgacggcatcgccagcgcggtgaatgaggacgactggttaacccagccgggcgctgatacagagtcagacgacgacctgcgcgatcgggtgaagaaccagttcaacctcgtcgggcaatatcacattgatgcggtgtaccgcggcatgatttccggcctggctgggctcaacaccgaccgcattttctttgagcatgacgcgccgcgagggccgggcacggctaacgtttacctgctgctggactctggtatcgccagccagccgtttattgacatggtgaatgattatgtcatgacgcagggcaaccacggccacggcgatgatgtgttgtgcctgccgctgccggaaacctctcacgaccttacgatcaccgtgcatctgtacgccagcagccatctgaccgacgagcagacggccacgttgctgcgcaatgccggtaacctggtgcgctgcgcgttccgggaaaataccgattatgacgtcgcgaagacctggccgttcagccgtttctctatgtcgcgcctgggcgaagagctgcacgacgccttccccgatatcgaatcccttgagttttccctgggtgacattctcagcgggttggatgtgccgcggctgcgcacactgagcatggttccggcggatgagtaa

SEQ ID NO: 433712 - DNA, 600 bp, Serratia marcescens
atgaacaagggcgagccgctcaccctggcgcacgcctcaaaaatctggtgggagcgggtttacgggtggctgacgttcccgctggcgcaaatcgacgttgatacctgcgacgagcagttactgagcctgctggcgtaccagcgcgatatcaaccgattccccggcgagtcgctggcgctgttccgcctgcgggttaaacacgcctttgtcaacgctctggacgcagggagcctggcgggatttgcgcggatattcgagcggctggagatcggccaggtgcaacagttggagcgccagctatggcttgactgggacgtcattttgctgcgcatcaacgatgagcagttgagccgcgataacgtgttgatgatgaacctggtgcgccagtacggccgcacctgccgccgctatttcttcgacgtgctcaaccagaacacagtcagcgtgcggcgcggccggtttgatctggatgtggggtttcactacgccatttggacggctccgccgccgagtggccacactgcgcttatcactgagaaaggggttcggcttgtcaccgaacgcggcacgcaactggtaacggaaagagagaaatcatga

SEQ ID NO: 433713 - DNA, 744 bp, Serratia marcescens
atgaccgacgaaatcagcattatgaacttgccgccggtcaccgagctgaaacagggcggcgtgctgccgatcagtcagccggacagcggcggcgaacttgacacgttcaaggtgtcagtcgagcaactggcggcaatgataccgccggggctaaacggtaagagcgcttatgagatttggcttgctgaaggtaacaccggcagtgaggcggattttcttgcctcgctaaagggggagccgggcgaaggggccgatctcacactcagcccagccaaagataacctgttaaaaaaagagggcgacggccttaaggttttagccagtcacccaattatccccaaaatttactcaacatcctacagcacctctaaatcggcgatggcccggcaatctatgccggatggcgcggtagtttatcgtgggacgttcagcgttaaaaatccgctgggaattaggaacttaaataatgtcggtattttcacctcgttttctcagcaaagcgggtatttctatctaggcaaagataatcagtttgtgacggtacaagtccacgcgatgccaaagacaacaacagccagcaccatcacggccgatcttgctctggtctttagcgctgagccttaccgggcatttgatgtttacagcggtgaagaggcggtgagctcggaagagggcgacgccagaatatccgtcagcattcggttaattgcaggcacaacgatggggcaaaacggttttgattaa

SEQ ID NO: 433714 - DNA, 1800 bp, Serratia marcescens
atggcccaaagcattgtcacgcgggcatttgaagcctggatcgtgaataaaatcctgaataaagagcccgccaggcccgacaagatgatttttgccttgatacctgggcaggatgaaaatgcggagatcgaccggggcgaaggcatgccggaagccggacagatccagcatacggcggatattacgcaatatggcgcgctgaacgaaaacgccgtggtgtattccgtggtgctggataccacgatcggcaactgggaatacaactgggtgggcctggtcgacagtgccagcaatacggtgatgatgatcgtgcatacggccacccagtctaaaaccaagaccgagaacggccagcagggcaacagcctgatccgcaacctgtcgatgcagttcgacggggcggcagcggcgacgcagatcaccgtcacgccggaaacctggcaaattgattttagcgcccgattgcagagcatggatgaatcacgccgcctggcgaatgtcgattactacggcgacgcggcattccgtggcgatggttttaaggtcagcctgtccgggcttactgctaccgtagccccagggctcgggtatgtcgccgggctgcgtgtcttgctggacaaacctcaaacgcttgatgtgacgtcaaaaacgggggtgtgggttgatgtttgttggtgtgggacggtgacgggagcctgggccaacctattcaccctgcgggcggtcaacgagctggaagattatatcgatgcggccgggtatcaacattacgttacccgcatttttcgccgtgatgcatcgacgtcgacggacgagcgcaaaccgttcccattggatgcgctggaaaaagaggttgaagatttagacgtctacagcaagacggaatcagatgcacgcttcctgcacaaaactggcgatacagcgaccggccccattttagcgccgtattttgccagcaagccagacgcgaaaccggagggcgcaggggcatacggtgatcaacttagtctgaaggccccgttttatcagcccaattggcaatgggatgtaacgagcggcggggtgttcgtacctgtcgccaaaggtacgtcaaccaggaaaggaaaaggctggccgacggcggtcagttttggctacctcatgcccggcacagatatgcacgctcatcctgtgatccatgccattggcgacagtggtcaagaatgtatctgggatttcaatacccaaaacggccgtatcagcagtaaagcgggtacgttcgccatcaaggaagaaatcacccccgctggggtgccgatgccgtggccggggagctcgccgccgcctgggtttatttttatgttggggcaggggttcaacaccggagcttacccgttgttggcacaggcatacccgtccggcgtgctgcctgacatgcgcggcctgacgattttgggtaaaccggacgatcgccagccattgtcctgggctgaggggcaagttaagcaccacggccatagcggtgaggtaggcggtgccgatttgggcagtaaggaaacaacaccgaacggcgcgtttcaaccgcgtttgcgttcgtataactccaatacggcattggatggcggatggagcacccgccacaccgtcgaacaggatcgggactatggcgatcgcaaccttaacatgattgagcctatccccaatcacacccactggatcacattaggatggcatgggcacagcttgcgcattgatgggtttggcgcggcgaaaaacaccgttgataacattgcatttaactacatcgtgaggctggcatga

SEQ ID NO: 433715 - DNA, 765 bp, Serratia marcescens
atgactggtacagcgtttgaattctccgacaatccgcagtttgtgtggatttacaactttgacgaaaaaggggtgtttaccggcacctatcactaccaggtaccgcctcagagcgggttaccggccaacagcacgaccgtgccatgccagcccaaaagtggtatgaccggagtttgggacggtaagaaatggcgcgaagtgcccgacctgcgcggggttcagtattgggataaatacggcaaggcgtccgtgatcatggcgctgactgagaccttaccggagggcgcggttactgtcgcgcctccgattgctgatcctgggcacgttctgctgtttagcgatggtgaatggcatcaactaaaggacatgaccggcaaaacgtattacggcgcatacgggcacagcgcgacagtgccggaaccgtattttactctgccggagggttgcacgtttaccccgccgggcacgccgtttgatacctggaatggctcggaatgggtgacggataccaaggcccaggccgacgcagctttgcaggacgcggcccagcaacgccagcaggttgtcagccaggcacagcagcagcgccaggcgttaattgagaaggccaatgagcaaatcaactgcttggaggatgccattgaactgggcatgcaaagagacggtgacgaggatttgctcgtagcatggaaaatattcagggtgttggcgatgcgaatcgacccagaggccgcgccggatattgactggccggtgatgccgtaa

SEQ ID NO: 433716 - DNA, 705 bp, Serratia marcescens
atgtggaaaaaaaagcgcctgcatatcccggagaacctgcgtggggttacctgctccaccgttgtggcgcatccgtgggtatttgggctgggccaggaagaggattccggtttttacctaagcccaccgaatgctgtcaactacctggtcagcagactggccgcggcatcggtgcgccaggatgtgaccgtgattatgatggtcgcgccgacgctggcggcatttgtcacactgctgaccaccgccgccgaggtctttccgatcgcaccgctgacgcaggttcagcgccgggcctcggcggcgatcagcctcgcaaccagccgtatgcagttaccagcggttgccgctggtctgccgcctgcggtatcgctgtcggtcagcaccacccgccaggccgctggcgcgcagtcgctgatccaggcgattgcggacgctgcggcacccagcaccccggaaggcatcactaccgcactggctgagtttgccaagagccgcgccacgttgctggaagcggcaaaggaagggctggcgcagctgcaggccggaagcgtggacgtgtgggcggtttccgccgtcggcgatacgcagatcgccgccaggctgatgcgtgaagatgtgccggaggccgatcgggtgtttacgctggccctgatgttcgtcggtgacgatctcgcgccattgcgtgcgatgttgggggagttatga

SEQ ID NO: 433717 - DNA, 552 bp, Serratia marcescens
atgacgcaaattatcatcctggcgctggatggcgaagccattttgatgaaaaacatccttgttacgccgtcgatgcagatccaggacaaagaccagtccgggcaggccagcagcaccgccaatgctgagcagggggtaaaaggcaaggagctgcgcgtatcagggctgataccgttcgaggacaaggcgcagttaacgcgcctgtttgcgctggcggaggccaagaacgccagcggcggcatgaaacgctaccgtgtggcccacgaggtggcacaggcgataaagtttcgtgaggcgacattttccggcaacgtggacgccgcgccgcaaactgaccgcatggcctggctggtgaatttcaccctgaaagaatatttcagcgtcgccgaacgcaaggctatgcaggccgcggccgctggcggcggcaaggcgaccgcgcagacggcgggcggcacaggcagtgccgaggaatcccccgaaaagctgtcctggtttgagggcgtgctcaaaaaaattgatacggccataggcccggcagggggtgaacagtga

SEQ ID NO: 433718 - DNA, 1674 bp, Serratia marcescens
gtgaaaccggttatcacgctgcgcatcggcaccgatgccgtgccggtggcctcacagcatgttttgcttgagctggccgggtgcggccgcggctttatcaccgcgttgaccactgccgacaccaccggccaactggtgcgcctcgacatggggtatgacgagacggtttaccgctggtttaccgggtttgttgaacgtagcagcccggccgagaacggcgcacagcgcatttttgtgcgcgagctgatcggcgtgtttgatggtcattggccggtatcgctgcagcacccgacattgcgcgatgtggtcgccgacgtcgcccggcgtaccgatatggtgttttcgctgccggacaacgccgattataccgacacgccgatcccgcatttcacccacagcggcagcggttaccaactgctggcgaatctgggccgggcctttggcatcgcggattacacctggtttcagctgcctgacggcacggtctatgtgggaagctatgcccattcccgctttgctggcgcgccggtcgatattcctaccgaatttattcagagcgcggccggtggcaacagcatcacgctgcccgctatcccggccattcgccccggcgtgatcgtcaacggccagcgtgtcacgcaggtgcggatccaggacgatgaaatgacgctgacctggacgccgctcaacagccagggaaaaccggcgcagaaaagcccggagcaacggcagattgacaagatttatcccgagctcagcgccgggctgcacctgccgcgcctggcgcgggtgatggggccgaccgacagcgccgcattgggtgaccagtccgacccgttccggccacgctatgcggtaaacctgcagctactggacgagaacggcgcagcggcagcggataccccggtatacaacgcggtaccgctgccggtaccgatggcagcggccgaagggggattatttcagtatccacccgaaggggcgctggtcgaggtcgggtttgccgaaggcaggccggataaaccgctgatccgccaaaccctggccgatggccaagcgctaccggatatcaaacccggcgagcagctgcagcagcagcgcgctggggtgagtcagcgcgtgacgcaggcgggcacctggcagcgggaaaccgaccaggcgatcgaggaatccagcagccagcgccgtgtcaccagcgatcgggaaaaccgcaccacgaccgcacgcaccacgctggtgcaggccaacgacaccaccacggtgctgggtaccgccaaattgctggccggggccgcggtacagctggcggacggcgactatacgatcggcgcatcgggtaacctggtcagccgctgcagcaaagacagaatcggcgatgttggccaaaatgacagcctgaaagtgggcggcacgctcaccgagcaaatccagggcatccggcgcagtgtggcggcggcgcaagaactgcttgcgcccactatccggctgggtagcgaagaggtgaacgtgttaagcctgctgaccgacaccttggacgtgctcagccagttggccgagcagacggcccagcatactcacagcaacaccggcacgccgaccaacagcgaagccatcgccgccaccggcgagaaaactaacgatctccgcgaaaagtacgcccctttcattgcctga

SEQ ID NO: 433719 - DNA, 219 bp, Serratia marcescens
atgaataacaacgacaaacccactatccggcatttcgatgactttcccttcatggggggcgcttctgcagaaatcgggaatcgtgtcgtctgcggccgaaccggtgcggggaaaacgacgctgatgcagtccatcgtggataaatacagcgcggatgccgtgcagcagggcatttctattgcaccgacaccgccttctgaggatgaggccaaatcatga

SEQ ID NO: 433720 - DNA, 204 bp, Serratia marcescens
atgaacatctacacaggtgcttattatctcgcgattgcctttaaaaaatggggagcgacatggcaggcagtgggggcttataatgcagggttcaaagactcaccaaagcaggcgcagcgacgttacaagtatgcgagtaaaatcgaaaagacttaccggatgataaaagccagcaagaacaactctcccattgtgaagaactag

SEQ ID NO: 433721 - DNA, 867 bp, Serratia marcescens
atgtcaacagcgacaaagaacggcgcgagcacaatagatactatcggcatcaatgacaatatgggcggcgatgtcattccttccactgcgattgatgtcattatcgctcagcgaaatttggggttgactgaattgaaagcagcggcggaaaaactccacgcagctctctctattttgcgcgaggctggcggccatagctatcaattcgatgaatatgcaattattgaaaagctgaaacgcagcacaaatctgaacgattttaatcgcacagcagaaatcaacgtcgaccgcagcatctggacgcgcctgatgaatgaaacggggatgttcacgctgatgagccaaaagcagcgagacaattggaatgaatctctgtatagcgagaaatgccccgccgtgacgctggacaatgtactggcaacattcgaggcgttaaatgcgacgaaagcgcaaacttttgagcagggtttaatcgacgtgttccaacggctttcgtgggattacaggacgaataacccttgcaggcttggcaacaaaatcataatcgacagattggtttcacgctcctaccgagaaagttttcgcgttgaggatcggacaattcaggcggtggacgatctggcaaaaatatttttcattctggatggcaaaagagtgcctgatatacgcgtcggggagggtgatcgatttataaacttctttaacagaggggaggggatcgggctgacatgtgagttaacctatttcacgatcagagcctatgccaaaggaacagggcacattgtgtttaaccggttggatctggttgagcgaattaacgaaatcatagcgaaacgattcccgaatacactgccgaccagagtataa

SEQ ID NO: 433722 - DNA, 246 bp, Serratia marcescens
atgactattgagttttcaatcatcgcacctgctgcgagaaatgtacagagtggcgcaaataaaaagcacaaacgcatcaagcgcgattgcattgcggccaacgacgtcgatcccaacgttaaagcatggagtcgtcatattgccaaagctcaacgcaaaggccagcgcgtccatattccggcgctcaagggcaacgagttagggcagttacttcgcgccctggaaatcaaacgggcatacgcctga

SEQ ID NO: 433723 - DNA, 270 bp, Serratia marcescens
atgaacacacgaaacgtcaacgtcaaaaccgccacgaaggaacgctctgaaagatgtgggcaaccccgttgggagatcatgtttttcggccagggcgaaagtggttctattccgatgttttcacgcgtgacagcccaaacggcagcagaggcaaaggcgcgttttttatcgctgttaaatccggtgtccgggtatttcctgggcgagccggtacaaattttggaaacagagattaaggaggtcaacgggggcgggcaatccctgaattga

SEQ ID NO: 433724 - DNA, 2004 bp, Serratia marcescens
atgaacacagtcaaagctactacagaaaaaaatacaagtaaaactgatgtgattgaaaatgtgctcgccgtcgcgccggtcattaccgtcccgctgggcaagctggtgaaatccgacctcaacgtgcgtaaacgtgaacccaagccggaggtcattgctgaactggcggccagtatccgggctgtgggggtgctgcaaaatctggtggtgtgcaaggtcaagggcggcaagcatgcggtggtggccggtgggcgccgtctgctggcattgcaggtgctgcgtgaggcgggcgatatagacgatacctacccggtgccgtgcaaggcggtgcctttggccgatgcggtggtggtgtcgctcaccgaaaatgggcaacgcgaagacatgcaccctgccgaccagattgccgcctttcgggcgctgagtgaggacgggcagagcgcggcgcagattgccggactgctcggctattcgacgcgccatgtgcaaaagctgctgaaactcgcggccatgcaccccaacctgctggccctgctggcggtggatgaaatcaacctcgaccagctgcaggcgctggcctcgaccgacagtcccgaccgccagatgcaggcgtgggaggtgggtgacgacttctacaacggccgcgagcctgccgcgctgcgtcgccgggtattgaacgacgaaatccctgcggacggcaacgccgcgctggcgctggtaggcctgagcgtgtacgaggccgccggtggcgagatacgacacgacctgttctccgactgcggttttgtcaccgacccgcttctgctcgattcgctgaccctgcaagcattggaggctatcgcggcacagctggcggcgcatgagggctgggcgtggagcatgggacgcattgacgccatccgcacatggggagacgaccgcgagcattacagcctcttggcgcaacccaccggtgaactcaccgagctggagcaggaggcgcaaacgcagcgcggcctgcgccatgatgaactgattgaggaaggtgatgccgcagccgaccccgccgacgctgacgccctctataaagccgccgagcgtatcgaggcagaaatcagcgccgtgcaggcgcgcgccaacatcgcggcctgggacgtccaaagcaaggcggatgccggggtggtggtgtcgttttatcgcggcgaactgaccgtacaacggggcgtggtgcgtctggcaggcaaaggtggcgacgagcgcgaagacgacaccggcagcgacaacagcggtgacaccaacacctcccaacaacaaacgactgaaccccaaaccaagggctacagcgccgcactgctgcgcagcctgaccgccgagcggacactggcggtgcaggcggcattgaccggcaacccgcaggtggcgctggcgctgctggtgcataccctgctgattaaaatgactacgccgtgggcgggcagcgtgctgggtgcgagcgtcagccagcagcgcggcacgttgttgacccatgctcccgccagcgcagaaaccgaccgcgccatgacgcgcctgagcgaggtggagcagggctggatggcgcgattgccaaaaggctgggagcaggacttttccgtgttgattgactggccgatgccgacactggttgacctgctggcgttctgcgtcagcggcggcatcgatggcctgtgcgaaaagaccgaccgtaacggacgggcaggggcgcagctggagggactggaggcggcgttgggctttaccctgcgtgactggtgggtgccgaccgcgcagaactgctttgcacggctcagtaaagaccagataggtgacgcgctggttgatgccgaccgactggcacaagccgcctcggcgctgaagatgaagaaagcggacgcggcggtgctggctgaggccgaaatcagtcagacccgctgggtgccgccgtgcctgacaccgactgtaccggcgacggccaggccgtcagaagccgacgacagcgaagcggcgtag

SEQ ID NO: 433725 - DNA, 366 bp, Serratia marcescens
atgaacacacgaaacgtcaacgtcaaaaccgccacgaaggcacactcaaagagatatggggcgaaagaaaatgcggttacagccagtcgttcaccggattttccggagatacggcgcagcgcctacaccaacagcgagcatctgaccgtgccgcaggtgtacgacctgttccggtacgtgtgcgatgccgccggacgctcaaccggaacgctgctgccgcccgacctgccggaggacgcggagtacctgtatgtggcctttgacggtcatgcggattcggtggcggtatggctggttgacggctggccgctggcggcgagtgatgaaatgagtctggtgcactggtcactgcggcgcagaaagtaa

SEQ ID NO: 433726 - DNA, 399 bp, Serratia marcescens
atgtttggcacggtgaaggaaatcagtgcggagttgttccgcgaatatggcgccgacgagccgctggcggtgttggtttgggatggtgaagcggtgcggtattttgcgcgggaatacaatcccactacggccgatgaactggcggtgctggaatcgatagggtgcatggagattgaagagtatcagcgggacggtgtaggcagggcgcacatcgacgcgctgatgttcgatattcagcaggcccgcgccgccacgcagtgcgtgacggtcaacaagctggaattgcagcggcttttgcactttgccgccaaccagctcgacagcaacaatgccgaagaaatgaccggcgaagaccgggaagcgatgcagaccatcgacgccttgctgaaccagctataa

SEQ ID NO: 433727 - DNA, 426 bp, Serratia marcescens
atgcaacagaacaccgcgttaaacctgcacgtttgtgaagctgaccgtctgtcgttcctgccgtacctgttcggcgatgattacctgctggcagaaatgcaggtttatgccaccgctgatcgctacctgccgcagtacaccggcggcttctggcacttcatcatgctgccgacgggcggcggctacatggcgccggactgcgaccgggtgcatgtggtcaacgacgacaattggttcgacaagaccgtgagcggcgaggccgccggcatcatcgttacgctgctggccatcaatcaccgctgctggctgcatcacgaccgcaacaaggcggggttggtgcaactcttcatgcagcgtgagcaacaactttacgactatatcgagactcaccccgaacgcgccgagattctgcgagcgctggactga

SEQ ID NO: 433728 - DNA, 225 bp, Serratia marcescens
atgaaaaactatgagggtcacgacgggctgcgcgccgacattgcggcgctggccgatgagatgtgcgagctgcatctgcgtctacgggggctggtgagtgcgtatttctggaacagcgacgtgctggccgagcgcctggcgggtcatatcctgcgggacgcgcacgaccgttacgtcgagatctacaaagcgattaacgaactggaacaccatttcaaggattga

SEQ ID NO: 433729 - DNA, 672 bp, Serratia marcescens
atgtcccgatttgtcctgggtgattccgtgcaggtgatggccggctatccggcgagcagcgttgattttgtcttgaccgatccgccgtacctggtgggcttcaaagaccgcagcggccgcagtatcgcgggtgacgtcaacgatgagtgggtacagccggcgtttgccgagatgttccgggtgctcaagccgaactcgctggcggtgagtttctacggctggaaccgtgtcgatacctttatgaccgcctggaagcgtgccggctttcgcgtggtggggcacctggtctttaccaagcgctacgcctcgaaatcggcctttgtcggctaccagcacgaatgtgcctacatcctggcgaaagggcgcccgccgctgccggcgcagccgccggcggacgtgcaaccctgggagtacaccggcaaccggcaccacccgaccgaaaagccggtgtctatcctgcaaccgctgattgagacgttcacgccgtcgggggcgattgtgctcgaccccttcgccggctccggttcgacctgcgtcgccgctttccaggccgggcggcgttacatcggcatcgagttgcttgagcaataccacgccatcggccggcagcggctggccgacctgcaacgcgcggcagtggctggcgccacgcgcacccctaccgctgcatga

SEQ ID NO: 433730 - DNA, 639 bp, Serratia marcescens
atgatcacagtcgtagggggtaataaaggcggttcatcaaaaaccacaacggcaaccaacctcgcagttgcactggcgatggtacatggcaaagatgtggttttagtggactcggatattcagcgttccgcctcccgttggcatgctgaacgcgaagcaagcggcttggcgccagcgatcacgctgattgaaaaaacgggcaatatttctcagacgttacgcagcctggcagataaatacgatcatgtgattgtcgatgtggccggtcgtaatagccgggagctgatcaccgcctgtacggtcgctgatatgcttattgccccccatcagtgctctcaactcgatttggataccatgtttgaactgcagcagcagttgatcagcattcgcgatctcaatccagaactgaaagcgtacgcctaccaaagtatcgcctctacaaacccggtgctcgaagggaacgaacgcaacgagttcttggagtatgtcgccgaatttgaccaactgacaccgctgacggcaaaaagctgctatcgcaagatctaccgggatgtcatgtctgaggggaaatcggtcatggaaaccgacaatgccaaagcccgggatgaagtgatggccctcattaatgaggtattctga

SEQ ID NO: 433731 - DNA, 279 bp, Serratia marcescens
atggcgatcaagaaaccgagtgaacggcgtacaccaggcgccagcgaagcggaggcagatgcgctggccaaccgcctggcggatcgcccttatggcggtaacaaggaaagcacaccggaggtgacaaaaccggaaagcatgacaaggacaaccatctccctgccggaggtattgctccggcgccttgaagatctggcgctcgagaacaagcgggctggggtggcacctaaaaatgtcagtgccattatccgggaagcgttggaggggtatcttaagtaa

SEQ ID NO: 433732 - DNA, 795 bp, Serratia marcescens
atgaacgaaaacgcacacaatcccgtcgcactcagcctggcctctaacctgccgatgctgacggcgaaaaactacccgcgcgcgctggcgctgcgcagcatggcggttgcccatgtcgatctgccccactacctgctgttcccggagatcagcgcgctgctgcattatgagaaaaactggcacaggcatgccctgttcaatctgctgtggaataccggggcacgtatcaatgaagccctggcgcttcggcggcgcgattttcgtttgcacgtcgcggtgccttacgtggtattgcgcacggccaaacagcgacgggcaggtgccggccgtccggcaaagggaaaacaggccaatcggatcgtccctctgaccgatccccacctggttgaggagcttcagcgcctgttcgccagcgtggaagaaacgttccagctgcaccccgttacccgctcaaggacgccgttaccggtctggactattacggcccgtacggcgcgcaactggttaacggcgatggttgaccgggcggcacgcgatggcattcgtctcagtatccccgtcacaccacacacattccggcacagctttgcgatgcatttgctttaccagggcacgccgctgaaggtcgttcagggcctgatggggcatgaaaaagcggagagtaccgaggtctatacacggatcttcgcgctggatgtggtcgctgaacggcaggtgcggttcacaatgccgggtggggatgccgtggccatgttgagacagatggacacggcatcattgacgcatgatagctga

SEQ ID NO: 433733 - DNA, 540 bp, Serratia marcescens
atgaaaaaaactctgatggcattgacctcggtagcaaccctgctgtgcgccaacggcgcggctaacgcagcaggcaccattcaaggcacgctaggcgtgacgctgaccatcggcgccggttgcgtcgtgggtggcggcaacagcagcggttccgtcaacgacttcggctccatcagcttcggcacttactcttcactggccaacatcatcgacgccagcgccaccggcgcagggggggccggtacgctgtcattgacctgcaccaccggcacagactacacggtggcgctggacaacgggctccacgtcacgtcaggcacccaacgccgcatggccagcaccgcaggcgcattcatcagctataacctttaccaggatgccgcgcgcaccaccgcctggggcagcggcgccaacgcgctgaccggcaccggcaccggcgccgccgttccgctgatcgtgtatggccgcgtgccggcggccggttctaccccagcggcggacacctataacgacaccgtcacgatgacggtcacctggtaa

SEQ ID NO: 433734 - DNA, 1437 bp, Serratia marcescens
gtggccaaatccaccgccgtttttctgccccccgctttccttgatgccacccgcgccatcatgcccgccgagctggcgatggacgattttatcgccgcttgccagcgcccgctgcgccgcagcctgcgcgtcaatacgctgaaaatcagcgtcgccgacttcctggcgctggtgcaggattacgactggcaactggagcccattccctggtgcgcggaagggttctggatcgagcgcgacgatgaagagctgcgcctgggtagcgccgccgaacacctgagcggcctgttctacattcaggaagccagttcgatgctgccggtcagcgcgctgttcgcgggcggcgcggcgccgactcgggtgctggacgtggcggcggcgccgggatccaaaaccacccagatcgccgcgctgatgggcaatcagggcggcatcgtcgccaacgaatactccgccagccgggtgaaagtgctgcacgccaatatcagccgctgcggcgtgaagaacaccgcgctgacccactttgacggccgggtgttcggcgccgcgctgccggagagcttcgacgccattctgctcgacgccccctgctccggcgaaggcgtggtgcgcaaggatccggacgccatgagcaactggtcgccacagagcgtggccgagatcgccgccacccaacgcgaactgatcgacagcgcgtttcatgcgctggcgccgggcggcgtgatggtttactccacctgcacgctcaatgcgcaggaaaatcagcaggtggtgcgttggctgctggacacctacggcgacgcggtcagcatcgagccgctgggcgagctgttccccggcgccaacaaggcgctgaccgccgaaggtttcctgcacgtcttcccgcagatttacgacagcgaaggctttttcgtcgcccgcctgcgcaaacggcgcgccgtggcgccgttgccgaagccgacctacaaagtcggtaaattcccgttcagcccgctgtccggcaaagaagcggcgcaggtcgcccaagccgccgccgcatccggcttaacctggggcgatgacggccggctatgggaacgcgacaaagagatctggctgttcccggccgagctggaaccgctgttcggcaaggtgcgcttctcgcgcatcggcctcaaactggcggagcgtttccctaaaggtttccgttggcagcacgaggcggcgatcgcgctggccggcaccggcggcaaagcgcatttcgagctggacgccgcgctggcgcaggagtggtatcacggccgcgatctctacccggaactgccgccggcgggcgatgaatgcatcgtcacctaccaggggcagccgctgggcatcgccaagcgcatcggcagccgtatcaagaacaacttgccgcgcgagctggtgcgcgacggcgcgctggatttccacctgtaa

SEQ ID NO: 433735 - DNA, 876 bp, Serratia marcescens
atgagtagagcaaatcgagatagtctccttgacattaatgaaataattcaagatattaaagtgcaaagcccttattttgcttttcaacaactctggcaagagggggagtcgttggttggatcatttacatctgaacagccccttttatacgaagcaggctgcattacagcgggagaattggggaggcacctggctatattgggtagctgcgctgcggtcgcattgcataacgggccagagggatactatttggcgacaaaggctcattttatccgaaagtcggaaaaacataccctacctcagagaatattatacgcaagagcgcaggtagtagacatgaataagcgggagctgaaaattttcgctcaggcatgggctaatggccccatagcagagttacattgcgaatacaccattctttcacccgcgttattccaacgtaatttcaaacattatgcctgcgaaaagttgtcaacgtcactagactcaccttatcaatatcctgtttcattatataatttagagcacaatgaaaaggagcttgttgcctttgccggccctctatcacctcatcaatgtaccggccatttccaaaactatccatgttggccagtggcaatcatctcacaaacagcatttcaggtcactggagagttacttaataaagtttatggtcccgggatccaattttacgtaaatgacactcatttatcagcaatgaagttgattggtgccgatacagtattaaaattccgtgtaacactaaaagaaaatcagccccccttgatacagagtgacattgtggtatatcgtgatgaagaagagatagccaggctaacaaaccagctcgaattgatattacccattaggccataa

SEQ ID NO: 433736 - DNA, 1125 bp, Serratia marcescens
atgggggaaccctggttcaaaatcgcccgggacgccgagcggcagggcgtagtggcgttttcgtcgaattatgcctactacgccgacatgtcgcatcgggtgatggccatccttggccagctgacgcctcgactggaagtgtattcaatcgatgaggctttctgcgatctgaccggtatcccggccgcgcagctggaatcgctcggtcggcggctgcgtgaagaggtgcagcgccgcacccacctgacggtcggcgtcgggatcgcgccgaccaagacgctggccaaactggccaactacgccgccaagacctggcacaagactggcggcgtggtcgacctgagtgcgccggtgcgccagcgacggctgatggcgcacgtgccggtagaggaagtgtggggcgttggccggcggattgcccgccggctggcgacgatggggatcagcaccgcgctgcagctggccgacatgccggcggccgcggcgcgccgtcagttctcggtggtgctcgagcgcacggtgcgcgagctgaacggcatcgcctgcctgggcctggaggaatttgcggcgccgaaggagcaaatcgtctgctcccgctcgttcggcgacaagcccaccgagctggacagcgtcagtcaggcagtctgcgcacatgccgagcgcgcggcacaaaagctgcgtggcgagcggcagttctgccggcacatctcggtgttcgtggccaccagtccgttcgccgccggcgagacctattacggcaaccaggccaccacccgactggcgacgcccacccaggacagccgtgacatcattcaggccgcccggcgggcgctcgaacggatcttcatcgccggccatcgttatcatcgctgcggcgtgatgctgggcgatttcaccagcgaacgcgtggcacagttcggcctgtttgacgacgcgccgccgcgcaaaaacagcgatcggctgatgcagctgctcgacagcctcaatcaggatggtcgggcgccggtgtggtttgccgggcagggtattcccgatcgggctgacggctggaagatgaaacggcagcggctgtcgccggcctggactacacggctgcaggatgtcccagttgtgcgtctgaagtga

SEQ ID NO: 433737 - DNA, 618 bp, Serratia marcescens
atggtggcgatgtgcgaccgcctgaacattgtgaccggcaaagttgaagccagtgttgagcaactttccgactggtgtgggttatctaccggtagtggtgacaagaaaagtatctcccgcgccagccgggcgatcactactctggaagagttgggtgccctcgcttgcgaacgtgcctgggatgaggccagtcgttcccacatccccaaaatcatctgggtaaccgaactgttctttgtcctgatcggctatgagctgggtaagtatcaggcggcgcaaaaccagcagctggcgtggatgaatcagggattgctcaagcagggcgaagccccgatcaccctgtcagaggcccgccggcgtgccaaagagcagcatataaaacgggcctttgaacaccgggcgcgtcaccgttccttcaaacaacagcgccggcaggcgcagaaactgctacagatggatcaccagcaggcgcgtactgaaatccttaacggtttgataaagatgtacagcaaggatgagctggaggccatgggccatcttgagctaaaacgccaggtagaccagcgttaccatgccttgcgtaagctggcctcatcagccccgccagacacaccataa

SEQ ID NO: 433738 - DNA, 2820 bp, Serratia marcescens
atgacagcaaaaacttcagatgctttgcgccacagagctatcaagatggtacagaatgggatctctaaaacccaggtagccaaagcactggggctgggcattagcaccgttgggcgtatcacaaagcacgtaggtaaaactttcacctactatccggaagaagtaaaacatgatgtgctacaaaggataactgctggtgaaaaggcggcaaccattggccgggagctgggcatagacaagggagttatttgtctatggcagaagaaggctaagggaattcagagaattagagaagatatacctagtgaagtaaaggctcaggccatcaaactcgttgaaaatggagaaatgtatacggcagtcggtcgtaaactgaaggtcagtgccgccgccgttcgttattggtttaaggctgcggaagcccgtggtgaaactgtattgcctcccccacagaacaaacgtaccgataaagcgcttttgtgggtacagcgccaatatccccatttggctcaatggcgagactatgcggttgagtggttaaaaggcgaacacagtgcgttggggactaaaacagcggcgctggtagcttttttcacccgatatctccatgagcagggattgccctcagcaccggaagcgctgttaaaacggggaactattgttccggattttttcaaggtagcctgcccgcaatcgccgggtggggtatcttacaacaatcacatgcatagctttattaactgggtacttttaacgtattatagtcacagggctgatgatgagagctcagttatttccccggtattttgcaatccgataattcggcttacctcagcgggctttcctgttaattacgaaagtgttcaaacaccattaccttatggatatattgcggaacttcgtaagcttcttgcacaggggccatcttttagcgactggatctgggcgcagaatgcgcttggtgtgaagcgagctggtgagttcagtactcgaatggctaaagactggtttccagtaacggaagatgaaatcgataggaatgatcccgattgtgtttggcgagtcagacggtcggttgatcccaaagtaaaacctgtgttggaaatgtggagcccagtcagatgggtggctcttcttattaaacttcagcttccgccgcgtactttccaggtgcgcatgctcgattctggtgaggcggatacttggcgatatagcggaggccattggattgataatacaaacccactcgtttcaggttcgaaaagaaatccggtacaacaaggcgtatttcgtcgttctgacaggctcggacaaggagatatgcgaaccacgctattttttaacacaaacaaaactgcagatatcagaaagtctgggacccataaagggtatgaattcccctggccggtgatgggggagttgtgcgatcagccacattactggctggaaaaaatgcggaattggcaagaaaaatataacccaatcgttcgccccaccccttggaaagaaataccgtcgaggtgcattggtgaacccaaatccgatatgcaactggcgtcgtatccagatacatgttttttatttcgaaccgcagaacgacggaaatatggagagaacacatttcccgttactgacggtactatcagtggtgcgtggggtaagttgttagaagcattgcaacatcgttttgctatgagcgatacgaaacatcccgatggtacacccatcgttttagttacccggccgggtaactcccccatagcggttttccccctgcatagtttacgtgtttcactcattacggctctggcaatagaaggggaacttcccttcccattgctaatgaaattagtggggcatagccgattgattatgacactttattataccaagccgggtttcaggcatatgcaagatgcgctggaagaagcagcaaaacgtattgatgcgaagaaggaagaaagtattgtttcatttctggcaaatgaaacgcatgcgaagcttatagagcgtgctatttacaacagtcaggacgcattcaaggcactcatcccggaatcgccagcaaatcgtaaccctgttggctggatgttaatgcaccatggcctctgcctggtgggaggtaatacgcaggaaagtgagccctcaataaataaaggaggctttaaactaggaggctgttataacggaggacccgccgtcaatccggaggcaggaaaccgtatttatagaccggttcctggcgggataaggaattgcattcgttgtaggtggtttgtcactgagccccattatgtaccggcattggcagctcatttgggaaacgtgtgttaccagtttgatgaagccagggatatggcattaagacagaatgctgaactgcaagacctaaaacggcaaaaagtcgatacggagaacactggggccgttttcagcaaggagctggcactgcgtactaccgagcgtttgtgggagtctaccatgcaacgttttagtcatctggctgaagatatggcggcgtgttggcaattgatcaatcggtgtaacgcgttacccgtacctaatgaagacactacaaccgtcatggtcgctgccggttcggagatggatgttcaggccggatttgaagaagttgactccgaattactgcaactttctggcgtttgtctgaacatagaaatttatccggatttggaacctggtaaagccattttcaggcgtagccagctactcgatgcagcgttagcacgcgaccacctgccaccaatatttctacgactaaccaacctcccaaggctggggcgaacaaacctgccctga

SEQ ID NO: 433739 - DNA, 1152 bp, Serratia marcescens
gtgagtaaggatttggaaatttctatttcaagtggtcgtttcaagaagttaagggagtggaacaggagacgaaattactacttcaaggaagtaaagcttaatatcaagatttatattgcaaagcttatctgggataagcgtagaaaaagcaattttgatatcaaagcaatcaaaactgtactgctccttcgcaatgaaggaacaatcggagatgttgtggtttcaacgccactagtgaagtgcctttatgagtcgggttatacagttgatttactacttacaaagtcaagtagcgtagctatgaaatacaacccctatgtcaggcatgtctacgaggctggggactgtaacaatgaagtttttttgaagagatttagccacaccgtggctgaatcgacaataagaacgttgagtgacaaccattatgatctcgtgattgacctttgtttatttgatacacctgtacataggatgatgctttttcgggacataaatgcaaagtttgtccttgggtttaataaatggggttgcattaatcactacagcaaatctatttcatttaagaatggtaaggaacatgtgacaaaagccatttccttggcagcgtataacttggggcttgactttaaaaatagtcacacctatgacttgcatatccctgacgcaattgcttccgaagtgcgaaagtatttcagcgcatgggaggggaaaattaaaattgtcattaatgctttcactggtagtccagaaagaaacttatctcaagagcaattaactcaaactattgagatgattaacgagagatcagatgatatcatcattattattcttgatcacaggaaagaactaagtgtgtctcttcccgataatgttgcgataaatccattcaattcactgcatcatgttatggaactgattagacaagttgacttggttatctctccagatacttcgattgtacatatatctgccgcatggaataaaccactaatttctgtttacaaaaacataactgacaataatgatttgtgggcgccgggttataaagaagcaagtcagattattgttaataaaagaaaaatatctgatgtggaaaatgttcccgatcttatatttaaggagataggcaaaaggggagtgtttgaaagttga

SEQ ID NO: 433740 - DNA, 10905 bp, Serratia marcescens
atgaacaaacattgctatcgccttatcttcagccgcacccacggggagctgcgggtggtgtccgaactggctcgcagttgcagcagcgaaccggggcagcgcatcggttcaggaataacgactgggagtcgtctgtgggtcaccgtgcgtcggtcagtgtggctgctggggctgctcatgttcgccagccccgtcatggcagacggcattgtcgcggacggcgctgccaatccttcccagcggccggaggtcatcaatacccagaacggcttgccgcaggtcaacatcacagcccccaaccaggccggcgtgtcgcacaaccagtaccagcagttcgatgtcgacgccaaaggcgccatcctcaacaactcggcggtgatgacctcgacccagatggccgggatgatccagggtaaccctaacctcaatcccaattccgcgccggcgcgcgtcatcctcaacgaagtcaacagcaacaatcccagccagctgcgcggttttatggaagtggccggcggcaaggcgcaggtgattgtggccaatcccgccggcattgtctgcaacggctgcggcaccatcaacgccgggcgcatgacgctgaccaccggtaaaccgcaactgaatgccgatggcagcgtggcaggttatcaggtcgagcgtggcgtggtgcgcatcgagggcggtgggctcaacggcgatacccgtcatgataccgagttcgtcgacattctggcgcgcgcggtggaagtcaacgctggcgtctgggctaaagaaggcgtgtcggtggtggccggtcgtaaccgcgtgagtgcggacggcaaaaccgcgacaccgctttcggacgacggcagtaccagaccagagcttgccatcgacatggggcagatgggcggcatgtacagcggcagtatccgcatgattggcaccgaggccggcgtcggcgtacgtaatcagggcggacaggtccgggcgggcaaaacgctcaccgtgagcagcgaaggcaagctcagctggcggtctgatacgccggatgcggccacgcaggccggcggcgatatccaactggcggcaaaaggtgacattgagacgcacggcaaagtgtatagcggtggccaactggccgtgcagagtcgcgagggaatgttatcgcagtccggtacgctggcggcggccgggaatgtgcacctgaacgcggcgcgcggcatccagatcagcggccacctgctggcgggcagcaatgccgacagcacgctggtccaggatgccaacctgcagctcgatagccagggcgatatccgtgccagtggcagtctgcttgccaagaagagcgtcaacgcgtccgggcgccgggtggatatcagcggcgcacaggttgcgaccggtcgtaccgcgctgacggcacgtgacggcggcgtggccttgcgccagtccaccgttgacagcggtgagctggccgtgagcacgaagggaaatgtggaggcgcagcaggccaaagtcaaggccgggcgctggacggtggatgccgacaacctgttcaaccaacaggcgacctggtcacagaccggtgacggtgagagccgttttaccctggcgggctcgttggataacagcgacggtgccatcgaggcacagaacctccggctttcggccagccagttagtcaatcagcgcggccgcctggtggcgctggggggcgcggcgcagtattggcaggtcggcggcctgctcgacaatgccggcgggacggtgggcagcaacggcgacctgcgcctcgatgccggcagcctcgataatcagcgcggcacggtaaaaacccaggcgggcttcacgctccatgctgatggtgcggtgaataatgccgggggcaacctgctggccgggaacggcctgacgcttgaggcaggtagcgatctgaataaccagtcaggcaccctgagtggcgatgacgtgcgtctggcggtacaacggctggataacgcgcaggggcagatcatcggtcagggcaatctcgacctgacggccagccgcctggataatcaacgtggcctcattggtgccggcaaggcgctggatatccataccggcgactgggacaaccgcagcggtacggcgcaaggcgaaacggccgtcacggcaacggcagcgaccctcaacaacgacggcggcaagctgctgtcaggccaggcatcaaccctgaccacctcgggcaacgccagcaaccgcggcggcgaaatcagcggcgcggcgctgacggtgaacaccggccggctcgacaatgcgcaaggcaaggtgattggccaagcgcggcttgacctgcatgcccgccaggggctggacaatacgcaagggctgctgggtgccggccaggcgttgaccgtgcggaccgacggtgagctgaataaccgccgtggcacgatatcggggagcgggcaaacccacatagcggccgggcgcgtgcgtaacgaggccggcaaactgctgggcgggcaacaactggtgttgaacagtgcggctgagttggtgaaccgcgagggcgaaatcagcggtgagtcgctcacgctaacggcgcaacgcctcgataacgctcagggcaaggtggtcgccatgcaggatataagcctgactgcgcaacaagggctgagcaacgccgccggctggcttgaaggcggcaatagtctctccgtcaagaccgatggcaattgggacaaccagggcggcaccgcacaaggtggccggcaggtcaccgccagcgcgcagtcgctcgacaataccggcgggcatctccagtccggcggtgacctgacacttgacgccgcaggcaatatcctcaatcgcaccggtaaactgaccgcgcaacaggcccttgccgttaacggcggtgcaaccagcctgttcgataatgatggcggctcgctgcagagcggcggcgacttatctttgcagggaggcctgctggccaaccgcgccgccggtgtggtgctcggtgggcaggcgctttccctgaacctgaccggcgactgggacaaccggggcggtacgtttaccggcaatgggcgcaccgaggtgcgcgccgccaatctgcgcaatgaccagggcaccatcaacgcgctgggcagcctggacatgcagttcaccggcaagttggataacagccgagggcgtatttttagtcagtcgtctcaaatgctgcaggcgcaggagatagtcaatgcgcggggctggatgggcagtcagggcggctggcaggcgatcagcggcggttttgacaatacggaaggcagcgtgcagagcctgcaggccgcacagcttgcggctgacaggctaggtaacgctaaaggtgtactgcagtcggcacacgacctggcgctgcgcatcaaacagaatatcgataatcgcaacggcaaggtttcggcgcaggggcagcttgctgtcgcaggcgcccaagacggtgaacacgccggtgccatcaataacgctggcggtcagtggctggccggcgaggggctgcgtatcgccgcccgcgcactcgacaatacgcaggacgggctgctctacagccagaaacaacagcgccttacgttgagcgatgcgctgaacaatcgcgatgggaaagtgcaaagtggcgaggcgcttcaacttgacgcacaaacgctgaacaatgccggcgggacgatagacggccagcaacacgtagcgctgcgtattcttggcttgctggagaataccgacggtgccgtgcgcagcaatggcgaccagaaggtgtcggccgccggtatcaataatacgcgcggcgtattcagcagccgcggcggcatcacggtgacatcaaagcagctggacaacgccggcggtacgttcatcagtcagggagcgggtatctaccgacttgaccagcttaacaatcagcacggcaaagtgcacagcggtgaggcgctcacgttcgacggcacgcaggtgaacaaccagggtggacaactggtgtcgactcagggcctgacgctcaaggccgggacgctcgataacagcggtcagggcacgataagcagccagtcagcgcttgatgtgcgagccgatcgcctgaacaaccgcgacggcgggctgatactgggcactacgcgtaccgacatcaccgcccgtgatatcgacaataccgcaggccgcctgcagagcagcgggcagatgaccctctcgggagtcacgcagttagacaaccgtcagggacgcatcctggccgacggcaatctcgatatcaacgctgaccggtcacagaccgactcgccgctggcgctacttaaccagggcggccgcgtggagagcgccggtgcactgacagcgaatacgcgtactctggataaccagaacggtaccttgctggggctacaggcgctgacactgtccgcgcagcaggactacacccgacaggccggcgacaccgtcagcagtaacggcacggtgacgttctccctgagcggtgcctttaccaaccaggcggactggttgctgccgggcaatctggtgctcaatgcagccagtatcaccaatccggccaccctggtgggcaaaacgctgcagctgacgaccggagccttgcaaaacaccgggcgccttgaagcggacagcatgacgctgaatgtcgataccctggacaacgccgcggcgctgatgggcgacgacatcaccgtgaacgggcgcattatcgacaaccacggtgcgcctgcggtgatggcggcgacccacagcctgacggtgcaggccggtgagcgactggccaatcgggagggcgcgctgatttacagcgccgaccgtctgcagttgcacagcgatgacctgattgagaaccgggcgagctttatcgaagcagacggtgacgccaccgtcgaggcccgtcgcctgaacaacctgcgcgaagggctggtgattgagcgtgacgccgagaagagcgactacaaatggcaccgctacaactactattggcgctcttatggttcaaaggtcaaccctgacaaaagcaccctggcgccgactacccaacagctgaccttccaggatgatgcggcggcacaaaccaaccgctacggcaccctgctggccattgatgcggctggcaaacgcgcgcaggtgcgggtcaaggacaacaaaggccaattgaccgacctgtgggtcaattacctggcgctcaagccgaatgccgacggcagctttgcgatgacgttctacgagacgcgggggggaaaccagctggcgactatcccgacgccgtaccaaaacggcttccattgggaacacgactggacgcaggtgatgacctgggatcccgaaaagcatgtcgacatcgacagcgcgccatttatcaccgattacaacaacttccgcgagcgtaccgaaagcggcacgctgacgcgcgacaagctggtctccgagggcatcggtgcgcgtattctggcgggcggcaacatggtgctgcgcatcaccggcgtgctgctcaatgacgccagcgttatcaccgccaacggtaacctgacgcaggacggcggcggcagcgtagacaaccgcggttactcggttaacgaacggcgccaggcggtgatcgttgaccactatgacaaggacacgcatcactggtacccgacgttcaaccgggacgagaccacggcgttggcgaccgttgacggcgtgatcaccggcagcggcaccgtcaccattaacggggcccgtatcaccaacaccacggtcaatcaggcacaaatcagtcaactggatgcggcattgaaggcggtggatgccgaacgcgccgagcttgaacgcaatccgctggccttcacggtagaggcggctgcccgacctgacggcgatacgacgctggcacaaggcgaacagatgacgcaacccggtgccacgccgtcctcgccgctggggcgcccgctgctgccgtctgagctggcgctgacgcagttacagcatctgggcaatgtggccaccaccatccccaataacggtttgttcagtcaacatacggcgaccggcagcccgttcctggtggtgaccgatgaacgctttacccgccgcgacaactttatcagcagcgactatatgctggagcgcgtcgggtatgaccctgcgcaggcccataagcgcctgggggacggtttttacgagcagcgtctggtgcgcgagcaggtgctggcgctgaccggcaaaccgtccgtcaagggctgggatgcgatggaacagtatcagcagttgatgaacaacggcagtaaagtcgcccaggacttccatctggtgccgggcgtggccctgacgccggagcagattgcggcgctgcagcaggatatcgtctggctggtgagcgagacggtgcaaacggaaggcggcccgcagacggtgtgggtgccgaaggtgtacctggcacagaccacgctgcgcctgaccggcgatggcgcggtgattggtggtggcgacctgcaactctcggcgggcagcatcaccaatgccggcaacctgtttgccgacaaagccctgacggtcgacgccgggcagttcctgcaccagggcggcgacatcaaggccggcagcattgacgtgcaggccgacagtctggccctgagcaccaacctgcaggatgcgctgcgtcaggcaaccctaagcgccggcgacattcgcctgcgcggcacggatatcacgctcacgggggcgaagcttgatgcgaccgatacgctcaacctgagcgcgcgtaacaacctgaccatcaccgccgcgcaaagccgccataccgccgaccttgaggttatctcgggctctatgggcaaccgtacccgcggcggcacggaagcagcaggctcccggatggcgcacgtcagcggcgaatggcagcaggctaaggggagtgaacttaacgccggcggcaaccttaatctttcggccggccgggacgttacattcgcgggcagccaggccaaggccggcggcagcacccgcgtgcaggccggtaatgatatcaacatccgggccgagacgaccaccaacaccacgctcctggatgctaacagccgtacttcctcggtcagcaacgaccgccaggaagagcgtctgacattaagcacgctcggcggcgaccagggcgtcaccctggtggcgggcaaccaactgctggcggaaggcgcgcaggttgacagcaaagcgggtcgcataggcgtcagtgcacaggacgtgactattaaagacgcgcgcagccgcacgcaagatctggacagcgaaaacaaacgcgagggcaaaaccaaaagccatcgcgaagagcaaaccgagcgcgaaatcagcaccggcagcaccttcagcggtcagcagggcatcacggttatcgggcgtgaaggcgatgtcacggtcaccggcagtaccctgcacagtgaccagggcgccatcgccctgcaggcgaaaaaggatgtcaccctcaatacggccaccgagcgcgagtcgcgctacagcgaggaacgttctgagaaaaaaggcttcctgaacaagagcagcagccataccgtgaccgatgaccgaaccacgcgtgagaacggctcgctgctgagtggcaacagcgtcagcatcagcgccggcaatgacctgacggtcaccggttctgccattgccgccgaccaggatgtaaacctgcaggccggccgtaatgtcgatatcggtgcggccaccgaaaccgagacgcattacctgctggaagagaagaaaaagagcggcctgctgggcagcggcggcatcggtttcacgattggcaaacagtcgagcaaacacgaaatcgacgagaaagccaccacccaaagtcaaagcgtcagcaccgtcggcagcagccagggcagtgtcaacatcacggcgggcaaccaattgcacattggcggcgccgacctggtggcgggcaaggacctggcgttgaccggcgacagcgtgactatcgaccccggctacgatcagcgcacgcgcaaagaaaccttcgagcagaagcagagcggcctgagcgtggcattgtcgggcaccgtgggcggcgcgctcaacaccgccgtcagctcggcgcaacaggcacgaaaagaaggcgacggacgcctgaacgcgttgcaaaataccaaagccgcgctgtccggcgtgcaggccgcacaggcctgggagcgggataattcgctaaccgcctcggcggaggcgaaaaacgtcgctgccggtttacagccgggagacgaagatgcggcgcagggcgccaccaatacggtaggcatcagcgcctcctacggcagccagtcgtcgaaaagcgaaacccgcaccgacagccgccagtcacagggcagcacgcttaccgccgggcaaaacctgtcgataacggcaaccggtaaaagtcacaacgcacagagtggcgatatcactatcaccggcagccagttgaaggcgggcaaagacctgtcgctcgatgcggcgcgggacattaccctgcagtcggcgcagaacagcgaaagcaccgtcggcaagaacagcagcaaaggcggcaacgtcggtgtcggcatcggcgcaggctcgggcggctatggcatcagcgtctcggccggcgtcaatgccggcaaggggcatgagaacggcaacggcctgacgcatgccgaaaccaccctggatgcgggcagtaatctcaacctgaccagcggccgcgacacccggctgaccggcgcgcaggccagcggagaaaaggtcaccgtcgacgtgggccgtgacctgacgctgcaaagccaacaagacagcgaccgctatgacgccaaacagcaaaacgccagcgcgggcggcagcttcatcttcggctcgatgaccggctcagccaacgtaagcgccagcaaggacaagctgcacagcaacttcgactcggtaaaagagcagaccgggctgtttgccggcaagggcgggtatgacgtcaaggtcaaagaacacacccagctcgacggcgccgttattgcaagccaagcggacaaagagaagaaccgcctcgatactggcacgctgggctggacggacatccacaaccaggcggactacagcgcaacacacagcggcggcagcttcagcaccggcgggccggtgggcaaagacctgctgaccaacatggccggcggcatgctgtcgggcgccaacaacagcgggcatgccgagggcacgacgaaggccggggtcagcgaaggtacgctgatagttcgcgacaaagacaaacagcagcaggatgtggcgcagctgaaccgggataccgagcatgccaacgacggcagcatcagcccgatattcaacaaggagaaggagcagaaccggctcaagcaggcccagcttatcggcgagattggcggccaggcgatggacgtcatccgcacgcagggagatatcgccgggctgaaggcgcagaaagacccggcggcgctggcgcaggccagggagcagcttgagaagagcggcaaaccgacgaacgatgcggcggtgatgcagcgggcatacgacaacgcgatgcggcaatacggcaccggcagcgacctgcagaaggcggcgcaggcggtaacgggggcgctgacggcactggcgggcaataacctggcgggggcgctggcgagcggtgcctcgccgtacctggcgacggaaatcaagaaacgggtcggtgaaaacaatatcgccgccaatgcgatggcgcacgcagtgctgggcgcggtgaccgcgcagctgaacaaccagtcggccgcggcaggcgggctgggtgcgagtggtggtgaactggcggcgcggattatcgcggacaaactgttccatgccgatacgccagagaagatagcgcaactgagcgaaagcgagaaacagcaggttagcgcattaagtcaactggcctcaggacttgccggtggcttggcgacgggggatactgcgggagcggtgaccggaggtcaggcaggtaagaatgcggttgagaataatgcgctgtcagccacagatgataagaaacgacaggatgcgaagtggtcgctgccgtatctggaaggggataaaaaacagcaggctgagaaacttatcagcgacctgaacgccaaagataaggcgttcgatgagaagctggatgcagcatgcaaggggctgtcatcaaccgcttgccagggaatgcgccaagaactgacagcgatggcgaaaagctacgatgagaaactcgacggccagtatgtcggtaatatgggtagtgtttacaaggaaggtaaaggtcaggttgacgccttgatgtggcagtatgccagcgcggatgcaaaagccgagcgtgaagctaacgttaatcgtattgctgaaaactggggggtgagtaaggaaacggctgctaatctgtacgatggtatggcggttgtacacaccacggccgcgataggtggtgcggtgtacgggatgatggaaaaaccgacaggagtagataccgccaaaccgtccaaaccaactgccggaagaacaccagagccaaatagaattgctgctgatgaagaagcctcaggatggtcgcaatacgaccattatcgtaatggaaaaggtgactggaactggcctgcaaagttaggttttgctgaggaaccagttcaggcaacgctccctgtgggaacgcgtcttgacagatatggtaaaactaatggctcattcttatcaccgcagggcactccacaggaacaacgtgctttagcgccgggctcgttagcggaacagtatcatcaatatgaggttctcaaaccattgcccgttatccagggaaaaatagcgcctgcttttggtgaacctggcggaggtattcagatcctgcctgacatgaaggagcgagtagatgtgcaatggttattagataacaaatacattcggaaggttaattaa

SEQ ID NO: 433741 - DNA, 1731 bp, Serratia marcescens
atgaaaaggacttttctttcgaacggatccacatcgaaggcgttaagccacattctcgctggtgttcttttcgccagcactttctcgggcatggccgccacgccctctgataccccggagcgagccgattcctctattgatgcccgcgagcagcagcgccaccaggaacgtgagcgcgccctgcttgaacagaacaccccacaggccgatgcgcgcctttcccgccccgaggccgtgttgccggattacccggtcaatgagtccccctgcttcaccatcaaccggcttaccctggtcggggagtcggccgctcgctttcagtgggcgctggacgccgctgcggatgccaaaggtcgctgtctgggcggtcagggtattgtgcttgccatcaataaagtgcagaacgccatactggccaaaggctatgtcaccacgcgggtgatggcgcaggagcaggacctgaccacgggcgtgttgacgctgaccttgcaaccgggtcgtattggcgacatccgctttgaggaaccggtctcctggcggggacggctgtggaacgctattccggcctcgcgcggcgatatcctcaacctgcgtgatatcgaacaggggctggagaacttcagacgagtgcccagcgccaatgccgacataaaaatcgtgcctggcgcccaggaggctaccagtgacctgcaggtcaactggcacgaggggcggccggtgcggctcagtctggggctggacgacagcggctccaaaagtaccgggcgctatctcggttcggcaaccctggcactcgatgcgccgtttgcgcaaaacgaccttttctacgccaacatcggcaaggatgtgtttcagcacgggccgttcggcaaccgttcacatacgctgaattacttcttcccggtggggtattgggccttctcagccaactacaacgactacacctaccatcagaacatccccaacgccaacgaggtgctgcgctatagcggcaagagcgacaacattcagttgaccgtctcccgattgctctaccgcgaccagtcacacaagaccacgctcaacctgcgcggctaccgcaaacattccactaacgccgtggacgacgttgatattgcgtcgcaaaaacgtcggaccgccggctgggagctggggctgaatcagcgcagctatttcggcaccactacgctggacgccaatatcaactggcgccgcggcaccggcgcattcaatgccctgcctgcgccggaagaatcgcgtcacgaaggcagtgcgcgtaccggcattttgctcggagacctgggcatcaatcagccattttcctggggtgggcagccctggcggttttataccagcgtacggggccagtggagtccgaatgcgctgacgccgcaggagcggatggccattggcgggcgttacacggtgcgtggctttgacggcgaacagatgctgtctggcgaaaagggcctgctgtggcgcaatgaaatcgcctggaatgtgttttctcgcgggcacgaactgtacctggctgccgactacggccgggttgacggcccgggcacccgctacctggtgggtcatcagttggcgggcagtgcgcttggtgtgcgcggcgcgctgtgggggcgattcagctatgacctgtttgctggcgtgccgctgtacaagccagcagggttccatacctccggtgcgaccgcgggttttagcgtaaatctggaaatttga

SEQ ID NO: 433742 - DNA, 1407 bp, Serratia marcescens
atgacattcatcagcgtaagtgctagtgttgtgaccgattcctcgggcgctatcagcgaattaccggtattgttgactcccacgggagtccttcagccattgctggattattgcctggcacgtagtcataaccgcagcctttcatggatgcggaaggtcgtccaggctacgacactttttttgcaatatttaaaggcgaaccctggagaacccgattctcatcggttgtttcagaacttcgcccagcgcctgtattctggaacctttgatcgaacaacaggtttagatcccagtaatttatgctggcaaccttattcctataagaatgcgggagagattatccagcggttgtccgattttttcatttggattagcgattctcggcctgaaactaagaaaatcaatcccagatatgctggcgatgccttcgatcgtaaaatggatgaaactgcctggctctatcgccgggaaaaagccttccttgggcatatctggatatccaaccctggcccacaaaccgctggctatcgcttgaggccaagaataaatccccacatcgttaagaatgaacctcctgcttttcccgatgatcgtttcgaagaactacttctcaaggggtttaaggctggaggacggtatgattatcgcggcatgttgataacgctactgatgcatggcggcggattgcgagtgagtgagccattccacctctatcttgaggatgttttcccctcccctgaaaacgctcaatcagcgacagtgcttgtccatcacccccacctgggctatgcacctggtgccgtattaaatgctgccggaaagaaccacggagataaccgcgcaagctacctggctgaaaaatacggcctgaggccacggacggaactcctgagcagtcaaagggcgggttggaaaaatccgcgactcgataatacgttttacatgacagttttttggttccagccttcgttcggcgaatggtttatggagctttggcaacgttatctggaacaggttgtttaccttgagcgggataatccctttgccttcattaatattcacagggaaccccgtggctcgatgtataccatcgacaaatttaccaaggctcacggtgctgctattgagcgactaggtatgaccgtgcgtaaagagttgggtacgaccccacatggccatcggcatgcttatggccgaaggcttaaaaatggtggcgttgatccgttgttaatacaacggtgtatgcatcatgtttccgaagagagtcagcgtgtttatacgcaagcaacgttgcaggagaccttcgctgctctgcaggatgccacgcgacgtatcgctgagcgtactgctgggttgaatgtgatccagcaaacaaaagagggttggcagccacctccaaaaacataa

SEQ ID NO: 433743 - DNA, 204 bp, Serratia marcescens
atgaacatctatactggtgcttattatctcgcgattgcctttaagaagtggggagcgacctggcaggcagtgggcgcttataatgtagggttcaaagactctccaaagcaggcacaacgacgttataagtatgcaagcaaaatcgagaaaacctaccaggcgataaaagccaacaagccccccctcctcgttcagaatccgtag

SEQ ID NO: 433744 - DNA, 372 bp, Serratia marcescens
atgaatacgcaaaacgtcaacaccgccaccaaagaatcttccaaacgatgggcgggaaaataccccgacgcggaaaacatcatgatccgtcaactggcatttatggaggaattgcacggcgtatatttgtcttctgacgaactagcgcaatcgctgtatgaaatttttaacacgatgacggttcggatggtgtttaacggcgtcgataactcgcagtccgataaaccgaaaattgcgtatgccgtcgtgcaacattggattaaggcgcagcgtctggccggtgcctatcttggtgagaccggcgtcactgcctgggaacatgcgcgttatcggcttcaccttcagctggctatcaatcactcataccgttaa

SEQ ID NO: 433745 - DNA, 273 bp, Serratia marcescens
gtgctggcgtacttcggcttcccgaaggcgcaccgtgtaaaaatccactcgaccaatacgctggagcgcctgaataaagaggtgaagcggcgtgccgacgtggtgggtatcttccccaacgaagagagcatcatgcggctaccgggagcggtcctgacggagcagtatgaagaatggctgctgcagaaccgctacctgccgccgtatagcatggcggagatagaccagactgctgaagacgacgtaatcgacgcgttaccagtcagcgcataa

SEQ ID NO: 433746 - DNA, 255 bp, Serratia marcescens
atggctcccttaccgaacgccttctcgatggcggtgatggcgctttgcagggctttggcgcggctccgtgtcctgcggtgtgcgagtgcggcgctgcagcaggtgtttgtgcagaccgaagcaaaaagtgcccatgccacctggcgtgaagtcgccggacaactggaaaaaagcgcgcaggcggtcacggagatgatggacgaggcggaggccgtgtgctggcgtacttcggcttcccgaaggcgcaccgtgtaa

SEQ ID NO: 433747 - DNA, 501 bp, Serratia marcescens
atgcgcctgggcgacaaccatggcatggctgtcgagcgtatcccgaccggctcgctcggcctcgacatcgcactcggcggcggcctgctggtcgtagaatgtttctaccaggcgcagcacggcgacattgtcatcgccaccgtcgacggcgagctcaactgcaagcgcctgcagctgctgccccggacgatgttgatgccggccaacccggcctttgtgcccatcgctctcggtgacaacatcgagaccatgatcttcggcgtggcgcgccattcacgcgctgtaacccagcccggttatcgccatctgcccatttcacaaagcccggagaatcccgccatgtttgccctggttgacgtaaacagtttctccgcctcctgcgaaaccgtctttcgccccgacctgcgcggccgtccagtggtggtactgtccaataatgacgactccgtcgtcgcgcgcagccgcgattatgcggaattgaacgtcaagtccctaaaatga

SEQ ID NO: 433748 - DNA, 780 bp, Serratia marcescens
atgtataaaactctaatgaaaacaagaagaagccgtggcgttagtagtgaaacatatgatgccaatgacatggttgactcaccaggctcatatactaaatccctgttgaatttacctcactcaaaagacaaacaagtttataatattattgtacgactggttgaaatagtagaagcaggaagaggtgggatgagagcattacaaggggaacagtttaacgatacaatgactaaattagctgctttttatattgatatacagtctgataatgttttcccgggcggaaaggaaatcatcagaaaatcaaaaggttttaggcggccacctaaagatttagttaatcaggcaagtgaaaaagggagtttatatgattttatgaccccttatcttactagggagcaagattctgaaaatttttgccttcaaaatgtaacctcagatctacataaatgggttgcacatattatcgataatcagcaaaaacgtcttccttctggaaaaaagtcagaacttctccttagaatgagtcgtgccgcagatccggaaataacacgaacagaattcaccaaaaaccctacattacgccctccagaagatcaagaggaagctatacaatttatatattatatggctggccaatttgaagatgaaaacgagtgggtaaactttgcccgtgaaatgtatactgatgaatacccattattaagaaatataagttacgatagagcaaaaagagttttcgacaaaaacaaaaccaatggattatatgatataacttaa

SEQ ID NO: 433749 - DNA, 333 bp, Serratia marcescens
atggtgtcagtactgatcgaccaggatgccattagtgccggacagatccagcagggcaatccctggtgctattatgatttggggcacggtctgtgcagctatgacttttttgagcagtgtccccaccgcatggcttgtgcgaaatgttcgttttatctgccgaaatcctcatcagctgcgcaatatattgagagccgtcagaatttactcaaactgatgcaggagagccagataacagacgatgagcggacggcagtagaaaatgacattggcgcagtggataaactattagacaaactaaaaaacactgatgaaccagataaaaaagaataa

SEQ ID NO: 433750 - DNA, 285 bp, Serratia marcescens
atgtatacgatcaaatttcgtgagtcggctctgaaagaatggggcaagctggacaaagcgctgcagcagcagttcgccaaaaaactgaaaaaatgctgcgagaatccgcatattccgtcagcaaaactgcgggggatgccggggtgttacaagatcaagctacgcgcctcggggtttcgtctggtttatgaagtgatcgacgattgcctgattatcgcggtggttgccgtcggtaaacgtgagcgcggggatgtttaccagttggccagtgagcgtcttaaataa

SEQ ID NO: 433751 - DNA, 252 bp, Serratia marcescens
atgccaaatatcattctgagtgacacaagtgcgagcatcagcgagctgaagaaaaacccaatggaaaccgttggcgccggtgacggttttccggtggccatcctgaaccgtaatcagccagcattttattgtgtgcctgcggcgctctatgagcaaatgctcgatgccatcgatgatcaggagctggtgagattggtcaatgagcgccggagcgaagcgctggttgatatcgatctggatcagttcgcgtga

SEQ ID NO: 433752 - DNA, 510 bp, Serratia marcescens
  misc_feature (498)..(507): n is a, c, g, or t
atgtatcaatacagttctaaaattcctcacaaaagaagccatgaagtagataagtccaaggaaccagcaaagggaactatgattgaggatggtacaaactcacttgcgccaagccgaaacattatctcccccctgaatatatccccttctcctatggcactaacactagcaagaggctggttgtataaatgcagaaagaaaagagcagacaatagctttctaagaatgcaaaagagaggagcgtatttgcgagatggagtattagccgatacagcttcaatgcctggagcaatgggtttatttatagcttttatgtccagtccatttttgcagctcccaagtttttttggtgaagaaataaatgtaaaagaactcgcagtacaaaactataaaaaactgcaaaacataaagttcaacactcaagaggaaaactttattgattgctttgttcgacaggatttttatctagtacacgcaaccaatgccaacattgaaaannnnnnnnnntaa

SEQ ID NO: 433753 - DNA, 4149 bp, Serratia marcescens
gtgctggggccgcacgacacgacggactctgtggccaagcgttacaacatgacgcctgacgctctgcgtaatctcaaccagttccgcacatttgcccgcgggtgggaaaacctccggactggcgatgagctagatgtgcccgtggcgccgttgccgcctgtactctgggagagcaagggtaatcgtaaggacaaggaagagggggcgcacgatggtggagcccataaagtcgcagggttcgcgtcccaggccggtggccttttggcgagccgcgaccgcagcgaagcggcggcctcgatggcgcgaggggtagcgaccggcgccgtgggcggggaggtgcaacagtggctgagccagttcggcaccgcgcgcgtgcagctggatgcggataaaaaattatcgcttaagaattcctcacttgacctgttggttcccctgcatgagcaaaaaaaccgcttggtatttgcccagggcagtgttcatcggacggatgagcgtacccaagctaatctgggaatgggttaccgctggttcacgccaacgtggatgctaggtgctaatactttcctcgatcacgacctgtcacggtcgcatacccgcatgggggtaggggtggagtattggcgcgatttcctgaagctgggagctaacagctatcaccgcctaagcgcttggaaagactcgccggatgtgacggactacgaagaacgtcctgccaacggctgggatgtacgggctcaagcctggttgccgatgttgccacagttggggggcaagctgacttacgaacagtattatggcaatgaggtggggctgtttggcaaggaggctcggcagcgtaacccgcatgcgatcaccgcgggggtcaactacacgccggtaccgttgctgacgttcaacgcggagcaccgtcaggggcagtccggcaagaacgacgcccgagtggggcttgagatgcgttatcagttgggcatgccgtggcgtcagcaggttgatccgtcttctgtggccgcgatgcgcagcctgatgggcagccggtatgacttggtcgatcgcaataataacatcgtgctggagtaccgtaagaaagaagttatcaggctgcatacggctgaggcggtgacgggctttgcgggcgagcgcaaatcgctgggcgtctccgtcaacagcaaatacggcctggatcgcattgactggtcggccccggccctgttggcagccggcgggaaaatcgtccatgacgttacgcaggggtacggcgtggtgttaccgccttacaaaccggcagcaggcagcgttaacagctacagggtaagtggcgttgcgattgatcggaagggaaatgcgtcgaaccagagcgagacgcaggtaacggtactggcgcccgtggttagcgacagcttgagcactttcctacctgccagcagcgtgttgcttgctgatggtaaaggcacgcaggagttgacactgaccctgaaggatgggcaggggcaggtcgtcgatgtggccgagtcagacattgttgtgggggcgggagagaagacgcgccttcccgcaggggcaagcatctccgcgccgaagaagagcgaaccaggtatctataaggtgatagtgacggcaggaacacgcggcgagttagtgacgctgacgccggtggttagtggcgtaacactgtcagcggcgcgggtgagcatcaatgatatgacgccggcggccgagcagtcgagcttcttagcctcgccaacaacgttgccggcagataatcaggccagcacgacgctgacgctgacgttgaaaaatgcggcaggcaatgcgttgagtggactgacccccaagttatcgctcgcactgaagggaggtgagggtacatcacgcgcggcggaagaggtcacgctgagcgccctgaaggaaagcggtcagggaggggtgtataccgcaacgctcaagggcatgacagcgggacaatacactgttattccagcctacaacgggagtgcgcttggtaacttgagtgcgtcggttacgctaatggcgggtgcagcagtgcgtaccgcgtcgaccattcatgttgacaaggcgagttatgcctctggtgatgatattaaggtgacggtaaccctgaaagactcgaggggcaatccggtggttggtcaggcggcagtgttgtcttctgcggtgaccgcagagcatgcgacgttgcggggggaatggagcggaaatgcaacgggcgagtataccgcaacctataccgcaaaagaggtgggcgttgacctgaaggcaagcttgttgctgaatggttggcaggccgcgcagacggccccctacgccattacggcgggggcggtgacgtcggccacgctggcggtggacaaggccagctatgtggctggcagtgccctggtggtgactgcgacgctgaaggatgcgcagggtaacccggtaccggggcaggtcggtgcgctgaaggaggcggtcactgccgcaaacgccacgctgaccggtagctggaccgagaccggcgccgccggcacctacagtgcgacctataccgcgaagacggccggcaccggcctgaaggcggagctgaagctgggtggtgtgaatgccagctctgcggcctacgccattacggcgggggcggtgacgtcggccacgctggcggtggacaaggccagctatgtggctggcagtgccctggtggtgactgcgacgctgaaggatgcgcagggtaacccggtaccggggcaggtcggtgcgctgaaggaggcggtcactgccgcaaacgccacgctgaccggtagctggaccgagaccggcgccgccggcacctacagtgcgacctataccgcgaagacggccggcaccggcctgaaggcggagctgaagctgggtggtgtgaatgccagctctgcggcctacgccattacggcgggggcggcagtgactacccaatcaaccattgtggtgaagggtggcagctttgtatctggcagtgacatgactgtggttgtgacattgaaagatgcgcagggcaacccggtgccggggcaggcggagttgctggataatggggtggccgtgccgaacgccacactgaaatctaagacgagctggactgagtcggacacagaggtgggtatctacaccgccacttacgtagctgtcacagccagtatcaaccagacggctacattgcgacttggtaacagtagcgtaccttctggtacctatgccatcacaccaggggcgccggcacgggaaaactcggttattattgttagtggtgcgcgttacctgctcggcggtgtgcttaccgtgacggtgacactgaaggatgcggcgggcaactcagtttccggtgaagagggcaagctggcgacagtagtaaaagttccgaatgccgagctaaaagaagtctgggtcgataaaggtgacggtgtgtatggtgccacctatactgctactatggttggtgacaacctgaaggcaatcatgacactgaatggctggagtcaagcgcgggagtcgggtgtctaccgcattgtggctgacggtatcacaggtatacaggtgaatggctatcggtttagtgcggacgccggattcccgtccacaggctttaacggggcgaaatttatccttgaacttaaagagggtgaggcatcccactatacctggtcgtcagatgcgccgtgggtatcggtgaatggtaacggagaagtgagctttaccagcaaaggcaatggtcagcgagtgaccctgacgggcaccgcaaaggacggagggggggctattacgtacagtttccaattgaaacattggtttaaggcgggggctcagtgggcgaaatgggagggtataagtatgacttgtaagttgccggcatgggcgcagttgaccacctacaacctcagcagcgacagggaacctaaacgagttgttggctatctctggggggagtgggggggtattgacgcatatccgggctctaatttttctcaaagtgaaacttggacgagcgacatataccagttcgacgaagctaatagtcaacatggcacgtactatccggttacgggaaggattagcaccgataatacttttaacaattctggtagttatgctgtcatgtgtgttgaggatttttaa

SEQ ID NO: 433754 - DNA, 450 bp, Serratia marcescens
atggcaattttagctaaaacaataggcagcacctacccaatcccgacctaccgttttgtggtgtcagtgggcaaagagcaaatgagtttcagcagtgtatcgggactcgaccagtcggtggagttggtgaaataccgtgatggtaccggcaatctgtatcagatgcctgggcagcttgaacctttaaccatcacgctcaaacgcggcattgtccctaagcaaggtcagttatatgaatggcttaactccatttccttcaaccgggtggagaagaaggacctgtctatcagccttaccaacgagacgggctccgaactgctagtgacctggagcgtgatgaacgccttcccaacaaaatggaccgggccgagccttgacgcgaccagcaatgaagtcgcgtttgaggagcttaccttggcggccgatcgactgaccctgcaatttcactga

SEQ ID NO: 433755 - DNA, 1095 bp, Serratia marcescens
atggattataaagtaccaggggtgtatgtcgaggagccgaacgggctgtccttgtcgattcagacaggggaaacggcggtccccgtatttgcgtttgaaggcgaccatacctggctgagtgcacatatggacggtgtgacggctttctcatcatggttggatgtggtcacgcttacaaagagtgccaacaacttggatactgacctgttgtatcagtcgctgaagctgtatttcatcaacggcggcggccattgctacgttgccccggtggacaagctgtcagcgctggtgccggcgctggatgatgtcaccttgctggtccaggccggtgtgaaacacgattcattcaaaagccaggtcgcaatattgtgcaaaccaggtcaggcgttgtttgccctgttcgacggaccccagaccgaaatggctaccgctgctgcggtagggactgagcagggtaattaccccgaccagccgcaggcggcggtgtattacccctggcttaccgtgccaggcacaacgaccgatattccgccgagcggggcagtggcgggggcgtatgctcgggtggaccggcagcggggcgtgtggaaggccccggcgaacgtcgacatcatcggggcgaccccaaagtataaggtgtcagatgacgtggccgggacctgtaacgtgcctgcaggcgggcgtgcaatcaacgtcattcgggcatttcgcggaacggggccgctgatttggggcgcccgcacactgtcagcccaggctgacacatggcgctatgtgccggtacgccgtttgtttaacgccgctgagcgggacattcgcatggcgatgagcatggcactgttcgaacccaacagcgccccgacatgggagcgggtgcgcggggcggttgaaagctacgtccacggcttgtggcagcagggcgccttgttgggtgaaagcccgcaacaggcgtatttcgtgcagattggactcgggacaaccatgacccagacggatatcaaccaggggcggatgattgtgaaggtcgggttggcggcagtacgcccggcagagttcatcgtgctgcaattgacgcaggatgtggtgcctggttga

SEQ ID NO: 433756 - DNA, 1572 bp, Serratia marcescens
atgacgaatgcatatgcagtgccgggcgtgtatgtgacggagactaatggattgtccctgagcattcaacagggtgaaacggcggtaccggtctttgtgggcgtattcaacgccaaaaatcagaaggaaacgcccgctgcaaacgccccgttgacctgcgtgcgtgtcgacagctggctggattttacccacaactttgacccctcggaccgtatcaccatcgatttaacccaatcctccccgcacgttcaggacgagaggttcatggggtcgaacagtgtccggttgtatttcgagaatgggggcggcccctgctatgtattacctgtccgccacaataataaaaaagtcgacgtgtcgccggcgcacattgcattgataggtccggcgattgcgcaatgtcccgacatcacgctcttgtgctggtgtgaatatgagggttccaaggccgatcagaacgtgtacacggcgttgggggcgctgttgggagccaatgcgacgccgggcggcaaccccggccgttttctgctgacagatgcttggccgacggggagttctgatgcccctgctgagtggacctttactacccccgacgtggcggacaaaacgcaggttgccagctactttccagcgttgttgacagggtatgcacgcaattacagcgactatttatcgcgtcccgactggctagggtatgagcacctggtgaccgtcaagtgcacggaggagcaggctgataagctgaataaagaacagcaagaacttgttaaccaagcgctggttacccttgatgcactccgggctgcaagcctgaaaacgagcaacaagcaaacgcaggccgtgctgaaactggtcgaacaggcctttgccggtacacttccatccgttcctgtcgtattgcgagcaagcgtggccatggcgggtgtgtacgcacgcgtggaccgtgagcgcggggtttggaaggcaccggccaatgtgggcgtggccggtgtaaccgccctggtggttcagggggaaagtaagagcgtaagcccaaggggcgggggcagtagttcggggggcggtgagtctaaaaaaacagcgactacgatcgctattaccccttggcataatccggtgccggtgcggatcgacgatgcgttgaacacaaagcttatcgataagcacatcaacgcgatccgcgtgtttcgcggccagggcgtgatggtgtggggggcacggacccaggaggataatgacctctggcggtatatcccggtgcggcgtttgttcaatacccttgagcgcgatgcccgtacggccctgcaagccgcggtgtttgaacccaacagcccactgacctgggagcaggtgcgcggaggactggatcactacctcaatgcgctgtggcgcaagggagccttgcaaggggagacgcctgaacaggcatattacgtgcaaattgggctcggggcgacgatgacccaagacgatatcaaccaaggccgtatgattgtgcggattggggtggcggcggtacgtccggccgagttcatcgttctgcaattgacccaaaacgtgatcgccagttga

SEQ ID NO: 433757 - DNA, 1293 bp, Serratia marcescens
atgagtgtggatagacatgattgggaggctccgggcatcaggttgacgcagtcggtgatgcccgacggggacgcaggaccacgcttgtcgagtgccctgccggcgttcatcggggggcatccgacaatcactggcgcaaggcagacgatgaatacgtcggaggtatgttttgtgccggtggcaacatggacgcaatggccatgggagtatcgtccgggggaatggtgcctggcggataccatccggcactattttgacaatggcggagggccgtgttttgtcctcaccgccccacaggaaacgacgggcatcatggagaactgggtggcgtggtgggacaccttcattgctaccgccagtatgctgttattgcgtgagcccgccattaccctggtggcggctccacaaatgtcattattgccccctccagtgggcgaacacgttgaggagactgaggtcgaggcgtaccgacaggcagcggcgctggcgctggttttgcgctggaaggctctcttacaggcgtgcgccagccgcccggatctgtttttcgtgctggatgcgcctgccgatccgcaggtggcgaccgcttgtatcaagtcaatccggggaacgaatgcgttgccgcacgatgtcgcgtcgcgcgtggcgctctatggaccccatctggttacggattacgacaaggtgggcaccttgccaccgtgcggtgccgtgctgggtgtctacgggcgcaccgacgaggccgacggcgtatggaaagccccggccaacgagattttgctgcatgtcgttaaaccggcgatgcgtgagactctggcccgtgactggtttgctgtcaaccaacctgcaatcaacctgatccgcagttttgctggtcgtggcacccgtatctggggatgccggaccttatcctccgaggctgcatttcgttatgtgcaggtgcgtcgcacggtgacctggattgaagcaaatctgaagcaaatctgccgatttgcggtattcgagccgaataatgagatcacctggtttcaggttcggggactgtgtcgtgcctggctgaggcggatgtggctggacggagggctggcaggggccgatgaaacggccgctttttcggttcgggtcgggttgaatgagagcatgacggcggctgatatcgaagccggacgtctgatcattgcggtcggtgtctcggtgctgcatgccgcggagttcattgacgtgaggctggtgttgaccgtcggtgacggtcaggagaatggcacatcatcgcaggggagtagcaatgcatga

SEQ ID NO: 433758 - DNA, 459 bp, Serratia marcescens
atgaaaacaccatggatgagtgcgcccaatctgtcgcaccgttttttggcgacattttttatcaagggcattccaagcccgatggatgtccgcttcgcccgcgtttcagggttgggccgtgagttgcaaatcacccagttgcggcaagggggggataacctgggcacggtaaatctggcggagcacgtgacccacggcaccctagtgtttgaacggggtctggcaacgctgacgccggtcactgcgatgttcgaactggtgttgggtcagtttgcgaatatctccctgaatgcggtgatcctcctgttggacagccattcacggccgttgtgcagctggacgataacggatgcgctgccggtcaaatggagcaccggcgatctggatgcggcgggcaacacggtgttgatcgaaacgttggagctggcatatcacgaactgcattgggaggggaggtag

SEQ ID NO: 433759 - DNA, 174 bp, Serratia marcescens
atgacattggagattcgcgaactggtgattgaagccagggtggttgatgacaggtcacagggccagaaagtcccccgggaggcggggatgaccgtcaccgagcaggcgcgctgggtcgagctggtgacccggcgggtattggacgtgttgcatgaacaacgggagcgccaatga

SEQ ID NO: 433760 - DNA, 666 bp, Serratia marcescens
atgatgggattacgggaacgtgggctggcaaagttgatgttggctccctatccgggtacgtcgacagatgaaaagtttattgcgatgtataaccccgagtcgatccatctcgactacgtggcgacggcaactacgccgctggccggtctgaatcaggattttacccaaagcccctacagcgagattgaaccgccgacgctgagcctggagttgattctggatgcgcgggggccgaaaagcggggtgtcggtgaatgatcaggtgaagaagttgcgacatctgtgctttgccatggggccgatgggcaagttcccccgggtgcaggtcctgtggggagagatgcgctggcatgggtatgaccatttccgagggtacgtgcaaaacctggcgattgtctacaccctgtttgaccgaagtggcaaaccgctgcgcgccacggtgacgttgacgctgaaagcgttggtcagcgatgcgacggccagcctcaaggcgacgcagtcaccgacgaaacaggtgttgcagttgccggacaaaacctcgttgccgcaattgctggccctggccccggtcgcggcaggggccgcgggctatctggccacggcctatgcgaacgatatggataatctgagtagtttgatgcctgggcagatgctgatcacccgttaa

SEQ ID NO: 433761 - DNA, 2103 bp, Serratia marcescens
atgagcaccgagtcattcacaaacaggatcgcggaggcgctggcttcctcttccctgcaagatcctgaggttaacgcgaagagcccgggcgtggggcggacggaggacgccgagggaccgacatcccccaatttcgtgacggtgcaggtcggtggccagagggtggacacgaaagatgctttcgtggagcaaatacagatgcgacatgccgtcaatgaaattccgtcggcgacggtggtcctgaatatcccggtagacgcaccaagcgaccacacgcgttttgagcatgtcatgcatctttgtcgggtcggggagtcggtgaccgtgaagatggcaaaactgacggtgtttgacggcgtggtgggggcgctgaaagtcacccagaccacaaaggacaagcgacagataaccgtacggctgaaaggccggctacagaggctgaaagccacccaccataaccgcctctggaaggcacggcaggatacggcgctggtgagtgagctcttaaaggagcatggggtttccgtgaacagcatcgcattgccggcgcacgagagtgagcagcgctgccagtggaacagtactgactggcattttctgcgggccgtgctgggattgcatggtgcctggctgtggccgcatacggatggtcgtgtcacggtaaaggtgcctcaactgggagggcgttcacattccgtttctgcgaagtctgagcctcatggcgtcacgttgctggatgctgaatgggagtattcggggctgaaccaaccccagaaaatgacgacgcaaagctgggacctgagtaaacaggcggtggtaaaaatgacggcaaagcccctggctctggggcagggggggctggcgccgtccacggtgaaagccctgggggctaacggtggcaccttgttgacgggacagtgggagggggggcaacaacagtccgccgtcgacggctggttcgccgggcaacaggcacaggcggtcaagctccgtttgacgcttgaaggttgtctggactggcaagtcggggatacggtgacgctgtcccattttggtcatcctctggatgggaaggcgatcgtgacacaggttgaattcaactgtgatctgaacgcgcggcaaggccggacgattatcggagtgggcctggacgaggcggcggcgtcagcaccgccgctggtgacaccttcgggcctgatggttgcaaaagtggccccctatcgcaccgatccccgcggcaaatcatggaatcgcctgccggtgacggtgccggtgcttggggcggagattctttgggcccgcatgggccatgtgtacgccagcgacaacagtggcgtgaccttttatccagaggcaggtgacgaggtggtgctggggtttgtgggggatatgccggtgattatggcgtcgttgcacaacccgaaacgcaaggcggcgatcgatcccgacgagaagaatgccaaaaaaggcatggtgctgcgtcatcagggccagcgcatggagctgagcttccatcatggctcgggggaggcggtcctggcgctcggggaagacaagaagccggagcagcagtttgtgatcgacaaggcgaaaggggtggcgatatcgagcctgaagggcgatctgcgggctgacgtgaaagcgggcggcgctgctgtggcaactaaaaaagatattgcgctgatgaccgacgaacagctgctgttcaccgggaaaaaaggcgtgaagctgaccagcaacatgaacatgacactggcagcgcaagaaaagctaacaggacagggcaagaccggtgtgcacatggagagcggcgagggaaaactggcgctgtcgccggagtcggcggatctatctgcagtacagacgaacgtggcgggcaaggtaggggtgaaggttcaggggaaagaggctgttgacattgcgggcatgagcattgaggtgaaagccagcggcaaagcagcggtttcggggccgagggtgactgtcaacgggacggctgatgtgggcattaaagcgcctagtgtcaaagtggatggtgacatgacggagctgggcggcgcggggatcacccaggtgaagggcagcatgatcaatttgggatga

SEQ ID NO: 433762 - DNA, 468 bp, Serratia marcescens
atgagcaatcaaaatgaagaattgatccgcttgtatggctcggggtggcggttcccgttgcactttgaccccaagcctgtgagcgcctccacggacgggcttgcgcccagcgcggtggtgatgtcgggagggggagagaatgtggcgcagagtctggcaatgttgtttcagacgcagccgggtgagcggatcatgcgcccggactatggttgcgacatgcaatcgctgatgttcgccaacctgtccgagagcatgttgggggcattgcgtcatcggattgtggagagcgtggcccaccatgaacctcgcgcggaacaggttgatgttgttctgcaggaagatccgacgttacgggggctgttgcatgttgcagtgaggtaccacctggcaggacagacacagcaggtgacggggcaactcaacctgctagaaagcgaaggcgggggcagttcatgggagatttcgtag

SEQ ID NO: 433763 - DNA, 429 bp, Serratia marcescens
atgggagatttcgtagtggcgaccggggatctggtgatcttcgagtcgacattcggcaatagaaccctgttggcccctgcacaggcggtgctggcgggaacggggcacttcatggtcaatggcaaaccagggtgtgtgctcagtgacctgacgaaggtgattgtgccgggggtgccctatatggcaggcaatttttcggtgccgggagtgggaatgatccaactggtgatggcggggcctgatcagtctgcgcataaggtgttgagcgggcccccggtgctcattaagggaagtgaatgccaggcgatgtttatccctacggctccggcgacagacccaacatccggtgtgccggatccgacagtgggtgtacccacgcccggcaaggggcggttcatagtgacgcaggtcaaggtaacggcaaactga

SEQ ID NO: 433764 - DNA, 3582 bp, Serratia marcescens
atgaccgatgaaacaaaaaaggcagcagggacgacgacaagcagaacggcaacctttgtgctggatgatcgttcgattgggacgcagctggatgcctttcggcagtacagtcagcgtttgccgtacgcagagtgtaaggtagccggctggccagaatccaccaattgggcgcaggtggtgctggggtttgaggcgggtgcatgggcggcggcgtccacgggcagtgctgtctggcatgaggctgccgagcttgcctggacatttgagcgcgaccgattggtcaaattgtacgagacgccggaacaagccgacgggcagttgccgccggagcgtgcgtttctgctgagcctgctgggcatgctggaaacaccgcgggccttgttgaaccagcttccggcacaacatcgttcactgtactaccggcagatgctggcgttggaggcgcaggcaccccaggcggatggggtcacggtgcattttacactggttgacggcgtgcgggagcaggtgttgccggcagggttgttgctggacgccgggcaggatggggcgggaaatgccttgcggtatgcgttgacgcaaccgctgacggccaatgccgcccgcgtaacggatcttcgctgggtggttaatgatccctatatgccgggcggccgacgggcgcgcattgtgctggatgaggcagcgggacaaacctggccggtgacgggggtgcggatgttcggtcgcgcgccgctcaatgccggcgagccgccccgggctgatgccgatcgcgttgtcgacagtgggcggattatcgagtcaccggtgctggatgtggccggcggggaacgcacctggacagtgacactggcgagtgccctgagcggcggcctgacagccgcggtgagcatgggggaatcctgggtcccgctggtctgcacgcagaacactaagccaaacacgacgtggacgataacactgcctgcgaacggtggggcgccgtctgcggtgtccaccctggacggcctgacgtcaaccgcacctttgctgcggttgaccagcccggtgggtgcaccggtaccgcccatccaaaaacttgaggtcaaggtcacgggggccgttggggtgcactgtgctcgcgatgacgggacgtctctgttagaaggtggattgccctttggcgacacggcggaggccggcgatgggctcagtctgatgtcgccggaatggtggcgactggggaaaaaactgaggtcggtgaccgtcactccggtttgggtcggattgccgcctaagtcgttttctgtgtggtatggccctgacgagcatcaaaaggccagggactggttgttggtggataaggatctcaatatcaccacagatacaaatcacggaaagccactcaacaaactcacagagtttcccgcggatacccgggcgcacagtgtcagcaacgggagcgatattgccgcacttattcccgtggactcgggttacccggatgccccgaagaccaatggggatttcagggtggaggcttcactgatgcagcaagggcgaacgctcacagcgttaagcacattatcgttgtttaccaatgacaacgcgccgatggcgaagccactggtactgacgctgccgggcggtttgcaagtgccgatggcgaaccctacggccccggcaccggatattgaagatccggcccggtggccgtggtacgtccggttaaccctgacaaggtcgtttctgcagcacgaatacgaggtgcaggaacgtgcagtgccgcagaccttgatgttgttgagcgaagaagagagcgtccaatacgtcccggtgatggagacggtaacggcggctgacggccaatcttatcacgtgcataaaatggtggaaacctcccagggttcggtcaaaaaaactcccatgccggccatggaggagaaaaggatcaagattgtcacgccggtgccgctcacggtgccgaaggcgcgatggaacccgccgtatatcccgcaatgggcgggggtgcaggtcgcttatgaggcggccgataaccaggttacgcagcggatcatcacgccgtttgggcatgtctcgccggcggcgatgcagatacaaccggagcccccggccgtggcggaagtgtatgtggggattgacggcatcactgcgggccagctgctgtcgttgcactggcaagtgaaaagtccggcacgtctgccattggaatgggattacctaaccgcgggcgagggctggacgcggctgacggtgaacgacggcaccgacgggtggcacacgagcggcatatggtcagttgactggccggaggacgcgagtcgaacgtcgaccagcctgccgacagggcgcatgtggctgcgaggtcgggtaacggcctggcctgaacatgagaaggcgtcttgcgcattaccgacgaccccctggctggcggggatggtgacgaatgctgccctggcccggctggtatcgccgcaccaggtgcaggcggcccattttgaaacgggtttgccggcgggccgtatcgtacaggcactgtcagcgccggaaacgctgcagtcggtcactcagccgtggcggtcgcaaggcggtagggcggctgagacgcaggctgcgtttgaggctcgtgtggcacgtcgtttacgccatcgtgagcgggggttgaataacgtcgacctgatgatgttgttgcaggataagcataagggcattcgtgagctggcggtattacccgcctccccgaaccccgctacacgggcactgtgccagacccttgtggtgatgccggggccgacactgagcgacagtgacgatgtgtgccggccaggattgagctgccaacacctggctgcgatggcggaggagctgaagacgatcacctcgccctggttgtcgctgaagtgcgtcaatcctgagtatgtgccggtcagcatcagttgggatgttgagtatgtcaccggcgtgagccacgcgatggggtatgtgcgggtgaaggcagcgctggacgcggcattaatggcatggtcccggccatccgatgaccgtgaccaacccgtccttggccgctctgtcacgcaccgtgcggttcgggatgtgctgcaccggttgcctgaggtggcgacgatcaaggacgtgtatctcaacggccagtcgtcgaatgagcccatgctgacgccggggcaggtggcggtagtgacgtgcattccgcgggaatataccggcctgaccctcacctgggtggacggttcgcgtgatattgaattgcccagcggtcaattcgcgacggtacagataacactgccgacgactgctgcagggcatgatggtacgcctgcagaggtgtatctggtgcacctggagacggggcggcgtttgccaacgacagagacgggaaacggtctgtggagcgagcgcgagccgcataaacagactttcacggtgcatgcgccgctcggtctatgcgggatcttccgcctggggattgtcgttgtgtacccgcggagcatcaccctgcaatcggcgtccatcggggaaagtcttaccctgtttctgcgtcagtcccccgccgcgcctgcctcatga

SEQ ID NO: 433765 - DNA, 3102 bp, Serratia marcescens
atggctgacaagtccaacgccgcgtcggcaaatgtgatgcgggtgagtgaggcggtgcaggaacagatccacttcgacaggttatgggcaaccgcgcaaggcgcgctggcactttacgcagggcaacgctggagtgcacggggtgacgacgaccctggggtgaccttgctgcaggcactcgcctatggcgtctcggacgtcagttatcgccacaccctgcccctgatcgacttgctaacagcgccgacacagctaaaagacgcacgcattacgctgaagcatgaggggagcctctttgcgcccgaatttgggcccgaatggtcactgaccagcagcccagtgaccctggcggattaccgaaaagcgatcctggatctggtgtcgaaaagcggcacgaagaacatcttctgttttcgggatgtgcagatcgcccaagtgtcggcgacggagagctaccaatacacctatgacaagacggattatgcctttcattttgtgggcacgccggacactcagcagcagtcccaaaaagtcaggtatgcagtcgcagggcagtaccgattatgggtgaccctgacaccggggatggacaagacggcggcagaaaatgtattacagcgatttttgaaaaatcatcgcaatctgtgcgaatgggaaatcgtgtcacccgtgtttgtgaagatggagcccaaacacccgcgcattcgcttgcatctgcaaaacgacgtggccgaaggggacgctatggagcaggtcattgctcaggcgatgtgggtcatcaatcaggccctattgcccgtcccggtacggcaagacgccgcgacgcggcttaagcagggcgagcgggctgagcacatttatgtcggtccccggctcacacatggctggatcacacacctcccgcctgagcggggagagaaagaaggcaagctcacgggctatacaataccggtacagacgctgtcggaggccgtggtggggactgtgccgggggtcgccgcggtcgaatgggaagggacccagactgtcaccgtggaggcgaatacacaaacccagctgtgggttgacttcaccgacacgaatacaaatacactgaacgccattcagctctaccggcatggtcagtgggtgccgtcgagcgcctggaatagccaggcggtcatggcgatatatactcgtctgaatgattctgtgagcacttgtacggcagagaccccgcgtcgcgttcccaaggggcgttaccgcaatccggggttctatcgcaccgtgggggcgagcttgccgtccgtttatgggttgcaacaggacgcggagtcgctgaaaaacgacgctgatgccgtccgtctcttcacctttatgcggttgttcgaacaactgctggccaatcgcgccgatcaactgaacaaattgcccaggctgttggcgttcgatggccgtgatccggatgcccacctgtggggcgcgtccgactggccgcagaaaagcgacgatcccctcgcccatgaacagactgtggcggtgttcggcgagttgataccggtgttacagggcgtactgcagacacagtcgcaggacaacgaaaaagagctggccatgctggatcacctgctggggtacttcggtgagcagcgcgcttcgcgggccctgaatacgaagagttcggcggcatttcgtcacgtgcagcagggagccctccgtcaaattacgcgattggcctatgagcgggctgccatcagcatcagcaaagtctcagcgctgcaacgtaagattgccgcccgcttgggagtgggcccagaactgttcgacgaaacgctgcagcaacaggatgccgcgtttccggtatcaccgttgccgttctatgtgattgagcaccaggaactgctgccggcctcaccgactcaggcctcgctgtcatcggcctgggcgtcgttggtgtcagtagagagtaacgagacgatattgaccctgacgtttgaacccagcgcggcaaaaaaactgaagtcaggcatgttgattgaattgaaagggcgccctacaaacccgagcaagactgccgcactcgagccgttagcggcaattgtgatccatgccgtccatggtgataaggttgagatcctgctggcgcagcatgcgcgacttgcgcgcagcatagcgctgttgaaaagttcggcgtatacctggcagtggcgggggtcttcgtcctggctgaaacgcgtggtttatgacgtgtccttccactcttccgacccaacaaagaagggcattccgcccgaaggccctgaggcagttctggacgtcggcccatctttccctgttgagttaaacaaaccaggcacgcgttttgctctacggccaaaaggtcgctggttaacctggccaacaaaagcggatctgtcaggtaatggcgtcgacaaactgcaggacattgttgttcaggtagtgtcggcggatccgatcatgggcacggtgacggtcaaatggattgggcaagcgcctgccaccatcacgctcaacgaccccaatgggccgcatgtttcgccggtcaacctcataagcgctgggaatccgagcgaaccgccaaagtgggatatggccgcgaacccgacggccccgtacgcctggtccgtgccctatgatgaggacagttttgcattcactctgagtctggtcttggatcgacggtggttagtgggtagcaataacccggaggcgctgagtcactggatagcgcaaatcgtgcgcgaggagatgccgagtcatctgaatttgcagctgcactggctgtcaggcgggagctttgacaactttgccgccaaataccagatgtggcagaacgatgcccggccggttggcgatcagtcgtatgagttgttgagcctgttggggatcggtgagcgtcctgtcgatacgcgaagcggcattggttttgcccggatcgtcaaactgaaagacagtgatgatctcgaacaaagaacgcagggcatgaccgccgaggcatgcgagagggcataccagcaggccgccgttgtctacgttaaagcgtcgcccgaagccgcggccaaacgcgatacgcccccgaaaaaaaccaagtccgacacgtga

SEQ ID NO: 433766 - DNA, 1758 bp, Serratia marcescens
atgacaaaaatcatcatgggacggttacggttacggttgcacacggaggagcggctggcggagcggttgcaaaaccgctgcagcatctggtttcgggcgcatctggagcgtgcgctggcggacgtgttcattgattacgccaatacggggaaggcgccgcgagtgatagaccggttgaccgtcaacgtgggcgacattccgctgtcccgctttgaggcggagatgcttgagcgcgttctcacgcagttgaaagagcagttgaacctgcggtcgctgacgcgccctgtgcctgggtggcaggcaccggagcgcgccacatcggcagagccggggcaggccaccgaaccggcctctgtggccgagacagaggcggtatcggcgtcaacaccggcacgcctgtttgcgcatctgttgcgttatctggataccggcgcggcggttgacgggcatctctggcgttcgcgacaagcacgagatgcctggttgcaccaggcgcttgacggggcattgcctgcggcagggccaggcggcatgcgacctctcccgccgcgtatcgcgctggcgttgagggtgctgcagccccgggcccgacagcggctcgtgtcaacctggtcggggcaggcgataagcgccctggccacgtggttgtcccccccgctcgggttgccgtctctgcccccggctcaggcggccgggatggtgccgctggcggccctgctcgcgctgcaacgccatcctgtttccgacccggatctggcggccatcatggaccgtgtttccctgagcctcccccttcccgctgtgctgcgtgacgccgcggctggggcgggggaagagactggggggaaaggccgggtgacgttgccggttgagtctgtcgccgaacagtggttcggggcgctgcatcagacggctttgccggcggcgttgcgcggccccttgcgcgcctggctgtgcgaaccgagcctggcgcgggagaggggggccatcctggctgacgtgtcggtgtcggtgcatcggcaactgcaggcaatgctcggtttgccgttgctcgcgcaacacaagacggaggcacctgtcacgctgggttcgaatgaccggcatcgtccggttatcgatggcgagtggggcgatgcatgggataatcggtcaccggcagcagggatgcctgagcggcccggagcccccgatcggccctgtgcggtgaccgacgccggggaggccattgttcggagcgcgcggtcattcgccgacgaggaagatgttccccatctcctgacaaatgggggactggtgttgctctggcctttgctgccacggctgttcagtaccttcggctggctggatgagggacagtttatcgatgaacaggcccgcgggcacgcgataggctgcctggactggctggcctggggcgatccggatctggcgcaatggcgtacgccctgtacagcattactgtgtgggctggacctggatacgccgcatgaagcctgtctaccgtccctctcacgccaggccgaccttgatgcctggctgggtggtgcactggcaacggtgcccctgctggcgcgctgcagtgcgagcgatttgcgcacttttttcctgcaacgcacgggcacatttgataaggcttcccggcggctggtgattgagccggaagcccccgatgtgttgttacatcaattgccgtggccgctgacccccgtggtgctgccgtggctgcctgctcctctttgtgtggattggacctcatga

SEQ ID NO: 433767 - DNA, 2187 bp, Serratia marcescens
atgaacaacgatgtgactgaaaccgccgggagcgcccctgaaacagggacgctcccgttacggcaaaataatgatacgcatacctctagggtgtcggggattgaggcgcgcctgtccggcctgggtccatggctggagtacgtggatttggtgctacaggggctgttgttatggcagcagcaaaatgaagacgatcggctgaacatggcgggactgatcctgtcgccggatgagcaggagatcgcgcgccaggcgttatccggattaccgggctggatccgtcagcctgttattgcgccctggctcgaggatttgcaggttccccctgtcgagggacgccttgccgaggtcgtcgcgcgttttgggttaacgcccttcgaaacgaaggtgttggtgttgggatgcctgcccctgtttgatgtgcgttatgagcttctgctggcctatctgcagggggaagacaagttacggtggcctgggatcgatttggcgctgacgctgtttagcgccagtcaggctgagcgactggaaaaccggttgacgctgaatgcccggcacggtgcgctgttgcgcgaagcgctggttgatacggtcgacgcgaatggccggcgtacggatggcctcagcgtgacgtatttacgtctgaatgcgatcgtgttccattttctgaacggcgagcctgccgacagctggcatgccggcctgggcgaggtctgtgactgggctgcccccgaccagagcgtgtcactgagtgaaggtgcctgggcattgaccgccgaacaactcaggcgtacctgtcttgcgccgcaagcttcccgactggtgctgttgcaaggaggtcccgggcgcgcggggctgatgaagcaactggcgagcgaagcgggacgtccgctgctgacgatggatctgagcctgttgccagaggacgcggtcgacgcagggcagatattgcgcacggcgttgtgcgccgtgcgtctgtatgccggcgtgctgttggtgcagggatgggccgatggcgaggcgaaacaccccgaacagctgaacgcgctgacatctcatgtgcgtcatcatgggcaaccgattgtctgtctggtgacacaggaagacgctggcaaggtatggcctggcatcccccggttgagcatcgtattaccgccgcggtcaactcgggatgacgagaggctcttactggcgggtatggcctcggaaacgggggccgaagactgggattggacggggctgctgctgcgtacgcgcattgatcctgacggggtgacgcagacatggcaggaaatggagggctatcggcttttacgtgacccggaggcgccgctggcggagtgtgatctgcaacaggcgttgcggatccgcgggcagcagcaatttggcgagctggcagagcgcgtccatccgcgccgcacctttgatgacctgattgtcagccctgagttgaccgtcgcattgcgggagatcctggcggccattcggcagcgggaagctgtgcttgaacgcgggtttgcccgcaaggtgggttacggcacggggatcagtacgctgttctatgggccaccgggcaccggcaagaccatggcggccgaggtcctggccggtgagctggggctggatctgatccgggttgacctgtcctccgtggtgaacaagtacgtcggtgaaacggaaaaaaacctgtcgaagatttttgatttggccgttgccgacaccgccgtgttgttgttcgacgaagcggatgcgttgttcggcaagcgcagcgaagttaaggatgcacatgaccggcatgcgaacattcaggtgtcttacctgttgcagcgactggaacaataccccggtctggtcgtgctgacgaccaacaaccggggacacctggatgacgcgtttacgcgccggttgacgttcatcacgcggttcgaggagccggacgtcacactgcgcgagcgtatgtggcggtcgatttggccgtctgacatcctggtggatgatagcgtggattgggcgcagtgggccgccgcgaccgatttgacgggcgcgggtattcgcaacgtcgcgctgctggcgagctggctggcggcggaggcacaacgggaggtgacgcaggccgacattgaacgcgcggtacggcttgagttggccaaaatggggcgtttcatgttgccgctgtccgacgcgtga

SEQ ID NO: 433768 - DNA, 870 bp, Serratia marcescens
atgaaaaagagtgacatgacactgatcgagctgaataaacacatccggacggcgctggaggcgtatttgcccgcagagttcaagacggcgaaccggatccggtttgacatgtttgacaaggagaacttgccggacagccccacggtgtacgtctttttgtatgacattcaggaggatctggaactgcgtcacgggcagtcgcgccattaccaacagcaaaccgagacattttcaccccgctatgtgctggttcgctgctgttatctgctgacctactggtggacgggcgacgataaggtcacagaggctctgcaggtgaacaatatggcgctcaatgcgctgttgaacctcaagctgggcatgccggaagcttttgtccgggtgattgccccatcggagcacttgtccagcctgggcaatttttggcaatcgctggataagccgcgcctggggttgaatttcaccgtgacggtgccggtagacctggatttggaagacgacgcggctacaccgcgggtcatgaatacctcgcttgccgacatggcggcaacgtgggagcacgaggatgtggccttgcagtttaaacgcgccctcgtcgaggcggcattggtggtatacgctcagcaaagcggggatgcatccgcgtcagactggctgacggtgcgcaccaaactggctcacctgcaggtgacctgcgactatggtgcctccctgtcgccggaggggttaccggtgatacgggtcgagggcctgctggacagtccgttgtacgagatagtcgttagtgaggggaaaaacctcacaggcgtatgggcagaacagggctcggtggagatgtcggccgtgcagttggtgtcaacgaaaacatga

SEQ ID NO: 433769 - DNA, 1149 bp, Serratia marcescens
atggccgacagtaaaaaagtcaatttagaagagttgaaaagacaatttggccccttgcaagtgccgagtgaaatccacttttcccagctgatcgacgtggcggccctgtcgtttcaggccgggcccggcctggccggcggcgtgcccgctgtgggtgaggaggggctggatgtcggcggggtgaccccgctgtacgtcaaggttcaagggggcatgcaggcgaccgcggacggggttgcgctgtatgttgccgcgggcggcgggctggcattggccagtgataaccgtctgaccgccccggtggccccgaaaggcgggctgcacaatgacggtggttttgctgtcaaggcaacggcccccctgacggtgggccgcgaggtctcggtggccattgatccccatcaggggatggcctgttctacggtgggactggccttgcaggtcgatgccacgacgctggagacggacgccgacgggctgcgggttaaatgccaactggccgggggaatgacgataaaggatacgggtgagctcgcgctcgatctcgacatcattttgggacgtgcctgcatacgcgtgcatcatgggcgtgcattcatttgtttgcccaaatcgcaggtggcggccatcgacaaaaccatgatttttattaaccacatatatgttggtgagataaggaaagatggtggtacaagttatttgaagaccgtcaggacggtgtcagtgacgggttattgggtcttggagaccgccgagtgggtgaaggcaggggacgttattcaggtcagagggcctgcagacgatgtgatcctccttgagcattcggtcacggccagtgaaaacgccccggtcaaccgattgccgcagataacgggcttgacgataaaggtccagggcggcggggcggctcgtgttggaaacaccctagaggcggcttacacctttgatgcccatggcactgcaggcagtgagattttattctcatgggagtggtacgaccattctaggacggtatgggtacgcgtcagcagtaataagacgtttattgtgcctcccggttaccagaagtggccggtgcgtgtgacattaactccggcaaacaattgcggaccgagtttctccagcccgacgataactatagctgaatga

SEQ ID NO: 433770 - DNA, 1722 bp, Serratia marcescens
atggccgaaaaaatacacattgatatcacccggttgagggacgcctttaaagagggggcaacgcccaatgaacaggattatggcgctctcatcgatctggcctcagtggggagcaaggccctgggggctacggctacggatgccacgacccctgttcccggtagtggactggaggttcggggtggcaagcttgcaatcaaggcaggtcaaggagtccttgctgacgccaatggggttgccgtaaaggtcgataccaagacgctttgcgtgacaaaggaaaacgcactggcactcaagctgaagccggatgggggggtggaggttgctgacgcgacagggttgcacatcaaggctggtactggcctgaaaaccgatgcgaaagggttatcggttatcctggaccccaagggtgggctcaaaacagacaacagcaagcttgcggtggctgtggacggcgtagcggcgggtctgacgtttagcagtgagggggcactcaaggtccatctggcgacatcaggggagaattacctcaccgcagacgcaagagggctggcgattaccaaggttggcattgaaagaatcaaggccatgctggaagcggaatcgacggcggcgctccagaaggctgttgataataccgaccatggcgagcatccagacaccaattcgggtggcaagattgaaaccgccatcgccagcgcattaaacatcgcttacataaaggggtatggaaaaaaacacacgcaaaaccagctcaccgtaacatccgtaccttcccaggtgctggacgtaggggcgaccgatgcgattgtgcccctccggtcacacctcactgccgatagcacgctgaccagcccgcatttttattttatgccagtgcagggcgatgaggctaactggaataaatttgtcggttcgcagggggggtctgccgatgggaacctgcacctgtctgctgcgacagtgggtaacggaaaagtcaaagtactggcgatggcggtggcgaacgcctccaccggatcgggattgaatattgccgccgcggaagtcacggtcaatgtcacggttcggccggtggtcaaaaatgtcagtatttcaccgagcagctcgcagtcagtgtatgagtctctggagctcaactacatcacggttccgtcggtgggtgtggcatgtacttatcggtgggaaacacgaccagccaacaccagcagctggcagccggttaccggggcgacctcgaggacgtggagaccagggacgacttatattgaccatcaggttcgggggtttgtggtaccgacaatggcgaacattgccggcgtcgaagctcagagcagtaacgttgtcactctctataataaaccgcacgacatcgaccatattgaggtgaatggccatacgtttaatcataatgaagggttccccactacggccttcaaggcggcaacgtttacccttgttctgccgagcgaaattaatgcatctgactatagttgggtcaccgatgcgggtgatgccattacggtgactgtagagaataagggggttgtggtgacctttgtcagtaagcctgccagtgcgaaggttactatcactgggaagcgcagtgacaacgcgcctttccagtacagtttcaaccttaaacactggtttaccaatcacggcaataaaaccatgacctggtccgaggcaaacgaggcctgtaaaaactgcaaatcataa

SEQ ID NO: 433771 - DNA, 555 bp, Serratia marcescens
atgaacgtagaccagaacgatattgacaagatttatgggaacttgattaaaatatatgagagaggtgaggagtccattgtttatttatttcggtcgaactcccccactctggaagatgacaagattgaggcaatgacggcctatgacgatgagttcacggctgaagagaaagacttcattttgcgcgcactggatcagcgtattattgctgcatcgaaaaacatgcctctgaagctggatgacgaacagaagaaacaggtgcaacgcttctacggcaccaatgcgggcgctagctttatcaatactcagttgagaaatgcacgcctaaaaccagagcaggccattcgccccacatatctcaatctagacagtgcggtggctgcagcggcaaatgaaggcgtgtcggaaggtagaatatccttttcaacggctggccggctggccatcaaacaggcgtttgcgttgggggacgcgaaaaaggtcatgcgagccgcgctggagggggggggagctgcactacagcaccccccagtatcgcgggacgcgcgtgcctag

SEQ ID NO: 433772 - DNA, 405 bp, Serratia marcescens
gtgcctaggaaccagctcgatgcttttagggtgggggatattctggtgaatacgttctttatgtccttttcgccggacatcatgaagccgacaaaaaggggagacgatgaaaaggttcatgacggctttaagcaggccaagatgtttgcgggtgacaaatataaaagccatgtgggggtgccggttatctatgagctacccgaacggtcagggtacaagacaacggtgatacacagcctgtatgagcatgaaacggtgttgccgcccatggcagtgctcgcaattgaaagtatcaagaatgaagggacgcatacacgcatacgtttgaagaaaaaatccgaggcagacgccgatgctaaaaaaaccggcgccaataaaccccggcagctattcatgtatcattag

SEQ ID NO: 433773 - DNA, 153 bp, Serratia marcescens
atgcctgaatcggtgctcatggaggccttcacggtgacggcatcggtgttcggcatcaatgaaagaccccctcactgttttcgcaacaaggcacgtgccgagcattatcctgacaatgaccctagtgacgatattgagtatgaaaagtggtaa

SEQ ID NO: 433774 - DNA, 885 bp, Serratia marcescens
atgtacaaacaaaactcagagctaactaagcgtaacacatcgaataagaaagaaacgcccccaagaacaggttatatgtcgaaatctaataatgtatccaacggaatagggaaggattttttcaatcagtttgacccttctcgcggcgatatgatattcggcttgtcatcagaaatagcgaaatatagaagttggtgggcattcttttctcgcagagccgattatcttgcagctttaattacagtggaaatcaatagcgaaattcactcacagtttgtaaaaagaatgtcagacccaaaggcactggaatctttccaaaatgcatgggttgactttgggagaatggacaaggatgaacgctccattattaatctatattatgagaatgtattgcaagcagaggacgctatatatgaaaagattatagagcgacagaatggatgttttcatgcatttaataatattaagctggcaagaaaatacacgacgcatttaaagaaccatgaacgttatgcttttagacaaacatttttttcatatgggcttgggttatttgaaaacactagagaaaaggttatttcttcgctagggaaatttatatcaagggccagtaaggctgggttggatatgattatcagttctgcaggggatgagaaggttcattttattttggatggtatcaatctgagtagggtcatattaaaggaaggagaagtatcattcacgggagcagagttaagatacttatacagaaacagaaaaacattaaaggataaagtaaagttttaccgtaatgggaaggagacttcacccccttgggaagataatgcttctggttggaatgcttacaaaaaatcaacatcacatcaaccattcaaactttga

SEQ ID NO: 433775 - DNA, 360 bp, Serratia marcescens
gtgctggacaggatcttggtaaaccgtggttacccgctgaagatgcggatggaaaacggtccggaactggtctcactggcgctggcacaatgggccgaagtacattgcgtgcagctcgaatttattaagccgggtaagcctacacaaaatgcttttatcgaacggttcaaccggacataccggatagaaatactggatttttatctgttcagaacactgaatgaagcacgggaaattacagagcgctggctgatggaatataacaacgagcgccctcatgaatccctgatcaacctgatgccggaagagtaccagctgatggctgaaaaaccggaactctcaaaaagtgcgtggaactaa

SEQ ID NO: 433776 - DNA, 765 bp, Serratia marcescens
atgcgtaaagcccgattcactgaacaccagatcatcgccgttctgaagtccgtcgaagccggacgtaccgtcaaggatgtttgccgtgaggccgctatttcggaaaccagctactacaactggaaggcgaaatatggcgagatggaagcggctgatattaaaaaaatcaaagaccttgaggatgagaatcgacgtttgaaacagatgtttgctgatctcagccttgagtgccgggcacttaaagacgtcatcgaaaaaagctttaaaccagcgataaagcgtgaacttgtcagctatctgacggcacaatttgccatgaatttacgccaggcctgcaggacgttatcgctgagcaggacggtgtatttttatcagccagatacccggcgtgatgaaactgtgatccatgcgctgactgagctggcagaacgctatccgcgctacggttttaagaagtttttccagctgctgcgcaggcagggtaatacctggaaccataaacgtgttcaccggatttactgcctgctgaaactgaattttcgtcgcaagggagagcagcggctgcctgtgcgtaatccagcaccactggcgacgccgcaagcgttaaaccagagctggtccatcgattttatgcacgatgcgctggtttgcggcagacgcttccggaccttcaacgtggtggataattttaaccatcaagcgctggcgatagaaatcgccctgaatatggggtgtgacgctcagtggaacgaaaactcacgttaa

SEQ ID NO: 433777 - DNA, 1596 bp, Serratia marcescens
atggtcattcatggagaaaagaaggaaactgcacaatggctagccgcctatagtgacagtaggcttgtacctcagggattacttcttggctggtacgatataagcaagagtaaaacacttgagcgagagcttgctcgtgctttgcaaaaagcaaatgatgctagtaaagaaaaaagtgattttttggcaagaatgagtcacgaaattcgatcgccgatgaatgctataattggtattttggagctagagagccaaaagagtagtgaagttagcacctctttaaaagttgcttattctgcttcgcgtcaattgctaaaaataattggtgatgttttggatatttctaaaatagaagcgggagagatgcatcttgtaccacaaccgactgatttattttcattgcttaaactagcactagaaacttatgataaccttgctgctaaaaagaaaattgagctaagaagcaatatcaaatccatacagtatcatcaatatctcattgatgggacgaagctaactcagatcattagcaacctattaagcaacgctataaaatatactgataacggaattgtttcattagaagttagtatagcttccaagggaaataaaactgactatatacactttgtggttcgtgacacgggaataggtattccattggtcttgcagcaaaaaattttgcaaccttatgcacaggttgatcctagcaaaccagctagtacaggtttgggtttgacaatcagcagccaattgttgcgattgatggggggagagttagccattgagtcaacaccaagacaaggggctaaattttccttcactcttccccttacacgggcaaagatcattaatgaaactcaagatattgagccactaccagtagtagaatcccctcttaagatattagttgttgatgatttaccagcaaatttgactgtaatgaaacttcagctagagaaactaggcaataacgtaatcacttgtgataatgggactgatgcgttgattttattagacaaggaggatttcgatctcatttttactgattgtcaaatgcctaatataaatggctaccaacttgcaaggcaccaaagagaaagagagagagaaaagcatagtcggtacattccaattataggctgtactgccaatgcatttaatgatgaattgcgtcgctgcttggaatctgggatggactcagtattaataaagccactaatgcagaaagatattagagatctaataatacaacaacaaggtgttcgtctagatatgaatgagatcaatatcatgacggctagcaactctgaagcaaagttagctataattgaggagctgcagacgagcagcgagattgtgcgccaagaattaacctcaaaaaaactcaaagataatgattatttagaagtcatacatcgacaaaagggttgttttgcattggcaggatttcaaagtggagtagctatttgtcacagactagaacagatacatgacatcaaagaaaatggttgcattgagttgcttctaataaactcaatgctattaaggtttatttccttgttagaaaatgaaaaggagctttgtgtgatttga

SEQ ID NO: 433778 - DNA, 1200 bp, Serratia marcescens
atgaaagcgcgccggctgtttctgtggcaggctttcgacgcccagggtgccctgcgccacggcgaactgatgagcgatgaaaaacggcaggtgagccggttactgattgagcaaggtatgcaaccctggcggatcgggcacggcaaacgcgtcacgcccggccagtggcgcggagaacctttgatccacttcacccgccaactcgccaccctgctgcaggccgggttgccgctggtcaatacgctgcagcttctggcggcagagcacccttcggcggcctggcgttgcctgttgcgccagttggcagaacaggtgcgcgaagggcagccgctctccgaaacccttgccgcgcagccaggcgtttttccacttatctatcgccaactgatcgccatcggcgagctaaccggcaatctcgatcgctgctgcctgcagctggcgcagcagcaggaagcccaattgctgctgcgccgcaaagtgaccaaagcgctgcgctatcccctcttcatctgtgcggtggcgctgctggtcagcgtgctgatgctggtgatggtgctgccggaattcgccaaggtttatcagtcgttcgatgcgccgctgccctggtttacccaagggttattggggttgtccgcgctgctgatcgccgttggcccctatttggcgctgctgctcggcgcattgctgttcggctattgccgctggctgcatccgcgcccgccgtggcgccgacgtgagcaggccgccttgctgcgcctgccgctgatcgcccggctggtgagcggcggcgcgctgagccaaacgtttcgcattctgaccatgacccaacgcgcggggctgacgctggtagaaggcttgaacgcggcggcgctggcggccgaccatctgctgtaccggcaggcgctggagcaggtgcagcggcagctcgccgaaggcgaggcgtttcatcacgccctcgccctgcaaccgctgtttccgccgctgtgccggcagctggtgcgggtgggcgaagaatcgggctcgctggacgtcttgctggataaattggcgcagtggtatgaacggcagacgcacgagctggccgatacgctggcgcaaacgctggagccgctgctgatgctggtggtgggcgggattgtcggcgctttggtgatcgccatgtacctgcctatctttcaactgggcagtgtgctgggataa

SEQ ID NO: 433779 - DNA, 924 bp, Serratia marcescens
ttgcacatagttagtttaagctttccgttaatggcattatctttgataatgagtgttttgttacgcatttacaatcaagcaaataaggttttattaatattttcagtcggactggctattaatattataattagtttgggattaatactttggcttgggcttgatatatccggtgctgcatggggaacagtgaccggcgtttttgttgagttttctttattatccctatgtgtattatcaataagagataaagttatctccataaagggaataaccctagccagattaaaagccatactgcttcactctgtttcttcagggatcggcggccttatctgggtgcttggctcatttttattctatgtattagtaggtaggacgggtagcaatgttttatatattcttgccattttaacacctatagagagccttcttttatcctttgccttaggtgtaacaacagcatcgggcatcgagttaggaaagaggatccctgtttacccaagagcctacatatattactttgtatatcaaaccttagggctaactctgtgtatgactttattcttagtgatgatcgcactaccaatattatggctagcgtttgacttgtacttcattacaattaagcaattcccccatttcattttaatgatgctttttgtagtcttattaaaaagcatttcgatccaattgattaatggaattcttcgatgcggtggtgatattcgattttgcttgcttttggatggctgtgttcaatggggagtgatgttaccttgtgcatatataatggtttcactaaaatatcctggggagtatgtttattctatagttatcttcgaagaaagcataaaaattataatatgctactggcgcttgaaaagcgatctttggaggcgtaatttagtagcgggatattag

SEQ ID NO: 433780 - DNA, 747 bp, Serratia marcescens
gtgtcactgacagcctatcagcctccggcctccggggtggaagcgctccccagcccttactttgattttgcccaggccgtggccatgcgacggatggctctgaatctgtcggatcaacccgcttatctgctggcaccggagatcatcttgttgctcgacaatatcgccgatctacgccggcggatgctgtttgattttttatggaacaccggcgcccggatcaacgaagccctggccgttactccgaaagacattgtgcttgatgccgtcaaaccttttgttgtgctgcggacattaaaacaacgtaaccagacagcaggtcgccgcggtcggcccggtaaagatacgccggtgaaaaggacattgccgttacttgaccccggttttgtacgccggctgcgtgatcatctggccaccttttcccgttatgtcaccaagccgatatgggagatctccgatgacaccgcacgaaactggttgaaagaagccttgggtaatgcacaacgcgcggggatgaacttctccattgagaacatcacgccacatacgtttcggcacagctttgccatgcatctgctctataaccgggtacatccgaagatcctgcagtcgttcatggggcaccgtgactataaaagtaccgagatctatactcgtgtttttgcactggacgttgccggtcagctgggcgtgcgcttcgagatgaccccggaacatgcgttacagttgttaaaccctaacagataa

SEQ ID NO: 433781 - DNA, 252 bp, Serratia marcescens
atgcacagagtcgcgaaattctatcgctggatgacacgtttacggcacccgctgacagtcagctatgcattgctgactttagtgtttgccgccatgggaacttactttgcttaccaggtgacggttcctcatctggaagattacctgggcaaatggtacggatactatgaatgggaaaacagcgatggttctcgcacgaagatcaccggcgatacgcatttctttgcaaacggcctacaactacggtggtaa

SEQ ID NO: 433782 - DNA, 228 bp, Serratia marcescens
atgaaaactgagacgatcagttacttaaagcagaacgcggccaaactcgatttaagcgagcctctgatagtgacacaaaatgggcaccctgcgtatgttatcgagtcctatgacgatcgtgttcgtcgagacgagagcattgcactgctcaaactgatgacgttatctgagaaagatattgagttaggccgtacgtttacccgtgaccagctcctggacgcactttga

SEQ ID NO: 433783 - DNA, 984 bp, Serratia marcescens
atgaaccatgacacattgactgtggtgcaggggaatgatcttcttgaaggcgcctatggcgtcactctggacgaaatgcgtctcctgaacctggccctcgcgcagattgatagcagaaagccacaaccggatatgttgtacacgctttatcctcgagattatcagcgtatttatggtgtcaatcctaccagcagccaccgccaactacgcgatgctgctgaaagcctgatgaaaaaaccggtgacaatttacaaagaagataggaatgggaaagtcagaactgttcaactttcctggttttcacgtcttgagtatgtcaacaatgatgatcatagtgcggtcgtactacgttttggacaggacgttgccccctatctttttgagctcaaagaaagctttaccaaattggacttcataaacctcgctaggctggatacacctttctctatccgtctttacagctggttagtgaaggcgcgtaacctgacacggtatagaagtcatgggacaattgaagtaacccttgagatcgagtggatgcgagagaaggctaatctgcaaggaaaataccaggattatcgggacttcagacaaaaactgctgcaaccctccctcgatcgcatcaatgcctcgacagatatctcggtgatttgggaacctgtgaagataggtcgttccgtgcatgctatcaagtttacttatgtagatgagtctgcacctgaagcaacaaaaccgatgcggccacgtcttcctcgtcgccctcatgtaacggcaggatctgctgctgaaggggaatgggccagaaaatgtatttcgctgatgactcaatatatgattcagttggatgcctatgatcctaatgagaaggtgagtgtacccgacttaagaaaattggcggggtggtataagaaaatagggcacagtgagcaggaaaaaaagacactggaggccattaaactccggacacagcgtcaagctaagtga

SEQ ID NO: 433784 - DNA, 1167 bp, Serratia marcescens
atgaacctcaagtcaacgctggatcgttgtatagaacgcggccaatttatgacgcaggaaattgctaaggcgcaatttggtaacgacagcccggaagcccgagcgattaccaggcgttggcggatcactgaagcttcagagcttgtcggtgtcactgcacaaacgatccgaaattatgaagagtcagggaagttgccatccccggagacggcaatgatcggacgcgtagagcaacgtaccggatactctatacagcaaatcaatgcaatgagagatgtctttggtacccgcccgacaagaccagccggccaggatcctgtcgttctcgccgtagcagctcataaaggaggggcttataaaacatccacatcagtacatattgcacaatggatggcgctacagggattacgtatcttattaattgatgccactgatcctcaggcaacagcgtcgctttatcatggttatgttccagatttgcatattcatccggaagatacccttctcccatattatctggggcagcgcgacgatgcagcttatgctatcaaaccaacctgctggcccaacctggacattattccatcctgcttggctgtacaccgtatagaatccgaaatttatccgttgcatgatgcgggaaagcttcctgtagcccctcaccttcttcttcgggctgctattgaatctgtttgggacagttacgatgtgatcgtactggacagtgcgccaaatcttgggatcggcactatcaatgttgcctgtgcagctgatgttattgtcgttcctacgccggctgagttgtatgactatgtttctaccctgcaatttttcactatgttgcgcgatttgatggttaatattgacttgaatggttttgaacctgatgttcgtgtcttaatcacgaaattcagcaatgcagtcggcagtcaatctcaatggatggatgatcaaatccgtaacgcttggggcggaatggttctgaaagaagtggttcgtgtgactgatgaagtcggtaaaggtcaggtcaggatgcgtaccgttttcgagcaggctgctaatcagcgttcaacgccggcagcttggcgtaacgcggtaaccatttgggagccggtttgtgctgagatttataatcgattaatcaaaacgcgttgggagaatgcgtaa

SEQ ID NO: 433785 - DNA, 969 bp, Serratia marcescens
atgaaaagagcccctgtattacgtcatgcacctacgatcaactttgatgaagctactaataccgttccggccaaagaaagtgaactttcaccttcggcgcccgcagtaagccagctgtcttcacgtgttagcgcaatgaaaggaaacaacatcaccctgccagtatgtggggaggatgttacctttgttctgaaaactatcgcggcagatcagatagaagtaaaaacaaccatctttgccggtaatgaacgtcttcaggatttattgaccgaatcttccctggatgatttattaccctcgttttcgtcgtcgggtcagcagtctccagcctttggacgtagtcataatggctttgtcgaaattgcagatggtagtcgacgtcgtaaggccgctattctgaccggcagtgaatacaaagttctcgtcggcgaattggacgatgcgcagatgcgctggctatcccaaattggaaacgattatcggccgaccagcgcctatgagcgtgggttacgctatgctcgtcggctcttttctgaatttgatggtaacgttagccatcttgctgaagctgagaacatctcacgtaaaattattcaacgttgtattaaaaccgccgagttaccacttgaaaccttacagttgtttgcgaatcccaatgaattgagcgctcgtagtggtgaaatgctctataggttccatgagtctgactttgcagcgcttaagctgttgacgcaaactttgcgagaacagcaatcagaaggtgccacattcagtaccgaagaactgctgaaacgtctgatgcctgtcaccaggacaaaatcagatgttacagtacgtaagtttgcagcgggtattgaggcgaaatactcggctaacgcagtttcatttaacctaacgggtgctccggctagccttatagagcgtattgaaatgctactagccgagcatgcaaagaagcaaacgccctga

SEQ ID NO: 433786 - DNA, 351 bp, Serratia marcescens
atgtttactgtattcaatgacaaaaatgatttcagctatgcttttgaaaaaatccgtaacgcgatttcctcccccgacgaaagtaacatttatgctgccacaaacctgggcctcggcattctgacgtgcaagtacgaactgttccgcaaggagctggatgcggcaggtgagctgggtgcctgggaatacgacctcgacacctacagccactgtattgcggtgctgcagcattatttcgccggcaatccatccgggcagacggaacgagatgcccggatttacagccattacctgcagattgagcacagagggtttgtgaggctggctgaagaactggctgccgagcgctga

SEQ ID NO: 433787 - DNA, 252 bp, Serratia marcescens
atgggtgactggtttattgccaccgagggcgtgaaaatcgtcaaagacagtcccggcctgtggccgcagatcatcacggcggtttcgtccgccggcgcggcacttttcggcgtgtacttggcccactactttgctcgccggcgtgaggaaagagcggcggcggttaagctggccagtgagcagctggaaaaggcgacccgcagcgccggccggttgccggcggccagcacgccgccgcgcgcgacggggtga

SEQ ID NO: 433788 - DNA, 231 bp, Serratia marcescens
gtgacgttatcggtgcccgtcaccccgcacaccttccgccacagctacgcgatgcacatgctgtatgctggcattccgctcaaggtgctgcaggcactcatggggctcaagtcgatcagttcaacggaggtgtatacgagggtgtttgcgctggaagtggcggctcggcaccgggtacagttccagatgccggaggcggacgcggtggcgatgcttaaaggtcggggctga

SEQ ID NO: 433789 - DNA, 531 bp, Serratia marcescens
atggcgtttcgcttgatgcggtatgccattgccgccatgcaacgccatcttgccgccggcaatgaacagctgccactagtgatcccggtcctgttctatcatggtcaggtaacaccctacccgtatccgatgagctggctgcagggcttcagtgatccggcgctcgccggccagctgtacgggggtgattttccactggttgacgtcacggtcattccggacgatcaaatcatgcggcatcgccgcgtcgccattcttgagctgctgcaaaagcacgttcgccagcgcgaccaggccgatttgctggaacagctggtcacgttgctgctggccggttacactagtcaggagcagctgacatcactgatgcattacatgctgcaggttggcgaagaaaaagggcgccaggaaggcgagcgcgatgcggcgctgaaaatcgcccgtgccatgctggccagcggactcgatcgcaagtcggtaatgaaattgaccgggctgactgccgacgacctggcgcacattcaccactga

SEQ ID NO: 433790 - DNA, 1275 bp, Serratia marcescens
atgttgaatcagcttttttctaatcccgacgttctaaaaaggcttactgcaagttcactgggctcattagttcaatcttatgcaaggttccttcatgcaaaggaattcagtccatccacaatgcaacacaggatccgggctgcgtcgcattttgggcattggattgatttgcagcacattgaaattaataatattaatgtctgcgaccttgaacaattcatagttcatttatcggattgcagttgccctgagtccagacctggtgaacattttcacactgccattggtgccagaagatttttggcatatttgtcaaaaatgggagctatcccttcataccagccgatacataacgaacctagctctcgggagcttctgctagataaattctttcaatggacacaacttaaccggggcatatcacggcaaacagggatagcgcaacgttctcatgctgtaaccgtgcttgattcccttggcgatgacccggccggctgggaagtaagagatatccgacagtttgtgttgtctcatttcgagcagtaccaatcctcctatatcaaaaccgttggttcaaatctgcgggcatttttacgctttttagtggtagagggactatgcaagcccgagttgattgatgctgtccctaaaaccgcacactggacactaagtgaaatcccacgccatatatctcctgagtcagttgatcgggttattgctgcctccagttctttaccccgcagtgaactgcgtgacagagctgttatctcgcttctggccacgctcggattgagagcccgtgacgttgttaatctttgcttatcagatatcgactggaaccaggggcggatccgtatcatgggaaaaggacgccgtgaaacctggttacccttgccccaggtggcgggtgatgcattactcgcatacctagaacaggaacggccaccttcaaactataaccaagtatttttacgctcccgcgtgcctttccagccattaaaaggcatagcgactgtacaaaaaattgttcgtcttacgcttaaacatgcgggcgtagagcgccctcctggagtcacaacacatcttttcaggcactctctcgccaggcgtttgctcgcgcaaaatattccgttggagggcattggtgtcgttcttcgccaccgcaacctgcagaccaccgcgcaatacgccaagatagacatcaaattgttgcaaacagtggttcaaccctggcctgaagtaaaggagaattgtcatgttaaatcagcatgctaa

SEQ ID NO: 433791 - DNA, 915 bp, Serratia marcescens
atgttaaatcagcatgctaatgactatatccagctacgacaattgggcggttttaagttcacacagcaggaaatgcatgtacgatcatttgttcggtttgcatataagcaaggcgattcacacatccgcacagatacggccatagaatgggctgcacagggaacctccgctgattgcagggaagatcggttgaggtcaattgttgccttcgcccgacattgccggatcgaagacgggacccatgaactgccaccaacgcatgtattttcttctggtcgccacaaacgccctgttgcgtatactttttcaccggatgagataagacaaattttagcagcggcgcttaaattggagccctgtgcatctctgcgacctctcacttactacacgctgtttggattactggcatcaacaggactgcgaattggagaggccgtccgattacgtcaggatgacattacctcggatggcttattgattcgggaaactaagtttaaaaagaaccgaatagttcccattcatccaaccacggcaggcgtacttaaccagtatctaatcttacgaaaacaaataggaatttccagcaaccagatttttgtcggaatgaatgggcagccactccagcaggcttgggcccagaacgcgtttcgcaaagtgattacagcgattggccttgataaagcccgctatgggcattgccctcgactgcacgacttgaggcacacctgggcggtccgggctctcgaatcgacaccaactgacattgaacaagtggatcaacatgtacgagcggtcatgacttatcttgggcactcgagtgtggcagccagttattactatatgcacagtacgccaattatcatggaccgcattgcaaatgcttgcgcggcgcttgagcagggggatatatcatga

SEQ ID NO: 433792 - DNA, 1002 bp, Serratia marcescens
atgacaccactggctccgcatctgaccagttttctcctcgaacgtttgaaattgcaccaacaagccagtccgaacacctgcgatacttacgcttatgcgttccagttattgctgaattttgccagtaaacagcttaagaccacgccatcttctctagctattgagcaactggatgagcggttggttctggacttcctgacacatcttcaacttgaacgcctcaatacgccacgcacacgaaattcccggttagcagccataaaatcatttatgcgttttcttcaataccgggtaccaacagcactggagcaaataaatcgtattctggcaattccaatacagagaatggatcgtaatttagtgcgtcatctaaagcgggatgaggaacaggcattattggatgcccctgatccaacaactcgtacaggcattcgggatcgggctatgttacatcttgctctggccggaggtctgcgggtatccgaattagtggggatcaggatgggcgacctacgtttcgataattctgcagttgatttacttgtccatggtaaagggcgaaaacagcgtgagcttcggctctggaagagcgttgcgcagtctattcgtgcctggttgtctgtgcggggtgacgcacctgttccagagttgtttttaaacgctcaggggaaacagatgaccagagccggatttgaatatgtgcttgagcgatgtcgggtgaaagcggtaaagcagtgtccttccttagttgaaaaaaaactgtcacctcatgtcctgcgtcatacatgcgcgctaacagtcctgaaagcaactggagatctacgccaggtggccttgtggctggggcatgagagtactgcgaccactgagtgttatcttcagttggatcctctggaaaagctgcaaagcatcgttggttttgtacccacttcactgaagcctggtaagttccgtccatcagaccgtctcattgcaatgcttcggggtgatcatattatgtag

SEQ ID NO: 433793 - DNA, 960 bp, Serratia marcescens
atgtattcacataaagcaagtacaagcaaaatcacaacaaaggatgataatctcttaattaatgagtatggaatgactcccgatgaagaatatctctctttatcaaacagaaagaagaatgtagtaaatcaaataatttatcagttgatttccgggaaaaaacctcattatgataaaaaatcagataaatattaccgatctcacggtgatgccaggttttatatttcagatatatatatgggaacagtgagagaagaacgatatgataagctatttcgagtggctaaaacagaggcgagtaagcttattaaaagtgacaaatttcgtgctattcttgcacaagaaaacgaagacaaaatcacgctacagaaaatacaacaacaaaaagctgcctcggaaatagaagttaaaaataaaaaaaataaagaaagcgagtggctagggttgtcgactatttgggcgatgaaatcaggcttcaaaaaaatccagagtcgctcaagtgaaaaagttgatataaaacagttgaaaaaagaattgatatccctgaattcaggtgatcgacattgggaaaagggtccatatggatcagaaataattgattcagtgtataatttttacaatgcgaactatgatgaagtcggtaatagacttgagagttatctaactgcaaactcaaaatctagcagtgatttattatatcgaggcacaacggcggatgaattttcgcaatggatgaagggaatatatatggctacggggtttgttccgactagtcatgtagaatcgactgctaaaggttttggtcagtatattattgagattgaaaatgggtatggtaagaacgtgcgcaatatctatcaaaatggatatgaggctgaatttctcataaatagaggttcgaagtttaaatttataagcaactcaggagataaaagaatacgtgttcgtcaaattttttaa

SEQ ID NO: 433794 - DNA, 351 bp, Serratia marcescens
atgtatattccgcgccccgcaaagctgctgttccagcatgatgatggctggagccagtacctggataaacacggcgacaccctcagcgactggaccaaactcgccgtcgagcgcatgctcgcctgcagcacctgtgccatgggcgtgcgccgttactgctgcgcttcaccggattgcacccatgcccgcttcttctgtcagagctgcaagtccagggcctgcagcagttgtggcctcaaggccagcgagcagtggatcgccgagcagcagtacattctccccgactgcgaccggcaacatataactttcaccatgccgcatctgctttggccgttcttcaacaacaactga

SEQ ID NO: 433795 - DNA, 210 bp, Serratia marcescens
atgaaaatcgactatcgataccacggcgccaccgccagcatcacgctgaccagcgtcagcgctcaccgtagcgggttgttcttcacgaaaaccgtgctgtctgactgttcggcagcggtactgaaagagtacctacggggcgagcacggcagcactgctgcctcaaccatcttgaagatccagtctcacctcaacgccggctccgtctga

SEQ ID NO: 433796 - DNA, 621 bp, Serratia marcescens
atggataagaaatactcgctagaaataccaatggccatatttggaactgatggttatgcagtttctgcaggatgggtaatgacatataccgccacacccgatagggagtattttcgtgcatggcgggaatatgtggccgtgggaacgactcttcctgcaatggcttatactgacgctccggcactacccgccgaatcaggtaaggcagttcaccgtaccacggatggcaaggtttgggaaatcgttccagattaccgcggacagactgcttacagcactgaaaccggcgaacctaagctcgttaccaatatgggggatttgccggccacgttgatattgcatgcccctcaggctccgtatgacaattgggatggaacccagtgggtgatagacaaagacgcgcagcatgctgcagaggtgttgatagccgatgcgaagttgaaacagttacatgatgaagccgatgaactcatcgaaagattcagacgtgccgttaaatacgatatggctaccgacgatgaaactacacagctcgaagcctgggagcgctacagcgtgctgctgagtcgtgtcagtgcgctggatacaccgaacatcgcctggccggataagccggcataa

SEQ ID NO: 433797 - DNA, 285 bp, Serratia marcescens
atgagtaaagccaacctatcaggcaccttgcaactcgaaatccttgactgtctgtttgcaagtcatcccatccccctcacctggtatgcgttcgtcgaacaatttggcgaactgaatgacccttacctcatcgtcaatatacgacagctcatggccgacaaactggttgcccctaaagcaattaccctcagcgccggtcaggaacggattgtcacctctaaattaaagttgacgactgagggatatcaatttatcgcgcataatccctccaggcataaatactaa

SEQ ID NO: 433798 - DNA, 780 bp, Serratia marcescens
atgaaaaagatattaagtttatttactgcattggcaatgcttccctctataaacgctatggcagctttccctcatactcagtgggcagttcatgtcactaatttcacgggttcccttcccaataagcccagtgaggggtttaagaatttgacattccctatagctatagtgtctgggcctatagaacgaaagttttattactcacaatatgtttattttaataactcatcaggcggaggggcatattatacaggggttcagcccaagggcaatgggcaggctagtatcatattctctttctttggtaaaggtgcgcgagttattgataatgtgcattgcagtggtggcgctgatggtggtaacggcgtttcttgtgcggcaacggttccttttgaattgggtgtagaatatcacttaacagccgagctggttaaagagggggatcatgaaaatgtttgggagggctctattagcacatatggtaaaagtggccgccaaaaaattggctcgtgggccacacctaagacgatgggatatctttcggggtcaagcattgggtttatagaagattatacgggcattaagagctgtgcagatattccgacgacgacggctcgctttggtggcggatattacacgggtaaaactgcttccgaagaggtcaggggtgctatcacggcaccttatggcgtgggggtttgtaaaggcaaggtcgccttttcatcctcggtagatggcaagggaaatcgtaccattgtgcagcagaaaggtgtcgattaa

SEQ ID NO: 433799 - DNA, 834 bp, Serratia marcescens
atgctccgctgggcgcgccagcagggtattgaagtcggtatcttctgtgcgctccatacctacggccggcagctcaatcagcacccgcatatccatgtctccgtcacccgcggcggcctcgacatcaaacacagcacctggcggcagttgttctttaaaaagaaagaggtagagcaaatctggcgcaatgccgtggtttacctgcttcgcgacaactacgcgcaaatcaaccccggcgcccagccgggcctgggccatatccgtaacgaggaccggtggcaccgctaccttcatgcacaataccggcgttgctggaaagtgcacttcgccaaaaagacccgcggcgcctggcgcagcgtgaaatacctcggccgttatctgaagcgcccaccggtggcagcctctcagctccgacattaccgtggcggcgccgtggtccatcagtattacgatcaccgaacgcagcagcacaaacgccagaaaatcagccaggaggaaatgctgcagcgctacgtcagccatattccggcgcggcattttaaaatggtgcggtactacggcttcctggccaaccgcaagcgcggttcgctgttgccgaaggtctacgacgcactggcgatgacggtacgggaaaagcctaaacggcccgggtttgcggtgctgatgaaaggtttcctgggcaccgatccgtaccagtgtatcctgtgcaaaggtcggttgcgttttgccggcgcggtggcaggtgagcacgctaccaaactgctctcagacaggctgcatcggatggcgaaaaaacgatggcttcagactctgatgttggataagtgcgcctga

SEQ ID NO: 433800 - DNA, 648 bp, Serratia marcescens
atggctttcgtaggttacgcgcgtgtatcgacgacagaccaagatctggcaaaccagattgcggtgttaacttcagccggctgccgtaaaattttctcggagaaaatgaccggaaccaggaaagaagggcgccaggcactcgatgactgcctcgactacctgcgggaaggcgatacgttggtgatcacccgtatcgaccgtctgtcacgcagcctgcgcgacttacaaaatctggttcatgagcttgaagggcaaaacatcaagctcagggcgacagagcaggccatcgatacctcttccgcttccggtaaagctttcctggatatgttgggcgtctttgccgagttcgagacacgcctgcgccaggaacgccagcgggaaggcattgcccgcgcgaaagccaggggggcatataaaggaagaaaacccacagctcaggcgaaaacgcagcaggtgattgaattgacgctggccggtgtcacccgcgaagcggttgccgaccgattgggcattggcagggccagcgtctaccgaatattaaaaacctggcgacagcaacatcccgacgctattctgcccggagagcgggtgaagccttcgctcagccatagtgagccggcaaccgaacatgttacgatagcgccatga

SEQ ID NO: 433801 - DNA, 972 bp, Serratia marcescens
atgaaaaaaaatccaacgccccatgatgcaaccttccggcaatttctgactcaacccgaaattgcccgcgatttcgttgatatccatctgccggccgaactgcgggccatctgcgacctcaccacgctgaagctggagtccggctcctttgtcgaagatgatctgcgccagtatttcagtgacgtgctctacagcctgaaaaccacctccggggaggatggttacgtgtacgttttattagaagcacaatcctcgcccgataagcatatggcttttcgcctgatgcgctactcagtggccgccatgcagcgacatatcgaggcaggacataaaaagctgccgctggtcattccggtactgttctacaccggcaaacgcagcccgtacccttactcgaccaactggctgcaggagtttgatgatccgacgctggccgggaaactgtacaccggcgattttccgctggttgatgtgacggtcattcccgacgaagagatcatgggtcaccgcagcatggccgcactgaccctgctgcagaaacatattcgccagcgcgacctggccgaactgaccgacagactgtccgccattctgctggccggctatctctcttcgccccaggtgatttcgctgatacactatattatccaggccggtgaatcggcgaatgcagaggcatttgtccgcgaactggccctgcgggttccgcaacacgaggaggaactgatgaccatcgcacaacagcttgaacaaaaaggtatcgagaaaggtatcgagaaaggtattgaacagggtatccagaaaggtatccagttgggtgaacagcgcggtatggaaaaagggcgccaagaaggtgaacgcgaagctgcactgaaaatcgcccgcaccatgctggccaatggcctcgatcgcgattcggtgatgaaaatgaccgggctcaccgctgacgacctggcgcagatccgccactaa

SEQ ID NO: 433802 - DNA, 615 bp, Serratia marcescens
ttgactgataaaaccgcatccgtttccccggaaaacaccacctcagcgctcagccatctggcgttctgcgccctggcggcgctggggctggcacgccaggacggtatcgccggcacgccctatgccgaaaatctgttcctgatccgctggctggccaccgcccaaaagcaaaaacgcttccccaggagcgtggcgattgacatccagtggttactcgaacgtggtcgcaaacacggcccggccggccacctgcgccagcatcttgagtacctctttcgctcctgcagcggcaatctggccgctcagtccgacctgttccgtctcacctacgcctctgaaaccttgaaagaccagggctgggacaattatgtgctggacgcacacgagtggaaatccggcgtcgtgccgacaccgtcacagcataacgggttctatgtcgaaaaaacggcgctgaatgccgcctttgcccaggacggtcgccatctgcaccccgtcacctttcgggtggtcggtgacgccgaccggtttatgcacgtcatggcagaatacggtctgggcacccgacggctcggcagtacggcaaccggtcacaccatcgcactggagcccgcgtaa

SEQ ID NO: 433803 - DNA, 4065 bp, Serratia marcescens
atgaccgaacacaagaagacactgccacacgctgacaacgcggaaacaccagaggcagggattgcgcatctgcccgtccatctcaccgccatcctctgccagctcgccctgcatgacgatttggccaaatccgccctactggataacctgcatcagctggaaataagcccggttgcccaccgccgcatgaatcccgcagagatggcggaagcgctgaaagtgctgttggcccagggatggctgcaggagacgaacaaccgctaccgcctggccggtcatgataacggggtttaccgctacatggccactcaccccgccgtctggggggcttccccgcatcaccctggccattcacgcctgttaagcggcctgcgtacacgccgagcccggatgtggcacgcgcttctcgccggagacgaggcggcactgccgcaccacctggacgaatggatgacaaatccggggtattccccgccggcacatccggctgttcagctgttggctgacgaggccggcagacagacctttgcgctgttgaacgaggccattcagaccgcgctgctggccagctttctcgttgatgcctgttaccgcctcagtgactgttgcgcgctctatcagtatgcctgcaccttcagcgacgcgcggagcacgacaccgtccgcgttacgggagcccctggcattgcaggccctgtggcgtgacgaccagagccgccttgaccaaatagcgggggagggggaactgcccccgaccgtcaccggctggatggcgctgtgccgcggacaaaaagacgcggcgctcgaggcataccggcagctcgtcagccagtaccgcaaggccacgcgtaaacgcaagttgcacctgccccccttgccggccatgatggccgcattaacactgctggccaatcatgagcctgcgtataccgccacactgcgggaactggcccaccatgccatcgaggaggggggcggcagtggctggatcgtgctgctggggctgctgcatgaatgcgaaggtcagccaccgcagggcacctcacccgagcaggccacaacgccactcatcggcatggccggcgtctggctggcgctgctccggcactggcgcagcgataccgaagacagcgaacgcgggcagcaacgcctcgagctgttcaggacgcagctggccacccgcggctatcaccggctggagcaggacatcgccgagctgctccatcagcaataccgccagccgtcgcccccactaccacatccgctgagcgcgctgtatcggcgcagggcatcatgggaatacgccctggacgccctgagccagctgacagcggcggaaaatgccaatacgtcccgaatggcctggttcctgaccctgcatcgctacgacctgacactggagccccgggagcaaaaatacaaccgcgacggctggaccaaagggcgcccgctgtccctcaaacgcctcaacgacacggccgacacgctgccctggctgctggcgcaggaccggcaggcgttgcggcatattcactacacctcggcgtactccttttacgggcacagcggcacctacacgctggatgccgaggccgccttgccggcgctggttggccacccggcggtgttctggcaggatgcgccggacgtacgcatcgacattgaacccgggcaggtgacgctggtgataacggaggcgggggaacatctcgccctcacactccgcccgtcgggcatcagcgacagccgtggcctgctctgggaaaaagaaacgccgacccgcctggtggtctatccggtcagtgacgagcatcgcaagatagccggcattctcggacgggaactgcgcattccggccggcgcccgcgaccgggtcttgcagtcagtgtcgtccattgcgcccctgctgccggtccagaccaatctgcccgagctgacggcgcacattccgcatgtgcccccggatgaaaagctgtatgcccatctgctgccgcttggcgaggggttgcgtctgcagctgcgggttcacccgttgccaagcggcaccgccttcccgccagggcggggcggcgacatcgtcaacggcgagcacgacggccaggcgatacaaacccgccgcgatctgccggcagaacaacagcggctgcagcaggtactggcggcttgcccgatcctcgatgtatcggcaacggacaccaccgagtggcagctgaccgatacccaggacgccctggaggcactgacgcagctgcgcgcggttgatccggcgaagcttgaatgcgtctggccggaaggtgagcgcctgcgtctgggcggacgccgcgatatgcaggccctgaaactgcatgtccgccggcagggcgagtggtttgccctgtccggcgaactggcgctggatgacggcaaggtgttgcagctgcgccaggtgctgacgctcctgcaggaaagccgcggtcggttcatccgcctgggcgagcaggagtggctggccctggataatcagctgcgccagcgcctgcaacagatagccctgctggccggcgacagtgactctctcacactgaatacgctgacgctgccgctgttgaaaacgctcgccgatgaagcggggcagttaggcggtgacgccgactggcgccggcagctgcgtgggcttgaggacagggaaaaacaccagcccgtggtgccgtccacactgaaagccgaactgcgcgactaccagcagaccggattctgctggctatcccggttggcgcagtggggtgtcggcgcctgcctggccgatgacatggggctggggaaaaccctgcaggcactggcgttgctgctcgagcgtgccccgggcggaccacaactggtggtggtgcccacgtccctcgccggcaactggttgagcgaaagcgaacggttcgcccccactcttcgtctgcgggactaccggcgccgacgtgagatagcggacgtgggcgcattcgatgtggtggtggtcagctatggcctgctgctgcaggatgcgccggcgtttgccgaccggcaatggcacagcgtggtgctggatgaagcgcaggccatcaagaatgcacagacccaacgggcgcgcgccgtgatggcgctgaaggcggatttccggctggcgctgagcggcacgccaatcgagaatcacctgggtgaactgtggagcctgttccggttcctcaacccgggtctgctgggcggcctgaaaccgttcacccagcgatttgcaacgccgattgagcagggggaccggctggccagcaccacgctgaagcagctgcttaaaccgtttatcttgcgcagaaccaaatcgcaggtactggacgaactgccaccgcgcaccgacatccttcaccgcatccccctgagtgacgaggaacgacactggtacgaggccttgcgccagcaggcagtagagcggctggacaggggcggtgacaacatcaagccgctgcaggtgctgacggaaatcacccgattgcgccggttctgctgccacccgtcactggtgctggataacctcccgctggcgggcagcaagctggcggcctgcctggacatcatcgacgagctgcaggaaaaccaccacaaggccctggtattcagccagttcgtcgaccatctgacgctgttgcgcacggcgctggatgaacggggtatcgcctgtcaatacctggacggatcaacctcgccgaccgagcgagagaggcgggtggccgcattccagtcgggcgagggcgacctgtttttaatcagcctgaaggccggcggcaccggactcaatctgacggccgccgattacgtcattcatctcgatccctggtggaatccggccgtcgaagatcaggccagcgaccgcgcccatcgcatggggcaggaacgcccggtcacggtataccgcctggtgatggaagacaccatcgaggaacaaatggtcgccctgcacggacgaaaacgccaactggcagaggatttactggctggcagcgacggcgtgggccgactggacacccacgccctgctggcggtgctgcggggagaccctgagtga

SEQ ID NO: 433804 - DNA, 435 bp, Serratia marcescens
gtgaccgaacaggaattgtatgattatgcggtatcgctgctggcaaagaaaaattacgcctctggcgagatgcatcgccagctgagccgactgaccgaaagcacgggggatatcgcgcgcgttttacgtcgcctgaccgataaccacgcgctcgatgacgcccggttactcgcttatcttcttgagaagcttgttaaaaaactgcacggccccacgcgaataaagcaagagctgcgccagaaaggatttcccgcgccactgatagagcaaggtattgataacggtgacattgactggtatcagttagccaaagaagcccgcatcaagaaattcggtgacgcgttgcccgcagatccaaaggaaaaaaacaaacaaatcaggcatcttcagtataagggattcacgatggacatgatctttgaggcgttaagttaa

SEQ ID NO: 433805 - DNA, 420 bp, Serratia marcescens
gtgacaacatacccaattaggaaggccgccgtacttctcgcatgtctgtttatcctggcgggatgcaaagcccccacgaccagtgccgaacgccatgccaaacactttacctatgccgctgacgacggattcgaccctcatttcgccacgcgcaaacatgactcgataacattgtctgtaccgttctttaagcaattctgggaggaaggaaaaaaggatcgggaaaaaggtattacacaggaagaagcaaacaaacgcgcacaatatttttacagcgatgatttttttacttcttttaaaaactacagcgtattcgcgggtaaggaatacaacgtaaccaatacatcactaaaatggcgtaaagctatgtctgaagagacctctggtgcatacatggacgggtatgaagggcgtaattag

SEQ ID NO: 433806 - DNA, 1185 bp, Serratia marcescens
atgggtggtttcaattacggtggcggtaaaggtgatggtactggctggagttctgaacgtggggacggtacttcgccaggtggtggctctcatggcacgggtggcggtaagaatgatagcaatgatgccaaagctgccggttggaatgtgatgcgtcccggtgacaggcatcaaaccaagtggggaacggttattattgatggtgaaggtcatgccaccatgaatgggatcgtcatgacagagggtaactcgtcatgggtggattatgaaggcggctcaacacgtattcttgactcattattaagagataacccaccaacaggcagaaatattggtacaccaaaacaaggtaaactacgacaggggtctccggggcatcctaacgtggcagacgtaggccaactgtacggagataacagcgataagcaccaatactattctcgattgggtagtaaaacatattctgttttagttgataaaaatggtaatatagctttcacatcaatagcatcaggaaaggaaagtggcaataactccgctagaaattatgataaaaatgaagctgctaatcaggtgcgagagtatgtgaaagatgagaaagaattccttatggaagcgagcggtattattgcggatgccggcgagaagataagccatcatatcggtgggcaatataagcgttacgctgacgagattgccaataatttgcgcaatttccaggggcgtactatccgtggttacaatgacgcactggcttcttttaataatattatgtcaaacccgtcaatgaaagttaagcaaggggataaagacgctatcatcaatgcaatgagagctgttgatgcgcaggatatggcaaatcggtttggtcacttcggtaagtttttcaaagctgccgatatagcgctcaagattgaaaaaatccgggagaaaagcattgtcggctacgagaccggcaactgggcgcctctagcatacgaggtggagtccatgctgctgagtggattggccggtgctgtagcgcttggatttgtgacggctgttctgtcgtcatttgctttacccactttacttgttaccgcgctaacaataatcacggcaacaatgattgcatacggtacatcattcattgacgcaggattcgccgagcgatttaacaatgaagtaattcgaccggcaaattga

SEQ ID NO: 433807 - DNA, 522 bp, Serratia marcescens
atgaataacgaaacgttcatatggaaaaaattcgcgataattctcatcgtaggtttgttaccccttttacttttgtttatttattttgagttttcaccaaaaagttatttttttgattattttttggatttaacccaaagtgttaatgcgaatatatcatcaaccaacttggaactaacaaaaccgctaagtatatactgtaaatcatcacctttatttgccttgtatttcgtttttaaatttggaaagtacataaaactcaaagaaggcaagaaaaaatcaacaatcgtctttaattttatcgggttttctcttgtgtacataattcttctctatatttttgcgataggagaatttgatataacaaacggtaacaggttgttaaaggcaacagcatcaaatgactatgcaatgtttctatactatatagttacgttttccggtctttattgtttgtcattcctattctttttgatgttgacaaaaataccatcaattatatcgaagggacgacatttataa

SEQ ID NO: 433808 - DNA, 783 bp, Serratia marcescens
atggcgatgtttgatccgcacagcggaaaactgcagcaggtgcgcgaagtggtgcgtttcaccccgctgcagcaggacgtactgaaatttttggcgctggtgctgatggtgttcgaccacgccaaccgggcgctggggctgcatgagcctgtgctgttgctgctggggcgcggggcgtttccgctgttcgccttgctgtgggggtacaacctggcgtcgcggcctgtccggcaggcgcaggcgacccggctgtggatttgggccgtggttgcgcagccgggctactggctggtgatgcgtcatgacgggctggcattcaccgatccgaatattttattcctgttcgctgccgtgacacaggcgctggcggtggcgtcgttgccgatgcgcaagggcgcgcctaacccggtattggccggcggtgtactgctggcgttgtggtgggcatatggcgccacagacggcagttacggtactgccggcgttttggtgctgttggccagttatgggctgtgcgtttcgctgccgagttacgtgacggccgtttggccggtgcgcgggctggcgatcgtggcctggccgctactggtgctgatgctcaatgcccagctgggcggcacgatgatgctggccgggttgttgttgccggcactgctcatcctggggacgcgaccgctggcgacggcgttcaatcaacggcgcctgttgccgcggggttttttcctgcagacctacgtggcgcacctgctggcgctggggctggccggcgtgtttttacactga

SEQ ID NO: 433809 - DNA, 219 bp, Serratia marcescens
atgaacacaacccaaaacgtatcaacgacgcagggcgtcttgttaaccactgcggtcttgctgtccggggctgcgacgctctggggatatgtgcagtgggacacgctgagcgacctgccgctgtattggcgtaatgcgctcgtcccgctgccgctgctggtcttcatgggcatgaagcacctgcaggcgcggctgagcaaggcggctccgcatgaataa

SEQ ID NO: 433810 - DNA, 1407 bp, Serratia marcescens
atggcagacatcgacagtcagtcccgtaccgtcagcctgcaggacagtgagggcaacacccggcagttttccccagccagtgctgttcgagaaggtgtcacgctgtacaacccgcgcaccatcgaggtgagcgtgggcgaccgcatgcgcttttcgaaatcggacgtcgagcgcgggcatgtggccaacagcgcctggacggtcgaagcgataaaaggtgacgtggtcacgctttccgatgggcaacagacccgtaccgtcaatccccgcgagcagcaaccagaccggcacgtcgatttggcctatgccatcaccgcacatggcgcacagggggcgagcgaacgttttgccatcacgctcgagggggtggaaggcgggcgtgagccgctggtcaaccgggcgtcggcctatgtggcgctgtcgcgcgccaaggagcatgtgcaggtgtacaccgataacgaggccgggtggctgaacgccatcggcaaggcgaaggcgcgcaccacggcccatgatgcggtgctggggatggcgcccggcagccagaaagcggccgccgacctttacggcaaggcagtctctttatccgataacgccctggggcgcgcggtgctgcgcggaagccagcttaccggcgacacgctggcgcactatgtgtcgccaggcaagaaatacccccaaccgcacgccatgctgccgatgtatgacgccaacggcaaaccggccggcgcctggctggcgccactggcggacacccagggaaaaagcgtcgggggactgccgacgcagggtcgggttttgggcagtgacagcgcgcaatttgtggcgctgcaggggagccgcaacaacgagacccgtctggccgggacgatgcaggacggtatccggctggcggcgcgctatcccgacagtggcgtggtggtgcggctgcagggggacgacgtgccgttcaatccccaggcgatgaccggcggcagggtgtgggtgaatgacgagacgctcaaggccacagcgcgggagagcggcgcggccggcagtgtcatcacattgccggagagcccggaagaacgcctgcagcgtgaactgcaggcgcaggccgacaaactgggccgtgaaacgaacgcccctgacccgcaacggctggccgggcttaacgatgagcagctgcgtgcgttgcttgcgcgcggcgaactgcgcgccgaggacgtaaaagcgcgtctgccggaggcggtcatgcgggaggtgatgggtcaggatgcggcacagcgggtcgatgccgctgtccgccaggtggcgcgcgagccggtatcgacccgcagccggctgcagcaggacgaacagaacctggtgcgcgatacccatcctgagcgggaactgaacaaagagaaaaccctgggcggcgactga

SEQ ID NO: 433811 - DNA, 1491 bp, Serratia marcescens
atgaaaaactcacaaccagatcaacttcgtcgcctgttagttaaaacccctttacttgctccgttattaacaacactacccacaacagcgatagcgaaactgtcatcaccgctttatactggcaccatgcctatcctggggcaaacactgctgctgaaaaatgcagatatggttgtgacaatggataaagacaagcgcgaaattaagaacggatgcatcttcatcaaagggaatactatagttgcagttggtgataaaaatgatactcctcaaacggcagacagagttatagatctcaaaggccatatagttattccaggtttgattaatactcaccaccacatgtatcagagcttaacccgcgtagttcctgcagcgcagaacggagaactctttagctggctgaattcattgtattctatttgggaaaagctgacaccggaaatgatgaaagttgctactaaaaccgcgatggcggaactgatgctctccggatgtactactacaagtgaccaccagtacatatattcgaacggtataaagctcgaccacagtattcaagctgcacaggagatgggaatgcgtttccacgcttgtcgcggtagtatgagtttaggaaaaaaaaagggcgggttgccaccggactctctcgtcgaaaacgagacttctattcttaaggatacccagagagtgatagagcagtttcacgatgcgacgcgtggagcaatgattcgtattgtaatcgcgccatgttcgcctttctctgtcagcgaagggctgatgcgtgattcagtaaaacttgcaagagagtatggtgtttccttgcatacacatttagcggaaaatgttagtgatattgaatacagtaaaaaaaactttaacaaaacaccagcacagtatgtagaagatctcgagtgggtggggcatgacgtatggcatgcacattgtgtgaaacttgatgactacggtataaaattgtttgctcggacgggaactggtgtggctcactgcccttgctcaaacatgcgtttgggctcaggtattgcgccagtgcgccatatgttagattccgggattcacgtgagtattggcgtggatggttcagcatctaacgatagttctaatatgattgatgaagttcgtcaggctctattgctacaacgtgttggtttcggtcctgaagcactgaccgcgcgtgaggctctggaaatcgctacccttggtggcgctaaaaatctcaatcgtactgatattggtgtgttagctccaggtatgatggcggacattgcggtgtttaatttagaaaatgttaacctcgccggtgcaatgcacgatcctgtttctgctctggtattctgtaatccgggaacagttgcttacagcattattaacggccgcgtggtagttgaaaaaggtaaggtgataactgtggatgtgccggtgatcattgagaagcacaatcgattggcccataaacttgtggaaggctaa

SEQ ID NO: 433812 - DNA, 738 bp, Serratia marcescens
atgctgctggccgtcacccgcttctacaccgccaacggggccaatgtgatcaacccgggttacggcgggttcgcgccgccgaaaaatgcgggggagatggagagccgtctgcaagctctgctgaagagaaatcaatacctcacttccggccagcgttcgcaggcgaaaagtgattatcgccagacggttgaactgctccacagggcgctcgaatcgccgatgtttgaacggtattccggcacgctctggcacggcagtcatgctgccgtgccagaggcgttgcttgaacagggcaacaatgcccggttcccggggtttatgagtaccacttacgatccggcggtcgccaagagttatatggcgaaagggacgccgtttagcgttgaacaaagctatgtgctgcatcttgaaaaaggctatccggctgaagccaattcaatgattaagaaaaagagattcgatcttgaagtggcgaatggatcgaaacagccttacgtgaacatccgggtgacccggcccggacagaccgacgggagcgaccccgaaggggaacgtgagctggcatcgctgattgaacagctcaaaaccggcagcgtcgaggggctggatccggagacgaaagtggtggtgctcaggtcgagggcgtcagaagaggcggagatgtcagaagcgctgctggatgtcgcattgccggtctcaagggctgaaaaagcggaagcgcaaatgatcgcgcggtga

SEQ ID NO: 433813 - DNA, 1266 bp, Serratia marcescens
atgcttgaattccctgcggtggagtatatcgctcgctcttttttgcgccgaacgctggagaagacggcgattgttcaggcacgtgaccctgctttttccgtagtaaaaaataatccggatgccgggatcggtttcctggaaggatggagcaacaataatgcggaatgggcaaagcaaatgaacgcgctgctgaatgaaaacaagactaacgcccgcgtattaaccagcctggcatacagctatatcagaccttttcgcaacccgcagacactgcgcaaactggaagatgaggctaatgagtctttgctgaacagcaaagagtccaacccgcgtctggatatttttgccggttcaacggcgggggcgccgccgaccatgtcgaagccgatcaccactcagcctcacggctggccatggctaaaatacgtcgactggaacgccgcggaagcgttgggcaacaaaacctccccggactttattggcagtaggtcaagcagcgatccgcataaagggacgggcttcaagtttaagggcatgctgcaggcgataaagccgccgccgtatcgacgtcattcattttccctcagggaacgcgaccaacatgaatcggggtatggcggttttgttatcaacgataagtcgatgacctcaataggggcagaaaaaccgttggtggtgaactggcgtcagcagaatatgaataaaaaactgccgatgttttccggcccctccagcaccacgtcctatatgtatgaaattgcccgtttgctgaatctgcctgcagctgaagcccaggcattcaggctgcttttgttgggctggatgatccaggcgcgcgatcacagttttaccgaaattatgggggcgctggatgcctatgccatggagtttgatgagcggggacccacgtccgtacccagtgacgcgaacatggccaggggagccagacagagtggcgactggctgcgcgcctatgaagatttggtgacagaggatattgacctgcccgcgctggaagccaaaacccttattctcgaagggcaagcgatccatttgccggcgcagggcgccgttcacatcagtcgggatgagtttgaccagttcattacagcgggcaggggatatccggcgcaatatgcttcagatgattacttgctgaaaataggtgaggcggttgccagcggtggggaaacagaagatatctccgggctggcgtcagaacggatcctgtatgcaccgcaaaatagggaggatctcaaactctaa

SEQ ID NO: 433814 - DNA, 321 bp, Serratia marcescens
gtggagaaaacgctgacggtaacaatagaagccgggattgcacatcattatttctctgatgattatgcatctatcatttatgaagatgctgacggtaataagctgtatcacgatgaagtgatcggcagccagacgcagcagatgcgttcggtggtgttaccgctatccggttatggcggcgaggtgatccgtttacatcacgaagagccggacaaccgtttaatcatcaccaacgatatgcaacaggtgcgtttagccgaaaaaggcaaacagcaaacttaccgtataaccccggtggggctggaacgaattgtcgattaa

SEQ ID NO: 433815 - DNA, 705 bp, Serratia marcescens
atgtataatttacttacattaagacgagatatcgaatcacttggtactaaaagtagaaaaaatccttttgtgtgggaggaacaaaatggaattgtcgatgaggagcttacaaatcaattccataatggaagaagacgtaagaattatataaacgatctggctgagtattgttggcttgtttatgaaaaagcatttatatcaactgggccaatgctaataggccgctcaggtgatctatggaaaaaaagtgtattagcacaatttaatttaaataaagatgaatatctctggaagaaaaatactactggcaacattttaatgatggataaatgggctgctattcttaatgatgcatgggtgcttggaggtgttcaccggcatgcaaattttcatctgatgtccttactggctccagaaaatctctggaattatcaatctggttatcatatagtaacagcaagggaaattttcggacttcaaaaattcggatatgaaagagtggtaatcgggaataaagttatatttaagtgtaaagatatctcatctgctgataatgcgaatctacgatcctatagtttactaatgaagacggaattgtcacagcgagaatcttcaattaataaaataattttagaacccgttgctggtttaaataaagacatacaaaattttgactattcaagattaaagcgacaatggtattga

SEQ ID NO: 433816 - DNA, 504 bp, Serratia marcescens
atgaaactcggtgtatctccggaccggatttacctcgataaagggctaaccggctcaaacaggcaacggcccggacttgatcaggcgctggccgctgtgcgcagcggtgatacgctggttgttcccaagcttgaccgtttggcgcggtcagttcctgacgcacgagaaatagcggattcactacaggccagaggcgtgaagctggcgctgggagccagcctctacgatccggcagatcctatggggaagatgttttttaacgtgctggccacgtttgccgaatttgaaggcgacctgatacgcctgcggactcgcgaaggtatggcgattgcacgggcgaaaggaaaattgagggggaagcagccgaaactgtctgaaaaacaacaaaaagagctgtgccgtatgcgggaaaccggccagtactcaatcagcgatctggcggaactattttcggtgtcacgaccgacagtttacagaacactggcccgcagtaaggaaagctaa

SEQ ID NO: 433817 - DNA, 3048 bp, Serratia marcescens
atgacaactcgtaacaaagcgacaggcaaaagtgaacgactggcggttttaaacagtgctgagcaggaagcgctgtatggcctgcctgatttcgatgatgctcagcgactggagtttctggcgctggatgaatctgaactggcgatggcctgcagccgtcgggggcttcacgcgcagatttattgcatcatccagaccgcttactttaaagccaaacacctgtttttccgcttcgggtgggatgatgttccggacgactgtagctttgtcctgagccgttatttccccggggagtcactgcctgacaaattacccactaagcacgagcgctatgctcagcgggaaaaaatctgtgcgctgtatggttaccgcccctggtcatcggcactgtcttcaccgcttgaacaacaggccgcccacattgttcaccgcgatgtcactcccggctttgtcgccacagagttgattatctggctcaacgcgctcaaaatcatccggcccggttataccacgctccaggagctggtaagccggacgctttctgatgaaaggcagcggctggggcgtatcctgacggagcggcttgatgacgccaccatcgatggtctgaaaaagctgattgaacgagatgataccctttcccggttggcgatcctcaggcaggatgcccgtgatttcggctggcgccagatggtccaggaacgggaaaaacgggccatactggcgccattgcaccgtaaagcctgcgacatcctgccggcactgaatatttctcagcaaaatctgctttactatgccagtctggcaaatttctataccgtttatgatctccgtgaactgaagcccgatcagactcacctttacctgctgtgctatgcatgggttcgttaccgccagttcagcgataacctggtggatgcgatgtttttccatatgaaacagctcgaggatgagagccgcggcgtggctaaacagcttctggctgacgtccaggaaaaacaccggcgtgaaacgtctaaaatcggacggctgttatcgctttacgttgatgacagcgttccggaccccaccacctttggcgaagtccgtcagcgtgcatggaaaatcatgccgcgggaggcgctgaaaaccaccgcacagcgcatgagtgtaaaacccgtcagtaaactggcgctgcagtggcaggccgtggacggtatgacggcattaatccggcgtaacctgcggccattatttttgtcactcgacctcaccagtgtggtccacggcagcccgtgggcggaagcgctgagctggctcaggatggtgttcagcaaaaagcagacgctttcacagcggtcactggcggaatgcccgccgggcacattaccggagcggttacgaccgtatctgctggagttcggcgaggatggcgagcccacaggcctgaacgccgggcgctatgagttctggctctaccgccagataagaaagcgttttcaggcgggtgaattccacctcaatgacagtctccgccaccgccatctttctgatgaactggtaccggaaggggaacaggccgctgtgctggctgaaatgaacataccgtttttgcaaaagccggttaaatcgcagctaaaggcgctggagtccgaattgcaccggcagtggaaagcctttaaccgcgagctgaagcaggggaagctgaaacatctggaatacgataaagaaatgcaaaaactgacctggcataaatccgtggtcagtcgtcataaggcgcaagaaaagcgattttatgagcagttgccattctgcgatgtaaccgacgtcttccggtttgttaacagccagtgccggtttcttcatgccatgaagccgctgcagccccgctatgccaaaaagaatgccgatgcagacagcctgatggcggtcatcgttgcccaggcgatgaatcacggtaatcatgtgatggcacgaaccagcgatattccgttccatgtgctggaaaccacgtacgaacagtacctccgcctggcgtcactggtcacggccaatgactgtatcaccgatgccatagaggcactgccggtttttccgcactattcgtttgatccggaaacgctttatggtgccgttgacggccaaaaatttggtgttgagcggccgactgtaaaggcccggcattcgcgtaaatacttcggccgtggtaaaggcatggtggcctacacgctgctgtgtaaccacatcccgatcaacggttacctgattggcacaaacgactatgaagctcaccatgtctttgatatctggtaccgcaatacctcagaggtgaaacccacggccatcaccggcgacatgcacagcatcaacaaagccaactttgcgatcctgcactggtttggcctacgctttgagcctcattttacggacctgaatcgacagttacaggagctgtactgcatcagagatccgtcggcctataaaaaattcctgatccagcccgccggacagattgaccgtgaccttatcatccgcgaaaaaagcaatctcgatcgtattgtcgccacgctggggctgaaagaaatgacgcaggggacgctggtccgcaaactgtgcacgtacaccacgaccaatccgacccggcaggcactatttgaatatgatcggctggtacgcagcatctacacgctgaagtatctgcgtgatccacagctggaacgcaacattcggcgttctcagaaccggattgaatcttatcaccagttgcgggccgcagtggccaaagtcggtggaaagaaggagttaactggaaaaaatgacattgaaacagacatcagtaaccagtgcgggcggctgatttccaacgcgatcgtgtattacaactcggcgatcctgtcgcgattgctggagcggctggaagcggaaggcaatgccaggggcattgaagctctggccagggtatcaccggtggcctggcagcacattttgctgaacgggcattataccttccagagcagcgatgagattattgacctggatgcgctggttgccaggctgaagctggggtaa

SEQ ID NO: 433818 - DNA, 558 bp, Serratia marcescens
  misc_feature (358)..(367): n is a, c, g, or t
gtggatagattcttcatagcgcattacatgagtacggcggtagtcggggtttatggcttggcgtttcagctaacctctatcgttatgctctttttcggcgtaatcaaccaggcgttccaacctttcatttatcgcaagcttaaagcgaacgattttagaggggtcgagctcattcaatatggttacacagctctggttatcgtttcgtgcattatttacttctttattttgccatttgctttcccgtatctgtttaatgctgagttcaatcgcgccatttattacttcaacattcttttgcctggaactgcatttttatcgatttattatatttttacgcactcactgttttactatnnnnnnnnnngtaaaaataaattaatctcaattattaccatgggttcgatgataacgcatttgattggtatatttgtcatcaccatgacagaaatcaaagttgagtatttctgcctggtttatgcaatttctagtttttatgcgtgtgcagtgactttttattgtggcaagcgacagatcagtattgagaggaaaagatga

SEQ ID NO: 433819 - DNA, 210 bp, Serratia marcescens
gtgatacctataatttgcaccagccgcgtcactatcaccttcaccatgccgcacttgctgtggccgttcttcaataataactggccgcagctcaacgacctgtttcgctgcgccacccgcgccatgctcaggcacgcgcgcaagctgggcatgaacgtagcgcccctatggggcgagcacggcagcgctgctgcctcaaccgtcttttag

SEQ ID NO: 433820 - DNA, 723 bp, Serratia marcescens
atgaaaaatcctttatcgttaaaagtttttgctaccaatcacagtgcaaatatgtttattaagtccatgtatgacgaatgggatggtaattgggtgatgtcgttcgaagagtttgctgcgatacgttattacaccgataatgcttacaaggaaataaatagaaccctgagatcgaccgcagaaaaagataaattagtttacccagccttcatcaatgcaattcgaacaggtataacaaaacttaacaaaacctcagaattcatggcgccaaagaaggtttatcgagtagtggttaccaaaaaagacagtgaagcattcgatgtacgcaaatctttcttggtagataatggatttctatccacgacagaagacgtaaaatctctcgacgtcctgcttgataatcacttgaaaaatgaaataaaatcgcttactgaatatgtaaatggcaaggagatgataatcatgataatatttggttggagcggtggtaagatagaaagtctatcatttcaccctcgcgaaagagaagttctctttaatccatcgataaagatgaatattttattttcccactctgaagaaattgataaaaaggacaaaaaatctggagaggtcgtaaaaatcactactcgtcacattgtaatggaagaagaagaagaagaagatgcagtgaaaaaagttaacaagccaacattaaaattacgccgaaaattaagcttgtag

SEQ ID NO: 433821 - DNA, 948 bp, Serratia marcescens
atgtactggccatttcaggcttcttcggcaagcaaattaaagaaagcggtgtggcatctgcttgattcttataatccatttatggctcgtgccatacgtaaggagctgcgcaaattttctccggatgtggtgcataccaacaacctcagcggtttttccgtcgcagcgtggcgagtggccaagaagctgggggcgcgcgtggtacacacgactcgcgattattatctattccatccgaacggcacgttgtttaaacatggccaaaatatggacgtacagtcgtctgcagtgcgcatcgcatcttttctgaagaaaaaagccagtcagcgcgtagacgtttttgttggcataagtaaatatatttccgccttgcatcgggaaaatggatttgcgcgcaacgcggtacatacgcatatctacaaccctgtcgccgcgatagagtatgtaccgaccgtcaacgaaaaggtcaggatcggttttgtcggtcgcctcaccgaagacaaaggttttgatgagttttgtgctctggcaaaacaggccagcggcgatccgcaggttgcattctacgccgccggcagattcaatggtgacgcagctggcgagaagttgaaggtgttagcgttggaggcaggtattcatttgcttggctttatcaagattgaagagtttatgacgcagattgacgccgttgttctaccaacgcgatggaatgagccctttgggcgaaccgttgcggaatcggccatctctggtaaggttgtgtatacgcctttcaatggcggagtggcagaaatcgcagctttttatgataatattttcgagctaaaagatttttctgtcgccagtgtggttagcgtcgtgagagaaaataacaacaaaccgcgtcgttcgttttttgaactagaaaaaataaccgatgcttatgagagcgtgtatagagggtcataa

SEQ ID NO: 433822 - DNA, 801 bp, Serratia marcescens
atgctccgctgggcgcgccaacaggggatcgaagtcggtatcttctgtgcgctccatacctacggccgccagctcaatcagcacccgcatatccacgtctccgtcacccgtggcggcctcgacatcaaacacggcacctggcggccgctgttctttaaaaagaaagaggtcgagcaaatctggcgcaacgccgtggtttacctgctgcgcgacaactacgcgcaaatcaaccccgatggcctgccaggcctcggtcatatccgtaatgaagaccggtggcaccgttatctgcatgcccaatatcgccggtcctggaaagtgcacttcgccaaaaagacgcgcggcgcctggcgcagcgtgaaatacctgggccgttatttgaagcgccccccggtagccgcttctcagctgcgccactaccgcggcggcgccgtggtgcatcagtattacgatcaccgcacgcagcaacacaaacgccagaaaatcagccaggaggagatgctgcagcgttacgtcagccatatcccggcccgacactttaaaatggtgcgctactacggctttctggccaaccgcaagcgcggttcactgctgccgaaggtctacgacgcgttggcgatgacggtacgggaaaaaccgaagcgccccggatttgcagtgctgatgaaaggcttcctgggtaccgatccgtaccagtgcatcctgtgcaagggccggttgcgttttaccggtgccgtggcgggcgagcacgccaccaaactgctctctgacaggctgcatcagattaaatgctgcatatga

SEQ ID NO: 433823 - DNA, 891 bp, Serratia marcescens
atgattaagattagtgtagttataccgacttataaccgcagtgagctattaaataaaactcttacctcattaacactgcaaacacttcccgtgacagattttgaagtaattgttatagatgatggtggtagcgataacgctagaagtatttgcgatagctataataacactttaaatatacgctatttttggcaatcagatttaggttttagagctggaaaagcgcgtaatattggtattactgccgcagaagggaagtatatactatttattgatgcaggagtgctcttgcaccaagaaactttacacgggcacctttcgctacatttatccagccaacatcctttggtttgtataggctatgtatatgggttcgaagttcaagagagcttgctgaatagcattgataaatatatatcgccacataatgtgaaagcatctataggcgttttaaaggagatgcaagcattagacatccgccaagtgcaatatgatgagtttggatataatataggaagttggccggcgccatttgacatattctggacctgtcatgtgtccgcagaaaaaagtgaactgataaaagtcggtatgtttgatgaaacgtttaactcatggggaggagaagatgttgatttgggcgttagattgtaccttgccaataataaattcttaatgtcaccttcgttaagctcaattcattggcctcatcctaaagaggttagtaaccataaaattgagacaaaaaatgccgcttcacgaatacatgataagtataagttatggcaaacatccttctataatgtagaccttaatgatgagaagtactctctaaataaagtcatatacttacacagccttgataaaggaaaaaacgatgccgctatatga

SEQ ID NO: 433824 - DNA, 546 bp, Serratia marcescens
  misc_feature (517)..(526): n is a, c, g, or t
atgaaaaaaaatatagttatagctgatgatcaccctgtgtttcttattggtttacggacagttgtaaactcatcttttggtgaaaaatttaccattagtggagaagctcaaacggtggatcaactactaaggattttgctgactcagaagccagatgtattgctaacagatttcaatatgccaggtatgcagcaaactgatggtttgcgattaatcagtatgatacgacgaaagtatccagatttaccaatagttgtaattacagttatgactaatcctgcacttgtaaagtctattctatcaactggcgtttttgcagtgatcaataaacaagccttaacaacagaacttactgcatgtttaaatgcgttgttacttggtcgccgctctccaggtgcaacctatgagcaggctcacacagaatcgatgagccctagggaactcgaagtaattagattgcttgctcaggggtatactgtaaatcaaattgccactatgctccatagaactaaacagnnnnnnnnnntacgagtgtctggattatga

SEQ ID NO: 433825 - DNA, 522 bp, Serratia marcescens
gtggtgaatgcaggcggtttcaataccaccggtttcttgccaaaagaatcacgtcaggcgatgtacgaacgcattggcgccgctctgggtgaaatcaatcaagaaggcgttgaaatcatcatccagacgatgcctccgttcccatggcactttggtggtcaaagctaccataacctgtttgtcgatccggacgagattaaagcgttctgtgagaaatacggctaccgcatctgctatgacacgtcgcattccatgatggcttgtaattactaccaatgggatcttcatgagtttacccagaaggtcggcccttacaccgcacatatgcatattgttgatgctttgggagtggatggtgaaggggtacagatcggtaaaggcgatgtgaactttgacgagctggctgatgatctgcggcgtcatgcgccgggagcgcagtttattcctgaagtgtggcaggggcacaaaaaccaaggggaagggttctggcatgcgcttaacttcctggaaaagtatctgtaa

SEQ ID NO: 433826 - DNA, 339 bp, Serratia marcescens
atgggggctgcggccttgtcggtaggggacattctcggcaaggtcatcggcttcatcatattgccttatttgacagcacacctaggcgcgtcggggtacggcgcgctgactctttatttgtccgttattcagatcttgatcattttcatttcgttcagtggtcaaggtctgttgccggtcaaatacatgcaggagggggaagggagctccctggtgttccgcagagataacatcgccttggcattcgcgtcgagcgcgctactggtggctatattctacattgtcacactggtcgccacaaacgccctgttgcgtatactttttcaccggatgagataa

SEQ ID NO: 433827 - DNA, 357 bp, Serratia marcescens; identical to SEQ ID NO: 423760

SEQ ID NO: 433828 - DNA, 324 bp, Serratia marcescens
atggaaattgtagttatcgcgctgcttatagcttttttggtgctcgtagcccagttgggacagataatttcattgcagaagaaaagcatcagcgagacaaaaacagtggctgcattcctggatgaaataaaccgcaatttagggcggcatactgaatccatatttgacgtcacagatcagttaaaaaacagcgtggagtctatagagtcaaaggtcggcgacattaaatacgttatggacgtaatagaaaaatacagtctaccggataaagagcaaagaaaagtattagaccaagtcaaaatcgacaacgaaatttatcggtag

SEQ ID NO: 433829 - DNA, 2682 bp, Serratia marcescens
atggcaggcccttgggagaaatatcagagcgcgtcggcggccacttcaccttcagaagggccgtgggccaaataccagcagcaggccgaacagtcgccaccgcaaaccggtggcgatattgtttctgcggctgagcagcgtttcgggctccctgcgggcctgcttagtgcggtgatcagcaaggagagcagcggcaactctaaggctatcagtccgaaaggggccatcggtcttgggcaagtgatgcctgatacagcgcgcggtatggggtacgatcctgaagagctaaaacgcaaccctgcgatgcaggttgaggccgccggccggtatctgaaacaaatgctcgacgcgcacggcaatgttactgacgctctggctgcctataactggggccccggcaacgtgcagaaatttatgcgtggtgagaaaacgcaaattccagcggagacggttaactatgtcaccgacccgcgtttcgcgcagtggacgcaagccgccgcgcagccaggtggcgaaggtgaactggctcagctatcgcaacaggcggcacaaccgtgggcgcaggcggcgccagagccgactttcgtagagaacctcgagcaggccgggcgaggcttggcacaaagcgctgtgaacgtcgccaatatccctgggcaggtggttaacaccgcgctcggcgccgcaggcgtaccggcagaagaccaggttatgcagttgcgcttgccggaaagcatgaggcctacagacccctatgcgcagatgggggcggagatcggcccgtatcttatccctggcctcggcgctgaacgtactgcggcggcgttggcttctacggctggtgctggacgtgcagaacgggtagcaacacaagcggcgaacatgctggcggaaaacctccccggtgcgattgcgcagtccacccagaataacgacctgtcgggcaacctcgctaccggcctggctggcagcgtgatcgggcgcggattgctggccgctggtgggcgcgctgcgggtgctattcgcaacgctgcgcagcgtgaaggggctgcgggggtaaccgccacggcaacgccagaacaggccgtatctgctcctccaggagcacaggcatccgtaatgccccccgagcaaggtgtgcaggatgtggccgcgcgtgttggcgctgccgcggatagagagactgcgccgcggatggcagacgctgcgcgcgatgtcgccccacggcaagatgttatcgacgccgctaagcagttggggctgcgcgaagacgacttgctgctgtcgcatgtatccggcaatcaggcctatcgcgatttcgaacaggcgctgaaatccgttcctggttcgcagctggcggcgcaggaaaaccaggcgctcaccaagatcgctaaacaggccgcggatcttacggatgcagccggcgcgctgccggataaagccgcgatgaatgacaagtttctgtcctcatttcaacgtggtattgcgactgttcagaataaatcagaccagctctataaccagatctcggccgccatccctaaagggcagaccgtcgaagccaataacatcattcgctatcttgatggcaaagcagacgaattgggaggtgcggagcatctatcaacgatggaaaagcgagtttataactctgttgctcccgtgggcactgaagcaactgcgccgacttatgcacggttggacaacatccgcaagcagatcggacaggcgatcggcaaaaactcgggaccgttccgcgacgaagagacaggcgcgctgaaacagctttacgcgaacctcacggcggaccaggaacaggcggtcgtcgctgccggcatgggtgacaaatggcaggctgccaagaagctgatcggtgttcgtaccacgatggaagacgcgctaactggactgctcggcaaagacctgcgcggcgacatcggcacaaaagcagcattggcgatccgcaatctagccaagggcgacgcgaaagggtttcgggcgctacagcaggatatcccttcgccacgcatccggcgtgaggttgtggccacatcgttgcgcgatgctttcagccagggcagccgcaaggagaacgaattccatctgccaggtttcgtggactggtatcaggggatgaagtcttccggcacgctgccgatggtagagcaggagctcggcgcacgaactgccaagcagctacggaatcttttcaccgtttcgcaggcagtgcgccaggcacgagaaagcagcatccaaaccggccgccttaacgctttcatcaagcaattcgatgcagaaggtggcacgctggacaaaatttaccgccacggcaaaggcgcgttagccactacggtgctgggccacattcctgttgtcggtccgacgctgagctacggcgccgtagccggtatggcggccaaagaagccgcccgcccggcgcgtagcgttgctgccgatcgtctgctggcatcacctgaatttagatcggtcgttaagcaggcgaaagggggcaagttaccggagaaggggcagcaggtaatcaaccggaaaatggagtctcgtatcgccaattcccctgcgtggaaatcgttctacagaacattgacgcgagaggagaagcaggcgatcgcgagggtgggtattattggatggctttcgggagaggccgacggcagagaatattaa

SEQ ID NO: 433830 - DNA, 852 bp, Serratia marcescens
atggcagacgataacctcaaaaatcccgtgacgatccaagcttcgcgcatcgacgcgacgttgttgccccaaaaaatattctcgcaaccctatctgctctacgtcattcagcaggggctggagttcggtctggttgcagataaggccaacgaggcgggccagggcgcttacgatgctcaggtcaagaatgacgagcaggatattgtgctcgataaccacgaagttaggatcaccgccgcggaagaaacgctcgttaaccatgaacaaaggatttctgctgcggaagaaaaactggttaaccacgaaatacgcattacagcggctgaagctacgctggtgaatcacgaaaccagaatcacttctgccgaagcggcgctggtgaatcacgaagggcgaatcaccaccctcgagggcgacgtcgattatctgttagatgaagttgcaaatcagggtactcgtctggctaccgcagaaggcgatatcgataccctggaaaccaactcggtatcgaaggcggtttcaacgagccagtctgtgcaggctacgggcggctcgttcctcgtgggcaacgtcgcaacgcctaccacggataagttgcaggttggtggcaacgttaacgtcagcgggtcgtacaaagtggcgggcctgcctgtcctcggcgcgcgccaaaccggctggactgccgcaaccggtacggcgaacaaaggggcgttcaacgctgacccgtcgtttaccgtcggcgccatctattcgcaaacagaagttcaggccttggccgacgcgctcaaggctgcgtgccagcgcatcaaagcgctggaggacatggcgcgcactcacgggatgattaactga

SEQ ID NO: 433831 - DNA, 219 bp, Serratia marcescens
atgcaagccaaccacatcacataccggaacggctggcgcctgaatggcatgcccgccgacgccgcagaaatcagaccgatctttgaagatcgccaggctgccgcgcatgccgtctgggaacaatacgagcagggcaaggccgctctgcgtgaagaaaacttatcgccggagcagtaccaggacgcgtgccgccagcttgcagactcgctggggatctga

SEQ ID NO: 433832 - DNA, 207 bp, Serratia marcescens
atgtataccgcagatgcaatcgcatttttcaaaacgaaagcagccttagccgccgctgccggagtccaaaaacccaccgtttacgcatggggtgagttagtgccagaaggtcgcgctgctcgcttagaacgcatcacggaaggcgcgcttaaatatgaccctgcgctataccaaaaccgcgacgtgatcaacaagggtgcagcttaa

SEQ ID NO: 433833 - DNA, 387 bp, Serratia marcescens
atgaaattacccggcgagcgcatacgtgcgcgtagaaaagaactgaagttaacccagcgcgctctcgcgaagatcgtgccggtgtcacacgtcaccgtttcgcagtgggaaaccggcgatagcgaacctgggggaaagaacctattcgccctaagcaaggcgcttcaatgcacccctacctggattctctacggggacgatagtcagcagccaggagagccggaggagttaccgccacaacttgatgagcgagaaaaagaactgttggatctattcaaggctctgcctgagtctgagaaggaatcccaccttgcaatgcttcgcgacaaagttgatgggttcaaccgtctgtttgaagaactgctaaaagccagaaaatccaaataa

SEQ ID NO: 433834 - DNA, 525 bp, Serratia marcescens
atgagcagaatacacagcaacacggccatagctatttctgccgatatgtcgaagcttcagtctctgcttgaagattctgaatatgatggctcggaactaacgccagaaatgatcgccgacacaatggaaggtttagagctacaactcggcgacaaacttgattcagcatttattcacgttcgcaatcttgaggggcaatccgacacgctggcggcggaaatcaaacgtctgaccgaccgcaaaaagtcattcgagaactgcgccaagtcgatccgcaagtacgtgctggcgtgcctgctggccagcggccagggctccattaaaaccaccgcaaatacgttcacagcgcgcaaaggatctgccagcgtggtggtcgacaatgccgacctgctaccggatgaactggtgactgtgcaaacggtggtagcgccggacaagaaagccatcaaagaggcgatcgagaacggcgtggaagtcaaaggtgcgcatatcgaaatcggcgagccgtcgctgcaagtgcggtaa

SEQ ID NO: 433835 - DNA, 162 bp, Serratia marcescens
gtgaatgagatctcggagcaactgagtctcagcccgaaaacggtgaacagctaccgttaccgcatgttcagcaaactgaatatcagcggcgacgtcgaattgactcacctggccatccgacatggattgttcaatgcggagacgttgttaagcagtgaatga

SEQ ID NO: 433836 - DNA, 756 bp, Serratia marcescens
atgatgagcaaacgtcacgttatcggcctgctggctaccacttcgctgctggcgggggctttggcccctgcggcgaatgccgccatcgcactggatcgcacccgggtggtgtttgatggcagcgtacagtcggtgagcctgagcgtcagcaaccagaacaagcagctgccgtacctggcgcagggctggctggaagacgcgcagggcaacaagatccagagcccactgacggtgctgccgccggtgcagcgcatcgagccgggcaagccgagccaggtgaagatccaggcgttgccggcggcgaagatgctgccgcaggacagggagacgctgtactacttcaacctgcgcgagatcccgccgaagagcaacaagccgaactcgctgcagattgcgctgcagacgcgcatcaagctgttctaccgcccggcggcgatcgcgccggaacgcaatgccgcgccgtggcaggagcaactgacgctgaccaaacagggcgacaagtacatcgtcaataacccgacgccgtattacgtcactatcgtcgatgcggccggggccaaaggtgcggccagcccgcataattttgaaccgtttatggtgccgccgaagggcaacacgccgctgacggtaagcgcagggagcgtgggcggtagcccggtgctgacctacatcaacgactacggcggccgtctgcaattggcgtttaactgtcgcggcgggacttgtacggtggcgccggagaaaaaagtatcgtaa

SEQ ID NO: 433837 - DNA, 486 bp, Serratia marcescens
atgaaagcgcacaactgttggcagtacattagctgcctggctctgggcattatcgctccgaacgcctgggcgagtaacagcatgctcaccgtgacagtgaccgtgcccgcgcttgattgcgtcatcaatggcaatcaacctgtagaggtcaatttcggtcaggtgttggctaaccgtgtgaatggtgctaactaccggcggctggtggattacagcgtgtcgtgccctaacggttatcagaatgccatgaaaatacagctatatggtaaggcagcggaatttgatcctggtgtgttggatacgaacatatcagggcttggcatccagctgtttagtggtgatagcaaattgccggtcaacgattggcttaattttacctaccccaatgtgccggcgctgtacgccgcgccggtcaaacaagagggcgccacactggtttacggtgaattcagcgcagcggccgtgatgcgggtggtttatcagtaa

SEQ ID NO: 433838 - DNA, 753 bp, Serratia marcescens
atgagctttatcgaggtggtggaggttaatgaccgcattgtatccatgactgtcaaatacgtggtgcgagactttcccattgatgatcctacccctgcgccggcacaatgcgtaagctcgggatgccgtgtaggggtggcctattggttcgataattctttgacaggtgtgacgaatggtggtggaggtacggtatccatacccaaaggcactaagacggtgggggatattgcgcgtatttacagtcaaagatatcccttgggtactgttcacgaagtagcaatatatcacttcgctgctaataaaaagccttgtattgggatggcttcatcgcgatcagacggagactatactctgttgccaggtaatttatgcaactacttggatctccgaaatgttcacaccaacgcttgttatatagatggtatgatcgaattgcagcatggcattgtggcgaacgatatgcttaataatcatagcgtaagtgccgcggtgaacttacgctgtttgcaaccggcgacggtgaaaattacgatgcccacttctgagccttatctatggttaaataattcaagaactctgcgcgcatcgatatttgttgatggcagttctatactgggaggtgtgaatattcagattcctggtgaacgagtaaataagacggtaaactttagttccaagttaattaagacggcagagattgaagctggtaattatagagccagcagcgtaattgtcctggagatattgtag

SEQ ID NO: 433839 - DNA, 543 bp, Serratia marcescens
atgaagtcgataaaaattatcattaaagatgaaaacaggtattttgctattggcctgcagcgaagtatcgaggaatatgcgctgaagcatgctaaacgcgtgacttttttaacctcggatgatgaagaacatcccgatatcgtttttgtctcatcggtacagcgcatccagtattggcgggtattatggcgttatggcgccgcgtcgcatattgtgacaatcggggaaagaatgctcggtattcatgaggagaaatctctggtgctgctacgcacatgggggtgggaagcgcttaacacgctgctgacgaacctgtttgccaatcggtatggcgcgacacacccattggtgtctcatccgtttacttaccgtgagtgtcaggtgatcagccatcttcgaagagggatggaccaggtgcagacggctaggaaaattggcgttagcgtaaaaacggtacatagccataaacgctcggtgatgaaaaaactgatgctgaatcgccaccgagaatttatgtattggttaatatcgcaagatgactaa

SEQ ID NO: 433840 - DNA, 882 bp, Serratia marcescens; identical to SEQ ID NO: 422323

SEQ ID NO: 433841 - DNA, 408 bp, Serratia marcescens
gtgaacctggcgtacgtgaacttcgagaacaacggcatcgcggaaagcggcggcgcggcggcattgcgcggcgacaagcagcacacggatgcgacggtgtcgacgctgggcctgcgtgcggataccgaatggcaggtgagcgcgggcacgacggtggcgctgcgcagcgaactggggtggcaacaccagtacggcgggctggagcgaggcaccgggctgcggttcaacggcggcaacgcgccgttcgtggtggacagcgtgccggtctcgcgcgatggcatggtgctgaaggcgggggcggaagtggcggtgaacgaaaacgccacgctgtcgctgggctacggtgggctgctgtcgcagcaccaccaggacaacagcgtcaacgccggcttcacctggcgtttctga

SEQ ID NO: 433842 - DNA, 255 bp, Serratia marcescens
atgggcttcctggagcacctgcttcatggggaaatactggcccgccatcaacgtaaacaggcgatgcatacctggatagcgaccttcccggcagtgaaaacattcgaggagtatgacttcaccttcgccaccggggccccacagaagcaaatccagtcgttgcgttcactgagcttcataaatagcgtcagtcctcatcattacaacggggctgacgccggaagaatcatagaacagataccgttcttacggtaa

SEQ ID NO: 433843 - DNA, 1236 bp, Serratia marcescens
atggatagcacgttaaaagaacttgagagaaagtgcgcgcctatagattttatcgaaccattggctaaaatggttttagatgatttagccatgtgggcaaatgataatatatattcaaaacactctggccggttaacctatgaattgcctcttgatggaaatattaatgcagggtgtacaagctatagtcattcacgctatctaaccaatattacaataaacctagggatgattcaggaaatatacatccagtcatttacttatccaggttacatcaaaaacctaaaaagaggaaactgggatttcaacgctattgatgactcctttaatgatgctgagtttttatttgaaggcggcatccctccaagagtccgtgcgtctaaaacggtcatttccatggtagagctatacaaaagcattcctgaaaacaccaattcaatgtggactgatgaagagttaatttgccgatttactatgtttgaattaatgacttcgtggatattttttcatgaacttgcacatcacgttcaagggcattacaagattaaaaatgaaaaaaaacaatcggttacgtatcatgaattagattactcaaacaacgctaataattccaaccctgtagtagcccccaatatcatcgcatataatattgaccaacatgcccgagaaatacttgcagaccttgaaggcctgcatttgacgctgaggatgatggttaggaatgacaccttaacaccacctaacacttttttgctcttatatgtccaatcctcaatgttcaatgtgttctataaattatctgagggaaagtatgtggagttagatagcattaaagtttctcatccccaccctgtaattagaaacaaatttgtacatgccctttatgtctctgttatgagttgggatttagatgatgagaaataccaagattgccgtcagtcttttagacgaggctttgaatactatgttgtaaagtcatcattattagctggaatgatatgggcaatgagacaacctgattacagcccagatacaatgcctaaattccttaaatttaatgatgaaaccgagtatgtcacagattatgactacctcatgaaattgacctctagcgctcaaaggcaatcatccatcatatcaaccatgcatatcatcgatggtgatttagataatatttttaaattaacaaaattagaaaatatatttactcattttttggataccaatgaagaataa

SEQ ID NO: 433844 - DNA, 702 bp, Serratia marcescens
atggagttcattaaaattatggctggtttatttttagagttgttgggggggttacagtccagcggagagctgtctcaatggcaagtttttttcatttttcttctttctatgcttttacttgtcgctttttttagggctaaaactattctaggctttgtgaatgggataaaaaacagtcgactaaatgaactaaagagtctttgttattttttagataaggatagcattgaggctagaagtattaataaagaaatagacaaaatagttagatatcgtgtgtgtggcgttagtgatgttgccatacaaaacttgatttttaaattgtcagaaaaaaacagcgatgttatagcaccatctttttttaaaaaatatcacatatggataggatttgaaaatggggttttgattttcaagcaaggcgctgtgttttggattgatagtgtttttttcgctttttttgcatttcaatatattgctcttgcatttttgtttttattcatttcaatctatcttggcgatgcgttagcattatggagacattttttactttacgcgatggcgatgattcttattgttatgtttagttcgttttggaaaatggtaccaacacgtaaagagtgtcgtcttttgaaatatgtggttagcaagcagttcgaagatacttgtaacgatccagagcctgcggataattctgctctatag

SEQ ID NO: 433845 - DNA, 207 bp, Serratia marcescens
atgaaaatcacctcggcagaggtgttggcgcatacactacacaatgaacttaaaagcgtaatcaaagagaaagtgctcatttttctcatcacggaaatttttctttatctgcattctactcctgaacttaataatttgatgtggtttaaatttattgttgctcttggagataaaccatgcttcattaacggttgtgtatacgagtag

SEQ ID NO: 433846 - DNA, 1098 bp, Serratia marcescens
atgactgagataaaccttcttcttgtggaagatgcaaaacaggatcagcaatcctgccaaaatgcagcaagtgacttccaagaagataacaattgcacaattaatattaaagtatgtgctaatgttaatgatgcgctaattgcgttaaatgagtcatactatgatggcgcaatcatagatatgaggttggccggtcagggcaatgaagggaatcaagtcataaatcgaataaaggacacattcagacgaatcccagtggcaattatgaccggtacaccagatgcagcagaaacagacggtttcccactgattaatatatataaaaaaggcgagacaccatattcagaaatcattactgagttatgtgggatatacaaaacaggattaacaaagataatgggtggaagaggagaaatagagaaaaaccttagccagatttttgttaaaaaccttctcccacaaagaaagaactggaccgcttatggtgaagaagataataccagaacagaaaaagcactacttaggcatgcactaaatcatcttattcaacttctggatgatgatgtagataaatgctacccagaagaaatgtatatatacccccctatttctccgagaattaatactggatgcattgtgaaaagtaaagattccgatgatttctatattattatgaatcctgcctgtgaccttgcagagcgtaataatggcggttgtaacacggatagggcattgcttgcaaaaatagactctgaatctgattttctatctgatgagcttataaaaagaaagattaaaaaaccggacctcaatgaattagctaagaaggacaagatatcctcaattaataatattaggcaaaatagaacctcctactatcattggcttccaaaaacagaattttttgcaggcggatttattaactttagaaaaatagcaacacatacgcaggaagagtttgatcagacatttgaaaacccttcagttcaaatttcctctccattcctgaaagatatcgtttcccgtttttcatcttactatgctaggcagggtcaacctgatatagaccatggaaaagtgcagatagtgaccgattaa

SEQ ID NO: 433847 - DNA, 2157 bp, Serratia marcescens
atgaacgagagtggaatatataaaataaggcccgctggccgacatctgctgaccattggtagagagttgattcaagatagctatgctgctgttgttgaactggtcaagaatgcttatgacgcagactctccaaatgtagatatttgcttcaaagccaaggaagatcggatggggtacacagtcacggttcaggatcatggccacggcatgtctagagatactgttattaataaatggatggtgccgtcaaccagagataaattggagcgaaaaacaagcccgaaagggagagtaatgcaaggaagaaagggggttgggcgttatgccgcctccgtacttggttctgatcttcttctggaaacagtttctaccgatagagaaaaaaccacagcttttgtcgagtggaaaagctttgaaaattctgaatatttagatgatgtagaaatactggtagaaagtcagatatcagatgataatacagggacattactgacgataactggtgatatagaatatatagccgagtggaataaaaaacagtttgacaaactcagatttgaactaaagaaattaatatcgcccataggttctgtggtaagaaaagaaagcctggactttgaagtcactctgaaagtttcaggcttcccagatgttcctgacattgatgaaacaattgaaccttatcctatttttgagctttttgattatcggatatcgggaaaaataaattccgatggaaaaggaaaattgcatttcgttctccaaaaagccagaaataccgttgatgaaaaaataccaatcaacttgagtaaaccgacagggtgtggagaactcacatttgatattcgagtttatgatcgtgaagctgatgccatagagtctttaatcagtcgtgggctgaaggatgagtatggaaattatgttggcaagcttcaagccagacaacttttgaatgagtctaacggtatcggtgtgtatcgtaatggattcagaatccgaccactcggggatgctgattttgactggctaaaattgaacgaacaacgtgtacaaaatccatcgctacgtatcggtagtaaccaagcaatcggttatgtgcttattcaatctgaagagcaatccagtttgattgaaaaaagtgctcgtgatggtcttcgtgaaaactcagcgtatgagcaacttaaagaaataaccagagaagtaattgctaaattggaggagcgccgcttcagttaccgtcgcaaggcaggtctgagcaaaccagccttgaaagttgaaagggagctagaaagactcttttcttttgacagcctgaaaaaggaaatccggaaaaagttgattggtggtggcatggctgaaagtgcagccggtgaagttattgccctgattacccacgaggaagaagaaaaagccaagactgcagaagatattcgccaagctgttgctacttatcaaggacaggctactctcgggaaaattattaatgtagttcttcatgaaggccgtcgacctttgaattacttccggaatgaagttccccgcatatccagattcgggaagaaattttccgaaactggagacaaaaaaaacattgaagaaatactgagcattacaaaaggtgtcgaatccaattccaccattttgtcagatttattcaaaaggctagatcctctcgccactggaaaaagagctgctcgcaaaaaattaaatataaagagtgaaatcctaaacagctttgcaatattccggcacgaaatggaagagaataatataaaattcgaagtcaatggcgatggagatataatattttcagcatggagccaagatatttacgccatttttgccaatctgattgataatagtattttttggatgaaagaaaaatcatcagtcagaaagattactgtagatattgctgaggaaaatggacaattagcgtacattaactttagagatacagggccaggcatagaaccttccctcattagcgacagcgttatttttgaaccccaattcagtactaagccatctggaagcggtatcggattagcaattgccggtgaggctgcagaaagaaacctcttggaacttaaagctctagaatcatcaaatggagcttattttagacttcagataaaggaaatcaataatgactga

SEQ ID NO: 433848 - DNA, 1263 bp, Serratia marcescens
atgaaaaaaaatttatgttttcttgacttatttgccggtgcgggtggtttgtctgaagggtttattcaggcaggtttttcacctgttgcccacgtcgaagttgatcaagcagccagctttactttgagtacacgaatggcatatcactggcttaagtccgttggcagggaaaaactctatgccgaatacttggaaggaaaaatctcccgaagtgaactctatgcagttgttcccgatgaaatcaggaaatcagtaataaatagggaaatatctgaggaatcgttggcagaaatctttcatacgatcgatggactgcttcagggaaaaaaactaaatctgattgtgggtggccccccctgtcaagcctactcactggttgggcgttcccgtgatagcaaacgaatggttggagacaagagaaattacctgtacattttttacacagagtttctacagcgttatcaaccagagtattttgtctttgaaaatgttttggggctgctgtcggcaaaagacaatgaaggcaatagctattttgaggccatgcgccagttgttccgggagtctggctacgagacagaatatcgcatactaagtgcagatgactatggtgttctgcagacacgcaaacggattattctggtcggtagaaaaggatgcatgacagggttctatcctgaacctgaaaaatggaatcccgcagttagagtagcagaagtatttaatgatcttccatctctcaaagcagcagacggtcaggtttccccctgccaattgaaaccctacgctggaaaatggctgtatgaggctggaataaggaatgatgcaatgcctgtgacttggcatcagtcgcgtccgaatacagctcaagatctggagatctatagaagggttgtagagcaatggaaccagaagcagaagcgcctagaatacaatgagcttccagattacttaaaaactcataacaacagaaccgcttttgtggacagatttaaagttgttgctgctgacttaccttcatctcacacggtggtcgctcatttatcaaaagatggacactactatattcatccagatatcagccaaaaccgctcaatcacaccgagagaagcagcaaggcttcagactttcccggacgactattattttgaaagtattaaaccgaaaccaggaagaacagccgcattcaggcagataggaaatgcagttcctgtattgctagccagaaagattgctgaaaaattgaaggataaatggatatga

SEQ ID NO: 433849 - DNA, 201 bp, Serratia marcescens; identical to SEQ ID NO: 5005

SEQ ID NO: 433850 - DNA, 561 bp, Serratia marcescens; identical to SEQ ID NO: 15275

SEQ ID NO: 433851 - DNA, 2967 bp, Serratia marcescens; identical to SEQ ID NO: 59353

SEQ ID NO: 433852 - DNA, 378 bp, Serratia marcescens; identical to SEQ ID NO: 16790

SEQ ID NO: 433853 - DNA, 660 bp, Serratia marcescens; identical to SEQ ID NO: 52324

SEQ ID NO: 433854 - DNA, 504 bp, Serratia marcescens
atgccgggcaaccgcccgcattatgggcgttggcctcaacacgattttccgccatttaaaaaactcaggccgcagtcggtaacctcgcgcatacagccgggcagtgacgtcatcgtctgcgcggaaatggacgaacagtggggatacgtcggggctaaatcgcgccagcgctggctgttttacgcgtatgacaggctccggaagacggttgttgcgcacgtattcggtgaacgcactatggcgacgctggggcgtcttatgagcctgctgtcaccctttgacgtggtgatatggatgacggatggctggccgctgtatgaatcccgcctgaagggaaagctgcacgtaatcagcaagcgatatacgcagcgaattgagcggcataacctgaatctgaggcagcacctggcacggctgggacggaagacgctgtcgttctcaaaatcggtggagctgcatgacaaagtcatcgggcattatctgaacataaaacactatcaataa

SEQ ID NO: 433855 - DNA, 411 bp, Serratia marcescens
atgagttcactcctgcagctgttgccctatttcgaagccgtcgcgcgcctgggcaactttacccgcgcggccagccaactgggcgtcacgccgccggcggtgtcgcaaaacattcaggcgctggagaatcagctgggagtgcggttatttcatcgcaccagccgctcggtgcgcctcagtgacgagggccggttgttctatcagaaggtatcgccggcgatgagccagatcgacgtggcggcggacgacgtgcgcgctctgggcgcgcagccggcgggcctgctgcgcattacgctgccgcagctggccgcctcgctgctggtgatgccgcacctggcggcgtttcagcggcgctatcccgagtgcagctggagctgtttaccgaagaccgcttttccgatctggtgctag

SEQ ID NO: 433856 - DNA, 645 bp, Serratia marcescens
atgagctcacttctcgttcaacgcgatgtcgccgcattattttatgccgtcataggaaaaaaagccgacattaaagatatcgattatttttcaaaaaaattggcacaagaaaacctctcccttgctgcattaacaaataaattaatcaattctgaattaggtcaatcacgcctgtcgcaattaaataacagtgaaaaaatacagtttatttaccataatcttcatggtgccgacgcatcggaggaaatactcgcttaccttctcagccaattggaaaaaagtggcgatctcggaagccttgcggcttacatgaacaacgaacttttgcactactccgggcaagaagtcattttaaaagaacaacaagccgcgttgattgaaaccgtcaatcaaacgctattcccctcttttaacggctcagtatcagacggagccgaatgggtgcagggtttttattatgcagtgaaatcaacgatgacatccgatggtataaactattggggcaacgtgataaataagcaccctgaacagttaaatctgattgcacaaaaatttgtcgatggtaaaaaagcgttgtcgaaccttagcgacaatgatttcgtcatcaaaattcatgaaaatattttttggatcagcccccgataa

SEQ ID NO: 433857 - DNA, 246 bp, Serratia marcescens
atgatgcagctaaccttgggtcgccagcatttcaccctcgatgagcgcgacgcgctgtttgtggcggaagctatcctgttgcagcgtaaagagcctggcgtcgtcttaccggagcaccgcagtgaaaaacacggcgttattcgtctggcgagtcgccaggcgcagccgcgcctgttcagtgccgggccggtgccgctgacctgcgcggcggccgatacccgcaacgacccgcttaccgactgttga

SEQ ID NO: 433858 - DNA, 264 bp, Serratia marcescens; identical to SEQ ID NO: 431104

SEQ ID NO: 433859 - DNA, 255 bp, Serratia marcescens
atgatgcgctgcccgctgtgcacccatgcgtcctatactcgcaccagtcgctatatcacggagcggacgaaagaggcgtattaccaatgtcagagcctgacctgttcttgcacattcaagacggtggaaagcgtcgataaaatcctgtgccagccgatacaggcgcaaccggtcgatgagaacgccttgccaccgccggagaaacggacgttgaaccgctatcgccgttacaacagcaatcctaccttgcactaa

SEQ ID NO: 433860 - DNA, 2286 bp, Serratia marcescens
atgatagagtctataggcgtttctcaagctggttcatatggaaatgacgttcaatatatgatgcctctagtgaaaataaattacatatatggctcaaatggtgccggaaaaactacaattagcaaaataatccataatgctttagattttccaacttgccaaatcaaatggaaaaacaataatcaattaactccttatgtctacaatagagatttcgttgtaaataatttttctggagatagtattaaaggtatttttactttaggtgaggaaacaaaagaactcacagataacatagacaaattgatacaacaaagggataaagagcaaagctcaatagattccaaaaaaagaaatttggataacaatgataatgcaaatttaggtatctatcaaaaacttgaaaaaattgaattagatttcaagaatgattgctggaatcaaaagaaaaaacatgatgactacttctataaagcattcgaaggtttaagaaatagccaagaaaaattcaaatcaaaggtactagatgagctatcttcaaaagaagtggatttacaccagttaccatacttaatatcgaaggctagtagtgtttactcagactcactaacagtccacaatacaattccattaccaagttttaataacattgaaaaaatagttagtgatgaaatatggaaagagaaaatacttggaaaagaagatgcaagcgttgctgaagtaataaaacaactagataacagtgattgggttaaagaagggataaaatactatgataaacttgaaaccaaatgcccattctgccaacaaaatactcccagtagtttgaaatcggatttagaaaattactttgatacgaaatacttagaaaaaacagaaaatattaatgcattactaaaaaattatatccatgaatatggtttattcgatgaatacgttgcaaaaataaatgaagggaactatgcttttcttgatttagatttatttaacacaaaatcccaattaattctatcgatactatcaagaaatatagataaagcaaaaagaaaattggctgaattaagtacacctgtcgatatgacaggatttatggaacttagcaaagaattattagacatcattcttgtagctaacagtcaaatttttgaaaataatgcactatataaaaacaggagcatagaaagagaaaaactaacaaaagaaatatggcattacattgttaaaattgaactggccgataagataaataaatataatactaataaggatcagttaaatagagcaaaggaagggttaattaaaggtttagaaaaagacaaagtcagattagatggtatcattgaaagtatatccagtgaggaatctaaaagaaccagtgtcactccaacaatcactgctataaataagatacttttatcatttggtttcaaaaactttagccttgcacctacctccgattcgtttagctataaagtcgtacgtgaaaatggtgagaatgctctaagcacactcagtgagggtgagaaaacttttatcacattcctatatttttataatctcatcaaaggaagtaattcagcatctggggtaatgaacgatcgagtagttgtctttgatgatcctatatcaagtttagatagtgatattctttttatagtcagctcattaatgaaaaaacttataaaagatattagagccaataatggaagaataaaacaggtctttttcctaacccacaacatttattttcataaagagttaactttcgatatggatagaaatttagatactgctcgagctgatgaaacattttgggttatcaggaaaaaagataaattatcgttcattgaaagccatgcatgcaatccaattaaaacttcatatgatttactatggagtgagataagacgcccagatattaattgcacaacagtacaaaacacaatgagaagaattcttgaaaattactttaaaatcttaggtggatttaatgtatggaaactcgaaacacattttgaaggcgatgaaaaaatagcattcaattcattgatatcttggattaatgacggttcgcaccattcaaatgacgatctttacattactctagaccaaaactcagttagtaaaaaccttactatattccagaaaatatttgaatacagcgataatgctgcacattataaaatgatgatgggagaatattataaggctctaccgaatgatgatgatattaatgtcgacgttcagcaaagtgcaaatgatgatcaaaatgtcgaagtaatttaa

SEQ ID NO: 433861 - DNA, 1263 bp, Serratia marcescens
atgaagctcaacgccagacaggtcgagaccgcaaagccaaaagacaaaacctacaaaatagccgatggtggcggtttgtatctcgaggtttcggccaagggttctaaatactggcgcatgaaatacagacggccctctgacaaaaaagaggatcgcctcgcttttggtgtttggcctacggtgacgcttgctcaggcaagagcaaaacgcgatgaagctaaaaagctgttagtacagggtattgacccaaaagccgaacagaaagaagctcaggccgagaattcaggggcatatactttcgaaaccattgctcgcgaatggcacgccagtaacaagcgatggagtgaagaccatcgatcgcgcgttcttcgctatcttgagctttatatcttccctcatatcggttcgtccgacattcgccagctcaaaaccagcaatctgttatccccgattaaaaaagttgatgccagtggtaaacacgacgtcgctcagcgcctgcaacagcgcgttacggccattatgcgttatgccgtacagaacgattacatcgactcaaatccagccagtgatatggccggtgcgctatctacaaccaaagcgcgacattaccccgctttaccctctagccgcttccctgagtttcttgctcgtcttgctgcatatcgtggccgtgtaatgacacggatcgcggtcgagctttccttactcacttttgtacgttccagtgagttacgtttcgcgcgttgggatgagttcgacttcgataaatctctttggcgagtacctgcaaaacgtgaagaaattaaaggggtacgttactcgtaccgtggcatgaagatgaaagaggagcatattgtaccgcttagccgacaggcgatgagtttgttagaccagcttaagcagattagtggagataaagagctgctttttccgggggatcatgatgcgactaaggtcatgagtgaaaacactgtaaacagcgcactgcgtgcaatgggatatgacacgaaaaccgaggtctgcggacatggttttaggacgatggcgcgtggtgcattgggtgagtcagggttatggagtgatgatgcaatagaacgtcagttgagccacacagagcgtaataatgtgcgtgcagcttatattcatacttctgagcatttagatgagcgtagattaatgattcaatggtgggctaattatttagatataaatagaatgcaatatgtgacaccgtatgactttgcaaaggaaggaaatctgtag

SEQ ID NO: 433862 - DNA, 423 bp, Serratia marcescens
atggttgcggtctgcaacgccgccagtgcttatgaccagaagcaccgcgcgcttttgcgcacctactccgaaatgacgctggaggttacgctggatcaagcctcaaccctgatccgcgcggttgctttacgactccatgcccagtcgcgtctcggccacgatgaacagcagttccataacaacaacctgtgcgcgcgagatccacacggtgtcgtgatgcaggaagtcatgcaggcactggttgaacgtgccgctaatttccacctgagcacagagggcgaccctattcttgaggcgattgggttgtacggcccggatttcagtggccttgaccagaggctaattaacagcccggcctcacgaatcaaactcggcaaggaaatcgccgcccgcaaacaagccaaagcggaagaggaggaataa

SEQ ID NO: 433863 - DNA, 246 bp, Serratia marcescens
atgatgagctgccctttctgccgcagcggtgcacacacccgtaccagccgctatctgacggaacagaccaaagaggcttattaccagtgccagaatattgactgctccagcccctttaagacgcgagagagtatcgaacacgtgatccgccagccattgccgccacaaccgctcatggcgccggtgtcaccgccaccacagcagcgaacgctgaaccgctacggaagccaccaccacgtacattga

SEQ ID NO: 433864 - DNA, 1251 bp, Serratia marcescens
atgatcctatgcccgcaatgcgatttattgatggcgttaccgccgttaagcactggcaccaaagcgctatgctcgcgttgcagtactattctcatcacccgctgggaagaaccgtacaagcggtcgataggttacgccctcagtgcgctgttcatgctgctgctggccaatatcttcccgtttatcactatgcgcgttgctggcttcagtaacgaaattaaactgattaatatccctcaagtaatgctggaagaaaactacgccagcatggccacgctgtttatgctgctcgtacaactgatcccagcactctgcatgctggttatcattctgctgtgttccaaggtgcgcatgccgctagtattaaaagaatggatggccaagatgctgttccagtttaaagcctggtgcatggttgaaatcttccttgcaggggtgctggtcagttttgtcaagctaatggcctatggcgatattggcatcggcagcagctttgtgccttattgcctgttctgtctgttgcaagtacgcacttttcagtgcatagaccgccgctggctttggcgggagatagaaccggcaccgcgcttgaatcgtccgttgacgacaggacgtaccggcatgagtcagggcctgcgctcatgtcgttgctgcacggcaatcctgcctgctgagatgacccactgtccgcgttgtcacaccgagggctatgtacgccgccgcaacagcctgcagtggacgttggcgctactgatgacttcggccatgctgtatatcccggccaacctgatgccgataatggtcaccgaggcactgggcaacaaaatgaattcgaccatcctggccggggtgatcctgctgtggggagaaggctcctatccggtggcgatggtgatttttatcgccagcatcatggtgccatcgctaaagatgttggcgatcggctggctgtgctgggacgccaacggcaaagggaaaaagcgcgacgacagcgaacgcatgcatctgatttatgaagtagtcgaattcgttggccgctggtcaatgattgacgtgtttgtcatcgccgtactgtctgctttggtacatataggcttattgatgagtgtctatcctgcaaccggtgcactgttattcgctctggtggtgatcctcaccatgttcgctgcaatgacattcgacccccggctgacctgggatcgggcaaacgaaacaataaaaaaggaactgccacgtgacggaaagcaataa

SEQ ID NO: 433865 - DNA, 1800 bp, Serratia marcescens
atgagtaagcgcattttaaatcagaagaactttctcggaattacgacccttaattggcttcgaacggaccttgcaagagagacgtgttttgctcattggggagggccccatgccgatctagtctctcgtaatgaatttatccgtgattataatcagtatcactttaacgatgatatcgcgggtttgtggcctttaacacctgaagtggtaacggatattccagccgataaacggatcgatggtgtttctgaaataattttagactctatcattcgattccccctgagcattcgctctattgatcgtattttcaaagacaaaaagaatgttttctgccgtaaaacattaaacatgacgacattaggtggaggaaaggtagttaaaactggcgattataaaaatatccatgctcgatgcgttgttttgattcgtcgaagggaaaaaggctctttaggcgatttcaagcgctttattcatgacagccttgctcatcaattaggccttaataatcatgttattgaagtccgcagccaggtctttgcgccatggtttaaggcacagtggaatgcaccggatgccgctcatggcatgccaccagagtataaataccatgcatcaattgtcataggagcgaacgataatgccggattgctatcagcactagctcaggtcgctagtctcaatagtgaaattgcatattattgttctgtaattcatgcttactcggtcgctaatacgttgatcaatcgggttgacgggcggacaacaataccgcagctcaaacccagtgcaaaaccgcgattagaacctgtacgacgtgttcttcctcatccccctgagcgtacttatcaacctacgggtacgacgccgttcaaagtgcttgaactgttaaaaagtgcagttaaaagaccagaagacgttatctctgatatggcaggcaacatttattatggagggcaaggagggaaaatttatcggtatagcctagaaactgagaacgaaaccattatagcggatacaaccggtaggccgttgggtctcgaatggctgaaatgcggctctctgctggtttgtgatgcccaccgcggtttgcttaaggtcagattagacgggcatgtagaaacattggtagaacgcgttcatggccttccattacgattctgttcgaatgccaccgcgagcgctgatgggacaatttggtttactcaatcgacgaatcgctatgatttcgagcattacgaaggggcaatgattgaacacagagggtcagggcagctgctgcggcgtgatacggatgggcaagtccatgtgctattggacggtttacacttccccaatggcatcactttagacagttcagagatgtccgtcatttttgcagaaacagacgcctaccgcttacgcaggctctgggtacaaggtccgaaagctggtcatctggagatttttgcagataatttgccgggttttcctgacaatatttcgcgtatgcaaaagggttacttctgggtagccatgggagcgccacgcaataaaagcctggaccgcatgggaacaatgccaggcttccttcgtaagctcatttggcgcctgccaaaatttatgatgcctaaaccgactcgaactgtatgggctatggccttcaatgaagatggcggaatatttgccgatatgcaaggcaatgcggataacttcttcacagccactgccgttgtggaaacaaatggtcgcctgtatatggcttctgttgaagcagacggtattgctacccttgaaattacatttatgcctaagcgatag

SEQ ID NO: 433866 - DNA, 1542 bp, Serratia marcescens
atgacaacacttcactttgataataaaagtaagttttcacctatatctgatttgatcgctattcatgctaacgaacgttctgacactgtcgctttacgcttcagggacgtatttgttacttataaagagttacagcattattctgaacagattttggcagcgatacagtataacaatatccccccgcacactgctattgccattgcttcgtccaacccattgctagctactttagcttttctcggcgttattagtgccggttgtgtcgctgtacccatctctctatcgtcgtctcccgaacaaatcgcatcggtaattgcagatgcatgtattccgttaatatttttggatggcgagtttcttgaatgcctgccatcgactggcatcagggtcgctaatcttgacgagttcgatagttggttagcccctgaagggtttgctaccacgtatgttgatatatcgcctgcagacccctttaacattatctattcatcagggaccacaggtacgccaaaggggattatccatacgcatggcatgcgttggagtcaaatagcagcatatgggcagattgttccgcaatgtgactctgccgtcactttgatcgccacgccgatctattccaatacgacattagtcagtttgttgccgtcgcttgcttgcggggggactgctgtgctgatgggcaaattcgatgcttatgagtatttagttgaagcgcagaattcacgagctacccacaccatgctggttcctgtgcagtaccaacgtattatggctttaacacaattcgatgattttgatcttggaagtttcatttttaaatcatgtactggtgcccctttttctcccgagttgaaggccgatgtgatccgccgctggccgggagcattgctcgaaatttatggaatgactgaaggaggagggacttgtgttctcttggcaaatgaatgccctaacaaactccacactgtaggcaagccagtgcctggctgcgaaattcgcttgattgatgcacaagggaatgaagtcaattctggagatatcggtgaggtcgtggggcgttcaaatatgatgatggctggttaccatggtcgcccggatatgacccatgaagccacctggattgatgctaatggcaatggatacatacgacacggtgaccttggacgcttcgataaagaaggttttttgacactccttgggcgtactaaagacatgattattagcggtggctttaatgtatacccaactgatatagaagctgttttacgaacacaccccctggttgaagattgcgcggttataggtattccctcggttacctggggggagactcccttcgccttctacgtatctaaagacgacttgcttaaccctcatgaagttatcacttgggttaatgagcgtatgggtaagacacagcgtttatccggcgcacaggcaattgctcaattgccacttagcgctacaggaaaagtactgaaacgcgaactgcgcgcgctatttctgaccgaacactctaccccattagtattataa

SEQ ID NO: 433867 - DNA, 936 bp, Serratia marcescens
atgaatgagcccggcaacatcagcattcgcgacttgctgatttttatacacgtttatgaaacgcagaatttctctatggtggcacggcgggaaggaatctctgcctctcaggtatcgcgcgtcatccatcagatggaggatgcgctagggcagcaactcttttaccgcaatacccgggcgatcattccgacggaaagtggccatctttttatccgctatgcgcgagccatgacgggcagcctggaggaggcgcggcgggaactcaacgaaagaacgcttgagccttccggaatggtccgcataaacgcaccggtgttctttggacagcggcatgtggcacctgcgttacccggcctgatggagcgatatccaaggctcagcattgagcttgcgctgaccgatgattacatcgatccgcaccgggatccggctgacgtcattttccggattggcacactgacggattcctcattccatgcgcgcgtgtttggccagcagttctatcaccttgccgcgtcaccggattacatccgccggcacggcatgcctgaatcacctgaagatttcgctcgtcataaatgcctggtctatcgcggctcgtcaggaccaaaccgctggctgctgcgtaggatcggagaggaatgggtgcattatcccgtctcgcccctgatggcatccaataatgctgaaacgctgctgattgccgcactcgaggggatggggatcgtgctgtttcctgactggctgattggcgaccgtcttaagagcggcgagcttgtcgtgctgttgccggagctggagacatccataaaaacggaaccgcagcacatcgcagcaatctacccgaatgcccgccaccctccgctgaacgttcggacgattatcgattactaccttgacgcgtttggttcaccgctttactggcagtcggaataa

SEQ ID NO: 433868 - DNA, 435 bp, Serratia marcescens
atgcaactgatattgattttaatcgtaattgccggaggaatggggctgtccgtagaggcaggattgctcgggccactgggcggggaggtcggtgacctctgggccaccttcagcgtatttggagtgggcgcggcgctgacctttctgttgatgctatttttcagcccgcgtaacagcccatcgttctttgcgcagccttcctggcaactgcttgggggcgtgcttgggccgatttacgtcatcatcctgactgtggcaacaccggcaatcggcatcgccatgaccatgatcggcatcctagcaggccaggtcttcaagagcctgattattgaccacttcggcctgctcggtacgccgcacagaaaaattgacagtaaacgcatcattgcactgatgttcatcagtgcagcgctggttatggttgcacaagggtaa

SEQ ID NO: 433869 - DNA, 507 bp, Serratia marcescens
atgactattatcatgattgttctcgccgtcgtcggtggtgctatgctgagtatccaggcggctatcaacagccagttgggcagcaaggttggcgtattcaaaagcgcgtttctgacattttcgataggcgcgctggtgacagggctgcttatctttttcttcgaacccaaacacgccctgaccctgatggatgtgcctaaatggcaactgctgggtgcaatgtttggcgtgccgtatattgtcattatggtactggccgtccagcgcattggcgctgcaattgccacggttgccgtcatttttggtcagctaaccatgagcatgctgattgataacttcggctggctgggcaatgagtcgattccgttctcgatgagccgacttggcgccatcgtctgcctagggatcgcactgttcttatttactccagcagcaagtcaaaagccgcaccggcgaaaaatccccgaccgcaggcagccgctaataaataagtccagccagttctga

SEQ ID NO: 433870 - DNA, 906 bp, Serratia marcescens
atgacagcagctatcaatactggcaaagcctatgcgggtttccgtgcccctctcgacttgtcggcatcaattcttgacccacaggcgctctttaatgcctacaaagcgcgggtagtggcggacggaggcactatcccggacgagtctggttgcctgtcgcggttttcatttctactgaataatggcatgtatgaccgagcaacggtgtgcgccgcacctgctttcggactaaaggcagatggttctggaaatgttcaagtagtttataacctgctcggtgttgacggtgatttgattgcaggttcccagggcactccaccgttgccgatgacgtatgatgctaccgcgcgcgcggttatcattcaaattacgtccggcggtggctggttcttaaagagtcgcgcaaaccaggttattcaaaagggcggtgcgtatcttatcgctggccgcatgagcgatctgtaccgtgctgacaacaatggtattcagcttgggtacaatatcaataatctgccgctggcatatctgcggacaatgatcactaacaataacgccataaccgaatcgtggcggtatggtacgcgtgatagtgcctggccagcaggtactggcggcgcggtaggtgctgcaacatcaatctatgctgactatgtgccatcggcaggacttttcaaagtcgcgtctggtgtcattgaaggttatgagaaaggaaagctgtcggtaacttcctctgtggccgctacaggtaagcttgccgatttgagcagtttcactgccccattattggttggcgggacgcagggagcgggcagtgtaggcgcatgctatggcgctttcaaagatgcgttattactgcacactgccgatgagtctgatgcggtattggcttcacgcctggggatgtaa

SEQ ID NO: 433871 - DNA, 2307 bp, Serratia marcescens
atgaccacaccaaccagcaaacccattccaagtaacgatgtaattgatttaaagtttaacgcggaaaaaatagacgaggtggttaattccaatgctgaaaattactttgatcggtttggggtggaaagatacaccttagaaggcatcaggaaaaatctttctccattaggtaaaacatacactcaagagcaggcagtcgctgctattgcatctggagaaataccggatggcgcgttcttctttatctggtctgatgatgagggcgctgtagctgaaaaatatcaaaacgttggcggtgtaattacaccaacgggtgtgaaaatatcaagtgagcaattcgtgcaaatggtttaccaacagacgttggcaaacctcgccgatatttcgcaacttaaaaacatcacatcgatgctaaaaaactacacgtctacagggtggcaattttctttggagtcgaaaaacggcccatctgaaacgctgcttggtgtagacgataatggtgaattgtggctcgccggtcttgctcgcgggatacaggaatatgttgaacagttgatcccgacatcattagcgaacagatataaagggcttcaatgggcgctggtggataaatcaggaaagctcgggcttatcaccattgacgatgatggtgctatgaacattgtcgggatggacgatgcacttcaggatcgtgtttcctccctttgttcatcaacattttcccgtcgtattgtgggatttcaatatgtggttttggcagaggatttaacgtcagcactgctcgctattgatgatgatggcggtttctatattccaggtgttgatggcccactccaagataatttgggcgagtccttggcaacgataaaaaccgataacggcatcccggcggcggcatggcgaggaaatgttgtgtggtcagagaggccggttctcaccgctcaaaaactgacatctactggatttattttcagttatgttcctggaggtgaagcaactgccggtagcggggttaagtacgagccatccattcgagaaatgccgatcgatgccaacgaggtgcatggcggcggttcgggtggccagtcactgaacacgccaaaagatggcgccggcattaatattgtcaatcgcgaccctgcttttcgtggtcgagtactcgcgggtgcaaatggaaggccggaaggcggcggcatggatcctgtaagcgagccagacctttctacgcttaacgatgcacagtatccgtctgcaggatggcgccagggtaatgtgttgccaatgtattatgcgatgctccataaaaatcccggcaaccaggtgtttattcatgccccatttgctgctggtggccgctcttttgctgagataagcaaagggactatcccttatcaaaactcgctggacttcgtgcagttgggtaaaaatgcagctgatggagtagggaaacgctacacgttcaaattcatgacgtttgagcatggcgaaacggataacgacaacggcagctcgcagaatcctggtgattatctcgcgaaaatgacgccttatttctcgggcatgcaagttgacttcaaggcgattaccggccagaccgagaatttcgcagaggtagttgggcaggtcggcagtcgcatcaatacaaaaaatcagcaggtagacgatcaaggcaaccccatcggcgagcttgtgattgtgcagccgtactctgtcaccgccaccgaccagttaacttatgtgcgtcagaacgcggcaaaggccatcatgtacggccccaaatacccgcttaactggctctataacgatgcaacgctgagccatctgaatgccgccggtaaagtgctgcaaggagaatatgccgcacaggcgatttattggcacctgtacgacccagcaaaaaaaggcacctggacagggctcaaagctcgctcattatcagtgaatggtggcactatcgacatcgtgttcgatgtcccatacccgccgctggtagttgatacaacaacaattgctgactgccctgggcaaggcttctcgttgcaagatgcctctgctgaggttcagtcggtagtcgttatcgcaccaaacactatccggcttaatctaaaccagtccccagcagttacagatcacttattgattggattcaccaacactgttccagcaacccaagactttgtctatccactggtgtgcctacgtgatagctcaactcaaacatcacgctggatcaccaagaataaccaaccttttccgctatataactgggcatgcctcgatcgcctaccactgaatggagcattttaa

SEQ ID NO: 433872 - DNA, 348 bp, Serratia marcescens
atgaactatcaccttagacacgcgctaggtatgttcgtcgttagcagcacctccttcgttagtcccttggagaatgcgcaaagcataatgaacgaactaaaatcaaaacaatacgaaggtaaggtattgttcgatttgttatgtgttaacggcaatgaatacaatcgatttatgaccatcagttttgtcgatgataaatttgatttctcttcgttgtgcgttcttactgatttgaatgattatctcattgattcacaagatgatttttaccgaatgaataacctttttttgactaactcggtactaacagaaacttcgaaacaaccttacttctctgctttttcataa

SEQ ID NO: 433873 - DNA, 1119 bp, Serratia marcescens
atggaaagaagttatcaagatttacctctgaaattagaaaaattagatgcattgattggtgattttttcaccttaaatccagatgtggccttgatagagagaaaagatcaaggaagaactcatgtaattacatatggttgcaaaggccagcctgatgcaatggttatcttgcatttgaaaaaaggtggagttacaaccgttcagtataaaactggtaaaaatcagcagcttgggtgtaggttggctgattttctttacgaaaacacggatcatgaagattctaaagcagtttatgtatccttaaggaatttctctcctgaaaatatggaaattcttatacagtccatagctggggaagaagatggtgctgcgttttccataaccgaacataacgatactgttcattctgttagatatgaaattataagcgttaaatatcaagataggttaaatcttacttattttgcatctaagcaatctttactaatacaaggtaagagactatattgttatagaacagtggcttactattcatcgattttgttggatgagaattccctttgttctgttctgagttgcagagaggtggagccatctgtcatagctagccgaggtgactcggaaacacatcttgctacaacattatatccaatttctttttatagaatgaatgaaacatatagaaagcttatagtttcatcttactgtttaagcctttcaaatccagaccttcctgattattcaatgcttgtctattctgaattaagggtattagaggggattgtaaagcaaactttagcattgcatggattgcataccaccacagctggagatacagcgataggtacctactttgatttagattcatctgtaacaatcaaagcgcagtatcgttcatctttcgccactgttggttcaacttcctctgcagctataattacggcgttggaggagtgctttagcttctataggcgtcaaagacacagtctttttcatatgacggaactgcctgaaatggcaagggttatatctagatccgcagaagcaacgcaactaagccaagagatcgctcgaagaattgaagatcttttccgtgtatgtgataaactacaaccatga

SEQ ID NO: 433874 - DNA, 675 bp, Serratia marcescens
atgacaccaatcacggaattaggcgagatggtcatcaccgatgccgatcgcgattacttccttcgaccttcgttcgcaaacatgacccgcataggttcgccagcggagattgtagagcgctttgctgaactacataccagtgaggcgccgagattgctttctgctgctgtggcagcgtatggcgagattccagggtggttgcttgcctatatcaactcgccgtcgttttgcagctcagctatctttgccggcatgatcgtcatgcaggcctgctgtgatgacgatatcagcgcgctggtgggggagctgcggccaagtaagcgaggtagaagggcgttcgtgttccgtcgtggaagtttgccggcaagcgacattatcatcctcgggcagtcgctgatcactcacggcatcatcggaaaagccaaggtgcgtcgtcttcagcggcatgagacaaacagcttcgtcagtgaattcagcgcattcgagtacatcagtgctgctcgtaaccatttcagcatgccgcgcgccgaggctgagcaactgaccatgacggaatttcagctgctgattaacgctaaatacccagatcagaaagggttcactgctgaggagtatgataccgttgctgatgagtacattaagaagaaggcgcgtcggctggctaaagctgcgtaa

SEQ ID NO: 433875 - DNA, 528 bp, Serratia marcescens
atgaactttccaacggtatctgtaaatggtgtatcggtacgagtcgacgaggaagggcgctatagcctcaatgatcttcacgcagccgctgtggccagcggggaggctactgaatcacaacggccgagcgtatttctcagaagcgctcagataaaacgctttgtaaaagcccttcaggccaaagcactaaaaagtactttggaacaaattcaaccacttaaggtaataaaaggtggtgatgagcctggtgtgtggggtgttgagttactggccatccgttatgcagcgtggattaagccagagtttgaaatcgaagtgtatgagattttcagagcaattgttcgccatggtattagcgccatgaaccgcctgaataaaatcgaccatattatcaataccgaaaccaaagcgatcagccagtgcgccagccaaatggcgaagtggggcgtcggtgggagaaaacgacttcttcacactgcacgagaacgagttgctgatgaagtgcagatgtacctgccaggtttttga

SEQ ID NO: 433876 - DNA, 759 bp, Serratia marcescens
atgcaaggttgctcaactgacaacagcaagttgttcggtcgtggcattgtgcttgaggtggctttgggctgccctgatacagtgccagcagaaagcgaatggcagtcgctgatcgccggtacttccaaaggcttcgacttcagcccaaataccgtaacttcggatgcggatgacaccaagggctatgttgaaaacctggtcactaactcagactttaccctgagctttgaaggcgaagtgcgtaagcgcgataagctggatcagttcggcgtggcgaagttcgttaagtattacaacgacgaaattcaggctggtcgccagcccactttgtgggtgcgtgaagagtatggcccgatcaccttcatcgggtacatggttatcaccgcgctgagttctgacggcggcactaacgacatcgttacgctgtcgaccgagttcaaggtggctgactccgataccatccaggttatcgacactccggttgatattccagtcaccgggatcaccctgaccccaaccagtggcacggtagcagccggcgcgacaaccacatttaacgtggtgtttgctccagccaatgcgaccgatcaatcgtttactttggtttcgtctgtaccggcgcgggcaactgcaacggctaacggcctggttgtcaccgtgtcagcaccatctggtgccaccgcaggcgtagcaaacatcactgcaaaaaccaacgacggggcttttacggctgtatacgcagctactgtcaccgcgtaa

SEQ ID NO: 433877 - DNA, 384 bp, Serratia marcescens
atgacgccagccatgcatcgccgtgttcgcgattacttcgttgatgctgcgctgaccgccggcttcactactcagatgctgcgctggagggataccggaaaaggcgaagataaattcatagtctttcgtccaaacggtggcagcccagttcgcaacgatctagccagcgaatatttggtgctggtcgacgtcatcggcgctataggagaggatgaagaggtcgacaatgctgttcaggcggttatcagccacatccagaacaatcccatgccaaatgactgcatcggccatattgagaacgtcggcggcatcccatccccagtttccacaactgaagggcgattagtctatcgcctgcaattcgcttgcctgtacggcgagtaa

SEQ ID NO: 433878 - DNA, 369 bp, Serratia marcescens
atgggcgtgaaggttaaaggtatccgggaggcgcaggccactcttgataggttaatcggcgatataaaagggaggagagttgtcagggctatgcagtcagcgctgctgattggtggggcacaggctgctttatacacccctatcgacacgtcgacgctactcaatagccagtatcgcgatatttccgtgaatggctcccggattacgggacgcgttggctattcggcaaattacgctgtctacgtgcatgacccgaatatcccccagaaattccggcgcgccaccgcccaaaaagagttccttaccaaagggtttgaggataccaaggcgcagattgacagagcgatcaagaaggagatgcagctatga

SEQ ID NO: 433879 - DNA, 348 bp, Serratia marcescens
atgagcgctgctgctaactggagctatacggcgatcgctacggtctggaagaagcttagcgtggacgagtatggtaaatctgtcttcgctcctcccatccagatcatgtgcgattacggcggtgatgcgactgcgcgacttggcgatatcgggcttgagtttgtcgtaaaaaacacgcactggactgagtatgcggatgcacgccagggtgactatatcctgatcggtgcttcatctgaaccagacccgaaaaaggttgatggtgctgatgaggttcgccatatcatccggtacgccgatgcattcgaccgcatcgccgatgactacgcgattatcacaggggtttga

SEQ ID NO: 433880 - DNA, 378 bp, Serratia marcescens
atggcagcgcagataacagtggcgcaggttaaacagcagttgtctgcgctgggttactccattcctgacttcatgatcgatgcctacctgtgcaagctggacggcatccgtcagtgcctggaggcgtctggctacgacgattgcgatctgatgctgatacaggtctacgccgtcaccctcatggcgataacggccttcagccagcgtatcaagtcacagtcagcgccttcaggggcgtcgaggtcgttcgattacagcggcgacatcaaaaccatgaggaacacgctggcagcgttggataccgccggatgcactgcaggcttgccgatcgacgttggcactagcgtggggttctttgacgttgtgggaggctgctga

SEQ ID NO: 433881 - DNA, 402 bp, Serratia marcescens
atggcactcgtaaaagttttggtagcaaacctctttgccggtgccaacttccaaaaactggaagttggtaaagtctacgaagtagatgacgcggttgcagggaagtggattgccgatggtaaggcggagcaatcagcagaaaagaaaggcgagaaactggtattagaagtggccacatcgaccgctacagccaatgccgacacatccgcacttcagacaaagttggccgaagcgctggagcaactgaagcaggcccaggctgctgctgcggctaaggataaggaacatgccgaagcgctggagcaactgaagcaggcccaggctgcagaactggcaacagagaaacagcgtgctgatacagcagaagctgctctggctgcagcgatcaagaaggacaagtaa

SEQ ID NO: 433882 - DNA, 1077 bp, Serratia marcescens
atgtttgtattttccactaaacaggcgaccgaaaccgggaaccttgaggttaactcctctcaatttaaaaagctgacagccgcgcgtaacgccagcgctcaagccgccgcagatttcattgcacgaaccaaatggcgtggtgatgcagaagatacgcctgagctcaacgctgtaaacgcagtcgacgatatccgccgtctgtataaggcatatgaccagacagtactgaagcagtttgagccgaacacagagttcactctgctcaacgatctgatgccactgtctcgctctgttcgcctagaagagtctgtgtacgaatacgcacgcactggcggccgtggctgggcgcacacctccatgtctgggcagatcggtgcggcgctggatgcgaagtcttacacctttgatggcaccatggtgcctatccacgacagcggctttaaattcaactggcgtgacccggtcttcaacaaaggctctgcactttcctccctggctgatgctcaggccggctctgtcgatgacgttcgccggcagtatgtggactacatctgggaaggtttccgcgacgcggccggcaacttcatcaagttcgacgacaagacctggaaggggttgcgtcatgatgagcgtgtggcgcaggttacgctgactgttaactttgcgactagcaccgatcctaaagcgatgcgcgctgctgctatcgctctgcgtgacgtgctgaagttgcaaaactatcaatacggccaacagacctggtacgtatccagcgaaatcatgtcgaactgggagcagtattttgacgttaatgctctgcgcacagttctggaagagctgaagaagttggccggcatctccgatatcaaagaggacgccgaactttctggtaacgaaatcgtgattatcccactcgctgctggcgtcattgccccgatcgtaggtcaggcgttcggcaccgttgccgatcctcgtcagttctacaacagcgattacgtatggcgtacctggggtgccgccggcctgatggtcaagcaagacatcaacggccacttctctgtcattcacgcatccagctaa

SEQ ID NO: 433883 - DNA, 438 bp, Serratia marcescens
atggctaaagacgggaaacacgtaattcacgcgggcggtatcttcgccaatccacaactgcatcgtgaaggtgctgccgccgccgacaccccccctggcacgatcggtttcttcgataacaccacgaagaaattcaccgcatcggtagatggcaatgaagccgcgatcctttacgtagccaactatgactatctgcggtgcaaaaccgtagatgacgtcattaaggctggtgattgggttgttgcattccatccaacccctggcgttttcttcaacgttcctgctgctgctggcacctacaccaaaggccagccgctttctatcgtcaacggccgggttaaggccgcagcagaaggcgagtcagtccgcgcatacgtagaagaagaccgcgcatacaccacggctgcaggtgaactcctgcgcgttgtcattaagtaa

SEQ ID NO: 433884 - DNA, 1386 bp, Serratia marcescens
atgaagcgcaatcgcgttaacgtgctgaccgtcgtcaactccgcttcaaatatcactaccgaaaccatcgacgggaaaccacatatcgtggttcgcggcattacgcccgttgttgacgatatcgtgatgaaccggaagttgtacccggcagcagaaattgccaaggcctataacacccttgagcgcaaaccgatgccgctggggcatccaaaaatagacgggaagcatgtatcggcgggtgatgtccgcgcggtgaacaactatcacgttggcgcctggcttcaagacgtccagcatgtcgacggaaaggtcaatggtgatatgtatgttgaccgccgttatgccgaaggcagtgaaaagggtaagcggctggtaaatcgactggatgaaatgatcgctgggacaaacgtagagcccattcacatttctaccggacttctttactcaggtattaccgccaacggcgaatcgaagggtaagaagtacaacgaaatcgccacaaacatggtgtttgaccatgttgccgttttactggatgagcctggagcaggaacgccaagcgaaggcgtaggcatcttcgttaacgccgacggcgacgatcaagaagtcgaaatcgcaaacctgtctgaaggtatcgattgcacccgcgaggggctgctgaataagaccaaattcttcttcaccaacgcttccaacttctcgtttgacgatatccgcgaagcgatcagcaacaagctccgtgaaggtcgatcagatgattactggccctggccggaatctatctggcccgacactttcatttaccgcgataaaaccaagtttttccgacagaaatacctcatcgatgaggacggtaaggccgtgttcgtcggcgaacctgtagaagtcgtgcgcaaacccactgagtacgaaattaaaaccaacggagagaaagatccgatgaaagaactgattatcaatgcgctgcaagccgctggtaagccgactgaaggcaagtccgatgccgaactgatggacgcttacaaccaattggccgcagagaaggcgacagccaaaaaagaaggcggggaagaaatcgaccatgcaaccggcaagcctaagaagaaagagcaggcaagcaacagcgacgaggcgccggcatggtttaaaccattcgccgacgatctcgcagctgttaagtctggccttattgccaactcagacaaagagaaaggtgaaatgcgcgcagcagttaaagccaaattcggcatgagcgacgttgctgtaaacgcgctggatggcgatccgctgaaggagctgtttgcccagtgctcaacttctatcggcctgaacggcatgctgcgtcaggttaactcctctcaaactttcagcgaaatgccggagtaa

SEQ ID NO: 433885 - DNA, 981 bp, Serratia marcescens
atgatgacaacgccgagacctaaaggcgggacaccgataataccgcgcaataaagcagaccccacccaatcctatcggcaagttaacaaaatgttccgggatatcgagaaccgatatctgggcatcaaaacaacgcttcggcaactgttcgaccagcgattaactggccgggtgctggtgggtaactctcagcgattgcatgttctttcaggtgacaccctatatcaggttaacgccggtacgtttgtctatgacatgaacgctcagcagttggctgcgcttcttgaggtaatacaaacgatccttgatgactacctgttagagggtaatggtcaggatatttgggcgctgcagtatatttcagatgagtatcggcgcggcacgctcaatgcctatacaaatctatctgctcagtctgaggtctacgcttcacagaccacgctaagtgcgcttctgtccacgcctgcttatcagaaccaagtggccgctgctttcgtgtcgacgtacagcgattggaaggggatcagcgatgcagcgcgtgctgaccttgccaatatcatcgccgatgctgttggccgaggggtaaacccgcgtgaaaccatgagggtgataagcaagcgccttgatgtctcaatgtcaaaggcaaagacgatcgcccagaccgagcaggttggcgcgctgagagaggctcagtggaacgaaaccacatgggtgcaggataggctaggtctgcgtaccaagttgctgcatttatccgccctgaagccgactacgcgcgcctggcacgcatcgcgccacggcaagctttacacggtcgaagaagtgcgtgagtggtactcgaaagacggcaacaggttcaactgttactgcagccagatcccagccatcgttgacgagaaagacaatgtagtaaacatcgggttggcgaagcgtctagctgaagaaagggaagcatgggtagagggtttaaaggctgcataa

SEQ ID NO: 433886 - DNA, 1428 bp, Serratia marcescens
gtgagtgaacaaaatagcgaggttgaattcctcgtcaatgccctcgctgacgcagtggcgatagggcgccagcgttccttgtacgcgggacagatgaatggcaacacgaaaagaacaaagctgtgggacgagttcggctacccggacaccataagcttcgatctactttatcgcgcctatcgtcgaaactccgcggcttatgccggcgtgcataaaacgttggataactgctggagtgactacccgacgattattgacggcccgctggctgataagtctaccgtctctacagaatgggagaagacggtaaccaggctgctgaaaaaacattggtcaaaaatcaaggatgctgatcggcgcaatctggtgggccactactctgcaatcattctgcagctaaaagataacaggccatggtcagagccagtggatacagcgctggtggcaaaacttggcgaaaatgccttggttaagatgatccccgtttgggaatcgcagattaagcctggcaactatgacattgacacgctatccccaacttacgggcagccggtaaattacatcttcaacgaacagcctgtgggtgatgacggcacctatggaaatgtgagaagcgttacggttcaccccagcagggtgatcatgctcgccgaaggttcagaagatgacaacatgttgtctgggatccctcttaacgaggctggttacaacgacttactggacatcgaaaagaccaagggaggaagcgcagaagggttcctgaagaacgcgagccgccagcttggcattcatttcgacgataaaaccgacatgaaaaccatcgcacagcaggcgatgaatgccggctataaagatcttggcgaggcaatgaatgaaaagatcaggaaactcaaccagggtacggattctgcgctagtaactcaatcagggacaacatctgtcctttcagtcgctgccgctgaccctacaccgtcatggacagtctcggccaatagctatgcctcaaccatcggctgtccgttcaatatgctctttggcaagcaaaccgggaatcttgcttctacagaagatcggaaggagtgggctaaaaaagggaatgggcgccgtggcggatggctatcctggctgctaactaaggtcattcagagatggtgtgacgtcggcgtagtatcgcaaccaaagaaaggcgagatcaccgtcgattggtctgatttgctggcgccaggtgatagcgagaagcttgagaacatgagcaagatggcagatgttgcctacaaaacccagcaagcgttcggtgcatctgctgttgaaccaaacgaggtacgcgccgccggcgaactggagccaatcgaggaacctagacagccagacccgacaaaaaagcaggtcggtaaggatccgctgaatgatgacaacgccgagacctaa

SEQ ID NO: 433887 - DNA, 1491 bp, Serratia marcescens
atggctgatctcaacaagcaattcagcgagctgaagaagaaccttaaaaatcgattctggcgcctaaacaacctttacttcatcaccgacaaatcggggaagaaagttaagttcaggatgacctctgagcagctcgaatacttcgaaggcgtacataccaggaacataatcttaaaggctaggcagctcggctttacgacgctggtttgtattgtccagctcgatgccgcgttgttcgaatcagcaaagtgcgcgctgatcgcccacaccttaaacgacgcaaagcgcctgtttagggaaaaggtaaaatatgcgtacgacaacctgccggcgctgatcagaaaggcgaatccggcaaagaacgacgcagttggtgagctggttttcaataatggcggttctctctacgtcagcacatcatttcgtggcggcacgcttcgttacctgcacgtttctgagttcggcaagatatgcgctaagtacccggacaaggcccgtgaaatcgtcactggcgcctttgaggcagtatcgacagattgctttacaactatcgagagtacagccgaggggcgtgctgggtatttcttcgactattgccagacggctgagaaagcacagctgcagggcaaaacgttatcaaacctcgactggaaatttttcttcttcacttggtggaagaatcctcagtacgcaatcgacccggtagaaagcctaccagagcgcctggttgactacttcaacgaactggaagccaagcatggcgtcacgttaaatgaacgccagaaggcctggtatctcgccaaagagaagactctaggcgacgacatgaaacgtgagtatccgagcatacccgctgaagccttccaacagtcggtagagggtgcgtattacgccaagcagttccgctggctgtataccaacaagcggatcggttcacttcccgacaattctcatctcccggttcacacgttctgggatatcggcgtgggtgactcaacagctatctggttcgttcgtgaggttggtgaagagtttcatgtcatcgactactacgagaactctggagagggcttgaggcactacatgaaggtgctcaaagaccgtggctatgagtacggcgagcactgggggccacacgatattgaaaaccgagagtttggctctgatgctaaatcacggaaggagctggcgcgtgagggttacgaaatcgacggccaggtgtattcgatgactttcaaggttgtgcccaaagtgggcgttgataccggtatcgagtctgtccgtgaaatcctccctaaatgcgtctttgacgatgagaagtgtgctgaggggatatctcacctggagggataccgaaaagagtgggatgacaagcgcggatgctggaaagacaaacctcttcacgatcacacgtcgcacggttcagatggtttccgctactttgccgtagcgaagaacaaccacaaacaagttggcgccgtattcttctaa

SEQ ID NO: 433888 - DNA, 684 bp, Serratia marcescens
atgacgcaacaattacctataaaccatacggttgctatagatgacccggacctgttaaaaatttgcaaaaccattaacccaaaatataaaccgctctcgataaagatgattgacaacccaagacctataggaaattgctattggaatgcctgggctcaagctcaagagaaaggtggaaaagttgtttatggttggctgtttaatgagtggccacaattatatatcaccgcaatgcatcatgcagtttggcaaagtgagagcggtgaattattcgatgtttctgaaaaatacgatactgaccctatcaggacgcgctcgacgtttctacctgacgatactgtaaaaatcgatttaaaaagattgccaatggtaacctcacgcatcgtagccagagcaaaactccacccagtcttagatcatgtggttaggcagctttccatggcttatcaaatgagaaacagctttgagcaacgaagtgctgatataatttatgactcgggttatagatgtgaagaccagtttaaaaaagcaaccaccaaagactttgaacctacaaaaatccctttcccaaataagctatttcaagttgaatggcaattcagcgaaaacatgaagtttcattacaacgatgcctatgtaagtagccttcaccatatactaaatctcttgagcctactgagataa

SEQ ID NO: 433889 - DNA, 615 bp, Serratia marcescens
atgaacaagcccgatgcaatctaccttctaccgtttgtccggcgccaatctgatttgcgtcgcgtgtggtgcaagggtaagaaaacaatcactccagcacagcgagtttggacgcgatacatgctgactctatgggggaggcatcttggcggagatgattcgcccgcgggatgcgtaaacgtcattggtcgattaatgatcagaactgaatggagtgagggacaatccaatcgaatcgttgaagtggttgaagcccttcacgcacaaggctatcgaggagaagagctattcaagaagtcgcgtgaacttgtcattccaggcacatcagcaagcaacatcatcgctctcgccaaagaatcagatgatgccgcttttgttgagtccgtgatgagcaaaacgataaaacgagatagcccgattcgctcagttgccattaaacgctattgcagtcgcaaacgcccgcaagacattgctcgcatgatagagcgcgaaaccggggcggatgtacaggcagcgagaaagcgagttatctggtgcgaagagatactcgaagaggaaatgttttatgcaataaagcgagagatggagaaagaatttccaacaatcgcggcttaa

SEQ ID NO: 433890 - DNA, 201 bp, Serratia marcescens
atgaaatcaagctttatgcacttagcggtaaccaacgaagaggctacccacctgatagagacctatcggcgtaccggcgctcatgcagagaaaacactgaacgtgtcagaccctcgtctgtgggatgtggtggtaaggctcaccgagcaacgctacctcaagccaacgccgcgctctatggtcaacaaaatgtgggggtag

SEQ ID NO: 433891 - DNA, 450 bp, Serratia marcescens
ttgcaaatcgaaatggtaaaaaatgccggtggcgttttttgtccagcattcgaacatgatttaccccgtctgaccaaattcaaaaacggcgaaacctataccgccgaaatcaagctaacccgtaacccccgttttcacgccaagatgtttgccttcttcaagttctgctttgagcactggtgcgccaatcgcgccggactcgaatgtatggacgagcacagccaatttgaacggttcaggaaagacctgacgattcttgctggtttctatgagcaaacggtaaggctaaacggagacgttcgcacagaggcgaagagcctggcatacgggaatatggaaccagacgaattcgaacgctgttacaacgcgatgatcaacgctgccatcaagcacctgttcggaaacaccaaggacaggaacacccttaaccgactgcagagcttcttttag

SEQ ID NO: 433892 - DNA, 186 bp, Serratia marcescens
atgaaagatttcgggctttaccttcttgcctctggcattgggttgatttggggattcaacatcttctggatgactcctgatgaaaagcaaagaatcagagccgaaggcgccgtcagtgtctatgaaaaacgcactgtttgcgagaaggctttagaccaatgggtatgcagcattccaaaggagtga

SEQ ID NO: 433893 - DNA, 690 bp, Serratia marcescens
atgcctgccggcacgcaaccgaagtttaggactgccgatgagcttatggcgtggcagcgcgaacagggccggatcgactctgaacgcatcatcgagcaaaaccggattgcccgcctgcagaatgtcttgggtcggtcggggatccaggagcttcaccaatcctgcaccttccagaactacaacactgagttacctgctcagcgcaacgcactggagaaatccaaggcatacgcagcacggttcggtagtgggtttggtgggtttattttcagcggtggatgtggcacagggaagaatcatctggcggcggcgatcgggaatgtattgctatcggcaggtaagtccgcgctggtcgtgaccattcccgacctgatgatgcgcttccgagaaacctaccaggaaggggcgaagaccagtgaggcaaaactcatggatgacctgtgcagcgttgacctgttgatccttgacgacattggcgtgcaacgagggaacatcaacgaaggcgttgttctgttccagattgtggatcgccgactctctggtaagaaacctgttggcatgctgactaacctcgacgcgccggcgctaactgagctacttgggaatcgcatcatggacaggatgacaatggacggcgggatgtggattaactttgactggccgagctaccggcgcaaggtgaaatcatga

SEQ ID NO: 433894 - DNA, 912 bp, Serratia marcescens
atgagcacagctgaggttatcaagttccccagacaaccagataagccaggaggccaagtggccgatctcgaaaatggctatctgcgactggcaaatcagattcaggatgcggtatgcagggttgagctttcagggcgtgaattccgcgttctgaatgccgttatccgcctgacttacggatggtcgaagaaagaagatcggataactaacagcctcattgctgacaaaacagggcttgccgtcaagcatgtgtcagaggctgttttaacgctcgctgcaaggcgcatcatcattctgagacgcatagggcagacacgctacataggaatcaatacagagctgaacgggtgggcatatgggaagccgaagtgcaaatcctgcgtcactttcttctctcaaacaagcgaggaaaattgctaccgcattgaaattacaatccctgaaaacagggatagcaaaaaagagcctcaaaccatccctgaaaacggggataaccatccccaaaaacagggagatgtatccctgaaaacagggaacaccaaagacattctttcaaagacagataaacataaagatcttaaaccccctaaatcccccaagggggaatcgaagaagttcgacccttccacggttgaattaccagactggcttgaccctgtcgcttggtcagaatgggtgcagtaccgtgcagaatccaaaaagccgattaactcccagctcacagtgaccaaggcattcaacgttctgaaggaatgcctggacgagggacatgatccaaccgaagtgatcaacaccagcatagccagcagctaccagggactgtttaaaccgaagttcccggcgcgcaaggcggttgcagttacccgcactagcaagccaatgaatcacataccagaggggtttacaggatga

SEQ ID NO: 433895 - DNA, 288 bp, Serratia marcescens
atggaaactgcaaactacagcaaaccaaccgaacaagagattaaccgcgcagagtctgatttgctcatggctgtttcagctatctcagggcgagagttcgccaggatggcagggtgtcatgagtcgaaaatcagccgcactgactggcgctatgtcgcaacgattctctgcattgccaggaagagcgtggagtttagcgttatcggcagggtggtgcaggaggtggttagggcagcgatgattggaaatgaaaaagccgagcagtgcgctaacactttctcggcttaa

SEQ ID NO: 433896 - DNA, 633 bp, Serratia marcescens
atggagttacatggccgccaagttgaaatagctagggcgcttagacttacgcccaaagctgtaagcaaatggtttaacgctgaagcaatacctcgccgggggaaaatggcagaattagctgattacatcggaacatctgtgatgtatctcataggtgaatctgatgaagatggcgtcacagaagcgccaaggaaaagtagcaatctctaccgagttgatgttctagacatacaagccagtgcaggatcaggggctatagtatcaagcgaagtcgcagagactgttaatcacatcgtatatgatagccaggaggcattagaggtatttggccatcgtccgccctcttccatcaaggtgatcactgtcaccggtgatagcatggctggaacgatagaacttggagactacatctttgttgatgtgtcgaaagactacttcgttaatgatgggatttatgttttcttctacaagggaaagttgcttgttaagcgcctgcagcttactggagacagcctgcttgtaagatctgacaatccaaagtattcagactggaagatcaccgaagaaaacgaacaatacctaaaggtggttggcaaggttatctacagccatgccatacgcagacatggctag

SEQ ID NO: 433897 - DNA, 540 bp, Serratia marcescens
atgaacaacgaagactatagcgtcaagaatttccaagaattcctggaaaaattgttaacgcttggcgttgtcaatgaaagcaccgcgagaaatctaaagaactcgtcagctcgcctgctaactgcagtaaaagacaatgaaatggatgatgtcacaaagattaacgtagatgacttagttatgcgttatgtggccatgtccgaatctaagccctctccttctagtatcgctgcttatagaagtcgcacagaaagtgccattaagaaattcatcgccttccagcagggagatgaaattccttacactccacagctaaaaaaagaagaggttgtagcagtgaaagaagatacgttcgaaatgggcaatcttgaaccagaggcattgaaaagtgcgtcgaatacgaaaacctttacactccctgtgactattcgccctgaagaaggtatagcagtaacaatctctggtattccaatggatatcacaaacgacgaggccgaacgcatcgcttcaattctgaaggtttacgtccggcctcggtaa

SEQ ID NO: 433898 - DNA, 171 bp, Serratia marcescens
atgagcaaatttccacgcgtttattattacgcttcacgcaaaacaaaatttatcgagatcactcacgcgccggttaacggagtcagcaccaaggagactaaatcagtgagcagtaaggtggaggcgcgtcagatagttaaagagataaacggcgtcgcttggaacttttaa

SEQ ID NO: 433899 - DNA, 228 bp, Serratia marcescens
atgagcaaagaaacaggtggtcaggcattccctatgttgggaaatgttggatacaactcagattggcaactggaagaaggtatgacgttgcgcgattacttcgctgcaaaagcaatgagcagccttgtgatttcaggtctgaacactgatgcatggagtgactatgacgacatggcgggaagtgcatactcaattgctgacgccatgctgaaagctcgcaaccaatga

SEQ ID NO: 433900 - DNA, 174 bp, Serratia marcescens
atgagtgactacgcaataccaaaaagtgaagacattgaatggcagcaagacatgctgcgcaagctacataaccggcttgagatgcttcaagagggagattgtgaagacatggaatcatcgctgaataatgcaatagatatagtgttagctctgcgcgaatacagcggatactga

SEQ ID NO: 433901 - DNA, 168 bp, Serratia marcescens
atgagcagcgtagtggttgagagcgatgagaaatttatctctcacatgacgtcagaactagagaggcagctcaccgaatcacaggcgcagactgacactcgctggaacggttcggatcgtcaaagcccatccgttacttgggatgaattcgcaggaaactttacctaa

SEQ ID NO: 433902 - DNA, 618 bp, Serratia marcescens
atgattgccgtttataaggccatcgcaggggtggcaaaagatttatcagaagtagggatagccaaggatagccagaacaagcagcaaggctttgcattcagagggattgatgctgtttataacgccctatctccggcactcgtaaaaaatgggctggtcatccttcctcgtatcacagagcgaacgataacggaacgaaccaccaaaaccggcggggtgctgttttatgtggttgttaaggctgagttcgattttgtcgcaaccgaagatggcagtaagcacacggttgaaacctatggcgaagctatggacagcggcgacaaggcaacgaacaaagcgatgtctattgcatacaaatatgcggcattccaggcgttctgtatcccaaccgaagagacggccattgatgctgacgctgaggttcacagcgttgctccagcgaccgcagaccagattttggcggaatttactaactatgcgggctctgaaaatgacgccaaaactctgcagtcgaaatatgcagaggcttggtctcgcctaaatggtcatccagatcaccaaactaagtgcaaagacgttaccggaattcgactcaaagaactgaaacaggcggcataa

SEQ ID NO: 433903 - DNA, 456 bp, Serratia marcescens
atggctagcaaaggcatcaacaaagcaatcatcatcggcaacctagggaaagacccagaggttcgctacacgcaaaatggtggcgcaatcgccaacctgacgattgccacctctgagtcgtggcgtgataaacaatctggcgagcaaaaggaaaagactgaatggcaccgcgtggtgctgttcggaaagctggctgaagttgccggtgagtatctccgaaaaggctcgcaggtttatatcgaaggcaaactgacaactcgcaagtgggcagatcaggttggcgttgagcgctatacgacagagattcatgtcaatgtcggcggcgtgatgcagatgatcggcagcaagcaagaagcatcacaatccggaaatcaacagccaccacctaagcagcaaaataaaccccaaccgtcgaatgagccacctatggacttcgacgacgatattccattctaa

SEQ ID NO: 433904 - DNA, 396 bp, Serratia marcescens
atgaacgaagtattgacctatgaagcactgaaggctgagcgagatgcgcagcagaaacgagccgatgcgctggctgtggagaatgcggcaatgcgcggcgttatcgatgcggcagtaggggtagcgaataattcttctggcattgcaggctggcacctgaacggtgaaatcgccgattgggaagaaatattgccagagctgaatatcgaaaccccagccactgacgcagcacttgcagatatccaagcgcagggagtggagaggtttgcggcttacctgtggaaacgaggcaatgagattgcttcagaaggcggaaaaaagtcagaggtaattcaggttcgagtggctgcaaaaatggctgaaatgttcgttgaagagctgcgggaggccaaatga

SEQ ID NO: 433905 - DNA, 183 bp, Serratia marcescens
atgaaagagctcaactttgacccaaccgatccggacaaaatgaagcttccagcgggaaagacgtgcggagactgcgcgcacgttcgccggtgcaaggcaattttcggtcactttgaaactgacacgtattgcgactggtcgccatcgcgcgcggtattcatggacaaggcggaggccaaatga

SEQ ID NO: 433906 - DNA, 366 bp, Serratia marcescens
atggcgaagactaatgcagagcgtaaagcagcccaacgcgagcgccagcgactggctggtattgtctctgtcgaaatcaagctagatcagcaagaggctgagatgttacgagagaattgtgcagctcgccggccacaacgcgaaccatacgacctagatgaatacatcaccatgctgatcaggaaggataacgccgagttaaaaaagcagctggcgacgcgggataaacggtgctgcgataagtgcaaagacaaactaccaggtgacccagcaggttgttatttccttggtgattctgagtgctggcaaacctacgggtggcatgaaaccaaattaacagtgtgtgacatgtcacggttgaattaa

SEQ ID NO: 433907 - DNA, 834 bp, Serratia marcescens
atgtatgttcttgatagaaatggaattgagctgaatgccgagtgcttagtgggcgaagaggatggcgtttatggcctgatccttgagtcttgggggcctgcatatagaaacaaagattataatgtggcactcgattatatcattgagcggctgatttattctggaatagataaggtcactgtgtatttggcctcattgccagccagaagatttatgccatttatagctgaaaggaaaatacatcctgatgagtatttccctctaattggtaattccccttccgatattcgacaaaaaatgtgtaggtatcaggccaatttcagtagtatgggtaaaaaaactgcaccctctgggaacagaaccaagcgaataatgataagtgttccaggtgttaacagtgctgagttttgggattctattatatatggagacacatcaacgttcttcgaaccgactgatgatgagagtgttctaagtgaaagggtcagcaggttaataaaactgcctttgaaagaacccgaaggatataaaatacctagtacagttgaaagagttaagagggtttatgttagagatcctgctgttaaagcttgggtattgaggcagagcaagggatattgtgagaggtgtggcgaatatgcacctttctcaattaaatctgatagtccatatctcgaagtgcatcatgtgataccgctctcgttatctggtgcggataccgttagcaactgtgttgcgctatgcccgaattgtcatagggcgttgcattacagcgaaaacgctgaagagctgattgagatgctttatataaaaattaaaagattgcaaagatga

SEQ ID NO: 433908 - DNA, 858 bp, Serratia marcescens
gtgatttgggctgtgtacatatctgataaaccgcattcaagaattaacttcccaattggtatgaatcaaggcatttggggggttaaagagacgaagaaagcaactgttcaagagataaggaaagatgatctgattgcctttgtttactctatttcttggctaaaggctgagggagcagctcctccaggattctcgcgtgtggggaaagatcagctacaaaatttccgaggactggtgcaaaaaatcataattggtcaagtaaccgagggattttatacatcttccactaaagtttggcctgatgatgagatttatccgcatcgttttaagttcaaaattgttcaggatttcggtgaaaatatttattttggtacagagttcttcaatgaagcattcgttgaagcggtgcgctattcggcttgtacccaaggttctattaccctagccagttcgatagatttactggaagatattacatataacgccaatgatcaggatgacgaagaatcatctgttgtcgaacttggttatgaaggtaaacctattatgaggttacaccagtcccgggaaagagatcccaaaattgtcaaacagaagaaagatcttatatttaacgagaccggaaaacttgagtgcgaaatctgttcaatgaattttgaggaaatatacggtgagttgggccgaggttttgctgagtgtcaccacaaagagcccttaagtctaagggataaaaacgaagaaacgtctattcacgatcttgctattgtctgtgcaaattgtcatcggatgcttcataggaaacgtccatggttatcacttgatgaattgaagggaatttatgaaaaacaaaagtcttga

SEQ ID NO: 433909 - DNA, 141 bp, Serratia marcescens; identical to SEQ ID NO: 21635

SEQ ID NO: 433910 - DNA, 651 bp, Serratia marcescens; identical to SEQ ID NO: 119426

SEQ ID NO: 433911 - DNA, 2181 bp, Serratia marcescens; identical to SEQ ID NO: 119427

SEQ ID NO: 433912 - DNA, 654 bp, Serratia marcescens; identical to SEQ ID NO: 119428

SEQ ID NO: 433913 - DNA, 231 bp, Serratia marcescens; identical to SEQ ID NO: 25792

SEQ ID NO: 433914 - DNA, 351 bp, Serratia marcescens; identical to SEQ ID NO: 119361

SEQ ID NO: 433915 - DNA, 333 bp, Serratia marcescens
atgacgaaactttttgccgataagtccatacccgatgtgatcctgacgttgctggccgtctttatccttgccccgctgaatgaggaaatcctgttccgtggtgtcatgctgaacgtcttccgttcgaggtacaactggacgatgtggctgggcgcgctgataacgtctttgctgtttgccgccgtgcatatgcagtatcagaacctgctgaccctggcagaaatgttcctggtggggctgattacatcagctgcccggatcagaagtggcggcctgctgctgccggtattgctgcatatggaagctaccgcgctgggtttactgttgggctga

SEQ ID NO: 433916 - DNA, 258 bp, Serratia marcescens; identical to SEQ ID NO: 119363

SEQ ID NO: 433917 - DNA, 333 bp, Serratia marcescens
atggaaagaggggaaatctggcttgtctcgcttgaccctaccgcaggtcatgagcagcagggaacgcggccggtactgattgtcacgccggctgcttttaaccgcgtgacccgcctgcctgttgttgtgcccgtgaccagcggaggtaattttgcccgcacagcaggctttgctgtgtcgcttgacggcgccggcatacgtaccaccggcgttgtgcgttgcgatcaaccccggacgatcgatatgaaagcccgcggcggcaaacgactcgaacgggtgccagagactatcatggacgacgttcttggccgtctggccaccatcctgacctga

SEQ ID NO: 433918 - DNA, 408 bp, Serratia marcescens; identical to SEQ ID NO: 119375

SEQ ID NO: 433919 - DNA, 498 bp, Serratia marcescens; identical to SEQ ID NO: 239690

SEQ ID NO: 433920 - DNA, 405 bp, Serratia marcescens
atgttgctggttgttggcgtgaccttgcttatgttgtggttgggagtaaccgctttgttggtgggcgggatgtgggtgttgccgccactttccccatcaacatcggtgtcaacagcgggaatgtggcgctttttgtccggtgagtttggtgtgtggggaacgctgcgcgtgggaatagcggtgggcgctgtggtgtggtggtgtgcgacggccggctatcccttgccgccgacagtgcgtgatgggctggggataaccgtgggcggcatgatgttgattgcattattcaatgtagggcggcggttgcctctgtcttccgccggagaggtactgttctgtggggggctgagtgcgggatggatggggatgttggcactggcgctttatctgttgctgcgaccatga

SEQ ID NO: 433921 - DNA, 780 bp, Serratia marcescens
atgctgtcatcaaccgatgacatcagtgcgtcctcatttcggactcacgatggcgtgacgttcagcaagttttcgttgccatacgagatgtttcgtctcgaactgaccgacaggctgtctctttccggcactgtccgggggagctacctgaaggtcaagggtacggatgacgatgagggaatggcaacgcgctttcgctgggatatgttttcggccgtatcggggctggttggacgctacagtgtgagcgatagcgtggccattaaaagcggtatcgaactgggctatgcctacatgcgcaatcgtatctctcttggtgaacatgcgcccgacgataaatatcgctgggatatgacatcccgaaacggtttagttgcaccgatggtgggcattgaatatgccaacgggcttgataatggagaccgcattcatgcagaaggaagtctctcatggatgtacgtttcatcctttagcacgaataatcgcctgataaatattcataacgagaaggcgggaacttggtccttgctgggtgaatatacctttggtgatgtttatcggttattgggcttgccaatggatgtcatcgcttcgaataaattaggcggcttttatggtaaggggtatcgcgatattgatatggggtttatgaacaataccgaattggcaaccgggactcgcatcaggctttttaatcagagttatgatgtgcacgtcggtgtcgggtatctgatgaacgacaatggtcaaggtatatcgctggttatgcgaatgaattaa

SEQ ID NO: 433922 - DNA, 567 bp, Serratia marcescens
atgttatctattgacaccatcaagcgctcctcttgccagaggaatgtgacgttgattcgtctgctcattcttgtgactggggtgagcatcctgacgccatctttggcggatttgggggtaaccaacctctatatgcgtgcaacgttaatacatccagcctgctcactcagcaccgactcgatcgataaatcggtaaccttgggtacctggtcggccaagcagtttgtggaaactccgtctgtattaccattaacgcgctttaccattaaccttgaggattgcgggcctacccccggagttaaggtcagttgggtgggaacaccacatgccagtaataatggggtattcgctttgacggcgggtagcacggcaacaaatgttggcgttgaattgctggactggaatcgaaagcggatcgcgccgggttacaccacacctgtttatgcatttgatgaaaacgctcctagtgtatcgatcccattctatgcgcgttatgtaagaacaggcgacacagtcacggcgggaacggccaattcaatggcgacctttacacttgattatttgtaa

SEQ ID NO: 433923 - DNA, 1035 bp, Serratia marcescens
atgcaacagagttatctgagaatgaaaatgataagagtcttttcaactgtgtttgttgctgcattctctttaaatgccacagcagcagtagagtgtatttcaggctgcaacagagatgtgaatttaacaataactaaaagttttacagacagtcagaataaggtaggggaaatagttaccagtaatgaggtcgatactattgaacctcgtcttcgagccacaagtaatgctaaggctcagcattggtttgcatttagtggggaaaatattccaaatgatggagcaagctttgcaacctggcaatataagccggttgatgattatatttcgattggtatgatgttagatacaccatgttatggtgttgtctatgccccttttaaccgagttattagaaatggtaaatgtgaagaaattacttttccaccgggagatgagacggtaattaagaacagtccatcgtttaaaacacaagtttatgttaggaagaaaattgtaactggggtttatagtaagcgaattcatataggtgattatggggcttgtcaacctaaaggatgtaccagtcgacaggctgttgtatataatctttatgtgagcctaaatatcactgttcctcaatcttgtgagattgatagtgggcagtcgataaatatagactttggtaatataccctcaacagcttttaaaactgcaggtgtgattgctcaaggtgttcaacccaagtcaagaactgtaaatatagcttgcaacaatatcgccggtaatgcgcaattaaccatgcgtcttcaggcggataaaccgaatggtaatatagtagtctctgatgagagtaatgacgtcggatttattgttactaacaatagtggattgccattgagtcctaataacttaaccagcgttatacctttcgtgctggatagcaatgcacgtcagaatgttactattcaggcctatccggttagtgtgactggaaataaaccagcagaaggtcccgtaacgtcaagggcatatttgcgtgtggactttccctga

SEQ ID NO: 433924 - DNA, 861 bp, Serratia marcescens; identical to SEQ ID NO: 49032

SEQ ID NO: 433925 - DNA, 294 bp, Serratia marcescens
atgataatctggatcaacggacctttcggcgccggaaagacgactctcgctgagcggctgcgcgatcggcgtccgaaatcgctgatctttgaccctgaggaaatcgggttcgtggtgaaagaaacggtccccataccagcgagcggagactatcaggatctccccttgtggaggggacttacgatcgctgcggtcagcgagattcgcaggaattactcgcaggacatcatcatcccaatgacgctcgtgcacccggactatcagaggtggctcgggaaatctgcacagcggtga

SEQ ID NO: 433926 - DNA, 312 bp, Serratia marcescens; identical to SEQ ID NO: 49033

SEQ ID NO: 433927 - DNA, 831 bp, Serratia marcescens; identical to SEQ ID NO: 36219

SEQ ID NO: 433928 - DNA, 186 bp, Serratia marcescens; identical to SEQ ID NO: 28362

SEQ ID NO: 433929 - DNA, 552 bp, Serratia marcescens; identical to SEQ ID NO: 28363

SEQ ID NO: 433930 - DNA, 351 bp, Serratia marcescens; identical to SEQ ID NO: 28365

SEQ ID NO: 433931 - DNA, 132 bp, Serratia marcescens; identical to SEQ ID NO: 102396

SEQ ID NO: 433932 - DNA, 1278 bp, Serratia marcescens; identical to SEQ ID NO: 52758

SEQ ID NO: 433933 - DNA, 327 bp, Serratia marcescens; identical to SEQ ID NO: 52759

SEQ ID NO: 433934 - DNA, 675 bp, Serratia marcescens; identical to SEQ ID NO: 52760

SEQ ID NO: 433935 - DNA, 1200 bp, Serratia marcescens; identical to SEQ ID NO: 36224

SEQ ID NO: 433936 - DNA, 867 bp, Serratia marcescens; identical to SEQ ID NO: 36225

SEQ ID NO: 433937 - DNA, 2310 bp, Serratia marcescens
atggagttattgaagtttctggcggcgattttagtaatttacttgttgttttttagaaagaaaaaacgtaaatctccaaagtcttatgcttcaagccctgtgaaagcaccgccaaaagaatggctcgctgacatcaagaaaaaagaggcggttgtgcgaaatgatgatagtgaagacgataaccttgcaacttttacattgagcggtggccggggtgttgaagttcgggtgacaaccaatcattaccggaacacctccaaatcagcaggtgcactagctcgatgggtacttccgggtgagatgataactgtagctggtgtaacaattagcggtggccacatttacgtggggcaacgtatgaagccctccggtcaagaatcaggcggctattatgacgatggaagtgaggcatcattaattgatgacacatgtaagataaaacctacttcttatctttacgaggacagttcattaggatactggcccagtttttcatctctttccccagaagcacgcggtgcgtatgtcagttggcttgccagcgataggtctgatccatcgtgtcctatcggctatgtttttatctacctctatggcctggaaagaaaagcgctcgtagattccactgacccaaaattccctgatgctgagttccgtaatctgttcaatgaagtcgctcggttaagatcggtattcattgagaaccgctccttccgtggatattcgacccaattactcgaagccatgtctattctgcgcccgaacatggacttagccactgagctcgatagcaattcaggtttcagcaacagcatgcaatttaagctggctctggcaaaaactgtacatgaaggagttcctgtatcagctgaaatggcgttgaactgggtaataaaccacaccgagtattcgctgcgtactccggctcgccgctgtgctaaagagtttgctgcgcttttcaaacggcgttacaccctcaaatatggtgaagggatggtcgttaaggcgaataaaacgcgcctaaggttagattacacaccagcaagtcctagtttgcgaggtgttcgacttcctgttcccgacctgcctgatccaagtgcgttgaagagccctgtccagaaaattatggctcttgccgacatatgtacggatgaacttgatgcttatagtcgctaccttggtaggaaaggtacgtcagtcaatgatacggctgcaattatcttgctcccttcagagatcgttaatgaaagcgcagaaaaaatattaagctcattcaaacgctgggctgatgaggcgatcctcgtcaaggaggggttagtctcagttgctgacttttgggcacatatgaatgccagttgccccaataagatcaataaaaaagaggccgatttgatgcaggcctttgctctgaagatgggttacggtgtggcacctgacccgtattatcaccatgtgaaggcggatgttgatggtgtacttgttctattccccgccgccgaagatggacgcttctcaccttctcctgaatttatctcagccgtcatgacgctcagattaggggctatggtcgccttgattgacgattctcttgatcaagctgaacagaaagtgcttgagaatgccatcaacaacaatcctggcttcaccgatgatgaaaaacgctctctacatgcgtatttaacgtggcaacttcataccccagccaatatgacaggaatgaaaagcaggattgagttgatgggggccgcggaaaaagctgctgtgggtaaggttatcattagtgttgcctgttcggatgggacgatagcgcctgccgaaatcaaacagcttgagaagatttattcaagtttggggctggatccctcatctgtctcgagcaatatccatcagcattccgcaactgaacatgatctcgtctcgtctgtaccaactgatcagatagcagcagggttcacactggatgctaatgtacttgcccgccacgaatctgccacggatgatgttcgtaaattgctgaacacaattttcaccgaagaagaaccggaagagccagaaagcgctccagactcatcaacggaggcgggggggcttgactccgcacatagccagctttatcgcagtttgctggagaaagaacagtggtcccgaaaagaggcgacagaattgtgcggaaatttgaatttgatgctcggcggtgcgcttgaggtgatcaatgactggtcctatgcggtggttgatgctccagtactggacgatgccgatgatgatatctgggttgacctggaaattgccaaagaattagagggatag

SEQ ID NO: 433938 - DNA, 1122 bp, Serratia marcescens
atggtgccgcagatgggcgagcctgcccgccggttgataggctttcgtaacggggtattcgataccgtgagcgggcagttcagcgcccaccggcaagagcactggctgcgcaccgtcaacagcgtggactacaccccgccgcgcgccggggagaacctggccgaccatgcgccgcacttctggcagtggctgacgcgggccgccgggggcaaccacgataaacaggagcgcatcctcgcggcgctctttatggtgctggccaaccgttacgactggcagctgttccttgaagtgaccggccccggcggcagcggcaagagcgtaatggcggccatcgcccggctgttggccggggcggacaacaccacctccgccaccatcgataacctggagtcggcgcgcgagcgagccagcgtggtcggcttctcgctgattattctgcccgaccaggagaagtggagcggtgacggcgccggtatcaaggccatcaccggcggcgatgcggtcgccatcgacccgaaataccgcgacgcctacgcggcgcacatcccggcggtgattttggcggtcaacaacaacccgatgcagttcagcgaccgcagcggcggcatctcgcgccgccgcgttattttgccgttcccggaagctattgcccccgaggagcgcgacccgttgctgctggcgaagatcaccgaagagctggcggttatcgtgcgtcacctgatgcagcgcttcgccaacccgaatgacgcccgcgtactgcttcaggcgcagcagagttcggcggaagccctggaaatcaaacggcatgccgatccgctggttgatttttgtggttacctgacggtgctgggcaccccggaagggatgatgatcggcaatgccaacatcaccccgccgaatccgcgccgctacctgtaccacgcctacctgtcgtttatggcggcacggggttatcagcacgtgatgaacctgacggcgttcggccaggcggtgccgcaaacgctgaaagagtatgagcatacgctgctcaaacgccgcaccaagcagggaatacagaccaacctgatattgagtgacgagtgcgaagcggactggctgcctaagtgcggggcggtgtga

SEQ ID NO: 433939 - DNA, 825 bp, Serratia marcescens; identical to SEQ ID NO: 96871

SEQ ID NO: 433940 - DNA, 1014 bp, Serratia marcescens; identical to SEQ ID NO: 49376

SEQ ID NO: 433941 - DNA, 816 bp, Serratia marcescens; identical to SEQ ID NO: 195523

SEQ ID NO: 433942 - DNA, 606 bp, Serratia marcescens; identical to SEQ ID NO: 53558

SEQ ID NO: 433943 - DNA, 384 bp, Serratia marcescens; identical to SEQ ID NO: 51105

SEQ ID NO: 433944 - DNA, 414 bp, Serratia marcescens
atgcacttgaaccgacgggtgcgtttcttctccaccgtggatttggtcaatgcactggagcaagagaaatcatctgggcgtcagggacaaatcgcaaaccgtctgttgtatgccgatttggtgattctggatgagctgggatatttgccttttagccaaaccggtggggcactgctgtttcacctgctctcaaagctgtacgaaaaaaccagcgtgatactgaccaccaacttgagcttctcggaatggagccgagtgtttggcgatgaaaagatgacaacagcgttgttggaccgactaacccaccactgccacatcctggaaaccggcaatgaaagttaccgcttcaaacacagttcaactcagaataagcaggaggaaaaacagacccgcaaactgaaaatcgagacataa

SEQ ID NO: 433945 - DNA, 252 bp, Serratia marcescens
atgggaagagaagaccctcaatttaatctccggctgccatacgagctgaaagagaaagtcaaacagcgcgccaaaatgaatggccgctcgctcaacgcagagatcacgctgataatcgaagaagcgctggcgcaaccgccgaaaataaccggctttcgcgacgacgccgaacgcctggcgcacgaacacgccgagcagttcaaaaaggttgtggtcgaaacgttaaccgcgatttatcgaaaagacgaataa

SEQ ID NO: 433946 - DNA, 324 bp, Serratia marcescens
atggaaattgtagctatcgcgctgcttatagctttcttggtgctcgttgcccagttggggcagataatttccttacagaagaaaagcatcagtgagacaaaaacagtggctgcatgtctagacgaagtaaaccgcaatctagggcggcatactgaatctgtattcgacgccgcagatcagttgaaaaacagcgtagagtccatagagttaaaaattagcgacataaaatacgttatggacgtaattgaaaagtacagcctgccagatagagagcagagaaaaatattagaccaagtaaagatcgacaacgaaatttatcggtag

SEQ ID NO: 433947 - DNA, 366 bp, Serratia marcescens
atgaccgaacaggccattgaacaagcaattcaggccgcaggtaaaaccgcgccgcgcgtcacccccgcacgaatcgagagcatcatcgtcggtgaacactacttcaccgccgcagacggtgtgcagggcaattacgccaagaagacagaacgttacagcccaattccagtggccgaatccctctgcttgctgacgttttgcgtgctggaactggccaacggtttcaccgtaaccggtgaatctgcctgcgcctccccggagaacttcgacccagagatcggccgcaagatcgcccgagagaacgcgcgaaataaaatctggcaactggaaggctatctgctcaaacagcagttgcatgacgcctaa

SEQ ID NO: 433948 - DNA, 201 bp, Serratia marcescens
atggcacataaaacaccccaagaaatcgtgaaatccctggtcgacgcaggtttcacccaaatgcagattcaagaacacactggcgtgcggcaaagtatcctgtcccgtttgctatccggtaagcataaagacccgagaatgtctactattcgggcacttgaagattttcacgcgaaacaagtagataacgataaggcgtaa

SEQ ID NO: 433949 - DNA, 669 bp, Serratia marcescens
atgaataacgaaactgatattttagaaaggaacatcaagcacttaatggataaggcggggatatccaacaccaccgaattgtctagacgtttgcggatgaaccagccgaccctgcatagactgctgtcaggtgaagttaaagacccgaaatacggagtcctaaaacagatagctgatttctttaagatcgaggtaaaggacctggtcgaaaccgatatgccagcagggggcgaatactccaccactggcaccatagaattagcgttcgcaaaggtacctgtcgtagggggtgcacagctaggtgaaggtgttgtgtgggccgacctacaataccctgtaggccagggagatggttttctacgctggcctaccaaggacccgaacgcctatgcattgcgctgcgccggcgactcaatgaccccccgcataaaagaaggcgagttcgtagtagtcgagcctaaccatagctacagcccgggggatgaagtgttgttggtgacagaccaagaggaggcaatggtaaaaacgttcctttataccagagatggctacgtgcacctgtcctcgatcaatgaagcacatcccccgataaaacttgaagtgcctaaaattgctaaaattcactatgttgcaggtgtcgcaaaatctgctctgtggtgccaagaataa

SEQ ID NO: 433950 - DNA, 156 bp, Serratia marcescens
atgaaactcgaacaaaacgcgaattggcagaccaaagcacgcggcgacaacgacagcgaatatcaaatttaccttgcctgtgctgacgacggtaaaggcaacgaattcatgaccggaaaaccgctgaaaacgtatgacgagtggctgaacagctaa

SEQ ID NO: 433951 - DNA, 639 bp, Serratia marcescens
gtgccgggatgtttaaccacgcccggcgcgtggtatcctgacggttctcacactgtcagaaaggaaatggccatgtcggaacagaaagggataattgctcgaattactgatgctgctataggggcaggggatgcattgaaaggcgtcttttcttccgccagagaacttcatcagttgaccgttgattattcagtaaaagaaaaaacacaggaaattctgaataagttatctgatgttcaaatgcgacatatctctcagcaagagcttttgattgaggccaaggagcgaatcattcagcttgaaaatgagaaaaaagagaaagagaactgggaagcggaggcgtcgagatatgagctttttagcgctatgcccgggacgttggtctatcgcatcaaaccgtctgagaacggcaacgagcctgttatttacctttgcccccagtgttacaacagaaagcaaaaatcgatacttcaagttagaggtatatctgttcctgctcgtgtgggtatggtggttgatatgcaatgccatagctgtaattcctcctacatgttcgcacgcaaacatttccctaagactgaagaacttgaacgtcaaagcagttttcgcgttcaaactgattacgatccgtatgattaa

SEQ ID NO: 433952 - DNA, 135 bp, Serratia marcescens
atgaattccttgaaacagatgcaacaccgtcaccgtgtgactggtgcggattttcacaccccgaaaacgcgcggcctgctgtacccgctggttttgctgtgcgttgccttttccatcctctacttagcgagatag

SEQ ID NO: 433953 - DNA, 897 bp, Serratia marcescens
atgcaaatcaccacctataagggtttcaagcaagacctaacctgccgcggctttcagtttgagatgggcaaaacgttcgagcacaaaggcaaggtagaagcctgttctggcggtttccactcctgcgagtacccgctcgactgcttcagctactacccacctgcggaaagccgttacgccgagaccatcgccgccggtgaggtcagtcgtgaagatggcggcgacagcaaaatcgccagcgccaccatcacgattaaggccgaaatctccatgcaccaaatggtgacccgcgcgattgagtggatctggagcaaggttgacaggtcgttagaacagaccaacaccggcaaccgctcggcggccagcaacaccggcgactactcggcggccagcaacaccggcaaccgctcggcggccagcaacaccggcaaccgctcggcggccagcaacaccggcgactactcggcggccagcaacaccggcaaccgctcggcggccagcaacaccggcaaccgctcggcggccagcaacaccggcgactactcggcggccagcaacaccggcgactactcggcggccagcaacaccggcgactactcggcggccagcaacaccggcgactactcggcggccagcaacaccggcgactactcggcggccagcaacaccggcgactactcggcggccgaggtgagcggatctcactccgtcgccgccgctttcggcatcgaaggcaaagcccgtgcatccgaaaacagcgcgcttgttctctgctatcgcaacgacgaaggcgagctgatccacatccgtgccagcaaggtgggcgaaaacggcatcaaacccaacacctggtacaccctgaacgaaaacggccagtttgaagaaattgaggagtaa

SEQ ID NO: 433954 - DNA, 1020 bp, Serratia marcescens
atgttggataaaagagatttgctcggtccggcccctagttctattgttacaggcctacctattgttaatgagcggcacttcccatttaactcgaaaagcattggatattttgacggagctataggagaccagttttctccctcacataactatatagcttacgtggcaaaaggagtagtacggaaccatgggaaacccttttacttccattatactaaattagataatttcaagaatatattaaactctggggctttttgggcatctgagctgggtaaaatgaatgatgctcaagaagtaacctacgctaaagatagacttattgaccaattaggtatcattatggaaaagaaaaatatactgttggaggtaagaaagtgtttggttgaagagctaaataaattcttcatagaggatgtttgtcaagggttatattgtgtttcgttaagcaaaagagggaatttgcttagccagtgggttaagtactctcaagaagatggtatttccttcgccttgaatacgcagctgatagctgccatccctagctactataaagaggctaaatgtatagatgttatttactccatgaaagaacagcactctatcttagcggagttagctaataggttgttttccagattagagagggtttcaagtgtcgaagatgtgcgtaagttattaatcagcgaatataaggaggagctaaggtatatcgtatgtgccataaaaaacccgtcttttgcggaggaggaggagttaagaattataatccctcgcgatagtaatgaagaagctgtaaaggttcgaccagggggtggtacttacttagagttgaactttatgaaggtttataataaaaccccaactatagatttccttatagagtatgctttttctgcacctacaagagacgaaaaaaaatctttgaataaaatatataaaattctttcacataagaggattaaatttggatttcttgtcggttcaggatcttcttacatttggcccggtacaaaatag

SEQ ID NO: 433955 - DNA, 792 bp, Serratia marcescens
atgctggaaagctggcgctggatgcactcgctgcactccacctacaccagccgccacgtggactggacccagctcgatgacgtgatcgccgcttgcgtcgccgcgttgccgcagctgcagggcatcgtcgacgccgcgccggacgcgactttccgcattcgcggtcagaagctggcgcgttcgccgcaccgctccagcggccgtaccgccatgcgcgccaacatcagcgtgcacgagccgcgtcagccgcaggataaagacaccatgttcgccttctcgatggaagggaacaacagtccgctggccgatcgtcagcagatcccgttcgcctgggcgccaggctggaactcaccgcaggcatggaacaagttccaggccgaagtgggcggcaaactgcgccacggcgatccgggcgtgcgcctgatcgaagcgggggagggcagcctcggttacttcgaccgcgtgcctgccgcgttcaatccgaacgacggctggcgtgtcgcgccgtactaccacctgttcggcagcgacgaaatgtcgcagcgctctcacgtgatccagcagcgcatgccggaagcctacgtgatggtcaacccggccgacgcggcgacgcttggcgtcaacgcgggcagcctggtggagttcagctgtgcgggccagaccctgcgtctgccggtgcgtctgagtgaaaccctgacccagggccaggttggtttgccgctcggcttgccagggatcccgccgatcttggtgggtgctaaggtagacaatctgcgggaggcggcacgatga

SEQ ID NO: 433956 - DNA, 222 bp, Serratia marcescens
atgaaattttcccacttacccgatggcgcgaagtcccaggcgcgcgaagctctgaagcatgccctttcggcctgtcatggcgtaactgatgtggaagcgcttggtcaggctatcgcgggtgcttatatcgcaatggaagggtatgagagtgagccagccgatcagccgatgcttattggctgtgacggcaaactgaacatctccatcaccaccaaaccataa

SEQ ID NO: 433957 - DNA, 1008 bp, Serratia marcescens
atgcaagcacatttcacaacaaggtgcttgcaagtgacaaacaaaaaaagcagtgagggaaaggctaaaggtggtattgcccgtgcaaaatctttaacaaaagagcaacgtgctgacatagccaaaaaaggtgctgcggcaaggtggaaaaataaaccctacagcgccactcacaaggggagtttttctgctgagttcggtatagatgcagaatgttatgttttaaacgacccagataaaacagtagtcacaagcaagcgaggcctttctaggctgctaggccttggtgggttaggtaacgatgttgatcgggtaatttactctcaatacatgcagccatatgttgatgcagttttacttgaaaagtttaaaaatccccttatttttcaatggaagggtgatgatgcaggagcgggctttggcgaggctcacggatacgacattacggtcgttggggatttggccggggcgctgataaaagcaaatattgccggggcacttccgaagagccgaattgatgcggccagacaggctcaggctttatcaaacgcagcaatgaaagccggtatcaaggggctggcttacgctgttgccggctaccgtccggaagttcaagaagtaattaatgcatttaaagcatttgttcgtgaagaggctcggcaatacgaaaaagagttcccagatgaactatatgaggagtggtatcgactttatggtctaagtcggccggagcgggggcggccgattcgctttggtcaattaaccaattcacagatctatgtgccgttagcaaagagtaaaggtaaaatacttgagcagattcgcgcaagccgcgatgaaaatgggaagcaatcagataagcttcatctgtttttgtcagagattggtgtgaaagcgcttcgacagcatataggtaagcttctgggggtggctgcaatgagcgaaaataaagaagagtatgaattaggtattgaaaaggtctttggtaaaatgaagtcagacctttga

SEQ ID NO: 433958 - DNA, 144 bp, Serratia marcescens
atgtttaagggatggttggcgattataatcgtaatgtctgtggtgctggggagcctggctcttatcaaaagtgctaatgccgtttgcgagcatgaattcatgcatgtgagtatctgtggttatgtaccagatattgaagcataa

SEQ ID NO: 433959 - DNA, 561 bp, Serratia marcescens
atgatctaccccgacaacatcggcaagggtgatggtaaagaactgcgcctgcgtgcgttagagcaagtttggatcgaaggtaagctgaaaatgtgggggcgctggtcgggaatggcgaagtatggcagcgccggcagcatgttcaaccggttgctgaccagcgagaaggtcacgaaggccgctatcacacaggcgctgcgacagttaaaaaaatcaggttgcagcaaggatgagctgcagtcctatctgttggaaatcatggaaggtaaacagaagagcagtctagcgttctgctctgatgaagaggccaagaccatcgaccaggtgatcggggccgtgctgctggatcacccaggcctgaagtatgtcatccagcagcgctacatcgggaagggaaggagtaaaaaggcgatggcggccgatttacacgataggcaccctgaatggtgcttgcgtacctgcgaaacccggatagctgtttggcttaagaccgcagaatttatgctctaccgtccaatgagtgatgcttttagttcgaatgttgatagattttacggttga

SEQ ID NO: 433960 - DNA, 783 bp, Serratia marcescens
atgctagcaaaagaactggaggtagcaaatctggtgtcaagtggtgctttgtttgtttccaaccactccggcggaaaagacagtcaggcaatgctcatcgagctgctgaaggtcatcccgccgtcccagcttgttgtcgtgcatgcgtcgctcggtgccattgagtggccaggagcgatggagctggcgcgagatcaggctgcagacgattggttgccgtttatcatcgcccgagcacacaagaccctgctggagatggttatccggcgctttgagagtcgcccggaggtaccaagctggccatcagccagcacccgccagtgcaccagcgacctgaaacgcgggccaatccaacgtgaagttaggcgttacgcgaaagccaacgggttcaagatcatcgtgaattgcctcgggcttcgtgcgcaagaatcgcctgggcgcgccaagcgtaagacgttcagcaagatgagcatcagcaactcggtgctgacctggtacgagtggctacctatccatgaattgaaaacagacgaggtgttcgccaccattcgggcggccggtcagaagccgcattacgcatacgcactgggtaatgaacgcctatcctgcgtgttctgcattatggcgagccgcaacgacctgcggaacggtgggcagtatcaccccgaactgttggagcagtacgctgtgctggaggaacgaactggttacacaatgcacatgaacagaataccgattcgggagctggccgccgatgacagccacaaggaggcgcaaccatga

SEQ ID NO: 433961 - DNA, 231 bp, Serratia marcescens
atgggtagcatcaccctcgccggcaggcagatcttcattctcaatgaaaacgacagatacccagaaccaacgatcaacagccctcctatgtttgcaatccgcgaagatgaggagcggcagcactggctttatgtttggcataaagggcgctggccgctcgtatcagatgagccgtttaaaactcagggggaagctgttgacgcagcattagcttatgggttttcactttga

SEQ ID NO: 433962 - DNA, 852 bp, Serratia marcescens
atgaagaaaaaaatcgtcttttcaattttattggcattaactgccgcagcaatctatttcgtttacagttttatctatgcgagcgacgggaggaaagtttatttaacaatagtcgatgatgatactagggctgaaacatataagtattggggaagactttctaaagagacaggagtaaaaataaccatagctgcagtacctaactggattaatggaaatcacccatctggtaaagattccatgaccatatcacagttaaaagaaatgtatgatgatggtaatgatatagtttctcatgggtttaacacattgacggttcaggagcatcttgatgatcccgatgtgatatatgaggagttacacgactctcgtcaatggctaatagataatggctttgtcagaaaccgtgggtatgactacttcgtatggcctcaaggcttgatcggtgatgaaaaaattaaatcacaggccaagaaagaggttgagaaatattacaaattcgctgtgaatgcatttaccgatcaaaaccatttggtttcaaatgattttgatgcttacgatataccgagggcaacatcggacggccagggtaaacttaagctaattaagtggatgcacgataccataaaagatggcgggtggcttattttgctcagccattcttggcatgcggatgactacgacaacggcagctatgacaaatggtctgcaaggtatcgatacctcctgtggtatgcgaaattaaacaatgtacagatagtcacgttgccagtaggcatgaagctttggtgtcaggaaaatgcaactaacgagcaatgcaaatggctgaacgctcaaagtgaaaacccataa

SEQ ID NO: 433963 - DNA, 798 bp, Serratia marcescens
atgcctattttaatcgcggatgattccgttatcaaaaacccgaaattcgcgcctatcttcgttccattcaatacagtagacggctgcctagctgcttggcgcggtgattttgcttcggacttaaccggcaacggcaatactctgaccaaggttggttctcctaatcaggccaggtttgcggtatccggcaataaatcgaacggataccgcacctctgttaaagacgggatcaacagaacgctgattggcattcaccgacaaccatcacctgtgggcgcacctggccaggcatacaactacccgatcggaaacctgagccagagcgccactaatactggcgttggcatcggtataatccaggccaacgcggtatcttccaacattaaccaaattagtggagtcgttggcgcctcgaaaaaagacgatccttatttcgcccgcgcggctccaccggccaccccggcaagcgacggcctggaatggcagtggtcggccttagtggtagacgggtcaaataactttgcggcgctctacatcccttctcagtctggtgagctagtgatggcggaaaaagttgtgggtgttaacctggctaaccggtgggtaacaaatactgacggctctccatcgtactacaatatctgtgcctggcgtgatccatcaacgcctgtagcagagtcctctacgatagaagtggcatcctctgcgttcttcgacaagcctcttttactgtcagatctgaacatgatgtaccagtatgacaaattcttcatggcacagcatggagaggtcatctaa

SEQ ID NO: 433964 - DNA, 1899 bp, Serratia marcescens
atgacaacctacaacaccggaaatcaattaggatctggtgatccaagagatctatatgacaacgctcaaaatttcgatctggcaataaatggtaatgcaagaaagtggttagatcgattaggtgttgagagatatacttgggaaggtgcactagcaaatattgctccactcggtcatccttggacagaagaagaagcaaacgctgcaattgcttcaggggaaattccaaacgatgcatattacttcgtatggtctgctgataaaaataacattgctgatgtctggcataacgttaatggggttgcgactaaaactgaaaaaagctatccatcaagtgaatttgttagctaccttagtgataaggttaattatctttcaaatcagctaaggaacgtgcaaaacataaaaggcgtaaaggatgaaatgggcaaggaaatcattgccggcatcgcatccgaaaacggtaaaattccactttatgttaatagcaatggggattccttcttgtctggattgagaattataaatttgggcgataccccgggtattgtttattgcgacagccttttccgcccatacgcctgttcaccaggctatccaaatccggaagggcttcctgtcatcggtgattttggcgggagtgacgaacctgtaattaaaattgatctcacaggtgtcatgggcatcgagacagaagggcagtcattaagcttgggggtgactaaaccggataacgtgaagctggtgaataccacgcagccttatctcaaccagatgttcagcggcactatccgcagtaccacgccagagacagacaccttggttccgttggttgaaaccaacaaagtgctgcctggtgctgaaagctaccctcagtcagaaacgtatctgagttctttcgttaacgagttaactcgcaagctgatggctgaaagaggagtaacatcagccgctgacttgcatttcaaattctttggcgctgcacacggcgttgctggtctgaagctagttgagctaatcaagggcaccgcgagttacgatatgtttcttaaatacgtaacaaatgctaagcgactagcaaacgcatcgggtaaaacctatctggagctgtgtgggttctttagccaaggtgaatccgactaccgagatcagacacggccggaagattgggaggcgctgcttatccagtatctggctgataaaaataaagatgctaaagcgataactggccagaaatttgaccgtgttgttgtggccgcgcaactggcatcccaccgtgcatatacccgtgtagtgccgacgatcgctctctcgatcgctaagcttgccaggcaaggttatctacagattggctatccggcttatgtaggtaaatacgtcgatagcgtgcatatgtcgccagatgaatatatatactgcggccggctggcgcagcgatctttacaccgtgcattgcagagaaacagcgagggtaagcctttcggaattacttggctggccattattgacgagttagtccaaggcacgatccatgtttacacttatgaggtgcctacaaagccaattcgtattcgtacagattgggtgttggaaatcgccaattatggttttgctgtagtcaccaaggacacctttgcttacgtggatatcatcacttcggtatctgtgacggccgaggatcagatcactgtaattacttcgcgtccgctaaccgaaaacgaaatgatgacctatggctggggtgtaaccggcgaaatgggtaaaagcggaagaattaacggcccgcggggcaatatatgcgacagttcgggtgatgtgcctggagagtcatatacggactccgtcggcgtattacgcccgatggacgactacgctgaaatctggaaatcggagctttaa

SEQ ID NO: 433965 - DNA, 3090 bp, Serratia marcescens
gtgatcagaatttatccttctcgcctgcctggtgaaccgcttgaaactcatcaacataaagccatgaccttgcaccagtggttcgtcgataacgtggatggttatcagaatgtaatgcgtcatcctgtctcggttgaggttaacggtaaggggataccgcctgaagagtggccactgtgttatatcagcgctgaaacggatgtgcgcatatttccaattccctatggcactggcttagagattgctgcctgggctgctgtagtggtagctgtaggttctgccgcatattctctgatcatgatgtcccagatgagcaaggatgggatggggtcagccagcggaggggattctcttgatttatcgccagcaaaagccaacacagcaaaacttggcgatccaattcgtgaagttcttggaagagatcgcgtttatcctgattatctggtacagccggtaagccggttcgacatcagtaacccacaaatttacagaacagatatgtttctgtgtgtaggaatgggaagtcacgctataaaccagactacaatcaagattggtaatacgacagccagcagttttggtgatgatgttagttttacgatttatccgccgggtgctagcgtcgcttctgaccaccgaacagaaaattggtttgcttcaactgaagttggtggtacgacatcaggtaccgctggacttgaccttgcttcgacaggacctgactcggtcagcatcacggcagatgcaataaccatatctggcaacaacgttacagttattggcgccgtggatgatgccggtgatgctgtgattcctgattcttgggttgtgggaacagatcttactatccaagtgccagataccttcacggtagcgctcgaggctggtcgtaacgttatctatggtgattttgctgaactcaacccatcagtaggccttcccgtgtccatgacatggaatggaactcgtattgacctgtttatttcagcttatgatccaggctcaccagcagtaccaggcgtaggtggtaacgcggcaagcatcactgcatctgcatcaccaacaacatacgacttcagcgctaatccactttcatttacattgacatgggctggtgtgaactatgtcatttctttgacagctaactacgtaactatgtcaggtctcactgatgagatggatgatcaattatcaggttcaggactggaagttgtagcgatagatacgaaggtagtgatcagggaaaaggaaagcccattcagtggaaacagtattggtttcagcgtactgccttcagttttgtttggtaccgatcctgttattgtggccggtacggcatcaacaggtggaagccccgctgttatggagcacattgctttatcatggggaagcgtgactggagatccattcattggacttccaagtggctcccagcgcatagcctttggcctacgaggatatcgctatcgtataactgacattgatgggcaaaccatcagcgttgatagactaattgaaaattcagatggctcaacaacggtagatccctcttggcctgggtttaccgggcgcacgttgttggattttacagtcactggactgagtgattcctatgactggatggggcctttcctttgctgtccagaaaatgaaacaacgactcaaatagagctaaatttcgtctatccacaggggttgtgcgatgtgggaagtaaagacggagccattcactggcatgacgtagcgatgacagttcaatatcgtttgtcaggttctgatgactggaccagcgtacaaataaagcatggaaataacacggttaatgaggttggttacaccgaggctatcacttttcctgctcccggaaattatgaagtacggattaagcgagatacgccagtatggggtggtactactcgagactccgtccagtggcaagcaatgcgcgctaaactttctgctcgcaagaccagttaccccaatgtgacgacgatcgcgctaactattcgaaccggaaaccgtttggccgctcagtctgaccgccgcgttaatcttgtcgcaaccaggctctatgatgggcatgcgtcgagaagcatcagcggtgcgttttaccacgtattgaaagaccttggctatgcagataaccagatagacttcgccactatcaatgcactggaggctaattactggacgccacgaggcgaaacctttgactggtcagcaggcagtgataacacttctggtttggaagtactccaacggatcgccaatgcaggtatgggttactttttactgagcgatgggctggcgtctgccggaagagagggggtaaaaaactggtccggcgtaatcagcccgcaggaacaaaccgaggaactccagacagctttcaaggcgctgtcgcaagatgactacgatggggtcgatgttacctacattaacgccactacatgggctgaggaaacggttcaatgccgtttcagcgacaatccaacacctcagaaggtagaggactacacgcttgatggagtgaaggatccagacagggcttaccgtataggcatgcgcaggctgatgaaatatcgatatcaacggctaacgcatacaaccagcacagaaatggatgctctttgctataactacggcgaccgcatcgttcttaccgatgatattccgggaagcaaaacgattagttgccttgtggtagatgaacagcatgatgctaacacggtaatgattcacgttagtgaaccccttgattggtcatttgaaaatcctcgatgcttaatccggtttcaagatggttcggcatcaccattgctagttccaactcgcattgatgattacacactatccctgagcaataccgtagatattcgtattgatgaatggataatggatgattcatcagttgagcctccaaggatagtgttctgctcttcttctagggtggggtatgattcaataatggactcaattgaacccggttctgacggctcatgtaagattaataccctgcaatatactccgcttctttatcaatatgatgacgcaacctatccagggaatataagtaacctacagcaataa

SEQ ID NO: 433966 - DNA, 381 bp, Serratia marcescens
atgtttgaccctgacaaatacctttcagtcacttggctgaagggcggtcgcacttatccaaaacttgattgctttggcattgttaacgagatccggcgcgatatcgatatgccagcttggccagattttgcaggggtaacaaaggataaccacggactcgatcgcgctgcaaaagaactgatgaaagaactgaccagatgtaacccatccgagggcgcggggatcgtttgttattcaggaagtctggttactcacgtcgccatcgtggtcatggtcaacggcgtgcttcacgctgctgaatgcaatcctaaagcgaacgtaaccttcctcccgctggaacggtttgagcgacggtatatcaaagtggagtattaccagtga

SEQ ID NO: 433967 - DNA, 2433 bp, Serratia marcescens
atggccagtaaatctctcggcacgctgacgattgatctaattgctaaggtggccgggttcacatctggcatggacaaggcggagcgtgcatctgataagtggcgaaaaaaggtcgagtcggatattaaaagtgccggttcagcgatctccggaatggcggcgttagcggttactagcgccgctgctatcacggccgttggcgtttccttgttaaaaacgtcctcagcgcaaatcactgaaacggaccgttgggccaagtctttaggcacttcaacgcaagtgttgttagagtggaagtatgcagctcagcaagctggtattgaaggcgataacattgctgatatttttaaagatctgaatgacaagattggcgacgctgttctgaatcagtcaggcgaggcagctggtgcactcgataccctgggattatcggcgaaaaaacttcaagaactgtcacctgagaagcagctggtggcgatagttgacgccatgaagggcatgaataccgcccaaaagacaaacattttggaaagcctgggcaatgacctgtccagaatgttgccgctatttgataacggcaatgaaaaactgaataaatttatccagcaagccagggattttggtgttgcaccgccgcaagaagatattaacaagctgctaaaggtcaatgaggtatttcaggagatagaaggttcctgggatgggtttaaaaacaaaatggccgcgggcttggccgatatcgatttgaagccgctggtggaatctgttcacagcctggaaaaaacatttacagatcctgctgtgcttcaggggattgttaatatcacgaagggaataacagatcttgttggactgttggctcaggcggcaaagcttgccaatgactttgcatatggctggaacaaaagcgcttcaacaagtgcggactcttccttcaatgatctgctgtcaaaacggaaagaacttaacgattctcttgcctactcagaatcttttcttggaaaaatagacgttgcagctggagtaattagaggaagcgagcagataagggccgagattgccaaaaatgaaaaacttattgatgaatttaatacaaaactgccaactcagtttgcaagtatttcagaatcaggcggactcgagttaggaaagggtgagaccaacggcaagcctaaaccagtcaaaataccgaagacggcaaatactggcgtgaaactcgataatgctttcaaggctacggagtccgcgtaccttcggcaaattgagttaattgacacgacagggaagcgcacagttgaggtgaccgaacaacaaaagctggcgttcgacatttccactggaaagctcaatggactaaatgaaatacagaagaaaagattgcaatctttggcggaagaggtagacaagctaaacgcggttaagaaagccaatgagaacatgattaaagcttctcaatatgccactgcgcttaaacaggaaaatgatgctaaacgccaaggactaaatgccgatttcattggggcatattcgagtaacgaccagcgggacaggcttcgcgagtctgccgcgattcaagaggacttcgcccggcgtcaacttgaattgcagacgcagttggactctggggatatcgacaaagacctctacgacaaaaaaagtcaggcactttctgactcgctgaatgagcagttgtcgattcaggaagactattacaaaaaggtcgatgagcttagaaataacggtacggcagggttcatgtcaggccttgcaacccagattgaggcatcaatggatctttactccaacatgcaacaggttggagcacaggcattcaacagcctaaccgacatgattatcgaatgggcggaaacaggaaagcttaacgccaaggattttgctgcttcatttcttcaatctataggaactgcattattgtcatatgcagctgcacaagttgcaatggcaggattatcagcattctcatcaatgataggggtgccatttgttgggccagcagtagcacctggtgcagcagtcgcagcagccgccgctgctggtgttcttgctatcggagtgagtagtgcattgaagggacaagctcatgatggcatcgattcagtaccagaaaccggtacatggttgcttcaaaaaggtgaaagagtaaccacagctaaaactagcgcaaagcttgatgcaaccttggaacgagtgagccgtgatgcgaatagcggaggtaatgaaccatatgcaccagtgactaatttaactgtcaatggtgacccagataaaagcactattcgcgctatcgaggaggcagtatctcgcggtaataaacgactatatggtcagatgacttctgatgtcgctacgggacgaggtgatttctccaaagctctaggtgctggttggcaaacaaaacggagaacaagttaa

SEQ ID NO: 433968 - DNA, 366 bp, Serratia marcescens
atgatcgcaccaatttttaaggtctgtgctgcaagtcaggcggtaacagatctcatcggttcaagccctgtgcggttatacccatttggcctgcaggatgacaatgtggtctatccctatgtcgtttggcagaacatcagcggttcaccagagaactacctggacaaacgcccagacgctgacagctacacgctgcaggtagatgtgtatgccgatacggtcacagatgctacatccgtggccactgcgctgcgtgatgccatcgaaccacacgcctacattacccgatggggcgggcagagccgcgacccagaaacaaagcgctatcgctattcattcgacgtggattggatagtgcttcgttaa

SEQ ID NO: 433969 - DNA, 207 bp, Serratia marcescens
atgaacgagcaacaggtaaacacactgatagcagcactgcaggaagagacaaaggcaaagcaggaacagacagcagcactaacccgcctggctgagtccaatgaatcgttggtcgctgttcttgttgatgcattcagcaatgaaatgggagacgttgatatcatcaaaaacgatgatagccaaaactatctcagcaatcgggggtaa

SEQ ID NO: 433970 - DNA, 1212 bp, Serratia marcescens
atgtctgacgtaaacgatattctgaaaaaagtcactgccagcattgaagaggcaaccggcaagttcaacgcgaaagcagaagacgcactcaaagaagcacagaagtctggcaagctgtcagaagagacaaaggcagccgttgataaaatggcttctgagttcaacgcactgcgtgaagccgaaaaaacgctgaaggccgcgatgggtgaacttgagcagcatgttgctcagatgccgctggcaaatgctaaacaggttgtcgagtccgttggccaccaggtgatctccgctgaagccctgaaaacctttgcttccagtgtggaaggcggtaaacgcatcagtatcccggttaaggcagcactgacttctgtggatgtgcctgatggtgttgtggagccacaacgcctgccgggtattgatacggcaccgaaacagcgcctgttcatccgtgatctgattgcgccaggtcgtacttcctcctctgctatcttctgggtgcagcagacaggctttaccaacaacgcgaaagtggttcctgaaaatacgcagaaaccatacagcgaaattgagttcacgccgaaaatcactggcgtcagcacgattgcccacctgttcaaatcctctaagcagatcctggatgactttgcacagttgcagtcaaccgttgatgccgaaatgcgctacggactgaagtatgcagaagagcaggaaattctcttcggtgatggtaccggcgtacatctgcatggcatcgttcctcaggcgtcagcgtttaatccggcgttcactgtcgaacagcagaacgggattgacgatctgcgcctggcaatgttgcaggcacagctggcgcgcttcccggcatctggtcacgttcttcatttcattgactgggcgcggatcgaactaacaaaagacagtctgggccgttacatcctggctaaccctgcggcgctgactggtcccactctgtgggggctgccggttgttgcaacagaagcggcagccttccagggtaaattcctgactggtgcattcaacgctggcgcgcaaatcttcgaccgcgaagatgcgaatgtggttatctccacggagaacgccgacgacttcgagaaaaacatgatcaccattcgttgcgaagaacgtctggcgctggctttaaaacgtcctgaagcattcgtgtatggttcattctccggcggttcaggcagctaa

SEQ ID NO: 433971 - DNA, 849 bp, Serratia marcescens
atgagcaaaaaacaacttccggtagcaccggcgggtcgcccctgtgcgcgggtcacctgtgaaactttaccctctgccctggaccgctgggacggcgggatcaaagctgcggccgccgacgataacagtatttctgtttttgatgtgatcggtcaggactactggggtgaaggcgtaacagcaaaacgtatcgccggtgcgcttaggtcgatgaatggcgccgatgtaacggtcaatatcaactcccctggcggagacatgttcgaaggactggcaatttacaaccttctgcgtgaatacgaaggccgtgtgaaggtgaaggtactcggtattgccgccagtgccgcctcgatcattgcgatggccggggatgatattcagatcggccgtggtgcattcctgatgatccacaactgctgggtctacgcgatgggtaaccgccatgactttgcggaactggcgcaatctctggagccattcgatgccgcaatggctgatatttacgcggcacgttccggtcttgatatggcaaccgtgcagaagctaatggacgccgaaagttatatcggtgggagtgacgctgtggcgaagggactggcagacagcctgctttctgctgatgcagtcagtgatggcgacgaatcacccgcggccgcgctccgtaaacttgatgcgctgctggctaaaaccaacaccccgcgctctgagcgcagaaaactcattaaagccttatccggtggcatgcctagcgctgttaccaccaacgacggtacgccgggcgctgccgaaaatatcaaacctgaaaccctcaattcacttgaaagcgccctggcggcgttagtcaaataa

SEQ ID NO: 433972 - DNA, 1305 bp, Serratia marcescens
atgaaaaaaaacaaacggccaggcagggttaaaagtgctctgcttaactggcttggtgtgcctatcagcctgaccgccggcacgttctgggaggaatggtttggtaccagcagcagcggaaaggtggtaacggccgataaagcgatccagctatcggcagtgtgggcatgcgtaaggctattaagcgagtctatttcgactcttccgctgaaaatatacgttcgacagtctgacggttcacgaaaagcagcaaccgatcacccggcctattcgatactttgtcgccgccccaattcagaaatgacgccgtcacgctttatgttgatggtggtcgccagtatctgcctgcgcgggaacgccttcattgagaagaaattcatcgcaaataggctggtttcgctggtgccgttgctgccacagaacatggtggtaaaacgtctcactaccggggcgttggaatacaaatacactgaaaatggtaacgagcgcgtcattcctgtcaaaaacataatgcacattcgcgggttcggtctggacggtgtttgcgggatgatgccgatgaaaacaggccgtgatgtgataggttcagcgatggcggttgaggagtctgctgcgaagatatttgaacaggggcttcagagttcaggttttctctccgctgataacgcgctgaatgatgaacaacgtgaaagacttcgcagctacatggctgcatttaccggttctaaaaacgccgggaaaatcatggtgcttgaaggcggattgaagtatcagggcgtcaccatgaacccggaagacgctcagatgctggaaagccgatctttcagtattgaggaaatttgtcgctggtttcgcgttccgcctttcatggtcggccacaccacgaagcaaagtagttgggcatccagtcttgagggcatgaacctccagttccttacgcataccctgcgtcccctgctggtgaacatcgaacaggaaattggaaggtgcctgctggacagcgatgatgaggtattcgctgagttctcagtggaagggctgctacgcgctgatagcgcgggccgtgctgcatactataccagcgcgcttcagaatggctggatgtcccgcaatgacgtacgccgtcttgaaaatatgccaccgattgaagggggggatatttacaccgttcagctcaacctgacgcaactgaaaaatctcgaaagcagcaatcctgctgttcaggccctggcccttagagaactgcataaccacatattccctgatatttccttcgaacaatctccgctgaaacaggccgcttag

SEQ ID NO: 433973 - DNA, 1737 bp, Serratia marcescens
atggctaaggtaactgaaggcatccgctacgccgaaagggtagtggcgggggaaataattgcctgtgagtatgtccgccttgcctgtcagcgttttcttgacgatctggcacacggcgaagagcgcggtattttcttcagtgagcctcgcgcgcagcacattctgaatttctataattttgtgcctcatgtaaaaggcgcgctggcaggacagcctattgatctgatggactggcacgttttcatcctgattaatatttttggttttgttatcccgctggttaacgaagaaacgggagaaaacgtcctgcgtaacgacggcagcggtcgtccagtaatggttcgccgattccgtacagcagatgttgaggtggcccgtaaaaatgccaaatcaacactttgctccggcgtggggctttatatggctggtgccgacggagagggcggggcggaggtttattccgctgcaaccacccgtgaccaggcgcgaattgtttttgaagacgcgaagaatatggtgaagaaggcgaaagccactcttgggcggatcttcgaattcaacaagcttgctatctaccaggagcaaacggcctccaaattcgagccattatcatctgatgcgaacaacctcgacggcctgaacatccactgcgccatcgttgacgagctgcatgctcacaaaacccgtgacgtatgggacgttctggagacggcaaccggtgcgcgcctgcaatcgctgcttttcggtatcacaaccgccggtttcaacaaagaaggcatctgctacgaactgcgggattacgccatcaaggtgctgcgtggactggtaaaagacgatacgttttttgccatcatctacaccttagatgaaggtgacgatccctttgacgaaaaagtctggcagaaggcgaatccggggctgggtatctgtaagcgctgggatgacctgcgccgcctggctaaaaaggcgaaagagcaggtttcagccaggattaactttttcaccaagcacatgaatatctgggttaccgctgagtcggcctggatggacatgatgaaatgggagaaatgcgagtttattgccccgcagcacgaacttaaaacctatccatcttgggtgggcgttgacctttcaaacaaaattgatatctgtgcggccgctaaagtctggcgcgcgccagatggccacgttcatgcggattttaaattctggctaccagaaggacgccttgagaaatgctcacgccagatggctgagctctaccgtaagtggggcgagatggacaagctgatccttaccgacggggatgtaatcgaccatgcgcagattaaggaagagctacagctgtggattgctggcgagagtctgaaagaaattggcttcgatccgtggagtgcgacgcagttcagccttgcgctggcagaagaggggttgccgctggtggaagtgccgcagacggttcgcaatttctctgaggcgatgaaagaggtagaagcgctggtatacggtggccgattccatcacagcgatcacccggtgatgaattggatgatgtccaacgtaaccgtcaagcctgatcggaacgagaatatttttccgaataagtccacaccagaggccaagattgatggcccagcggcattgttcacagcaatgagccgcgttctggttaacggtggcaacgaccagcaggatctctccggattcttcaataatcccatcatggtaggtttctga

SEQ ID NO: 433974 - DNA, 498 bp, Serratia marcescens
atgtctggaccaccgaaaacccctacccatctacgtttggtgaggggtaacccatcaaaacgaccaatcaatgaaaacgaaccaaagcccgctgctggggtacccccaacgccgaagcatttcgacaagcaggggaaatactggttcaagcgtatggccgaagagctcgacgcgcttggcgtcatgtcgcaactggacgcgagagcgcttgagctactggttgaggtttacaccgagtaccggcatcactgcgatacgcttgagagagaaggctacacctacgccgtatatagcgacgaagagccagacgaaggaaaagagcgagaaatacgcatgatcaaggctcaccctgccgccatcatgaaagctgatgcctggaagcgtctgcgcgccatgctaggtgagttcggcatgacgccagccagccgttctaaagtgaatgctaaaggtcctgatgcggttgacccgctggccgagtttatgaaagcgagggattaa

SEQ ID NO: 433975 - DNA, 591 bp, Serratia marcescens
atggtggaagcacaaataaagtttgttgtagtcggccatcattccagacggacccaggcagctgcgcttgccagatcgcttcaggctcatttgctgattgatgaaggcgacaatggcgccaattggaaccaccgtcgcgcgcttgaatgggctgccgctcagatttgccgcgttgttgtggttgaggacgacgctgagcccgtaccaaaattccttccccaggttgaaggatggctgcagcgctaccctgattcgctggtaagtttttatcttggtaccggccgaccgccacagtatcagatgcagatagctgaaaggttgatagtggctgacaagacacgtgctgacttcatcgcgctaccgcgcctgatacacggcgtgtgttacagcgttccgcgacagcagattgagcgcgtactgaaccgctgggatacccgaaagccggcagattacgccgtaggtgatgcattcggtgccccggttatctatccatgctggtcgctggtagatcatgccgatggagatcctgttgagattcaccctgatggttctccgcgtactgaacgccgccgggcatggaggttagcctga

SEQ ID NO: 433976 - DNA, 1461 bp, Serratia marcescens
atgcaggtgattattgacggcgttcactatgagcctgccaacaagcaggctttttcacgtattggtatcgcgatatcaacgcatcagcggccagaagtgctagcaagggctatctcgcaacaccttaagcatttgccacctggtgcgctggtggtggttgtagacgatggttcaaacccggcggcagctgttcctgatgggattcagcttttaagacatgaagaatcgcgcggtattgtggcaacgaaaaatgccagccttgaggcgttaattagcgccggttgcgaacacctgttcttatgggacgatgacgcatggccgattgcggatggttggcatcttccatacatagcctcaccagaaccgcacctggcttaccaattccttgaccttgctggaccaagaaaacttcaggatcttgcggtgctgcatgctgatgatgagcacgttgcctacaccgggcagcgtggcgtgatgctttactatcatcgcagcgctatcgaacaggttgggggatttgacccggtttatggccgtggtatgtacgagcatagtgatctggcgcttcgcattcacaatgctggattgacaacttgggcctatgccgatgtggttggttcggcatcgctcattcactccctagatgagcatgaggcagtagagcgatccgttcctaagccagacaggctggctcttgttgaacgaaatgtgaaggtgcataacgataggcgtgatgctggatttaccgggtatgttgaatatcggcagcgtcgtgacgtagtaataacaacgctactaaccactcaactagacccgcaacgcggtaccaaaatggcggcatccgcagacatgctggcaaggtgggatggttcacttcagcagtgtaggcgtattgccttagtggacgagctccaggatgccccgcaggacgttgagctgtaccgcgttccggatgtgaagatgaatgtctacttccgccgctggctgcacatctggcagcacctacgcgatcatcctgaataccggtttgtctggtgtacagatggtactgacgtggaaatgatgagggcgccttgggatgaaatggagcccggcaaggtttatgtcggttcagaaccgaagacctatgcagacgcctgggccaaggagaagcaccccgaacgcatttatcaggatttcctcgatcggcatcgcaatgatgtgatgctgaatgccggattgctgggcggccagcgtgaagacgtcatggcgtttgcacatgccatcgttcgtttgttctatcggatagagagctatcgattctggaagatggagaaggcatctgctgcggtaggggacatgattgcgtttggtattgttgccaaaacatttggcgaccgtgtcattaccggcccgcgcgtgcataccgtattccgcactgatgggattggaagggagtatgcatggtggaagcacaaataa

SEQ ID NO: 433977 - DNA, 210 bp, Serratia marcescens
atgtacacactgaaaattgttactgctaaccgaaacgaaattatcaacgccgttgattcaattgagtggaaacacgctgagaaagcaatccatgcctacgcctgcacgggtgagcttctaaagctaactctgctgcccggtgataccgcctatctggttaacagcgataaccgcacggtagccacgtacactaatccagctaagcagtaa

SEQ ID NO: 433978 - DNA, 423 bp, Serratia marcescens
atggcgatagccgcggtattgatcccctcgcttgagggcgtcgaatacaagccttaccgtgatgttgttggcgtactgacggtctgttatggccacactgggccagacattatccccaataagacgtacaccgaagcggaatgcaaagcgatgctggataaagacctgcagccgttcgcccgctctgtagagcgttcggtgaaggtgccagccagcgaataccagaaagcagcgctgatcagcttcagctacaacgttggcgttaaggccttcgagtcatccacgctactgaaaaagcttaatgccggtgacagccgtggcgcctgtgacgaaatgaggcgttggaataaagctggtggcaaggtctggaaagggttgattaaccggcgcgaggttgagcgcgagatctgcaactggggctaa

SEQ ID NO: 433979 - DNA, 237 bp, Serratia marcescens
atgccggagaaaatcaccacgttcatttcttactgcacctctgcgactctggtgtgtggaggtagcatttttcaatggcttcatgacctcgactggaatcaggttgcggtagttggcggctttgtgattggtgcaatcactgcagtgatgaacttctacttcaaacaccgccagacaaaagcctatgagaaagccctcaaggccggctatgtcacaccaccgccggcggaggactaa

SEQ ID NO: 433980 - DNA, 855 bp, Serratia marcescens
atggaaaagggtataattttgacagatggatatcattctgatcctgataccggaaaatataatataagaaatcctatatctttagaagatattagattttgcactttattttgggataggatagaaaatccaaagtcgttgatcgatttggctccacctgaggattttgatgttttggttcaggagggaattgcttcaagaacttatgttcaaatcaatggaattggagaggatggaggtgggggtaattggatgagagagctgatattgaagaatcagcttgcaataatggatgcaaaaaaaaatgatattggaatagattggagtttggctcaaacatctgatcacctttcagtaccaaacagtagcaatgtaaaaagggctgtgtgtgagtttaatttatatgaagccattgcatcaccaattggaaatgtttcaatttatgatgttcttgaattcaaaaacagaaggggcgatgagctaatggcattaaggaatactcttgatgactctgtttttagagcaagcactaaccctgaagatataaatgcttatgaaagagaagtatatcggttgaaaggtgttcttgatgattataatagggttatgagtgaaacaggatttcagacggcaaaaagaactttaacttcatttctttgcgcctccccattgggggcagttgcaattgcgggaatgattcctgaattagcagcttttatgaaagtaattaacgttataggccttggtgcatgttcagtggctttagcatataaagaaataatagttgagaagaatatacctcaggaacataaacaattagcatatctaatacatgccaagcaagaactaggttaa

SEQ ID NO: 433981 - DNA, 546 bp, Serratia marcescens
atgaagtcagattatcttggcgtcagccatacgccaccagagcataaagaccggtggcaaacaccgatcgagatattcagcgcgcttgatgttgagtttgggttttacctggatgctgcagcagacaagaacaacgcactgtgcgctcgttacctgactgagcaggataatgcgttggcagtcgattgggagagctacggcgccatctggtgcaatccgccatatagcgcgattaagccttgggttgaaaaggccacgcaacaatgccgggtgcagaatcagccgatcgttatgctgatacctgctgacacctcggtaagctggttctcattggcgctgaagtcggttgatgaagtcaggttgatcactgatggtcgcatatcgttcattaacgccggcacgggtaaacaagtgaacggtaataacaagggaagcatgctgttgatctggcgaccattcatcaaaccacgttgccaattcaccactgtaagccgcgatgagctaatcagtattggcgctgaggcattgcgcgaggtggctgcatga

SEQ ID NO: 433982 - DNA, 735 bp, Serratia marcescens
atggcatcgtcaactgatgtgatggcgcgcctgttggcgctaaagcctgcacatgtcgaacctcgcttcacgaccgtcgaaggctggaagaaatttcaggcggaagaggctttgaaatcgaaccagcagatcacggatcagaatcgccaagcgcgcatggagaaaatcatcggccgctcaggtattcagccgatgcaccgggaatgctcattcagtaattaccgcgtggaatgccctgaacagcaggctgccctggatgccgcgaaaggttttgtgaccgcgttcggcaagagccacggcggttttgtgttctctggcaactgcggtaccggtaaaaaccatctggccagcgccatagcaagaaacctgatcaaacgcggttactcggcgatggtcatgactgtttcagagctattcgaaaaccaccgcgccacgttcagcaaagacagcccagtcaaggaggccgatctgctgcgcgacctctgccggcttgatcttctggtgcttgatgaagtgggcctgcagaaaggctccgaatacgaaatcaacctgctgaccaacatcgttgatcgtcgccagttgcagttgaagccaacggggatgctgaccaacaaaactttcgaggaaatggttggcatggttggcgaacgagtaatggatcgccagaccgatggcggaatttgggtgccgttcacatgggccagcatgcgcggccgcaaggggaagaattcatga

SEQ ID NO: 433983 - DNA, 918 bp, Serratia marcescens
atgagcgtgaaagtctcaagttacgtctgggacggatgcgctgcacacggtgtaaagggtaccaagctgcttgtaatgcttcgtctggctgacttctcgaatgatgaggggatctgctatccggggattgagaaaattgcccgtgagatcggtgctggccgcagtacggtcacgacagcgatcggcgaattagaaagtgatggatggctgacacgcaaggagcgccgtagagggcagcgaaacgacagcaatatttacaccctgaatgtgccaaagctgaaggctgcggcattaagcgtcgattctcaccgtccagtttctgacaagtcagaacctgaacattcaaaatctgacatgtcagaatctgaacgttcagaatccgaccgttcagaaaacacgaaaaaaggcagttctcacccgccagaatctgggggggatccgtcagtaaattcaaaacaagatccatcaggtaagaaacctacttgtcagtctgctgcgcagaccgaccctgaagtattgatcactgaccaagcaaaggaggttttaaatcacctaaaccttgtgaccggttcccgctatcagacctcgaaaacctcactggaaaacatccgggcacgcattcgcgatgggttcactgtcaagcaactggtgcaaaccgttgattatatgaatgcgaaatggggaaacgacttggctatgtcggattaccttcgccctacaacgctgtttgcccccacgaagtttcccggctatcagcaatcaagcactgcatgggacaagaaagggcgtccagcctgtatcaacggcaaatggcaaaccagcacgaatcaccgcgtaacaccagctacaggcgtaatcccgccgggcttcagcaatggcttaccaacaggaggtgaacatgatggcatcgtcaactga

SEQ ID NO: 433984 - DNA, 534 bp, Serratia marcescens
gtggacaacaaagatttcccaacacaggacgacatcagcgaagcgatacacaagctgatcacgttgttcccaggtaagtacagcgcgatggctcagcagctggacccggtggccggtaccgaaaacgcattgcgaaatcgagttcgtcaggtgtctggacaggtagtaccgctgggtatggcagctgaaatggagtcgatctctggtcgtagcgatatcactgaagcgatgtgcaaacgggctggtggagttttcgtgaagcttccagaagtcgagcagatgggcaatgaagagctgctttacaaatttaacgatttgctggcctctctcggccagttcgcgcgcttccacaacgagtcaacatcagacggcattctggaccgcgaagaaagcaaacgcatgaaggccaagggctatcgggtgcagtgtctggtggctgaaatcatggtcgttacagagatgttatttggagagggtgacgccacagatatgcggtctgtggcgtcggtcgcattaactaaacgtgtggagtaa

SEQ ID NO: 433985 - DNA, 663 bp, Serratia marcescens
atgaaaacagcaatgaatgaccgtattcgcatgaggcgattgcagctgaacatgacacagttgcagttagctaaggccgttggcgtgagccgtgtttcagttaccaaatgggaaactggcaccacgcaaccagatggtgaaaatctacatgtgttggctcaggttctttctgtaaaacctgagtggcttctttatgcccagggcgaaccagataacaaagatgatactcggcttaaaccgattattgcgaaccctatcaatgtcccggtaatctcttccgtgcaggcaggatcatggactgattcatatagctctgcgcgaatttcagatgtgcttagatggtgcagtacgacagtgaatgtttctgatgatgcctttgggcttgatgttcgcggtgagtctatgacgaatcctcatggcagcccaacaattccagaggggtctaccgtaatcgttgaacctcattatggttcagtcgaagaattatcgggccgaatcgttgttgcgatgatagatggaagttctgaagccactataaaaaaattggttatcgatggacctaacaaatacctaatgccactaaacccaaatttcaaacctattgaaattgatggtaattgtaggattataggaagagtggtccaagtcacacaagacctctaa

SEQ ID NO: 433986 - DNA, 786 bp, Serratia marcescens
atggctaaaaactcaacggaggcctacggcgccagcggtaaaaccaacgtgctgatgttcgagcctgaaaatctgcacctggtatccgataaaacgcacccgctttacgacgaacgcatccatctgcctctccatgaaccgactgtgcttagcatcatgaagttgggggtgctggagccgatcattatctggaaagacccagagacaggcagatcctgcgtagttgaaggtcgtcagcgggttaaaaacactcttgaagcaaataaacgtctgcgggaagaaggcaaaaaacctcttctggtaccggcggtcgtcagacgcggatcaccgtttagcgtcgctgaggtgatgattagtgccaatgaaatttttcaggcagacacgccgctgggacgcgccaagaaaatggctgatgcgcttacgcggggccacgacgaaaaagatttagcgctgatgtttggcgtcggtgtgcagacgatccgcgccacactcgccctgctcgatgccactcaggccgttaaagatgcggttgaatctggcgacattaccgttacccaggcgcgccagcttgcgaacctttcgccagacgaacagcgcgaaaaagtgaaagaggttgaagcggcaaccgccggcaccaaaggccatgaaaaggcacgccggcagcgccaggtgattggcgatgccaaaccccgcatgaagtccagaaaagaaatcacgaaagcccttgagagtgcgagcggtgattacgctcaggcgctccgctgggtgttgggagaagacgaatga

SEQ ID NO: 433987 - DNA, 186 bp, Serratia marcescens
atggaggccaatgccctgccggtcaacgccgcctgccgcgccggggtgtgcggctcgtgcaaaacccgcatcctcgagggcgactacaccaccaccagcaccatgacgctgagcgcagaagaggtagctcagggctacgtgctggcctgcagttgccagctgcggggcgacgtcacgctggcgtga

SEQ ID NO: 433988 - DNA, 1383 bp, Serratia marcescens
atgttatcccatccttcgccgcagggcgtccgcggcatattggccgctctgtctctgagcatgctgctgtcatcgctcggcatcagcatcgccaacgtcgggctgccggcgctcgccgccgcgttccatgcttcgttccaggcggtgcagtgggtattgctctgttatttactggccgtcaccacctgcatcatcggcatcggccgcctcggcgacagccttaatcgccgccgcctgctgctggcgggcatcgcgctgtttaccgccgcttcgctcgcttgtgcgctggccccgcagctttggctgctgctggcggcgcgcatggcgcaggggctagggggcgcggtcatgatgtcgatcgccatggcgctggcgggcgaggcgctgggcacggataaaatcggccgcgcgatggggctgctcggcacgatgtcggcagtgggcaccgcgctggggccgtcgttgggcggcgcgttgatcgccggtttcggctggcgggcgatgtttcttatcaatctgccgctggggctgctggcgctgtggcttgcctggcgatacctgccgaacgggccgcgcccggcagcgcgccaggaaccgttcgatcgcgccggtacgctgctgctgggcggcgcattgctctgctattcgctggcgatgacccttgggcgcggcaacttcggtgcgctcaatctggcgttgatgctgggggcgctgttggcgggggcgctgttcatcggcgtggaacgccgcgccgcatcgccgctgttggcgccggcgatgttccgccacccggccctgacggcggggctggcggccagcgcgctggtgatgacggtcatgaccgccacgctggtggtcgggccgttctacctgtcgcgcgcgctggggctaagcgcagcgcaggtcgggctggtgatgtcggcggggccgacggtggcgatcctgaccggcattccggccggttatctggtggatcgtttcggatcgcagcgcattggccagtttgggctggcggcggtggccgccggggccgcgttgctgtcgctgcttaaccgctggggcgtgctcggctatgttggccccatcgcgctgctgaccgccggctatgcgctgtttcaggtggcaaacaacaccatgctgatgaaggatctgtttcccgaacggcgcgggctgatcgccggcatggtgaacctggcgcgcaatcttggggcgatcactggcgcttcggcgatgggggcgctgttttatctggcttcgcagcgggtggcgggcgccgccgccgccgcggcttacggcatgcaggtgacctacggcgtggcggcgctgttggcgttagcggcgctgctcatcgccttcggcggccgccgcccgcgtcggcgatga

SEQ ID NO: 433989 - DNA, 1068 bp, Serratia marcescens
atggctgttagaaagttgccaaccgggaagtggatttgcgaatgctacccaaacggtagagatggcaagcgagtaagaaagcaattcgcgacgaaaggcgaagctgcggcttttgagaacttcaccatgaatgaggtcagtaataagccttggcttggtgaaaaaacggataagcgcaaactttcagaattggtgacactctggaattctctgcacggccaaacactcgcatcccctaaaaaaatgttggccaagcttcaaataatcagcgatggattaggcgatccgatagcaagtgagataacagcaactgacttttcttcatacagggagaagcggttaaacggagaaataattgatagagagggtaaacctctggctaaagtcaagccaaggacagtcaaccttgaacaaatgaatttatcagcagttttcagcatattgaaaaagcttggccattgggatgccccaaatccaatgaccggattgccaatgtttaaaattgcagatagtgaactggcgttcctggaatccctcgaaataaaacgtttgttagatgcctgcgcagaatctaccaaccctcacctggtgttagttgcgaggatctgcctctcaactggtgctcgatggggggaggccgaagggttacaaggctatcaggttactaagtatcggatcacgtttaccaagaccaaaggcaagaaaaaccggacagtcccgattacaccagagctttacgacgccatacctcaaaaacgcggtaacctatttactccctgccgtaaaacgtttgaaagggcattaaaaagagcaggaatagagttaccccaaggacaggctacgcatgtgctacgacacacattcgctagccatttcatgatgaaaggcggaaatatattggtcttgcgcgatattctcggccataccgatattaagcaaacaatgcggtacgctcatttcgcccccacccatctcgaagatgcaaccaccaaaaaccctctggcaggcttaggttgggttgtaaagcatggcggcaaaatggcggcagaggatgaaaagtcatgttaa

SEQ ID NO: 433990 - DNA, 597 bp, Serratia marcescens
atgtcaacattaaagtccccaaatgcgatccgcattgatacatcatgcggcggcaaagcagcgattgaacgtttggtagaggcgtatggatttagtacgcgccaagcactttgcgatcacctcggagtgtcgaaaagcacccttgcaaataggtacttgagagatactttcccggccgattgggttattgattgcgccttagaaactggggtttcgcttcgatggcttactacaggtgaaggcccgctttatttggatcagtcgagcgatttgatagctatagaccgtctcaagttgattaacggcaagcttcatccatcgaactacataatgttcgacaaggcattgttacctaatgggattattagcccgcgcgttgttcttgatgggagtgtttcgcacgttgtcgagttggacacgcaaacgctcactgacggtttatggctgattgagatagaaggcacagcaagcattaaaaagctcacacgcattcccgttggaaaagttcgggtgactggtggcgatgtttcattcgactgctctattgatgaaataaagctgaccggacgtgttgaattaacaattgccaagggttaa

SEQ ID NO: 433991 - DNA, 237 bp, Serratia marcescens
atgagtacacagatttcaatccgcattcctagcgcagtggtcagccctggggagtttgccaagctagaggggatcacccgtcgcacggcttactcttggtgtgagaaaggcttgttacctcttcacccaaagaaaaatgctcacagccgtactaaaatttattacgcgcagtacaagcaaaagcaaatctctcaatcacttggccattcccgttttgagatcttaatcggcgaataa

SEQ ID NO: 433992 - DNA, 450 bp, Serratia marcescens
atgaaagtgatcgcagttgaaaaacagggatttatggacgatttggccgcttggggcgtagcgccgaactatgcccgctttttcctggccaaatgccaagaagttgatggccttgttgccctggagccgtttgttttcaatgattccatgcatttgaccagcccttaccagtggtttgcctccaatgcggcgttttggtgccgcgcataccgtgaagctggcaccgccgaagaacaggcggaaaccctggcatctatccgcgcccttttctatgtggcggggatgttggggcagggcagcattaccgcgctgattctccaatggtggtcggcaacctatgaacttcaccgcctgccagcgccgaacgtttccccaactgacacgctgatttttcggaactgtagggcttcacactttatcgatacagctaccggtcagcgccgacactaa

SEQ ID NO: 433993 - DNA, 240 bp, Serratia marcescens
atgccaactatcggccaaaacattagcaaccgcgccgccgcagcctcttttgagagcgcgcttaacctggcgcgccgtgaagcccaagcagatgcagccgttaaattttctggccacttagaccgtatggccaccgctgtggctaaccaggaattatccgccgttgagatcgtggaactgctgcgccaggacgccgagaaatggaaaaacgaggggttggaatgtcctgggtactgctga

SEQ ID NO: 433994 - DNA, 3114 bp, Serratia marcescens
atgtcacaaaccgcgatcacctttgcctttgagcaatggaaagcaaaagaagccgtgaacggctcccgcgtggtactggatgaatttgtttttgccaacgtgccgggcctcgatgccagcaagcccatcgaccggaaagaagggatgccggcggcagccaagatagtgcaccgccaggccgtcaacaaaaccggcgtcgtgaacaataacgccgtggtgtattcggtcaccctgggcaccgaggtgggcgatttcgactttaactggatcggcctggtgaataaggccagtaacacggtggcgatgattgttcatgcgccgatgcaacgcaaggtggccaaccgagcaggacagcaggggaatgcgatcacccgttcctttgtgatggagtatgacggcgcggccaaagagacagcgatcaccacgccggcagaaacctggcagattgattttaccgcgcgtctgggcggcattgatgaaatgcagcgtctgattaaccgtgaccattacggtgccggcgcattctttggtaatgggttcctggcagccaaagccggcgcgcaatatttcgtaacggcgggcacaggctatgtgggcggactgcgcgcggtgttggcggctaaccaaaacattaccgtgacaaccaagcctaccaaggtctgggcagacgtgagtttgcagggcaacgtggtaagccaatgggctggcgctgtgaagtttaccgttgcggctaccgctacggattacacggataacgccggttttaagcactatgtgtttgcggtggccagcatcgatgccgccggcaacattaccgacttgcgcccaaaaggttcactgtccgaccaggccggcaatgatgtctatttgcgtaaggatgacaatttagcctcactcaaggacaaatcaaaaagccgcggtagcctgggcctgggcaccgccgccacgcgcaacgtgggtgtggaaggtggcaatgtgatggaggtcggtgcgtttggcctggggatgggttcccgccaccgtgaggatgcttattgtaatcagggcgaaattttccgcgttaataacacgtcagcgaatgcgccgggtaacggcgtatatggggtgatttctttgccatgtgatggcggcccttctaccggatacgtgggtatatctaacagcggtgcgggcttcttaggtggttcaaatgccacgaacggggttaagtgggcgcgaatttacaccacggactataagcctacggcgcaagatgtggatgcggtatccgctagccagggcggaacgtttcagaaggaaatccaggcatccggcggcgtgatggtggcgaacagttggaaagccaagcctggcggccttttcccagggaacggggacggggccagttatgaaacctgcaatgtggatattaaaagctggtatggcctgggcttttacaacacatgcaaagagggcgtgcagggccgcacggcgtttttgaatgtgcgcaccggctcattttcggccaaggggcggatcactggcgcatccgtatgggatggtaatgcccgcgtttactcccctgccaataaacccacggcggcggacgttggggcgttaaccgatgcccaggcggcgcaaaaatatgccctgcgctctatccgtgtaaacggcaaagcgttgaccggtgatgtgaacttgctggcgtcggatgtgaatgcctggacaaaaacagaagcggacggacgctatgtaaaacttgcgggcgacaagatgaaaggccggttagagattgagggttcaacggtattgccagtgcaaccgttacgcgcggctacagattcccccactttatggaagcatggcattagcttatcaacgcttgagtttgatgatccgaatatcaaaaattacccatcgaagccttattctaccctggtaaatttcagtgcgaacgagcaccgaggctttcagttattggcggaaaagaccagtaatagcttttggctgcgtgctaccgatacgggtaagtattcggattttgtgggcctgtaccacactggaaacaagccctccgcgtccgatgttcaagccgctgatgtacgaaacagttttgccgctcgaatgggggttgcccgtgtcttgaccggggctaatgcgccaacgtcaccgggggtatggagtgttgaaaatagttcctgggccggcgtgccgtggggttctgttttgtgtactaccaacacgaatgatcttaccgccactccaggtaacggaaaatttcagcattatttacagatgtctcatgaggcgggtgggaaagctggcctccgtgtggccgcaaatataaacggcacttttagtggctgggatcgggtgatgatggccagcgggggcaatttcaccggcccggtatcgtccagcagttctatcgcagccgcgtcattaaccgccacttatcacagcataccttctggcgcgcctccagaagggtgtggcgcttattcggtgcaactcgacacaaaagccccgttttatcaggaaaattataattgggacgttgccgaaggtggacgttatgtcccgctggtcaaaggcaaaagcactcggaaagggcaaggttatcccaccgccgtaagctttggttatctgctggatggaaaaggcagttttgcgaagccctgcatccatgtgaaaggcgataacaacgcggaggctctttggcagtttgaccccaacaacaagcaatttattgcgccaggtaatctgaacgccggggaggccgtctatcagaatgacggcaacgttaaaggctccatctggggcggatatatcagtacctggctgaacaatcaattaagcgcgcgtgataacaatatcaataaccgcgtggattggggcacatacaatcgtgatgttggtgcgcgggcaaccatagattgggttaaccaaaactttattcaaaacgtcagatacagcgcagaagcgcagcacggtgcaacaggtgtttacacctatcacgacaacactgttttaacgggtttcgataacagagacggcgactattcggctgagtccctgttttggagctatatccagatttataaaaatggccaatggatcacgatagggcgataa

SEQ ID NO: 433995 - DNA, 549 bp, Serratia marcescens
atgatgaatattaagaatttccaactgggtgagccaaaaacaccagaacaaattaaattgcgcaatcggcataacgccatgtttctttttgccgccgatggcacggaatggtacgagtgccaaagcggttttgcggctgactcaatcaaaatcgcgtatgacagtaacggcgtcattcgtagtattgccgccaacaaggatgtttccaccttatggcctgcgggcttgagcgtggcagaggttcctgataccacggcaaaccgtcgtgcggtcattggtggcggatgggttttcgatggtgaaaaggtagttaagcgagtttacacgccagaagagtaccaggagcaagccaaggcagagcaaactgtacgtattgctacagcaaccaaacacattgcgcctttacaggatgccgccgatctcgctattgcgaatgatacggaaaaagagcaattggcagcctggaaaaaatatcgggtgatgctgaatcgcattgatctgttatcggcaccaaaaattgaatggccagaggtaccgaatgtggcgtaa

SEQ ID NO: 433996 - DNA, 1656 bp, Serratia marcescens
atgaaaccgattaaacgcctgatgttgtccggggataccgtgcccctggttgattttaatctggtgttggagctgaacggctgcgggcgcgggtttattaccgcgcagacggataccgattacagcggcaaactggtgcgcctggatgccggctatacggataacattttgcggtggtttacgggatatgtagagcgcgcgcagccggcagaaaccggttctcagcggctttttgtgcgtgaattggctggcgtgtttgaaaggctttggccgtgttccttccagcacccaacattgcgccaggtggccaagtggttggaggaaaacagcgggttaactatcgcgttgccggcgcaggcggattacctggacaagccgatcccccatttcacccacagcgggacgggctaccaactgttggccaatctggggccggcgtttggggtgcctgattacgtttggcaaccgctgccggatggtggcgtgttcctgggcagttgggcgcattccatgtttgccggcaagccggtagatattcccgccgagtttagccaagcgcgtgccggtggtaacagcatgaccttgccaatggtgcaagccttgcggcctggtgtggtggtcaatggccaccggctttcgagtgttcgcctggagaatgacgacaccacgatcacctggttggccaaaaatccgttaacgggtaaatcagtggccatgacgccggcacagcgccagattgatgccgcttacccggagttgtctgcgggtttgcatctgccaaaattcgccagggtagaagcccacgcggagggcgtcagcagcggcgacctggccgatccattcaggccacgttatgccgtcgatttgcagttgttggacgccgacggccagccggcaaaaaatacgccaatttacccggcggtgccgctgccgttaccgatggcaggccaggattcgggcatgttccagtttccaccagtgggaacgctggttgaggtggcgtttactgatgggcgacctgataaaccgtttatccgtcagacgctggcccagggcaacacgctgccggatgtgaaacccggcgagcagctacagcagcagcgggaagaagtctcccagcgggttacccaggcaggggattgggaacggaaaaccgaccaggtgatccgtgaaagttccatgaccagggaaatccaggccgacgaagaaacccgcaccctggtggccagggccacaacggtgcaggccacggataaaaccacggtgttgggcacgtccaccttgttggccggcgcagtgcagcacattaccgagggggattacagcgtagcgacccagagtaatttggtggccagcgtggggagggatgccaccacggcagtggccggcagcctgatggagaagataggcaaaatccgtagcagtattgcggctgtgcgccaggatgttattgccccggtggtgtgggtaggtagccaacaaatcaacgtgatggcgctgatgttggaaaccctggaagtggtgcaggagctggcgcagcagaccgccgcccatacgcacagcaacaccggtgggccgcagaacgccgcagcgattagcgcagccggcgcgaaatctggccagttgaaaaccaagtacgcgccagtgattggatag

SEQ ID NO: 433997 - DNA, 1053 bp, Serratia marcescens
atgctagtaaagtattatggtttggtttttgatgaaatgactaactgttggtcgccaagaaccgaatttatatcaaatggtctgtttagaatgactcagcctaaataccttaatgataaaggtagtgaagcaaggttatggccgtatttcaataagttctcaccagcggattatgcatgggcaaaaagagaacatgataaaatacaaagaaatccatcttatatcccttcaaatgaagagttagaaaacttctttttaaaaccatgcggtactagatatggtgacactttcccgcatatgttacatctagaaggtttcaagtcgatggatgaatatgatcttgcacaattgactataattgcagagaagataaacacattcttggttgagtcaataagttgccacttaggtgttttatctttatcaaagtctgacacaaacgagcttatgtggacgcattatgctagtgaaggtaaggggctagcagtaacattcaaagagaaccaccattttttcgatcaacttccccccaaagatgttagctattctcaagataaaagagcttctcttacatactataaaggtatgatgagaatgaatggtattccgttaaaaaagttttatgctgtcgattttattaatccgataggtgttatggagacactcattggaaacggtattgatatagtagatttttcagaacgcttactatactcgaaagcagaaagatggtcttctgaggatgaggtaagaattgtatgtcctctaatgtgctgtgaaaagaaagttgggccattagttcaaccagaatttggatttgaattgaccaccgaacaatcaagtcatttcaaaagttattctgagattaacctaaaaagcataccatttgatgcatttgaatctatagttttaggttacgcgatgaacgagtcagatagatcgaccattattgaatcggtcagaaaaaatgctaacttatcacatttaaaattacgcgtagccaaacacgatatttatggaaacattgaggttacggacttatctgaagaatga

SEQ ID NO: 433998 - DNA, 654 bp, Serratia marcescens
atggaagatattaaaacagccagcacacggttaatcttatcttccgctggcctcattctctttttagggggctgggcatctttcgcagactccatcccgatcggcaacttggggttaaaactaacctcattgcacattgcccctatcatactgatcgccttttgggcatttagctggcagcgcttttttgtcctggctcgccaaagcaataaaccagctattgatcagatgattgctgataaagtgaattcatctaaactgattatctcggtgttcccccccaagtcgtttaacttacctggagcagtgggcatacataaatggggctggccccatgaaagcatcccgaaagctgctcctcacgattatatatcgtataaacgcgagcgattcaaacgtcgctttatgtttcagtacttcggcaatgattccaatgatgaggcgctatatgttcattttgggcctgttgcatccaacatcaaagacggagacttagcacctttcaatactggatattggaaatgtatttggtttgaactcaaaacattaaccccaagattttttgacaccaccgtcatagggtttcactatttccctcatattttcgcatgggctgcgtttgtctatatgtgtatttggctttgcacccagtga

SEQ ID NO: 433999 - DNA, 771 bp, Serratia marcescens
atgaaattaaaagccacaaggaattctgttctcaaatttttcagaaccaacccacatttagggccatcattacttttattcctgttaggtataattttccttttaacaatgaaccttgctgctgtgtcaggtgccttattcggtgccggagcttcattactgggcgcttggatttctgattttaactcccgtaaaaaagagattgcatcaaaagagcagaaagaaagagatgctataaagttcttaacccctgaactattaagaacaatatcaagagttctctatattcaagaacgagcaataattaactatagtatgaatgctgatcaaaataataagaacactgatctaaggcaaccacttagccctgacattcacgacctggtaaatttaggtgataaaaaagaggattttatcccctaccttcctctattgtatcccaatgcaccacaagcaaaatatttggatggagaaaaggctgttaagttaattacttattatgattcattgtttaaactagagttattcgtaaaagactggtggcgtagagcaggtcaactaccatctaacattttcaatgaaataagtcatttatcagaaaacagccttttattatctctagagtgtttagcagagtttcgaattaataagagtgatgatggttttccttatagtgatacccttcccgcaaaaatcaccaatgcactagacatggcagtgaaaacaagagcacgatgctatgatgactttgagaaagcaaaggaaaaataa

SEQ ID NO: 434000 - DNA, 1044 bp, Serratia marcescens
atgaaaagtgcggctaaaaagttagatgcgaaaaagctttatgagaatgcaattgtatcgatacaactcggcatcgaagacttcaagctatcccaactccctgaaagcgatggcggcaacccttttagaacactttcatccgttcgcaatcttcacgctggattgctattgcttttcaaatacaaaatagccatatcagttgacactgatgagctagcttatgaattaatccatagccctcctcataaaatattgcctcatccagatggcaacggtggagtgatttggcaacctgaaggcagatttaagaaaaccactatcgatgtagccgaaattaaagaacgctttgcaaattttgaagttatcgttgattggcctgttgtcgaaaaacttcaggaatgccgaaaccatctagagcatttgcaccctaacaattcacttggtgaggttgcggaatttgtagctgatttattccctgtgttacgagatttcattacaagtgagcttcatgaatttccacagaacatactaggttctgcatgggacacaatgctcaagcataaacagtttttctctcagcagctacttaaaagccaatccacttgggaggaagcaggagtcccagctggtatggaagagtttcttgaacattgtagctgcccagagtgtggctccaagtttttgaatgcttcacatatgaatttagctgctggcgaaattgtttctgaggatgagaatttatttaatttcatttgtgcttcctgtgggaaaatagaattgatagcgcctttattaataggggctttacaacgtgtgtttttttattggccaccagatggagatgagcctacatatgagatgtgctatcaatgtggacatgaaacttttttaattgctgaacaaagttgcagatggtgtgaatatactttagaacgtgaatcatgctcgctttgcggcgaaatgcttgcacaagatgaacaagataatggaggattatgtagttaccataactatatagcctcaaagtatgatatggatgactag

SEQ ID NO: 434001 - DNA, 219 bp, Serratia marcescens
atgtctcgcaaagggaactgcctggataatgcagtgatggagaacttcttcggccatctgaaagcggaactgtattacttacaacgctttgataacgtagaacacttggcaaaagaaatagagaactacattgattactataaccacagccgcctcagagagaaactaaaaggcctgagtccggtagagtatcgaacccaggccatgaaggccgcctga

SEQ ID NO: 434002 - DNA, 1104 bp, Serratia marcescens
atgctgcaacgcctgtcgctcggcatgctgctgctgtgcgccttcagcgccgcggcggcctgcgagtggccgggctggcaacagtacaagcagttctacatcagcccgcaggggcgggtgatcgatccgagcagcccgaacaaaatcaccacctccgaggggcagagctacggcctgttcttcgccctggtggccaacgaccggccgaccttcgatctgctgctggcctggacggagaacaatctggcggcgggcgatctcagcgcccgtttgcccgcctggctgtggggcgagagcgacgacaaacagtggaaggtgctggacgccaactcggcgtcggacgccgatctgtggatcgcctacaacctgctcgaagccggccgcctgtggaaaagccggcgctatcaaaccctggggacgctgctgctgcaacgcatcggccgcgaggaggtggccgacattcccggcctgggcctgatgctgctgccgggcaaagtcgggttcgtgacggacgatcgctggcggctgaatcccagctacctgccgccgcagctgttggcacgttttgcggcgctgaacggcccgtggcgcgcgatgcgccaggtcaatcaacggctgtggctggacaccgcgccgcacggtttctcgccggactgggtggtgtggcgggtcggcgccggctggcagccggatcccgtcaagccgaacgtcggcagctacgacgccattcgggtttatctgtgggccggcatgctggcggacgacgatgaatacaaggcggcgctgctcgaacgttttcagccgatggcgcagctcaccgccaaacagggcgtgccgccggagaaaaccgataccgccagcggcaaaaccaccggcggcggcccggtcggcttttccgcctcgatgttgccgatgttggcgacgcaggctgaggcgctggcgacacagcggcaacgcatcagcgaacatccgccgggggacgacgcctatttcagcgcctcgctgacgctgttcggccaggggtgggatcaacaacgttatcgctttaatcgtcagggtgaattgcaaccctcgtgggacggccaatgcacaacttcaaaataa

SEQ ID NO: 434003 - DNA, 2307 bp, Serratia marcescens
atgacgagaaaaataacctggttaactgctctggccttaggcatcagcaccctgtcgcaggccgaaaccgccaccgcgccgaccgtggcggcccagccgccgattgccgcggcggccgatacggcgatcgcgccaccgctggccgccgcgccgcaggatccgaatgcgccggtgcgcgacgtgtcgctgccgtttgcgcagatagcgccgccgccgggcacctttgttctgcgcggcacccggccggacgggcagatcgaattcggcgtgcgcagcgacgaggtggtctcgcaggcgatgctcgatatggagtttacgccgtcgccggcgctgatcccggtggagtcgcacgtcaaggtctacctgaacgacgagctgatgggcgtgaccacgatcgccaaggagcagctgggcaagcccaatcgcatccagatggcgatcgatccgcgttatatcaccgattttaaccgcgttcggctggtgttcgtcggccattatcaaaatatctgcgaaaacccggccagcacctcgctgtggctcgacgtcagcaagtccagcgcgctgaagctgcgtttccagacgctgccggtgaaaaacgagctgtcgcacttccctgagccgttcttcgacagccgcgataatcggccgctgacgctgccgatggtgttcgccggccagccggatctcgctcagcagcgtgcggcgggcattctggcgtcctggttcggcagcaaggggcagtggcgcgggcaatccttcccgacgctgtacaacgcgctgccgacgcagcacgcggtggtgttcgccaccaactcgcagcgcccggatttcctgcgcgattatccggcggtcaacggcccgacggtggagatgatcagccacccggacaatccgtacgtcaaactgctgttgattcaggggcgtgacgacaacgatttgatcaccgcggtgaagggcatcgcgcagggcaacatcctgttccgcggccagaacgtaacggtggacaaggtggaacagctggcgccgcgccagccgtacgacgcgccgaactgggtgcgcaccgatcggccgatgaccttcgccgagctgcagcagtacgccgagcagctgcaaaccagcggcatcgagcccggcccgatttcgctgaccatgaacctgccgccggatctgttcctgatccgcagcaccggcatcgacatgcacctgaaataccgttacaccgcgccgcgcattcaggacggttcgcggctgagcgtcagcctgaacaaccagttcgtgcaggcttactcgctggtgccggagcacgagcagggcgcgcagctgctgcgcctgccgttgactcaggggctgctcgattccgacaagaacgtcaatatcccggcgttgcggctgggggccaccaaccagctgcgctttgacttcgactacaccacgctgctggccagcggcgcggaagggcgctgtgaaacctactccttcacgcaaaaccacgcggtgatcgacggcgcgtccaccatcgatttctccggctaccgccactttatggcgatgccggatctgcgcgccttcgccaacgccggcttcccgttcagccgcctggcggatctgtcgcaaacgctggtgttggtgaatcagaaaccgcagccggcgcaggtcagcgcgctgctgaacgcgctgggcgtgatcggcgcgcaaaccggctacccggcgctggccttcacgctgagcgatgactggtcgcaggccaaggatcgcgacgacgatatcctgatggtcggcaccattccgccggagctgcgcgacgacaagaaaatcagcctgctggtggacgcgacccaaagctgggtgaaacagccgacgcggcagccgccgctgcccagcgcggaagcgctggcggaggatacccggccggacagcaagaccgccgtcagctccgagggggcgatgtcggcgatcattggcgtgcagtcgccgttcaacgaccagcgcagcatcgtggcgctgttggcggacagcccgcgcggctatgagctgctgaacaatgccctgctggacagcggcaagcgcgccgcggtattcggctcggtggcggtgatccgcgaatcgggggtcaacagcctacgcgtcggcgatatttactatgtcggccacctgccgtggtgggagcggctgtggtatgccctctctacccatccggtgctgctggcggtgatcgcggtggtgctggtggtgatcctggggctgatgctgtggcgtggcctgaaggccttcagccggcgtcgtctggcgcctgaagatcggggttga

SEQ ID NO: 434004 - DNA, 1701 bp, Serratia marcescens; identical to SEQ ID NO: 233544

SEQ ID NO: 434005 - DNA, 726 bp, Serratia marcescens; identical to SEQ ID NO: 108039

SEQ ID NO: 434006 - DNA, 2010 bp, Serratia marcescens; identical to SEQ ID NO: 233551

SEQ ID NO: 434007 - DNA, 1290 bp, Serratia marcescens; identical to SEQ ID NO: 108038

SEQ ID NO: 434008 - DNA, 513 bp, Serratia marcescens; identical to SEQ ID NO: 108037

SEQ ID NO: 434009 - DNA, 897 bp, Serratia marcescens; identical to SEQ ID NO: 108036

SEQ ID NO: 434010 - DNA, 408 bp, Serratia marcescens; identical to SEQ ID NO: 108035

SEQ ID NO: 434011 - DNA, 243 bp, Serratia marcescens; identical to SEQ ID NO: 108034

SEQ ID NO: 434012 - DNA, 249 bp, Serratia marcescens; identical to SEQ ID NO: 81053

SEQ ID NO: 434013 - DNA, 1503 bp, Serratia marcescens
atgcagattaaatctaatgccctggtgaaaattatcgtgccggccgtggtgattgccgggctggccgtggggctcaaaagctgcaaaaacgaaccggcagaacaatctcaggcaaaacaaagcggcggccccctgcataatctctcgccggatgaactgaaggcgctgggtgtggaaggcgacacgccggaggacaccctgcgcacgcttatcggccggctgaacgatgtgcgtgaccgccagaaaacgctggataagcagaacgcggatttggtgaaagaaaacgagcggttgcgccgacgcaatcaggacgtttcaggacaggtgaatgaggccgttaatggtctgcgcgagcagtacgacaagcggcaggcgcagcttcagaacgaacaactgagcctgacggcgaaaatccaggagctgaccgacaaactcaaaaagcctgacaccgagaaaaaaacggcggacagcgatatcccgctggggctgggcctggacggcatgggcagcagcaccggggggagcgcttctcagggcagcgacggcatgatgtgggtcgcgccgacggaccagaaagagacggacccgcgggatgcggccagcggcaaggcatcacctcagttcccgacttcttttctgggtgaaaatgagctgacccgccagaaagcggcctatgaggagaaagtgaagggccgtacgaatgaaaaaggggcggaagagagcgccgagccggtttacacgctaccggaaaattccacgctggtcggcagccgcgccatgacggcactgcttggccgggtgcccatcaacggcaccgtgaccgatccttatccgttcaaggtgcttatcggtaaggataacctgacggcgaacggcatcgagttaccggacgtcgaaggggcgattgtttcggggacggccagcggcgactggacgctgtcctgcgtgcgcgggcaggttaacagcgtcacctttgttttttccgacggtacggtgcgcaccctccccagacccgacaccagtaacaacgccggcgggcaaaataataacgctcaggctaaacaggataccggcaccagtggcggtatcggctggatctcggatgaaaacgggatcccgtgcattggcggcgaacgtaagtccaacgcctccacctacctgcccaccatctttggcctgtcggctgccggtgcggccggtgaagcgatgagccagggacagtacaccacgcagaacaacgtgaatggcatttccgccaccatgaccggcgacgccggacaggcggcgctggggaaagccatttccggcggcatgtctgaaaccaccgactggatcaaacagcgttacgggatgacgtttgatgccatttatgtgccgcccggtgcccgtctcgccgtgcatatcacccgtcagctggccattgattatgaagataagggccgtaaggtgcgctacgacttcaccctgccgggtggcgtcagtgacaacggcggactggactga

SEQ ID NO: 434014 - DNA, 945 bp, Serratia marcescens; identical to SEQ ID NO: 108032

SEQ ID NO: 434015 - DNA, 855 bp, Serratia marcescens; identical to SEQ ID NO: 121638

SEQ ID NO: 434016 - DNA, 816 bp, Serratia marcescens; identical to SEQ ID NO: 121640

SEQ ID NO: 434017 - DNA, 138 bp, Serratia marcescens; identical to SEQ ID NO: 236469

SEQ ID NO: 434018 - DNA, 969 bp, Serratia marcescens; identical to SEQ ID NO: 121642

SEQ ID NO: 434019 - DNA, 174 bp, Serratia marcescens; identical to SEQ ID NO: 121643

SEQ ID NO: 434020 - DNA, 549 bp, Serratia marcescens; identical to SEQ ID NO: 233597

SEQ ID NO: 434021 - DNA, 672 bp, Serratia marcescens
atgaaagtggttgatatggatattttaaaacaacgccttatgattctgactttcggattctataactttttattcttttatttattattaacctctattgatctaaatatattcttaatgactaggcttgatttctcaatattacatttgcagataattaagcctctgatgatgcttttaatttttttatccataactcacttattaaataacacctcactttaccaaggattaacctgggggaaacctaacaagcagtcatttgtttttttcttgctcataattattgcttacactgcttcatactaccttacgccgaaagaacccttcgttacagaatttactaaaggtttgtcacatggaatggcagctgtaaaaatcgcagccacaattattattttccctctactggaggaactggttttcagaggaattatcctgagttcttttttaaacgcccttggtgaaaaggcgggctatatcatcggtgggctgacagtttctgttttgtttgcagttatacacacacagtattcattgcccaccaaaatccaaatgttttcactttcattaattttctgtggagcaagatatcaaagcagagggcttcttttaccaattctactgcatgctttttgtatcgcgcttggcctatatattgagttaaaataa

SEQ ID NO: 434022 - DNA, 1683 bp, Serratia marcescens; identical to SEQ ID NO: 121645

SEQ ID NO: 434023 - DNA, 909 bp, Serratia marcescens; identical to SEQ ID NO: 121646

SEQ ID NO: 434024 - DNA, 1218 bp, Serratia marcescens; identical to SEQ ID NO: 108025

SEQ ID NO: 434025 - DNA, 615 bp, Serratia marcescens; identical to SEQ ID NO: 108024

SEQ ID NO: 434026 - DNA, 246 bp, Serratia marcescens; identical to SEQ ID NO: 108023

SEQ ID NO: 434027 - DNA, 276 bp, Serratia marcescens; identical to SEQ ID NO: 121653

SEQ ID NO: 434028 - DNA, 366 bp, Serratia marcescens; identical to SEQ ID NO: 233581

SEQ ID NO: 434029 - DNA, 846 bp, Serratia marcescens; identical to SEQ ID NO: 121771

SEQ ID NO: 434030 - DNA, 1758 bp, Serratia marcescens
  misc_feature (1531)..(1540): n is a, c, g, or t
atggctaatgaaaatctagatattgattcaaaaacagctgaagagctttacgaatggtttttagaccaaaaattaatagttaaccgtaggtatcaaagaaaattagtatggtctattgaagaaaaaaatgctttaatttcttcgatgatacagcaataccctattccattattgctattcgtttctattgatgctaaacgtgaaattcttgatggaatgcaacgccttgaagcacttatgagttttattgagcagcgattttcattgaatggctccttttttaatttagatgcaatagctctcacaaagcagcttaaagatagcgggaagctaatacaaaatgaaccaatgttatctcgtgaggaatcagcactgattgcaagatatagatttgccatttcagaatattcatccacagaggataatatcgatgaggtttttcgaaggattaactctaatggcaagattctttcgaagcaagaactacgcagtgcgggctgtgtaagtaacttttcagaaattgtaagaaagatttctactttaatacgaggtgacacgacgcattctgacgttatgggtttaaacaaaatacatagcatctcaataagtaatgaaggtttaagctatggcataaatatagacaatcacttttatatacgaaatcacattttaacaagaagaagtattcgagactcggatgacgaagaactggtagctaatattttaggttatatatttcttgaagacaaaccgacttccggctcaacctctttagatactttttatggagcaggaacctctagccatgctatcgggcagcgtgcgcatttagaaagtttcattcaaactaaaggtgctgaaaaaatcattgacagttatctaattgtttatgaaaccatacaaaaattatatgatgatcatttgatcaacttcagaagtcatatcttaggcaatgattctacatctcaggaatgtcctagatattatcaagctgtctttttagctatgtatagtctgttgattgaaaaaaacatgcagttagctgatccagaagggtttttctcccagctaggagaaagtgtaagtaagacgatggtgcagactgaaggaggccgatgggcagcaagtgctcgcgagaagtgcgttgaggatttgaaggcacttataattagatatttcaccccttctcaaaaacactatgagaatcatgcttggcaaactttaataagaaccattttaaacaactctaaaactgaacagccatcttatgattttaaacaaggtctatttaatctttcgggagaaaacaaggttgatgaaaacagcctaattaatattgtccaaacttgcgttgcaataaacaacattggcagatcatcaaggggctatatattagttggcatttccgaaacacaagccacttcggacagattagtaaggttatttaacatcaagccacaagagtttaatggcttttttataaatggattggatcatgaggcaaagattaactcaaaagatattgataatnnnnnnnnnncttataacttcaccaatgctttaaaacaacaaatattaaaagacattgagctttgctcttataacggcttgcatgttttgaaaattgaaatcaagagtgttggacaagtctgtcattttgaaaataaattttacataagacaaggatcttcaactgagtgtttagaagaaggcgatgaaataactgccttaaatgcttcttattattcaattagttaa

SEQ ID NO: 434031 - DNA, 1620 bp, Serratia marcescens; identical to SEQ ID NO: 108016

SEQ ID NO: 434032 - DNA, 1032 bp, Serratia marcescens; identical to SEQ ID NO: 108015

SEQ ID NO: 434033 - DNA, 168 bp, Serratia marcescens
atgaatatactgcgcgcgggtgctctggatctttgtatctggagcctgcgtgaaaggtacaaagagaaaagccccgagtcgatatccatcaacccgaggccaactctaacgccagacaacgttaagttagcctcttacccgccgcgaggcaaggagaagaaggcatga

SEQ ID NO: 434034 - DNA, 219 bp, Serratia marcescens
atgtctcgcaaagggaactgcctggataatgcagtgatggagaacttcttcggccatctgaaagcggaactgcattacttacaacgctttgataacgtagaacacttggcaaaagaaatagagaactacattgattactataaccacagccgcctcagagagaaactaaaaggcctgagtccggtagagtatcgaacccaggccatgaaggccgcctga

SEQ ID NO: 434035 - DNA, 303 bp, Serratia marcescens; identical to SEQ ID NO: 96991

SEQ ID NO: 434036 - DNA, 351 bp, Serratia marcescens; identical to SEQ ID NO: 140926

SEQ ID NO: 434037 - DNA, 1206 bp, Serratia marcescens; identical to SEQ ID NO: 182585

SEQ ID NO: 434038 - DNA, 141 bp, Serratia marcescens; identical to SEQ ID NO: 36145

SEQ ID NO: 434039 - DNA, 975 bp, Serratia marcescens; identical to SEQ ID NO: 388238

SEQ ID NO: 434040 - DNA, 351 bp, Serratia marcescens; identical to SEQ ID NO: 179543

SEQ ID NO: 434041 - DNA, 363 bp, Serratia marcescens; identical to SEQ ID NO: 179544

SEQ ID NO: 434042 - DNA, 1752 bp, Serratia marcescens; identical to SEQ ID NO: 388240

SEQ ID NO: 434043 - DNA, 192 bp, Serratia marcescens; identical to SEQ ID NO: 98248

SEQ ID NO: 434044 - DNA, 141 bp, Serratia marcescens; identical to SEQ ID NO: 388243

SEQ ID NO: 434045 - DNA, 1185 bp, Serratia marcescens; identical to SEQ ID NO: 388244

SEQ ID NO: 434046 - DNA, 483 bp, Serratia marcescens; identical to SEQ ID NO: 388245

SEQ ID NO: 434047 - DNA, 363 bp, Serratia marcescens; identical to SEQ ID NO: 388246

SEQ ID NO: 434048 - DNA, 546 bp, Serratia marcescens; identical to SEQ ID NO: 388247

SEQ ID NO: 434049 - DNA, 714 bp, Serratia marcescens; identical to SEQ ID NO: 388248

SEQ ID NO: 434050 - DNA, 327 bp, Serratia marcescens; identical to SEQ ID NO: 388249

SEQ ID NO: 434051 - DNA, 1326 bp, Serratia marcescens; identical to SEQ ID NO: 182646

SEQ ID NO: 434052 - DNA, 285 bp, Serratia marcescens; identical to SEQ ID NO: 121747

SEQ ID NO: 434053 - DNA, 354 bp, Serratia marcescens; identical to SEQ ID NO: 97191

SEQ ID NO: 434054 - DNA, 1479 bp, Serratia marcescens; identical to SEQ ID NO: 121753

SEQ ID NO: 434055 - DNA, 828 bp, Serratia marcescens; identical to SEQ ID NO: 95489

SEQ ID NO: 434056 - DNA, 1197 bp, Serratia marcescens; identical to SEQ ID NO: 95490

SEQ ID NO: 434057 - DNA, 375 bp, Serratia marcescens; identical to SEQ ID NO: 95491

SEQ ID NO: 434058 - DNA, 1140 bp, Serratia marcescens
gtgccatctgcatttttcagctcgcccgcagccggcggcatcgtgctcatcatcgcctcagcagccgctatcatcgtggctaactctccgctcagggagggatatgaggtattcctgaaatacaacgccgccggcctctccgttgagcactggataaacgacgccctgatggccgtgttcttcatgatggtcggcctggaaatcaagcgcgagcttctcaccggtcagcttgccacctggggccagcgcgcgctgccgggatttgccgcgctgggcgggatggccgtgcctgcggccatttacgtatggtttaatgcgggcagcgatgaaaccctcgctggctgggcaattcctgccgccacggacattgcctttgcgctcggggtactggcactgctgggcagtcgcgtacctgcctcgctgaaaattttcctgtcggcgctggctattctggacgacatgggcgcagtggctattattgcgctcttctataccagtaatatttcgtttctgatgctggccggtgcggcggtcacggttgctctgctgtttatcatgaaccgtgccgggattacccggctgtttccctatctgctggcggggggcgtgctgtggtttttcatgcttcagtccggggtgcacgccaccatcgcgggtatcctgctggcgctctttatcccgctgcgggtaaccgatccggataaacaatcccctcttgcccggctggagcacggcatcaatccgtgggtgacgtttctgatactgccgctgtttggcttcgcaaatgcgggggtcgcgctctccggtatgacggctgatgacctgatgtcgccggtaccggtcggcgttgcgctgggcctgtttgttggcaagcaggcgggcattttcggcctgtcgctgctggccgtcagcctgggcctggcaaaacggcctgaaaaaagtacctggctgcaggtttacggcgtatcggtcctgtgcggaatagggtttaccatgagcctgtttatcggcaacctggcgtttgcagaaagccccctgttggtggacgaggtcaaggtgggggtacttgccggctctgtactggcagcactggcgggtatgctgatactgcgcttttctccttcgcatccttcccggtaa

SEQ ID NO: 434059 - DNA, 333 bp, Serratia marcescens; identical to SEQ ID NO: 121758

SEQ ID NO: 434060 - DNA, 558 bp, Serratia marcescens; identical to SEQ ID NO: 121759

SEQ ID NO: 434061 - DNA, 3009 bp, Serratia marcescens; identical to SEQ ID NO: 121760

SEQ ID NO: 434062 - DNA, 639 bp, Serratia marcescens; identical to SEQ ID NO: 121762

SEQ ID NO: 434063 - DNA, 654 bp, Serratia marcescens; identical to SEQ ID NO: 121763

SEQ ID NO: 434064 - DNA, 1710 bp, Serratia marcescens; identical to SEQ ID NO: 121764

SEQ ID NO: 434065 - DNA, 276 bp, Serratia marcescens; identical to SEQ ID NO: 121765

SEQ ID NO: 434066 - DNA, 351 bp, Serratia marcescens; identical to SEQ ID NO: 10325

SEQ ID NO: 434067 - DNA, 435 bp, Serratia marcescens; identical to SEQ ID NO: 121767

SEQ ID NO: 434068 - DNA, 219 bp, Serratia marcescens; identical to SEQ ID NO: 434001

SEQ ID NO: 434069 - DNA, 414 bp, Serratia marcescens
atgccccctttcagcctgaagactatcgatcatgtggttctgcgcgtgcgcgatgcggaaaaaagcctgcggttctatacccagacgctgggttgcgacatcgccaaacggcggcccgatttggggctggtgcacctgcgcgccggaacggccatgattgatctggtcgacgtgaacggccagcttggaaaaaaaggcggcgacgcgcccgatcctcaccggcaaaatgtcgatcacctctgcctgcgcatcgatcctttcaacgaagacgaactgctggcctatctgcgatcgcaggggatcgccgtcgaccctgctgaatcgcgctacggcgcggaaggcgacgggccatcggtttacttcagcgatccggacggcaatcgcatagagcttaaggggccggcggccgattaa

SEQ ID NO: 434070 - DNA, 252 bp, Serratia marcescens; identical to SEQ ID NO: 382460

SEQ ID NO: 434071 - DNA, 768 bp, Serratia marcescens; identical to SEQ ID NO: 40324

SEQ ID NO: 434072 - DNA, 957 bp, Serratia marcescens; identical to SEQ ID NO: 118529

SEQ ID NO: 434073 - DNA, 999 bp, Serratia marcescens; identical to SEQ ID NO: 101473

SEQ ID NO: 434074 - DNA, 903 bp, Serratia marcescens; identical to SEQ ID NO: 118531

SEQ ID NO: 434075 - DNA, 2325 bp, Serratia marcescens; identical to SEQ ID NO: 118532

SEQ ID NO: 434076 - DNA, 954 bp, Serratia marcescens; identical to SEQ ID NO: 118533

SEQ ID NO: 434077 - DNA, 522 bp, Serratia marcescens; identical to SEQ ID NO: 118534

SEQ ID NO: 434078 - DNA, 936 bp, Serratia marcescens
atgcccaaggggcgtgatcttttgatcagagtcagggcggtcgcggttaacccacgggacctgaaaagccggcgaaacatcagtccctctgcaggcaatccggtagttatgggatacgacgcttccggtgttgttgaagcaaccggaccagaggtgacgctgttcaggccaggtgaccacgttttctatgccggtgtgctcgatcgccagggagccaacgcagagtttcagctggttgacgaacgcattacggggataaagccggcagcactaagttttgaagctgcagcgtcggttcctctgaccggtctgacagcctgggaaatgttatttgatcgtctgcagttgtcagtgaacggagatgctgatcagaccctgttgatgcttggcggtgcgggcggagtcccttgtatggctatacagcttgcccgcactctgagtcgggtgaacatcatcgggactgcctcccggcaggagagtgtcagagcggttcgcgggtttggtgcgcattatgtcctggatcattcatgtgcgcttgcgccacaggttgccagccttgctggactccctcccattacccggattttctcaacgtacaccacgccatctgcctgggaaaatatggccgaaattattgccccacaaggccgtatcggactcatcgacgaccctgaaccactggatctgcgtttgatcaaatttaagagcgtttctgttcactgggaggcaatgtttacccgccccatgcatgctactgcggacatgtctaaacagcatgatattcttaacaaactctcatgcatgctggattccggtaagctcaaacctccgttgctggcagagtatggcaggctgaatgctaaagcacttcgccgggctcatgaggacatggaaaataaaaatgtgaacgggaaaattgttttttcagggttctga

SEQ ID NO: 434079 - DNA, 1149 bp, Serratia marcescens
atggcgcaaaacatttcgtggtatggcatgatagcacccgaagagagtcaattcagggtggtaaatgtgaaaccagtaacgctatacgatgtcgcagagtatgccggtgtctcttatcagaccgtttcccgcgtggtgaaccaggccagccacgtctctgcgaaaacgcgggaaaaggtggaagcggcgatggcgcagctgaactacattcccaaccgcgtggcacaacaactggcggggaaacagtcgttgctgattggcgttgctacctccagtctggccctgcacgcgccgtcgcaaattgtcgcggcgattaaatctcgcgccgatcaactgggtgccagcgtggtggtgtcgatggtagaacgaagcggcgtcgaagcttgtaaagcggcggtgcacaatcttctcgcgcaacgcgtcagtgggctgatcattaactatccgctggatgaccaggatgccattgctgtggaagctgcctgcgctaatgttccggcgttatttcttgatgtctctgaccagactcccatcaacagtattattttctcccatgaagacggtacgcgactgggcgtggagcatctggtcgcattgggtcaccagcaaatcgcgctgttagcgggcccattaagttctgtctcggcgcgtctgcgtctggcgggctggcataaatatctcactcgcaatcaaattcatccgatagcggaacgggaaggcgactggagtgccatgtccggttttcaacaaaccatgcaaatgctaaatgagggcatcgttcccactgcgatgctggttgccaacgatcagatggcgctgggcgcaatgcgcgccattaccgagtccgggttgcgcgttggtgcggatatctcggtagtgggatacgacgataccgaagacagctcgtgttatatcccgccgttaaccaccatcaaacaggattttcgcctgctggggcaaaccagcgtggaccgcttgctgaaactctctcagggccaggcggtgaagagcaatcagctgttgcccgtctcactggtgaaaagaaaaaccaccctggcgcccaatacgcaaaccacctctccccgcacgttggcagattccttaatgcagctggcacgacaagtttcccgacttgaaagcgggcagtga

SEQ ID NO: 434080 - DNA, 3075 bp, Serratia marcescens; identical to SEQ ID NO: 118525

SEQ ID NO: 434081 - DNA, 1254 bp, Serratia marcescens; identical to SEQ ID NO: 118524

SEQ ID NO: 434082 - DNA, 306 bp, Serratia marcescens; identical to SEQ ID NO: 102371

SEQ ID NO: 434083 - DNA, 1206 bp, Serratia marcescens; identical to SEQ ID NO: 120241

SEQ ID NO: 434084 - DNA, 654 bp, Serratia marcescens
atgtccgaaagtcagcgaaatttgtttcgtacatacgttataattcggacaccctttgcgtacggaaagtttcctatgtcacgagtttttgcctactgtcgggtctccactctggaacagaatacagaaaatcagcgccatgaaattgaagcggcgggttttgccatcagaccccagcggctgattgaggaacatataagtggttcggttgctgccagcgaaagaccagggttcatccggttgcttgatcgaatggaaagcggtgacgtattgattgtcaccaaacttgaccgactcggccgtaatgcgatggatatccgaaaaacagttgaacaactggctactttagatatccgtgttcattgtctcgctctcggaggtgcggatttaaccagcccggccggaaaaatgactatgcaggtgatttcagctgtggctgagtttgagagggatctgctgattgaacgcacacattcagggatttctcgggcaagatcagccgggaaacgcttcggtcgtccgcccatcttgagcgaggagcaaaaaaaaatagtgtcagagcgccttaattccggggccagtatcagtgcggttgccagagaatttaataccacccggcaaaccatactccgggtaaaagcaggacagcaataa

SEQ ID NO: 434085 - DNA, 1542 bp, Serratia marcescens; identical to SEQ ID NO: 120972

SEQ ID NO: 434086 - DNA, 540 bp, Serratia marcescens
atgtgctttgacttttcgaaaacgctccggcgctcgtcttgcgtgaattcccaccaagctgcgttttttcggatcggtatcaacgcagcgcaagttgcttctgggcgcgctagcccttgctgcttcaccacaatttcgttcttctcttcgcgcatgacataccgttcattgcttgttattccgcgaagtacccagggtgcattggtttcgggctgcaactctgaggcagatattacgttgagccttttggcttcaggcagtgacttgccaactatggtttcggttccaacgatccgccaaagaccgctgtctccgccgacgaatgcaaataatcgtgtatccatttcacccccttcatgtgagtgtgttaacttttttacagcctcaaaaaacctatctgcccatcccatgcttgtgcatcatcgtctcgcctcgcttagcgtagtattgcattacgcttaccagcgcccccagttaaattgtaaatatagcatcgcttggtttcaagtaataactgcaatttcattacgcggcgagtaa

SEQ ID NO: 434087 - DNA, 1647 bp, Serratia marcescens; identical to SEQ ID NO: 129980

SEQ ID NO: 434088 - DNA, 327 bp, Serratia marcescens; identical to SEQ ID NO: 91887

SEQ ID NO: 434089 - DNA, 1077 bp, Serratia marcescens; identical to SEQ ID NO: 97051

SEQ ID NO: 434090 - DNA, 1005 bp, Serratia marcescens; identical to SEQ ID NO: 31749

SEQ ID NO: 434091 - DNA, 1005 bp, Serratia marcescens; identical to SEQ ID NO: 53712

SEQ ID NO: 434092 - DNA, 969 bp, Serratia marcescens; identical to SEQ ID NO: 121809

SEQ ID NO: 434093 - DNA, 267 bp, Serratia marcescens; identical to SEQ ID NO: 126402

SEQ ID NO: 434094 - DNA, 1089 bp, Serratia marcescens
atggaaacaatccttcaatcatttaatgaaaaaaaagcaagttatgactcttttgcaacaagcttaaaatcattactaaacagcctattgttaaatgagcgcatttccattcactctttagaaacaagggtgaaagaacgagatagtttggaaaggaaattatttaaaaaagacaaatacagaagcatcgatgagattacggacatagttggtgttcgtattatcacgcactatgctgacgacgttgagagagtcgcagaagtaattgaacgtgaattttctgttgacaaggaaaactcaatagacaaaagagcctcactcgcacccgatagatttggttatttatctctacattatattgtatcactcaataaaaacagatccattcttggggagcacaaaggatataagagtcttaaagctgaaattcaaatcagaacaatccttcagcatgcctgggctgaaattgaacacgatatagggtacaaatctaacacaagacttccagatgaaataaagcgcaaattctcacgactcgctggattattagagattgccgacgacgagtttttaaaaataaaagattacatagaagagtatagagagaaaataaaccgagaaataaagcacggggatagcgacatacctataaacacactctcactctttgagtacgcagagagaagcaatagcattgatgtgatatttgacataatcaacacaaagtcaacatataaattcacaccttcattaaataccgagcatattgatatagccgactcagttataaagggacttgattttataggaatacaaacaattaatgaccttgactcacttattaaaaacaactccgaactagctgcttggagagttattagcatgaacgaccggctaaaggattttttctcaaaaaacaaccttcccaaactatccgtcatcgccctcttaatccaggccattatcgcattaaaaaacgataaagaagtagaaaaggatttcgctaacaaagtaatgacagcaataccatcagaagggattgaagggttcttcgaaagaatacgaaccggcttagcacacccacattaa

SEQ ID NO: 434095 - DNA, 1068 bp, Serratia marcescens
atgagtggttctgacagtgtaatgctaggtaatcgttataatataattaaaaaaataggtgagggagggatgcagaatgtattcctcgcacacgatgatatccttaataggaatgtcgcactcaaaacacccaagaatcaatctgctttgaaacggtttcatcgaagtgcaatactttcttcaagaataaatcatcccaatgttgctaaaactctagattattttcatgccgacgggtgtgagtatttgacagaggagtttatagatggggttgatttggataaggctattcttggtaagtataaatatgttgacccatgcttgacggcgagtattttccatcgtttgtctaaggctctatctgcttcgcaccatgcaggtgttattcatcgtgatctaaaaccatcaaatattatgattaccggtggaattaatgcctcagaagtgaaaataacagatttcggaatatcaaaaatggctggggatgaaattgatgaggcagctaaaaatggcgatgcttcaattacaacctcacaaacagcgatgggtgcattgccatatatggcaccggaaatcattgagcgtccgaaggacgtttcaactcaaactgatgtttgggctataggggccataatatacaagcttttaactggtgagtatccgtttggtaatggttacagagctattccaaatattttactcggtactccagtgccttaccctgatttcgttttaggaaatccacagtttagaacgctttcaagtcaaataatcgatattatcactctatgtttcagtaaaaaccctgcagatagaccaactgcagatgatttggtacatatgtgtggaaaactttgttatagtttagcacctaggtattttggaacggtaggagatattccatatggctcatatggctttatttttagtgaaactggtgagcgagtgtttttccattttgatagtgtatatggagaaactttaacttcaggtgatgaggttatactgtcaaagtatttaggtgggggttatgaccgagctcatcctgtcattaaggccaaaggataa

SEQ ID NO: 434096 - DNA, 1065 bp, Serratia marcescens
atgaaaagaatgagattgccaactagatatcagccgactgaaaaatatagttctggagggtttggtgatgttctaatttgtacagacactcacttagataggctggtagctataaaatttataaaagacttggaagaaatgccaaggatgcaggatgaaattaatgcattgatgacacttcgttcaaagcatgtagtgcagcttttcgacataattgaaaaagatgggcagttagctattgttgaagagtatatccctggtcctgacttagttacgtatgctgattcaattgaaaatgtgctggattttataaaggtagcttggcaaatatcagcaggtatagctgaaatacatgctcatgaaattgttcatagagatataaaaccaaataatatcaagttagatggtgagggaatagttaaaatttatgactttggattatcgcgcagtaatgataatgccaaaaccgtaggttttaagggaacattgatttttgctgctcccgaattgtttaaggggcgtggggcggttagttttacctctgctgttgatacattcgcctttggagttacggcgctttgccttgctaaggttccgccacctcaagcactcaatacggcaacgaaaattttaacagaaaatccattcttagcatctcctttcaaaatacctagatctattcaaaagatcttgtttaaatgtttgtcggttgaaccggatttacgtcctgaaatgtcatctgtaagtatgttactacagcgacagttgttgaaaaactcccatcgagctctgcttattcataagaattcgcaacatgttttagataaggataataaaggagttactctcaggcgtgctggagttggaagcgtaagcgtttcatacaatggatttgaatttttcatagaggacttagatggtgaggttactgtgaataataggacgcctcgagttgatgatattttgccagaatcatgcgttataataattggcaagatttcacgtccatcgagagagcggagtgctataacatttgacatttctcatccggaggttgttttatga

SEQ ID NO: 434097 - DNA, 1215 bp, Serratia marcescens
gtgaaaccagaaccttgccgaatgttagttgaacaacttcatagttggttgcatagaaaaaccatatccagttcaatcagaaggattgctaccttacctatcgctttggctacagacattggtctgagtcgagatgagaaccaagatagggtggcagtgatgaagtatcgttcgctgaatcgaagccatgatacggtcgttatcgccctggctgatggaatgggtgggatggttggtggtgcaaatgctgcatctttgacaatttcatctttttttagctcaatgatagaaaatgctcatgttgatttgagcgagagattggttgatgcagtccaaagtgccacaaatgctgtttataaacattaccaaggagagggtggggcgactttatctgcggttgtaatagaagatggtgattctattacaggagtgaatgtcggtgatagtagaatttatgacatcttcaatggttcaattaatcaaataagtgaggatgatacagttgcggccttagctcagaaatataatgaaaagaaactggagctagatggaaggtttaatcatgagttggttcagtttataggccttgatggtgttttagaacctcatttttacatgattcagccagagaagtttaaaactgtaatacttacatctgacggcgcgcatacaatcggtaatgacaacattataaggttaatgacgcactcaaataatataggtgtttttgttaaacgtactatcgatcttgctaattggttcggtggtggtgataactcatcaattgctgcgattgatttgtcctattttaataagggcaatactggctctcaaaatggtgttataaatatttgggatccatacggtgaattgcaagtggtgaatgtttttagtgacgattctcaagatgtaccactgactgaaagtaatatgccagaggtgcttaaggggggatcggaagaggcttgtgagaaaccaaaagatttgattggtgatatctgtgaatcgagtgaaccaaaagaactgtcagagcaattggatatggaaaaaggtactcatctcaccaaaaataatagtgatgttatggaaggaaagaaaggagctcgttttaaaggtaaaaggcaagctactactccagcagttaaggataataagaaaaataaggttcaattagatatttcatttcttgataaaaatgatggtaaaagcaaatga

SEQ ID NO: 434098 - DNA, 1095 bp, Serratia marcescens
atgaagaaaaaaatagcagatttattagcctttaaaacaaatatacttgaagtgttcgttgttgcagtattaattgctttgggcgtaaatatactttcctcagggattattaattattttgaattatcatttttgaaaatgattacagttggctctctacttatgattttaggcgctgcaatctttctgagaaacgcctatcctatgaataacggaaagtataattttgatggggtggtgtgcttagatgatgaaaacaaaggattagtgccaattgaaggttacgattttgcagaggaggttagtcgttatctaaaaggtctgtgtgcagaaaataaggctatccataaattatggactgaaaattcaattggctatggttatgatattcaaggtggtgtggtaaccatgaaaaaaaacaaagcaaataaactgtttgttgaagcaatagaatactatgttttaaaaatgctcgcacttcatttaagtagtcattttaatggcaataaatctgtttctgaggattatttagttaagctagataggaagagtatccctggtgttcttatgggaaatagatttattgatactttctctaggcctatggatgagcgtgagcaatttattgaccatggtccctcaccatctataggtaaggttgtatatgcgtatgggaaagggggcgcaatttttgaccattttgaaatggttcttcccaaaaacagttcggtcataagagagagtgactccagcataagtgtgattaccaaaagattcaaaataaattatcggcctttgttcgaaggcttgagtgataatctaccaagaagatttgaggaactctatttaggtaaggactttcattcattgtcaacctattcagtaggcttggtcgttactgtggattttaatgttaagtcgttactaacaaccaaaggttgggagtattattggtggcttgattcttttttagggaaattggaaagctcattttcaaaagaaatattcttatctaaaatttcttgggatcaaaatgctgcaatgtttcttatagctgagaataggaggaaaatccaacacaagggagagtcttaa

SEQ ID NO: 434099 - DNA, 183 bp, Serratia marcescens
atgatgatttttaacgtattcggccgtctgctgggcgtgacgctgccggagcgcaaatatgctcccagctgcgatatcgtgctgccggccgaactgcgcgaagaggagatcgccggctatctgggggatatttatcacgaggcggcgacgccgcagcggccggaggtgtttcgcgtcgaatag

SEQ ID NO: 434100 - DNA, 1218 bp, Serratia marcescens; identical to SEQ ID NO: 422325

SEQ ID NO: 434101 - DNA, 228 bp, Serratia marcescens
atgaccacagcaagcgaacttatcagccgcgaccttttggagtggtgcaatcttcaaaagcgctactggaatgcttcttctctgccgcgcgctgagcgattcaagcataacccaaagcgcaaacagtaccggcgagacagggtgttaatcaggattttgaaacttaacatcgatgcgacacgtaaccgaattacgcgggggatgcatgacgcagacactaacgactga

SEQ ID NO: 434102 - DNA, 696 bp, Serratia marcescens
atgacttgtagtaggggaaaagcttctccaaacgcaaatacaattagacggctttttgctagttcaggcggtttttgccaaaatccacaatgcttgcaacctttgtttgttgatgctggtgacaaaaacataacaattggagaacttgctcacattttcagtgccattgataatggcccaagaaccaatgctgatctaactgatgaacagcgaggccattttgataatattattcttctatgcgctaattgtcatacgacaattgacaaggcagaagaatattttactgatgaaattattcgcttttggaaaaaagaccatatcgataagattaatgcaacttttggtgttaaaacatatgagaacagagaatctgttaggcaggagttagaaaaatacttcagagaaaacaatacaatttttgtaacatatgggcctacccaagagaatagcattgatcccgaaaatccaaatgcagaagtgtggttaaggaaaatacaatctcacattttacccaacaatagaaaaatacagcgactaattgagaaaaattatcatctcatgagtgaagatgagaagagtgttttttttaagctttgcgttcatatagatgactttgaatcaaagcatctgggtttaaccgatgctaatggtattaggtttccagagactgcatcagaactgtttataggatga

SEQ ID NO: 434103 - DNA, 651 bp, Serratia marcescens
atgagcataaatgcaagtaaaggctatatttcatggatggccggaaaattacaagaaagcaagggtattgaaaatattgaggtagcagataatgggactttagtggttatcactactgatggtgaaagctattcgattggagcaatcaacactggccggataacatgccccgaactaaatgaatatctagagagtaaggaaattgattttctatcagttaagggaggagttgaatttatctctgaggatgcaatgaaattgcttgagcaaaaaaaaataggagtggattcatttgggcatatagcatcttctttaagaactaacaatccatctgaacatattgataaagaacatttttttattaaccgagtattcaaacaacattcacacgtaagctctgtagagcgagagaccaacaaaaaatatagaattaaaagacgtgggatggcggatttggttattgttgctgtgaatgattatgatatgactgcaggttctgtaagagatgctgtagggctgcatggcaattgtgatattgtttttgcttccaatcccaatggacgactgacgactccggcaaaagaagccgctgacagtattggagtcgaactttacaagttgagtgatttattacgaagaatttcacggtag

SEQ ID NO: 434104 - DNA, 654 bp, Serratia marcescens
atggaaattttttttatcgtggttggcgtcgtggcagtaataatttttattatcagccagaaccgcaccaaagtctcagacagaaccgttgtcacccacaacagaacaataaaaaccgacgatggggagatccgcgtacagcgcacacaggttatggatagtacttccactcagtaccacaagcctggggctgcaagtgtaaccgacaaaacagaatatgacctgcaagctattaatgattactacaagcagaaggacagcatagaaacacagaaaaaaattgtcgcagatgaaaaacccgtgattgaggtgcaaccagtactggtcaataagccaaaagaaattcccagtaatactgataggtttacgacagaacgaggcaaagcttccagcatttccgaagataagaagcagtgtacaagatgtagaataaacttaccgtataataaattcagcaaatctagcaaacatcccgacggtttaacaatatggtgcacagattgtcttaagggcgaaaagaacaccaagcacatgaaatggtgccctatgtgtaaggttcgtcggaaaagaactagtttctacccaaataactcaaatgcagatggtttaatggcgtggtgtaaaacttgttgggataagcacaagggaagataa

SEQ ID NO: 434105 - DNA, 234 bp, Serratia marcescens
atgacaaggaagctgatcggaccgcaggattacaaaaccctgtttaacgaaatgcccggcggcccggagattctcgacgaactgaccgcgcgtttcgggaaagcaatttatgtgaagggcggccatgaggctgaccgcgaaacctgttaccgagccggacaacgatccgtgctcgatttcattttgctgcaacttaacagagcagacggagtaaacgacgatgtggaagattaa

SEQ ID NO: 434106 - DNA, 225 bp, Serratia marcescens
atgcaggatttagaaagaaaaatttatgaggtgctcgcaaagtcggaagccacggttgggctaggttcgtctgatacagcaaacaaactgatcgaagcagcgcgaccgttttataaacaagccgatcgcacaggcaaatccagtatcatcaacaggctcaactcgatgagaaaagagccggggatacaattcccggaaaacctcggtgaattgctcgaaaaataa

SEQ ID NO: 434107 - DNA, 903 bp, Serratia marcescens
atgagctcaaaagcaaaaaaaatagagaacacagaacaagatgatagcacaaataatgtttgtgggataattatgccgatagcggatactccgacatatcctaaggggcattggacggatgtgtataatattttaagcgaagcagctataggcgctggttttgaaccaaatatggtaagttttgatgatgatgtaagtgtaattcaaaagcgaatagttcaaaatatttacaacaacccaatagttgtatgtgatataagctctcgtaatgccaatgtgatgtttgaacttggcatgagactagcatttgataaacctactgtaatagtcaaagatgagaaaacaccatattcatttgatatttcatctatcgagcaccttgagtacccgagcgatttacgatatcaagctataaacgaatttaaggcaaagctagccggtaaaatatcagaaacccacaaaagagctacgactgatcctgagtacaccacattcttaaaacactttggaacatttaaagttgcgaagttagacgaaaaagaggttggagctaacgagattttcctggaggaactcaaagagataaaaagggttttaaataatgccattaaaaatgataataacatcgaatatatcaagaagaattatttccctagactgattataaaagagcataacgtcaaatcaaccaataaatattcctatcagttcagagagcctaatcttggagatagatttgatgagttcattaatataattgaaaggtttgatcgtgcgcacgcgatggggttttctggggctgataagattgatggtgattcggctactgtattctataatcgccctcaaaatgaccaattattagaaagcatgcgaatggaagtggctcaatattttgcttaa

SEQ ID NO: 434108 - DNA, 807 bp, Serratia marcescens
atgacggaaataaaatcaccagcgttgcgttatcatggcgctaaattccgcctggcaccatggattattgagcacttgccagagcacacctgttacgttgaaccatttggtggtgcagctggcgtattgctgaggaaaaaacgcagttactcagaggtttacaacgatattgatggggatgtggtgaacttattcaaagtgttacgcgatcctgccaacaatgctcgcttacgcgcactttgcgcattgaccccttatagcagagatgaattcaacgccgcttacgaaccaacagaaaatccgatagagagagcccgacggatggtggttagagcctgcatggggtttggctccgccgcagctgtgggcgggcaatcgggattccgcagcgatagtaagcgtcagtatgcgactgcatctcatctctgggcaagctaccccgacaatctggcagcagtagggcaaaggtttagtggtgtgatcatagaaaacaggcctgcagttgacgtgataaaggcgcatgattctgaaaagacggtgttctttatagaccctccatatctaccagaaactagagttcagcgtaatcggtactaccgctttgaaatggataaggctgaacactacatgttattgaatgcgattctaaagattaatggaatggttttgatttctggctacgactccgagctttataacgacttgttaagagggtggcgtaaggtaaaaaaaacagcgagaataagtgctggaagaggtactaaaaccagaaccgaatgcttgtggattagtccaaactcagtgtga

SEQ ID NO: 434109 - DNA, 408 bp, Serratia marcescens
atgaaaaatatcgttgaaaatcaaggtataaaaactgataagccgctggcgatgagttatgaagcattgaaggctgagcgcgatgcgctggccgatcgagttaatgcgctggctgtggagaatgcggcgcttaatgaatcgcttgactcaatttgcaatgcatacaacgaggagatgacagatctactcgatatcgcagtaaaaatggcactcaaacttcaaaccccggccactgacgcagcactggcagctatccaggcgcagggagtggagaagtttgcggcttacctgtggaaacgaggcaatgagattgtttcagaaggcggaaaaaagtcagaggcaattcaggttcgagtggctgcaaaaatggctgaaatgttcgttgaagagctgcgggaggccaaatga

SEQ ID NO: 434110 - DNA, 249 bp, Serratia marcescens
atgactacgagcattcgaaccatagatctaaaggttggtgacaagatcagtttttacggtgcgctgtttgaaatatcgagcgtgcgccacatttcacaaccttaccgcgacgacatggggccagaaaaaaccaccattgccaatggcgtttggcttagcgggaatgagatccccggatattttggaaaaaaacgcgactggacgtttcagggaaaccaccgggcaacgctggaacgcgttgacaactaa

SEQ ID NO: 434111 - DNA, 1779 bp, Serratia marcescens
gtgacttcactaatcggtggaaatacaagtgggaaaagtagtgctttgcaggctgcccagcttggtatatctatattacaggcttcgtatcgtaatcgtcgaaaaaatggtacttttgatttttcgggtacagtatcaaatgacgctgtactttttcgcccgactgagcatctattggatcttaaacgtggtgggaattcaactcaaaactctggatttttcatcgcttattatggtgtagatctcgatacgaataatagaaaatatacagagatagaaatacgtcgagggaagaatgctaacattgctataacgcgtggtggtgatgatgatttttctgctgtactcgcggacgttgataagcctttttctatacttacacctgggatttctggcctttctatgagggaagagtggagaacaaagggagcaatagatgctgctgtaatgcatggtgacgcaaatctatatcttcgtaccgtgcttgaccatcttttcacgcgcgatttagatcaggtatcgaaatctgcttggcgtgagggatgtgatataaacttactgcctgatagcggttggaaaacattttctacattgctagaacgttgttatcaaggggtgcgagtcatagtagatcatgatcctcgacgtgatcgttatgtgaaagtagatgtcaaaacacttgactcagtagttacattagatatggcttctaccggtatattgcaggttattcaaattatcgcttatgcctgcttttattcgccaccacttcttcttctggatgaacctgatgcacatcttcatgctgatagtcagtcacgactctacgaggcacttagaggagtagctgaagaaacgcaaactcgtattctatttgcaagccattctccccagttaatacaaagacttatgtatgattctggagctagtgttatatggatgagtgaaggcgcgaagattcccgtcgatgatacagaacgtcctgcgataccaatcctcatggcactcggagccttatctgcaggtgcagatgtcttcgatccgaacaagcctataattctcatgacggaagataagttaacacgaccagtgaaggtattagctcaagccaatggggcaccggaaaatttggctgtactctcttataatggatgtggaaatctatctgcggctaggttgcttgctagtatgataactgacatgcggcccgatgttaacattatcatccaccgagatcgtgactttaggactgatcaagaaatgcattttgagttagaatgtgcagctgcagaacgtgaacgtaatggggttgatcgtgttacagaagtatttactcccttcaatgatgttgagcattcattttcccaagctgaacatctaaaacgagtattcaataatattcaaccggacctgattgacgcagctatcacacaggtgacatcactgagacgagatacattggtaaatgctgctcgtgtcgctcgtgaaaaaattgcgtcatcattatatagatcaccaagaaaacgagcaaaaccacaatgggttgattcgggaatgcctgataatgagccaagaattgaagggtttatccctccgaatggtttggttgcggttgcttttgaacatactcatgggaaaattctgatggatggtttacgccccgctcttcatcctcatattggaggagctacacaaaaaattaatgatagtatttacactgtgaccgatactctcagtactccaacttgggcagcagtattcaatcatgcggaggtttag

SEQ ID NO: 434112 - DNA, 621 bp, Serratia marcescens
atgctgatgctgtttctcaccgtggcgctggtgcatctgattgcgctgatgagcccggggccggacttctttttcgtgtcgcaaaccgctgccagccgctcgcgccgcgaggcgatgatgggcgtggtcggcatttctctcggcatcgtggtgtgggccggcgtggcgttgatgggtctgcatctgatcctgcagaagatggcttggctgcatcagataatcatggtcggcggcggcatttacctgtgctggatggggtggcaactgctgcgctccgcgcgggcgcagcaagcgcagcctgcggcggaggcccaggtggcgttgccgaaggccgggcgcagctttattcgcggttttctgaccaatctgtccaacccgaaagcggtgatctatttcggcagcgtgttctcgctgttcgtcggtgacagcgtcggcgccggggcgcgctggggactgttcctgctgatcgtcgccgagaccttcgtctggttcagcctggtggcggtggtgttcgcgctgccggcgatgcgccgcggctaccagcggttggccaagtggatcgacggggtggcgggggtgctgttcaccggcttcgggttacacctgatctttacccgctga

SEQ ID NO: 434113 - DNA, 627 bp, Serratia marcescens
atggagtataactctacagatcctgaaattgataatcaagaattataccttcaacaagcctatacttccgcaatagaaaaagagatagttaacacttttaagacaggggtgttatgtttaagttcgaaattcaacagccctttgatgtggtctcattatgctaataaacatcaagggatctgtattgaatatgatataactgacgttcaggatgataaggtacatcaggttgtttatggcggctctagaaaaatcctaactagcgatgtcagtacttggttaaataatcgtgatgataatattaaattgaagcaagtttgtttactaaccaaatcaaatgaatggcgttatgagtccgaatggaggatttttggtagaattggtgtaggtgactcattgcctcctattaactcaataatattcgggcttaaatgcgaagacgttacaatttacaccgtaatgaaagcaatgatagccaaaggcagaaagcttaaattttggaaggtgtataatgatggggataaatttatactaaaaagaaaacaaatttatcctcacgattatgaaaatgattttccatacttgtattcttcaagtgaaatactttctgacttagattgggattaa

SEQ ID NO: 434114 - DNA, 510 bp, Serratia marcescens
atgtttgattaccaaacgtccaaacactcacacttaaacagtgcttgccgccgattcgctcaggcacacaatctggcagagctggccccgatgctgaatgtctcgccgcaggtgctgcgcaataagctgaacccggaacaaccgcacgagctgacgctttcccaactggttacgctcactgcgatcactgacgacgcggcaattcttgatggtctgttagcgcaactttattgcctgccggcagtgccaaccaacgaggcgaagcccaacagcttgccgactcacacattaagcgccactgcggcaatcggcgctatagccggcgaaaccgcatccactgcgcctatgacgcaatcccgtaaaaacgccattctcgaccgcgccaaccaggcaatccgtgatttgtcgctgatcgttgtatcagtagaagcgcgtttccaatctacgccagtgctggccgctgctgttgacgtgttcaacacctgcgcgcctgcgttcggcatgagctga

SEQ ID NO: 434115 - DNA, 627 bp, Serratia marcescens
atggcgaacattgagatcgtattgggaatccgtcaatcttttttgttcgactggaagaactttatggatttcaaaaccggaggacgtgaggtcattgaacgcctgattgaggcgtatggcttcactacaagacaggcgttatgtgatcatttaggtgtctcaaagagcacccttgctactcgttatatgcgcgacatttttcctgctgaatgggttatccaatgtgcaattgaaacaggagcagcccttcgttggctagcctctggcgaaggctcaatgtttgataacaagtcgtcagatattgtagatattccacgaaaaaaacttattgatggagttttatatgaatcaaatcattactctttcgataaggctctcttaccaagaagtttgcaggtgccattaattatcattcatgaagaaactatctatataacagagaagaagtttgaaaaattcaccgatggaaattggtttataaaacttaacgaccttgtaagcttgagaagcattattaaaattccaaatgaaaaattaaaaatagataatggcaaaataaatttcgaatgcaaaataagtgatattgagttaatttcaaaagtcacatcccgcattgaaaaggaatga

SEQ ID NO: 434116 - DNA, 882 bp, Serratia marcescens
atgcgaaaattccttactcaattttatcttataaacgtagggttggagtgggtaaaagaaacaatcccaaatcaaatggaacctaagctagagagaaacgcgagtaaatcggccagtaattatctggctgaaactgactttaaggatcttagtgatattttgtttttaaaatacacaaaacatgaaatcacctctatttttgaaaagataaaactagcaaaaacccctgaaaatataaaagaaataacagaaatgctaccaagttctaattgggagcgctattttaagaagcatatagattgcgacgataaacagttagaaaaaaactggggtaaattatacatattgagatgcaaggttgctcataataaatcatttacaaaaagagaccttgaagaactagaagaactagcagccattgtaaaacccacaatagagaaatcgatagagaaattagaactaatagagataacagaagaagaaaaggaaaccataattttaagcagcatcgcaaacaaaaatgaaaatataagtgagctctcgacaagatttaaaaacggcgccaaaaagcataacgataaatatatgaaaacattatttgatatcgagaaaaaattgatgagaaccccatcgacatttgtaaaaactagacatataaacacaccttcattaaatgacctaataaaaagcgcggagcatcaatatagagtagtgaacgtattagacggaaataattttatttcattcactgataaagaccacgacacttcaaagtatctaaatgaacttctaaacgcatttaatgtatctgaacacgatataaatgacaatgacaatgacaatgacaatgacaatgacaatgacaatgacaatgacaaatga

SEQ ID NO: 434117 - DNA, 354 bp, Serratia marcescens
atgttagagggcgggctctctccaaatgccagagataaggttcataatcaacccattatatttgaaagttttgatgcggcgaacaccgaaacattaaagatattaattgcatacaaagctgatgttaatatcaaaggcgctatgagccgaatgccattaattaatgcgctgtataacagctgccctgagcacattgaggttcttttggctcatggcgctaaccccttagccaaagatgactttaatgacagcttcctttctctgatttctgcggaaatagccaaaggggataagagcaatgcgtacataaaaaagctaattgaagttaaagaaaaaataaaacaggtgaattag

SEQ ID NO: 434118 - DNA, 354 bp, Serratia marcescens
atgaccgaagtattgacctatgaagtactaaaggctgagcgcgatgcgctggctgtggagaatgcggcgctgaaggatgggttcgaatggctttacgcggttgtctcatctgatgaagtttccattcctgatgagaaatatagcgccgtcacaaatgctgccgccgttttaagtgaaaccccagccactgacgcagcacttgcagctatccaggcgcagggagtggagaagtttgctgatgaccttcacaaaaccgccatggctatgtgctcagtcaagccggacaacaccaccccaggcgcttatgcgggactggctcgctcgttcgctaagaagctgcgggaggccaaatga

SEQ ID NO: 434119 - DNA, 483 bp, Serratia marcescens
atgagcaagctatacgacattgctaacgattacgcgaagctcatggattctggtttagagccagagatgatagccgacaccatcgaaggaattgatggcgagctggttgataaggtcgagcagttgcttgccatctgcaaaaacgagcagctctatgctgaggctctgaggaatgaatcaaagtcactacaggaaagagcattggtagtcgaaaacaagatttcaagtatcaaggagtacatagccagatcgcttgaaaccgctgggaagaagtcaatcagagcgggtttgcaccaagtaactgttcgtgttccatcgcgtcaggttgatatcaccgacgcatctatcctgccgattgaattcgttgagtatgagacagtcgttaagccggataagttggccatcaagcaccaactggacgcgggaatcgccgttcctggtgctcagataaagcttggcaaaccatcattaatcatcaagtga

SEQ ID NO: 434120 - DNA, 171 bp, Serratia marcescens
atgatgtacgccatcgcagggcagtccggcatgggctgttccaataactttcttctcaaaatgcagcatcacaaatcaaacatcctgaccagcgctagctttacgccgccacctcgcaagagctggctggataagctaatcgacattttacgcaccgagggtcggccatga

SEQ ID NO: 434121 - DNA, 156 bp, Serratia marcescens
atggaaatcgaagttagagtgacaaaagaagagcttgaagaaatggatacgaacgagaaaggacttcatagcgcaatcctacgcgatgtagatggcgcagagtcttctgaaatgcagtactcaggattcgacgtaaaagtagtcgtgactggataa

SEQ ID NO: 434122 - DNA, 321 bp, Serratia marcescens
atgagtgaatttaaaggaacgccgggcccgtgggctaatgttggcggttgggttgacgctgagaatccaagaagaatcaccatttgtaaaatggggcaaattatcaaagaaaccactgagcaagtgcaagatgccaacgccagcctcatcgcagcagcgccagagcttcttgatgcccttcatgagttcagccgcctctatggaaggttgtgggatacaaaaaagcctgagggcggtttcctctcgcctgaaagcgtgaaggaatacgacaggattcatgtaatggcagagaaagcaatcaaaaaagcgttaggtcgctga

SEQ ID NO: 434123 - DNA, 990 bp, Serratia marcescens
atgtcagaagaaaataaaaaaccatccagtaaagcaaggggcggcgtagcacgcgcaaaatcgcttaccaaagagcagagatcggaaatcgccaagaaaggtgcggcagctagatggaaagacaaaccattgcgtgcaacacacaaaggaagctttcagcaggatttcggcattgatgttgagtgctatgtattggatgacgacaacaaaactgcagtaataagccaaaggggaatgggagaatccattggtcttggcgagggcggaagcagactcccaaaattcatacaaggcaaaacgatctcagcatacattgggcatgaacttagagaaaaattggaaaatcctcttaaatttcaatatcaacagccgggcgccaactctccaggaaatcctattgtccacggctatgatgtagccatgttgatagatctgtgccgagctatatcaaaagcgcactctgatgggaagctgttatccagccaagaagggatagcaaagcaagcaagaataataatagatgcatctgccaaggccggtattcaaggattggtatatgcccttgcaggatacgacagaacaaaagaagaagttatccaggcatacaagctctacgtagctgaagaggcaagggaatacgaaagagagttcacgcctgaactttatgagcattggtataggctttatggcattgagaagccagtacgaggaaggccatgggctttcaagtacctaaccattgatcatatttattacccattagcaaaaagtgaaggcaaggtgtttaacattgcaaaagcagccaaagatgaaaagggaacaaaaagtgaaaaaattcatcaatttctatccgaggttggagttaaagctctcaggacgcaaataggcaaggtaactggtattgccatggtttctgaaacaagagagcagtatgaaaagttcatagatgagaaggttatcgggcaaagaacccttgacatagataattaa

SEQ ID NO: 434124 - DNA, 798 bp, Serratia marcescens
atgttaatctcatcgattgaaaaaatcaacacaatgaagattgaaaaaataaacaacgtgtttactctggtgtatccggaggattttatgaacagcattgccgaaagaattaagcacttgatgaccttggaagggttgaggcagaagggattggcggaaggtattaatgtgtcgccacagacggtcaacaactggttaaagcgtgatgcgatcagtcgagaagctgcccagcaaatatgcgagaaatatggatattctcttgactggttgcttaatggggttggccttcctaaggttaatcaaggggatagaaaatcaaccatcaaccctgaacaagacggagtcggtgtagaagcatgggacgacgaaacacctcttgatgaagatgatgtatatatcccgttcttcaagagcattgagcttgccgcagggacaggctgcactaacaacaaagattacaatggctacaaactccgattttcaaaagcgacattaaagcgatatggagctgagccatgcaacgttgtaagtttccccgtctatgggccaagcatggatcccgttatcccgcacaaatctaccgtgacagtagatacagggaacaaaaagatagttgatggtggtatctatgccatagagcaagatgacctgtttcgagtgaagttactctatcgattgcctggtcgccgactgagcatccgcagctataacaaagaagaattccctgaagaagaggccgatctcgatagtgttaagattattggtcgcgtgatcaactggtctgtcatggcttggtag

SEQ ID NO: 434125 - DNA, 222 bp, Serratia marcescens
atgatcaacaaggaacatgcttcggtaactccattggagaaagctgtgtatgccgttggcggcaaacaaaagactttggccgaaaagctcggcattaccgcacaagcaataacccagcttaagaagcgtggcggcacgttaccaaaaagccgcatgaaagacttactgcagatcaccggacttagcaaagaagaattgtacccggaaattttctgcatctag

SEQ ID NO: 434126 - DNA, 279 bp, Serratia marcescens
atggaaactgcaagcacacgcaagacggcgatgaagattcattcgtcgcttctgaacaaaatcgcagtaatgggtcagcgcaagtttgctgacgctatgggtgttcatgagtcccaggttagccggtggaaatcaggcttgctggagactatgagcatggcgctggctgtcctgaactacgggatagcagatgaagaaatggcggagttggcgcggcgagtagcagccgttctgacaaatgaaaaagccgagcagtgcgctaacactttctcggcgtaa

SEQ ID NO: 434127 - DNA, 225 bp, Serratia marcescens
atgaaattttccgatttacgcaccgagacaaaagagcacgcgcgtgcagcacttagcgctgtcatcgccaaaggctcagtaagttcagacaatgcaaagctggcaggtaaaaccgttgctgctgcgtttattgctatggagcaatacgaaagcgagacagtcgatcagccgacgctcattggttgtgatgggaaagtgagcatctgcatcaccaccaaaccgtaa

SEQ ID NO: 434128 - DNA, 525 bp, Serratia marcescens
atgaaccgatcgaccacgataattgccgctgtgttgctggtggctgtcatggccgcctgctgggtagccagctattaccagggaaagtcggagaggctggagggcacggtcaagcaactgcagggcgataacaaccttcagacggcgaccattgctacccaagcgcttcactttcagcgcgccaacgaaatcagcaccgcggcgactcagtacggcatcaacaccgatgcggccacccaggggaaagaaattgaataccggacgatcctcaagaaacagccgacgtgcgatctggctgtgcctgccgctattgctggtgggctgctcgactacacgcaccgtctacgttcccgcgcaatgtcagccgataccatcgtcgctgacgcaaccggtgctggcgccactacctccggcaccctgacatactgtcaggcggtgctgtggattgatccgctgctggcggcgctcgacaaggctaacaaccaactgctggcaataaggtcgcttgatgttgagcgaaaatag

SEQ ID NO: 434129 - DNA, 1623 bp, Serratia marcescens
atgcctattccgttcccgttcgacttcaaaaacccggattacacccaggtgttcgaatggcggatggagcgcctgcagcgcatcagggctaacccggaaacgctgccagctattcgtgagttttaccgcaccaatccggcccagttcatcatcgactggggcatgacgaccgacccccgcaacatcgactacggcctgccggtgacaatcccgtttttgctgttcccaaaacaggaagagtggatccactggattatgacgcgccgggagaatatggagaacggcatcacggaaaagagccgcgagatggggctgagctggacggcgatcgggctggcttgctcgctgtgtctgttcaacaaagaaatggtgattggcttcggctcccgtaaagaggagtacgtggacagcaccggtgacccaaaggcgctgttttggaaggcgcgcaaattcgttgaaacgctgccggtggagtttcgcggcagctggagcgaaaaaaaacacgccccctatatgcgcgttgaattccccgatacgggcgccgttatcaaaggcgaggctggcgataacattggacgcggtgaccgcaccacgctctatctggtggacgaggcggcattcttgcagcgccctttgctgatcgacgctgcgctgtcgcagacaacgcgctgccgtatcgatttgagttcggtcaacggcatggctaacccattcgcccaaaaacgtcatagcggaaaaattccggtgttcacgttccactggcgcagcgatccgcgtaaagacgatgcctggtatcgcagggaatgcgacaaaatcgataacccggtggtggtggcgcaagagctcgaccttaactacagcgcatccgccgagggcgtgcttattccgtccgattgggttcaggccgctgttgatgcgcatatcaagctgggtattcagcctaccggtaaacgcctcggggcaatggacgttgcagacgaagggcgcgataaaaactcattttcgacccgtcacggcttcctgctggagaacgtccgcgagtggtcaggcgtcggcagcgacatctaccagtcggttgagaaggttttcgggttctgcgacgcggacaacatcgatgagtaccgtttcgacgaggacggattgggggctggtgttcgcggcgacgcccgcgccatcaacgagctgcgtaaagccgcccgccggccgatgattctggcgaccccattcagggggagcggcgcggtattcgatcccgacgatgaagcggtacgcggcgacaacgggcagcaagcacgactgaacaaagatttctttgccaatgccaaagcgcagagctggtggcgtctgcgcaagttgttccaaaacacctaccgtgcggttgtcgaaaaaatgccgtacaaccccgacgaaatcatttccatcagcagcacgatggaaagcaaagacaaactcatcatcgaactttcacagccgacttactcaatcaacggggtggggaaaatcgttgtggacaaacagcctgacggcaccaaatcgcccaacctggccgactcggtgatgatcagttacgcgccaatgaattcagccctgaatatctgggagctgttagggagacaggcctga

SEQ ID NO: 434130 - DNA, 372 bp, Serratia marcescens
atgccacttattgacgtgaccgaggttcttcttgaccctgacttttgcgacgcgacgctggtttgcaagcgtcaggtgcaaagcagggatgaggataactttgtaactaacgccacgcaggaaataccgtttgctggcgtggtaacggtagatcgctcactggaagcgcagcgaatgatagccgggcaaaacattgccggcgccattctaatcgtgacgcaattccggcttactcgcggtaatcgtgatggattagatgccgatatcgtgccgtatgaggggtatagctatcgtgtaacgaaggttgacccgtatacgcgctatggcgctgggtttgtgcaggctcattgtgaattgcttgatgaggcgtag

SEQ ID NO: 434131 - DNA, 840 bp, Serratia marcescens
atgcctaagaatgaatttttaccgttcggcacagcagcaaacgccaatgttttacccaacgctgattatcaggcgctgccagcgcgctcgtcaggtttcaattctggtgtcgccaagtcggaacagctcaacactgtatggcgccaggcgtcagtaatcgccagcgttgtcgcacagtttatcgctgataacaccggcaaggatgtgctggatgatggcgatttgtctggtttgcaggataaattgaaagaatcgctcctttcattctctactggccgattgatacgcactttgacatttacatcaaacaccacatataccccatcaagcggagcgaaaaggatattcgttaaagtttgggctggtggtggtggcggtagtggaacatatacatctgaacagggagggtttggtggtggcggcggtggtttttcctctggctatatagatgtcgcatcggttacctcattacctatagttgtggggggcggtggtgcgggtgtggctgctggggcttctggagatggcggcaatggcggttcatcctccgttgggggcatatcgtgcactggaggtagaggtggatcatcacaaaacaaaacaccaggtgctgggggcgttggaagtggaggttccatagagaataccgcgtctcagcaagggcaggggtttataaataacattggcggcaatggtggatcttcgcgtgagtcatttggtggaattgctggagagtcaccgaatggcggaatacctggcggtggggccgccggggcaacaacaggctttagaggtggggatggtggcagggggcttgtgattatcgaagagtatagttga

SEQ ID NO: 434132 - DNA, 1131 bp, Serratia marcescens
atgaatcagcatataaatagcgcagatggattaaggggagcagcatgtatagccgttgtcctatctcacatggttctaacattctttccatttatgcatggtggtgacgtccctaacaattctgttgaggttttcatattcaactcacctttctcctttttttactcaggaactgccgcggtttatatatttttcacattgagcggagtggttctaaccgcgagctttgagagaagtataaataaaaaacacgccttgatttcgttcattattaaacggtatatcaggttaatgattcccgttcttacatcatgtgtatttgggtatttagtctttagcaacattcatgttgatacatcaggggtatcatcttgggcggcgcgattgggcaccgaagactataacatttacgactcagtaatcagtgggctctttggggttttcctgaacggaggttatagcaaatataactgggctctttggacgatgcaaattgaattgttttgttcatatctgctaatccttacaatctttactttttcaaagtttcaatttaataattaccttttcatagcaattccgttatatttggcatctgtattttttgacaacaaccacatattaaccggagcatcatgttttttctttggagcggccatttataagatagatgcaaagataaatgaaaacacactcatcgctctatttcctgttggcatttatctttccggttgtcacttcacatcaaactcctactcatttattttttcatttacagaaagaaaaccacaagcacaagagttagcttatgttttatctgggataataataacgacatgcgttataaaaagcattaacctatcatctttattttcatcagcaaaactaattgctcttggcgatatttcattttccctttatctaatccacctccctataatttattctgtcggcatacctttattcaaccttatagataaagcaatcaatcaatactcagtttcagcggcgatttccatattgatatctttgctgatatcaattgttatctcaaaagcattccataaattaattgacaagcaatcagttttcgcatcaagaaaaataccatccatattatttaaagagtaa

SEQ ID NO: 434133 - DNA, 240 bp, Serratia marcescens
atgggcagcatcacacttgccggccggcagatcttcattctcaacgaaaacgaccgatacccagagccacagcaaaatagcccaccgatgttcgcaatccgcgaagacgaggagcatcagcactggctttatgtgtggcacaaggggagatggccgctcgtctcagaaacgccatttgaaacagagggcaaagccgttgatgccgcgatcgcattcgactttgccacgctgtacaaatag

SEQ ID NO: 434134 - DNA, 1377 bp, Serratia marcescens
atggccggtgtgggtgctgccgaccgaccgcagcgaggtggtcggcaccttgcccggcacgatgtgcgcatcacagcggaaagcgtcgaaagtgtaaggtacctcgctggcaccctcgaccatcattggatcaagcccattgaccaccaaagcagtcaatggactattcagtgtccaagaatgcccaaccacggtattggtccagcccaccaccttgccgccgcggatggcgccgcgcaggcggtgcaggatcatcggacgataccagccgttgcggatgtcgtcctcgcgcgtccacaccactttcacaccgtggccgggaccgatgcccttggccgccgccgccatatcggcaaccagatcgggccccaccaaagcattaccgaaatcgatgcgccggccgaagctgccgcccgccagaatggtttcaatctgcaccttgtccggcggcaactcgaacagctcgcacagctgcttgtgatcgagcgtttggatttggcagccgtagcgcgccttgacgctctcgccgtcccagaacaaatagccgtccagcggctccatcggcgcgtgcgcgacgtacgggaaggtgtattcggcctcgatcaccttgtcggccttgtcgaacacctcgtccggcttaccgagactctttgccaccacgccggttttctgcgccacctgacggaattcggcgtagatctcctcggtgttgcgccgttcggcctgcgcgtcgtcccacgtcaccttcagccgctcccgcccctggatcgccgcccaggtgtttttggcgtaaaccgccacgccggtggcgatttgcttcaccgccaccacccccggcaccgccagcgcccgttcggcgttaaaggtcgccaccttgccgccgaagcgcggcggcttcttgatggtgacggtcaacatgtccggctcatggatatcctgcgagaactgcgcgctgccgttggttttcgccagcgaatcgacgcggtgcaggccgcgcgttttgccgatcagggtgaaattggccggatccttcaacataaggctggcgggatcggggcgaggcagagtggcggccaacgcagcgaactcgccgaagcccgcttcgcgcccactggcggcatggcagatcttgcccgcctgcacggtaatttcctgtaccgaggttttccaacgctgtgcggcagcctgcaccagcatcgcgcgcgccatggcgcccatgcgacgcatctgctcataggcgttggacaccgagctggaaccaccggtgccctgaaaaccgagagaagggttggtataaatttgagtgtcaaccggtgcggcaacgacccgcacctgtgcccaatcagcatcgagctcttcggcgaccagcgtcgctaa

SEQ ID NO: 434135 - DNA, 249 bp, Serratia marcescens
atgaagaggtacagctacccggccagcaggatgctggagaaaagcgttaacacgcgcgaagggatcgcgggattagctaaggcttcactactggaaacgctgctgaaggaactcgatgaggacggatcagagataggcggtgctatgctggaactgaatgctttagtgaactatgtcacacaaaatgaaaaaattaaggaacaaatcaaaacacattcgcaatttattactcaccagttggaacaataa

SEQ ID NO: 434136 - DNA, 741 bp, Serratia marcescens
atgacagctcaaaacgcacctacagttttctctttcgactcaaacgtaaaaatcaacgtcatcaccagatccggcgctccatggtttttcgctgctgaagtatgcaaggcgatcggaatcgctaaccatcgagacgcagtgagaaagttggatgatgatgagaaggccgtcggtttaaccgacacccttggaggcgagcaggaatcagttatcatctccgaatccggcctctacacgctgatcctgcgctgccgcgacgcggtgacacctggcactatcccctaccggttccgcaagtgggttacatccgaagttctgccggccattcgccagactggccagtaccagcaccgggcgccggagacgttatctgacctggccggaactgtcacaacgatgacagttcgcgacgcgcgccgcggtaagaagaagaccagcactaagactgcaagcaggatcgccgatgcatgcgtgccagttatcctggaggccatgcgtgaccagtatcactacgccaacacgaacgttggaccggaagaagtgatccccgccctgctcagcgacgagcgcaacctgcagatcaccgcgttggttgaagagctggcagacaatggccacaacgtcgccggggtcgtgcgtgaagttgaagtgatgcgctactacatcctgcagtgcgccaagaacatggcggcgatcgccacgcacgcggcattcatagcgcagcagacgaaggtgcagtaa

SEQ ID NO: 434137 - DNA, 528 bp, Serratia marcescens
atgaacatcgatccagtaacaatgcaaatagttagcaatgcaattgtattgcttggggtggttgttgcaattttcaccatctggtacaacatcaggactgcaaaaaaaactcagacggctattttcttgttcgaaagcaggacagacaaagagtacatagagtccttgcatgttcttagaaaagtgcatgaatcaggaaagtcttttaggtcttatgttttcccatgtggtggagaaaaattaacggaagaagaaaagaacgaaaagagaaagttccagtacattttgaatttttatgagcgagtggcagtgagcatccaaaatggaatttataacgaggatatgataaaaaagacatcttactcgacagttatagatacttggaatcatgctgagccgcttattaaagccatcagagaaagcattagctctaaaacaacctatcaagaatttgagtggcttgccaatagatggaaagactcaccgctaagagagacttcaaagcgacgctggtaccactcatcataa

SEQ ID NO: 434138 - DNA, 2766 bp, Serratia marcescens
atgaaacaagcctgtgtagatgtaattgcccaaacgcttggccgggcgccgaaagcggatgaactgaagaacatagaagatcggataaaggatgctatccggcaagttggacgtacaaatgcgcgtgctggtaaaactggcatccccgacgctgaaacctatcgtcaggctgctgatctcgtcgctcagcgagtagtgcacgacgttttcaaaaagcgccaacgcctggcgcagaacgcaatagcgattaaccgcgtttcggaggatatcgcgaggaacttcacggatgccgagcaaacgccgcaggctctttcccagttcatttttgctggacgtaaaacgcttgatcgaaaaaatgtcgatgtcacctcagccgaagaactggcaaccggtgcctatcaggactggtcgcgccagctttctgcagaattggttaaggctggtcccgaggtgcaaaagtttttccacactgccaatgccctgggcgagcgtaggatcactgacattttcggaaacaaggctgctcagtacggtcagctgcagatcttgaaagcgctttacggtgagcaagttgatgcgccggcagcaaagaaaattgctgatgtatgggggggcgttaccgaacgtgctcggcaggagatgaacgacaacggatttgatattgggctgcgtgatgattggcatctgccatacgtcgatgatgccgatctcatccgtgccgccggccgtgaagaatggctggctactctcccggtcaccgaacgcgccgcagcgatcgcatctgggcggatgccgccggcagaatgggctcggcgggcttgggtggatgatgtgtacaacactcaggaccgtagccagtatgtcaacagcgacggaagcccaatgaatgatgccgaataccgccaggcgctggaggcgatctacgaaacaaaatccactgatggcgcaaacaaattagaacctggtcagttcatggggacgggcggtgtcaaaaaccgaggctctcaaagccgagtgatggcgttcaaggatgcaaccagccatttctcatacatggaccgctacactaagcagccagtagtaggggtgatgatgtcgcacctgcagagttcatcgcgtgatctcggggtggttaaggcgttcgggccagatgcagccaacaactttaagctgcttgcagaccggctttaccagaagtcagtaaccaccgccggcggcgggcgacctgccaatgaaatgcaggcacaacgtgatttggtgcagcgcatgtttgactctatggctgggttgaatggtgtgcaaaattctggtgtgttctcgtctgcgattggtgggctgcgaaatcttatgacttcggcaatgctgggcaccagtgttttcactgcagcatctgaccaggcgatcatgcgcgccaatgcccaggcgctggggtttagcagaaacggcatgcgcctgtctgccagcactattcgtaacctgtttaatggcgatgctaagcgtgccaatgctgagcttggtctgctggtggatgcgcattcagcggtggtatccaagatgggcggttttgatttaacccgcggcgttacagggtgggctgcagagaaaaccctgaagtggtcagggctgatcgcaatggaccgcgccaacaaggctgcgtttggtttgctgatgtataagaatatcggagagttgacacgcaaatatgcaactctcgatgccgtcaaaggaagcgacaaacaaatcctggcagccaagggttggtcagtggaagactgggcgataatgaattccgccgagcttcgcccattaactcagaagggccacatggggatgacacccgatgccatttatgcagtgcctgacgcgcgtattcgtgaaatccttgccgaccgtattagtgaggttcgtgccggcgctgatcaggcgcttgctagcatgggggaaatgtcggagacgcgcaccaagcagttacgtgatgcatttgaggcagaggctgagcagacgatagcgcgcatggtacgaaatgcccgtgctgaggctgcgcaaaagttaattggcgtcacccatggtgaaatgacaagcgctgttaccactgctactgggatcgataccttcgaacgtgaccaggctggccagttggtgaaaagcttcatgctgtttaaaacgacgccttttgctggcttccggcagatggttaaccggttccgtgatctggagtcggtgccggcagctaagtttttggcgacatatattgccggtaccaccattgccggtatgtttgctaaccagatgaactcactgctaacagggaatgatcctcaagacatgacaaagccaagcacttgggttcaggcgttgcttaaaggcggatcattcggtatttatggcgattttctattccaagaccatacccagtacggaacgtcaattgcaggaacaattggcggccctgttcttggattcgctgagaacctgacaaaattactgctcactaacccgcaaaaggctatgatgggtgaggaaacaagcttcggtgccgatgccattaagaccgcgcgccagatcattccatttgctaacctgtggtacacaaaggcagcgtttaaccatttaatcctgcagcaacttcaggaaatggccaaccccggctacaatgaccgtgtacgcgatcgggcgcagcgggagtttgatactacgagttggtggagtcctggggatgtcgcgccgcgccgagcgccggacttcaataaagcaataggtgagtaa

SEQ ID NO: 434139 - DNA, 1518 bp, Serratia marcescens
atgtcagatgtattctctcttgtgccagaggggcaggcatggacggattacaacgccaagccagcaaccaaagaagactatgaccctaaatttttctcaggttcgctaacagcgttccagcagggggctgggtctggcgccgtcggtctggggcagaccgtgaccagcttcggcaagcaactgatctcagaccctgacgtaatgaatcaatttgcgccaagttatggggtggttaaggctctgtttccagatgcagatgaagccctcaatgatagctatgacaaagcggcgtcagctctaacgtctgctcagaatggtgtgaagccagaggctaatagccagggaatagcggcgcaggtgctttacggacttggtcagtttgttccggccattggagctactatcgctgctggaccagcagccggcggcgccgttgctttcggtagcacatacgagcctaccaggcaggagtttttagaaaagggggttgatgctgataccgcgggaacgttggcggccattcagggcactgccaatgcttttggcatggcactaccggctggtgtcggcggatcgctggcgaccaggttgctatccggtgccggcattaataccggtttcggcatggcgaaccgatttgccattggtgagaccctatctgatcacggatacaaagaccttgctcagcaataccgtgcatgggacggacaggctatgctggttgatggcgtgctgggcttggcgttcggtggcgttcatcactggaatgccagccgggccgatggagaggctgtagcgacaaatcaaatagacgatcagtcaataccaacagatggtgtagcggctacgcctgaaactcaaccagtcacccggagtgagtctgggccagctaatttatccgatccttcgctttcaaccccagacgctattaagcccagcgatgtcgacgcagctcatgtgatgaacgaagggctttattacgatattgaggcatctccagtgctgcatggtacaactgaaagcctcaacgcccacgtagcagctatggatgaggcatctcgcgctttgatgagtggcgatcctgtaaatgtttcccagcaaattcgtgggcttgatggtgtcactcggcctgatgcattttccgaagctccggaacagcacgccgctgttcgtcaggtgctagatgaaaatggggttgattactcagagcggccagagccggaggctatcactccagatattcgccaggatagcgcattcctgcgtgcaggaaatgaagctgagcaaatcagcacagatccggaaactggagcagtcatatcatcaaacagctatgacctgttggctgcgcgtgacatggccttagccaacccagagacaaaagtactgcaccctgataccggcaaagagatgtcattgtctgaagcactggctgacctcgatggtcagatcgccactgcacagaaagagtcgaaagtttatagcgcggccgccgcctgcttcttgaggaatttgtga

SEQ ID NO: 434140 - DNA, 2508 bp, Serratia marcescens
atgcctacagtaccggtatatcagcgccaatcgcaatcacaagcggcgccggttaatacgcaggatttgcgtatccccaaagacaacgctttcactgcgctggcagacgttggttctaatgcgttgggaatttatcagcagcagcgggaacgcgaagatctggctttcgctcaaaacgccctgatgcaattcaaccagcaagccgatgacctgatgaataaccctcaaactgggttactgaccaaacagggcgccaacgccattgggcagagcgaacaggtagcaagtcagttaagccaaatggccagcacggcttttgactccattcctgatggtccggtgaaagagcgtttccgtaatcaattttccgccgccggccagccgattgccaatcgtgcgcgacagtacgagatcggccagcgtcagcagttcgaagcaggtcagcagcaaggacttttggcaaacctgcagcagcaggctgaaaacagcttcgacagcaacgaagggttcgtaaatgcaaacctgctggccagagagcagatcatggcatacggccaggcacacggacaaagccaggaagaaattgaagccaattgggtaagcttccgggaaaactcggccaaggctgccttgaatgctcagctcactgctggccgctatgatcagttactggcgagaaatggcgagccgtcagacgtgggcggcgtgtctcgattcactgcgcatggaaattcatctgccgcgcgaggtctgcgaaataacaaccctggaaacattgaggccagtgataaaaacccatgggaaggacagacaggcagcgatgggcgctttgccaagtttgagactccggagcatgggattagagcgctgggtaagaacctgctcgcgtatcaggctaaagggttcgataccgtagcagagatcgttaaccgttgggcgccggcgtcagatggaaacaacactgatgcctacatcaaggcgctgtgcggcgcgttgggtgttggcgccaatgatcgggttgatatgagcaacccccgcacccttgcagcgttgtgcgccggcatcgtgaagcatgagaatggcagccagccgtacaccgatgagcagatcggcgccggcgtcagtgccgcgcttggcctttctgcgttggaatcctcaaagcgtagaaccggcaatgccgcttttgatgctgcaagccctgcaactcaaggcgcctatttgcgacaggcgcaggctatgcagaatgagcagcgagcgcaatacaagtcgcagatggatggaatagtccgtgacgctgaatcagcatttcagcgtggcgttgagtacccaatgccaggcgaaaatgacttcgttaatgcctacggctacaacgagggacgcaagcggtatgcagacctgaataatcagcgcattgccggccagtacattggttcattccgaaacatgccgacggcgaacattcaggaatatttgacgagccttaaaccaacacaggcagacattgataacccgggcggatttggcagcgttgcaacggcatatcagcacattgaggcggcggccaacaaagtcattaaccagcgaaaatccgatccataccaagcagcaactgatattggcgcatatcggccgttgaataccagcaactttaatgaagtggcggcagagctgaacaaccgtttttcttctgatgagcagttgaagaagcttggtatcgatgcgcccattctttctaaacaggaggctgccggcctaactgagatggtgcgcgggacaaccgacgcagaccagacgattaacttgctccagtcgatgggaaaaagcctgtcagcgccagcaatgcgtaaggttgctggtgcaattgcaccaaacagcgcctcaacggcttacgctgcactgttgctcggcacagccagccagacggtggcatatcagcccggcaccggatacaggccgatcatggacaaatatgatgtggcgaaaacaatcctgacaggcgatcagctgatcaatcccaccgctgagcagaagaaggcagggatcgctgcagtgcaactacccagcgatgaaaagatgaaaaaggcgtttgatgatggtgttggcaatgctttttccaacaacccacaagcgcgacaggctgcatacggcatatacaaggcggcatatgcatctcttgtttaccgcaattctgatagcgataaggcgtcaacgcttgtcgtggatgatgattctgcgtccaaggcggttcagatggcgacggggggagtttataaggggttccagggcggtgatgtggtgatgccgtttggcatggataagagcacgtttaaggataaatacacggcagctgcgcgtagtgcgttcactgatgctggcttgtcaccggctgggcagtcgaatttcacccctgtgaatatcggcagcggtcagtacaaattactggcaggcagtggccgctgggctgtaaatccgaaaacgggcgagccgatcgtcgtgggggttgaataa

SEQ ID NO: 434141 - DNA, 987 bp, Serratia marcescens
atggctattaaaggtcaaactgcgctgacgctggcggattgggctaagcgcgtagatccagatggcaaggtagataagattgtagaaatcctgggccagacaaacgaaatcctggacgacatgctgtttgtcgagggcaacttgccaacaggccaccgcaccactattcgcaccggtttaccacaggccacatggcgtatgttgaactatggcgtgaagcagggtaaatcaaccacagctcaaatcaccgatgctatcggcatgctggaaacgtactcagaaatcgacaaatctctggctgatcttaacggtaataccagtgaatttcgtctttctgaggaccatgctttcctcgagggcatgaaccagcagatggctgaaaccgtgttctacggtgatgcgactctcaatccgcaacgctttaccggcttgtccgcacgctacaatgacatgagcgccaaaaacgcgcagaacatcatcgatgcaggcggaacaggttctaacctgacgtcgatctggctggtcgtatggggggctaacactgttcatggcatcttcccgaagggccagaaggctggcattaaccatgaagataaggggcagcaaaccctgaccgacgccgacggcggtaagtacgaaggctatcgcacgcactacaagtgggattgcggtattaccgtgcgagactggcgctatgcggtgcggatctgcaacatcgataccaccactttggatagcgatgaaaatgctgcaaatctgctgaagctgatcgtcaaggctttccaccgaatccccaacctgaagcttggtaaggctgctctgtacggtaaccgcacagtgatggaatacatcgacgttcaggcactggaaaaagcctcgctggctgtgaagacccaggaaaccgaaggtatcttctggcagtcgattcgtggtgttccattgcgcacctgtgatgccctgctggataccgaatcccaggtcgtttaa

SEQ ID NO: 434142 - DNA, 126 bp, Serratia marcescens
atggaagtcgccgggatgcaggttaaggttcacgttctcgataacggccagcgggtgatcgccgccgaagacgcagaaaagctttttcagtggctggaagcagcgccggagggtgggaatggctaa

SEQ ID NO: 434143 - DNA, 597 bp, Serratia marcescens
gtgtattttttccagcccgatacctaccgcgatgagccggtgatccaggcactgaccacaatagcgaacgctatccgcgatacggctttaagaagctattccaggtgcttcgcagacagggcaacacctgaaatcataaaacgtgtacaccggatttactgcctgatgaaactgaattttcctcgtaaaggaaaacagcacctgccggtgcgtaatccggttccgctggtaaaatcggagtctctgaaccagagctggtccattgattttatgtacgatgcactggtctgtggcagacggttccggaccttcaacgtgatggatggttttaatcgtgaggcgctggtgatagaaattggcatgaatatcccggctcagcgtgtcgttcgggtactggacagggtagtggggaaccgtggatatccgcggaagatgcgaatgggcaatggaccagaattagtctcactggctctggcactgtgggccgaagagaatggtgtgatgctggagtttattaaacccggccaaccgacgcagaatacctttatcgaacgattcaaccggacgtaccggaaagaaatcctgttaggaccctga

SEQ ID NO: 434144 - DNA, 582 bp, Serratia marcescens
atgaataaacagggactgctgcgaagcattgctgagactggttacaatgtcggctttggggcgaagaagaattttgctacatacgacattgtgcagaaggctcctggactgattggtttcgcttcactcgttgtgggcgtcttcgcgctaatatgcgaacctctgaatagcaagtggattgcagcaactcttgttgtgttcggcatcgctagcctttacgtcacacaatacgactacaacaagacggccttctgtgacgagggtgagaggctcacggctctgttctaccggcttcgcgatctttaccgtgacgtgcaggcaactggtgaaaacgatgacctttctgcttaccgcatgtatcttgatgccattcaatcagaggtgttcagttctaaccaatccaagcagatcctctttagcgactggtatgcgcactacaagtttttctggcagcaccaaatcgagtgggtcgacgagcaaaagaaattcaccttgtggcgtgataagattcctttgtctttaatgtttgctgttgccacagtgcttatgatgattattgtctgcgcaattatctttttttag

SEQ ID NO: 434145 - DNA, 1320 bp, Serratia marcescens
ttgagtatcgcagatatattccaaagatttcttagaaatcttgccgttgacaatgctcagacgatttcagatagatatggagagatcacctgtgtactcaacaaaaagttccgggataccgaatcgaagactgcaaacacattgcaagtcggttcctacgggcgttataccgctatcaaaggtatttcagacctcgacatgctctatatcatgcctaagagtgagtgggacaactacaaggatggtggacagtctaggctgttatctgattctgctaacgccattcgcgcccgatatcctaacactatcgttaaggtagatcggttggtagtgcaggtgatctactcgaatttccgagtggaagctcagcctgtatttgagcaggatgacggcagttttaaataccccgacacctacaacggtggtgcttggaaaattaccaagccaagggaagaaattcgtgcaatgtctgagttcgatactcagaagaacagaaaccttcgtcggctatgtaagatggtgcgtgcatggaaaaacaaacatggagttggggtaggcgggctccttatcgatactttagcgcacaactttctcaagtcgaacagtgactatgatgataaaagctacttctattacgactatatgagccgcgatttctttgcatatctcagcgaattacctaagcaagactattacgcagcgttgggcagtgggcaacgcgtgaaagtgaagaagaattttcagcgtaaggcgaagaaggctcatgaactgtgcctcaaggcgatcgaagccgagggcaaggataaccagagcgacaggtggcgcgccgtttatgggaggccattcccagcaggcgaggaggtacataaagcggaattggcagagcgtgtgggccatcttgtccacacgacggaagagtatgctgaggacgtattcggcgctatcgatattcgtaacaatattcgcatcgattgtcaggtcgaacagaacggctttcgccccgcctctctgcgagatatgcttaacaatcgcgcgcttttgatgccgcgtaaaaagctcactttttccgtagccgagacggatattacagggccctacagcctgttctggaaagtgctaaatagggggcaagaggcgttcaagcgagactgcattcgcggacagatagttgcggatgagggatacaagagtaacgtggaacgtacaaacttcaagggtgaccacgtggttgagtgctatgctgtcgttgacggagttgtcgttgcgactgatcgcatccatgtgccaatcagtacgaaccaagaggatctcaatgaataa

SEQ ID NO: 434146 - DNA, 3348 bp, Serratia marcescens
gtgaatttaacaaaacttacccaagattcgcggacctcgatacataggaagcatatcgatagctcagcatataaaaagggatatcgtcaccttcaagactaccacttctggaatggtatagaaaatgggccttgtctctgggaacaccagaaagctgcgatttgtagtgttgttgcctacttatgtggtgacaaagaaatacctgagcgccccgagcaaaaggaagctgcactactcaaactaccaacaggtactggcaaatccggtatcatcacagtgttggcccgttgtcttccctccgtacgccgtgtgcttgtactcactcccagaactgcactaacagagcaacttatagcagacatatgctatcgtttctggaagaatttgggctatgaacatgaaggaaatggacttttcacagccaaggctgacggattaggtagaaatttagagagtgtatatgtcgagcaattcctacctagcaaagtagaaacgatggtgcagcacttgggcaatccagatactgaccgagcagtgctcgttggcactcatcatgctcttgccgatatcagagaaaaggctttgtgttccgacttggctgatcataattgctcaaaattactgaagcatatacgggaaaattttgatctcgtaatcgttgatgaaggccattacgaacctgccatttcttggtctcaaggcgttcgtgacttcaatctaccaactctacttctaagtgctacgccctaccgcaatgactataagtcttttcgtgttagaggtcgttatattttcaattttccttacagtcaggcagtcgataacaacatcatccgccccgtggaaattattcagccagaaggtgtcccacgatctgaagaaaaaaaaaccgcagtggtacaattcgttggcattcttcactacgagctaccggatcggattaaacaagccaaagaatggtttcgcaacaacaacgcttctccgaaaattatggtgcgcgctgataaccttgatacccttattcttttgcaaactgagataaaccgacgcttcaaaactcgtgcaatagttattcatgaccgagccaaaaagactccccaaaatcaggatatgttcaggaccgtagcatcagctcagcgagctcgttctgatgccttgttttggattcatcaaaacaaactgatggaaggaattgacgatccatcattcgtttcagttgctatctttgatctaatggaaaatgcacgtcagcttgtgcagttgattggacgagtaaccagacgatcaaatagcaaagaggaggttgggcaagtaggttgggttatctccactccagcaaataccgagcgtattcgaacaatatgggaacgatataaaggttacgaggactacgctgcacgtcacacggaacacatagtttcaaacgaagtcgctttaccggatcgtctactcagctatacgccagaatatcaatatattagcggcgatttcagaaggcgctttgaagataatcagccgataaccgcagtaaacattcagcttcagagaaacgccgcagtattaagaaccgtcgattctcaagtcaatatacgcgcatttgagacagccattgaagaagcgatcatggacaaggaccgcttcaagatcactccgattgaagatatgcccgaaggcaccttaggtttttcatactatgcttggcgaaactcgccgtatcttactgaccgttttttttctgaatggagactgggaattttcgttgcagttcaggtggatgcgtatattttcatgcacgacacagaaggcctagtagtggatatgcacggactcggtctcaaacgtgccgatcggtcagttatggaaaaagcattcccagaaagcaaaaacaatatctctcggctctcgcgcatgtctttttcatctcttgatatgtctcagaattcaatacgagcaatggcgttacgtactcgctcttttgctgatgctttcacagatttacttgatccctcactagttcctgcgactgccgctggttttgtgaacggaattgcccgatatgttggattcaaccgttcacgccttagagatgcttccgaaagttatattccaattctcgattatattgcgtggactcaggaaatagctgctgagctgcaagatagggttcgtaagcggagccatgtcttcggtcgttatgcagcattggtggaggatatatctgaaaaagaagctaagccagtttccattctgctcgatccttctcttgacgacatgcgtgacgacgaaactggaggagctagctggattctcaatgactacattgattactttgatctttgctccgaagtcgataaggacaccggcaagttcacaatccagataggtaaagaagatgtgttatgttgcatcgaatttatgcctgaaactaggaaatataggctatccagcagtaaactagacgaaatttctcccgttcaggaaagccagggtagacgccaagggttaacactagtgcagcgtcttaacaaaggacaaaccttccgtattctgactctgcgtgataacgtcgtctattcagaaggcaacttctatgaaccgaaggtacagtgggtacaaggagtcaccaagccagtcctagagcacattcacgcttcggctgcacttgatgcagttagaagcgaaaaaggcgaaaatgattacacctccaataaagctatttggtacaaaaaatctatttttggtcttttctcagtaacatgcgatatgcagcgcaaagaatatgggattgaaaaagatgacctaatcacagcaattgaagcaattcctatttggttgtgtgacgacgacagtcgtgaggctgcagattttattggaattgatccggatgctaagaggattgtgttagtccatgccaaggttggtagcgttggggcagatagcacggggtatcatgttggcggattgcaggatgtaggtcggcaagcacttgccagcctagggtttatttcacgagggcaaccgtccactatatggacagcgaagcgttggctaaccaatgtacaggctaataaagttgagttaaacgggcgtagccgcatatttcgcaatcccaattcactcacgcctcaacaactcaatgatctgctctgtgctgcgtgtcgcaatccgtcgtttgatcgtgagatatggattgttggtgcagagatggcgcgtagagaaaagttggtaaatggattggacaaaaccccctgggcaaaccgtctacggcaatttttaatgcattgggattcaatgcaaactgcttgtgctcgagcgaacactcgcctgaaatttttttgttcaaattag

SEQ ID NO: 434147 - DNA, 2103 bp, Serratia marcescens
ttgagtaaagctggtattcagtctaataggggggatggatatcaaacgttggtagcgtttgactgggctttgaccgtgttatccgatcctgattatcaatggttagagacagattcagtgaaatggctggtcgatgacgttgtgatagggcggactgacggtacaagaatttgttgtcagtgcaaaaaaaatcaaacaggatttcgagcgtggtcattcaccgatcttaatgatgagctagaaaaggccattaaaacgcttatacaagatcctactacgacagtcagattttactctcgtactccttttggtgagctggctgctttgcaagaatttagtactaatttcccagatgaaagtgcttatcatgctgctttaaaagagacaaaggtacatgaggcgataaatagaaaactcattgaattaattgcaacaatatcttctaattttaatggttatgagtttttatccagaacaaaatttgttactagcgatattcatgaacgaatgagagaaactctggaagagcgattgcaatatttggtgagtaattctgttgcagcttttaattcgctttggacttgccttgattaccaagggatgcgagtcgctgacacgcaagataataaactatcatcttgctcgcgtttaaccaaagccgaccttataaatcttctttctcaatcaggttgtgttatttctcctccggcagatattcaatctatttttaattcattcagaaaaacatcatccattggtcgttcatggcaacgagatattagtggtcatcgtattgatacacttctggtaagtgaattaattgaagctatcaaaagcaagagccattccatattagtgactggagggccgggttcaggaaaaacgtgtgttctacttgaattgcaagagaaactagagcagttggcgcaatctggtagtattatgttacctctattcattcaatcgcgagagtttgctgatttagaaactgcacaggaacggcaatctctagggttagacgagcaatggattgaaaagattgcgcgtgtagctgacagctatcatgtaatagtcataattgattcacttgatgtgcttgctatagctcgagaacatatggtgctaacgtattttttagctcaaatagatcagatgtcattaattccaaatgttaccgttattacggcttgcagagagtttgatagacattacgatagacgtatatctcagcgctcatgggataaagagtttaagtgccaggcattagattgggaaggtgaaatcaagccgttgcttgaaaaattctcaattgactcatcaaccattgataacacaacgcgacatttaattagcaatccacgtgagttagctctatttataaatcttgctcaaagaggtggcagctttaacatagtgactagccaagcgctagctcaacggtatattgattccattgttttgactaatcccttgctaggtgatagagggaaaatagcgcttgaaaatatggctacggaaatgttaaagcttcgtaccctgtcgataccaacccaacgatttactgcttcagttgatattcgtagaatgttacttagccataatgtgttgcatgaaactgatgataataaattaacatttgggcatcaaacgttacttgatgtattagttattagtagagcgattcgtcatggattgactttaagtgattttataaaggatctcccaccagtaccttttgttcgcccatctattcgtagctttattgcacagcttgtcaatgaaggaagacaagagtttagaaaacagttacgaacggtacttactggaacttatgcttttcatatacgtcgcctagttgctgagtgttttgctgagcaattacctcaagatgatgattggccaatgttacgtgatttacgtaatacgcatcgagacgtttttcaggttatttatagcaaagcctcacaagttgaatggcattatttttggttaagtaatcttgttccggttttaaaagctatgcgtgatattgatggtatagaaattcatacttaccgtattgcacattggttaaatctagatccatcaggtgttattgattag

SEQ ID NO: 434148 - DNA, 2211 bp, Serratia marcescens
atgtctccgctattactggagctatttaaatttccacaggaagaatatagctttttaggcagagcccttgctcgctgtgttgctgcaggggggatcgatgatgcggtgctttgggattacatcattgctgatgttaaagatgaagacatactgacctatcgttttggaaataagcttaagtgccgaccgcacgaatttggtgataaggataatgaattcctttcaaatagaatgattaattctattactttgttagagcaggctatatcgacaattgaacagtggagccaagtacggagttatagatatgaagaaaaaaataattatcgaagtggttttctaaatggaacttctcattatgatgatcgcagaatgagtgattttgagcataaagatagtcaacgtgtcctgatggatgctttagaagttgctattattcatcatgctaatatcaattctgagtggtggcaaaacaatcgtgaacgtttatgctttaatctggaaggatcgcttcgttactttgcattgttagcgtgcattaattctccgctaactaatcttgacatatcctctcgtttgctgtcgaaatcggatttattagagtctgagctttcacatgaactgggcactttagtgcagaaagtttttatccatttgagctcagaatcccaagacgcaatacaggttataatacttgctctttctcagagatatgctgatttccctgagtataggcaatatatgcttaaagatcaggtcaagtttattatttgtataccgtgctatttacgttcgccgtcatgtgtaagtatttttgatgaatatagtcgttcaaactggccacttgaacataaaccagatgttaatggatggtgcgggatagtaagagctccgttctcatttgaagtttttaataagattagcaatgaaggcgttctcagtcttcttgagcactataatgggtataggcgagactcatttagcgatatgttaattggtggagaggagcaagtcgctcagcaactgagtgaggcatcttcaagggatccattacgatttttgagtttgttatcttcttactggcaagatataaatgaaaatttccgaaataatattatgaatggtattgcgcgttatttgaattatcgttatggcaaccttcggcaaaataatgactggaaaccgattaatgaacctaatattgatattttagttagcaatactttagatgaactggaacgacattctgtctattggcggcaaaaccgctctgcttccgaagtgctacaagggtgctcacatgtagtaaaagatatcaataatgcggaaagaataacctttttatctattccctatttagccgtggaggaaagagatcctatctcaggagatggtgtcacttttattggtataggtattaatatgattcgagggcatatcgctgatgcccttatggttatggcaataaagttacatgaagaacatatttcttggcctgaattattgttaccgacactacaccaatttgctactaacgagcatcctgcagtgcgagctgtagtattacgccgtttacctcatttacagcatattttacctgaggttggttgggtggtatttgaattaataatgcgaaaaggtagcgaacgactttgggatatggcagaacgttgtctctattatacctatcatcatgagctcgacagagtttccccatggttaaataagattgtatctgaaggtattaaaggcggattgcaagcgtggggaagaatatctgcattggctgtattgtcagaaaaaatagaaagtcgtgattttatcaaacaattaaaagaattaagcgatagtgatgcatgggaaggtgctgtcgatgtttggacacatcgtgagaattttcaacggcatcaggatttatgtcttgctggtttggatgctgcgttaagtgatgataatcaatattcctcagaattaatagcgtcaatgggtggtatttttagagggaaagagccggttattattttacccatgcaagtgttagagcgttatttttcattagtatttacgagttcagagtcatcgaaaattgatttgttcgattttggctcgtggttaaatattgtttcatgcatagaaccattgtatgcattgagggctacggagatttatcttgaatatgctcgtacaacaaaagtctatttacatgattag

SEQ ID NO: 434149 - DNA, 309 bp, Serratia marcescens
atgaaaatgaacgaccaacaacccgtaaacatcgtgacgcaattctttgcctggttggctgcgattgcatccgcagccgggataacgacacaagacctaatctacatcgcgttcggtgcaatcggtgtactggtatccgtgctgtcctttgtgctggggcgcatagatgcaagggctaaacgcaaacaggaggagcgcagaacagcgctctacgaagggtatttggagcgtcgcagcggaagagctgggctgtctatcgatgaggcggatcagtacacgcctttgccgggtggggagagtgaaacgtga

SEQ ID NO: 434150 - DNA, 189 bp, Serratia marcescens
atgcctacaaagcacataaacgatgttcaatggcgaaaaatagagaaagaaaccgttagagcggtatcaaccctagctgttccagttaaagataccaaaatgctcgaatggataatcgccaaagggctagagacgatcacagaagacgactaccgcaagttcctgaagacagaaagcaaaaaaaaataa

SEQ ID NO: 434151 - DNA, 1116 bp, Serratia marcescens
atgttcttcgactggttaagtattgaacaggatttcggctttcaacttcctattctctcggatgttgcttaccagcgtattcatcttgaaagtggtgaggctagtgcgctttctcagccaacttttcagcaccggggatctttctgtgatgtcgtttctatttctatccgtggatctgttctaaaaatgacgggcaacccttcgcggtgggggcggcttgataatttatttggcttacctaccgttgatgcttgcgttatggttttcaataagatccttcttgatcttaaattgcctgtttttacaaaatgcactcgtttaatgcccggtcagtctaaagaaaccgaaaaagctcatatggtcagtgatggggcgttaattaaagagcttcacataacatctaataaatctgttggcaaagggaatgaggatgattatatttcagggctttcgactcaaccctataggaatagtgtaccacggttgcattcaaacggtaaatctgttgactggttgtctaaaaaagggaatgttaatcttatttatccgactgtatataataagtcacatgagattgagttacatagtttattaaaaataaaaaataaattctctgagcagtcaaaagagtttaattatattgttagtgtgattgattattgtaaggaaaatggaatagtcagatttgaacaaaaattgaagtctcgttttattcaaaaacactctctaggtttttgggggttatctgattattctgtgttaaataagttacattctgattttctggcgcttgatgaaaagttatcggtgaatgctatggattttgaaactattagtgaacatcttattacccgtggaatagttgaaactacacgggcagctaatactacagctatgtacgcgatccaatggtttcatggtcatatttttgatttaagtaaaaatcaagtgcgtattcatcgggcaagactccgcaagattggtattgacattgcgcaaaaatgtaatgtttcgaaattctctcttgttgttgtcaagcaaacgcgagagattaaagtgtctgattgtgttattccatcgtggtatgtaaaaccgtctcatttacgagttgcatag

SEQ ID NO: 434152 - DNA, 1863 bp, Serratia marcescens
atgcgcctgggcggtcattcagggtctggaaagttaggtattactatattgtccttactggtttcatccggtgtacatgctgatgcagtaacagcagacggatttggacgtgtaattcagcaaatggttgaaacccgtgaagctcaggttgtttctcaatctgcggggcgtgtattcgcaacgggtgccagttctctcggtatgggcgcgggtatcgctgtcgctgcggaggttatacgcgaacgtcctgacgtttttgattcaatccgcatgtgtggcgagaaagtgggtaatcctcagctttgcaccggaacgtcagttttcgcggctgcttatggccttgcgaagcatacaattgacgattcgatatccacgggtatttcaagttttggcagtaatatgatggctgccggacagacaacatggggattgctggggcaggctgcgggcgttatttccgttgctgaccttgctttaaagcagggcgcaaaagctgttgaatatattacaagtggtataaaacaggatgatggaacttatttacttaatttgtccaatggcgctactgttacttcttctgttgcaccttcacctaaaagccctgttgctgtttatttgccctctgatgctactggcttttctgcgaagaatattcaggactcgatgaaccagtataatcagcaggttaagcctgttcaggttgcgccaacctattacaatattgatgcaccaccgccgataagccagccatttccgaatgatgtatatcgtgtgtcagttaagggtactaaatatccttattcgactgatatcagggatgcaaagggcgatgctgtacttgtcagtgataatccggtaatgattgcgctttataagtcgattaatggttattctcattccaatgtgacttatcatgaggcttctgacgacaataacttacatatcaggatgccaagaaatttcaaggtttattcggtttccgttaaagactttcagtatgaaaagccgaatccttattttggtggatattcatcgattgtcactgttgttttatctgttgcgacaacaacggttacgcttgaaaattcatgggatttatgtaaaagcgagaaagtacctgcgccgggcagtacggctgataatcccaaaacgcagtggaaaagtatttgccaccctgagaaggccgtgtataaaacgacgaatgatgttcaggatgttaaagaccagatattttttaatacagaatttgatacatcaaatttacctcaggtaattaatggcgaggttattgataatatagatttcaagccagaggaacagttaaacccggctgcgctggttaatcttattaatggccttgcaggtcagactgttgttcaggaaggatatcaggggataccgcttgataaaccttttacggcggctgaactgacggctgcggctaatgctgttggcgtaaaacttgataagggcttgctttatagtccggttgtcgttcctcagtcgtgggttaatgccagacccggtgcgggaacggatacaggtgtacaccctggtacaggcacagataccgatacttctgttgatttaggcgaagaccccggcattaaagcgccggaacttgaaaaaccgcctacaggtgaggaaattctcaagccaattacagaattaatgccggacattaaaaacctgagtatttcatcgaaggatgttcagtgtccggtatggtcgttcgaactctgggacaataaatattccattgattctcactgcgagcttctggaaaaaatcaggccacttctgaaagcggtattcctgcttatctggggcattatttcgctgcgtatcattctgactgcgtga

SEQ ID NO: 434153 - DNA, 288 bp, Serratia marcescens
atgtttggtattctggtttcagcctttaacgtggcgctgggttttgtgctgcgaacggtggtcgtcaaatttattctgttttttggcctgtactttgtcgtacaggcgtttgttccggttctggcgtcactgttgccaaaatctgttgatattgccgggttgttttcctcactacctgatagcgtatggtatttcgtgaatctgtttatggtcacggaagggattaaactgatgttttcagcattgttaacgcgctttattattcgtcgcattcctctgattggttaa

SEQ ID NO: 434154 - DNA, 1035 bp, Serratia marcescens
atggctatttctgcgtatgtgggtattccgggtagcggtaaatcttacgaagtagtggcaagcgtcattattcccgcctgtatcgcggggcgtcgcattgtcagtaatatttacggccttgccacgcaaagtatttatgattactgcgttgatattaaaaaggcagacagggaatcacttggtgaaattttacttgttcagaatgaagacgttcagaacgataatttctttccctacaaaacggattcaggcattgcggatgatacgttctgccgtccgggggatttaatctgtattgatgaagcatggcgcatatgggagaacgataaagggattcctgcaaatcatcgctctttcattgcagaacatcgccattttgccgatgaaaaaacgggcgtaacctgtgatttagtggttatgaatcagtctgttgccaaccttccgcgattcattaaagaccgggtggaaacaacgtatcgcatgagtaagcatgtggcgctgggtctgcataaccgctaccgtgtggacgtatttacgggtatcaaactgtttaagtcgaatctgacgaacagttatcagaataaatatgacaaggcgatattccccctatataaatcccatgagaacgggcagggaagggaacttgtcaccgataaacgtcagaatattttcagttctaaaatgttgtggtttaaagctgtcgggttactgattctggcggtaattgccattttttatctgttctggtttttcacgtcaaacggtaattcagagcctgaacagcagactaaagatttacccgccgcaaataattcagcgtcttttgtacctgccgcgccatctaagcccgttgtgtcggacaaatggcgacttgccggacggcttaaacgcgatggtcaggcatgggttgttgttgcagacacgtcaggcagattgcgtatagagccggcttcgcagttcagctttgacggcatgatgatgacgggtgaaatcgacggcgaaacggtgacggtttattcaggggcgatacgatga

SEQ ID NO: 434155 - DNA, 1263 bp, Serratia marcescens
atgaagctgataacaggtttactttttttactggttccggggctggttatggcgaagggcgtcagtctggagctcaacgctgttccgctgccgcaggcgctgaacatgatttacgttcaggtgctcgataagccgtttatgcttgacccggagcttgccaaatccgataaggtggtgacgttccgtatcacgccggatatcgatgaacgggcatttattaagcgctatctcggcaatatgaacattgcgatttataacaaacagggcattgactacgtggcgccgttcactccgaaagcgtatgtgccgccgcaggagacctttgtttatcggcctcgcttccgttctgtggcgtatctgtctgacattctggccggacagtttaccgggcagtttaacagtcagcgtaactcgttaccgtccgggcagatatcgccagaagcggccgtagcgggtacggcatcggactttatgaaccgtaccggggatgtgctggtttattatggccggaagtcagagattaaccggttgcagacgcttttaccgctgattgatactgcctctgaagaagtgattgtcgcagcttacgtgtttgaggttcagaccagtgagcgtaacggttccgggctggcactggcggcgaagctgctttccggcaagctgaatatacagattggcgcgtctggcggctttgataactttatccgggtgaatacaggctctcttgatgcgctgtatgagcttttcaggacggacagtcgttttcatgtcgtcagttccccgcggctcagggtgaaggatggcgcatctgccacgttttcagtcggtaacgaggttccggtgctgggtcaggtgagctacgccgacaacaggccgatccagtcgattgaataccgctccagtggcgttatcctcgacgtgaaaccgcaaatccggactgacaatattgaccttgtgattaagcagcagctttccagctttgcgaagacggatacgggcgtgaataacagcccgacgctgattaagcgcgaggttaatacggaggtatcagcggctgacggggatattattctgctgggtggcctggctgaatcgaaggtcacaaacgccgataccgggttcagctttctgccaaaaggctggctcaccagttcatctgacgagaagaacaagacggatattcttgtcgtgttacaggcgaaaaaagtcaggcgcgccagcgccgcgcacgcaccgagttcccacgaggagcgcgcgcggtga

SEQ ID NO: 434156 - DNA, 189 bp, Serratia marcescens; identical to SEQ ID NO: 434150

SEQ ID NO: 434157 - DNA, 1116 bp, Serratia marcescens; identical to SEQ ID NO: 434151

SEQ ID NO: 434158 - DNA, 1863 bp, Serratia marcescens; identical to SEQ ID NO: 434152

SEQ ID NO: 434159 - DNA, 288 bp, Serratia marcescens; identical to SEQ ID NO: 434153

SEQ ID NO: 434160 - DNA, 1035 bp, Serratia marcescens; identical to SEQ ID NO: 434154

SEQ ID NO: 434161 - DNA, 1263 bp, Serratia marcescens; identical to SEQ ID NO: 434155

SEQ ID NO: 434162 - DNA, 1290 bp, Serratia marcescens
atgctggctcggctggccatttttgccgaccatattcccgacgaatggattactgccgctgccgccttgtctgaaaaggccactatccgccgacgccgcttaccttctgatatggtcttgtggctcgtcgtggggatggcctttttccgcaatgagcccatctccgaggtcgctcggcgcctcaacatctgtgcagaagggttggccaatgatgccttgctcgcggacagtgccctgtctcaggcccgtcagcgactcggcaaacagccgctcgagtggctgttcaaacagtgcgccgatgtgtgggggcgggaacgttatcctgaagaccattggcacggtttacaggtctttgccatcgatggggccctgttccgaacccaggatatgcctgaactcagagcacatttcggctcgggtaacacctcaaccaaccggcagacaccctacccgatgctgcggttggtcacgctcatgaatgtccgctcgcatgtcattgccaacgcggccatcagcccgtaccgcaaaggggaaatccccctggccagcgagttcattcactcattgccggacaagtcagtgaccctgctggataaaggcttcttcggtgccgacctgttgctgcgtattcaggccgaagacagcgaccgtcactggctcatcccggaacgcaaggggctggtatacacggaacttgagcgctatggcgacggtgaccgtctgttgcaaatgacggtctcgcctcaggctcgcaagaaaaacccggcgttgccgacacactggcaagttcgcgcagtgacctatgaggtggcaggcaaggagaaaacggtctttacctccctgcccgtggcgcgattcagcgcagctcaggtggcgaccctgtaccacgagcgctgggaaatcgagctgggataccgggatatcaaaagcgcgatgcagcacaacgccatcacgctgagaagcaagaaagtggacttggtctatcaggagctgtggggattgctgcttggatacaatctggtcaggcgggaggccagccaggccgccgtagcccatcagcgagcgcccaatgaggtgagctttaagtttgcctgtcatttcatcgcgaaccagatggcagtgatggcgggcgcgttatcgccagcccatacgccacggaggttggcggagttgcggggctgcataggcgtcatgttcatagaaaaacgccccaggccatcgagacccagggcggtgaagatatcaaagacccgttttccggtaaatcgcaatgcggctccgcttaagtga

SEQ ID NO: 434163 - DNA, 612 bp, Serratia marcescens
atgtattcaaaccaagaaccattttccaaggatccatttggttatagcgctttagcgtggcacaaatggggaacattagcgactaaaaacggttttgctatagatattacgaaaccaccaacagctgccgatcttaaaaacccaattctttggttaactcatgctcatgcgttatctgaagcggctattagcttggtacgtcagccgtcaaactttgaaaccatgcctgaggatgttagaaccatatgccacagtcaatatcatgccgtagctttaatgctggttggttatagcctagaagtttgcttgaaagctatgattttaatcaagctgggagtagatgaatttaccaggaaagagaaagaacattttcaccaccggctcgatgaattagctaattttatcccgaatttgagtgctaaagagatagcaatattaaaggggctaactcattttatagtatgggcagggcgctatcctgatccaggcactcggcgagtaaatgatacaataaatgtattcgagctctccgaaaaatatgaaataaatgctaaggatctttttgaactatcggcaagagtaatgacacatgtccaaacagtttctggctag

SEQ ID NO: 434164 - DNA, 3453 bp, Serratia marcescens
gtgactgttattaaagcaggggtgttaactgacagtctaaattatgatgcaattttcgaaggggagaatttttctaattggccagatggatttgtggctagttttagacatgcatgttgcactaaaaaagatcttagtctgcttctgagagcttggcactatttgccaagcaattcacatcataaatctcagattgagcttgaagcaattagattaagcattgtagagggagctgacataacctgcaggccagagtacaagtccttttcctcacaacatttgtcaggtttttttgatgcattttctaagaaaaaattcatccgtattttaactcatgtttttgaaggacagtcatcgacaacttcaaagattgaagttgtgagtagttaccataactggtttttttcttcccttaacatgagattaaatgctgaaggagattattcatggttacctgtcagcgcgatttcagaccgtatagatgtttcagctcattatgaattgctcaacgagatagctgattggatcgctgatgtcatttgtgctgaaggcacattaaattttgacatagcgtgttcattatttccggtagggcctgtattagatgatatacaatgggaaactcgcagaaatgatatttctctgaggaggagttggattgaaattgcagccgatcttcatttgataacgaccaagacagaagtttcacgtgacgagttaaagcgcatagttgatgatggtgtgttcaatattaactggttaagattatggtacaaagaatctggccttaaactgttaaaagataatgcctcagaactgcttattgatctcgaagaagttcgtcaaatgagcgagttagaagaaactatcgagaactccaataataacctcgaactagctcaaatagcattccaacatgaaaatctagcatcttttcaaaagttgttgagaaaaacatgggattttgtcctgggctatggacatcataaagatccaactatttttgatgttataaatgctgtgagttttatttcttatgaagatcctgattctgcacttacaatcttagaaagaatatcaccaatagtttacaatatttcaaaatttactgatggggacgaaactaggaactctaaacactccttaacttcaatcttggcacgattaaatccgcaaacagcggcttcagtttatgaacaggagctttgtgatggtgaatggtattattctgaagacacaatacttaggctaattgagagatgtgatttttctgaaccaattataaagaatttatacctgacagggttgcattcaagctgtcttcaaatgcttctgaataaggtagagagtgggaatccacatgctattcaaattgcgggtgaattagaaaaacttctcggtaaaaaaattcagatgttgaatgatgataaacattcgtcaaatgatgttctggatgaaaagattgtattgaacatatcagattatccaccggatagtttcgatgaactcatcgttgatctaaaaggaaattatagcactcataaatttttagtgtcttggtataaatactggtgtgatcagggaaaagaaaatgaattgctgcatatacttacttcatgcatttcgacatttactgatcgatttgatgataaacgatatttgctagatcttcttttttcaagctcttttaaattagaaggtaagagtagagcctttaaaattttggtggcagcccatagatcaatggggggatggtcggattggtatgagcgtgaagaaaatagcattaaccgacttaagatagttgcggaacagtacccacaaaaaatcgaggaatttataaagctcacaacattacagcctgacgactggaacgacaaatttggtaaactgatcataccaaatgacaaactggtttttttactttctcatagcggcagaaaagaagaagctcttaagctcacattacagatggtaaaaagtttagaagatagcgtccggaatcttcaacttacaaaacctatttgggattggcacagaaatgactctcttgaggaggcattacttaaatctttagtttcaagacttaagctgccaattccttcaattaaaatctgggtaatggagcagctttcacaacttttaatagctcagaagcctaaagtagaggatctattaaaaagagacttagctagtagaaaacaagaatcagaatgtgttgaagtacttagcgttttctttatcgcaaaatctaaaggatatgtttgtgataatgaaattgggaagtttataaaagcaaggtcctctctatccgacttaatgatcacggaacttgtatcaaatgcaaattatttcggggaatacgcttctcaattcaatccatttattgttttagatggtgataataatcgctttgaatattatcaaggtaatcacgtccctttattgtataattcattactagaagagcaagagaaaaaaacaggtgtgccatttacgggctattaccaatccgaatggaatcggacattcgaatatcagccttcaaaagtaacaagtattgattactttttaagtggtgataggcaaaggtctaccgggcaattttacacacaggcgagccatcgtggtcgttctgcttatctacgcacattagaagtggctaagaactttttcggtatgcccaatgattatgctcagaatttgtctgtacctgcattacctatcgagcctgcttatctaggtattgtacctaaaagaccgacatggataccagaatggaaagcaggagttcttataactaaacaaaatttaattaaatttgttgaagaattattgatgaattttgatacggaagatgattgtttagacctgttggcaatttcattccctattaaattagatgaaaatagatgggtcgatttaactatagtcaaagcgcttgctaagtttagtagcacagcggaaattaaagttaaagagcgtattggttgtatatcaattggtaaccttctgaacaataagttattatatgaactctatggaaatgtaaactacgaaggtactgtactggcagtaactccatttccgttaacgagatatggacattggcattctgatcttgaaaccagaggtatctatattccaatgtgtactgttgatggtaagaaaactatcggttattccgctaatggattattttgttatgatgttgataacgctaggattggtttttcatctttctggtataactattggcaacctatccatccaaagggaattaactcactttgtggttcttatacggcagttattagggaaaatattgaaaaatggataaacacagcgattatatcccagaagagtttttatgcgtgcaaggccgtagtgctcacatccgatagtgattacaaagagtatgaccaacaagtgatagagttcgatgtgctttga

SEQ ID NO: 434165 - DNA, 576 bp, Serratia marcescens
atgggtacgcacggtgctcagcgtaaaacgctggcgctcgcagtcgcgggcgcgctgttgggaacagggtttgccatggcgcctgaggcgaaagccgcagggtttatcgatgattccacgctgaccggcggcatctattactggcaacgtgagcgcgaccgtaaagatctcaatccggacagcaaggactacaaccaatataccaccaacctgtcgcactccaccgccaacctgagcctggatttcgcttcgggctacgcctgggatatgttcggtctggacgtcggtgccttcaccgccatcgagctggcggaatccagcgccagcggccacccgaacgagatcgcgttttcttcgaaaaaccggacctacgacgaagactattccggtgacaagggcggcatcagcctgtacaaagccgccgccaaattcaaatacggcccggtctgggcgcgcgccggctatattcagccagaggccaaaccctgctggcgccgcactggagctttatgccgggcacctatcagggggccgaagccggcgccaagttcgactacggcgatgccggcgcgttga

SEQ ID NO: 434166 - DNA, 1086 bp, Serratia marcescens
atggcgaaaagaccagaaaagtacgacgctaacttacctaagaatctcacttatcgtaagaagtataaatcgttctactggcgccaccctatcacgcagcgagagcttcccttagggcaaatcgccagaaaggatgccattgcacaggcaatcgaagcgaacaactatcttgagcaaaactatctgcccaatgcactcatagaacgccttaaaagccgtaaagacgttttaacacttaatgcgtggatagataggtacgaggtaatacttagccggagagagctaaaagcaaacactataaaaattcgaactaaccagttaaaaatgattaggtcactaatgggcaactgtttgctgccagaaatagatactcgacagatagctgagtatttggagtcctttaacgcccaggggaaaaactcgatgtcaactgcaatgcgttcagttttgtcggatatattcagagaggcaatcgtggaaggtagaataaaaacaaacccagtggaagcaactagagcccctcgcattaaagttaaacgtgaacgcctaaattatgatgagtacacaaaaatatacttagcagcgagagagcaccctcaatgggtgggatttgctatggatatggcccttatcaccggccaaaggcgagaggatgttgttctcatgcgttttactgacatcatcgacgagcgactacatatcgaacagggtaaaacaggtatgcgcattgccatccctttaagcctacatcttgaagcggcaaatcttcgcttgggggatgtaatagagcgctgccgagcctcgcattcttcaaactacatcatcaacaccacgcggcgttctaagaaaggtgatacatcgttacaccctgatgctttaaccaaagcgtttgtgaaagccaggaatgcctcaacgctggatcttggtgacaatccaccaacatttcacgagatccgcagtctcgcgtcacggctatacagcatggaaaaaggggaagagtttgcacagcgcctactgggccacaaatcagcactcatgacgaagaaatatctcgatcccagaggcaaagaatacgtacttgtctaa

SEQ ID NO: 434167 - DNA, 753 bp, Serratia marcescens
atggtcgatcgtgtgtgggctatactttgcctactatcactgcgaggtttttgtatgtgcggccgctttgcccaagtacaaacaagggctgactatctcgattatttggcttcagagctcgagtatgctgatgctctggatactgtgcctattggtcgctataacgtagcgcctggcacccatgtattgctcatcaatcagcgagatacccagctccatatggatccggttctatggggatatggccctgattggtggcttgagatgaagcgcccgcccgtaatcaatgcccgtgtcgaaacggcggcagggagccggatgtttaagccgttgtgggagcatggccgcatgctggttgcagccgatggctggtacgaatggaagaagtcaccagatgatccgaagaagaaacagccgtattttatccatgcagatgggccgatattttttgcggctatcagtcgatttcataccaaagaggctgagcagcatgacgacggctttgtcatagtaacagcggcaagtgattccgggttgttggatattcacgatcggcggccggtagttttgccgccggtggctgcccgcgaatggctaaaccccgatacctcttctgcgcgtgctgaagagctggccatgagcggagcgacacctgccaataaattctcgtggcatcccgtttcaaaggccgttggcagtattaggaacgacagtgcggatctcataaaaccgatcgataatccgttgcagtga

SEQ ID NO: 434168 - DNA, 1269 bp, Serratia marcescens
atgtatgccctggccgatgtaaacagcttctatgcaagctgcgaaacgctgtggcgtccggatctacgcggacgcccagtgattgttctatcgaataatgacggctgtgtagtggctcggagtaaagaagccaagttgttggggctcaagatgggagaaccttacttcaaaattaaacgggactttgagcgcgcgggcggcatagcattcagcagtaattacgagttgtacgccgatatgtcgatgcgagtaatggcggtactggaagaaatggcgccacgcgttgaaatttactcaattgacgaaagttttctcgatctgaccggcgttcgtaactgcgttgatcttgataagtttggtcggcaggtccgtgccaaagtgctacgcgacacagggctcacagtaggagttggcattgctcaaaccaagacactcgcaaaactggcaaatttcgcagcgaagaaatgggataaaaccggcggcgtggttgacctttctaatttggaacggcagcgaaaattgatggcgctagtgccggtagcagagatttggggcattgggcggcggatatcgaaaaaactgcaggtcatgggaatagaaactgcacttcagttggccgacgcaagcaccactatgatcagaaagcatttcagtgtcgtgattgaacgcactgtgcgagaactgcgcggtgaaccctgtttgtcgctcgaggaatttgcgccgacgaagcagcagattatctgcagccgcagcttcggcgaccgcattacggagtatgaccaaatgcaccaggcgatctgcatgtacgcgacgcgcgcggcggagaaattgcgtgaagagcggcaatactgccggtatataaatgcctgggttaaaaccagcccattctcgatcaacgaggaatattacggcaatacagcaagcatcaaactcaccacaccgacgcaagatacacgggatatcatcgctgcggctattcgatgtctggatgccatctggcagacagggcatcgctatcagaaagctggcgtcatgttgcaggatttctactcgcaaggtgttgcccagttgaatctgtttgatgaatttcagccacggcctaatagcgaacgactgatgacagttttagaccacctcaacaagtctgggcgtgcaaaagtctggtttgccggccaaggtaaccaacaagcatggtcaatgaagcgggaattgctatcccctgcatacacaactcgagtaaccgatctgccacgagcgcgcgtttattga

SEQ ID NO: 434169 - DNA, 225 bp, Serratia marcescens
atgatgaccatcttattgaccatctatcttgccggtatcccaatagcctttgttctcggttatgcggcctatgaaccagtagacgagaaaaaaggcaacgctgggtttgttgcctgtgaggctgctatatggccactgttgctaatcgtgctctacgttgccattcctatcgtcgaattgctttgcctgacttatgaccgattggttttgggacgccggaaataa

SEQ ID NO: 434170 - DNA, 306 bp, Serratia marcescens
atgagcagcaaacaccgtaaaggcgtgctctatatccgccatatccaacccggcgataaatgcgacagatttatgtctgccgtcggcctggccgccgccatgatgaaggttgagagtggcatccggcgcagcgtgtatgtgctggtccgccacggcttcccgaatgatgttctcagccatggccattcaaagcgtgcggtagaaaaaaacatacttttcggtggcggcaaggggaaatcgttcaaggtcaacgcacgcacctggcggagcaagaatcagcaagcagcgaaggaaagaggaaaatga

SEQ ID NO: 434171 - DNA, 234 bp, Serratia marcescens
atggaggtcaaacacggccgccgggaagtttggcagcatgcggccgaggccaacatgcaggaagctataaagaaaatcgctgccattttcgacattgatgacgtcgccattttcccccccggcaaactcacctacctcaagaacaagcccgtcaaacatatccgaattcgcccgttgcagagcgacgtggtgattgaccctattaccggcgccatcagcgctaaggagaattga

SEQ ID NO: 434172 - DNA, 423 bp, Serratia marcescens
atgggcgatgaactgaactacggctccatctataagcctgaggacgacatgtgctgctacatcgccgtgattgtttggcgaatgcgcacccgtgcggcgctccgctccggtatgccgtatcggccggaaccaaaacctatttatcgaggctcaggccaactgccggcaaagcgaaaacttgactccgtgaatatcggagcccgacagcgttactcatcaacgatcatgctgggaatttatcaacttcaccgtgccggccacaacgagcacacaattgccgctgacacaggcattcctattgccgatatccgcaatctgctggagcacaaaacacagacgcaacgccgcgcatggatgctggcccaccagatacggatcccctctaagcaggaaattctcagccgcctttcccgcgaagtttaa

SEQ ID NO: 434173 - DNA, 1155 bp, Serratia marcescens
atgagtaccacacaatcaaccgttgccagcgtgttggaatcagccctgcgccccgttcgggcgcagctcgacttagccattgaacaaaccacggggaccgcgcaacggtccattgaaagcgccggagttctcctgaaccaagcacaggccctgtgtatcgagcagcacaacgctgaggttgatgagttcaatagccttatcgaccaccatgaagcattgcgcgcagagatcaccaccaagaaactacagctcaccaaccttcaggagcagttggcagaacagattgtgattgccaaagaagccaatgcaagcgcggagatagcccgaaccagagtgaagcaactcaccagcgacaatagccgtcttgtcaaggagagcaatgacctcaaatctctgaacccgcatgcactgcaaaagcaaattgccagattaaaagatgacctgaagtttaaggttcaactactcgatcagcaaaaagcggaaatgcgcaaagctcgcggtacggctgccgacatcaaaacatcactggcccaggctgcacatcgtaattctgttctggaagataccgtggagaaattgcaatcacgcctgcagaacatcgacggcgacgtggcgccagtttggtacagcgctggcgataacagcggtattcgtttttatttttacacctttggctggcggctttcttttggctccgacgaccgcgatgtgcaactgcagatcttgcagaatatcgactggcacatcgaggtacggaccaatacagggattggcgtcatcgtatccgtgaccgagtggtgccgcccacgttatccaacactggacatattcaaacagtcctggcctgaagaactcggatccgcaatctgcacccgtatcaatgagcttctggagcgcagccaccctcatctcgtccgcagatcagaatgggccgaaagcacaccactcagcacgttgccacagttgaaaccacagtggctggatttgctgaatgcctctggcctccattcactgtattccgtcgccagtcttaccccggaagaactttccgaaacagtgaaaggtttcggcatcgccaccgcgcgccaggtacatgccgcatgtatgaaaacggtgaaaacatgggaacccgaagataagcagaaggcggcctaa

SEQ ID NO: 434174 - DNA, 1575 bp, Serratia marcescens
atgcaaatcattaacgtacagcagggttctgctgaatggcacgcgctgcgtgccaaacacttcaccgccagcgaagcacctgtaatgatggccacatccagcaaaatgcgtcgggatgaactgctgagcatgaaagccactggttccgaacgtgaaatcagtgactgggtgcaaaccaacctcttcgataaaggccaccagcaagaagccgccgcccgcatcatcgttgagcatatgatcggcgatgagctctatccggccacggccgttgatggcgacttattggcgtcattcgatggtatgaccatgatggaggacacgcttttcgaacacaaaatgtggaatgccaacctggctgaagcagtccgtcaaaaggaattagcgccagaatattactggcagctggaacagcagttactggtcagtggtgcagatcgtgtcattttcgtgtgttccgacggcaccgaagaaaaattcgtatccatggaatacaccccagtaccgggacgagtagaggcgttagtcgctgggtggcagcagttcaggcaggatctggagaacttcaaaccccgcgagaccaaagaagcgccacaaggcaaagcgatagcacgattgccggcgctaatggttgaaatcgaaggtgctgtaaaacagtcgaacctgaccgtatatcaagggcaggcactggcatttatcgagtccatcaatacaaacctcgtaacggatcaggacttcgccgacgccgaggaaaccgtgaaattctgcgacaaagccgagaatgaactcgacctcattaaaggtcaggccctgtctcaaacggtacagattgatgaactgtttcgcacaatcgatacattacgtgaggcaatgcgtaccaaacgtcttgagctcacccggctggtcaaatcgcgtaaagatgaaatacgcgccgaaatcgtcactggcgccaagaaagcgctgaatgagcatatcaacatcttgaacgcccaacttggcaccgtgcgtctgccagccatctcggctgattttgtcactgcgatcaagggaaagaaaacactgacctccttacagggcgcagccaatgacgagttagcgcgcgccaagatcgaagccaatcagatctgcgataaataccaagcgaacctacagctgttcgatgcgattgatcccgccttcaaatctctgtttgccgatatcaaccagctcgtcggaaacgatagtgagcatttgaaattgctgatcgaacagcggatcagcaaccaaaagaaacttgatgaagaacggatcgagcgggagcgacaggcgctcgcagaagcccccgtcgcggagccggagactgttgctaaaaccccgcttcattcggctacatccttcaagtatcccgagacattgggcggcgcgccggtggcgaatgctgaagagctgaagccagcaggcatgagcatcacggagatcaccaatgacgttaaagccgatctggtcgccgagggcatcaaaatcagtgcggcagcgttaaaccaactcatccctgcaatcatcgccggccgcattcgccacatctctgccaacgtttaa

SEQ ID NO: 434175 - DNA, 840 bp, Serratia marcescens
atgagcaacatggtaacaacaggcactttgccacaatctgtcgcggccatggggatcgatgagcctacctggaacgcgctgaaaaactccatttatcccggcgcgcgggatgactctgttgtcatggctgtcagctattgcatcgctcgtcagttggatccgctgatgaagccggttcacttggtaccgatgagcgttaaagatgcccaatcaggcaaaaacgaatggcgcgacgtagtgatgcccggcatcggcctttatcgcattcaggccgaccgctcagggagctatgcgggtgcaaatgagcctgaatttggcgacgatattacaaagacgctaaacggcgtcgagatcaccttccccgcctggtgcaaatacacagtctgtaagcgcatgcccgatggcaagatcgtcgagttcagtgccaaagagtattggctggaaaactacgcgaccgccggtcgtgataattcagcccccaatgccatgtggaaaaaacgcccttacggccagttagcgaaatgcgcggaagcgcaggcgctgcgcaaagcatggcccgaaatcggccaacaacccacggcagaagaaatggagggaaaaacactggatatcaacgacgccaaggatgtgacgccccacaaagaaacccaggcgccgttgacgctgccacattacccagcagataagttcagtgcaaatctgcctggttggcaaaggatgattgagtccggcagcaagaaagctgatgcagtgatcgccacggtcagcaccaaattcaccctctccgaagatcaaaaagacgtaatccgcagactggagcctatcgatgcaaatcattaa

SEQ ID NO: 434176 - DNA, 159 bp, Serratia marcescens
atgagccataaccctatccaacagatccagtaccaacaccggatcggcagccacaatattcaccatttcaaacaccgccgccattcgttgaaagcctgcgccgtcgttctcagcgttttccgcttatctatccgtaactccgtgagggctgaccaatga

SEQ ID NO: 434177 - DNA, 306 bp, Serratia marcescens
atgcacgaatacaactatcagcggatggttgaggagacgctggaacagtatgaccgcacgttagcggcggatcctgatgaaaaagcgctgctcgatgcgcgcgttgagggtatgcgtaaaagcctgcgggtatcggtgttccaaaaactgattgcggaacgctgtcacatcgcggggctggacaagcggcctctggtcgcactgacagagtcacctggaatggaggaatacctttgctcggtgcaaaccgagatcctcacccggatcgcgaaaaccgaacgagcgatggagtttatgactaactaa

SEQ ID NO: 434178 - DNA, 270 bp, Serratia marcescens
atgacaatgacaatcaatatcaacctggcacctgttaactcttcccagatccacagcatcggccacgacgcggcaaccaataccttggcaattcgcttcaagtcccgcggcgaaccggcggcgctgtaccactacagcaatgtaacggcagaggattttgccgcgttcaaagatgcggactccgttggctcccacttctaccgccatatcaaagcggacaccgagcgtttcccgttccagcgcatcaatgaaaagaaggatgacgaataa

SEQ ID NO: 434179 - DNA, 168 bp, Serratia marcescens
atgaaagcgataaatgagcacgtcggatggggtgttgatggccacggcctgaaggttctgttttgcaacaactgccgcgcggttttctacaaaacgctgagtggttcaaaaataattcaggccaagcgagtgtttagcaaaaaacaccagtgcagcgttagcaactaa

SEQ ID NO: 434180 - DNA, 633 bp, Serratia marcescens
atgacgccgcgggggatccggctgctaccgcgcattttctggcgaccggcggcgctgatttgcccaggcgccagaggctcgctctcaacagtgcggcgtttgcgtggcttcggtggtgctggcatatccggcatcgttttacagcgggtgatcaccaacgttgttttttcgatgcggtcgctgctgcgctggattcgttcttgcaattcacgagctcggcgcagccgtgctgatttagcttttgctttaatcatggtcattggtcagtccttattgttggtttttctgggatatttaggcacgcccagccgtgctatccttgctgtcaccacaacaagtaaggatacggttatgaaagagagattcgaggctacttgtccgttgtgcaacgacgatggaagctatgttttcacggattcggataactacaagatttatgagtgttcagattgcgggggatttgagatcagcactcacgctgagaaattagttagggatatgccccaagaacgtagagagttttattcatcactcattgctgctgcacctgaagggcaggtattagaaatatcattcgaggttctaacaactgggaaccgggttaatcatcgctatatcagtgtgcctgagtag

SEQ ID NO: 434181 - DNA, 171 bp, Serratia marcescens
atgaatgatgagcgacagaaaccgacagaagacgaagtacaacagttgaaggaactgctggaaaagcatcctacgtttgtcttccagcagttaaatgagtggatgaatcaagacggtttgatgctgtcaattcgtaccattgaggaaggaaagactactcaggcacactga

SEQ ID NO: 434182 - DNA, 678 bp, Serratia marcescens
atgaaaacactcggtgaacgttttagatggcgccgtgagcagcttggtctgactcaagaggatgccgtaaaagagataaatcgcttattgcaaggcgaacggaaactcacgcgcgtaacgatcagcaacatagagaatggcagccaagaaagcatgaaggacaaggtgctattggccgttattcaagtgctcaagtgctctgctgagtggctggttaacaacattggccccatcgaaactgcagttaacaatgatcatctaatacgaagtaaagaagaattgcgcctggttccgttgctatcttggggggatgttaagcaatttattaataccgatagctcagcctcactacaaagctcagtaatgatcccatgccctgttccgtgtaatttcggtacctttgctcttgaggttaagagtgaggaaatgcttccttcgtttgaactgggtgatgtgatttttgtagacacgaagaatacagagctatgtcaaggtaagtatgtcatagccgttaatttgaaaaataatcaggcgactctaaagcaatttcaactaattgataacaatgaatatttaaaatccaccaaccccgattatccgtcagaaatcaaattcactaaaattgacgataacattttaactattggccgtgtcatcagccaagttaaaaaattatag

SEQ ID NO: 434183 - DNA, 240 bp, Serratia marcescens
atgaccactacaggcaaaacgctgtatcagatcctgaaagagaagtacgggaatgataatggcattgcgaaggcgttcagtgttgaacgacctacggtttttacctggcggaaaaccacgccagaaaaaatagctttgctttgccatatttctcctgaaatcccatacacctacaacccagcggattacggccgcaaccctgaaaatttaagcctggttctgaccaaaccagcctgttag

SEQ ID NO: 434184 - DNA, 756 bp, Serratia marcescens
atgagcgaccgcaacgggccgaagcaggtaacggcggcagtaatgcagcagatcgcttccagcagggactcgccgcaattcaggccgtacaagaaaaatacggctacggcggcggagagggcggcgacacaggggattgtcttgacggtgattttgcccatgtatccgatccactggccggcatgggtcagccgaatgaacacgacggcgctcatggaggcgtttggttcggagctgacgcgagtactgctacaggaggcgatcacccctgagcaactgaattacgccatcagggcggcgccgggacgaaaattttacccgttccctgcgccgccggactggctggccatggcgaaagagctgatcgacgccagactgccgacagtggatatcgtgatggaggagtttgatcggtacagcgccagacgggggagttttgctagccctgaagagttccgatggaaaacgccgatcctgtactggattgtcaccgatatgcgcaaagcgatgttgcagtacaaccatggtgtcgctgagctgcgaaaggtggcagagagactgctcaggcagtgggagaaaagactacaggacggagagcgaataccagaaccagccatcaggctggggtataccgaaataccgataggtgttggaaaagagcggggattgaccaccctcgatacagagcaaaaaggcgcggcaatgcttcagtcaattcggctgagggtggcgcaagcaaaaatgaataaggactga

SEQ ID NO: 434185 - DNA, 918 bp, Serratia marcescens
atgactattagcttcaagaatgcactgatttaccgcttatcccgaaatgtcgatctgaacgggatggaagagaaactggctgcgtttgcattcactccatgcggcagccaggacatggcaaaaaccggatgggtggcaccgattggtggtgcactcgtacacaccgccaacggccagcatctgctggtggtccagcgtgaagagaaaatccttccccgagagataattcaaaccgagctgaacaagaaagtcgccaaacttgaagctgaacagcatcggagactgaaaaagtcagagaaagatgccgtgaaggacgaagtgctgcacagcctgattccgagagccttcagcaaacaccataagacacaggtctggattaacgaaagggccgggttaatcgtcgttgacgccgccagtgccaagcgcgctgaagatacgctggcgctgctgcgcaagagcctgggctcgctcccggtggtaccgctgaccatggaaaacccgatcgagcttaccgtgaccgagtgggtacgctccgggcagccgccagcgggattcatcctgcaggatgaagctgagctgaaagcggtgctggaagagggcgggatcattcgttgcaagaagcaggagctggtcggcgatgaaatagcgacgaacctgcaggcgggtaagttggtcacgaagctggcgctgagttggcaggatcgaatcgacttcgtgctgagtgatgacggctccctaaagaaactgaaatttagcgatgcgctgctggaacaaaacgacgatatcgatcgggaagattacgctcagcgttttgatgcggatttcattctgctgaccggcgaactgtcggcgttaattactaacctcatcgcggcgctcggcggagaatcgaacgcagcctctgggaggctttgttga

SEQ ID NO: 434186 - DNA, 3132 bp, Serratia marcescens
atggcgagcgatgaacaagttggcaatatcgtttatgaagtagaaatgaatgttgccaatctgctcgaggcgcaacgccaagtaaacgaacggctggacacaatggatgagcgttttaaacgctcagcaaaatcatccgacacgctatctacctccgtaacacgtctggctggtgctgtttcggccgcaatttcagtgcaacaggtagcgaagtatgctgacgcttggacgacagtaaataacaagctcgcaaactcggttaaggcaaatgaggatcttgcgacagtaacgcaacgagttttctccattgctcaagatacgagagcggcgcttgatgccacagcgtctttgtatcagcgccttgaaagggcaacacgaagctatggaaccagtgttgatgatgtagctcgattaacaacgatcattaaccaaggttttgtcgtttcaggtgctacagctcaggaagcaagtaacgctgttattcagctgtctcaaggcctagcttctggcgcgcttcgtggtgaggagttcaattctgtaactgaacaaggtggtcggctggctacggccttggctgattccttgggagttaatattggccagcttagagcaatggctgctgaaggtaagctgacaaccgatgtagttgttaaggggcttctctctcagggagatgcgatagggaaagagtttgcgaatactacgactactattggacaggcgcttgagattgccaataacaatataactcaattcattggcagctcaacgacagttaagtctactgtttcactatttaacagctcaattattacgctgagcgaaaatcttgatgtcgttgcgaaagtaatcggttcagtggccgctatcgtcggtactcgttatgcggcagctctaacgctcgctgtagcagggcaggttaagcttgctgcaactgcttttgctgcatcaacatctctttctgcttttggtgctgctgctgctctggccaagggggcgcttgcgctaatcggtggcccagcaggggctgctgtgctcgcagcttctgcaatcttttacttttaccaacgagcaaaagaggcgcgtcaggcggccattgagttagccgacggcgtaaacactctgttaggcaagatgaaagacatgtctgccacggagatcgcagccagtatcgcaaaactacgtggtgcaatccctgaattaactggagctgtcaaagatgcaagcgacgagtatgataaggcgtcaaagcgcgttgcaaaccttcagcgagaagttgatcaatggggaactggcactacacgtgggcgccaggcagccgaggcattaaccggggcagttgataaccaaagcatagcttttgcagagcttgatagagcccagagaaatctcagccaaacacaaagtgctgtagggattgcttcggcgcagttgaatggcacctttgaacaagggattgggttgctttcccgccatggtgagcaagctggttttgctgccggaatgatgaatcaactcggtaggcaattaaattttgcagccggggctcaggaaaagttcaatgcatccaacctgaaaataaccagaccaaagaacgtccaagactaccttgacggtcttcaagatcaggttgagcttcaggcggaattaaacgataagaagcgagctcaacttaaagctgaacaacaaataagacggctgggagggtcagaggctgacgttgttctggcaagagagcgcgctgctgctgaatatgactctcttcaggcgcagcaggaacagaagaaggcgaccaaggaagggatagctgagggcaagaaatcagcgagccaagcagaaagcgttgcccagaagctggcaaacttgaagcagcagtctgagcttgcggcggactcaacaaatgagcttagccgagagcaggcgatcctgaccgcacagcaatcactggggaaaggagctacacaggctcagatcgctgaggctggtgcttacgctgccaaaaagtgggatacggcaaatgctatcaaggcgcaggcggccgcagagaagttactcccagagtccaaagagaacgccagctacgcgcaagacgttaaggatttaaacacggcgttggcggccaagaaaatcagccaggaacagtacaacaccactgctgagcagttggagcaacagcatcaggttaacttggcaaaaatccgggctgaagccgtagtaagtcctcagcagcaagccgccggtatggttgacccagttcagcagcttgccaacgagaacgcgcagaagctggcattgattcagcagtttgaaaatgatggcacgttggcgcatgaccaggccttagcgttgcgaacggctgcggatcgtcagtatgagcagcagagaacagaggcgcagtggcagctcttgagccagcagagccttggttacgacatgctgacgagtgctgttgatgccttctcgggtaatgcctccaacgctattacagggctacttaccggcaccatgtcagcacaagaggcgatgcggtcgcttggcaacaccattctgaatagtgtgataaacagcatcgttcaggtaggcgtggaggcgctgaaaaactacatcctcggccagacgcttggcgccgcctccgtggcctcatctgtgggtatggctgcaacaacggcttcagcctgggcgccggcggccgcaatggcatccctggcaactcttggcgctaacgctgctccagcggctgcagggataacctcaaccgtgggattggctggtgggctggctttggccggtacacgttataacggcggctctgtgagcgctggcgcgatgtaccaggtaggtgagcgaggcaagccagagatttaccaggcgagcactggtaagcagtacatgatccccggtgacaacggcaaggtgatcagcaacaagcagatgaccgccggcggcagtgcggcgccaaccatcatcatcgagaactactcatctggtgctggagtaatggatacccaggccagcaaaggggctgatggtgccgatgtggtgcgcattgtgctggctgatctgcagcagggcggccaaattagtcagggcatctcccagtatcaccaggcgcctcgcaaagccactgaatag

SEQ ID NO: 434187 - DNA, 642 bp, Serratia marcescens
atggatgtgaaaaagtttatattggctgcagtccttagttgtttaccagcttttgcctttgcaaatgatattgatgcggcaaaaagcacaatacttgaatcaatgaaagatcccgacagtacaaagtttaaaggtgtaagggctgttaaaaactctattggtcaagattttgtttgtggcgaagttaactctaagaattcatatggtggatatgtggggttcaaagggtttgcgtacaaagcaggcagactggttattgatggtgattacaaaacacctgacgatttagagttttatgcaacatctggttgtggtggtaagaaccttgaaaaggtagcaatggccaggaggaacgctatcagtggatgtgagatatcttgggggcaaattagcgatgtgatcctatttggtgcaacgccggaaaaagccgcatttaatgcagcgtcaaaaataaagaacaaaaacccaaaattttcacatgaacaagaatcagcatacatagccacgtcagttaactctttaaaacaaacattatcgaatagtgagtttgtaactggcgtaaaaaccaatacaaatgccacaaaaaatgcttttatgtccacatgcatagataccacgtccaaagctctatctggcatgtaa

SEQ ID NO: 434188 - DNA, 390 bp, Serratia marcescens
atgaaaaatcacaaactcgacacgcaacgcatcatggctgatgcctggaagcacgccgaatacatggcgtttgaacttggcggcctcaagtctcagtatttttcatactgcctgcgcaaggcgtggcatgcagctaagcaacctctcaagggaactatcaaacagatcatctatgcaagtgacctgtcgaaagagtttatcgaaagcgtggttgccaacatccctcaagctgaagccgccggcgttaccgcttaccgagcattagccgaggaggctatcaatgctgttgatttcttttctggctacgcaggacagctcatcgatgagctcctgaaagtgaataaacgcaactgcgcggcaatccaaaacctgatcacctctttgaaatga

SEQ ID NO: 434189 - DNA, 864 bp, Serratia marcescens
atgagtagcattctcgttaacgactgggcggatcgttatgagcgcctgattgaaaggcgcttgcttgagtcggccatcacagtcaaaacaatggcggattacactcgaatgatacggcatgttaggaagctttgggctgacaggattttgtctgaaatcaatgttgccgacattgccatgaatatcgactccatagcccgtagagcgcctcattcagcacgtcgatttcggcttaatctatctaattttttccttgaagcccaaagagatggactgttgccaccgggtcataacccagccctaatcactcgggaaccatttacaccaataacaacacgcaggattacattccctgaatggatatctgtctaccgaaaagcacaaagcatagcgccaagctatttccctgtggctatgctttttgctctcgttacagctcagcggcgtggagatcttgtagcctttcatcgcgcccacttgtttgatgggtatttgcacatcaaacaacaaaagaccggagaaatgattgcactgccaatgagcctacgcctcgacgcgttgggcatatccctatctgaagttatagcgatgggccacccatccgggttgcttttacggcagaacaacggaaatccagtaaatccgtggagccttagttactggtttaggcgatgccgtgatgaggcgttgccgagtacctcaacgggcaggcctccatctttccgggagcagcgctcactttcagagcgactttatcgcgagcaaggaattgatactcgcacgctcctcggccaccgattccaaagcatgaccgatcaatacaacagcctgcgcggtcgcgattaccgccgattggttctttaa

SEQ ID NO: 434190 - DNA, 159 bp, Serratia marcescens
atgttcaaatctatctccgacgctaaaactttcctgttcaaccacggcatgatcgacttcatcgacctggatcgctttgatgaaatagtcgaagacctttatcgcaacgctgatgataaagacggcgctgacgagatcgtaaacaactacgttatctaa

SEQ ID NO: 434191 - DNA, 411 bp, Serratia marcescens
atggacaatctcgaaaaaatgattaaggtcggtgaaattgctttcggtaaaaactggcaatctccactcgctcgctatttgggcgtgagcgacagaaccattcgtaatttcatctctggggcatcccgtaccccagctgatttatctggccgtcttctggttgcgctggaggcgaaacaagctgaaattgaggccgctatcgcgctgattgattctgactgcgtgcgcggagacagcatcagcattgaaatgctcggtgacattgctgataaattcgattttcacgacgagcaagacaaaaaatctgcgatggacgagatgaataacagtgtttatgaggttactcacctgtctgatattgagcagatagcgaaaaactggagcgtcgcaaatggccgcacgaataaatag

SEQ ID NO: 434192 - DNA, 1095 bp, Serratia marcescens
atggccgcacgaataaatagccgagcagaagccgaggcctatgtatccagcgacctggtcgaatgcctcgaatgcggaaaaaaattcgagtttctgccagttcatatcaagcgcatgcacggcttgacggctgatgaataccgggagcgacacaacatcccggcaggaatcccgcttgccgggaaagcttatcgtgagatgcagcgtaaaaaactcatcgcgatgcaaaaagatggtgttctcgattactcccacctgcccagagcagagagagccgctcggcgtgctggtcgcggcgataagcgggactttgaccgacaatctcaatccggcatcatgaaagagataaatgagtctggccgcgcctacagaaaaacaaaatcattatctacaccagttgaagcgggtagcccaatggctagagtagtgctctctgatgaacaaattgagttcatcaaaaacaatgctcataaaatgtctgccagcgaaatgcaaagagagctcgggattagccgaaaggtaattaaacgcagggctgacaagcttgggctgtctttactaaaaggcaagccccctgtatcaaaaccaatcctagattgggggtcggttgactggtcaaaatctaataaagaaatagcctcctcactgggatgcagctatagcgctgtaaaagcaatgcgccgtagactcggtgtcggcccaggagagcgatcaccaatgtcgaacaaaggagtaaaaaggaattactcgccagagcatttagctctgattaaaaagaatgcagagaagatgcgcttagctgcactatcaagcagtaaaatttcgagaacagaacataatattcatgccaaaaaatggaccattgtttcacctgatggagatgtatacaaagtggtaaacctccacaagtttatccgagaaaatacagaacttttccacccagaagatgttgtctggaaacgaaatggcgaagaggctgaagaaggctctcgattgtggtgcagagcaagcaaggggttcaatgggttaaaacaaagagccgcagagtcatggaaaggctggaagctccttaacccagaagacgatgagccttga

SEQ ID NO: 434193 - DNA, 390 bp, Serratia marcescens
atgaactggttcccattaccaaactggaaagcaattctggtggcagtagctctcggattggtctcatggctggccgtcagcaactggggttatcgcaaagagctgaggttgaccgaccagaggctttccacagagcagttgaaaaacagcaagcaggcggggttgataactacgctgcaggcacaggatgaagtaaaccgcgcgctggtggcatcacaacagcagcatgagcagcagctacgccagcagtacgacatcttgcagaggaaattccgtgaagcgattaaagataatccctgcgctgctgagcgtatgcctgatgctgtcgttgagctcctgcagcaaaattccacctccggcgccagagcagttaataagcctaccccctga

SEQ ID NO: 434194 - DNA, 612 bp, Serratia marcescens
atgacacaaaacgaatttcaacgggcggctggtattagcgccgggttagccgcgcgctggtatccgcatctgatagccacctttgctgagttctcaatcgagaagccagcggcacaggcaatgtttattgctcaggttgggcatgaatcagcgggttttacccgtacagtagagagcctgaactatacgccccagggattgctttcaacctttgggaagcgcatcacaccctatcaggctgacatgctcgggcgtacaacagcacacctggcaaatcagccggcgattgcaaacttggtatacgccgatcgcttgggcaataaatcacgcggtgatggctggaaatatcgtgggcgtgggctgattcaggttaccggccaggataattaccgagcgtgcggtattgcgctgaaactcgacctggttggcaatcctcaactgctggaaagcgacgctaacgcgatgcgttctgccggctggttctggaaatctcgcgattgtggtcgcaacgccaacgatatcgaatgggtaacccaacgtatcaatggtggcatcaacggtttatctgatcgccaggcgcggtacgacatggcgcgtaaggttctgctatga

SEQ ID NO: 434195 - DNA, 333 bp, Serratia marcescens
atggcaagtaacgatatctctgtgatgtggttaaacctcattcacacagtaacgaccagtgatccacttgtggtgctgaatgtgttgctgtgctcggcgattgtctgccgtctggcctgcttcagaaaaacaggctaccggcaccgggcatggatagcatggctggcgtggttggttatcggcgcctattcatggatcccgtttcgcttcattgcgcagcagtaccaggaaacacactggggcgtaatcgcggcgaatctcatcatctgcatcgcgctgtaccgggttaaggggaacatcgcgaaactgctacaccccttgaggccacaatga

SEQ ID NO: 434196 - DNA, 378 bp, Serratia marcescens
atgtccgatccattgactgcgactggcaccactgcgctggtgtcggcaacgattgctgcgcctgcagttggcattgattacggggttatctttggcgcgttcatcggtgcgatgttctacgtcacccaggccaaagacattccgcgaatcagacaggctttctcgttcgtcgtctcatttggtactggcgtactcggtgcgagtgttgccggcgccaagctttcagcatggctgaattacaacgacaccccattagagccgttaggtgcgctaatcatctctgccgttgcggtcaagctgcttaccttcgtcagtgagaagatggaggatccgacatcgctgttttccagattccggggaggcgcgaatggcaagtaa

SEQ ID NO: 434197 - DNA, 834 bp, Serratia marcescens
atgagattagagtcgattccgaaatactttgcaccgaaatcaccgacctttagcgactcaccgcgcgcgacggcttcggactctttgaccggtactgacgtgatggcagcgttcgggatgtgccaggcgcaggcggagttgggccttacggcgttcatggggaaaatgggtgtcagcgatgccgataaggtcaaggcggtgacactgctggccgagaagggcatggctgaatcagttcgtgttgcgcctctgagaaaactgcaggatgagacaagagttcgcgttgttctggcgttatcagtttttgccttcctggattactcacgcagcgcttcgagtgaggttgcttgtgattgctgctctggcactggatttattgaggccgaagtattcacaaataaagttcacacccctttccctgcgaaagagcttgtcaaagcgtcgatccgttttggcgtggagggattcagaccttccgagtatgaagtgcgccgggaactgagagaggttattcgcgttaagtgcaaaacctgcaacgggaaaggcaagatatcgacggcctgccgtgattgctctggcagaggtactgcagttgataagaaagagacagcaaagcagggggtgccggtaagaggagactgcaagcgatgctcaggccgtggttatgagcgcatacctgcgtcacatgcctacgctgccgtgcaacaggtcacggatgctatttcctcggcgacctgggataaaaccgttaagccattttatgacggcttaattcgcattctggagagcgaagagagccacgcagagcgggtattgcagcgagtaactgcatag

SEQ ID NO: 434198 - DNA, 468 bp, Serratia marcescens
atgacagatcaaacgaatatcccagacaacagcgataacgtgctgtcgttcaccaagcgctttgacgagaacgctgatattcgcgaaatgcgaaatttagtcgatgcagagccgacaaaggttaaccgctgcacgcacagcaaaatactcgtggattcccatcaacgccaactgacatgccgccagtgtggctctgttgttgatgctttcgactggatctactcagtcacaacggaagagacaaaagtcgattgggaacttcgcggattacgccgtgaaataaccgatcaccgccaggggctggagaagctgaagcgcgaagaggtgaactgcaaggcgcggattaaaaacgccagcttcaaactcaatgaccttcgcattgagaccgaaaaagccgagaaggaacttaaattcctgactgagcgactggggcaagtaaagggattgcgtgagggtaaaaaatcatga

SEQ ID NO: 434199 - DNA, 213 bp, Serratia marcescens
atgaacaaagctattcaaaaagctgtaagcatcgtcggtagccagcagaagctcgcctcattgtgtggtgtcgcccaaccgacagtttggcgctggctgcatggtggcggcattgacgccctttacgttaagcgcatcgaaaacgctactggcggaaaggttaaggccgtagagattcgtccagacctgtcggatctgattacaacaaactga

SEQ ID NO: 434200 - DNA, 144 bp, Serratia marcescens
atggtaagcctaaacgctcgtattcagcacaagtacgacctgaccgggggcgatttcgcccctaagcgccaccacggcaaacacctcttctacctactcatttttaccctgtgcctgctgactgccggcgcggtctggagttaa

SEQ ID NO: 434201 - DNA, 840 bp, Serratia marcescens
atggcgaactcattcaagcaaatggctaaggacggaaccataaagcgacctgacggccgcatgacaatgcgaattgacgatattcacgtcgaggaagggtttaacaagcgcattgagagcgaacagaccaaggatgacgatgaaaggctctttcagcacctgatgaaaggcaggcctgtaccgccgcttgaggtgcgggttcgtgatgagggtggtgtttggatagtcgaggggcatcgtcgccaccgagcttatgttcgctgccgtaaagccggtaagcctgttgaccgcatacagataattcctttcaccgggaatgatgttgagcgaatcgcccgcatcatgaacagcaacacacagttgccgttatctccttacgagcaatctctcgttgtaaaagagctggctggcttcaatcttacgccagacgagatcgcctcgttggtcggcaagagccgcgccacggtcgataaactgcttgccctcaccctggcaaatcacgatgttcagacgcttgtcaaagatggcgccgttgccgtcgatgccgctgttgagcgcgtaaaagagcatggcgagcaagccggcaaggtactggctggcgacgtcgaaaaggccaaagccgcgggcaagaaaaaggtcacaaaatcctttatcgctccaaaattcagcgcgccaaagtcccgcaagctcgtcacgctcttagcacaagccgaagtccgtgaaatcgacggccagaccgcctacatccttcccgccggcactcagcttgatgtgctcgccattctcgatgaataccgctccaccagcggcaaggagaatccagatggttcagagatataa

SEQ ID NO: 434202 - DNA, 399 bp, Serratia marcescens
atggttcagagatataaccctgattacgtcatgcacgcggcgcgatttgcgccgtttgcccgcgaaaacgagcacggtgagttcgtcaaattctccgactatgaagttttgaaggctgagcgcgatgcgctggctgtggagaatcaggctctgtccgcagcactatcgttgatttccggtagctatggactttcgccacacattcaaagcatgtgcgttgttgaagccccagccactgactcagcactttcagctatcgaagcgcgagcgaaagcggaagcatttgccgaaatcattgagtttatcgatcggcgtagcgggcttgctgaaatgaaaactcagtgggatttgtcttctgcaattgttgctcacatcgccgagctgcgggaggccaaatga

SEQ ID NO: 434203 - DNA, 237 bp, Serratia marcescens
atgaaagagcgcccagtgattgtcaacgaagacgaagagcaactgtataccaaagcagtagagttcaccctcctacatgccacgatgggcgcagccaagcttcagcgtgaactgagatgcagctattggatggcaagcgggattacccagcggatggaaaatgaaggcgtagtaactgccccagcatggaatggcattcgcacagtgattcatggaggtagtgatgccagcaaatga

SEQ ID NO: 434204 - DNA, 312 bp, Serratia marcescens
atggacaataagctgagcgaactgagcaagcccgagcaatttgatgcagcggtggagattcacggcggcgaaccattcgctgtatggtcgccagcggtaaacggctcacacgttaaggcagagttatattacgccctgctgtcagagctggaagcgaaggaaaagcgcttagccgagctggaagccaagctggctacgccggtgcggttgccgaccacttccggccgcctgggcgtggcatacacccgggtaattccagaagttatcgaagctatccgcgccgctggcttcatcgtggagggggatgagtag

SEQ ID NO: 434205 - DNA, 255 bp, Serratia marcescens
atggcaaagctgaacaagaaagagcgcgcctggctcgacgagctgcaagaagtgctgaaccgctgcccgtcaacgcgtctgggtttcttcaccatcggagataaggacgtttttgtgtatgacaagcgcctggataaacagatagatgaattacaagacagtggaggcagggatttcggcctggtagttaacgatcttgatgcgggtttcggggagctaatattcccgtcccacgttcactccacagcaggttaa

SEQ ID NO: 434206 - DNA, 687 bp, Serratia marcescens
atgacactaacgactactgaagaactgaagcacctggcttccagcgacaatgccaacgaactgacgcgccgattggctcgcgagtgtttggctaaccgggaggcgcagccagtgagtagggctgaaatcacaaaaattgctgctgaacttgtccgtggggattatctgagcaaattatggacggaggcggaaaaatcacggcatgttgatactcacagattgcagaacctactcgatgaattgcatgacgtgatgaaggtgaaggcgatagctatcacgcgcctgctcaccgccccgccagcgccagcagtgccggcggaaatgtctcttgccagagctatagaaattgcatggaaagattcagatatctattcaccaggctctgcataccgtgacggctggaacgcctgccgcgccgcaatgctggcagcagtgcctgaatatgacatccttgaagactatcgagctgagatgcttaagcgcgtgacctttggcggggatggcaaatcatcttgtaatgcgaactctccggtaattccggatggttggaagccggtgccggttgagccgacgaaagaaatgataaatgcagcactggccgccgggtgcgcgagcatacgctccgcatatcgagagatgctggcagcagcgccggagagtgggaatgatcacgatacccgacgataa

SEQ ID NO: 434207 - DNA, 165 bp, Serratia marcescens
atgtgttttttattattgaattcaataagttatgatattttccgcgatctactgctgcgtcacatgggctggttcgaagcggctgacctgatcgttaaaggcatggaaggcgctaacctgctgaaatgttcagagtttggcgacgctatcgtagagcacatgtaa

SEQ ID NO: 434208 - DNA, 132 bp, Serratia marcescens; identical to SEQ ID NO: 101192

SEQ ID NO: 434209 - DNA, 498 bp, Serratia marcescens; identical to SEQ ID NO: 16552

SEQ ID NO: 434210 - DNA, 789 bp, Serratia marcescens; identical to SEQ ID NO: 235392

SEQ ID NO: 434211 - DNA, 525 bp, Serratia marcescens; identical to SEQ ID NO: 16553

SEQ ID NO: 434212 - DNA, 537 bp, Serratia marcescens; identical to SEQ ID NO: 16554

SEQ ID NO: 434213 - DNA, 879 bp, Serratia marcescens; identical to SEQ ID NO: 52347

SEQ ID NO: 434214 - DNA, 318 bp, Serratia marcescens; identical to SEQ ID NO: 52346

SEQ ID NO: 434215 - DNA, 1269 bp, Serratia marcescens
atgccaaagcttaccgacatgcagatccgggcatggataaaggccggagaacggtttgagggccgcgcagacggcggggggctttacctgcgtttcagggaggccgacaaaagcccgtcatggcgattcagatacaagctggcagggaaatcacgcgtaatgctgattggctcctacgctgagttgtccctatccaaagccagagatacagccaaagaactttctgcccgcgtagcattgggttatgacgtgtccggggagaaacaggaacgcaaagccgaagcgctggagaagatggagcaggagaaacacgcgctgcgagtatcagcgctggccgccgaatactttgagcgccagatcctgccacgctggaaacacccggacatactgcgccgccgtatcgacaaagacataaatccgtcaatcggtcacatgaaggtcgaggacgtgaaaccccgccacattgacgacatgctgaaaagcattgttgatcgtggagcaccaaccatagcaaccgacgtcttaagatggacgcgccgcatattcgattacggcattaaacgacacgcactggagattaacccctgctcggcatttgaggtttcggatgctggtggtaaggaagtggcccgcgatagatggctcactcgtgaagaactgatccgactgttccagtccatgcgaacggctaaggggttcagcaggcaaaacgaactaactttcaagttattgctggtcttgtgtgtgcggaaaatggagctgtgcgctgctaggtgggaagaattcgatctcaataacgctatttggcacttgccagaggagcgcagcaagaacggtgatgccatcgacatcccattacccccaccagctattgactggctgagagagcttcatacgttctcatgcaatagcgcatgggtactaccagccaggaagatgcaaaaccggatgatcccccacattcaggaaagcactctcccggtcgccctagcgaaagtgcgcgcggaaatgcctgacgcacaaaacttcactattcatgatttcaggcgaacggccagaactcatcttgccgctctaggcgttgatccggtagtggctgaaaggtgcttaaatcaccgaattaagggagtagaaggcatctataatcggtaccaatactttgaggagcgcaaggcagccttaacactatgggcttccatgctagtggcgctagataacggtgaaggctacaatgtaagccctatcaggaagacgcaaaagaacgcataa

SEQ ID NO: 434216 - DNA, 873 bp, Serratia marcescens
atgagtaatcccaagcttccccctcttgaatactgccatatagatagagcttcccgacttcttgaatgcgaaattgaagatattcttcattggcatgaaattggcgcaataaaaatttgtattcgcttggacggtactgaaaaaattcatagttacattagtgagtttactttatcaaaactatacgactcaggtgtaactattggggtggacataccgaaagaattatcttttcagtcaagggtttgtatttacaatgagtatgattccacaccacttccattgagatctgacatagacagaacgaaatataaatccacactatttaacacactggtggagtgctatgggttctgggcgctggttccctaccagtacaactcatctgacgacaatactgacataattgtatacagcactgatattgaagacaaattcaatatcagattttccatagaagaaagaaaattcgccattgaggacatgtttatcatgaaacatgacattgatatgctgctcggaagcaatggtgaaaccctgccaaattatatcaatgggaaatcccccccaattggatcggacacaacaaaaatagaggtgaagaaaatacacaggaaccaagaaataaactcttcaaaaagagagcgtattcttctagcagcgatgtatgtgatgaaacattacccaaatgaatgcttaagaaaaaatgggaaagaaagcctggcagctaccgcaaaggctgtttgcaaccatagctactcactctttggcaccgaagaaccaccaataactaacgtcagaattatttctgaaatcatcgctgatggctacagactaccaaaagaacgcaagcgagctggaaaactagattaa

SEQ ID NO: 434217 - DNA, 420 bp, Serratia marcescens
atgcaaaagaaaacccgcactgaggcgggcggtatcggacaggttagcaccttcgataatactgctacgccagcaaacaagccagcccctaaaaagcatcgcgcccgcgtctatatgatgcgcaccggcattgaaggttggacggaaaacgacattctccgctattgccgtctatcgtctggacgtaactatgcctctgagctggaacgtcgccttgacattcacctggagcgtctggaagaaaagaacccggacggtatcggcgggcatttccgttatcgcttcacttgccgcgccgacgttctccgcgtgatccaactggtcaatagcaatgccagcgctggtggctattgcggcctttcccagcaggaagttaacgacattctgaccctatatccggacgccttcagagcagcttaa

SEQ ID NO: 434218 - DNA, 810 bp, Serratia marcescens
atgaaaatgaaaaatacgtccattactggtcggggccaaactcaccccgaagaaggccacgacgatattagcaataatggctttgcagctctggtgccggttatttccggtcagatcggtgggcgtgaagccagcattgtaagcgccaaggcattacataaaacgctgggtgtagggcgtgatttcaccaactggattaaaggtcgcatcaaccaatatggctttgctgccattgatgattatgtgttggttgaaaatttgagcacgccaaaacgggcgagcacaaaatccaggcggcagcttgagcatgattatctgattactttgggtatggctaaagagctggcgatggtagagcgcaacgagcaaggtcgcgctattcgccgttacttcatcagttgtgaggaagagctacaccgcagcgttccagaggtgtccgccagactgcgccgacagcttaaagcccgtattggtgccgccaacatgttcaaacccatgtgcgccgcgctggatgctgcacgcgctgagcagggtaagcagacacagccgcatcactacaccaccgagagcaacatgatcgccaagattgtgctgggtgggctaacagccaagctgtgggcacaggctagcggcattgatggtgatccacgcgataacatgagcgccgagcaactggagcacttctcttatctggagcaaaccaacatcacgctgattgagctggggcaggactaccaccagcgcaagaacgaattaacacgcctatcacaacgctggcttgctaagcgattgggggtggaccatgcataa

SEQ ID NO: 434219 - DNA, 1071 bp, Serratia marcescens
atgcataactgcgctgccagccagaaagatgccttttccttggcaggtcgctgtctattcgatgttggcaacggtgcccaggcaaatacgcgacaagaacctgcagagcgtcgttgctctgcgtcggcggtaattactaccgaaaagcggaatatttcacttaaaaatgaagttggccaccgagggaaattagttggatatgccactgaatttacaaacgcagataatcaaactgatcgcggggtgttctgtgtcggcatctgtcagtgttcggatagagggggcttagttgatatggctgacagagccaataactgtggctctgtacatggcgaggaaaatgagcagtattcaaagtcgaagggcggacgcataaatcaactacgcaacaccacagctaagcgaggtaacagagtaactgatagttactctgttccgtcttctagtgattcctgttttgatttacggcgttgtcggcgcttaatttcgcccttggcagcaacaaccaaaaaacccgcaatgctctcgttatcgcccttggttttttcgatttcctccaaatcttcgagagggagcctgactgatacctgtaaagaacgattattttttctacccgttgccattactgtaactcctttcttgaggtggtgttcagtatacacatggaaaccaacattaaaatacttgaagtggtgtgcactaagttatacattggtggtgttcaccttatccacagataaggcacaggaagcacacaaaatagcgacgccccggagtggtggaacactgccgaggcgtcttaccaccaccgatagaaaaagtatcgaggtagctatgtctgatcataccacacccattgctgggcggaacacgcacacccagcaacacacacaaggccatcagcgctttgtttttatctttgccgccattcgtagaagttcaccgaaaatagccccagaaatgcgccatgtttctgcattttcagaaaatgaagcccgtaaagttctcgtatctgattttgtcttgctgttcgctggccgcttgcctattcaggaggtggaacatgcgtag

SEQ ID NO: 434220 - DNA, 366 bp, Serratia marcescens
atgcgtagtctacccacccgcagtggcaatgccttggttattcagccggtaaaggcaatcagcggccgccttttgccctccgctacctcacctgcagaaacactcattgagctgcgtaaatattttgatgagctttcaaagcatcaggaatttatctgcacggcatggaaccagcggtatcgcatcgggttagagatcagcgacccaatgaacggacgtatgcgcggggccatgagccaggtaagcgccatgctttgtatggttgatgactgcttgagtgttcttgagagccatcagaagccaagtcaattagcagaaaccccagcaaagcgcacctgcatagaggccgaacgcgatgatcaataa

SEQ ID NO: 434221 - DNA, 201 bp, Serratia marcescens
atgatcaataacgaaacctttgaagtgctcgaaagatgcgaacgactctgcgccctgctggcggcaatgaagattgctgccccaagcatggaggactcagaagtaaaagagctgatatcgctgtgcagtgatttggccgaaccggtttgctgtcacctggccgagctggaaggtaaatcctatgacggaggtaaaccatga

SEQ ID NO: 434222 - DNA, 201 bp, Serratia marcescens
atgagcaacgcaaaggggctgaaaaaagcgactaagaaggcagatcagctttgctcacttctgcatttcatcgttcactcaggcagcgatctcggttcggttgaattaaacacacttctcacgttagcgctggatttgtcgggagagcccgcgtgttggttactggaagagcagagccagcgggagggtgcgcatgagtaa

SEQ ID NO: 434223 - DNA, 204 bp, Serratia marcescens
atgagtaaggcaacgttagaaggaattgttcagcgtaccgaacggcaaaagcttaacgacgccagagacgccatgcgtaaggtgcaaagcctgctgtctgctgcccagcatctgacatcaacggaagaagaaaccgaaatgcgtgcggagttacttggccttgttgaaggcgtggtagtcagaacgatggaggccattgcatga

SEQ ID NO: 434224 - DNA, 624 bp, Serratia marcescens
atgaacaacatttccgcactgaaactgccgaagaaaaccggcaaacattacatagaggcaacgccggaaggcgtgcaattctggtcgatgaaccataccggccaatatgaaagcgaagagctggtgggctattccgagctcatacagcgactggaagccggagagctagacgataacccactcggcccatggatatttagagtaatggccgaggggatggatctcggctatcacgcgcccactgttggcgatctgctgatttgctggaggcagaacgttgcccaggcgtttcttatcgaacaagcgtctaccaatgggtttgctgaggtggttcaaccggaaggcggtatcaagcgagcggttatctatcgaggtaagaacggcagcatgacggtttatccaagctctgtacgtttcgccatggcaaataacattgaaggcgcattgatagggcagcacggccaagggaaaggcacagacaacgctgtagtcatgtattgcgccatgctgaacgttcgcggtgaactctcaccactgggccgtgagctgctcaccgatttacacgatggttttattcagcagttgaatgatgaaggtttgccgtcagcaccaatagcgcactaa

SEQ ID NO: 434225 - DNA, 2739 bp, Serratia marcescens
atgcgtaatatcgatttaatccgcgaggtgaagcgctgtgccgctggcgcatgggcgaccctgctcccctcatgtggcgtgaccacacctggacgcggtaaacatgggccatgtccgatctgtggcggcaccgaccggtttcactttattgatgaccacggcggcggtgagtggcattgccgacaatgtgacatgccgaaccacggcgacggcctcgacttattggcacgggcaagtggcgtaacggtcacagtggcagcggaacaggttgccggtgtgctgggggttgatatgcgcaatccaggtggtatagatacgcccaccagctcatcagcaatgccaagcaataaggcgaagtcgcatgccagcagtaatgcagaaaaaccgattgccgaccgcgttaacgtactactggaaaaatcccgccctggcgtttctcaatacctgacggataagggcattcacagagctggcctgcctatcttgccggatggctcaattgtattaccgttacgcttgctggatggcactgtgaccggggcgcaactcatacgcccatctggggataaaaagctggtggctggaacgcacaagaaaggtgcgtttatcgcgctggatgagttgccagagcaagtggatatggtggtgatcggcgaggggtatgcaacagcacaaagcgcctcattgcttgcacctcaagccctggctatagccgctctggatgcgggtaatttactgtctgtcgcactggcgtttcgggatcgctggcctgacgctgaaatcaccattgccgcggataacgattggcatctccccggagagctggataagcaaggcaagccaaagcgtaatacgggcaagttagccgctgacaaggccgctgccgctgtttctggctgggttactctaccaccgactgaacaccccgccgattgggacgactaccgccagcaagtgggggctgaacaagcgcagtgcgactttacagaacggctttatcaaccacattccactaccgcatccaccagcaagaaaggccgctcagatggcgacccactcaagccgcatgtggatagccggaaagatggtgttttctgggtaacgccgaaagtggataaagacagtggggaaatcatcaataacgagagctggctttgctcgccactggaggtgatcggcaccgggaaagacgacaaagaccagtacctgataatgcgctggcttccagctggtgagaaggcgctgacaactgctgcgatccccctggctgatattggtgaacgggaaggctggcgcactcttaaggctggtggcgtgaatgtgaccacaaaaagctcgctcagggcgacgctggccgactggctacagcgtggtggttcacgtgacatttggcgagttgcgcaggctaccggctggcagtgcggtgcgtacatcatgccggacggcgacattatcggtacgcctgataaacccgtactgttcaacgggcgcagctcggccgccgcaggctatacgatcaaaggcaatccagaaagctggcgcaatagcgtggcacgccttgctgatggtaactattccatgatgacgggtatcgctgtggcactggctgcgccgctgattggtctggctggcgctgatgggttcggactccacttttacgaacagtcgagcgcaggcaagactaccaccgcaaacgtggcgagcagtctttacggcgatcctgacttgcttcgcctaacgtggtatggcaccgcgcttggactggcaaatgaagcagcagcccacaatgatgcgctgatgccactggatgaagtaggccaaggtgctgatccacacagcgtggcgcaatccgcctatgcgctgtttaacggtgtcgggaagttgcagggagcaaaggaggggggtaatcgcgacttgaagcggtggcgcacgatggcgataagtacgggtgaggtggacatggaaacgtttattgccagttcagggaagaaaatcaaggctgggcagttagtgcgcctactgaatattccactcagcaaagccgtggcttttcatgaataccaaaacggcaagcagcacgccgatgccctgaaagatgcttaccagagtcaccacggtgccgcagggcgtgaatgggtaaagtatctggcagaccaccagcaacaggccattgatgccgtgagggatgctgagggccgttggcgctcactgataccgtctgactatggcgaacaggtacaccgtgtggcagcccgctttgccgtgctggaggcagctttactgctgggccgcgttattaccgggtgggacgagcaaacctgccgtgatgccattcagcacagctataacgcctggatctctgtctttggtaccggcaacaaagaggttgagcagattattgagcaagccgaggcctttctcagcgcctacggcatgagccgctttgctccgcttccctataaccctgacgcactgcctatatccaatctggccggttaccgggaaagcaaaagctttggcgagcctgtcgcattctatgtgctgcctacgacctttaagggagaaatggcgaaagggttcgacccgtcacagttcgcaagaacgctgcacgaatccggcaggttaaagaagccagccacaagaaagggctatcaggcactgacaccaagacttaatcatctgggggatattcggcagcgggcctacctggtgattcagatagcggcagaggaagaataa

SEQ ID NO: 434226 - DNA, 498 bp, Serratia marcescens
atgaaaatagtgaaagcgttagccgtgctggtggctgtatccgccctggctggatgcgataaagacaaaacaactgatgctgacgcgcaggagtatgcccaagggaagattttagagctaatcaagaagcaggcaccaaaaaataaagaggcgtgtgatacagggcgcgagttgatagtgtttttaaaaaatacaaaacaagacatatcaactgcggagtgggcgacggataattgcagagaaagcattgaccctagcaccggagttaagctttcaaatgtaacagtcttcagaaataaagatggctcaataaaaagcatttgcagtcatgttaccgggaaaaactacgacaaaagcaatgtgacggttccggccatagtgaacgagggtggagcatttattcagtttgagtatagctctataaagaggtcgcaaccgggcgaatacaggtccttgcaagaggaattctcgatgataagcaagacatcttgtaaataa

SEQ ID NO: 434227 - DNA, 168 bp, Serratia marcescens
atgagaaaaaccgatacccgtcctattttgattgaccgcgaatcaatggcattgcttcaccgtatacaggaacgtgagcgcagcaaatcagacctaggtgtagcgccgagcattcaggacatcgcacgcagtgttttacgcaaggcattactgcgggaggtggcttaa

SEQ ID NO: 434228 - DNA, 333 bp, Serratia marcescens
atggatcagattcagcgactagcaaaaacgattgcagaggtttatctccgcgacttgaagaaagaaacaggcggcgacacggtcacgattaatggcatcaccaaaaacatatcattagatgagttgacgttcgggctggtgggcgttgtgtcttacaacgcaaaaaaacatgagggtgaacgcaatgttctgagcgacccctataaaaacctgatggagatgatttgcattggtacgaagccctacacactaactgattacggggtgcggctcataaaccacatgaatgaaatatcaataaataaaccaatgggcaatgaaaaaattatgtga

SEQ ID NO: 434229 - DNA, 3342 bp, Serratia marcescens
atgtcagaaggaaccagtttaggtacgatttacattgaagttgatatggaaacgaggaagttgctcgacgctaacaaacttgtgaataaatcattggatgacgttggtaaaggcaccgaaaaactcacagctaaaatcgatggtgccgacaagtcattaggcggtttaagcaagagtgctagcgcggtatccacggcgcttaagatgccggaaattaaccgtctatcaatcgagctagctcaactatcagggaaaattggagcttcaacggatgcggccatttctggcgcagttgctcaaaatcgcttctcaggagccctaagtaccgtcgctgggcaattaggcgcaggttatgtatctaatatcggtgaagccacatcagcattaatacggcatacaaaagaggccattgccgccacatccgcacaacttgaaaactcagtagccgctcaaaaggaagctatctcgctgcaaggcgcggcttcacaattggtgatcaacgccgccgcggagaaaaagacagcggaagcggcgctgcaaactgcagaatcagaactgcaggtagctgaagctatctttagcagaaaagagtctgatattgcctcactcgaagccctgctggccaggcagaaagaatcgttgaaacagtctgaagccaacctgcagataactaactctgaaaaagccgttaaagacgccattcaagccagaaatgccgtagaaacaacgcagaataaaatcctcaaacaatccaaccaagcagtaaaagaagttactgccgctgaggataaagccagggcggccaaggttgctatcaccaccgccagcgaaaagctatccgcagctagtgtgctggaagttgccgccgcatcaacggtagaaaaagccaatgaggctgtcgcaatatccagtatgaaagtcacgctggcagctaaagcacaggccgctgctgtaactggtgcgagaaccgcccttgctttacttggcggccccgctggtgtgctcctgcttgctgccgcaggggtgtatgccctctatcaggcaatgggcgataatacgtcaatcgacgactaccgagcgaaggtcaaagaagccgcgaaggctcttgatgaacttacggcaaatcaggcaaaagccgccgccatacaggccggggttgtcattaaggctgactctaagagcattgaagaagctaagcagcagatagatgacctagaagggaagattgccgatctccaggcgcgtgggctgacatttggtaactatgctgacaatattaaaagctataacaaccagataacgcaactacaaggcgatattgacggttattctcggtctattgctgaagcgaaaggcagtcaggataaattcaatcaggctgcaaaaacaaacaatgacacatccattgagaatataaggtcagggcgtatccttgctgaagttcgcaacgcaatgacgaagcagcaagatctactaactgaagccaccagcaagggtgcccaggcagcggaattgctcgctttccggcaagagttagaaaatcgttatatccagcaaggaattgtgattactgacgatattgctcaatcaatagatcaagtcgtggagaaaaagcgccagcttatggcggacgcttctcaaggagctttcactgcgcagttaaaagtgattcaaggtaatgtcgaagcgttaaaaatcgaaatgaaccagggggccgaagccgctgccgtctatcgcgcgcagctcgccttaaatgatgccggtgttaccgaccccaaaaaggccaaagaatatactgacgccattcgtgagcagtttaaacttcaaaagcaaatcgctgacagtcgtaagaacgctggtggttctggtcgggtaggtaaagccgataaaggactcgaacgccaacagagccaggccgcttcgttgcggcgagagtatgaacttcttaccactggtgtaagcgatgtggcacgtgaaatgtctatcttcaatgccgtgcaatcactcggcaccaaagccacgcagcaacagaaagaagcagccgcggctgatgcggccacggtttatgatttaaagcagaaagttgaagacttccacaaggcggcggagatcacgccagagctgaagatatcgaaggcctttgctgacgagtccgagcagctccgccgactattcgctgaggggttgattgacgagaatacattccgtgaaatgggcgcaaaagcgaaagaatcattcatggccggtatggctgaggccaagtctgacgcggttgtatcccctatgcaagaagcggtcggaaaggttgaccctgtacaggcattagccaacgagaatgccaagaaaatcgcattgataaatcagtttgaacagcagaagttagccatcctgcagcaaagcaacatgcaaggggttatcaccgcccagcaatacgaacagcaaaagttatctgttgagcaacaagccttggcgctacgtaatgccgctaatacccagtacgaacaagctcggacagaagcgcagtgggagatatggcgcaaccagagcaccactaacgatcttatggcctctgccgttgatgggtttgcctctgaggcatccagtgcgctaacagggctgataaacggcactcaatcggcctctgaagcattccagaatctcggtaactccattctaaatagtgtcattcaggcgctggtggaggtcggaattcaatatctgaaaaacgcagcaatggcgatgattgcggacaaaatgacatctacatcgtcacaacaagccggtgcgcaaacggcggcggcgtgggccccggcagcagcagcagcctcaatagcaacattcggtggcgcagctatcgcaggcatagccgggatggttgccgcctttggtattggtgccgcacttgctggcaagcgtaaaaatggcggtggggttaggcctggcggactgtatgagtttggcgagggtggtttgcctgaaatgctgcagatgggcggcaaaaactacctgttgcctggtaataacggctcggtaatcagcaataaagacctgatgaacagtaatggtcagtcgcagatcccgaaagcctcaaatggcagccatcagcttaaaaattcagccaatgatgacagcgtctcagttaaggccgccagcgttgtgccaaacttcactgttattgttgagaatcacggtacgccaatggaagtaatgggccagcggtatgagaaagggctaagcggggatgacgttgttcgagtcgtagtgagtgatctgcagcagggagggcaaatccggcaggcgttaactaaatacaccacggcaagcgcaagggccaacgagtaa

SEQ ID NO: 434230 - DNA, 189 bp, Serratia marcescens
atgttaacgcgtgaaattattgagaaggtgataatcagtatcgcccaccagcaaggcactgagctatgcgccaaagacctgctggagatacgcaccgaggtggcggctactatggcggagcaggagcgctatcgtcagcgcatggcctcgataacataccaatggaagaagccagcgccgcgacgataa

SEQ ID NO: 434231 - DNA, 372 bp, Serratia marcescens
atgagactgaccagccgcaaaaaaaggatactcagttactttgagcctgataaccgggaattggtaacgcgcgagatcggagcaccaccgctggatgtgtccggcgtcacctacctgctccacggcatggattcattcaataagcgccaccagctcgaatcaaccaggcgcacacttgaagcaatggtaaaggatggactgttggagaaaaccaccagctacgagcaacggcaagataacacgcagtccgggggtggtgatggcgtttggtgtaacgtatcgcgttatggcttaccaggcacttgcactgttctccgtgatgaaggtggaaagcgtgaggccattgacggggagtctttgcgcatagactga

SEQ ID NO: 434232 - DNA, 1434 bp, Serratia marcescens
atgagttctaattgggaatttgttcgacttggcgatcattgttcgaagattggcagtggagcaacgccaaaaggaggtaaaagtgtttatctcgaatcaggagatgttgccctaattcgcagtcaaaatatatataatgaagggtttaaacaaggaggactagcatatattacaaatagtgctgctgaaaaactggaaaatgtctgcgtgctagctggtgatattcttttaaatatcactggggactctgtcgctagagtttgtcttgcgccaaataaatatctacccgctagggttaatcagcacgttgccattatcaggcctgatgcgaatgtctttgactctagattccttagatattatttatcgtcgcctgcacaacagaatatcctactgactattgctagtgcgggcgcaacacgtaatgctctaacgaaaggaaacattgaagaattaaaagttgttaagccgatgctttccgtacagaaatggatagctgaccagcttgaatcgcttgataggaaaattgaggtaaaccgtcaaatcaaccaaaccctcgaacaaatggcacaaaccctgttcaaaagttggtttgtggattttgaaccgataaaagccaaacttgcggtgctcgaagcgggtggttctcaggaagacgcgactctcgccgctatgacggcgatttccgggaaagattctgatgcgctgatggtgtttgagcatgaacatccagagcaatatgctgagttaaaagctacggcagatttgtttccgtctgcgatgcaggacagtgagctgggggagattccggaagggtgggagtcgtcatcactatcaaaaaaaataaagctaactggcggaggaacaccaaagcgttcagaaccagaatattgggatggcgatatttgttggtattcagtgaaggatgctcctgctgaaagtgatattttcgttattgataccgcagagaagataactaaaaagggtctgaataaaagctcaacaaaattacttcctattggtacaacaataatttctgccagaggaaccgtaggcaaattagcgttaactgctactgaaatggcaatgaatcaatcttgctatggaatatctggtggtgagttctcaggtccattgctgacatacctgaaagtaaagcagtgtgtggatgtgttgaaacgaaatacccacggtgcggtgtttgatacaattacaacatcaacctttgaaacagtatctacacttacagcgtccaaaaatataaatatccaatttgagaaaatcgttgctccactattccgagtcattgaaaataatctaaggaccaacgtcaatttaacccaactccgtgacacccttctccccaaactcctctccggtgaaatcactctgccggaagccgagcaggctataggtgaggtagaaaatgtataa

SEQ ID NO: 434233 - DNA, 147 bp, Serratia marcescens
atgatcatgctggagccggacgacgccaaacgcgcggcggcggaagagttcgccgaatacggcgccaagttctggggctatccggtgctggtggccgccgatgaagccgcaggccgggtattggcgcagacgttattgttaaaataa

SEQ ID NO: 434234 - DNA, 804 bp, Serratia marcescens
atgaccaaatacagcctgcgtgcgcgcatgatgatcctgattctggccccgaccttgctgattggtttgctgctcagcaccttcttcgtggtgcaccgctataacgagctgcaggagcaactggtcgacgccggcgccagcatcatcgagccgctggcggtggccagcgagtacggcatgacgttccgcagccgcgaatcggtcaggcagttggtcagtctgttgcaccgccgccattcggacatcgtgcgttcgatcaccgtgttcgatgcgcagaacaatttgttcgtcacctccaattatcaccacaacttcgctcagctgcagctgccgaaaggcgtgccgttgcctaccgagctgatgctcacccgacgcggcgattcgctgatcctgcgcacgccgatcctgtcggaaagccagtatccggatgaaaccgccgacggcggtagccaccccgacaacaacctgggctatgtggcgatcgagctggatctgcagtcggtgcggctgcagcaatataaagaggtgttcgtctccaccctgctgctgttgctgtgcatgtgcatcgccatcctgttcgcttaccggctgatgcgcgacgtgaccggcccgatccgcaatatggtgaataccgtcgaccgtatccgccgcggccagctcgacagccgcgtggagggctacatgctcggcgagctgcacatgctgaagaacggcatcaactcgatggcgatgtcgctcaccgcctatcacgaagagatgcagcagaacactgagagatcccctcataatttccccaaagcgtaa

SEQ ID NO: 434235 - DNA, 918 bp, Serratia marcescens
atgagtttaggaacacacagcaagtcacatctattattctttaaaataaactgccctctgattgcatgtcttaatgatgaagaacacctggacaacacgataaacttccttaataaaatagaggataccatcgaaagaggtcattctgcggaaatatctttttcctcttgtaaggaaattcgtccccttgcagccctgatgttattttcaacaataaacaacatccagttcaagtatggtttcggtcgtgtacgaatcaacattccagggcgaggtagcaccctatcaaatgacatctcactttctcgctcaggtctatgggaggctcttacctgcaaagataatgatgacattcaaagtttaatagaaaaaaacaatagatttaaaacatcgcaagatcccgcaataattaaaagagtagagcaaatccttaacaggataaacaatctcccccaagagcacgtatttttcttgaccatggccataagagaggccgtgctaaatgtaatacatcacgcatataagaaagaccctttaaataccaacataaaagtaatagataacagatggtggcaatgtgcctgggtaaatgttaagagaaaagaagtaaacattattatccatgatcgtggcgtaggtattcttggtacatacactgatgatgctaaatcatctgaagaactcctactcgaagccatgcagcagggctgttcaagtacaggcctcaccaaccgtggcatgggttccgaagatatgaaaacccctgtaaacatgctaactggcgtacaaaaactgacaatctacaccgaaaagtatgtgtattcatacagttcaagcattttacaaccctcaattatagagagaaatgtcaccatttgtggtacacttgtgcattgggagtgtacatatgatgactaa

SEQ ID NO: 434236 - DNA, 588 bp, Serratia marcescens
atgaaatcaatcggattatatcgtataaattcccattgccgttttatgaaatacaagcaaaaaaattcatggcaatcgagtggagtaaaaaaacgagtaaaagtaaaaatggaatttaattggacaagtttaatatctccaacaataacaacagtaggttggctcattgcttataggttagcaaagataaactcaactcgcactgagtcaaaaagccttattgattcaagcattggcttgatagatacaatatgtgaaaagtcatcagacttttacatggctaacggaaaatcaaatttggagaagaaacaatttgaaaaaatggcaatcagcaagataacatttctatataagaaacttgaactacttagcaatcgaggaatttcctttgagccggatgaaatatccaacttacacgaatctgtcactataaacattcctaatcaaggaaataataaactaacagatgagtcaacaatacttaacattataaaaatatcttcagaaattaattacaacttacacagaaaattccatgagcactacccccctattaaatccttcatcgatttaagaagagtgttttga

SEQ ID NO: 434237 - DNA, 159 bp, Serratia marcescens
atgacactgggcgatgaggatattttagccagcgtggcggcgctgctggagttactgacacactgtgatgaagatacgaagatcgaaacggtgcaaacgacggctctgctgggttggagtttgttgaaagggatcaatccaaaagaaattcgaggttga

SEQ ID NO: 434238 - DNA, 1353 bp, Serratia marcescens
atgggtgttcaaggtttagctgatggcttcctggctggcttcaatactgctgatgcggctatctctcgtaataaagaaatgcagcagcgtgatgctgcccttcagcaacaaataaaggactctgatcgcaattacagtttacgggaagccgacttcaattatggtaaagagcgtgaccagcgagaattcaagtacaagcaagagcgcgaccaggtgggtgataagcaatggggtctacgccatgctatcgaccagcagcaagttggtatcagtcgcgcagggttggggctgcgtgcgcaggaactcggcatgcggcagaaagagtacaactaccgtctgatgcaggagcaacgcaaccagcgcctgcagaatgaaatgccagtggtgcagacgctttacaaacagctggaggaaaccggcaaatttgacccgcaactctactcgcagatctctaaggacaacccgctgaatccggggcgcttctttggacaggatgccatcaacaacgtgatggaagtgaaccgcgttatgccgaaggtactcgccggcgagatgaactacaacgatccgaaggtcatcaagctgatgaatacggtgttgtcgccggatattcagcgaggtgtgggtgaagttgatccgcagacaggcaagaaaatcattggtaaagagctggggcatattggtgtcagtgaggatggcaaattcatcatcccaggtataacggttaaatacgatgacgggacttctgcacttaagcccatgaccgaaaatggctcagcggatgaacgtgacaatcaggttgcccatatcccgattagcaacgttatggacaagattcgcggctacggccagatggttggtcagcttaaccagccggaccgagcggctttcctcaataacatggtcaacccacccgataaaacagccacccgtgaggaggctaaagggctccgtagagacttgctggatgtgggtaaggcgcgtgcgaaggcgttggccggcgccacagatgaacgagcgatggttgaaattaacgctcagtatgatcagctgcaaactgaagtattgcagtcctatggtcagccggtaccgcaaacccctgggcaggatcctgaatttgctgcatatgcagaacagtataagcaccagtttggcgaatctcctgatccacgtaaatcggaggatttgcaggggttccagctttggaaatccaagcaacaagcgcctgttgcgccgggggcatcgtcggctagggctgccccgcaaacgcagcagcctcaacagcccacagcgcctgatagccatacagctcaacaattgcgcgagttccgcaggctgtcccagacgaattga

SEQ ID NO: 434239 - DNA, 387 bp, Serratia marcescens
atgggacaggctgcggatacgtatgctcgattgatacgggagcaatatgcggattggcaaaaccgtttttaccctaaacagaaagaattgatggggctggcaaccagcgggcaactgatgaatgaccaactggcgcgcgctgatgcgaatactcagcagacattgaggactgctcaggtaggccagcagaaccaaatggcgcgttacggcgtggctcaaacccaaacggccggagacaacagcctgggattgcgttcggcgttggcaacggccggcgccaaaaacgggatccgcgaaggtgaagcggatcggcaaatgaatatcctgacggggggcagcgccagccttcgccagcaaatgaatatcggcggtggaggaggtagctaa

SEQ ID NO: 434240 - DNA, 672 bp, Serratia marcescens
atgggtaaaggcggcagtaacgaaattaaagaaacagagaacgaaaaggcggctgcgcaagtggcggcgcagcaatgggatctctatcaaaacgaacttcggccctatgaaaacctgttcatggataaagtggatgcgctgaacaacgaacaaaaatattccgatattgccaatgctaccaaccttggctatcagtcagagtttggcaaggcgcggcaggatacggcaacacagttggcggccggtggcgtggatccgagcagcggtaaatttcagggcacgctcgataatattacttctgaccaggttgtcggccagatcgatacaaccaaccgcgcgcagagtacccaggcagataaatacgttgccggtttgcaggatgtggttgcaatgggcgcggggcaaaaggctgatgccatggccggtttcaacagcatagccaacagcagcatgcagaaagctcaatcggatgctcagcgttcaatgggcaatcggcaggcaacggcagggctggctggtgcgctaggaggtgctgctgttcgtacctacggtctgagagatgcggcaccttcagtcggttcaggatccaacggcgtgtttggcggcggcagtagcagcggtggtcaattcggtgtgtcaaacacgcctttcggcaaaacaaccttcaaataa

SEQ ID NO: 434241 - DNA, 1269 bp, Serratia marcescens
gtgagtaacaaaggaaaattccgttcaggtacagatctgccgacggttgcagagaacattcagacattgaccggacagcgcggggatggccttgatcgtgcggtgacagtgcgtgatttggcgcgactcggcttctcgaccaagaaagcaggtaacggtggagtatctttgatccccggatggacgccgccgcccgattggggtgggccgggtgcaaacaaaccgacgcagttccccacaaaacctaccggcttcacggcgtatggcgcattttcatttatcgcgttggtgtgggatatgccgaagtacggcggccactcgctaacggaaatctaccgcaatagcgccgataacctggctgatgcagtaattgtgggaaccgaagccgcaggcgtattcagtgatccgcaaaacaccggtacgccgggtgcctattactggatccgccatgttaacgccaacggcgtgccggggccgttcaatgacaccgccggcacgtttgcgaaaacggatccggatgccgcacaaaacctgattgctgaccgtgttattgccggtattgagatgatcacaccgttgctgcgttctgcgcgaattgagaatggccggttcaaggtggacgagaacggcaatatgacagccatcaacgccagcatgaactttatgacggccaatggcgggtggttctatgacgtgtacgccgagcgggccacattcaggaactgccagatactggaagactgtgatgtccgcggcactatctacgccaataagctcgttggcgatgtgtataacactcagtctgggggaattttcatgccgccattgaatcaaccaggccagtatggattcacttgggctagccaagccggcgatcatgttatctggaacatcgctggtgaggattttgatcgcgtgatggatacgaacgtgaccatcgaggcaggcagttctgataggcaatacctcaccctgattatgcgtagccccggaaaagacgatattcagatcgcctataaagataccgggaacaatggtgaaaatggcaatctaaactaccaacttcaaggtattaatctacccgctgtaggccgtgataaatatcaacagttaattttgaatattcgagaaaaccgcactgggtcagttgtaatttttacgccagtcatcagcggtggcgctggaacaggttcccctgaggtgagggcaaaaccggtaattggcgtctataaatcagggcgccagatagccacgagcggcccacaatga

SEQ ID NO: 434242 - DNA, 1590 bp, Serratia marcescens
gtgccgcgcatggtcgcacacctgttgccacaatcctctgcgacgatcgccaataactgccactttcgccatggcgtgatcactccgaataacgttgatgccaagcaagctaaggtatttagcattacgcctggcactatcttcaactatcacgatgacatttggtttgcctggaatggcatcgttgatgcgatccgcagtccggtcgccaatgatgattatgaccgggtgtactttaccgacggtacatatccgaaggtgaccagtaaccgtattgcgacacagggacaaggcaactatccgtcggcgcatttccgtttgggcattcctgcgccagaacatgcgattgtgattgggggcgtcacgccgccggcagacccgggcgaagatgatccgacggatgacgaaagtcggttctatgttgaaacctatgtgactgaatacggtgaagaggggccgccggggccagcgtcagcagaggtcactattgtttacccgggtagttcggttgctttacagctacaaccgccgggcacccaaaacagcaacatcacgcggcgtcgcatttatcgttctgcaaccagcgacagcacggctgattttctgttggtggctgagttggagattgccatcggttcctatgacgattcattgtctggtgctgagctaagcgcggcgcttgaaacctacgactacatgatgccgccggaaggtatgatcggtttgtgtgcaatgaaaaacggcatctgcgccgggtttaaaggcaacgaggtaatgttctctgaagcctatctgccgtatgcctggaagccaactaaccggcagaccaccatgaacaagattgtcgccatcgcaccagtcggtacttcgctggtagtcggtactgaaggcgatccgtatttgttcagtggcatcacgccatcaaacatcagtagcacagagccgagcatcacacttgcctgcgtctcacgacgatcaatggtggctatggacgggtttgctatttacgcttcaccgaacggtattgtcactgtggacgcatcaggtaatgcgctggtggccactgagaaaatcattgaacaaaagcagtggcggaagatgtttaacccttcatcgattcgcgcctggcggattgagaacgaatatctggcgctatacgacacggccgacggcactgcgggttttatcttcaatccccaaatgatggatatccggcacataacagcctcgttcgatgccggctttaacgatgagaagagcgacacgctttacatcgtgaaaggtacccagctttatactctgcagggtggtgatgtgtcagttagcatgcgctggcgctcgaaaatgtttctggcaccttacgacacctctttttcttgtttgcgcgtcatgagcgatcagttgttcttcgtcggtatcaacatcattgtcgatggcgcgctggtgattactttgccgccgggtacaatgcgggaaaacatgcttaagttgccgcctatatctggtcgaaagtggatgatcgaaacgtgggggcggggacaggttgaccggatcacgctatccacctcaatgatggagatgcccgcgtga

SEQ ID NO: 434243 - DNA, 2112 bp, Serratia marcescens
atgaaatatcaaacaacgtgccgtgatagggatatcgctatcgtgggaatgtctgcgcgcttcccgggtgcagaagataaggcaatgttctggaaaaatctgctagatggtgtagaaacgatcagtacgttcactgaagaggagcttagagccagcggcattgaagaggaaatgatcgcctcgtcaaactatattcgtcgcagaggcatcttgggtaatgcgcaatattttgacgccaatttcttcgatatcacacctcgtgatgcggaaattatggatcctcaacatcgggtatttttggaatgcagctggcatgcatttgaagatgcgggttatgtacccagtacctatcccggtaaagtcggcgtctttggcggaaccggtactgcgtggcatttgaataaagtcaatacgcatcctgatgtgcaaaagtacgtgagcggtgcttcagtggtgaccaataacgataaggattatgttaccaccagggtgtcgtacaagctgaatttaaaagggcccagcgttaatgtgcaaacggcgtgttctaccgcgatggtcgccgtggtgatgggtattaatagtctgttgaatggggaaagcgatctgatagtcgccggtggcgtttccctcgatacccctgaacgccgtggctaccaatacatgcaaggcggaatggagtccgcggatgggcgttgttatgcttttgattctcgtgccaatggcaccgtattcagtcgcggagccggcgttgtcatattgaagcgcttgagtgacgcattgcgtgatggcgaccatatctatgcggtattgaaaggcggggcgattaataatgacggcaatctgaaggcgggctataccgcgccaagtatcgaaggccagatttcggtggcgaaacaggcgttcgacaacgcgcaggttcatccggataccatcagtttcgtcgaggcgcatggcaccgcgactgcgttgggggatcctatcgagttcacttcgctcagccagacgttcagtgaatttaccgacagaaaacaatattgccggctgggttcggtaaaaacgaatatcgggcatacggatgctgcttccggcatggcgagcttaattaaggcgtcattggcattggagaagggggaccttcctgcttcactgcattatatttcgccaaatcccaatattgcatttgaaaccagcccgtttgtgatgaataccgaattgagcaaactggcgagttctgacgaaccgcatcgtgcattggtgaattcgtttggcgtaggggggacgaacgcctgtgtcattcttgaggctcctccgcgaacggagccaagcactcgccatgatggcttggttatgctgccattctcggcgaagagccgaactgcgttggaagcgatgaaacaacgtatgcacgatttcttggttgaaaacaaggacgtcaatcttggcgatgtcgcctacacgctacaggtgggccgccagccgtttgcgcacagcacggtcgtcgtagggcaggatcgtgaaacgttactggagaaattgaaccagccgtccgccaatatttcaacgttgacgaaaggcgataaggccgtggtgtttatgttccccggccagggcaaccaatacatcaatatggcccgtgagctgtacgccacttacccgaaattccgcgaagtgatggatcgctgctgtcgctatttggacccgatcttgggcgtaaatttattgtcgataattttccaaggcgacgaaggattaagaaaaaaccgtattaatgaaacccagtttacgcagcctgcgctatttattgtcgaatacagtctggcgcaattatggatgtcgtgggggatcaaacccgatgccatgataggccacagcgttggcgaatatgtcgcagcgtgtattgccggcgtgttctccctggaagatgcgctgcgcgcggtggcgttacgcggcaaactggtacaagcgctgccggctggcgcaatgcttgccgtgctgatggatgaagagtcgctgcgtcagcggttacagggcgacaaattggagattgccgccgtcaattacccggggctctgcgctgatgaatcccctaatgattttggtaaaaatcattaa

SEQ ID NO: 434244 - DNA, 1800 bp, Serratia marcescens
atggtatctgaagatattattcatgctagatttaaatggcagagtaatgctacgccggatttggtggcgttgcgatgtgataataacgcactgacctatcaaaaactggaccaatatacggatgcattggcggagcgattaattagtcatgggataaaaccaggggatatcgtcggcgtttaccttaataagggaatggatctggttatcagtttattaggaatactcaaggcaggcgcctgctatttgccattggacccatattatcctgttaaccgtctggcatacatgattgaccatgctggtacgagactggtcattacgagcggtgttctggatcaggcgttgaaagacgcctcccagcgttgcgaatggttggacatcacgcgcctggacctcactttacctttggcatcggctttgccgaaagtcagtgggtccaatctctgttatgtcatgtatacgtccggatcaaccggtaagccgaagggggtgatggtcagtcatcgcacggttgtacagtatttgaaatggatgcaggctgcgttcaatctgtgccagcatgatgtggtactgaaccaatccagcttcagtttcgatgtttctgtctgggaaatattttggcctttgatgactggcgcaagctgcgcgctgatcgatgaggaaatgaaatatgatcccctgctaatggcaaatttcattcgccgccaccgggttaccgttgcccaatttgtacccactgcgttacgcattatcgttgatgccgatgtggtgggcgattgtcgaactttaacgcatattttcgccggtggcgaagcgctgccgcagagtttggtcgacgatttgagccgtcagttctccgggcagatccacaatctgtatgggccgacggaagcgactatttttgcctgccattggccgtgcttgccagagcagggagagggcatggttcccataggacggccgattccccatgcgcgcgcctatgtgttggacaacgcgcttaaacctgttcagcccggaaactgcggtgagctttatttgggcggcgacattctggccaaggggtacctgcatgctgaaacgttgaccctcgagcgtttcgtcaaagatccttttatcccgggcgaaaatcataaaatgtaccgaaccggcgacttggtcaaatgccttgatgacaatgtcttggaatttatcggcagggttgatgatcaggtaaaagttcgtgggcatcggattgaactggctgaaatcgaaatgcatttgcaggctttgccccagatatcgcatgccgccgttattgtagagttcaaccaaaataataaaataccaacgctatctgcattttatgtttctcgtcatcaacagcctattaatgttcaggaggtaaagagcgctttggcgaagtctctgcccttctttatgctgccttccagatttatttcattggataagatgccgattcatccaaatggcaaagtcgataaatctaaccttagttcgcatgaaaataaaggagagagagagatggttgatataaaaagcaagatgagttctgatatagaagcgcaaatcatttctgtatggagaacgattttaaaaaacaaggagctgtcaacgaaagataatttctttgacgctggaggtaattcgttattgatgtctaaagtacacagggaaataaaagataagttttccacgcccattaccattatggatttattccaatacccaaccgtacagatgctaagtcaacgcattgcagagaaaaatgctgagctattaggaaaaaacaaataa

SEQ ID NO: 434245 - DNA, 3075 bp, Serratia marcescens
atgaatgacagaaagcctatttttgaacccatttcgacgtggtcaacccaacgaccggctaagcgtgcagtcgtttttggcgagcaaacgttgagttatgcccagcttgaataccagtccaatctactagcgcgctatttattatcaaaatatccgatgcatccacgaggaagaattgctgtctatctggagccaggtctaatgatgcctgtggtgctgttggcaattctcaaagcgggctacacctatattcccttatcagattttttgcctaacgagagagtattaaaaattctcgatgacgctgcagcctttttgttgctgaccacggtttccatcatgcgtaaaacggggataggaaaaaatttcccttctacgctggcgttagaggatatcgcctatgcagatatgccggctacgataagcctgcccgtggtacagaaaacggatatcgcttatgtgctgtatacctcaggctctaccgggttaccaaaaggggttgtcattgagcacgggaatttgagttattacctggattggttcaaccaagcactttggcctgaaactcaggcagtattaccgctgacttcaaccttgagttttgctgctgcggttacgcaactttatgcccctttgctgcgtggcgatacgttgcatattttacctgccaatattttgcatgagcctgaaaaattgctgacttggtacgaacaacatccttcaggagcgctttattgtgtgccgacggtatgggatgcgttgctgcgctacgatcgtcaagcaggcggcgcgtcgcgtttaccaacaaccgtatttctttccggtgagccggttccctttgatctaaaagagcgaacctttgcgcaatgtccagacgcaacgttgtataacctatacggccctacggaaacgacggcaaacggctctttcgctcgtttggaaaaagggaaggcggtcactctgggtaaggcattgcgaggcagtaaaatactgattgttgatgatgactgttcacctgtcagcggcgatcggtgtggggaaatctgtattgttgggaaaggcgtggcgcgcggttacctcaatcgcgatacattaactcaccaacgtttctttacgcaggaaatcgatcatgcgtgctatcgtggccatcgaaccggtgatttgggaaaattcaattcgcatggcgagattgtctatctgggtcgcatcgaccgccagatcaagataaatggagtgcgaatcgatccggaagagattgaaatcgccttacgtgaagatcacagaattagacacgccttggtgcggaagacagaggaaagcacggggggcatacgattgatcgcttacctggttccggaatctgaggggactatttcggcaaacgaaatcaggaattttttgcgtttgacgttaccggcagccatgattccttcgcactttatttttgtcgaaaccatgccaaaacttcctaacggaaaactggacctccagcgattgccccaacccgttccatcacgccctgcgctgagttatgcttttcgtcccgccgccaacgaattggaacaagaactcattgatatattccaggaggcattaggtttctgtgacttaggcgcagatgataatttctttgatctgggtggcggttcgttgcaggtgattcagataaggcaattaattaagcgccgattatttagcgatattgattacaccttgtttttcgataatgcaacgcctcatctgctatcgtttatcgtgccttactatgtcaatgatactgacccggttgtgcttgaaaatgattttaggctcccgtctatctctagtgaacagcgctattttttaactttagatcaaatcagcccggcgcctggcgcttatcagattgcgtttaggttggccttcggtgggccgctggatatttccgccatggagtggagtattcagcagatcttgaagaataatccagtattgcgcagtcgctttaatctaaacaacgttagttgcagtgagggagactatcccgcgtcggatttgaagatcgtgcgccaggagtgcgcggcggagatctgcactttcgatgagctgagcgacgaagggctgttggccgccgccggcgtacccgagatggatcttgaactcatgccgctcattcatatccggttcatgtccctaccggcgagctggcacattctcttgctacaggtccaccacaccgtttttgaccatgactctatcggtttattcttcaagcaattcattgcttattttcaggcctaccgcgcgggcgatcgtggctttgagctaggccaaggcaaggggtatcagcactatcgttgctggcaacagcagtgcatccagccgacgcgctacccgcaggaaagagaattttggctggaaacttttgctcattacgtacataccggcgcagatgcttccctgttctccccccgagatacgttggagggaaaaaatgtgtggtttacgatctcgaaagcgttgacgcaatcgctcatggcctttgcgagaagccaccaaaccacagtttttgtttgtatgctgacggcattcaatgtgttgctaaatacttttacgcgttatcgccatgtgccaattggcatccctgtctccaatcgcatgctttatgaagaaacctcgctgttgggttgtttcgtaaatagagtgacttattacgataagtacagtcctgaagatgatatcggatcgcttttagatcgttgtcgaaaaagagtgtatgggttattggaaaatcaaacgataccttatgatattttgaatagtgacattcgcgcgcatggctggatggatctcttgtatgcgccggtctgttttaactatttaagtgcgatgccatcaccggtcaattgtggtggagttgatattgacgtcaaagcggtagaaagcgacttcgcaaaagtcgatatgacattgtctattcatgaaggagaatgtctaaatgtttgctttaactatcatatggcagcgctaaaaaaagatgaagtgatacggctgtcaaaagaatatatcgggataattgaaagaatgactctttga

SEQ ID NO: 434246 - DNA, 1518 bp, Serratia marcescens
atgtccgggatcgacttcaagcaaaaaatcagcttccaacggcctttcagcaaaccgatcgaggccgaggaagagtacgacatcgtgcggcagttcgagagcgatcgcgggcgcatcgtcaactcggccgccattcgccgtctgcagcaaaaaacccaggtgtttccgctggagcgcaacgcggcggtgcgcagccgcctgacgcactcgatggaggtgcagcaggtcgggcgccacatcgccaaagagatcctcaaccgcttcaaacaggcggggagaattgatgagctcggcctcacccggctgctcgatccgtttgaaagcatcgtggaaatggcctgcctgatgcacgacatcggcaacccgccgttcggtcacttcggcgagtcggcgatcaacgactggttcgcccaacggctcgatcccgccagctgcggcagcgagccgggcagccacgatcgctgccaggtggcgacgctgcgcctgcatgaaggggagagcgatctgaaccggctgcgcagccggatccgtcaggatctcagccacttcgagggcaacgcccaggcgatccgcatggtgtacagcctgctgaagctcaacctgacctacgcgcaggtcggctgcattttgaaatacacccgcccggcctactgggcgagcgacatccccgccagccacagctatctgatgaaaaagcccggctactatctggcggaagaggccttcgtcgatcggctgcggcgcgagctgcacatgggcgagttcgatcgtttcccgctgacctatatcatggaggccgccgacgatatctcgtactgcgtggccgatctggaagacgcggtggagaagagcattttcaccgtcgagcagctgtatcagcacctgattcaggagtggggcgaggtggcgccgggcgatctgttcgacaagaccgtcgccagcgcgtttcgcaagatcgatcgcggcggcgcgcggcgcagcgcggaagatcagttcttcatgtatctgcgggtgtttaccgtggcgcggctggtgccgcatgcggcgcagcgctttatcgacaatctggacgcggtctatcagggcagtttcaatcaggcgctgctggaggattccagcccggcgtaccggctgctgaaaatatttaaaaatgtggcgttcaagcacgtgttcaaccacccggaggtcgagcagctcgagctgcaaggctaccgggtgatcagcggcctgctggacatttacagcccgctgctggcgatgtcgctggcggacttcagccagctggtgcgcgaggacagccaccgcgcttacccgatcgaaacgcgcctgttccataagctgtccaccaagcatcggctggcgtatgcggaggcggtagaggggctgcagcatttatcgccggagcagcaagccattcgggaatattatttccgcgcccgtttattgcaggactatatcagcggaatgaccgacctttacgcctatgatgaatatcgtcgattgatggcggcggaataa

SEQ ID NO: 434247 - DNA, 312 bp, Serratia marcescens
atggaaaagcaaagccttacgttaaatgaagcgtgcgaattacttggcgtatcaagagaaatactcaggaaatggatagaaataggacgacttaaagctacacggaaagatttaacaaaaccgaaatctccctatttgatcactccggaagcactcactgaagcgttgactaactcagcctaccaagtccaaacctcaatggttatgaataaaaaaattaatgagcacaaggaagactctctttccgctacgaaagacgccgccaagaagctaaaaaagatgttagcaattagaagtaagggaagagactag

SEQ ID NO: 434248 - DNA, 540 bp, Serratia marcescens
atgggttatacaaaagccgaaaaattacaactcctaatgctgtgtgatatatataaaaagttaaatattgaaggaggtttcaatcctgatatcattagtggcgctataagttctggaaatctttgggctatcgatgtggaatactccatgctgattggtgacgaagtttcagataatgttcgtgagaacgtcgtatcggcacttaactgctaccgctatatcagtgcttctcttaacaatcttcacgtaacagataaagacgagctggtaactgaattcaagctccacattcatgacaaacaggttcagttccctgggtacgatggtaacaacgaaggcgagtactcttctgttgcccgtatgtttggtgagctgggcagattctctgaacaggtagagatcgacaaaaattctcatgaagaaaatcgacatgcatactcagatatgtctgtatatgtccgaggtgtctcggatcctttagctcttaccaaagagcaattaaaagaattgctttcattggcacctaccttctggggttga

SEQ ID NO: 434249 - DNA, 255 bp, Serratia marcescens
atgtcaaaagataacgtagatgtttcaataatttatgggaaaataaaaattgtaaatgcctttccagattacaaagtaaaaattgtaaatgcgttccctgacttaaaggttaaggtagttggagcgtttccaaatgaaccagggaaatggaagatggttgaagcttttcctgactataaaatccagtttgtggaggcatttccagactttacaattcagtatgtcgacgcatttcccgggccgactaggcgttaa

SEQ ID NO: 434250 - DNA, 1014 bp, Serratia marcescens
atggctaaagatcttactacctccgcacacgaccgacagaacatacttaataactcctatgccctgacacatgctgaaaaacatatggccttaggtgggattgagttcaatggcgaaaaagtgttcacaaaaagccagttgatagaactttttgatgtcagcgacacaacaattgaacgctatattaacaatcacttagatgaattaaagaacaatggatacacccttctaagagggaaatccctaagggatttcaaagagatagctgatggtaccctcatcaatgaaggtaccaaaacctcaatactaggcatattcaagtttcgctcagttttgaacctggcaatgctactagttgaaagcgatcaagcccgcgccatacgagctcgtcttttagatattgttattgatacgctggcagaacgttcaggtggccatacaaaattcatcaaccaacgtgatgaagactacttagttgctgcgttcaaagacgaaagctatagaaaaaaattcactgacgctttagatgagtacgttgaaggcaacaaatggaagtatgggaatttaacaaactcaatctaccaaagcatttttcatgaaaatgccaatgagtatcgcagtgttcttaagttacaccaaaatgacaagattagagataccatgtactcagaggtgctaactttaatctctagctttgaggctggcttagcacatgaaatcaagctgaaagccgaccaacttggtcgcaagctcacttataaagaagctgaatccatactaaagcaaatggagggacaccctctatatgagccaatgctagtagacgttaggactaaaatggccagtagagatttatgctttcgcgatgccctacatgaaaaacttgaagcctatgttaaagctgttcctgcgggtgattttgagcgttttcttggagaaaaaagcaagtcattagaggaaagactgagcgatcctgaaaccctggaagtgtttaaaagactgaaagatcgctag

SEQ ID NO: 434251 - DNA, 462 bp, Serratia marcescens
atggacgatataaaattcaattattttgacattgatcacgctattagggttcatgattggatcattgataaaacaggcggcttacacggaatcagagaccaaggggtactagagagtgcccttgagcatatccaaaacgattggtattaccccgaattcatggataagctaagtcacttattctttgcaatcaataaatttcatgcttttagtgacggaaacaaaagatcaggcatcgccctttcaacatactttcttgagataaatggtttcggccattgtgtgcaactttttgtgcatgaaatggaaaacatcgctgtttgggtggctgatggggcgatagataaggaattgctcaaaaacatcatccatgatctgatcttgtgcgaagaaatacttgaaacaaccaagctggatatcaccatagctctaatggactttgaagctcagagacatggttaa

SEQ ID NO: 434252 - DNA, 822 bp, Serratia marcescens; identical to SEQ ID NO: 16544

SEQ ID NO: 434253 - DNA, 2109 bp, Serratia marcescens; identical to SEQ ID NO: 16545

SEQ ID NO: 434254 - DNA, 1668 bp, Serratia marcescens; identical to SEQ ID NO: 16546

SEQ ID NO: 434255 - DNA, 1527 bp, Serratia marcescens; identical to SEQ ID NO: 16547

SEQ ID NO: 434256 - DNA, 1617 bp, Serratia marcescens; identical to SEQ ID NO: 16548

SEQ ID NO: 434257 - DNA, 1185 bp, Serratia marcescens
atgtctaaagaaaagtttgaacgtacaaaaccgcacgttaacgtcggtactatcggccacgttgaccacggtaaaactaccctgactgcagcgatcactaccgtactggctaaaacctacggcggttctgcacgtgctttcgaccagatcgataacgcgccagaagaaaaagctcgtggtatcaccatcaacacctctcacgttgagtatgacaccccgactcgtcactacgcgcacgttgactgcccagggcacgccgactacgtgaaaaacatgatcaccggtgctgcgcagatggacggcgcgatcctggtagttgctgcgactgatggcccaatgcctcagacccgtgagcacatcctgctgggtcgtcaggttggcgttcctttcatcatcgtattcatgaacaaatgcgacatggttgatgatgaagagctgctggaactggtagaaatggaagttcgcgaactgctgtccgcttacgacttcccaggcgacgacctgccagtaatccgcggttccgcgctgaaagcgctggaaggcgaagctgagtgggaagcgaaaatcatcgaactggctgaagcgctggacagctacatcccagagccagagcgtgctatcgacaagccgttcctgctgccaatcgaagacgtattctccatctccggtcgtggtaccgttgttaccggtcgtgttgagcgcggtatcatcaaagttggcgaagaagttgaaatcgttggtatcaaagacaccgttaagtctacctgtactggcgttgaaatgttccgcaaactgctggacgaaggccgtgctggtgagaacgtaggtgttctgctgcgtggtatcaaacgtgaagaaatcgaacgtggtcaggtactggcgaagccaggctctatcaagccacacacccagttcgaatctgaagtgtacatcctgagcaaagatgaaggtggtcgtcacactccattcttcaaaggctaccgtccacagttctacttccgtaccactgacgtgaccggtaccatcgaactgccagaaggcgtagagatggtaatgccaggcgacaacgtgaacatggttgtaaccctgattcacccaatcgcgatggacgacggtctgcgtttcgcaatccgtgaaggcggccgtaccgttggcgcaggtgttgtagctaaagttatcgcttaa

SEQ ID NO: 434258 - DNA, 432 bp, Serratia marcescens
atgacgacagcattgacaaaagccggtttctggcgcaaaaccgccgactcttcatcgctgcgtgagccgcgcgtgctgattcgggtctacgttggcgaaggcgaaatcgaccgcgccatcgccttttacgagcagttgcacggcgtaacggcggacatgcgcttcgattttcccgaacatcggctggtattggcggcggtggggccgtttctgatcctggaaggggcggaagagcagttgcgccctttccgcagcaccgtcggcacgctgctggtcgatgacatttatccctaccaccagcggctgctggccgctggcgccgagattttcttcggcccggtggaggtgcccaccggcgcctgtttcaatgcgcgcctgccggacggcacgactgtcgagtacgtgcatcaccggccgcgcgcgggcgaataa

SEQ ID NO: 434259 - DNA, 2178 bp, Serratia marcescens
atgccgattgaattttggtatcatgattttgacagggaaaatggtagttttatcccaaataggctagtgcgttataaaccagtcaaatcatggtcaacaattaatagcccatatgcaagaaaatcaaatgctgatggggataaatttttgcttacacagcaggggagtgtaaaacataaagattttgtacctgataactttggctttagacatgatgtagaagcatttacatataaggtgaacggtgtttttaaaacaatttgttattgtgatgaaaaaactcctgagaataattatgtaggggatgctagggtaaactctatagcgagcatagttgatgcgataagtaatgatgaagtattaacattctctttattgtcaaaaatacattctggaaatatttcacatccaaaagaaagacgctccaatggtaatgtaaaattccagttgtttattggcacgtctccaatggataaaataaacttttggaacaagaggatgatatctgaagctggtttgttttattcgggttttgagcgtgtttctgaaatgattatcgataaatcagttacttatgatgatggtttttgtaagagtcttggggtttttttagataaaaatgtatatgattatggttcgcgaagtgggtgcgttgaaataagaactttttcattggagcttgatgaatgtaagcggtttattttgaagcttaagcaatttactaatgcagagataaatctggcaaaaaaaactgatgaattatcattgccgaatctcgacgaacgacactcatacaggtttttaggaaagcctgatcaacaggaaagcactattaataaatactctaaatttaagttgcaggggccggagcacttctcatatataaattatgaacaccaagctctatttagcggagagtggattcttgacgtttctatagaacgatatcaaaatgatagtttatatgtcaatacgaataattattgggagctatgtcgtagacatgttattactgagctatttacaaaaaatccggcgaaagtaaataaataccacgcgctctcaattctaagctctgaaaatatagttagtatatatagggggaataacaacaaacaagacaaatatcttcagttgatgtccccatcggatgatgctgttttcaaattgataatgtgtcatgataaggaatattatgattataggcagtattgcaagaaaaaaaacaaatatgaaaatataaaaatttcggataaaggccaacaacacagagggattgtttcgaaatttgcaaatatctatgaagcatcatctgtcattaacaacgtcttcatcagggggttgttaagagaacagaatggaagtggttatgagttagtggctcttcagacaagactaaagcaagtccccaataaaaaaattgaaatactaatcgatagtgattacgttacgaatattggtaaggcgaaagaattactctgtgctagtttgttagatgcaattgaatatatggtgaggatcggatttattgaacaagtttatattgtaaggtgtgagtattgtggtaattcaaatagacgtattttagatgggttgaaattagtgaatgaatgtgatgtctgtgcggtggagtatattacaccaatagatatgacatggcgttatgcatttaccccatttgttttaagatgtttggctgaacataatggtttgtcagttattgccgccatatcattgttattaagagagtcaagaagtaagcagtctgtttaccttcctgaagttaatctccattcgtcatctgacaaaaatgactatcaggaaattgacattgttgctgttattgatggcaatttagtaatttcggaagttaagggttcagcggcttcattcatagaaagtaaaaatgatcaaagtaagttcgaagaaaaggttttgatgatagaacctgatgtcgcatatttgatttttgagagtgtctgcaaagatgctgctcaaaaggagattttttcccaagcgttgaaaactctgtctaaagagctaaacatcaagtttcggggttgttctttaattaaggttgttgttatggatgaacttcatggttatgattcttatgaagacttaataggatatcaatctagccggacaaatggagtttatcttaagtatggcatgtga

SEQ ID NO: 434260 - DNA, 819 bp, Serratia marcescens
atgaccatcgcaatagaacaactaataaaaatgcacgatccgcgctgtgtaagcgcggagtcaatgaatgtaggccgtggacgcgcttccctgaccagggagcagattcttggggcattagctgcagtacagcaccggcattcagtcggccttgacctgctgatgaccaaataccgcaacgattataaagcggaacagcggctacgtgcagtgatcaatgaatgggtgcatcaacgaccgcatcctgaacgcgcgacgtcagcatgccagttagccctcagcattgtactggaacgtaacctgccggcgcaggtggcacacattgcagcgctacttcgccgatatggcccgcgaacagcccagacgcggaaaaacattgaagcgttgcaatccgagattaaagcgctggagaagcggcgcagccaagcacagatcgccgatattgaataccacgaggttggcttcgaaattaccgatataaccatacggattgagcgggaacgggcatcacttcgagcttggtctgaacaacacgctgctacaaccaatatatgcccacgttgctccggtaccggccgcatggttaggccgcatcctatagagtgcgaagaatgtggcggcaaaggccagattccggccaatatggagcatctgcgtaaatcgatgcgtatcataggggcagtggtagagtcgggtgactgggtgaatcaatatgtggaactggtgaagcagtgcatcggatggctatatgttgaggagtcgaatgcgactgttctgctatccgaaaggatccgttctgaaaagtttgaaattagctaa

SEQ ID NO: 434261 - DNA, 666 bp, Serratia marcescens
atgacaccggaagaaattcgcctgattgtgagtgaaatattaccccagattgaaatcacgcaagcatacttgatcggtattacgggatttgttggcctgttggggggctgtgtcggtgcttttttgggcgcatattttaaacgatatggagagaataaggcaaatgatgctcattttgaaaagctaaatgagcagctaaaaataaacacctctgatactgaggagattaaagctgcagtatcggggcatggatgggttagtcagcagaactggagcattagagaaaaatactacactgcattgatttctagcctttcggactgggtaaatgaagtcagtgttctgcgaggttattatcctgacccacacaatgatgaagttgaagtcgaggatgaagataaagtggcaagaattcagtcacgaatgtcagaggcttgtcaaaaggtaaaggagttaagaggcccgtctcttatttttttatctgataagaccaatgaaactattggatcaatattttcaatgttattccataactctcaagattatttaaatcaccatgagcgttttaataaaacatttgatggactagtgaaatttaggaatgtaattcttatagaagcaaaaaatgctttgaaagcatcacttcatccggttgaaaaacgctaa

SEQ ID NO: 434262 - DNA, 537 bp, Serratia marcescens
atgaccaacaaactcttgctcaccattgccggtgtcctgctggcggtgatccttgcgttcggctgggccgcttcccacttctacggtgtatctatcgctaaggatggggagctaatccagacgagaaacgagctggatacggccacagccatgaatgctcagcaagcattccagttccagcgcgccaatgagatatcagccgccgccggcagatacaacgtcaccatctcagccaagagcgaggaacggcaaaatgaaacccgcaatgaccttaaaactgaggagtgtgctgatcgttatatccctgacgctactgctcagcgcctgttcgcgtacacgaacgatttacgtgccgacgcaatgcgtaataccagcaaacctgacggagccgcttctggttcctctgccgccggcagactgacataccgccaggctgtcctttggattgatccgttactcactctgttggatagggcgaacaacgatcgcgcatcaatccgcaacctcccgcatcagcaaccagtcactaaggaataa

SEQ ID NO: 434263 - DNA, 213 bp, Serratia marcescens
atgacgactaccaacctccaacctcaccagcagcgagtagtggacgaattgaatgaactggaagggcgcctcgagaaattaagcacctttatcggtggcagtatcttctgcggaattccagaggaagaccaacggcttcttgatgcacagcgacacatcatgtcggcctacgttgaggtactgaaaaagcgcgtagaacggtttggagcataa

SEQ ID NO: 434264 - DNA, 429 bp, Serratia marcescens
atgtatctcgatgctgatgagttgtttgaagcggtcgcagactccgatctacatgatgaactgatcttcacgcgcgctcgcgctctgtccgttaccaagacgatgaagcagatcatggaggatttgcagaacgccgagagcgtggaaacgcgtattgagctgtacgacaagtttttaaaagccgagcagggcctcgacaggaatatcggacgtattgagtcgatagagcgaacgttgagcagtttgcggctgaacgacgttaatgttcctcgtctgagtgaagatacccaacgaattattgcggccacggccaaattgaaagccgagacgcagaagctgacggcagagagcaaagacgttacgacgccgttgtctggcatcgttaatgatattcagggtatgagtgacgacggattgatgtccaaatga

SEQ ID NO: 434265 - DNA, 1716 bp, Serratia marcescens
atgacgactccacattacgacgccgccactgctgatgatgcactgaatgggatgactgcggcacaacagcgcttgtttattacgacgaagctttccaatccgtggtggaggttgaataacctctacaaaattgagaacgagaagggtgaactggtaacgtttaggttgcggccggcgcagcgtgcgctgttcgagtcgatgcattaccgcaatatcatcctcaaggctcgacagcttggattctcgacggcgatcgatatctaccttctggatcaggcgctgttcaataagaacctgaagtgcgggattatcgcgcaggacaaatcagcggctggcgagatattccgtaccaagattgcgatccccttcgataacctgccagggtggctaagagccgatttcaaaatatcggaacgacgcagcggggctaacggcggttacattctgtttgctcacggcagcagcattcaggtagcaacatcatttcgctcaggtaccgttcagcgtctgcatatttccgagcatgggaagatctgcgccaagtatccggccaaggccaaggaggtgcgcacgggtacgctcaacgctattcacgacggttgtatcgcctttatcgaaagtactgccgagggcgttggtggcgattttcacgagatgagtactcgctcgatggagctggggcaatcaggcattgagctgagtgctcaagactggaagttccatttctttgcctggtggcaggacccgaaatatgttgcgccggttccgtctgctggcttacgtctcagtaagtatcaccgtgaatatttttccggggttgcgtcgtctatgcagatcacgctcaccgaagagcagatgcagtggtacatcaataaagaaattgagcagcgtgaagagatgaagcaggagtttcccagcacgccgcaggaagcattcctgacgtcgggccggcgcgtatttgatgctatcagcacaatgagagctcaagggtactgtaaacctccgttgctggtgtatgacatggatccggtgacaggcaccaagaccaaggcgcagggattacgaggcggtgaaacgaaagagctcgtccgtactctgctgaatcacctgctggtctgggagcttcccgatccggaagatgactatgctattggcgctgatattgcggaagggttagaaaacggcgaccgatcatcgtttgacgtcatcaagaagagcagcggtgagcaggtcgcacattggttcggctacctcgatgcagaactattcgcgcaactgctggcgcacgtcggcaaatggtacaacaccgcttacattgggcctgaacgaaataaccatggccatgcggtgctgcagaagctgcgtgatatttacccactgcgcgctatctacgcagagcagtatctcgatcgtcaagacgatgacgagacaccaaagctcggctggctgacgaccaagcaaagcaagcctgttatcaccgaaggattgaagaccctgttacgcaacggtgtcagtggtatccgctggatcggcaccgtcaatgaagcgaacacctacgtgtatgaccctaagggctctatgggcgcgcaaactggttgtttcgatgaccaggtgatgagctatgcgattgctcaggaaatgcgcgcgcgaatgccggcgcgcccgaaggtcacacctatcgacagatctaaaccaacacattggatgtctcactga

SEQ ID NO: 434266 - DNA, 2127 bp, Serratia marcescens
atgaatacagccatgatagatgctgaggctaccgcgccgcagcaagacaaccgcgatcgttttacgcagcagcagctgttggatatctcggctgatattgactcgcagcctgagtggcgaacgacggctaatacagcctgcgcgtattacgatggtgaccaattagcacctgagctggtttctaaactgaaggaacgcggccagcctctgacaatgcataacctcatcgcaccgacgattgatggcgtgctgggcatggaggcgaagacaaggactgaccttatggttattgccgacgatccaaacatggaaatggagcaaatggcggaggcggtgaatgctgaatattctgatgcctgccggttgagcaatctcaacaaagcccgttctgatgcctatgccgagcagataaaggcgggattaagctgggttgaggtgcgccgtaacagcgatccatttggggccaaatataaggtcggtacagttcaccgtaatgaggtcttttgggactggttcagtcgggaagctgacctaagcgattgtcgttggctgatgcgcaagcgatggatggatgtggacgaggtgaaaagctctttcccaggccatgcagagatcattgattactcagtgcgagactggaaagggtttgtcgaaaccgatctggcagagggggatgaatctaacctgatcaacggttatgaggaatataattcgtacagccgcgatcaggctgagtggataacgtcaaaccgaaagcgagtgatgctgcaggttatctattaccgtacttatcagcagttgccagtgatggaactctccaatgggcgcgttattcagtacgacaagaacaacgtgatgcatgcggtggcacttgctaccggtcgcgttgcggtaacaatggctcgcgtgagccggatccgtgaagcgtggtttgttggcccgcacttcattactgaccgcccatgctccgcaccgcagggcatgttcccgctgatcccattctggggttaccgcaaagacaaaaccggcgcaccctatgggctggcctgtcgtgctattccggcacaggatgaagtgaatttccgtcgtattaagctcacctggctgttgcaggccaagcgcgtgattaaagacgctgatgccaccaacatgaccgataagcaactggctgaagagctggagcgacccgacggtgtggttaaccttaacccggatcgcaagaacaaaaagaccatagcggaagcactgacggtgcagcaggatttccaggtcgcacagcagcagtttactgtcatgcaggaatcgatgaagttgattcaggatgggatgggggtgtattccgcatttctggggcaagactccaatgcatcaagcggtattgctatcagtaatctggtggagcaaggtgccacgacgctggcagaaataaacgacaactaccaattcgcctgccagcaggtcggccaattgctgctgtcctacctgctggaggatttgagccgccggcgaaattacacggtcgtcatcaatcgtgaggacaagcgccgccgcaaagaggtcatgctaaacgtcgttgaggcggagggctcgatgaataacgatgtctcgcgtctgcgtgcgcatattgcattggccccaatccagcagacacccgcttataagtcgcagttggccgagcgtatggcacaggttatcactgggttgccgcctgaggtgcaggctgctgttcttgacatgtgggttgagcttctggatgtgccgaataagcaggagtttattgaacggatccgcagcgcacttggcacgccgaaagcaccggacgaaatgacgccagaggaacagcaagccgcgcagcaggaacagcaaatgcagcaggctcagcaagagcttgcaatgcgagagattgctgggaaggtagctaagctggaggctgaaagccaacgcattgctgctcaggcgaagcgggatgatgcattagccaacggccagcgtttcaatgatgctcatacacaagcgcagactggccagatcctgcaacagatggagaacgtatcggctgaaatcaatgctttgaatgagcaaatgctgcagactattcaggggcaaattgacgcgattcctgtatga

SEQ ID NO: 434267 - DNA, 891 bp, Serratia marcescens
atggcattggtttaccattactgcagcccgcaggcattcttacaaattattgaaaaaaaatgcatttggctatcatcgacaaataatatgaacgattccaccgagggtagatggtttataagtattgttaagcgagtcctagatgagcataagaatgaattaggggaggaatggtgtaaaaccgtcattggcggacttgataataattacaaacccaactatatagcttgtttctctaagaatggtgactcattaagtcaatggcgttcatacgcacaggatggggcgggggtttctattgggcttgatgatcagaaaattgaattgctaagaaagagtaccattcctgaagaaaatggcggagcgcctaatcttcatataacactagagtttcaagatgttgactatcagggctatgagcattatcaggaaaaaataatagaaagagcacgatattggattgaagaagttagaaatccacttagcgcgttttacatgcaaaatgaaggtttttataatgattctagtgcggcttttttttgctatgaatgtgagcaagcatcagcaattgcaaagaacccagcatttattgaggaacaagaaagacggcttatatttaagccgaattattcacaaatggaattaaaagagtttcccggattggcaggaaaaagaaaaaagcaggcaatgcaagaattgggtggggtaaaacataggatttcagacggatttttaacatctcattttgagttgggttttaataaagagtcaataaaaaaagtaattttggggccgaagaacacgttttcatttacagacgtcaatagttttcttgtgctaaatgatatggaatatgttgaaattgaacgctcttcagcaacctaccgataa

SEQ ID NO: 434268 - DNA, 1035 bp, Serratia marcescens
gtggacatcgataatttaacgggtaatgaaacgatagaagagcttgacgctatgctggagcgggtgggggatgtggagatttcagacacggtggtggctccgcctggtgctgaaaagcctgctgctcaggtggtcgcaactcttgaacaaactaaagcgggcgataaagaagttccaccgccgccgggtgcgattgttgaagatgcagtggccagtaaggtcagtgatgatgccaacggcgaaaggccgaaaggtatcgccacccaagacggtaagcatgtcattccatacgctgtattggaagctgcgcgcgctgaaagtcgccgtaatgctgagaatagccagcgtttcagttctgagttggagcaaaccaagcgacaattgcagatgctgacgcagcaggttaatcaggctgggatgaccccggtaaagttacccgaagaatcgcagattacccctgaacaaatagagatggttcgcaatgagtttccggatctgtctggtgtgtttgaaaccatggtgcagaaaattgagtatctgcaaaatgcgaacgcaaatgcacaggctgttgctgtagttgaaccagcaggaaacccggttgctgatgcgataaaagccactcccgatctggaacagtggcagtcggcagatcctgaccgtttcagtctggcggtgcatatcgatgaaacactgaagaatgatcctgcatggaaagacaagccgctagctgagcgatttggtgaggtggtgaagcgtaccaaagcagcctatggcgagagtgttgaggcgcctcaaacacctgcccaggccacacaacctacagctgaagagctccaaaaactggcgtatgacaaattggctgcagtgaaaactgccagcagtattcctgcatcaccatcagatcttggctcaacgagcacgcatcaaccaacactgctggagcaggctgccagtgccgatcatcatcaactgacaacgatgttctctggcatgacggaagcgcaaatcgatgcgttgttagaacagtccctctga

SEQ ID NO: 434269 - DNA, 1224 bp, Serratia marcescens
atgaccactattacctccgcccaggcgaataagcttcagcaggttgcgctgtttactgcagctaaccgcaaccgctcattcgtgaacgtgctgactgaacaacaggaagcaccgaaggctgttaatccggacaaaaaaggcaccatgcagaccagttttaccgcgccagttgtgcgagtaaccgatctgcaaaaacagaagggcgatgaagtagatatgcagatcgtccacaagttgagcaaacgtccgaccatgggggatgagaagctgtctggccggggtgaaaacctcgcgttcgctgatttctcgctgaagatcaaccaaggccgtcacctggttgatgccggcggcaagatgtcgcagcagcgtttcaaacacaatctcaataaaacagcgcgcgttctgttggggacttactttaatgaccttcaggatcagtgtgcgacggttcacctggcgggtgctcggggcgattttattgctgacgacaccattctgccgctggctggtcatggtgagttcggcaagatcatgatcaacgacgtgatgccacctacctacgatcgtcatttctatgccggtgatgcaacatcctttgagcagctggatgccgccgacctgtttagtctggggactgtcgataatattgcgctgttcctggacgaaatggcgcacccgttgcagccggtcaaaatgtccaaggatgagctgaaggacgaagatccgtactttgttctctatgtcacccctcgtcagtggaacgattggtacacctcaacgtctggcaaagactggcaggcgatgatggtgcgcgcagttaaccgttcgaagggctttgatcatccgcttttcaaaggcgaatgcgcgatgtggcgaaatattctggtgcggaagtattccggcatgccgatccgcttcaataccggctcctccgttgcggtgtcaaacaacgatggcgcggccagtgtttccaataaaacggcgggcacgaccgttgatcgcgcgattctgttgggtgggcaggcgctggcaaacgcatatggcgccaatgaaaccggcggacactttggttaccacgaagaaaaggtggaccatgacaacggcaccgaaatctccgtcagttggatcaatggtctgaagaagttgcgtttcacgcagaaagacgggcgcgtgaatgaccacggcgtcatggttgtggactcggcgatcacgctgggccgttaa

SEQ ID NO: 434270 - DNA, 384 bp, Serratia marcescens
atggcaacgattatcgcgccatcaatgcgagacgcagtttaccaagggccacaaggcaacctttctatcgcagaaggccagatcgttctggcagctgcaaaagcaggtgatgtcatcgagctgctggatatgccgatcggtatgcgcatctactcgctcgatattgtcagcgatgcgctgggggctggtgtaactgtggcgatcaaatctggcaccacaacactggttgctgctggcagccatgtggcggcagtagctaaagtggtgccgattgtaccgtacagcacgataaccagtggggagaaaatcactgcaacagtcgctggcggcgatgcctctggccgtctggtggttaccgttaaatacgtggctactggctactaa

SEQ ID NO: 434271 - DNA, 450 bp, Serratia marcescens
atgacccaaacaattgcagttgcctatattggcccaaaagacaaaaagcgcgacacgatcactggcagccgactggtgttcccgcgctttacccctgtagatgttgaatcagctattgcacatcggttgcttgattacccgacggtattcgtaaaagcggatttcctcgaaagcgtgatgcaagcgaaggccaacgccgcagaaaatcaggcagaggctgatcgtctggagcaggcgcgtttagccgcattggcagcacaaaacagtttcgtcgtgaaaattggcaatgatgaggtcgatctcgccaagctcaccgccgtgcagttggccacgttgattgaggctgaagagttggaactgaaacaggatccgcaggagaaggttggtgatttccgcatccgtattcgtgatgcaattaacgctaagcaggctggcggagatagcgagtaa

SEQ ID NO: 434272 - DNA, 597 bp, Serratia marcescens
atggcatcgcttaacgtatttctgcctgcgatccggtgtcacatcaacgggccgctggaaatcatgatgcggcagtcagtgcttgagtcggctatcgcgttttgccgtgaatcactgttctgccgtgaggagttgacattggcagccgcagcgccgggaacgacgtatgcgctcattgacagcccactggtgaaatgcgttaagcgtctgcgtgttatcgatctctccgaacaactgagacgacttgatgagacaggcactgtcctcgtggcgggaattgatttcaatgtcatttccgcaaaccacatcacttttgttcgtccgttcgaaaaggttgctgtcctgttcgctattgagccgcgccgcagtgtaactgaggtgcctgatgtcctcgccgacgactacatggatgttattaccgccggcgcactgaatgacctgtacatgatgccaggtaaaccgtggtcggatccgaaccgggcgggctactttaatgcccagtttatcgagggctatcgccgcgcattccgtgacgctctggaaaattcaccgatcaccactttttataaccccatccgtaagcacgagttctactaa

SEQ ID NO: 434273 - DNA, 654 bp, Serratia marcescens
atgcaaaaggttgccgagattatcgggcgcgttaacacgcagctcgtggatgtcgcatggttgcgctggcccaaggcggagctccttgattattacaacgacgcgatccgcgccgtgattattgttcgtccggatgcaggagaaagctccgagctcctgacgtgtgtagaaggtactaaacagcaattgcctgtgggagctaatcgactattagatattactcgggtggcgggtggccgtgtgatccgtccggtacctcgcgaggctctggatacgcaattccctgattggcatttcagcacgggaacaatagaggggtactgctacgacgaacaaacgccccgaacttactatgtattccccggcactgcggcaggcgtgcagctcgacgccgtggtttctcgtattcccgtttcaatcacgctggcagcactggacgaagcgctggtgtctctggatgagctttacaccaacccgatcatcgaatggattttgtaccgctgttacagcaaggactcacaaaacggtgccaattcgcagttagcccaacagcattaccaggcatttaacgatcagctcggggttaaaacacaagccgaaatggccgtaggcaacaaaaaacgcgagcaatataacgggagcactcaagtatga

SEQ ID NO: 434274 - DNA, 2538 bp, Serratia marcescens
atgagcctactggtatccggcacattagttgacccggcaggtaagccgatcccgaaagccgacattgtgctcacgtcggtatcaacaagctttgtggttctgagtggcttctcaacacgccagccaacggacgacagtgcagcgtattcattcctgcttgagcctggcaattacgctgtcagcgtttcgaaagagggcgccaacttttattacggcgccattactatcaccaacaccacagtacccagttcgctcaaccaactgctgaagcagaacatcatggaggcggagatttcgccagaatatgttccctatttccagcagatccaaaaagaagtaaatgattcagaggccaggtcgaaagcgaatgctgacgcagcaggtcagtctgcagtggagctgaaacaaacagtcaaagaatttgcgtcggacgagcttgccaacagcgcgatcgctacgggatttattgccaacggtgagctcttctcaattcgtgtgggggacaacagttattggtcgttggaataccagaatcaaagcggagtagcgatccccaccggacaatgggtgccaaatggggctgcgatccagacgttagagcagtcactgtttgatatgaaactggcgatgatccaaatgcaacgccttacgtcatacatgcgccagtacacgtcgagccaataccattggtctgtcgagggggctggcggcccgtcagaaacggcactcgcgctagataatgattttggcctgtggcttgcaggattgccggctgcggtacaggagtatttggaatacatcgttcccaagtcactggcgaaccgttatcaaggcctgcagtacgccattgtggctaagaacggccgcgatggtttgttgaccataaatgacaacggcgatattcgcttggtaggcatggatgacatcctacaggatcggctggatgtgatttgttcaaccacgttctcgcgccgtgtcgtaggttttcagtttgtcattttcacctctgacatgaagacggcgatctttgcgattgatgatgacggaggggtgcacatccccggagtgaaaggtgcactgcaagataacctcggcgaatcgttagcaaaggtggcgcccttaaatggcgtacctgcagcgtggtggggggatcaggttgtctggtcagagcgcccggtacgcacagcgcagaagctaactgataaagcgatggtgttgagttataagccaggtggcgaagctagcgcgggtgatggagttatgtatatcccctcaattcgcgaaatgcctatcgacgcagcagaaatccatggtggtggttctaccggtcaatcgcttaataccccttttgacggtaacggtgcgaacatcgtaaaccgaaacccactgtatcgcgggcgcattctggcgggggccaacggtcgcccagaaggaggaggaatgaatccggtcagcgaaaccgatctcaccaacctcaatgatatgtggtatccagcatatcggcagggcaacgtcctgccgatgtataacaaactgctcgatgccaatcccggcaaccaggtgtttattcacgctccgtttgcagcaggcggccgttcattcgcccaaattagtaagggcaccataccatatcaaaacggtattgattttgtacgatttgcgaaagcggtagccgatggcgtgggcaagccctacgttttcaaatttctgactttagaacatggtgaaaccgataacgacaatggtgataatcccaacccgggtgattatctcgcaaagatggaccattattttgcgggcctgcaaattgactttaagggcatcactgcccaggaggaaaactttacagttgtaatcggtcaggtcggcagccgaattaacagcaaatcacaaccagttgatgagcaaggtaatccggtcggcccccctgtcattgtgcaaccatactcaatagccgccacagatcagctgacatatgttcgcaagaatcccgcgtcagcaattatgtatgggcccaaatatccgcttaattggaaacacagtgacgggacgttgagtcatttgaatgctgtcggtaaagtcctgcaaggcgtttatgccgcacaggcaacctactggcagttgtacgatccggtcaaaaagggaacgtggactgatacgcgtgtgcggtcaatttcgctcgatggggtaattctggatttagtctatgacttaccgtatccacctgttgtgattgatacaactagcatcgccgattgcccaggtaaaggtttttctctcgaaaacaaatcggcggaagtgatcgctgttgaaattgtcgagcaaaacaaactccggatcactttcgataaagcgccggcggcggatgactacttgctaatcggtttcaccaatacagcaccacattcaaatggcagcgtttatccacttgtttgtgttcgtgattcttcccctgtaaccgaaactatcaacaatgtcgtttatcccatttacaactgggcgagcctcgatcgcctgccgcttacaggagccttttga

SEQ ID NO: 434275 - DNA, 900 bp, Serratia marcescens
atgttagctactaatactgggaaagcttataacgggtttcgtcccgcattggacatgactaattcaatactggagccgaaggttctgtttaacgcttataaagcgcgtgttattgccgatggcggttacattcctgatgaagccgggtgccttgggcgtttcgatttcttgatgggtagtggtatgtacgagcatgcggtgacatgttccgtgcctgcttacggcctgaaggttgatgccaaaggggatgtgcaaactgtttacagcttaatcagtcaggctgccgatttaattgccgtacagcaaggtgctggcgatacgattaaatatgatgctgcgacacaatccgtctcggttcgcgtcacgtccgctggtggatggtacctgaagagccgggagaacttacggatccaaaagggccgcacatacatgattgctggacgtctcagcgattcctataacgcggataaccttggcctgacggtaggtatcagcttatcaaatttacccttggcttatctgcgtacaatgattaccaacgggcaagcgactaccgaatcatggcgttatggatcgcgcgacagtgcatggactggctccgctgctggtggagcagtgaatgcggcgaccatcacttatgctgattatgttccctctgccgccctgttccgtgtcgatcaaggtgtcatatctggatatacacgcggaaggttagagaaggaggggcaagccgttactggcaaattagccgaccttgtcagctttactgcgccgattattgtcggtgccgcgatggcgggtggaaccgtgggggcgtgcttcggcacaatgaaggacattatcttcctgcacactgcagaagaggcggatgctgttcaggcctcgcgcttgggcatgtga

SEQ ID NO: 434276 - DNA, 3999 bp, Serratia marcescens
ttggccgccggaaaagagctgtctctgacggcggtcaacgccatcgacgcctggcaaagtgagctgaaagggcaggacgtcacgctaaacgccaaaaacggtgagataaagatacattccagcgagaaacctcactacttccgccctgacggttcgcgttggttgggcagccttgaggcttcacgcgatctgtctctcacggctggcagtaccattacgttgctgaatacgctgctggcgccgcaaagtcgcaatatcgccatgacggctaacggcagcattgcaatcgtaaaaaacagcgcgttgttggaggggtcgctattgggggggccggtttctccggctaaacggcaggaatacttcaaccagctgttggccagtggccaaatgagggcaacgggttcggttctgctcaatagcggtggctatctggcgctccgcggcgccaagattaatgcggataaggacgttacgctgttagccgcccataacgccgatcttaactaccgtgaacttgacggtcgattcaatgcgcttttccctgtgtcccgcacgcctgaactgggcagccgggtacacgccggcggcaatttgctgattaactcggcccgcgacatcggcacccagggcggcgcgctctccgctaacggcaatatcacgctgctggccgggcagaatctatggttgtcgaacctggcctattccgccattgatgccgccaacgacaacaacaaagacgaccgccatgtggtcacagccctcagcgcgggtaaaaacctgaccgcgtcggcgaataaccaactgctgacttacggcgccaggctgacctccggcgccaacatgacgctgacctccggcggcgatatgcgtttcgaggcggtgcaaaatcacacttaccgcgagggcggcaacgagttcaccgaaactcgcactcagcagggcaccgagctgaatgccggcggcctgatgacggtgatttccggcggcagcattctgttccaggcgaccaaactggtggttaaaggattaggggcgaactggaaaccgtcggtggcggtgacggattggggaagccggatagcggcggcggagcaggcggttagaaatgcagagcaaaatgttaatcaaaaacagaatgtactgaacaacgttagaaatacgcctgaaggtttgttactcgataatcctgctcagcatcctatttcatacaagcacagtagttctgtaatgataccgggtacggggacttatcacctcgatatggggaatattgaaataaaaacccgttcagatctggatagattgcttaatgagggagggaaggcatttgacccattcccttatggtgtcgatcctgcggaaacatccggtgatggttatgagattgcgctggcaattcgaaaaaagacgatagatgaatatgaaaatttgcgtcaacgcataatcaaaaaaaagaatgagatacacgccgcccaacaagcgttgaattctgttgatagtgaaaaggtaaacgcaaataggaaattagttagcgtccaacaggaagcccaagctaaacatgcggaagaaacaaggctgaaagcccaggtcgatgcccacaaccaggcagaggccatgcgtgtcggcaatatggatatcgccgccaagggcggctatctctacgcccaggcaatggaagagtccagccattacgagaaaaaggaaaccaagcgcaaatggtggggcaagaaaaccgaggttaagcagacccgccatgacgtgaccaacaaggttaccgagtttaccgccgccggcaatatcacgctgatgagccgcgacgacagcacctatgaagccagtaaaatcgccgccgggcaaaacgcgcgcctgaccagttcccgtggccaggttaacttccgcgcggtgaaaaacacctctttcgaacagaccgtcagcaattcgaaaggcttctttatcaagcaggccaataaagggtacgaagacaataagtgggtgctgccgagcattcataccggtggcgccttgaccgtagaggccgccaagggcgtcagcgccgatgtgaaggtgaaaaacgggcaggcgctgcaaagcgccatcgacgccctgggcaatacgccgggcaccacctgggtcaaagatctgaacaagcgcaacgacgtgcagtggagcaaggtcaaagacgcttacgacagctgggattacaagagccagcacctgaacccggcggtggcggcggtgatcgccatcgcggccgcggcggtgaccgcaggcagttcactggcggccacggcggcctccagcgtttccggcgccgtgggcggcggggcggtaaccagcggtgcggtcaccgccgggatgtcttcgctggcctcccaggcggcggtggcgttggtggagaaccagggcaacctgtcgaaaaccctgcaggcgctgggtagcaatgagaacgtcaaggcgaccgccacggcgatggcgatcggtggcgcgctcaacggtttcgacagcgcgatgggctggagcaaggacgcggcgggcaaaccgctcaatccaaacaacgtcaaactgccgcagctgagcaacggcgactggagcaaggtggcgcagcgggtggccgggcaatcggtcatcagctccagcctgaataccgccatcaacggcggcagcttcaaggacaacctgaccaatgcgctgctggcgaacatcggcagccaggttcaggccgagggcgccaatctgatcggggataacggtcaggttctcaatataccgggccgtgccgtaagccatgccgttctggcgggcgtggccgcagaaatcggcaagggcaatgccaaaggcgcagcggcaggggcgctggcggcggagctggccggggtgatcatcaatgataatttggtcagaagtgaaggctggcaagagcgtcaggctcaaatcagccgcgtagcgggcgcctttgcaggggccatcgtaaccgccaaagcagcaggtgccaccagcggtgcaaatgcgggtgagtttgtcgagcgttttaatcgacagttgcatcaggaagaactcaacgccattaaagcgttggctaagggtgacaaggaaaaagaagcgcgtctgatggcggcttcatgccgaaaagtagcttgcaccacgcaagaggcgttgaactcagacgaacgcaagcagtttgaagccctgatgaataagtacccgtcaacgcgggatgaagacggcctcattgccaattactgggtacaaaaagagcgccagcgcttcggcaactatccggcgtttgccggctatgacagcgaacagttattcacgtatgatttgggcgaccagataaccgacggccagctgtttgcacgcaaccagcagatagaacaaatcagcaagttgaccgggtggtcgccggactgggtgaatgcctcggtgatggcggtctctattgccagcacgtttgccggtatgggtaaagcgaacgtcggcaaccagtacctgtcatccaaactggtagggccaaccagcgcctggaaagggtatctggtcaatgagaagaccgttcaacaggctgctgcgtttaggcagcaggtattggatgctagggcgccgttttctcaaaatatcaggaagatggggaatgccgcagttgcacaaatcgatatcccaggcatgccgaaaactcttgcggcacatagccgtatagacaaggctgaaaaaagttttgttgggaaaggtgggggaaacttcacatatgaaacgatcaagaatagtgacggtaacccaatccccagaaacctggattctgaatataaaattttggataatctggctgataaattgggggcgaacattaccgctaagggaaaggttaccatttttactgagcgtgtagcttgcgacagttgccttggtgtcgtggaacagtttcagaaaaaatacccaggagtcaaggtggaagtgatcgataacaataatatactgctgatacctcggaggttgaaatga

SEQ ID NO: 434277 - DNA, 381 bp, Serratia marcescens
atggcgtcatccaatgcaatgaatattctcgactttgttgaggcgggcgaaggaaataatttaactaacgcatttcttcgccttgccaagaaaattaatgagaatcctaacccggtctgggaatccctcggcggtaaggtcatcgtgcctgccggtacctacagcatcactaagcagatcgtttttttaaagccaggggtacacatcgttggggaggggattcagtcaacgaagttactcctcacggctgacctgggggagctgggggccgttttcaaatttgactctgatattgcggggtactctaccgttggcgtgtgcatcaaagatatctcgatcaatatggccagggctttgttgaataaatcagatttcgggtaa

SEQ ID NO: 434278 - DNA, 531 bp, Serratia marcescens
atgaatggcgaagctggagtaatcctttgtgctcgtgagttcatgaactcactggaagagtcgagcatgcaggaggttaagcaggcgatcctgtcagtgccatggctagcagccaatttcgatattggtgaaaagtacatccgaaccatcgataagagcgtgaattatgtgttctgtggtctgcggcataacctcgacagcatcaagtcgaaggcgcgtattttgctttgctgggttgatgaggctgaatcggtcagcgaaatagcctggcagaagctgagacctacagttcgtgaggaaggctcggaaatttgggtgacgtggaacccagagcgcgacggtagcgccactgacaagcgtttccgcaaagatgttggcgatgactgcattaccgttgagatgaactacacggataatccctggttccccgatgtgctggaaggtgagcggctgaacgatgaacgccgtcttgactcggcaacatacgcctgggtgtggaaaggggcctacctcgaaaactccgataagtag

SEQ ID NO: 434279 - DNA, 207 bp, Serratia marcescens
atgatgaagaagatgctttctgttgcaatcatggcggccgcggtcgctgcgccggtggcttttgctgaagacaattccgccggtggcgtgattaactttaccggcgccattaccgacaccacctgtacgattaacggcggcaagagcgcggatttcaccgtagcactgagccctgagagatcccctcataatttccccaaagcgtaa

SEQ ID NO: 434280 - DNA, 1095 bp, Serratia marcescens
  misc_feature (1080)..(1089): n is a, c, g, or t
atggataatgaacagcagtttttctgggtgaatcataataaagagcgccatgttatagaaacccgtgacggtgtcctcattgcagggattggtggtgattcaaagcttggatatcgagagatgttaggtcaagctagaaaaggcgacatagtgttcgcatgttttgaccaaaaaataaccaacatcggagtggtaaagtcaaaagaagcaaaaattattgaatggaaaggtagtgaacattttgaagtaaaggtgaaatttgagccgctaaagaaagtggttaatattaaagaacatgtgaaacacctggttgcaataaaacgagattatttatcacctataaacaaaaatggagtgcctcagcaaggagcatatatatcgaaaattgattttgatatggcttcatttttaatgtcaaaagccaatgtatattttgatggcaatggctttgtagaaattaataaaggacccagtggtagaatccataatgttaaaaaaatgttgagtgaacttagtgctcgcgctattaaagatgcaattagagactatagccagtatgaaccatggcgttactgctatcggcattcgacaacttacgatttagtttatgatgggaatcgttattcgcccaaattcatatttggtattgctgcgaaaactataataaatagacttttaatttcagatgagttttctggcggtgaggatagcgagtgttttgaaattttaacctccaacggattttatattgagcctaaatcgagaggtaatttaaaaccaatattactaagtaagtacgatcgcgaggggatttgtcagttatttgaaccaggaacgaagtttactgtaggttctggacgatgggggatatccgggataatcaagcttaaaaatgaaactgacgatctagtattcattgttacaattgaaaagccgcatgcgggtaacccatatgaggacgcacttaccgacgacggtcagttgcattgggaaacacagaaaaaaatgagtgcggatagtgattttgttcaaaggctaaaagcacatgatcacaatgtaagcaatatacatctttttttnnnnnnnnnnttttaa

SEQ ID NO: 434281 - DNA, 1503 bp, Serratia marcescens
atgtctgacggtcgctctaatcgcaaggctaaggttgtccctttcgtcgatcgtcttgagcgtgacaggaataaaaacctcaaatctttagtcagcaaagcaaagctaatgaaactagaagggtttgagtcggttgtttgggatgaccccgagtggcaagtcgatgcaggtcgcctggtcaagttaactggtagaaacacgaaatcagcctcatttggtttttcgctatctccgaagctcggctctgagccactagatggttgctgggaggtggttgccaaggcgctattcgctctcaggttccacagaaagcatcaatcaacacccaatcagcgcaatttcattactgctattggatatgtttcatttgctgcgaaacagatcggtcaagagctggccagactgacgcctgagtcgctggataatgcgtgcacgctaatttcgatacattacagcgatacaaccgcctataacctccacaagcatgttgcagagttcgctgcgcactgtgatgccaatggtttatgcagggttttattacagtacaaatacgccaagatgaagcgcccagctagcacgggagggataaatcataaaagattggatgatccagatgttttagagacgaaatcgggaaaacttgtcgctcctgctgtctttcaagtcattggtgtactttacttaaaagttcccaaagctcacaagtatcgattctatattctgatgttgaccctacttgcttgtacaggacgacgattcagtgaggtttcactattacccaatcagcaattgtcatttgatgatgaaggtaattgctatatcgaatacttcccgcgaaaagcaagccgtggtgacgtttttacaccaaaacgtaggctttacttaccgtcagaagtgacccccatagtaggtgatgtgcttgttgagttagcggaaattacatttgaagcgcgttcaatagcggaagaaatgcacaaagttggtgggcctgaccttaggtttttggacaccataccggaagataaaaagttatatgcggctgatttaactgaattagggataagtcataccgcattgggcacaaccggttggctcagaaaacaaaaactcgcatggccagagtatagcgctttaactaagcatgtaattaagcctgcaaaccctagtttttacactgacaaaactggattggttaagtactgtttccgtgatttctcgggagcatatctatcggctctccatacggaccaatttggtaaagaatactacctaaaagatcttttattcattcgtcctcttggactttccagcggaagctacgctcattggctggccattagttgtagccagtccatgtttggtaccttcctccgttatttcccgcaacttaccgccgaatacgcatctagtagtatcgtggtagacttcaccagtcaccacttccgccacacgcttaataccctgcttgatgaaggcgggttaagtgacctgaggctttgttga

SEQ ID NO: 434282 - DNA, 1584 bp, Serratia marcescens
gtgaacataaaatcatcgaaaatacaggttgtcgggcaattttggcctgagatagaggtactgattactcgtgaaggaaagggagttgatatatctgatgatatttggaggttgccgtattcaacgcgggataattcaaccctgaatttcacaaagattattaactccgaaatcagagaatcgttcaaaggtcatgttgccgaccgacttaaacgaatatcgacccatgcgggctatgcagtatatcaggatatctggagagaggtgctgagacattggggtaacccagcacctcaagttgatacagagtcgcacctaatagatctgtttgaaatcgctatcaatcgtgctcgttcacaaaaaaggttatgggcaatgtacaggcccatacaatggtacatctggagcgcggacaacaatccagaatatggcttttcggaaatttatgcacaagaactcgaggtcctagagctaccagggaacccgaaaggtgaagctgttcggatggaagatcccgaaggtggtcctcttaacaagtctcttgagctacctctcttaatcaatgctcttaaatcggatgagggacgatcattagagcatttgcatcagagggttgtggttgccctttccatagcatttggtcgtaacccggctaacctaacatttctacgtgagtctgattttgaaaggctggctcctggaggtgaggacccgtgttacatcattcgcatgccgagaattaaaaagcgatttgtgaatccaagagacgatcttttggatgaatatctcgatccacattttggcgcaatgatcgagcagttgattgaaattagtaagtcggtgccgttgagctttgcagatagggcctttgttaatccggaagagcgaccattgctaattaacaggaatggaaataaagcagccattttatccaaagatcttgataatgcatttaatctgacaagcagcgatatatcacgtttactcagtgcattcgtaaaacgccacaatattatctcacctctcactggtgaattaatgcgcgttactccaaggcggctgcgctacaccttggcaacaggcttggctgccgaaggaatcagtaagcgtgagctggccagaatactagatcatactgatacccagcacgtgaatgtctattttgagatggcaggaagaatagttcaacaccttgacaaggcgacagcgaaaggattctcgacgtacctcaattttttcagaggcagactaatcaatagtgatgaaaatgctgtcaatggtgagcgagatgacaagcatctaacgtttttcgatgagcaaaacccaactgatcaggttggtattggtgtgtgtggtgaatccagtgtttgccaccttgatccaccttactcatgttatttatgtccaaaatttcagccttatcggcacgctaaccatgaacagatactggaatgcttggtggccggtcgtgaagagcgtttgaaaaagtacgagaatgcgcgattgggcatacagcttgatgaggtgatcgcagcggttgcgcaagtagccaaactctgtgaggaagggggggacaatgtctga

SEQ ID NO: 434283 - DNA, 234 bp, Serratia marcescens
atggcattctataaagacaagaaatcggtaaacgagacggacaacccagaacagtacgagaaagagcgttcaataggctcagtccctggagggcctggcatctataagtgtcaaaaatgtggttatgaggacgtgatcaaccgcgaatgtgttaagttacctccttgttctaattgcaaaaagaaaggcagtagcaatacttggaagttcctcgtcaaggcaacagataagtaa

SEQ ID NO: 434284 - DNA, 213 bp, Serratia marcescens
atggcgactgtaaaaagattgcagatagatatatctgaacaatcctttgaaaggttgaaaagacttaaagagagttccgattcttcatcatatgccgatgtgacaaacaaggcatatagagtctacgagttttttgttgatgcacttcaacaaggaaaagagatcaagctgatagacaagaacggtaacgaaacaaaagttgagtttttataa

SEQ ID NO: 434285 - DNA, 216 bp, Serratia marcescens
atggaaaaacagcccgcctggctgtggccttttcccgcttttctgcatgccactcacaccttcatccttccctttttgtccccaccgctcgccgcagtgttgactagcgcagtctgtcaacgcgaggaagcggaagtgcatctgcagctgatgtgtcgcacggtcattgtggggcttttgttgacgatgcaagataggccacgtgttcacgtttga

SEQ ID NO: 434286 - DNA, 438 bp, Serratia marcescens
atgctccgtgaggacatcaaaagaggcatggtcggtggggcgctggctgagcaaatcaaagtgacccctattgagttacaggatgccattctgaaagcgcgaattcaggctgtgcatgatgtggggacgggcatctgtatccacaacttctctcaaacaccatgcgagcgccatttgcaatgttcggctgattgtaaagactatatatggaccaaaaacgataaaggacgcttggacgagcagaagcgacaatatgcgcttaccatgctggcacgacaaaatgctgaaaagcagttgagcagcgacaagcccaaaaagagtgctgattggttggcccataacgacaaaaaacttaaaacgctggctgcacaattagccgataacggggtggaacactttgatcctgaacaatacttgaatggagtagagcatgattaa

SEQ ID NO: 434287 - DNA, 225 bp, Serratia marcescens
atggagctagttcgcttaaaagcggagttggacatctataaacttaaggaggaaaagtggttgcgcaaatggcagcagatcgcttttcatgttcgtcagaagggtttacaaatgtccagcattgataaagcattaccagatgatgcagagttgccttctgaaacagaagcaactcaaattttgagaccatttgatcagaaaatcccgccttctggtagagtctag

SEQ ID NO: 434288 - DNA, 891 bp, Serratia marcescens
atgaggggatctctcagcgccaagcgcctgtcgccattcaccatcccctctttcctggtcaatctggcggccggtcacgtttccatcaagcatcacttcaaaggcccgattggcgcaccggtcaccgcctgtgcggccggcgtgcaggccattggcgacgcggtgcgtatgatccgcaatgatgaggccgatatcgccctgtgcggcggtaccgaagccgctatcgacaccgttagcctgggcggattcgccgccgcgcgcgccatgtccactgcaccggccgagttggcgcgacaggcctcccggcctttcgacagcgcccgggacggttttgtcatgggggaaggcgccggcatgctggtgattgaaacgctggagcatgcgcgggcgcgcggcgctacgccgctcgcggaaatcgtcggctatggcaccagcgccgacgcctaccacatgacctccggcgctgaagacggcaacggcgcctatcgggcgatgaaaatcgcgttgaagcaggcgaatatcgccccggaagaggttcagcatttaaacgcgcacgcgacttcgacacccgtaggcgatttaggcgaaatcaatgccatcaagcacctgtttggcactgccgggactgtcgccgtgacctcgacgaaatcagcgaccgggcacctgctcggcgccgccggcgggctggaaaccatctttaccgccctggctctgcgcgatcagatagctcctgcaacgctgaatctggacaatcccgatccggcggcggcaggcttgcatctggtcgcgaaacgggctgaatcgatggacatgacctacgccttatcaaacggcttcggctttggcggcgtgaatgcgagtattttactgaaacgctggcaggacgaataa

SEQ ID NO: 434289 - DNA, 1209 bp, Serratia marcescens; identical to SEQ ID NO: 139615

SEQ ID NO: 434290 - DNA, 141 bp, Serratia marcescens; identical to SEQ ID NO: 36145

SEQ ID NO: 434291 - DNA, 171 bp, Serratia marcescens
atgattatcttttattattgtaccaattgcttgtcttggccaggcaaactgaaaaccactacagagatggagcacatctttttgcctataattaagattacgccaaagttcggaatagtaagttattatatttccatcagtgcaggatggaagtttctcaatttgccatga

SEQ ID NO: 434292 - DNA, 129 bp, Serratia marcescens
atgcagcgcctcgaccaggtgttgcgtgagctgcaaccggtgctgcgcaccctgaatgagaagagcaacgcgctggtgtttgaagccgccggcagcactgaccctcagccgaagaaggccacgaaatga

SEQ ID NO: 434293 - DNA, 234 bp, Serratia marcescens
atgaaagtcgaattagtaatccagaaaaacaaagagttaccagctggcgctgttgcggcgattgaacaggaattccagaaacgactgctgaaatcataccccgattgccgcgtcgccgtacggctcggcgcccaggataatctgtcggtgatcggggctgaaaagggcgccaaagagcgtgtagagaacatcctgcaggagacatgggaaagcgcggacgactggttttattga

SEQ ID NO: 434294 - DNA, 150 bp, Serratia marcescens
atgaccaacatcgcacgcaggccgcgcttggtgcgcggggtagaaatcacaacagaacaggacatgtggcagcagagcaaacattatcgctttcgctcaggcatgtactacgggcggatcagatatgcggagttgcgtgatgaaaagtga

SEQ ID NO: 434295 - DNA, 1977 bp, Serratia marcescens
atgagagaaatcatcgttgataatttcgccggcggcggtggtgcgagcacgggaatcgaaatggctaccggccgcagcgttgatatagcgatcaatcacgacgagaacgcgatcgctatgcacaccacgaatcatcccaacacgttgcactactgcgaatcggtatttgatatcgaccccgtggcagcgacggcagggcgccctgtcggattggtttggttcagtccagattgccgccatttcagcaaagcaaagggaggcactccagtgaaaaaggagatccgcggtctggcctggatcgtaatccgctgggctctgcgcaccaacttccgctgcggcatgttggagaacgttgaggagtttaaaacgtgggggccgttaaatatcgacgcgcaggggaacggattcccatgcccggcgcgcaagggtgaaacgttcaaggcctttgttgccatgttgtccaccggcattgtggaggatcaccctgcgttagacgagtgctgtgatgtgcttggcatcgctgctgatagcgacgatcggcgtcgcctggtggcggggttagggtacaacgtcgatcatcgcgaactgcgagcaaatctgattggcgcgccgaccatcagaaaacgctttttcatggtgatccgccgtgatggccagcctatccgctggccggcgcaaacgcacgatcactggaaatcagccgcggtgcgtaatggtaaaatgcaagcagagccaaccatggctgaatgcattgactggtcgatcgcgacccggagtattttcggccgtaaaaaagacctggccggtaatacgttgcgccgcatcgtgaaaggtatccaacgctatgtattggactgtcccgatccattcatcgtgcagattggccagacaggttttgggggagatggacgccaatatgagatccgagcaccactaactacggtgacaagcaaggcagagcatctgctgattgagccgtttggcgtgaagtgtaaccacacctccagcaaaaccaaatacgattgcttccggggccagtccggcaggctgccgctgcagacggttacccaaacccacgggttcgcagtcgcggcaccggtggtggtgaagcaattcgggaaaagcacggcgcagagcgctgatgcgccagcgggcacggttatgcctggtggtggtggaaaaatgcagttggctagtgccgtgctggttggcgccggcggcccgacctattccggcaagccgcgaagcgtctacgcgccagcaccaaccattcctaccgagtcgcacgcggcgctggctgccgtcaacttgataaagcattacggcggcaattacaccggcgcaggcctgggcatggatgagccagcacacacaatcacacaggtcgaccaccacgcgctttgcacctcgcacctggtgcagctgcgcggtacgtgcaaggacgggcggccgacgaattcgccagcgccaaccctgaccgctggcggcaatcacgtaggtcatgttcaggcgttcataacgaaatactacggcacagcgtcagctgtcggcttggatggcccgaccccagctgttacgaccaaagatcgcctgggactgactgaagttcagtgcgagacctcaacgctgactgaggatcagcgctacggcgcctggtggtgtgcacgcctgatggagaagttcagcgatgctcccgacgatagccacctgtttccggcgccgcggccacaatatcttcgcgttggtgaatacgtcattgtcgatatctgcatgcgcatgctgcagccgccggagctttaccgtgcgcaggggttcccgtcctggtacatcatcgaccgtgattatcgcgggaaaaaatactccaaagcacagcaaacggcgcgttgtggcaattcagtgccgccgcttttcgcaaagttgttggttgaggtcaatttacctgaaatgtgcacagccaaagaggatatcgcggcatga

SEQ ID NO: 434296 - DNA, 399 bp, Serratia marcescens
atgaccaatagagtaaccgaaaagcacagagtaaccgcaaagcaactcgtggatatcatcctcggcaaagaaatgagcaccactgaaatctgggaagcggtcaaagcctcgcacccggcaaacacgatgacgcggcaggagctggcgctcaggctgaggtcgatgatcagatcgccagacgtaaaaatcacaaagaagggctgcgggccgagggcgctctacaaactgacaagcgtgtccgacaaatttgttgagcgcgccgaggtgaattatcgcgccaatccccgtaccggcacgccggataaaacgctgtggcacttccaccccaaagaactgcagttctgcaacgtccacaagatgtttgatcaggcgctggccaacctgcgcgggagggcatag

SEQ ID NO: 434297 - DNA, 741 bp, Serratia marcescens
atgaaaacaccagagtcactgatcagcaggctgcagcgcatcatgccgccgggcgtcaagccgaagttcagcaccgctgaagagttgctcgcctggcatcgtaccgaaggggaaaaacgcagtgccgagctggataaagcgaaccaacgcacccgcgcagaaaggattttcggacgctcggggatctgcgacttgcaccgcaactgcacgttcgcgaattaccaggtgaacaacgacgggcagcgccacgccctgagcaaggccaaaagctatgcgcaaaatttcggtatggggttcggctgcttcgtgttcagcggcggctgcggtaccggcaaaaaccatttggcggcagctatcggcaaccacctactggcgaaaaataacacggtactggtggtcactattccagatctgatgcttcgcgttcgacgctgttacgacggcggagagtccgaggcttcgttgctcgacgacttgtgcaaggtcgatctgctcgttctcgacgaagtgggcgtacagcgtgaaacgcggggtgagtgggtgattttgaatcaggttatcgatcgccggttgtcgtcgctaaaaccggtgggagttttaaccaatttgaatgcgaaggaattaaccgatgttttaggcgcaagagtcatggacagattaacgatggatggcgggatctgggtggacttcacctggggaagctatcgaaaaaatgtaagccacctgcgggtgattaagtaa

SEQ ID NO: 434298 - DNA, 891 bp, Serratia marcescens
atggctaattcatggttgcggctttggcacgacatgccaaacgacccgaaatggcgaacgatagccagaaaatcgaagcaggggatcggcgatgttatcgctgtgtacctgcacgttcttgttaacgcatcaagtgccagtgaaacgactggtaacgcaggtgtaacgcaaggaagcgcaaccgaacgcgggaggataaaaaatctgtgcgctgacgacatcgccagctctttggatctcgacattgagcaggtagagcaaattcttgcagcaatgcaggggaaagttcttgacggtgattttgttaccggatgggcaaagcgacaacccaaacgggaagacgactccgccgcgcgggtaaaggcttttcgcgagaagaagcgggcagagaaagcagcggcagaagggaaagaaagcagcaaagaaacgaccggtaacgcaggtgtaacgcagggtaacgcaccagataaagatacagatacagatctaaaagataaaaccccacacataaaacgcgcgggcgcgattgcttcgccgacgggggaatcggcaccgccggagttcgtggatgaatcctggcctgatgatcctgctttgaagtttccgatgactgccggctggcagccgtcgtcggatttccgtcagcgtgccgcattgtggggaaaggctctaagcggtcctgagcttgggtacacacctgccgaactggcgagcttcgttgcctactggcagccagagggaaaggcgttccatcaggcacagtgggaactgaaatttgctgaccatctgagaaaacagccagccgcggcgccggcaggcggcggaagccggaggcggggcagtttcgaaccgtcgggcaactacgacgaaaaaccggcgggattttcctga

SEQ ID NO: 434299 - DNA, 243 bp, Serratia marcescens
atggccaatttttcaagagcacagatcgaaacacagatccgcgcccaactggtgcgcgagggaattcccgacgacgtggcgcgctcggctgccggccgtggcgccgatcattacctgtccagcccgaacgtgacgatcgccagcagtatcgctatcgcaaagacgtacgcaaagccgctaaagcgggtaaagggcaagccggatcgccctcatgtacctgggcgccgtatggggcgtcggtga

SEQ ID NO: 434300 - DNA, 462 bp, Serratia marcescens
atggaaatcaaacacgagcagatccgcgaagcgctgcgcgggtgggccatcgaaacaacccagcgcattgtagccgccgagatcacccgcgcttattttgacctgcatttacaggcgccactactggcgcagatcgaacatgccgacggcagcgttgacgatgcagcatggcacaacaacaaacagcagatctttcgctggctggatggcgatagtgtggccgcgcgccgaaagattcaacagctgcaaccggcgatcctcgctgcgctgccagcagaactgcgcgcccgactgattgccggaaacagcattgaatatcttgcaattcgcgcgctgaaagaacaccaaggggcgatcgccgcggcgctgttgaacgcgttgccgaccgactttgaacgggaatgcgacaaagctgagcgaagcctcaacgagttacggcgcgcctattcaaccctgcattaa

SEQ ID NO: 434301 - DNA, 306 bp, Serratia marcescens
atgatcaaatcaatcgaaatcaaattaaacctgctgcacaaaaccgtagtggaaattatgactaacggcgaaaccatcggttatatcgtcaataccgataataaagaaaaaccgcactctctcgtgaattcaaaaggtgccaacgtaggtgattatgattgccctaaatgtgccattgatgccgcagcacgccttcatcttggcgtgagtgatgatgtgccttctgagttcgaaataaaggggcgtccatctcctaaaaagctgctgttgcttgccctgctggccatgctcgcaagcgatgattga

SEQ ID NO: 434302 - DNA, 228 bp, Serratia marcescens
atggaaaagttattttcccctgtcgcggcacgaaaggcacaggtggaatattgcaacaataaacacgttccacatttcgcgccatacgatgggatttgttttcgttgcaaaaaggatatttaccagcaacacggattgcgtgggtatgaaaccggtatttcgctggacgaagcaaaaaacacccatgttatttactgcccacactgcaaccgcagttattgcgattag

SEQ ID NO: 434303 - DNA, 1050 bp, Serratia marcescens
atggctgctctgatggcccgtaacctgatgatgatctatctacaacatcaggatgaggagttggaaagcatccgttcgcgactgtacgcctgccggactcaactccagaaagcacagctcgttggctgtgttcccgtggcattgcccgcagtggcaaccaccacccaacccgatgccacagaaaagaaagcgacagcgccgaagcgaaaacgtaaacgtaaacgcctaaccctatcaacggtgctcgaagaatacttgaaatgtcagaaggcagaatggcgaggtaaaacttactctgcgaatgaggccaaatgtcgctacttcatcagccttgttggggacaggctgatcaccgatatcagtaaatcggatgtgtcggacttcaagcagcatttggttgatagagggtttagcccaaacacctgcaatgactatttcatcaaagcatctggccttttcacttttgctgcgactcagcgcgagtaccttacacgctccccattcgacggtatgggattcaaacgggtaaccaacctgaagccaaggagaggtataaagaaagatgagcaccagcaggctgttaaaggcttccctgagcgatcgcaaaattggtggctactacagctgctctactacaccggctgtaggatcagtgaaattacaccgttaaccacaaaggactatcgtcagatcgatggcgtttggtgcatatacataaatgatgatggagtgagaaccatcaagaacgaagcatcgcggcgaaacatccctatccaccatgagctgatagcgttgggagttttagaggataaacctaccttctcatatacccctgaccgggcatctcaattggttagctctatctataccggcttaaacgtcaccgcacacagttatcgttacggaatgagtgaccgcctgcgtaaggtagaagcttcggactatgttaggttcgccctacttgggcatgctcacaaagcaactactgatcgtgtgtatcgctcggatggcgctttggaacgcttaagagaagctatagatagaacatag

SEQ ID NO: 434304 - DNA, 522 bp, Serratia marcescens
atggatacgcaaggatttattaatgctttagggccgattggtgggggcatcatcggggcagcaatcactggcatcgtcgctactatcgtagccttctataacaacagtgtcagtagaacaaaatcacaaaatgagtggcgtcgagataaagttctaagtctaatcttggagtttcaagatgagatgcgcaagattgacgctgtactttttgaatatgcttatagtctaatttctagcgacatcgagaccaaagagaatgctctatttgctatacaaatggagtcatatagaaaacaatgctataaacaaattcgagtcatagaacagaagctagaattgttaatttcagctgagttcagaagtacatttaaaatacaatgcgctcagtttataaaaaccgatgctaatctctatgctgaaattatcatggggggttttaccaacccagaccacgttgaatctttgcctgaaagacataatttccaacctttattcttagatattcttgacaacttacgataa

SEQ ID NO: 434305 - DNA, 279 bp, Serratia marcescens
atgctgttagcaagttatacatataagatagccaatgaagagcttacagaatctgtagagtacagagatgaaggcgacatccacaacgacattcttatagctctctacgaaaagtacgtggattcgccagcggccattgctgggaaaagaagctttaaagagggttattcttttttcgctcaagcgttacttgataatgggattgataacaacattgaggtaacttttggaaacatgtcagaaatttctagctcattaaaattaaaatcttttctttga

SEQ ID NO: 434306 - DNA, 366 bp, Serratia marcescens
atgtatttaatggggttgctgctcgatcatgtaggttggatagagtacgacgataataaaactatttttcaagatcaatacggtacgtgttggctaagagatgatggggaggtttacagttccggtgagacttttagctatgcaggcacccacaaagaggtggaggctacaaagctcttcacccttccgattgctgatgattaccggacaactcatatcaattgtaagcagtatcgattagcctatacagaggtttttctggcaaaggcccgaacatcaagtaaggtgctgaaatggacaattttcctatgtgctgtatcttttattgcgggcatgttcgccagagacattctgaagggtttttaa

SEQ ID NO: 434307 - DNA, 840 bp, Serratia marcescens
atgagcgcagccctgaacaataaggccgacacgttcaagttttggggtgatttgactggcaatgtgatcgagggagccacagacgccttcgcatacctctacgacacgatcgtatttgttgcccgtgttggtggtcattaccttgaaagtatgggcgtctcattcgaaggcttggagggctggggatcgatggcggcttatgcattgggcgtaacagcgtttgctagcagcatttggaagttggggggggctttgaagtggatcatcggcttcctgaacccacttaccaagctgttgggagttatgcaaggcatcgcagccctaggcggcattgaggcagcaacctccggcggtgtatcaggcaaacagcctaaaggcactccaaccaagcaaccggacaagctcggcaagctgggcaaaggagccttggcggtaggcggtggcatggttggcgcagcagctatgaacccatacacctacccggcattgctcggcggttacgcggtagtctcaactgacaacgccaccagagaggcggacggtctgggcattctggattctatctcccaacgctggaaggctggaggatgggccaacaacgcacagaacaaggcagcagaggcggcacttaagccaactgtggatatgagttccgtgtactccggatcggcaatgattaataattaccgctacccggtatcagcaccacctcagacgcataagcttgaagtcacttccaccgttaaagtgcaagatggggcagtgcgtggactcatcaagcaagagattgaagagaacgacggtcattcaatcaacatgcagatccaaggcggtcactaa

SEQ ID NO: 434308 - DNA, 1086 bp, Serratia marcescens
atgaaagcgctgcgtccgttagcctatcggcgcgacgacggcggcctgcatcgcgcgctgatgcaggccgcccagcattatctggcggccaacggcgatcaccgcttcgccgacggcggcatgctggcaaaggtggcgctgctgctggcgctgtgcggcctgtgttacgggctgagcctgcagcagcaaaacggctgggcgtttttcgcttgctacttcggttttatctttatcggcatgttcctgacggtgaacgtggtgcacgatgcctcgcataacgcgtttttccgtcggccctgggccaaccgctggctgaacgccctggtgagcgtcccgttggggctggatcccgactgttggcgcgtgcggcacgtgctgttccaccatgcccataacaatatcgaacattacgaccccgacatcgacgccaacggcgtgctgcggcaaacgccgttccagcgctggcgaccctttatgcgcgcccagcgttactattggccgctggtggcggcgctgacgttcccgtactacatctggctgttcgactggctggatcgggcgggacgcacccgggtggcggcgcgcatggcacagcagggcgtgcgcggctggtgcgagtttctggcgggcaaggcggcgcacctgctgctggcgctggcgatcccgtgctggctgctgccgccggccatcggcatcgggcaaattctgctggtctatttgctgagccagatgctttcttcattgctgttcgtgatgttgatcatcggcacccactgggccaaggccaatttttaccaggcgccggcgcagggcgcgatgccgcacggctggtatcaccatgtgttcgccaccaccttcgactggctgacccggccgcgttggctgggatactggctcggcggggcgaacctgcatttgacgcatcatctgttcccgcactggagccaccgccattacccggcgctgagccgcatcatcggcgaggtagcgccgcgtttcggcatcgactaccgcctgctggagttggaggagctgttgcgcctgcagcagcgcttcctcagcgcgatggggcgcaaaccgcattag

SEQ ID NO: 434309 - DNA, 297 bp, Serratia marcescens
gtggcccgctttttcatttctcgcgccgcgcaacagccgcacggttggtaccggcacaatttcgccaccgcctgcgactggcagcccgagccgcgctggctggagcacctgaccggcgggctgaactatcacctgacccaccacctgtttcccggctggaatcaccgccactatccggcgctggccgccgcgctggcggaagtggcgcagcggcacggcatggcatatcgctgcatcggctatcgcgaactgctggcgcagcaacagcgcttcttgcgccttatggggcagccatga

SEQ ID NO: 434310 - DNA, 1074 bp, Serratia marcescens
atgccatttaatgtgccgaccttgcgccagttaattaaaaccggcgaacaagatattgaaattgaactggatgaaaagttgccgcccgttggtgttgagcgcgcactcaatacctcattcagtggtgctgttcgcgacgtctatgactatcagtcctggatcgccgatcaggtagtaccgtcaccaaaatctgatgaccagacaattatcgataccgccagcaccgaaggtgtcatccgtaaagctgcgacctatgccgtcggtaatgccattttcaagggtacccaacccatcccgctcaacaccgagatgcaggcgagaaatggcaacggttaccacgtcatcaccgcgagtgcgccggtgaatggcgtgcagaacatcactatccaggctgacgacgtcggcgcgtccggcaaccttgatgccgacgcccagctaacgctggtttcccccattcccggcgtcgagagcacgggtgtggtggatggctacggccttaccggcggcaccgatattgaacccatcagcgagttgcttgatcggctgctgttccgcaagcgcaacccaccggtgggcggtgccgtccatgattacgtcatatgggcgcgtgaaatggcgggagtaagccgtgcctgggcctgggatgcctggcacgggccgggaactgttggccttgcctgggtttacgacagccgcacggatatcaccccgaccgccgccgacagggccgcgatgaatgagtatttgttccgccacgccgacccggcgaccgggaattttgttggtaagccaggcggcattgaggtgtggatcatatcgctgacgctcaagccgattggcccggccattaagctggtgcccgactcagcggagacacgccgcgccacgctggccaacctcaacgcactgcaacggacattgtcaccaggttcgacgttgctgctgtccagcctgcgcacagccatcggtacggctaccggcgtgacggattacaccctgaatatcaacagcgatatcaccagcgcgagcggtgagctgatcaccatcggggacgtcacatggctcacagcgtaa

SEQ ID NO: 434311 - DNA, 450 bp, Serratia marcescens
atgaccgtcaaaataaattggcaccacccccaaggcggtgatatcgaagtaaccaacaatggcctttcgtctgacgagggccttgttactttagtgctgatttgtcttttcaccgacgcccgcgccaaagaaagcgacgttatccctgatgggactgatgaccgtcgcggatggccgggtgattccttcagcgatgacgaatggggctcacggttgtggctactcgaacgcgagaagctcaccgaatctgttcgtttactcgtagagaattacgccaggttgtccatgcaaccgctaattaatgcgggctatgcgaaaaccgcccacgtcaccgcaattattccgcagcctggttggatttccttttccgttgtattagctcgcccaaataaaacggcattaacagtagaaattaaaaagcgctgggaggagttagagaatgccatttaa

SEQ ID NO: 434312 - DNA, 540 bp, Serratia marcescens
atgggattaaaagtcgagaatatagcccgctcaatcaccgccatgagtcgtcgcttgcgcttgatggtagaccgcgccgtggtgcgcatcgtgaccgatagcctggggcggcaaaacttacaggtacaaagcctggctgatgagacaaacgacgacgttgaaaggttccagaattacggggtgacgtcagtgccgccagcaggctctgaagctatcgtgatagcggtaggtggtagacgttccggcctggtggccatcgcggttgaggacaagaaatcacggcctaaagggctagaccccggcgacgtttgcgtgtatcacagtgagggccacaccatcacccttaagaaagatggtgtaatagaattaagagggaaaacggttaatctggttgctgaagaatcctgtgacattgtgagtaaacttattaatgtcaccggccccgccaacttcagtgaagatataactgttaagggcaaaagcgttcttaaacacattcacaaagatggcgacggtgctgatacttcagagatgttatga

SEQ ID NO: 434313 - DNA, 1092 bp, Serratia marcescens
atgagtgaggagctgaccctcaacgttgacgggaaaatttggggcggttggacagcaatgaccattaaccgcagcctggacagcattgccggtgaatttgacctggcagtgaccgcgcagtggtcgcaggccgcgccgcgctccatcaagcctggcatggcgtgcagcgtcaatatcggccaggatcgaacgctaacgggctacattgatgactttattcccagttacgacgacaggaatgtttcattacgcgtgctgggccgggataaaaccggtgacctggttgacagctcggtggtagacaaatccgggcagtggcgaggccaaaaactggagcaaattgccgctgcgatctgcaagccctacaacatccaggtcatcaccgaaactgacaccggcgacacctttggcggcgtcaccctggaacagggcgaaacggccttcgaactgctcgatcgcctggcaaaacagcgcggtgttttaatgacgtctgacgcctgggggcggttggttatcacccgagcatccactaagcgcgccagcgtggcactggtacttggccaaaacatccttgccgcacgtggccgcttcagttggcgtgagcgcgccagccagtacattgtaaaaggctccgctgcggcaggtggaaccacctgggatgaccagccagtcaaagtggttggcggtcgccaggtgattatcacggatgctgagattacgcgctatcgtcccaaaatcctcgtgaacgaagacaaccttactgttggtggcgcgagcgctcgtggggagtggtacaaagccagcgctatgggtgaggctaacgccacagatatcaccgttgccggttggcgtgagaacggcgaaaccgggccactctggctacccaatatactggtgccgattgatgatccaattcagcaactgaaggtgacctggctgattaaaaccgtgtcgttttcgcatgatgaaaatggccgcatcacggtattaaccctggtgccacctgaatcaatggatatgcccgccgagaaagccaagggcaagaaaggcaaaggtaagaaaacagccagtctgggggttacatgggattaa

SEQ ID NO: 434314 - DNA, 1260 bp, Serratia marcescens
atggccaaggccaagtgggaagacttacatgaagcctcattccgtggggccgcgttttatcttgaggacgtcgaaggtaccggtggccgtcgcgccatccctcatgcctatccacgaaagaacgtgggctggacagaggataacggcgcagaactcacccagcagcaaattagcggcatccttctgggggccgattacctggataaattgaacaggcttttggctgcgctcaatacgccagggcctggtgaactggttcacccctggtatggcgtgcagcaggttcaggcaggaaaagtaacccaccggctcagtacgcaggaaggcgggattgcctacatcagttttgaagtattcgaggctggccaacaactgtttcccacccagcaggaagacaccagtgccacaacattaagtgcagccgaccaggttaaagcggcgctggccaatggcgattactttgcggcgattgatggcatgggcagcatggtggataccttgcttgacgatatgcaagggctggttgctaacctcccaacgctgcctgacgcacttaatgagtggatggacagactgaaccgcttcaaagacctcgcagggatcatcgtggcaacacctggtgaattgatccgggatgtcacagacctcatcagcgacataaaagacctggtgactgaggcaccgtgggcgctgcgtgtctatgaccaactccgcgataaatgggatggtgaccgcgcggcacagtcggcaactaaatccctggcggacaatgtggcggtaaatgccaccacaggttttgccagtagtgtcacgcccacggctctggtggatatcaccgatgcgatgcgcaccaacatcgatgatttcaggctcttggttgtgacctctgccctggtcgcgaaagccgaaaccgtagcgactgcaacgtttgaaaccagccaggaggctcaaagcgccggtgatcagcttgctgaactgctgggagaacaagccaacatcgcggttgaatccgggcagcgtgatttgtggcgctcattgcgaactttgcgatttgccgtggtcaacgatgttcgtattcgtagtgtgcagctcccggagctgcgccgtatatcaccatctcaaactatgccggtgatgctgttagcctggcgcgaactgggcgacgcagatagacgcgatagcctggtattacgcaacagacttcgatatcccgcgtttattttgccatcacaaaccattgaggtgatcgggaatgagtga

SEQ ID NO: 434315 - DNA, 1881 bp, Serratia marcescens
atggccaagcgcctcgacactgaaatcatcattaatctggcgggcaatctcacggccaaggcccgccagtatggtgccaacatgacagactttgcccgacgtaacgaacgggccatgtcagtggtcaaggccaccacggcggcggctgggcgcgggctggacagtttagggaatcgatataccacggccatcgccggctttgccggcggcgcgattttacgtaattacgccaccgtcgatcgccggctaacccgcctgggtatttccgccgacaaaacgcgcgccgagatgggtgcaatcttcaacgacgtccaggatgtgtctattgcattcaaggtagacagtagcgaagtggttggcgcgctggaggagatcaacgcccgcaccggtgatatggagtttggcctaaaaaacctgaaggggctggccgcaaccattgccggtaccggcagctccggggcgtctatcggcgggctgtttgccgagttcaaaaagtacggtatcaacgacggcaagaacggcttcctggccatggatgtcttgaacaagctgggcaaggaaggtgcatttgagctgaaagacctcgctgaaaaggcaacgccagccctgtcgctctatgcggccgctggcggcatcggtgttaaaggcatcaaagatgttggcgtactgttggagtcagcgatcggggccaccggtaaccgcgataccgctgcgacactggtcgaaaactttatccgtgagattcagaaccccaagatagcaaaaaaccttaagtacaaaggcgtgaacgtcaaagacagcgcaggacgtctacgagcattgccggagctactcgaagagattgcacgaaagtctaaagctggtggtgccaaaaaaggagggcaaggccaaattggtgagctgcaacaggtcggttttacccagaccagcctggacttaatctccggtgtgtccagtcaatccgggatggaaaacctgcgtcgttttatgggggtgaccgcagacggcagcagcattgagggcgatgcaaaatatgctgggcaagacttcacttccgcgattcagagcctgacaaccaccggcgagaaattcgcgaacgccaacctggccaaacctgtgcaggagttggccgatgcgctgaactccgtagaccaggccacagtccagaactggctggagatcggcaagaacgtcacgctcgcggtgggtggcctgctggccgctcgtaaggcgttccagataggtaaaggtgcctatgacttcctgaagcctggaaagaaaggcgttcccaaaggcgttaccgatgtgtttggttccggcgtcatgccggtctacgtcgttaacatgggggctggcggtctgggcggcgctgcgggaaaaagcgcaccaggtgctgctggaggcggtgcagccgctgcggccggtgcaggcgcggccactaaaggattctgggggctggcaggccgagcgatcggcggtgcgggcatggtctacggaatgacggagttggcggactatggcgctaaaaccctgtacgacatcactggtgcaggtgaatgggcaaaaggctccgcactccgtagctggatcgatgagtcagtcgataaatccgctctgcctgcgccggtgtctgcgggttctgtctggcaagaagtcaaggactgggtaacgtccgcccctgcctatcaagacccatcgccgtgggcgtcccttcagccacaaaatcaaggcagctcgtatcccatggttccccagcaacttcagggcaacattgaggtgacggttaaagatgaccgggtgcaagtgagtaaagtcaatgtaagtacgcctggcgtgacgatgagcgccagcagcggcgtgcgtaacgtggagcaagattga

SEQ ID NO: 434316 - DNA, 384 bp, Serratia marcescens
atggccaaagtcagttttgagttaactcatggcctggtcaccggaaaaggcaccgacgatgaaacgaaaaacttcaacgtcgagctgcgtgaactgaccggccaggacattatcgattcgcagttggcggctgaacgtgtcgtgatcggtgagaacggcaaagccgtagcgtatgtgtccgaagtgctgtatgggctggagctgctgcgccgccaggtatcccaactgggcattttgcctgggccgctgtcactcaagcatttgggccaacttcacccggaagatttggagctgctcaaccagaaagccgagagcctggatgagttaattcgggggatcggccaacgggggcgagctgatgccgctggcgacggcgttcagtaa

SEQ ID NO: 434317 - DNA, 351 bp, Serratia marcescens
atgattttaggcatggcagccattcgcgtgaatggccgtgaaattaaaacagagggttcctccacccttaaccctggcggctatgcgcgcacgatgcacagcggcggcgggaagcattggggaacctctcgcaagatggctgcgccatctatacagctgaccatcgcggcagcagaggacatggacgtcatcgagatcagcaactgggaaaacgtcacagtgatgttcgaaggtgacaacggtctgagctacatgatgaccggcgccgcagcagaaaacccggctgaactgagcgaagacaatggccagatcagcgtcacgttcctcggcaccaaatgtgtgaaggtataa

SEQ ID NO: 434318 - DNA, 1479 bp, Serratia marcescens
atgtcgttaggctcaattcccaatgatgtccgcgtgccactggtctatatcgaaatcgataattccctggcactggatagcgccccggcgcagcaacataaaatcctggtcattggccatcagttgaataccggtaccgcctcggcactgacccaaaaccgtatcaccagtgacagcatggccgatcagctctatggacgtggctcaatgctggcggaaatgctcaaggcattacgcaaaggcaacagctacaccgaaacctgggcgatggggatcgatgagttggctgaaggtgcagcagctgtatcagagctgaaagtttccggcaccgccacggcggctggcacgctggcattattggtgtgcggtgtggccgttcaggtcggcgtaaaagccggtgatacagcggcgacggtgaccagcgcggtgattgctgcgttgaacgcgaaagcatcgttgccagtcactgcggccgcaaaaggcaacgatgctggcacggtggtactgacggccaagtgggcaggtcaaacgaccaatgacctggacgtgcgcctgaattactacgtcggcgaacagacgcctgccgggctaagcatcaccacggctcccttcaccggtggttccggcacgccggaaatggctgaagtggtcgcagccctgggggatgagtggttcaaccatatcgtctgcccgtttaacgatgtggccagcctgaacacgttgcgcgatgagttgctgagccgttgggggccgctcaagatgattgaggccatcgcctataccgccgttcgtggtacccacgcacaaaccggcacctggggcagctcccgcaatgacttcttgatcacctcaatcggtaccaacattgccccgcaaccatcgtacttgtgggcagcgacttatggtggcgtcgcggcgtttaacctggcaatcgacccggcacgacctctgcaaacactgagattgcctggtctgttggccccggctaaagaagtgcgttgggatatggtcgaacgtaacctgcatctgttcgatggcgtagcgacgcactttgtagatgcaggcggcaacgtgtgcatcgagcgcgaaattacgacctatcgcgttaacagctttggcgatgccgatgtgtcgtatctggatatcacctcaccggccacgctgggccatatccgctacgtcatcaagaaccggttcaccaatcgatatccgcgccacaaactggccgatgacgatgtgctggagaccttggccgcaggccagccggtcatcacgccaaagctgtgtcgccaggagctgctggatatcttcctgactgaactggagcctgctggtctggtggaagacttcgacgactacaaagactcgctggctgttgagcgggacagtagtgaccagaaccgactcaactttgtcgctcatccgaatatcatcaaccagctccgcgttctggctggcctgatccaattcaagctctaa

SEQ ID NO: 434319 - DNA, 216 bp, Serratia marcescens
atgaaaacaaaacagattaaacccaagtcagaagccgtgcaggttcgcaagcctgacggctcgctgttagctgctgccggtgaacccttgccgatgacggcattctggctgcgccgaattgctgaaggcgatttggttgttagcgatattccagtgccaaccaccgagctggtcgaagtagcgccagccgccaaaccaaccaaagcggagaagtaa

SEQ ID NO: 434320 - DNA, 618 bp, Serratia marcescens
gtgagtgaacgtcccagcctggtcacgctaggcagcacagtttccgccgctgagcggattgttaactggctgcagcccgttttgcagggaagccaacccgaccaggtgcgcgttgtcgaacgccacattggccaattcaatagcccggatgaagtgaagcgacatctcaccgatcgcgatggttccgtgcgtgttgctgccctgcgtgtccgagatatccgctatgaaacaggcgggattgtcgggctggtgacctgggtggcatatgtgatggccaccgacgcctggggatatgggcgagacctacgcgcagaagtgatggttggcaaactggcccgccgcttggcgatgcctcaagccaccaaaggtatgggagcggagcgcaaggcagaaagcatttccgccgagaacatctatagcggaagcctggatgacctgggcgtgaccatgtgggcggtgacatggggccaagaattcaaactcgatgaagaaacggacattagcgagctgcctgatttcctccgattggggatgacaataataccgcccggcggcgtgcctgttgttaacggtgtgattaacgtgcgagagaagaacgatgaaaacaaaacagattaa

SEQ ID NO: 434321 - DNA, 543 bp, Serratia marcescens
atgggtattcaggttgaagtcctgggtgctgaaaagctggcggatatccagaaagctctggagcgtctggccgacggcggtttgcgcgccgaactgctggacagtatcggggcagtggttgagtcccagacccgccgtcgcattaccgacgagaaacaagcgccaggtgggcaagcctggcaagactggtcagaaggctacgcaaagacccgtcacggcaaccaaagtctgttgcaaggtgacggcgatatgctggacagcattacgtttatcacagagcgaaaccaggtgcgggtggggacaccgctgaaatacccaggcattcaccaggatggctttaccggtagcgtgtccgtcggtgctcatcagcggctgatccgccaggcatttggtcgggcgctgaagcacccagtatggcaaagcgtgcgcgcccacagccgcatgatgaacatcccgcaacgtgaatggcttggcttgtcgaacagcaacagcaacgagctgttgcacatcattggtgacttttggaaagaggtattgccgtga

SEQ ID NO: 434322 - DNA, 435 bp, Serratia marcescens
atgcactacgccacccgtgatgatttgctgattgccgacggttcctatctttggaacgtggccatcaatcgggaaaccgatcagttggatgaggaagcaatcagccaggcactggatgacaccgatgaggaaatcaactcgttgctgtctcgccggtacaagttgcctctggaaacggcggttccccgcattctgaaccgggtggcgatctccatcgctttctattggctggctgaccgtgataaccaggcgaccgagctggttcgcaaacgctatgaagatgcgatcaagacgttgaaggaaatcgcaaacggccagcgtgatttggggttgccgaccatagaacaacctgccgaaggcgatagcggcaaggtcatcatggtcggtgaaaacccgcgcctgttcacccgcaagagccttaatggtgttctctga

SEQ ID NO: 434323 - DNA, 240 bp, Serratia marcescens
atgggtaaaggctgggatgagtcgatgcgccagggccgccgcgatcgcctcaaaaaggaggtgctctatcgcatggccggaggccccaaaccagagccggttaactaccggggctgcgatggcactcatgccagcttttatatgaagggctgggaatccgtcggcccgcgcgatattgcctggcagtgccagcgctacaaggaattgcacagtgaaaaccatcctgaaaaacatcattga

SEQ ID NO: 434324 - DNA, 582 bp, Serratia marcescens
gtgagtcagttcaatcctaccccagcgtttacccatgccgttgcttttgtcctgggcaaagaaggcggctacgtcaatgatcctaccgacaagggtggtgagaccaagtacggcatttccgacaagcgcgacggtgtcgccgacggtatgaccgacgttgacggtgacggcaagcccgacacccgcatcaaagacttgacccttgaacaggctagtcagatttatttccgcgattactggtatccagcctactgcccaaactggccggacggcatctcactgttggtctttgatgccgccgttcagcatggcgtcaagaaagccatttccctgttgcagtcggcagcaggtgtaaccgctgacggcatcgttggcactaaaaccactacggctgtcatcagtgccgaccctgaatggctgctggcccgctttctggtctaccgcgcccgctattacgccgacatcatcaagtccaatccatcccagggtaaatacctcaacgggtggttcaaccgcctggacgatgtggcgaacgcctcctgggaagtagtcggcggttcagcatcggtagcccggagctaa

SEQ ID NO: 434325 - DNA, 396 bp, Serratia marcescens
atgagcgataatttggagcttttcgacgatgggcaggacgacagcattcttgaacaccttgaaggtggtgaagccgaaagagcaaagttcccggctttactggcagaattgaatgctctactgaaaactgagttggagcggctgggaggaaatccaaaccactcattagagctggtggtagcgatcagcaaacaaattggcggtatccaggtatatttaccccgtggccaagcgcttgaattcttggtcagagatatgaagatctggcaagattttgatggtcgaaatgttcaagagcttgcgaaccgctaccacgtcaccttcaaaaccgtgtataaagctatccgaaggatgaggcgactagaaacacagaaaagacaaccacagctattttga

SEQ ID NO: 434326 - DNA, 525 bp, Serratia marcescens
atgaaactgggccgttgtcctatttgccactctgaattgcacctcgatgcaattcttgaagacgatgctggccgggagcttctgaccctgctgacgaaattacccggaggtgccgccaaggcaatggtggcgtatatcgggctgtttcgcccagagaagtcgaacttatcgcactcacgagcggtgaagctggttaacgaggtgctggcgcagcaccagccagggcggatactaacccacgccttgagcgaaacggtagaacgcatccgtgccaagcgcatcaacggtgacaaaaaaccgcttaacaatcatagctatctacgtgaagtctatcgcacctctgagcagatattcgcccaaaccagcaacatcaccgcacgcgaacgcgatgagagcaagcgcgaaactgaccaggatagaaaccgcgacgattatttggctaatatgttccgccttggccaagatgtgtcgagattgcccggcggagctgagtggcttgaacgcaatggggggagcaaaccatga

SEQ ID NO: 434327 - DNA, 555 bp, Serratia marcescens
atgaataaaccacaattagttcgattgattcatgtcgctaagggacaattaaatattcccgatgatgcctatcgcgcattactggctaacgctgccaacggaaaaagcagttgcagtcagatgaatatcatggagctacgtgacgtctatgccgaactgcaaagtaaaggctttaagcgcagtttcaagaaagccacgaagcgcgtgcgcgataacgccagaggcgctccgcgcgtggaagaaatcagcaagctccgcgcaatatgggccactatgcatcgccatggctttgtcgaaagcggtgacgaaaccgcgttaaacaagtatgtcaaacgcatgagcagccaaattaatggtggtgccggtgtggatgaagttggctggctcgacggcttcttggcgtttcgcgtcctggagtgtctgaagcagtggcacattcgcctaatgctggcgacgctggatgcgcgcaagaaaccacgaccacagcaccctctgagcggtgatgatgcacgcagctatgacattattttggatgcctacgaggactcgctatga

SEQ ID NO: 434328 - DNA, 615 bp, Serratia marcescens
atgaatactgaattaaaaaatgacaactatcgcaaaaacgcccagggttacctggttcccgaagacttgatccgccctgtcgataaactgcgcgatgacgtcgtgatgaaaattgtcgcggcggcaaaaactctacgcgaagttatggctgtcttcaaaattgagtccatgggacaaattgaagacttcgttgacctttccgctagtgagtatggcgtggagtttggcggggccaagggtaacgtgttgctgaccagttttgatggtcgctatcaagtgcggcgtgctattggcgatcatcgtgtttttgatgagcgcattcaagcagccaaaaagcttattgatgaatgcttgatcgcctggtcggatggtgccagtgataatcttagagcactcgtagagcacgcgtttcgagtaaacaagcagggccgtattgatgttaatcaggtgcttagtttgcgtcagttggatattgatgatgacaaatggcgtgaggcgatggaggctatcgccgactcaataacggttacgggcaccagccaatacttgcgaatttatgagcgtcaggagagcggaaagtacacgcaaatcagcctggacatttcgggggtctga

SEQ ID NO: 434329 - DNA, 243 bp, Serratia marcescens
atgaacgcagaccgtagaaaaaggctgtcggaaatttttgtgaaaatagaacagataaaaggtgaagtagaagatattcgtgatgaagaacaaaatgcctttgactccatgcctgaagggttgcagcaatcagagagagggcaatcagctgaaaatgcaatttcttgtatagaagaagttattgatgggcttgagcaagcctgtgaccaaattaacgatgcgatttttaaggtgaagaaatga

SEQ ID NO: 434330 - DNA, 198 bp, Serratia marcescens
atgattaacccaaccaagctggtgaatgcgctggggtggttgcaacgtcgcaatgtagaaatcaagcatgtgaatatcagccgtgctcagcccatcgttgaggtcaccgcgccagacgctgacctgaagcgtaaagcgcataactaccatgctgtatccgctgccactattcagggctgcattatttattggagataa

SEQ ID NO: 434331 - DNA, 957 bp, Serratia marcescens
atgacaaacgtaattgatttagaacaacaacaagagaagattgccgacgtccgcgcaaaggttcgcaccatcgttgaaagctctgatgtgacttacgctgccgtcgcacgcgaagcgggaatttcaaccagcgttatctctcaattcatcaaaggcgaatatcgtggtgataataacggcgtcgccgcgaaaatcagtgtgtggctggataaccgtaatcgccgtgccaatgatatgcctgtggctcctgatttcatcccaacgcgcaccgttaagcaaatttgggatgctctccaatatgcgcaattagcgcagtgcatcacagtgatttatggcaactctggtgttggtaaaacacgcgcgcttcagcagtttgccgccgatcgtcccaatgtctggttgataaccgtgtcaccctcacgttcgagcctcagtgagtgcctgtacgaattggcattggagctggggattggtgatgctccgcgccgttctggccagttaggtcgcgccatccgtcgcaaattacgcggcaccaatggcgtggtacttgtcgatgaagctgatcacctggactactccgtgctggaggaactgcgcatcttgcaggaagaaaccggtgttggtttggcgctgattggtaaccatcaggtttacggcaaactcacgggtggtaacagccgcaatatggactttgcgcgcctgttcagtcgtattgcgaaaaaggtgtccatcctgaaaaccaagaaagccgacgttgaagcgattgccgatgcctgggggttaaacggtaaagcagaacgggatctgatccacgcgctggccgacaagcctggtgcgctacgtaccatttctcatacgctccgcctggcctcgatgttcgcacgtggtagcaacgaagcgatgagtgaaaaacacatccgcgccgcagttaaagacctggaaggagtatccgcatga

SEQ ID NO: 434332 - DNA, 2010 bp, Serratia marcescens
atgagcaatgtcagcatgagcaacaacatttggttatcgataaccgaaatcttaggcgtaccaggatatcccacaactgaacgtggcctgagaatggccatggataagcaagcgttagcccagccagacattcgaagaaagcgccaaggatccaaagcgtttgaatacaacattaactgtttagctcctgtagctagagcatacgtgttgaaacaacgtggtgaggtctgcgttggagaaaaaacctataaggttcctcaacgtaaagaggactcttattgccgcgaagccctttggcaccattgggaatcggccactgaaaaacagcgccttgccgcgcagaaaaagaccgaagccgttcaagctgtcgttgctcttattgataccggcattgacgttgtaaccgcattcgatgcggtagcggaaacacacgatgcttctgttgcatcagtgcggcgctggtactactcagcccgtaagttttctcgtgaagattggatggcagcgttgctgggtcagtacggcaaaagcatcgaaacacgccgtaaaaaagaggcggattgtgaccaggaagcatgggactttttccttgcagatttcctgcgtccagaacgtccggcgttacgcacagcttatgcgcgtctggctgaaacggctgcggcacgcgggtgggaaatccctagcctatcaaccatccgccgcaaactagagagagaggttcctgttgagcaacgggtattgctgcgcgaaggcgagcacgctgttatgcgtctattcccttctcaggagcgaaccgttgccgatctcgacgcgatggaatgggtgaacggtgacggctatcagcacaacgtgtttgtccgctggtttaacggtgaagtgatccgccctaaaacatggatttggcaggacgtgaagacgagaaaaattctggcttggcgtactgacgtcagcgagaacagcgactcaatccggctatctctttcggacatgattgaacgctatggcataccacgcaaactgaccatcgataacacgatggcggcagcaaacaaatggactaccggcggtgttcctaaccgttatcgcttcaaaattaaagaggacgaccctaaagggatcatccctctgctgggtattgaactgcattggacaagtgtcttattcggtcgcggccatggccaggcgaagcctgtcgagcgtgcattctctcacggtggacttggtgaaaccgtcgataagcacccggcactggctggcgcgcataccggccctaacccgatggacaagcctgacaattacggtgaccgggttattgaggccgaggagttcttgaaggtgttggccgaggggatcgcattctggaaccgtcgccctaaccgtaataccgaaatgtgtcggggcatcttgtcgtttgatcaggcattcgaagaaagctatgagcaagccaccattcgcaaagcaacaccagagcaacgccgtttgcttctgctgcccgccgaagctgtgcggatcagcgagtccggcacatttgttatggaagctggcggcaaagtgcaggctcgaaaaaaccgctacttcagcgaaagattgctgggcgtcaaaccgaacaagattgtagtgcgcttcgacccgcagaacctgcatcagagtgtcctgtgctacacgctcgacgggcgttttatttgcgaagcgacgtgcatcgaaagaaccggctttggcgacacgcaggcagcgcgagagcataaccgtaaccgcactcagtttgttaaacgcaccaaagaggctgctgctgctgcaaaaagaatgtcagcgctggaagcggccgaacttatgccagaaaccgtaccaccagccccgccggaatcacgggtggtagaaatgctgcgcccagttggcaatacactccggcggcagattgtggaagaacagattgaagaagacgagtcagaagaagcctttagcaatgcagtaagccagctatataacgcgtttcagaataaacagatttaa

SEQ ID NO: 434333 - DNA, 726 bp, Serratia marcescens
atgagttacgagaaaactgacaacaacgaacccaaaaggaaccaaaatcctttgggtgaaagtagtaaaggaagcggttttacggagagattgaacctcatagttggttctgaaacgggccgttcgtttgcccgcaaggctggcattccttacagcacatttcataaataccaagcaggcacgacccagccgacgttggataacctgatacttttggcgaacgcggctggtgtaagtgttgagtggttggcgactgggaaaggtgacaaccaagccccctcagaacaaactgaatttttggaagagttcgcgctgatacctggatacaacgtccaagtgtccactgggcacgggactacggcaatagacggttacgcccccactcgttacttagcattccgtcgcaaatggttgtcattcagaggtttcaatgaagatgacctggtgctgttatgggccaagggggattcgatggagccgacaatatcgaacaatgacacattggtcgttaacactgcttttaccaaacccattgatggcaacatttacgtaatcaggcatgatgatacattgtgggctaagagggtacaggttcagcctggcgcatggcttttgataagtgacaaccaagcggtttaccctcccatggaaatcaaacgcgaagacatgggaaactttgaggttatcggccaggttgttcacatatcaaaagacgtgggaatgtag

SEQ ID NO: 434334 - DNA, 2553 bp, Serratia marcescens
atgagcaaatttttagaccgtttccgctatttcaagcagttggcggagcctttttctggcgatcacggccagaccttgaacaccaaccgcgactgggaagacggctaccgcagccgttggcagcacgacaaagtggtgcgttccacccacggcgtgaactgcaccggttcctgcagttggaagatctacgtgaagaatggcctggtgacctgggaaacccagcaaaccgactacccgcgcacccgtcccgatctgcccaaccatgaaccgcgcggctgcccgcgcggcgccagctactcctggtacctgtacagcgccaaccggctgaaatacccgctgatgcgcaagcgtctgctcaagctgtggcgcgaggcgaaagcgcagcacagcgatccggtcgcggcctggggctctatcgtcggcgatgcggaaaaagccaaaagctacaaggtggcgcgcggccgcggcggtttcgtccgctccagctggcaggaggtcaatgaactgatcgccgccgccaacgtctataccgccaaaaccttcggcccggaccgtatcatcggcttctcgccgatcccggcgatgtcgatggtgtcctacgccgccggcgcccgctacctgtcgctgatcggcggcgcctgcctgagcttctacgactggtattgcgatctgccgccggcctcgccgatgacctggggcgagcagaccgacgtgccggaatccgccgactggtacaactcctcctacattatcgcctggggctccaacgtgccgcagacgcgcaccccggacgcccacttctttaccgaagtgcgttacaagggcaccaaaaccgtggcggtgacgccggactatgccgaagtcgccaagctgtgcgaccactggctgaatccgaagcagggcaccgacagcgcgatggcgctggcgatgggccacgtaatgctgaaagagttccatctcgatcgcgaagtcggctacttccgcgactacgtgcgccgctataccgacatgccgatgctggtgctgctggaagcgcgtgaaggcggccattacgccgccggccgcctgctgcgcgccgccgatttggtggacggactgggccaggaaaacaaccccgagtggaaaaccgtcgctatcgacagccgcagcggcgatctggtggcgccgcagggctccatcggcttccgctggggcgagaagggcaagtggaacctggaacagcgcgagggcaagtcgcaacaggaagtcgagctgcagctcagcctgttgggcatgcatgacgacgttgccgaggtgggcttcccgtacttcggcggcgccgacagcgagcatttcaacagcgtggcgctggacgagatcctgctgcacaaactgccggtgaaacgcctgcagctggcggacggcagcgaagcgctggtgaccagcgtgtacgacctgacgcttgccaactacggcctcgagcgcgggctgggcgacgccaactgcgccgccgactatgacgaggtcaaggcctacagcccggcctgggccgaacagatcaccggcgtgtcgcgccacaacatcatccgcattgcccgcgagttcgcggaaaacgccgagaagacccacggccgttcgatgatcatcgtcggcgccggcgtcaaccactggtaccacatggacatgacctaccgcggcctgatcaatatgctgatcttctgcggttgcgtcggccagagcggcggcggctgggcgcactacgtcggccaggaaaaactgcggccgcaaaccggctggctgccgctggcgttcggcctcgactggcagcgcccgccgcgccacatgaacagcacctcgttcttctacaaccattccagccaatggcgctatgaaaccgtcggcaccgacgagctgctgtcgccgctggcggacaaatcgcgcttcggcggcagcctgatcgacttcaacgtgcgcgccgagcgcatgggctggctgccgtcggcgccgcagctgggcaccaacccgctgcgcctggcggagcaggcccgcgcggccggtcagtcgccggtcgagttcaccgtcgacagcctgaaaaacggctcgctgggcttcgccgccgagcagccggacaatccgcagaacttcccgcgcaacctgttcgtctggcgctccaacctgttgggctcctccggcaagggccatgagtacatgctcaaatacctattgggcaccgaaaacggcattcaggggaaagatctcggccagcagggcggcgtgatgccgcaggaagtggaatggcgcgagcagggcggcgaaggcaagctggatctggtggtgacgctcgatttccgcatgtcgagcacctgcctgtactccgacgtggtgctgccgaccgccacctggtatgaaaaagacgacatgaacacctccgactgcacccgttcattcatccgctgtcggcggcggtcgatccggcctgggattcgaagagcgactgggagatctacaagggcatcgccaaggccttctccgaggtgtgcattggccatctgggccaggaaaccgacgtggtga

SEQ ID NO: 434335 - DNA, 150 bp, Serratia marcescens
atgaaagctttggttcatgccaccttgctggccgccatgatgggcgccgcttccttcaatgcattggctcaggagaccgtaaacgtgaatagtaaaaaccatcagggccatgtctggcgcccccgccaccactgccctggccgccgctaa

SEQ ID NO: 434336 - DNA, 924 bp, Serratia marcescens
gtggcaaaacagaagtacaaaatcatcaactggaagacctacaacaaagccctcatctatcgtggctccatcactttctggctcgacaatgaagccattcaggcgtggtacgactcagcagcatcctcatcacggggaagacctcagcgctattctgacctggccatcacaaccgtcctcgtgattaagcgcgttttccgactgaccttgcgggcagctcagggctttattgattctattttttccctgatgagagttccactgcgcagcccggactactcctgtgtcagcaaacgagcaaagtcggttaatgtcagctttaaaacgcccacccggggtgaaattgcgcatctggtgattgactccacggggctgaaagttttcggtgaaggggagtggaaagttaaaacgcacggcaaggagcggcgtcgtacctggcgtaaactgcatctggcagtggatgcaaaaacccatgaaattatctgtgctgacctgtcgttgaacaacgtgatcgatacagaagctttcctgggtcttatccgacagacacaccgaaaaataaagtctgcggcggcaggcggggcttacgatacacgacgatgccacgatgaactgcaccgtaagaaaatcatagcactcatccctccccgaaagggagcgggttactggcctgaggaatatgcagaccgaaaccgtgcagttgcgaatcagcgcctgagcgggagtaatgcgcgatggaaatggtcaacggaatataatcgtcgctcaatagccgaaacggcgatgtacagaataaaacagttgttcggcggaacactgacgttgcgtgactacgacggtcaggttgcagaggctttggctatggtgcgtgcgctgaacaaaataacaaaggctggcatgccagaaagtgtgcgtattgcctaa

SEQ ID NO: 434337 - DNA, 1584 bp, Serratia marcescens
atgagaaatattagcaatctaataataccatctgttgacgccattgattatacatcctctgaaaagaaaagtttctttaaagaatcatatttatcaacaagtttctctgataaggcttgtgaagaaaactgctactattttgttggtgaaaaaggaactggaaaaacagctttagcttttcatatacaaaataatgagcctaatgacattaatgcaaagttattaccaatttccgaagcgcaatatactagatttatcaatttaaaaacatcaggaaaattggcgtacactgactaccccattatttggcgagctacaatactttacttaatctgcaaacttataattgaaaaaaggaagcgttggtatcatagcctaactaaaaaattcaacaaattacagtcagccataacaacctacgataaggatgctcacattcctgagttagagtatgttatagaattcgcaacctcactaacggagggaggaaagatatcggccaatcttccagaggcatttaaacttgcgttagaatccagtgagacaaattcagttaaaacaacccaaacatcaataaaagcctccttgcttgaatgtgagaaagttcttaaaaacagtctttgcgaccttaagctaaacaaacaagttgtattatttctcgatggtattgatgcgaaacccggtgggatagagtttatagaatatcagaaatgcatagcagggctagctgaagccgcatggagtttgaataaagatttcttttcgaattttaaacactcatcaaagaaaccaagggttgttttacttcttcgtccagatgtatttgattcattaaacttgcacaattcaaactgcaagttaactgataactctgtaatctttgattggggttcctctagacttggttataagcactctgacctttacaaaatgtctgacaaatattttaattcacaaaacgatggtaaattcggatgggaggattattttcaagacacttcactacccaatagaaacaaatcatatagaaagctattgagaatatcataccaaagacctcgcgatattttctccgcaattaaaatcctcatagggttatataagaaaaatggcaggaaaggctctgagctttttactgggcaagacattcacagccctgagttcactaagctttactcccaatatctccttggtgaagttaaaaattactcaaactattatatatcaaatagccaattcgacattctcatatcatttttccagcattttgacggaaagagtaatttcaccgaagaagaattcgaggaagcgtataataaattcagtataaaacttggcgatgagattaaaggagcgccgaacatcactaccgattatgcttccttcttgcaattttggtatgacgttaacgttattggttacaaagaaagaatagcagaggaaaataataacttttaccactggtcttatcgtgaaagaaatgcaatgaatgtaatgccaaaaataaaaaaagggtgtatttacatcatacaccctggcattgcaaaggcattagacatcggaaaaccaacgatcagggaatag

SEQ ID NO: 434338 - DNA, 1056 bp, Serratia marcescens
atggctttgtgggttgttgcaggacacgcgtatgaagccattccctcaatgaacaaagtaatacccatcacgttgttgaatgattttgcagttgacgtttttatagttctcagcgggtttgttatttttaacctgttaaacaaaagcaaggtgtcttataagaaatatataactcaaagatggatgaggatcttccctatatatctggtggttctggccgcatcaatctcgagcatgtatttctacagggatattttaactattgctccgttctcaccatcaacggagcatagaatttatcaggtggacacatacctaagcaaccaagttgctcatctcctgccgcatcttttcctccttcaagggttaattcctgagagggtattgccgctggctgggacaacaatcgtaggccaggcttggagcgcttctgttgagtggcagttttatctgattgctcctatgttgtttattttttttagtaagttaatgacatcaccttctaacagggcgtttttacttgcgttatctttcttggtcgtcatgattcttttgggtaaggtacttcataataaagcatttgctggtggaagtatggctgctttcttgatggggtttatttcatttttcttttatcgtgacatctttccggttattactctggccaagcttaaagttatttctttctttgttgttgtgtcatcggtcttgttactgaagaaggattgcatcggctatgtaatatggttttcgacattctttgctgttttgataagtgtgaagagtgagcgtgggaatttcataacaaaactttttgataatagaattatgcagattattggtaaggtttcttattccgtatatatggtccacatgttggttatttactttgccctatatctttttgtaaagctggaagttaatgttggatttggatatttaatgcttgtgcctatatcaataattgtttcgctaattgtatcaatggccacgtttaagtttattgagcagccaatgatgaatctgggaaaacgagtttcacaaaagctggcataa

SEQ ID NO: 434339 - DNA, 825 bp, Serratia marcescens
atgtggaagcttaaacaccttttcatgaacgcagatgcaggcgctgacgctgggggtaatggcgatgcggataaaccagatactggtgatgctggcggcaattctctgctcagcacaggtgccccagaccaggcggccgagggtgattttattcctgagaagtaccgcaccagcggcgctgatggaaaatttaacctgcaagactcggcgcgcaagctggcggatgcttattcgcacctctccaagcgcttcggcagcggtgatgttccgccgaaaactgtcgaagaatattcgccgaaggtagaggccgagggcttcaaatgggacgagttcaaggccgaccctgagatgcagggattcctcaaggcggcgcacgccaagggcatcaccaacgatcagatgggcttcatcctcggcgagtacatgagccgcgcaccggcgctagtgggcggtgctgcagagcttgatcaagaggcggcggctaccgagctgcgcggcacgtggaaaaccgatgcggaattccagaaaaatatcggactggcgcaccgcgcgtttatgtccctggctgacccatccgaccagggcaagatggacgagatcggcaacaacccgatggtgatccgcatgctggcgaaaatcggcgcggagatgggcgaggatacccccgtaggcaatggccaaatcaatctcgaagaacagcagagcatccgcgacctgatgaagtccgaggcatacaccaacccgaaacacgccgaccatgaacgcgtttccgcccaggtaaaagcgttttatcagaaaacctacggcgatcaggccatcgcgtag

SEQ ID NO: 434340 - DNA, 897 bp, Serratia marcescens
atgccagcaaatgaactgaagcccaaagagccgatggtcgtcagcttctccggcggtcagtcgtcggcattcatgtgcgatttcctgctgcagaactacgccaactgcttcgattttcattttgtctttgcgaacacagggcgagagcatgaagagacgctgaagtttgtagatagatgcgatcggtacttcgggctgaatgtggtctggctcgaaggggttaccagccctactcctggtgttggcatggcgcacaaggtggtgaactttgaaactgcggcgcggaacggcgaaccattcgagcagttgatcagtgttgagggcatcccaaatgtatcccggcaaaagtgcagcgactatttgaaaactcaaacgatccgatcatggatgcgtgaagttggccttgctcgtcgcggctggtcagcaaaaacggcgatcggcatgcgggcggacgaacctcagcgcgctgatccgaacaaagacgcggccaagcgctacaacctcgtttatccgctttgccactggggcggcttcgataagcaggacgtgaacgacttctgggacgcgatgccttttaagctgaatatcccgccacatcatggcaactgtcttacgtgcttcaagaagagcgacgcaaagctgtacctgattgcccatgaacacccggaatggttcgcgtggaatcgcgagatggagcagaagcacggcatggtgaaagccgttagtggccacacctggtggcgcaggaagcgcaacacggatcagcttatcgccgatgctcagcttgaagaccgacagcggcttatctatctgaccaaaaccaaccccgacgacggcgacggctgcgcatcatcatgtgagccgttccagtttatcgaggagtcccagcatggctaa

SEQ ID NO: 434341 - DNA, 777 bp, Serratia marcescens
atgaaagagcgcccagtgatgccagacactaaaaccgctcagctcattcacgcagattgcatggaggcaatgaacctaattgccgatggctacgttgatatggtgtgcgctgacgtgccatacggcaccacgcaatgcgcgtgggactccgttcttgacctagagctgatgtggtcgcacctgcaccgcatcgccaaaccaaacgccgctatcgtgctgttcagtgcgcagccgtatacctctgttctggtcaacagcaacatccgacattggaaaacggagtggatttgggaaaaaggcaacgcaacaggtttcctcaacgccaagaagcagccgctgcgcgcccacgaaaacatcctggtgttctatcgcagcatgccgacttacaacccgcagtttaccgatggacacccacgcaaaacgtcgcgtcgaaaaacggtcaattccgaagtgtatggcgaggccgtgacgctgacggaatacgactcaacacggcgttatccgcgcgatgttcagttcttctcgagcgataagcagaaaggccgataccacccaacgcagaagccggttggtctggttcgctatctgatcgagacgtacagcaatcccggcgatgtggtgctggatttcacgatgggaagcggaacggctggcgttgcgtgctcagcgactggccgcagattcatcggcattgagaaagagcagaaatatgtcgaagttgcgcaccagcgtattttcggcaacagcgaattggaggtgcgtgatgccagcaaatga

SEQ ID NO: 434342 - DNA, 207 bp, Serratia marcescens
atgctgctctatccacatatctacggcggttgcaaaatcaatcgcatttcgcatcgcctgattctccacagccagcgcatcattggtttgatttgctgcatgagcgcgctgaatggcttcttgctcactgataagagcatttctcaggcgaacctccagcgcatcggctcgtttctgctgcgcatcgcgctcagccttcagtgctga

SEQ ID NO: 434343 - DNA, 330 bp, Serratia marcescens
atgaaagaacttaatttgagtgaaattaatcgagttacaggtgcgggcggtgaacaaatagctcaactggccggcactgtcgccggtacttggctcggtggcggtaatccctatgctggggccctcggcgggtatgcggccggagaaatttacaatggaattcagaacggctatcaaacggctccaaatatagatgtaggtatcgggtcttacaatgctaactttaattctgacttaggcgctagcggtagtttttctgttgcagatgtgcaagccatgggatggtgtaattttaatatgacttatttctctagctctagcggttgttaa

SEQ ID NO: 434344 - DNA, 315 bp, Serratia marcescens
atgtcacagaaatttgttaataacattgaaaaaattcagcagaacttaaaggaaattgaacaaactaatcagttgcgttttgatgagctgttcaatactgagttcctctctcaatgttcatcgtttacatcacttgaagacatgttcgaaaaatcaggttttaaagtcgaaaatgcagatgattttaaggcgatacctgatgatgagtgggagcattttattgttacgaatacgcactatgcgagttggaaagagatgcaaacagatgctgctaaaaagttgctaaataaacgacttttgaaagggcttaagtag

SEQ ID NO: 434345 - DNA, 429 bp, Serratia marcescens
atgagctatggatttagcgcaacgaccaaggctttctatgtttacgaagataaagaaagctatgaggcaaacggtaattggccggaggatgtaaagcccgttagcgatcaggtgtgggaaaaatattgtatgcaaggcccggaaggaaaagagcgcggcgcaaataagcgcggcttgccgtgctgggttgatattcccgctccagcaaaggaaacgcagaccgctgcagccaactggaaaaaagggctgctactggaaaaggcaggcaaggcgatcgcccccttacaggatgcggatgatttggggattgcgtcagaagcagagaaagcggcgttgctggcctggaagaaatatcgggttttgctcaatcgcatcgatgtggaacacgcggacaaaatcacctggccggaggtgccgagtgtggcgtaa

SEQ ID NO: 434346 - DNA, 3180 bp, Serratia marcescens
atgtcacaaaccgcgatcacctttgcctttgagcaatggaaagcaaaagaagccgtgaacggttcccgcgtggtgctggatgagttcgttttcgccaacgtgccgggcctcgatgccggcaagccgatcgaccgcaaagaagggatgccgccagcgggccagattgtgcaccgccaggcagtgaacaaaaccggcgtcgtgaacaacaacgccgtggtgtattcggtcaccctgggcaccgaggtgggcgattttgacttcaactggattggcctggtcaacaaggccagcaacacggtggcgatgattgttcatgcgccgacgcaacgcaaggtggccaaccatgccggccagcagggcaacgcgatcacccgctcctttgtgatggagtatgacggcgcggccagcgagacggcgatcaccacgccggcggaaacctggcagatcgactttaccgcgcgcctgggcggtatcgatgagatgcagcgcctggttaaccgcgatcactacggtgccggcgcgttctttggcaatgggttcctggtggccaaggccggcgcgcagtatttcgtgacggcgggcaccggctatgtgggcgggctgcgcgcggtgctggcggcaaaccaaaacattaccgtgacggccaagcctatcaaggtgtgggctgatgtgagtttgcagggcaacgtggtaagccagtgggcggcggcggtgaaatttaccgttgcggcgaccgcagcggattacacggataacgccggctttaagcactatgtgtttgcggtggccagtatcgacgccgccggcaacattaccgacctgcgcccgcaaggctcgctgtccgaccaggccggcaatgatgcctatttgcgcaaggatgataacttggcctccctcaaggataaggcgaaaagccgggggagtttgggcctgggcaccgccgccacgcgcaacgtgggcgtggaaggtggcaatgtgatggaggtcgggacgtttggcctgggcatgggtgcccggcatcgtgatgatgcttactgtaaccagggcgaaatctaccggttaaacaacacctcgaaaaatgcccccggcaatcaggtttatggcgtcttaagtctgccgtgcgacggtggcccgtcaggcggctatctggcggtgcaaaacaacgccgatgcttttatcggtcggtcgaatattaccgataacggggtgacctggttccaggtttacaccacgcgatttaagccgaaagcgcaggacgtggacgcggtatcggccacactgggcggcgagttcaagaaggaaatccaggcatccggcggcgtgacggtggcaaatagctggagttctaagccgggcgggcttttccctgggaacggggatggggccagctatgaaacctgcaatgtggatgtgaaaagttggtatggcctgggctttttcaacgcctgcaaaggggaagggatccaggggcgcacggcgtttttgaacgtgcgcactgggtcattctcggccaaggggcggatcactggcgcatccgtgtgggatggtaacgcccgcgtttactcgccggcgaataagcccacggcggcggatgtgggcgcgctgaccgatgcccaggcggcgcagaaatatgccctgcgctctatccgtgtgaacggtaagccgctgaccggtgacgttaacttgttggcgtcggatgtgaacgcctggaacaagaccgaggcagacgggcgttttgtgaaacaggccggcgacaccatgatcgggccgctgacggtgccgcgcattgtgtttcccgatgggtctacggggaatgcggatggcgacgtgaatcgcgcaaacgggttcaccgttgaatcgttggccgagtccacccataaggggtatccggtgccgggtggcatgggagttttgtttaccggcaaggcaaacgagtttcgcaacgtgcaatttttggtggggtcgggtgaccgctctttctacctgcgatccatgcggaaagatagccctggctctactgagtgggcgcgggtgtacaccacggactacaaaccgacaattagcgatgtgaaggccgccgaccacagcaataactttgctgcgcggatgggggttgcccgtgtgcttaccggggcagaaaagccgacgtctccaggcgtatggagcgtggaaaatagctcgtggacgcctgttgcgtggggaacgctgtatgtgactaccaacggcaccaatttgagcacggcctccggtaacgggaaatttatccactatctgtttatcgcccacggcagcgcgaacaagttctatgttgcaacggatgtgaacggcggattcaccggctgggagagctatctaaccaggaaaggcggccagctttcgggaacgttgacgagcagtgccgaaattacggcgaaatatctgtcaacgccaacgggcgcacctccagaagggagcggcgcgttttcctcgcaactcgacaccaaagcccctttctatcaggaaaattacaattgggatgttgtcgagggtggccgctatgtcccgttggtcaaaggcaaaagcacccgaaaggggcagggttacccaacagctgtaagttttggctatctgatggatggggcaggcagctttgctaagccctgcattcatgtgcggggggataacaacgcagaggctatctggcggtttgatccgaacactaagcagtttgtggcccccggtaatttgtatgcaggcggagccgcctatcaggttgatggcaatatcagtggctctatctggggcggttatctcagcaactggttgaaccagaactttaacggccgcgttgattgggggacgtacaaccgtgatgttggggccagggcaactattgactatgtaaacagccgttcagctgttgccggcagccgcaatgcctggtggtacaaggatgaggtgacggggttcattattcaaggcggggtggttaaccgagtggactatgtaaaccgtgtcggtttcccacgcgcttatgcgcgggagtgcttcggtgtgcaactgacgttggccagttccaacgggaattggttcggcgatagtcgggtcaatatccaggggcgggatctggataacaacgggtttaatgcaatgatggatggtcaagaacaggtcgtgttttggcaatcggtgggggtgtaa

SEQ ID NO: 434347 - DNA, 450 bp, Serratia marcescens
atgaaagtgatcgcagttgaaaagcaggggcttatggacgatttggccgcttggggagtagcgccgaactatgcccgctttttcctggccaaatgccaagaagttgatggccttgttgccctggagccgtttgttttcaatgactccatgcatttgaccagcccttaccagtggtttgcctccaatgcggcgttttggtgccgcgcataccgtgaagcctgcaccgccgaagaacaggcggaaaccctggcatctatccgcgccctgttctatgtggcggggatgttgggccagggcagcattaccgcgctgatcctccaatggtggtcggcaacctatgagctgcaccgcctgccagcgccgaacgtttcccctgctgactcgctgatttttcgggacggcagcgcgtcacgctttatcgatacaactaccggccagcgccgacactaa

SEQ ID NO: 434348 - DNA, 420 bp, Serratia marcescens
atggcggataacaactattggttggccaaaatccgcgcccaggtttgccccgaacattcagaggccgccgacttttggaatggcctatcaccagagtggcgcggcgtagtgatccacgctgcggcgctggaagggagggaggagttaaaagccagtttgagcaattgcctttggcgcgagctgttcgagcggctaccccctcaagcaatcatgcagattcgtgccggcatccaaaaggcgcggaatgtgtttggtgggtttggatctctgcgtgaatcggactttcagcggaagggaacgcgccgaaatataaaggagcatcacccggtgcgcaagcaagtggaaatggtggcagcgccgcacattatcaggattttagagcaacaagaaagcctgcaaggccaggcagaggaaaggtaa

SEQ ID NO: 434349 - DNA, 570 bp, Serratia marcescens
atgactttagatctagacaaaggcgggcgtgcagcgatcgaacggatgatcgatgcatacggatgtggaactaaaacagcgcttgcggagcttttggggatttcgaaaggaacgttgtcaaatcgttatctaagagatactttccctgctgattatgtgattcagtgtgctcttgaaactggggtttcactcttgtggctagctactggtcatggacctatgtatgagaataaccaaacagatatattatctctctcaaggaaaaaactgattgacggaaaactttatgaatcaaatttcataatgtttgataaagcttttttatctagcaagttaatagatcccatcgttatttcagaagacaacataacatatgtggccgagcaaaaattcgatgaagtaacagatggaaaatggttattaagtattgatgataaaatttccattcgtgatgtgggtgtactgcccggtgaaaaaatccgcatagagaatggtaaattttcttttgagtgcaaactttctgatttaagttttttggcaaaggtagattcaattactttaaaaatctag

SEQ ID NO: 434350 - DNA, 1764 bp, Serratia marcescens
atgtctcactatttagatacattaacaataaaaaacttcaaatcctgcaagcatattgaagtgaagctttcagaattcactccaataattggatataataacgcaggaaaatccaacattctttcagccgttgaatggttgttcaagaaaaaattattagcacttgatgattatcatgatgctgatatggaaatttgcgttgaagggaaaatagttggtgtaagtgatgagattttagatggcctagctcaagaacatagagaaaaaatatcaccatttatacaagatggtattgttgagattaaaagaacccaaatagtcaatgcttccaaagcagcagatgtaaaactacaaataaaaaatccagcaaatggtcaatatcgagcaccaccaacaggaatagataatgcaattaagggattattccctgaacctattcgggttggcgcaatggaaaactccgctgaagacgcttctaaatcaaaagctagtagtactataggaaagttactgtctgaactttgcgaatcagtacagaaaagtaactccaccaggatttctaaacacttgaatgcagtatcaaggagaatggaggcagatggaaataaaagaattccagagttatcagacatcgatacttccataaatgaaaagattgctgattttttccccggaatcaatttaaaacttcacttcccgacccctagttttgaagatctgtttaaatctggaaccgttaaagtttatgaagatggtatggcaggtattgccagagagtgttcttcctatgggcatggaacccaacgctcaatacaaatggcattaatccgccacttagccgacataaagaaaaatgagcaaagctcaacaacgaccctattactaattgatgagcctgaattatacttacatccattcgccatagaacaaataagagaggcactaaacactttatctggaaatggataccaaattatattcacaactcactcctcacaaatgattacggaagaaactgcaccccataccattcttataagaaaaaataacatcaagggcacatatcgtagaacaactatggctgaggctgttgcacgaaccattgaggatgggccagcacaagcaagccacttgttctctttaacacagtcctcacaagtattattctctaacaacgttattttgacggaaggaaaaacagaacttcgcttacttcctttcattttccaaaagatacagaacagaactcttggacaagcccagatagcaatgattgaaacaggctcagtcaataacattagtaagacattgaaaatactgaaggctatggatattcctgcaagagcaattgtagacttagattacgcattcagaggcgcaataataaatggaattattaatgatgacgaccaaaacattgctgaattaaaaaagatattacaaaaaatgcatgataatcaagaatgtaaagtcggtcacaatggtttaccaaccaaaggaggagtttgtactgcggcagaagcttttgagatcatggcatcaaaaccagaagcgcacgcccacattcaagcgctagcaacaattcttcgtgagaagaatatatggttatggcaaaaaggggctattgaggcacacttaggtttagaaagtaaagatgaagacacatggtctcaattcaaagtaaaagcatcacgttcccctttggaagaaatatgtccagaccatgcgggtatacacgcattgattcaatgggtctcagcatag

SEQ ID NO: 434351 - DNA, 210 bp, Serratia marcescens
atgcaatttcgtggcggcttgattgccccgcctccttgcacgattaacgccggggcgaaaatagatgtcgattttggctcgcgcgttgggatcaaaaaagtggatggcgttaactaccgccaggtgatcgattaccaccttgattgtgaaccgggggcgcgcccccttggagctaaggttaaccctgaaggggaatggcaccgcgtttga

SEQ ID NO: 434352 - DNA, 522 bp, Serratia marcescens
atgcaacacattaagaatttgaagagatacacgccggaagaattattcctcggcgagaacgtgatttatcttcaggatgataacggtattgactggtacgccgcgcaaaaattgttttcgccggacaccgtaaaactggcttatgacgaaagcggcattatctgcgcgattaaccgcgatgtgtcgatgctgtggccgattggcttatcggttattgagctgaacccaacgaaactgccaaagcgttgtctggctaatggtgagtgggtgtttgacggtaagaaggtgagccagcgagcctattctgcagaagaaatgatggcgagggctgaagccagaaaaaatgaattactggcgatcgcgggtaaggctgttgcgccgcttcaggatgctgttgatttggatatggcgaccaaggaggaaaaagcgctgttggctgactggaaaaaataccgtgtgacgctgaatcgtcttgatatgtcagtcccggatattgactggccgatggcgcccgccgcctaa

SEQ ID NO: 434353 - DNA, 1215 bp, Serratia marcescens
atgactgctcctattgataaaaaattagaaaacgtagacaaggctttcgatttcttcagggagtgtaggaaggaaaataaattcttcgacttgcctgatgtaacaaaaaaaacaaactggggactgtcaacagtaaaaacatattcaacaaaaagatgggggagtttcattaaaaaaacagaaaaaggatacatggtaactgagaaatttgaccgatttgacaaaaaaagctttaggaaacaccatagccaaaaagaaacatcaaacaagtatttttacaatctcttggttgagaaatcaataacagcgtgtattgcagctattgaggtgtataacaaaccagactttaaatttcgcgaagaaagtttctctattttaatgataaatgcttgggagctaattctaaaagctaaaattctcgagttaaacaacgacactaaagatagcatttatatgaaatctaaaggtgagattcaactctccccttctggtagtccaaaaaccatcgccataactcgtgccgtaggattattggaagggcaaggagtcataaataaattagtagctgataatataaagttacttatagagatccgggatggctcagtgcattttgtgcatgatgacatgaccctgagcactaaaatacagtcaataggtaccgcctcactaaaaaatttcatgacattggcaatgagctggtttgattatgactttagaaaatacaacttttatttaatgcctgtttcgttttatcatttgagcgacatggaaagttttagtgttgacaataaatttagggaaaaccttctaaactatttaggtaaaattgaaaaagagcatgatattgatgacgaccctaactttagcatttcacttagattggaaactaaatttgtcaaaacctcatcagaggaagcaatgcaaataagaatcaccgatgatcctgacgcaccagaaatccaaatagtagaagaggatgctttgaaaaaccatcctcacacctacaatgaaatatgcactataatcagaaaaagatatcgtgactttaagcaaaactcaaaattcaatgaattaatgcgcgatatgaaaaagcaaggtgataaattctgtagagaaagaaaactagatccaaaaaaccccaaaagtatacacaaaatcttctacagtagtagagtaattgatgagcttgacaagcattaccatagaaaatag

SEQ ID NO: 434354 - DNA, 489 bp, Serratia marcescens
atgagcaccgttgtgatccaacggccacgcccggacgcgccagcaccgcgtccggaggatgagccgatcgttaaaaacgtctttttcttcccggatattaacccggcagacgtgcgcgacgtaatgcgcattgaaggcacgatcaccgccccgcgtttgcgcatggtgattaaaagcgcgatcgcggaggtgaacgccgagctgttcactttccgccgcgacaagatggccgacggttatcagcggcttgaggatgtacccgccgacgaaatcgatgatgaaagtgtgcgggtgagcgagtaccggaacgcggtcagcgcgatcacgatggcgcttttgtcggagcaataccgcagttacgacactaccgccaccggcgcccgcaaggctgatgtggttgaagcctcaatcggcgagctgtggcgcaacgcccgcaacgcgatcagtaacgtggccgagcgtagccactgcatcatcgggctgctctga

SEQ ID NO: 434355 - DNA, 741 bp, Serratia marcescens
atggtgagtcccgcacagcgtcatatgatgcgggtctcggccatggaggctgcgcagcgggtcgataatccgctgcgccatgcaaacgtctatgagcaaatgctcgttaggctggccgctgaccgcaccaaattaaaacagatttattccgtagagaagaaagccgaacacaagcgcgcaatgcttcccgcatatgcaccttgggtggcgggcgtactggcagaaggccgaggcgctcaggatgacatcttgatgaccgtcatgcagtggaagctcgatgcggatgatattccgggtgcattacagatcgctccttatgcgttgaaacatcgcctgaaaactccaaacaacaagcgcccggccgcgtatctgtttgctgaggaaattgcagcgtctgcagagcgccttcgcaagagcggtagcgccgtgagtcttagcgatatgcaaacggctattgccatgatcgcgaatgaagatatgccggatgtggtgaaagccaagctgcataaagtgaccggcctcatcctcagtgataaaggcgatcatgcgcaggcattagaacacctgacgcgcgcaatgcagcttgatagcaatgccggggtgaagaaagaggctcaaaaatgcgaaaccgcgttgaagccgaagccagtagccaaaaaaacaaccgcacgcccgcgtaaagctgccgcaactccggctaaacgcgggcgcccacgaaaggcgattaaaaccgccggttaa

SEQ ID NO: 434356 - DNA, 1182 bp, Serratia marcescens
atgcgtaacgaaactcgcctgcaattcaataaatacttgtctcgccttgctgaactgaatggcgttgacgttgctgacctcggcaaaaaatttaacgttgaaccgtctgttactcaaaagttatttgagaaaatccagcaatcaacctcgttcctgcagcttattaatatggtgccggttggcgagctgactgaagaaaaagtcggtatggatgttaacggcacgattgccagcaccgccgacacggatagtggggttgagcgaacaaccgcagatttcaccaaaatggatgcgtaccgctatttctgtaagccggtgaacttcgattatcacttgaaatataacaagcttgacctgtgggcgcgttatcaagatttccagatccgcattcgcaatgcgattatcaaacgccaagcgctcgactacatcacgattggctttaacggtgttatgcgcgccccaacgtctgatcggaaaaagaacccgctcctgcaggatgtggctgtcggctggttgcagaaataccgtaatgacgccccggcgcgtgtgatggataaagtaactgccaaagacggcaccgttatttccgacaccatcaagatcggtaaaggcgggcattacgccaaccttgatgcgcttgtgatggatgcgcatgagtcgcttatcgacgaaatccaccgtgaaaacccggagctggttgtcatttgtgggcgccgtattctgaccgacaaatatttccctaaaattaacaagttacagccgaacagtgaagaattggccggtgagctgattgtcagccagaaaacgatgggccagctgcaagcggtgcgagcgccgttcttcccggctaacagcattttcatcacttcgctggataacatttctatctatctgtacgaggatggacaccgccgccacattgtcgaaaacccgaaactggatcaggtggaaaactacgaacaggtgaaggtcgattttgttatcgaagattactccgccggttgccttatcgagaatatcgagattctggagcctgaagaggaaggcacgccggaagtgaagatcgccaatgtattcgcggctgaattggtgaaggcgatgaaatcgctaacggaacccggtgccgctccagaggcatccgatcacagtcaaaaagatactgacggcaacacggaggcataa

SEQ ID NO: 434357 - DNA, 846 bp, Serratia marcescens
atggcaaagaaagtttcaaaatggtttcgcattggtgttgaaggcgacacctgcgatggccgcgtgattgacggcaacgacattcaagaaatggcggaaagcttcgacccgcgcgtttatggctgccgtatcaatctggagcacatcaaagggctgtttcctaacggcgatttcaaacgcctgggcgatgtggtcgagctgaaagcagaaaagattgaagacgattcaatcctcaatggcaaatgggcgctgtttgccaagatgaccccaacggatgagctggtcggcatggtgaaggctatgcagaaggtttacacctccatggagatccgcccgaactttgccaataccggcaaatgctacctgatcggcttggcggtgacggatgacccggccagcctcggcactgaatatctggaattctgcgcccgtgctaaggctaacccactggccggtaaaaaattagagccgggtgatttgttctctgtggcatctgaggcgctactcgagtttgaggatgtccccgacagcctgctgagcagcttaaccgatcgggtaaaaggcatgtttagccgtaaacaagccagcgacgatgcgcgattcaatgatgtgcatgacgcggtgacggctgtcgccgagcaggtgcagagcaatagcgaaagtgttgaagcgcgttttgcgcagttggaacagcagatcgcagggctgcaaagtgaaatcgctacagagcaggagaaattttcctcgctgcaaaacacgctcgaccgcattgaaaactttactcagccgcgacgcccgcacgccaccggcggtgatggtgcggaagccaatttgaccgactgctga

SEQ ID NO: 434358 - DNA, 1026 bp, Serratia marcescens
atgagtaaacgcagccgccacaaggtaaaagaaaatcaggccgtcacgcgggccgatcagcaagttgaggcgttcacctttggggaaccttcgcccgtactggatcggcgcgatattttggattacaccgaatgtatcggtaatgggaaatggattgagccgccaatcagtttttccgggcttgctaaaagtctacgggccgccgtgcaccacagctcgccgatttacgttaagcgtaatattttgacaagcacctatatcccgcacccgttgctttctcagcaggatttcagccgttttgttttggactatctggtatttggcaacgcatttttagaaaaacggatgagcgtcagcggcaagctgctgaagctgcaaacctccccggccaagtacacgcgccgaggggttgagccgggcgtatattggtttgtccagtcctttgcagagcctcactgttttgcacctggcggagtctttcacctgttggaacctgatattaatcaggagctttatggcatgcctgagtatctcagcgcgcttgactcagcgtggttgaacgaatccgccacgctgttcaggcgtaagtattatcagaatggcgcccatgcgggttacatcatgtatgtgaccgacccagcgcagagtaaaaccgatattgaagccatgcgatcggcgatgtcgagttcaaaaggactggggaattttaaaaacctctttctctacgccccgaacggtaagcccgacggcatcaagatcgtgccattaagtgaggtcgcaacaaaagacgattttttcaatataaagaatgtcagtcgcgatgacttattaagtgcgcatcgtgtaccaccacagatgatgggaattataccaaataacactggaggttttggtgatgtgacaaaggccgctcaggtttttgtacgaaacgaactaataccattgcaggaacgaataaaagaggtaaacgaatggatcggtgaagagattatgtgcttcagcacatacaatttatcgaataaataa

SEQ ID NO: 434359 - DNA, 714 bp, Serratia marcescens
atgaaaaaaatagtgtacataggttttttatttatagctttggttatttctttctattactttaactttggtatggaagggaaaatatccaaaagcacagaagtatgggggcaatttggtgattatcttggtggggttataaacccaatactgacctttctttctattgtcttgttagtcaagacaataaacttacaaagagaggcgaatacaagtattctagatgaaaataggaggcaagagcggctcgatcactttaaaaatttcgaggttaggttttataatctaattgattcacaacgcacctacttcatgggttttaaacttaggaatgttgatgcgggcgatgagattaaagtgtcgtctgatgctgttgctttcttagaggagatgatttttgactgtaatcaaaaaaagatggcactggatgagctaagagcaaagataaatgatatagatggttcagatgccatatactctgcagttcggcatttctatttattagttaagttgattgatgataaactcagtggggaagaacagaaggagtactatgaggttttaattaatttgactgactaccatttgataagacttttggtgctatcaacctgcgtttatgattgggatagtatattgtatatagagaaaagtgatgttttaggatctaaggagttacggaggtataagagtaattttttacctgctccttga

SEQ ID NO: 434360 - DNA, 816 bp, Serratia marcescens
ttgaatataaattttgatattgtgattaagagtggcgataacgatgtagatatggattatgggttgaaaacgttatcgggaacatcacgagttgtatcaacgcttgctgaagctattttaaaaaaagaagtgtcagagcgtcgaacaagtattaatgatgttcgtacccagctaaagcaaagttttaaaagttcttatgggcaaaatttctgtattgaggttaatgagccactattaaagagaaggttaagaaaaataggtaatgatacattctgtgaagtcatggctttttatatagctgaatctttatttatcccttctgatgatcttagcccgatggcaaaagaggtggttgatgatctcgaggaagtagaagataagcttttagacgttttaaggcgcggtttggttgatatgcataaaattacggccatgaatagttttaatgtcgaacttaatcataaaccaagaggaggtcataaaagaattgctacattgacccctaaaactgcaaaacacattactgaaaccaaggagggggataaagattatgaaatcactgctatattcacgagatttaactcaatgactgggaacgggcggttgatagtaaaggatgatgataaaacaactgcgtttgggttggccaaaggattgagatttgttccgttggagtttaagaaaaaaatcacagctaatttacatagtaataatgggttaaataaagaaaattggaactacattaaattaaaagtaaaggatttgaagctgacaagtggcgaggttgtgaagtacttcataaatgagattgcatag

SEQ ID NO: 434361 - DNA, 231 bp, Serratia marcescens
atgagacgagatttaaacttagccggggcgtttatggaggcgttgaacttcaacgagaacggcaagggccgccgcataaagaccgttgatttcattcacgccgcaaaccggctcggcacacacctaacgcctgaagaggcgaattactacatcaagcaccagtccggccacgttttcaggctgattgacgaggggcgttatcagcacaatacatacctttttctctgctga

SEQ ID NO: 434362 - DNA, 225 bp, Serratia marcescens
atgcatacagtaattaagcatcggagggaaagggtgcaagcagtggatgaagtggttgttttagaaagaattgaactcatcgcccgtctgggggtttgttatgagagccaagcgaaagacaaagacattgcactgatatggatttcagaactggcgggggagatgaaaaccagcattgcccctgaaaaagcagaagtgatcaggcagcttgccgcgatctcttaa

SEQ ID NO: 434363 - DNA, 2217 bp, Serratia marcescens
atgagccaagcggctaccgtctacgcttacccatggaacgaaccgcgcccggcaattgccgggccggtaagaccgcttacccgtgaggaactcgctcaggggcaagctgttttaaccaacatccgccgcctgccgcgcttcctcagctccatgttcctgacgcgttacaccaacttgctgaagggtaaggggctgcacgacgccaacaaatggctggtattccagttcgatcgccgcatctggccgcgcctgcaaacggtgagcgccaaaaatgcgatgaacctcgccgcgtcaatgcggttttctgctgaagtcgataattacgcagctctgcccggcatggatgacaaagagatccgccgtcttgccgatcgcgtggccggtcaacttctgcagaattacgcagattactgcgatgagtttgtggcggagaacggcggcgacaatgccgggcttttcgaagatgccactcaatcagaattttatggccgcattgccggtatggcgcgcgccttcaacatcacccctatgcactggcgcaaataccgcaaaggcaaactggatgcccggtcagcgattgccagcctgtcgcggttggttaattccgaatggtgggaacgtcagttgaaggcccagcgcacgcgctggcgcgaggcattgctgatcgcagtcggtaatgtgaatcgcggggcgtcgtcatacgccagtcggcaggcaatccgggatgtgaaagcccgccgccagtcaaactttgattacctcaacagccgcgagctagagaacgtcgaaaccggcgaacgtttcagcctgatagacaaggtgatggcgagtatctctaacccggaaatccgtcgtatggagttaatggcgatgatcgccggtgttgagcaggccgccgctatccgtggcgataaagggatgttcatcaccatcaccaccccatccaaatatcacccgacgcgcgccgtcggcaaaaacagcccaaaggtgcattttaatcacaaatgggatggagaggcgtacacgccaaaagacggccagcgctatcttgtgaagctgtttagcaagatccgcacggcgtttaaagatgcgggcctgcaggtctacggcgtgcgcgttgtcgaaccgcaccatgacgcgacgccgcattggcatatgatgctgtttacctccaaaaaacagcgccagcaggtgatcgacatcatgcgccgttatgccatggctgaagatggggacgaacgcggcgccgccaaaaaccggtttgactgcaagcacctgaacaaaggtggtgcggcgggctatatcgccaaatacattgcaaaaaacatcgacggctatgcgctggacggcgagcgcgatcatgaaaccggcgagctgttgactgatacggccgctgccgtcaccgcgtgggcgtcaacgtggcgtatccctcaattccactttatcggtctgccgtcgcgcggcgcatggcgtgagtgccgcaagatccgctctgtcagtctggccgatgagtttgacgaaaccgttgaggcggtgcgcgctgctgctgatgccggtgactttgccgcttacattctggcccagggcgggcctaacgttgcccgtgacgatcagactgtgcgtgtagcccgccgggttgccgacgagcgcaacgcctatgacgaagaagtgcagaaaatcgcggggatttttgccccgcacatcggcgccgatcgcgtttatgaaacccgcaccacgcaatggcgcatcgtcgctaaagccgttgccgttgagcctttgactttgaaaagcgcctccggcgcgcctcggagtcctgtcaataactgtgggttggtcggcagcggtggcgccgaaaatgcgcaggatggggggcctgtagaggccgtggcagtgatggaacatgcaccggaaacccagattgactgggatgacatgaccgttgcacggtctgttatgacgcgtttacgggcaaatgccccgcagataaacaggcagcaaagaggaattgacccatataagcgtatagagcctgctgcatcggccagattgaccactgccgagcgcgatcgtgtatccaaaatttactcagagctggcactacacggcatcgagccgacgcgctgggaacttgaggcactggcacgcggcgctaaagtcaaatttggtgatatttcaatgcactatccggcggttagcgattgggcgggcttccaataa

SEQ ID NO: 434364 - DNA, 303 bp, Serratia marcescens
atgttgttggctactgaaacacaaaaagcgatcggcattaagcgcatttcacagattaagcgtgagctgttcccgcataagcggaatcaggcgcaagaggcttttgataagtcgccggaacatatccgcagaactgtttgttttcatgccgggctgaaagagcggcatataaaaatgaagtttgccgaaatgagttattcagagcgtaaacaaatcgtgtgggcgctgaatgacctgattgatttatcaaaaaccttaccgcgatttatcagtgatgatgattgcgaattaaacgttaattaa

SEQ ID NO: 434365 - DNA, 2691 bp, Serratia marcescens
ttgcgcatcgaacacacccgcgacagcgagaaaaccacccgcaccgaaaaccgcgcctcgaccctcagcggcggcagcgtgaagctcgaggcggagaaggacgtgaccttcagcggctccaaactggtcgccgacaaaggcgacgccagcgtcagcggcaacaaggtttcgttcctggcggccgacgataaaaccacctcgaacaccgagcagaccaagatcggcggcggtttctattacaccggcggcatcgacaagctcggcagtggcgtggaagccggctacgagaacagcaaaacgcaggcgcagagcagcaaggcggtcacctccggcagcgacgtcaaaggcaacctgactgtcaacgcccgtgacaagctgacccagcaaggcgcgcagcacagcgtcggcggcgcctacaaagagaacgccgcgagcgtcgatcatttggccgccgccgacaccgccagcagcaccaccaccaaaaccgacgtcggtgtgaacatcggcgccaacgtcgattacagcgccgtgacccgcccggttgagcgcgcggtcggcaaggcggccaagctggacgccaccggcgtcatcaacgacattggcggcatcggcgcgcctaacgtcggcctggatatcggcgcgcagggcggcagcagcgaaacacgcagcagcagctcgcaggcggtggtcagctcggtgaaagccggcagcatcgacatcaacgccaaaggcgaagtgcgcgatcagggcacgcagtatcaggcgagcaaaggcgcggtcacgctgacggcggacagccaccgcagcgaagccgcgacgaaccgccaggaagagcagaaccgcgatacccgcggcagcgccggcgtacgcgtctacacctccaccggcagcgatctgaccgtagacgccaagggcgaaggcggcacccagcgcagcaacagcaacgccagccaggcggtgaccggcacgatcgacgcggccaacggcatcaacgtcaacgtgaaacaagatgcggtctatcagggcaccgcgctgaacggcggcagcggtaaaaccaccgtcaacgccggcggcgatattcgcttcgatcaggccaacgataagcagagcgaaaaccacagcggtttcaacgtcaaagcctccgccaagggcggtttcaccgccgacagcaaaaacttcggcgccggcttcggcggcggcaccaacaacggcgaaagcaacagcagcaccgcgcaggtcggcaacgtcagcggccaacagggcgtggagctgaaggcgggccgcgatctgacgcttaaaggcaccaacgtcaagagccagggcgacgtcaccctgagcgcgggcaacaaggtcgcgctgctggcagcggaatcgacccaaatgcgtaaggagaaccaactgtccggcaatatcgatctgggcgccggcagcagcgacagcaaggaaaaaaccggcggcagcctctccgccggcggcgccttcgacatcgccaaggtgaatgagtccgcgaccgaacgccagggcgccacgctagcctcagacggcaaggtcaccctgtccgccggcggcaaaggcgatgacgcgctgcatctgcagggcgccaaggtcagcggcggcagcgccgcgctcgaggcgaaaaacggcggcatcctgctggagtccgccaagaacgagcagcacaaggacaactggagcctgggcatcaaagccaacgccaaaggcggccaaacgttcaacaaggacgccaacggcaaggtcgatccgaacaccggcaaagacacccatacgctgggcgccggtctgaaggtcggcgtggaacagcaggataaaaccacccacgccaacaccggcatcaccgcgggcgacgtggcgctcaacagcggcaaggatacccgcctcgccggggcgcgcgtcgatgccgacagcgtacagggcaaggtgggcggcgatctgcgcgttgaaagccgcaaggacgtcgagaaaggcgtgaaggtggaggtggatgccggcctgagccacagcaacgatccgggcagcagcatcacctccaagctgtcgaaggtgggcacgccgcgctacgccagcaaggtgaaagagaaactggacgccggggtgaataaagtggccgacgccaccaccgacaagtacaacagcgtggcgcgtcgtctcgatccgcagcaggacaccaccggcgcggtcagcttcagcaaggccgacggcaaagtgacgctgccggcaacgccggccggcgagaagccgcagggcccgctgtgggatcgcggtgcacgcaccgtcggcggcgcggtgaaagacagcatcaccgggccggcgggtcgccaagggcagctcaaggtcaatgccgacgtggtgaacaacaacgcggtcggcgagcagtcggcgattaccggtaagcacggcgtggcgctgcaggtcggcggccaaacccaactgaccggcggcgagatccgcagccggcagggcaaggtggaactgagcggcagcaaggtcagccagcaggacgtcagcggccaacgctatcagggcggcggccgcgtcgatgcggcggccacggtaggcgggctgttaggcggcgcggcgaaacaaagcgtcgacggcaacgtgccgttcgtcagcggccatgcttcgactcagcaggcggacgccaaagccggcgtgttcagcggcaaataa

SEQ ID NO: 434366 - DNA, 1335 bp, Serratia marcescens
atgagggtatcgacaaagtcgttggttgtttttcttttgctgatgtacatgacattgctctcattgaatggcgttgtgaccgtcgctgcgtatatgtcgaccagggcacttttattatataaagacttttttgccatggcagtgccggttttcgtcctaatcttgctttttgcgcgtaaccctaacgtgtcaaaacagtgtagaagcgtaatgatctttttcctgtcgatggtgatcttctcgttagtttatgtacttttaagtatgatcaccggcaggtttgatttcttccgctctatcgttcagtttcgcttagagttactgacattcggttcttttttctttgccgccgttttacttctttttgaatataatgagcgtgtcgagattgttaataaaatcattaagtactatattttctttgccgtattgaatgcgctctttgcggtcgccgaatccagtttggcaggcctgctttatgcactaatcggttttgaccctggcccacagttgacacagtttggtaaagaatatggtcttctgttacgcaccattcaggggcaattacgtgcttttggtctgctcaccgggccattcagcctcagtgaatatctgttttttgcactggtattatcgccttatgtaagcgaaaaaaatcgcaagaaatatattcttctcattatggttgggatcgcattttcaacatcgaaaacggcgattatcatggcactgctttatatcatgttcctgatgctgagacgctttttctctcaacgttttagcctgaattcagtcactatggtaacgatggtcttgtcactgttcttttatattacgacgaccaattacagtatttatgagatgatattcccgaaggagaatgcttacgcggagaacagcattttacttcgtacggtcaatatagaagccgtgcgagctgacagtgagtattcgccatttatcggtgctgggtacgctgtgaatggtaacgcggtggttggtgatgacaatacgaactcaatcccgcttgatagtatgtatatctacatgttgtcgaattacggtaatgtcggaattatccttctggttattgtcgctacgataattcttggcattctttatcagcgtactcgtcttggccttaatcccagtgtttacctatactggatgatctcgctttcgatgaatttcgtttataataacccgttgacaaactatccaggctatatattcgcaatcataatatcgattttgttattatcgattagaacgccggagacgggttccgtgagtcgctcaagaaagaatgtaggttatgtgcaatcgctacattga

SEQ ID NO: 434367 - DNA, 585 bp, Serratia marcescens
  misc_feature (561)..(570): n is a, c, g, or t
atgatagcgtcgacgccaggacaacgtttgatagcgatcgcggcatcatttttcagcattcagctggcctacgagttctttgtttacagaaaaatagcggttgaacgcagcgtgctccaaccgttgcgtaagcgttataaggaaatcattagctacggggtatccctattgccacatcatggcagttattggattaaatcctcggtagatagattcttcatagcgcattacatgagtacggcggtagtcggggtttatggcttggcgtttcagctaacctctatcgttatgctctttttcggcgtaatcaaccaggcgttccaacctttcatttatcgcaagcttaaagcgaacgattttagaggggtcgagctcattcaatatggttacacagctctggttatcgtttcgtgcattatttacttctttattttgccatttgctttcccgtatctgtttaatgctgagttcaatcgcgctatttattacttcaacattcttttgcctggaactgcatttttatcgatttattatatttttacgcactcactgttttactannnnnnnnnngttttactatcgtaa

SEQ ID NO: 434368 - DNA, 2334 bp, Serratia marcescens
atgagcgcccacttcgtttcccagaccgtacgtaccgccaccggccagtggccggtgatacttccggcccttggtattactttgcagccgaacggcaagtcacagccgtgcccgacctgcggcggtaaagaccgcttccgtttcgacaaccaggacggacgcggcacctggttctgtaatcagtgcggggccggtgacggcctcaacctggtggaaaaggccctgtcactgtctgcccgagctgctgccgaacaggtggctgccgtgatggggaatagcgccagcgccttgccaccggccgctgagagcggtcattcaccacaagacaaggccgaggcccagcgcaaggccgcgcgacaggcacaggctctggtggctgccgcgcaacctcagaccggcaatgcctacctgagcgccaagggctggccggaggtggacaccctgaccttgcagggccagccgctgcgcgtcggcggtatcaccttccagcccggtgacctcttgctgccactgcacaatgccgggggtgaagtggttaacgtgcagctgattaacgccaacggggacaagcgcatgctggcaggcgggcaggtaaaagccgcctgccacatcatgagcggcacggataacgcggttatctggctcaccgaaggctacgccaccggcctcaccgtgcaccgcctgaccggtgagacggtgtgcgtggcgctcagcgccaacaacttggcggcggtggcagagcagctgcgcagccattacccggatgcgcggctgctgttggcggccgacaatgaccgcagcggcaccgggcagacccgcaccgccgaggcggctacactcaccggcggtatcccggcgttgccgcccacggaaggcgactggaacgacgtttactgtcagcagggcgctgaggccacacgtacgcaactccaggcgctcagccagccgccgcagccgagcccgttcgacacgctgagcgatgctgacctcaaagccatgagcgccagcgagaaggccgaactgctggccgagcactacggcaacaccctggcggtgccaccggtgggggaagagctgtgccgctatacgcgtggcgcctggcaggtgctgccgcaccgacagctgagccgggagattgccgcattgttccagaaggtgcgtgcgccgttctctgccgccggtatcaacagcatcctggacactctcaagctgatggtgccgcagatgggcgagcctgcccgccggttgataggctttcgtaacggggtattcgataccgtgagcgggcagttcagtgcccaccggcaagagtactggctgcgcaccgtcaacagcgtggactacaccccgccgcgcgccggggagaacctggccgaccatgcgccgcacttctggcagtggctgacgcgggccgccgggggcaaccacgataaacaggagcgcatcctcgcggcgctctttatggtgctggccaaccgttacgactggcagctgttccttgaagtgaccggccccggcggcagcggcaagagcgtaatggcggccatcgcccggctgttggccggggcggacaacaccacctccgctaccatcgataacctggagtcggcgcgcgagcgagccagcgtggtcggcttctcgctgattattctgcccgaccaggagaagtggagcggtgatggggcaggtatcaaggccatcaccggcggcgatgcggtcgccatcgacccgaaataccgcgacgcctacgcggcgcacatcccggcggtgattttggcggtcaacaacaacccgatgcagttcagcgaccgcagcggcggcatctcgcgccgccgcgttattttgccgttcccggaagctattgcccccgaggagcgcgacccgttgctgctggcgaagatcaccgaagagctggccgtgattgtgcgtcacctgatgcaacgcttcgccaacccgaatgacgcccgcgtactgcttcaggcgcagcagtgttcggcggaagccctggatatcaaacggcatgccgatccgctggtcgatttttgtggctacctgacggtgctgggtaccccggaagggatgatgatcggcaacgccaacatcaccccaccgaatccgcgccgctacctctaccacgcctacctgtcgtttatggccgctaggggttatcagcacgtgatgaacctgacggcgttcggccaggcggtgccgcagacgctcaaagagtacgaacacacgttgctgaaacgccgcaccaagcagggaatacagaccaacctgatattgagtgacgagtgcgaagcggactggctgccgaagtgcggggcggtgtga

SEQ ID NO: 434369 - DNA, 336 bp, Serratia marcescens
atgaacactgcatcctgtttaccgattgaagtccgtaccgccgttttccgacgcgccgtggcgcaagcctatctggacacctgcgccttttaccgggtgagcctcgggtacacgctggacgagctgcagatgacgattgccctgcgcctggaagggcactttgtgcgtcagtacggcgcagaggacggcatggacatggcgtgcaccatgctgagcgacatggtacaaccggacgttctggtggccgcaccgcgcctgaccgcgctggggcaaaagatgatggacgagctgtgctgcgagcgcctgtcggcatcgaagaacgccaccgtacactga

SEQ ID NO: 434370 - DNA, 1395 bp, Serratia marcescens
atggcgttacgtactcgctcttttgctgatgctttcacagatttacttgatccctcactagttcctgcgactgccgctggttttgtgaacggaattgcccgatatgttggattcaaccgttcacgccttagagatgcttccgaaagttatattccaattctcgattatattgcgtggactcaggaaatagctgctgagctgcaagatagggttcgtaagcggagccatgtcttcggtcgttatgcagcattggtggaggatatatctgaaaaagaagctaagccagtttccattctgctcgatccttctcttgacgacatgcgtgacgacgaaactggaggagctagctggattctcaatgactacattgattactttgatctttgctccgaagtcgataaggacaccggcaagttcacaatccagataggtaaagaagatgtgttatgttgcatcgaatttatgcctgaaactaggaaatataggctatccagcagtaaactagacgaaatttctcccgttcaggaaagccagggtagacgccaagggttaacactagtgcagcgtcttaacaaaggacaaaccttccgtattctgactctgcgtgataacgtcgtctattcagaaggcaacttctatgaaccgaaggtacagtgggtacaaggagtcaccaagccagtcctagagcacattcacgcttcggctgcacttgatgcagttagaagcgaaaaaggcgaaaatgattacacctccaataaagctatttggtacaaaaaatctatttttggtcttttctcagtaacatgcgatatgcagcgcaaagaatatgggattgaaaaagatgacctaatcacagcaattgaagcaattcctatttggttgtgtgacgacgacagtcgtgaggctgcagattttattggaattgatccggatgctaagaggattgtgttagtccatgccaaggttggtagcgttggggcagatagcacggggtatcatgttggcggattgcaggatgtaggtcggcaagcacttgccagcctagggtttatttcacgagggcaaccgtccactatatggacagcgaagcgttggctaaccaatgtacaggctaataaagttgagttaaacgggcgtagccgcatatttcgcaatcccaattcactcacgcctcaacaactcaatgatctgctctgtgctgcgtgtcgcaatccgtcgtttgatcgtgagatatggattgttggtgcagagatggcgcgtagagaaaagttggtaaatggattggacaaaaccccctgggcaaaccgtctacggcaatttttaatgcattgggattcaatgcaaactgcttgtgctcgagcgaacactcgcctgaaatttttttgttcaaattag

SEQ ID NO: 434371 - DNA, 1935 bp, Serratia marcescens
  misc_feature (1882)..(1891): n is a, c, g, or t
gtgaatttaacaaaacttacccaagattcgcggacctcgatacataggaagcatatcgatagctcagcatataaaaagggatatcgtcaccttcaagactaccacttctggaatggtatagaaaatgggccttgtctctgggaacaccagaaagctgcgatttgtagtgttgttgcctacttatgtggtgacaaagaaatacctgagcgccccgagcaaaaggaagctgcactactcaaactaccaacaggtactggcaaatccggtatcatcacagtgttggcccgttgtcttccctccgtacgccgtgtgcttgtactcactcccagaactgcactaacagagcaacttatagcagacatatgctatcgtttctggaagaatttgggctatgaacatgaaggaaatggacttttcacagccaaggctgacggattaggtagaaatttagagagtgtatatgtcgagcaattcctacctagcaaagtagaaacgatggtgcagcacttgggcaatccagatactgaccgagcagtgctcgttggcactcatcatgctcttgccgatatcagagaaaaggctttgtgttccgacttggctgatcataattgctcaaaattactgaagcatatacgggaaaattttgatctcgtaatcgttgatgaaggccattacgaacctgccatttcttggtctcaaggcgttcgtgacttcaatctaccaactctacttctaagtgctacgccctaccgcaatgactataagtcttttcgtgttagaggtcgttatattttcaattttccttacagtcaggcagtcgataacaacatcatccgccccgtggaaattattcagccagaaggtgtcccacgatctgaagaaaaaaaaaccgcagtggtacaattcgttggcattcttcactacgagctaccggatcggattaaacaagccaaagaatggtttcgcaacaacaacgcttctccgaaaattatggtgcgcgctgataaccttgatacccttattcttttgcaaactgagataaaccgacgcttcaaaactcgtgcaatagttattcatgaccgagccaaaaagactccccaaaatcaggatatgttcaggaccgtagcatcagctcagcgagctcgttctgatgccttgttttggattcatcaaaacaaactgatggaaggaattgacgatccatcattcgtttcagttgctatctttgatctaatggaaaatgcacgtcagcttgtgcagttgattggacgagtaaccagacgatcaaatagcaaagaggaggttgggcaagtaggttgggttatctccactccagcaaataccgagcgtattcgaacaatatgggaacgatataaaggttacgaggactacgctgcacgtcacacggaacacatagtttcaaacgaagtcgctttaccggatcgtctactcagctatacgccagaatatcaatatattagcggcgatttcagaaggcgctttgaagataatcagccgataaccgcagtaaacattcagcttcagagaaacgccgcagtattaagaaccgtcgattctcaagtcaatatacgcgcatttgagacagccattgaagaagcgatcatggacaaggaccgcttcaagatcactccgattgaagatatgcccgaaggcaccttaggtttttcatactatgcttggcgaaactcgccgtatcttactgaccgttttttttctgaatggagactgggaattttcgttgcagttcaggtggatgcgtatattttcatgcacgacacagaaggcctagtagtggatatgcacggactcggactcaaacgtgccgatcggtcagttatggaaaaagcattcccagaaagcnnnnnnnnnnaacaatatctctcggctctcgcgcatgtctttttcatctcttga

SEQ ID NO: 434372 - DNA, 180 bp, Serratia marcescens
atggctgataacgttaccgaaaccgccgttgtgggtggagtggatacacacaaagatctgcacgttgctgctgtcgtagatcagaacaataaagtcctggggacccagtatttctccacgacagggttaccggctgatgctggcatggatgacctcatttggggcgtgaattggcgttga

SEQ ID NO: 434373 - DNA, 549 bp, Serratia marcescens
atgcagctcatcaggactctgggagcatggaggcctgatgtcactgaatgccgcaatgttacaaacgtttatcgaattgcattgaagtcccttgcccgaagctatcttgagttgcacgacgaaattgctgatctggacgtcatgattgcggcgattgtcgatgagctggcacctgaactgattaaacgtaatgttattggatacgaaagcgcttcacaggtgctgttcacggccggagacaatccccaacggctaagatcagaatcaggttttgctgcattgtgtgccgtcagccctgttcctgtctcttctggaaaaataaaccgttatcggctcaaccgggctggagatcgtggtgaaaatagcgcacttcacctcatcgccatcggacgcttacgaacagacgcaaaaacaaaggaatatgtcgccaggcgcgtagccgaaggacatacagaaatacgctgtctgaagcgatatatctctcgcgaggtttgcacgttactacgctatcaatacaggcaggtcaacagtattccgataacaacttga

SEQ ID NO: 434374 - DNA, 894 bp, Serratia marcescens
atgatcctcacaagtaacacgatgaacgcttgcctaagtgtgttattgttgttacccggtatgtcacaagcgggtaccgtgactgtatcccccgggtacaccatgccgccggcgcctactgtgtttgcatcgtcgactgatgtcgacgtatgggtctacggaggaggggcgggcggctgggattgtggtgcattggtgggcgtacaagtgcaagaccctaaccatccggatcggcaccgttatcattattaccgacacaaagaacccgcggtacaactgggggtcgtgaatggaaaacgcatgtttacctgttgggggtatgacttccgggtggcttggctgcctgaagatagagagtacaatatgggacaagtcaaggccctattaaggcgtggtattgaactagaagaccggtacgcaacggacggggaactcggctggtggggctacgaacgtggcgggtgttcaatacagttatacataaacggtggcgcaaacgtcgcattccacgccgggtactcaaataatcatacgaacagctgcatagcgaggtctaggcctcgccctgccgagtgcaaaaccgtggtacccggggctgttgaacacgggacgcggcccacggacacgggtacgagccgcgtgacggataccgtcgagattgaatgtgaccaaaccacatcggtggacatagacatcggacaatcaagtcttccactgcatgagggaaaccaggaacttccatcacaattgtatatcggacgggacggccagaccgccgcccggttttctgccaacccgcgggttagtgtgcctctgataagcattattaacaccgataggaccaaaccgggaaaatacgaagggtcaagggtgatcattgtatcttgggattga

SEQ ID NO: 434375 - DNA, 813 bp, Serratia marcescens
atgtcgcttcaccgtaggtacgataacagttgggtacagtggagtgcgcaagatgcgctggtgttgaaatgggtcaccttgcaggtggaggatcaattgcccacccatccaagttgcatccatctaaaaggacgcggtgggggcaggcagtctgtagcgcaggtttggcaggcgctcacctccggggagtatgcctttgtttatcggacggatatccgcgggtattaccgccatatccgcaaagcgcaggtgctgagcctcgtgcaacagcacattgatgatccggtactgaccggtcttatcgcgcagtatttgtattacagcgttgaggatggtggcgagatttttaccccgcagcacggcatctgccgcggctgcgcgctcagcccgctgatcggtgccagcttgttgtaccacgttgacaacgattttgccgctcaggcagggactttttatctgcgctacatggacgattttgtgatgtttgcccgcacgcgctggcaactgaggcgttgtgttaagcaactgcaccactatttcaatatggcgggctttgaaacgcacccggataaaacccaattgggaagaattgaacaaggttttgattggttgggcgtgtggtttactcctgagggaaccaccattgcgccccggtcattagaaaatcaccgaataaagcgcctgtggctttacgagcaggcccgtcggcggggactgtcaatggcagactctgaggcgcggctgcgggcgtatgaagcacggtggacattatgggcgaaaaatatgattgcattaactgccctggaacgatga

SEQ ID NO: 434376 - DNA, 534 bp, Serratia marcescens
atgagcgggttcggggcatgttttcatgcggctttgatcgccggggtgttggcatttagctgtttggcgcaggccgacaacgttcgcctgtacggtgcattggtcgccgaaccctgcgtgattgcgccgggggatgagaacgtgcggctggattttggcacggtgatcgacaaatacctgtatgccaatgagcgcacccaagggcaggcattcgatatacgcctgggagattgtgacctgagtctggggaaaacggttaaggtgaccttcagcggcccggaaaaccctacccttaaggggttgttggcgattgacggcggcagtcaggcatccggcatagcgatcggtatggaaactcagggcggccaacccttgccgttgaacaaggtcggtgagggctaccgcctggttgatggcaacaacatcctgacggtgcaggcctatgtgcagggtgagccggaggcgattgccaacaagaccatcgaacgcgggcctttcagcgccattgccacctttagcctggaatatgaataa

SEQ ID NO: 434377 - DNA, 492 bp, Serratia marcescens
atgaaaggctgttcaggtattgccttgctgtggatcttcggtgccctgagcacgccggggcgggcggcggagaacatgaagttcttaggcaccctggtcgagcccccggcttgcaccattaataacggagggaatattgacgtcgatttcggcaatcgggtgggggttaaaaaggtggatggggtgaactatttgcaaccgatgaattatcagatcacctgtgatcctaatgctaatgctaatgcttggcggatgacgttggagatcgcaggaaaagcggcgacctacgacaaagcaggcgttgtcaccaatgtcaccgatttggcgatccagatccggcagaatggtgttcctttcgagctgaaaaagccgatagccatcaatctgactaatccgccgcagctggaggctgtgccggtaaaacgggctggctcgacattaaaagaaggggcgtttgaggctacggccactctgaaggcggtttaccaatga

SEQ ID NO: 434378 - DNA, 516 bp, Serratia marcescens
atggatgctgaagtggtacgcaaacggcaaccggcattatatgccgtctgtctggcgctcacggcctggggtgcgggggggccggccttggcgaaaacggccaccgcgacggtgactgtcaaaattacgctgacggcaccgccgtgcgaggtcaataacaacaatctgatcgaagtaaatttcggtaatgatgtcatgaccacccgggtcgatggtgagtataaaaaaatgccgattgtctactcggtacagtgccagggggaagccgcaggcactgccagaatacgtattgatggtgacagcgcggcgtttgacgctggggtactgaacaccaatagaactgattttggcattgaactgcttaacggtggcaagcgactgccgatcaatagctggctgaactttagctaccccagcttaccgaagcttgaggcggtgccggtgaagcgcagtggtgccaggctaagcggtggagcattttccgctggggcgactatgaaggtggaatatagatga

SEQ ID NO: 434379 - DNA, 651 bp, Serratia marcescens
atgcaacagcgaaaacaacggagcggcttcctgtcttgccctgagcgtcaatacctgttggccaaggtggctgcggtgctgatggtgcccgtggtggtcggcagcctgtgggcgctgatgcccgaagcctgcgcggcaggtaactggaacgttgacggtgccaatggagtgttgcatgtgcgtggcgcgctgaccgaaagcgcttgtcgccttgaaatgacctcggcttatcaggacgtgtggctgggggaaaccggcaccgcccggttggcggaggtgggcgcgcagggctcgccggtggcggtgcagttgcgcttgcaggattgtttgcgcgccccggtgaataaccgtgacgatcgcagtggcaatctgttgtggaatgcacatcaaccggcggtatcgctcagttttgtcgccccggcggacgcggataacccgcagttaatcgctgtgcgaggggcatccggtgtcgccttgcgcatggtggacacactcggcagggatattcgtctgggtagccgcggggcgccgctgatgctgtccgtgggccaggacacgttggactatattgtgacgcttgaacgtacccatgcgccgttgcaggtgggggcctattcggcccatgcggatttcaggctcaattatgactaa

SEQ ID NO: 434380 - DNA, 753 bp, Serratia marcescens
atgaacctagtcaagcaatcctttttaccgatggcgggcggcctgttggccggtgtgttgagtattcagcaggtgcaggcggcagttgcgctggaccgcacccgggtggtgtttaacggcggtgagaaatcgaccagcctgagcatcagcaatgaaaacaagcaactgccgtacctggcacaaggctgggtcgaagacgcgcagggcaataagatcaccacgcccttgacggtgctgccgccgttgcagcgcctggagccgggcgccaaaagccagatcaaggtgcaggccttaccagctgccaacctgttggcgcaagatcgcgagacgctgttctatttcaacctgcgtgagatcccgccaaaaagcgaaaagcccaacacgttgcaactggcgctgcaaacgcggatcaaactgttttaccgaccaaaagcgctgagcaataccgaaggcgcggcaccctggcaggaaaagctgacgctgaccaaactgggtgacaaataccaggtgaataacccaacgccgtattacatcactatcgtggatgccggtactaaaccggggggagcgagcgccaaaggatttgaaccggtgatggtggcgccaaaaggcaaagagatgttgaacgtcggcgtggcagcgctgggcaatgcgccggtgctgacctatgtcaatgactacggcggccgcccgcaattgcagttcaactgtggtggtgccgagtgcaaggccaagcccgtcaagccaagctga

SEQ ID NO: 434381 - DNA, 2535 bp, Serratia marcescens
atgatgatgccgagctggactttattacccttccgcccgcgtgccgtgggtgtttatattgcctgtgcgttggttttttttgggtattacgccagtgcagaagaggtgcagttcaataccgatgttcttgacgtcaaagacagagataatatcgatctggggcagttcgcacgcggcggttatatcatgccgggtgattacatgatgcagatccgtattaacaagcaggaattacctgaacaatccgttattttttatccgacggaaagtgataccaacgacagcactgcgtgcatcagcccggccatggtcgaacagttcggtttaaaaccggacatgaaagaaaaactggcctggtggcatcagggcgagtgtttaaacttggacagcctgccgggtacgtcggcgcgcgccgatttgggcagcgccagcctcaccgttagcctgccgcaggcctatctggaatatgcggcagacaactgggatccgccgtcgcgctgggatgacggtgttccgggcctgctgctggattattacctcaatgcacagacccagcggcagcagcaacgtggtcagcagggatataacctcagcggcaacggcacggtcggcgcgaacctgggcgcctggcggctgcgggcagactggcaaacacggctggatcaccaaacgggcagtgggcaggcgacacgccagagctgggactggagccgttattacgcctaccgggccattcctcgattgggggcgaagttgtcggtcggggaaaactacctgtactccgacatctttgacagtttccgctttaccggcgccagcctgatcagcgatgacagcatgttgccgccgaacctgcgcggttatgcaccggaggtcaccggggtggcgcgtactgacgccagggtggtgattagccagcaggggagggtgttgtatgaaacgcaggtcgcctcggggccgttccgtattcaggacattaacgacgcggtgtcggggcagttggatgtgcgggtggaagaacaagacggcagcgtacaggagttccgtatcgacaccgccagtatcccgtatctgacccgcccgggaacggtgcgttacaaagtggccagcggccgcccttcggactggaagcacagcaccaatgggccattgttcgcgactggcgaattttcttggggggtcagcaacggctggtcgctgtacggcggcggcgtggcgggtggcgattataacgcactggcggtggggatcgggcgggacctgatgatgtttggcgcgctgtcgtttgatgtgacccagtcgcgggcacgattaccgcaactggagtacggcaccctgagcggaggttcttaccggctgagttattcgaaaaacttcgacgagtatgacagtcaggtcactttcgccggctaccgcttctcggagcgcaattacatgtcgatgagcgagtacctggatgtgcgcacttatggcacccgcaaccagaacagtaaagagatgtacaccgtcagtttcagtcagcacttccgcgatcttgggttaagtgcctacctgaactacaaccaccagacttactgggacagcgcggccaacgatcgttacaccctgacgctatcgcgcaatttcgacatcggtcagttcaggaacctgagcctgtcactgacggggtatcgcaataagtataacggcgtcaacgacgacggcatgtacctctcgctatcgataccgtggggcggcaacggctcggtcagttacagcggcagctatgaccgcaacgacagcacccaccaggtggggtactacgatcggctggataacggcgacagctatcagttgagcagcggtgttactcgcagcggtggttcggcaagtgggtattacacccatcagggcgatatggctcaggtcaatgccaatgccagttaccaggaagggcgttattcgtcggccggggtgtcgttgcaggggggcgcgaccgctagtctgaaaggggcggcgctgcacaggtcagggatgatggggggcacccgcatgatgctggacaccgacggcgtggcggatatcccgatcggcggttatggcgcggtgacccgcaccaaccgcttcggcaaagcggtggtcaccgacgtcagtagctactaccgcaaccgggtcagcattgacgtaaacaaactgccggaaaatgccgaagcgacgcgctcggtggtgcaggccactctgaccgaaggggcgatcggttaccgccgatttgaagtgatcgccggtgagaaggcgatggcggtgatccgcctggcggatggcaccacaccgccattcggcgcgacggtgcaaaaccacaaaaagcaggacgtgggcatagtgaacgacgacggcaatgtgtacctgagcggcattaacccgaacgaggaaatgaccgtgcactggagtgggcaggcgcaatgtgcgttgacattgccggcgcaaataccgagcggcgacattgccaacctgctattgccgtgccgcctgttaccggcggacgtggcggcggaataa

SEQ ID NO: 434382 - DNA, 591 bp, Serratia marcescens
atgcgggcagtaccccgcatgcattcttgtcagagtgatgtacaggagaatgatgagatgaaatggccaaaaatacgttattcggcgttttgcctgttaatgctgttaccgatgcagagctgcctggctgcagcagggtggggacgggttaacatgcaaggtgctgtcattgaaacggcctgcgccattgataccgacagccgtgatcaaactattgatatgtccacagtgccgttgagccaaataatacgtgataggaaaggtgctacacgcccattcagtattcgcctggttaattgtgtattggagcgcatcgatgaaaatttaccgaagtggcaacgttttcaggtgacgttcgatggtcggagagataatgggttattcggtgtcgatgggcaagcacgcggtgttgcactacagcttgccgacagcgaaggcaatatagtttcgccaggcaacccaacgccgttgctggatattaccgaaggcaacagagagttaaattactctctgcggttggtcagcaatcaacagctattacgcagtggggaatacacctcgagcattagatttaaaatggactattactga

SEQ ID NO: 434383 - DNA, 528 bp, Serratia marcescens
atgaaattgaataaaatcatgatggctgcagttttggcattcggtactattactgtcgcacaggctgctgacgaagggcacggtaaagtcaccttcaccggttctattattgatgctccttgctctattgatcctaagtctgttgatcagactgtggatttgggcgcagtatcaaacgtttctctgctgaacggcggtaactctgacccgaaaccgtttgaaattcatctggaaaaatgcagcctggatactgcgaaaactgtgaccaccacgtttgacggtgctgcgggcaaaaatggcctgctgggtatgactggcgatgccaaaggtgccagcattgcaattaccgatggtagcaataatgtcattgaactgggcaaaccaagcgcgggccagctgatcagtgccggttcttctgaagcaactcttgccttcagtgcctacctgaaaggcgacggtggtgatgatacatctatcgttccgggtaaattccagagcgtggctaacttcatcctgaactacaaataa

SEQ ID NO: 434384 - DNA, 798 bp, Serratia marcescens
atgaaatacataataaatctaaccatggtttttgatcctgacagccggctattaatgctgaggaacaacacccaactaaccatagggttatcaaagccggctacgcgattgctaatcgagttgataagaaataataaaattgaattaacgcgtgaaacactgataaagcacgtctgggaggattatgggttttctccctccagcgctacattgagcaaccatattagtgagttgagaaaagcctttgaagcgctagagataagcaaagaaattctgctcacggtgccacgagtgggttttaaaatggatgcagaaatccaccctgaaaccaaaccaccgaaagaagagggatctattgaaatgattgaccccgctgttaccgcaagtgagccggtaaagcagcaaaacgtgacgcctcactccacagattcgggccacagaggaacgctgcagcgcatgctgaaacccggcctggctcttatcttcgccttactcggcattgctgcagcgataaagttgatggctctgcacagtaatgaagagccagtgctcataggcgttcaggataaatgcaatttttataccctggataacaataagccaagcagtgaacagtctgctcatgcgcgaaaaatgctctccgatgtaaagatagactgtacgcagataaatcgagacatctactatattgtggctcgccctgccaatgaaaaactaaagattcactttatggcagtttgcaacaaaagaaccaatatgagctatcaaacttgtaataactataaactggttgagtaa

SEQ ID NO: 434385 - DNA, 1371 bp, Serratia marcescens
atgatcgtctggaaacggtttacctaccgttttctggcctgcctggctggggggatgatgctgccagcagcttcatcgacgccaagcaaggataatgccgatattccggccttgctgcagtttgccgagcaatacagcgaaaaaagccatccggtagaaaaagcccttgtcgtgcgggatcgccctcgccccgaaaaacacccagcccctagcgccgagaaaggtaagcctgacaacaaaccgccaccacagcgtgaatcctggcgaattaaggataagacgatccagcaacagggcacggaaatagcccagctaaaattacagataacccgtctgcagcaaaacaccctaacggcaacgccggactgggccgcgctatcccaattggcgcaaagcttgcgccaggcgctggggatgactccgacagaacgccaggcaaaagccaacctagtacagatacagcagcggtgggatcaggatcgggcggtattacagcaacagttgtccaaagcaaaagcagaaaaccaggtcttatcagcggcagccaatcagcaaaaaaatttgctgatagaagcagaaaagcacaacgcggcgcagcgggagcaacaggctgaattgcggtcgcagcgccaactgatgcaaagcgagttggatgataccgtcaagaaactggcagatacgcgcgccgacatggcttctttgcaagcgcgaagcccccatctggtgacggccgatgcgctcaaaggcgcacagcagcgtgaggattacgccgcaggcgtttccctgggagaggatattctgcaaatgcaggaagaacggcagcgttggggagtgagatcggagaagggaatgctattggccggcattgcagatgcctttgcgggcaagcggatgttgtcggatgatgaacttaataacaccctggccgccaccgaggaaaaggtggtatccgcaagagaaaaagttagcgtaacccaacggaaaaaaggtgcggcctatctaggggaattcaagaaagatcagcgcgttcaccaggcatcatccggattttggtaccgtatcgactatgcgggcgatacgcagatccccgctaacgcctcggtggatgtggtggtaaaagaaacgctggtcgacggcaccgtggtgcaagatatggaagcgactggcgccacactgtcgcagccggtggcggatttcccaccgttgtttaaagaggcaatttcactaatgaaaaatcacggtacgatgaccctggtggttcctccagaacaggcttacggagagaaaggctatccacctaaagttccccccaacgccaccatgatttataccttgcgcatagcggaggtatacccacctgctcaagcctaa

SEQ ID NO: 434386 - DNA, 648 bp, Serratia marcescens
atgcacaaagctagcaagaattttcagcaaattgtccgggagcagcacctcattccacaggtagcgagtagcgtaatcgttcgcatcttccgggatgtcgttccccgcaccaccgtcgtgagtacctttgttaaatggcagaaagtaggttttatcaccgtcgagtttggtcgccataaacacttcgtactgactgacagcaaagtgcaccagtgccccgcgtttaaaagtaagcagcggctcaggtttgttggtgacgggatcctttggcaaacgcgttttcttatattgcgtaatggcgttttgcactgcctgtttaaactcagacttcagctccaacgttgccaccggcaaaccgttgacgaacaaaaccaggtcgatacgccactttttcgcttttgtacccgcttcttcaaatgccgctttcgaagcgtgtgggctatacaccagttccggcacaatacggcagatattctgctgataacgcgcgagcgtttccggattgaggctatgctccggcttaaactgacacagggaaaaacgggcgttatggcttttgatcccgtgccgcagcacgccgagggtgccgtaagtacgcgacagcatatcggtagcgttgatatccgcttttctcagctgagcgactag

SEQ ID NO: 434387 - DNA, 1365 bp, Serratia marcescens
atgactaagtataaggcgtatccagagtataaggactctggggttaagtggttgggggaaattccaagaaattggcaggtgttacgtggaaaatatgtatttagagaaatcaaagagttatcttatcgaggggatgagacactactttctgtttctgaatattatggagtaaaacctcgacaagataccattgaagagggggagtttatttcaagagctgaatctctaattggttacaaaaagtgccaaatcaatgatttggcaatgaacatcatgcttgcttggaagactggtcttggcgtttcaaaatatgaaggtattattagtcccgcctattcggttttcagatttgacactgcaatagcgttacctgagtatatgaactatctactcagaactaaaatctatacagatcatttcaaatccctttcaacaggggttattgattctcgtcttcggttatatcctgaggtattcggaacagttaaaattttgttaccacgatttgatgaacaggtgatggtatctgcatttctcgatcacgaaaccgcaaaaatagataagctgatcgagaagcaacaacaactgatcgaactgttgaaagaaaaacgccaggcagtgattagccatgccgtcaccaaagggctaaaccctgatgtgccgatgaaagattctggcgttgagtggttgggggaagttcccgagcattggcgagtcagtcgagttaagaattttgcaaaaattgaaagtggacatactccaagtaaaactaaatcagagtattgggtcaattgtatcatcccatgggtatcattgaatgactcaaagcagttaaaagatgttgattatattgaggatactacctataaaataagtgagctagggatggctaattcatctgctcatttgttacctgctcgtgctgttgtttttacacgtgatgcatcaataggactcagtgctataacaacaaaacctatggcggtatcgcaacatctgattgcttggctttgtaatgagagatttgtcgtccctgagttcctgcttcttgtgttttatgcaatggaaaaagaatttgagcgttatactttcggcgctacgataaaaacaataggtatggataatgttagagggctgagatcagcatttccaccaattgatgaacagcataaattgatagaatgggcatttaagaaattagaaaaaattaaattttccattaataaagtagaagatataatctcccttctccaagaacgccgcaccgcccttatctccgccgccgtcaccggtaaaatcgacgtgcgcgactgggttgcacctgatatgcaagacgctgaggagccacaggagaccacagcatga

SEQ ID NO: 434388 - DNA, 1653 bp, Serratia marcescens; identical to SEQ ID NO: 429225

SEQ ID NO: 434389 - DNA, 1569 bp, Serratia marcescens
atgaccattccagcccttttaaaaaagcatggccccatcctgagctcaaagctgtgtgatctcatgtgtgcagagggagccttaactcgagaaacggcacggcagcacatatcacgagcggtgaaagctaaaaccgtgcattgtctgaaagaaatgtttcctcgtagagagcattttttatatctgccagcgcaatttggctcatcgcagtactggagttctctcactagtagtcttcaggccacacgctctgcttatggatacgcactgggtgcattaagtgcacgtggcggtgttattcctactaggcatttccctgctgcatgtggggcaccaaagaatatgagcaaaaggttatcctttgataccgtgagagaagggcttttaaaacaggacttggttaaaatagtaacaattcctggttgcggtgagtgtgttgcattacgggaaaaacatgatgagaaccttgttgctataagaaaagaggttaaagcgcgacttataacagagtctattttgataaaacatgttgcgcaatggattaaaaatctgggaataggtagctatgaaaaggttagaactagggataacgatttattagcgccagaagttacaagattccagtttgatatttcttcgccaagctatttgtcgcccatattgacactaaagaaaacaggggaattcatgcccggttttgtagcttgcgatgttttactcaatggaaagcttgagttaatgcatgtgagccccttcattaacaaatgtcgttctattaatagcttatctaaaacaggacgaaccttattcatatttgtatctgaaaattacactctcgaagcatttcaagcattgaaaactgaagggattatccctgcaactgttaataacttatttgggcaggacaccgccgacgctcttattatgttaaaagatcttttgcagtggattacaaattcagacgattttattggtaatattgacaatataatgtcacgtctttccaagattgaaggggtattaccacaactccaaggcgatttattcgaatatctagttgctcaatcacaaagagattttggtcaagttgagataggtaaattatgtaaggatgaaaatagcaaatctgctgactgtgacgtgctggttaaacatgggcaaagatcagtaacctttatcgaatgcaagggctacaaaccctattctgaagttctgcataaggatgttatgcactggatgcatgatcaggtttcagttttttataaacatgcgctacgagaatatccaactctgcctgtaaaagtggaattctggactactggtaaattgagctacgaatcaaagaaagccatagataaatttataaaaaacaatgaaattcgcaatcgttacgaaataaaaattcgtgaggcggataatgtgcatgaaaaattcatagaaactagtgataaatcacttatcaaagtttttgaacggcattttttggatccaatggaaaaaaaagggtatcgactatcaaggcctagaaagcttgccacctcttcgtttgaggatgatgaaccattctaa

SEQ ID NO: 434390 - DNA, 1605 bp, Serratia marcescens
atgacccttccaaccaaaatcgacaccacgaatttactaacgatactgagtgtcattgccgctgtgtgggcccttattactccaactaagaggcttttactacagttcggtatggcctggtgggactgggtgattgttcttggggtttttgctctaagtaattacttagtatttgcaccaaccctaaaagcattgggattttattatagttttgggccctggaaatgggggttagatagttcaagtgctgtttacttgctactcttatcagtttctttctatctgtgcttgcgttttaaatcaccaaagcttctgcgaggaaaaataaataatttccgcatgttactagaaaacttacatcttacaaaacaatatgaagacttggtgcgcttgttagaacctcagcttgataaattattgtttataattaaaaacccaccatttatagcgcggaaaattgatggactatataatattatgggtaatgtaaacctcgctgaggttatgatagtagaatcatctttgattcggtgtttacaaaaaaaattacgactttttagaaattatattttgaatcgtgatgactcggatgagcaagcccgtgaagtactattaaacgttttgacttcaccagaactaacaagacatcttgcgcagacccatccacatttttgtcttaaactaatcaaatgcaatgaggtattcagtaccgatttcactgcggattttattagtgcattactcaattcacctaatagtcgtctttatgtcgagctaaaaaacaatctaaacactaatggtggaagccgtttagcaatcccgaaaacaaaccgattattacattttttattttcgaacgcggagtttgctaaatataatgatttttccagagctattggtgaaactcttttttggcgtttggacgaagacaatagattagctgaggttcttaataaaccacttggctcatatggtgatattggaaaattccagtgtcctatttactctggcattacaatgtttgaaatcatggtgcatgagggtatccaccaggtattacatgatcatctatggctacactactataaacactttgctgaaaaaattcttaagaagatgaccaaacaggatgaagatatctggggtgagtggcaaaccccttttcactatcttttatgtcatttgtttaaagtagctacaaattggtctgagcaatgtgcttacattaattattctgaaattttaaaaaaaaaccaaaaatcaactagtcttgatccttactacatatccaaagagtctactaaattactaggttcaatgctggagctaattattccaagcgataaacttattttaagttcgaaaaaggaaatacttgaaacagtcgtgcggtgttacacaagactcgaaaggaatcctaagttaagggctgtggctgattcattattaatctcaaccactaagggagattttaatatgactaaagcctcttaccgcaagcaactcctggaattgtttgatgaaatcgacgatcatcgggtacgtggggatgcgccaaaatttcgaaaagcaatcgaatcggctattgaggtcaaacctgagtag

SEQ ID NO: 434391 - DNA, 177 bp, Serratia marcescens
atggctacatcaaagtgtacctacatctttgccgcaatcaaccgcacccagcgcaaaatccgcccggtgatgttgcgcattaccgccggtgacgaacgcagcgcccgccgccagttggccggtgactacgtactcctgttcgccggtcgcctgccacagggaggctgccatgcgtga

SEQ ID NO: 434392 - DNA, 282 bp, Serratia marcescens
atgacttcatcacatgggcaaacatcagctcagggcacgctgttgccgccatcctgccgctacctgtcttacggcatgaccgaagacgcctttgaaaaacttaatcgcgccaagcaggcgtgttcgctgctggatatgttgttcgccgggcaggccgcctctacgccgttcccgactggcatcaccacgcaggaaatggccgcgatggtggcttacctgtcggaggatttggccttcgttcaggcgcagtgcgccgcaattaacggcgaggtggtcgcatga

SEQ ID NO: 434393 - DNA, 1731 bp, Serratia marcescens
atgaaaaggacctttctttcgcacaaatcaagagcgaaggcgttgagccgcgttctcgcaggtgttcttttcactggcactttcccgggcatggccgccacaccctctgatacccctgagcgggccgcttccgccattgatgcccgcgagcagcagcgccagcaggcgcgcgagcgcgccctgcaacagcaaaatgccccgcaggccgatgcgcgtctttcccgccccgaggccgtgttgccggattacccggtcaatgagtccccctgcttcaccatcaatcggctaacgttggtcggggaagcggccggccgctttcagtgggcgctggacgccgcagcagatgccagaggccgctgtctgggtagccagggcatagtgcttgccatcaataaagtacagaacgccatactggccaaaggctatgtcaccacgcgggtgatggcgcaggagcaggacctgaccagcggcgtgttgacgctcacgctacaaccggggcgtattggtgacattcgctttgaggagccggtctcctggcggggacggctgtggaacgctattccggcctcgcgcggcgatatcctcaacctgcgtgatatcgaacaggggctggagaacttcagacgagtgcccagcgccaatgccgacataaaaatcgtgcctggcgcccaggaggccaccagtgacctgcaggtcaactggcacgaggggcggccggtgcggctcagtctggggctggacgacagcggctccaaaagtaccgggcgttatctcggttcggccactctggctatcgatgcgccgtttgcacagaatgacctgttttacgccaacatcggcaaggatgtgtttcagcacgggccgttcggcaaccgttcacatacgctgaattacttcttcccggtggggtattgggccttctcggccaactacaacgactacacctaccatcagaacatccccaacgccaacgaggtgctgcgctatagcggcaagagcgacaacattcagttgaccgtctcccgattgctctaccgcgaccagtcacacaagaccacgctcaacctgcgcggctaccgcaaacattccactaacgccgtggacgacgttgatattgcgtcgcaaaaacgtcggaccgccggctgggagctggggctgaatcagcgcagctatttcggcaccactacgctggacgccaatatcaactggcgccgcggcaccggcgcattcaatgccctgcctgcgccggaagaatcgcgtcacgaaggcagtgcgcgtaccggcattttgctcggagacctgggcatcaatcagccattttcctggggtgggcagtcttggcgggtatacaccagcgtacggggccagtggagtccgaatgcgctgacgccgcaggagcggatggccattggcgggcgttacacggtgcgtggctttgacggcgaacagatgctgtctggcgaaaagggcctgctgtggcgcaatgaaatcgcctggaatgtgttttctcgcgggcacgaactgtacctggctgccgactacggccgggttgacggcccgggcacccgctacctggtgggtcatcagttggcgggcagtgcgcttggtgtgcgcggcgcgctgtgggggcgattcagctatgacctgtttgctggcgtgccgctgtacaagccagcagggttccatacctccggtgcgaccgcgggttttagcgtaaatctggaaatttga

SEQ ID NO: 434394 - DNA, 10902 bp, Serratia marcescens
atgaacaaacattgctatcgccttatcttcagccgcacccacggggagctgcgggtggtgtccgaactggctcgcagttgcagcagcgaaccggggcagcgcatcggttcaggaataacggctgggagtcgtctgtgggtcaccgtgcgtcggtcagtgtggctgctggggctgctcatgttcgccagccccgtcatggcagacggcattgtcgcggacggcggtgccaatccttcccagcggccggaggtcatcaatacccagaacggcttgccgcaggtcaacatcacagcccccaatcaggctggggtctcacataaccagtatcagcagttcgatgtcgacgccaaaggcgccatcctcaacaactcggcggtgatgacctcgacccagatggccgggatgatccagggtaaccctaacctcaatcccaattccgcgccggcgcgcgtcatcctcaacgaagtcaacagcaacaatcccagccagctgcgcggttttatggaagtggccggcggcaaggcgcaggtgattgtggccaatcccgccggcattgtctgcaacggctgcggcaccatcaacgccgggcgcatgacgctgaccaccggtaaaccgcaactgaatgccgatggcagcgtggcaggttatcaggtcgagcgtggcgtggtgcgcatcgagggcggtgggctcaacggcgatacccgtcatgataccgagttcgtcgacattctggcgcgcgcggtggaagtcaacgccggcgtctgggctaaagaaggcgtgtcggtggtggccggtcgtaaccgcgtgagtgcggacggcaaaaccgcgacaccgctttcggacgacggcagtaccagaccagagcttgccatcgacatggggcagatgggcggcatgtacagcggcagtatccgcatgattggcaccgaggccggcgtcggcgtacgtaatcagggcggacaggtccgggcgggcaaaacgctcaccgtgagcagcgaaggcaagctcagctggcgctctgatacgccggatgcggccacgcaggccggcggcgatatccaactggcggcaaaaggtgacattgagacgcacggcaaagtgtatagcggtggccaactggccgtgcagagtcgcgagggaatgttatcgcagtccggtacgctggcggcggccgggaatgtgcacctgaacgcggcgcgcggcatccagagcagcggccacctgctggcgggcagcaatgccgacagcacgctggtccaggatgccaacctgcagctcgatagccagggcgatatccgtgccagtggcagtctgcttgccaagaagagcgtcaacgcgtccgggcgccgggtggatatcagcggcgcacaggttgcgaccggtcgtaccgcgctgacggcacgtgacggcggcgtggccttgcgccagtccaccgttgacagcggtgagctggccgtgagcacgaagggaaatgtggaggcgcagcaggccaaagtcaaggccgggcgctggacggtggatgccgacaacctgttcagccaacaggcgacctggtcacagaccggtgacggtgagagccgttttaccctggcgggctcgttggataacagtgacggtgccatcgaggcacagaacctccggctttcggccagccagttagtcaatcagcgcggccgcctggtggcgctggggggcgcggcgcagtattggcaggtcggcggcctgctcgacaatgccggcgggacggtgggcagcaacggcgacctgcgcctcgaggccgggcgcctcgataatcagggcggcacgttaaaaacccagtcggggctcacgctccatgctgatggcgcggtgaataatgccgggggcaacctgctcgccgggaacggcctgacgcttgaagtaggcagcgagctggataacgcatccggtactctgagcggcgcagacgtgcgtctggtggcgcagcggttggataacacgcaggggcaggtcatcggtcagggcaatctcgacctgacggccagccgcctggataatcaacgtggcctcattggtgccggcaaggcgctggatatccataccggcgactgggacaaccgcagcggtacggcgcaaggcgaaacggccgtcacggcaacggcagcgaccctcaacaacgacggcggcaagctgctgtcaggccaggcatcaaccctgaccacctcgggcaacgccagcaaccgcggcggcgaaatcagcggcgcggcgctgacggtgaacaccggccggctcgacaatgcgcaaggcaaggtgattggccaagcgcggcttgacctgcatgcccgccaggggttggacaatacgcaagggctgctgggtgccggccaggcgttgaccgtgcggaccgacggtgagctgaataaccgccgtggcacgatatcggggagcgggcaaacccacatagcggccgggcgcgtgcgtaacgaggccggcaaactgctgggcgggcaacaactggtgttgaacagtgcggctgagttggtgaaccgcgagggcgaaatcagcggtgagtcgctcacgctaacggcgcaacgcctcgataacgctcagggcaaggtggtcgccatgcaggatataagcctgactgcgcaacaagggctgagcaacgccgccggctggcttgaaggcggcaatagtctcaccgtcaagaccgatggcaattgggacaaccagggcggcaccgcacaaggtggccggcaggtcaccgccagcgcgcagtcgctcgacaataccggcgggcatctccagtccggcggtgacctgacacttgacgccgcaggcaatatcctcaatcgcaccggtaaactgactgcgcagcaggctcttgccgtcaaaggaggagcagccagcctgttcgataatgatggaggctccctgcagagcggcggcgacttatctttgcagggtggtcagttgaccaaccgcgccgccggtgtggtgctcggcggacaggcgctttccctgaacctgaccggcgactgggacaatcggggcggcacgtttaccggcaatgggcgcaccgaggtgcgcgccgtcagtctgcttaataccctaggtgcaatcaacgcgctgggcagtctggacatgcagttcaccggcaagctgaataacggccaggggcggatttttagtcaatcgtctcaggtactgcaggcgcaggacattttcaacacccagggctggatgggcagccagggcagctggcaggcgatcagcggcagttttgacaatacggaaggcagtgtgcagagtctgcaggccgtacagcttgcagctgactggctcaataacaccaaaggtgtactgcagtcggcacacgacctggcgctgcgcatcaaacaggatatcgataatcgcaacggtaaggtctcggcgcaggggcagcttgctgttacgggtgccaaagacggcgaacacgccggcgccatcaataacgccggtggtcagtggctggctggcgaggggctgcgtatcgccgcccgtgcactcgacaatacgcagggcgggctgctctacagccagaaacaacagcgccttacgttaagcgactcgctgaacaaccacgatgggaaagtgcaaagtggtgaggcgcttcaacttgacgcacaagcgctgaataacgccggcgggacgatagacggccagcaacaggtgacactgcacattcttggcttgctggaaaataccggcggtgcagtgcgcagtaatggtgggcaagaggtgtcggccgccggtatcaataatacgcgcggcgtattcagcagccgcggcggcatcacggtgacatcaaagcagctggacaacgacggcggcacgctcatcagtcagggctcgggcatctaccgactcgaccagcttaacaatcagcacggcaaagtgcacagcggtgaggcgctcacgttcgacggcacgcaggtgaacaatcagggcgggcaactggtgtcgactcagggcctgacgctcaaggccgggacgctcgataacagcggtcagggcacgataagcagccagtcagcgcttgatgtgcgagccgatcgcctgaacaaccgcgacggcgggctgatactgggcactacgcgtaccgacatcaccgcccgtgatatcgacaataccgcaggccgcctgcagagcagcgggcagatgaccctctcgggtgtcacgcagttagacaaccgccaggggcgcatcctggccgacggcaatctcgatatcaacgctgaccggtcacagaccgactcgccgctggcgctacttaaccagggcggccgcgtggagagcgccggtgcactgacagcgaatacgcgtactctggataaccagaacggtaccttgctggggctacaggcgctgacgctgtccgcgcagcaggactacacccgacaggccggcgacaccgtcagcagtaacggcacggtgacgttctccctgagtggtgcctttaccaaccaggcggactggttgctgccgggcaatctggtgctcaatgcagccagtatcaccaatccggccaccctggtgggcaaaacgctgcagctgacgaccggagccttgcaaaacaccgggcgccttgaagcggacagcatgacgctgaatgtcgataccctggacaacgccgcggcgctgatgggcgacgacatcaccgtgaacgggcgcattatcgacaaccacggtgcgcctgcggtgatggcggcgacccacagcctgacggtgcaggccggtgagcgactggccaatcgggagggcgcgctgatttacagcgccgaccgtctgcagttgcacagcgatgacctgattgagaaccgggcgagctttatcgaagcagacggtgacgccaccgtcgaggcccgtcgcctgaacaacctgcgcgaagggctggtgattgagcgtgacgccgagaagagcgactacaaatggcaccgctacaactactattggcgctcttatggttcaaaggtcaaccctgacaaaagcaccctggcgccgactacccaacagctgaccttccaggatgatgcggcggcacaaaccaaccgctacggcactctgctggccattgatgcggcgggcaaacgcgcgcaggtgcgggtcaaggacaacaaaggcacacttaccgacctgtgggtcaattacctggcgctcaagccgaatgccgacggcagctttgcgatgacgttctacgagacgcgggggggaaaccagctggcgactatcccgacgccgtaccaaaacggcttccattgggaacacgactggacgcaggtgatgacctgggatcccgaaaagcatgtcgacatcgacagcgcgccatttatcaccgattacaacaacttccgcgagcgtaccgaaagcggcacgctgacgcgcgacaagctggtctccgagggcatcggtgcgcgtattctggcgggcggcaacatggtgctgcgcatcaccggcgcgctgctcaatgacgccagcgttatcaccgccaacggtaacctgacgcaggacggcggcggcagcgtagacaaccgcggttactcggttaacgaacggcgccaggcggtgatcgttgaccactatgacaaggacacgcatcactggtacccgacgttcaaccgggacgagaccacggcgttggcgaccgttgacggcgtgatcaccggcagcggcaccgtcaccattaacggggcccgtatcaccaacaccacggtcaatcaggcgcaaatcagtcaactggatgcggcattgaaggcggtggatgccgaacgcgccgagcttgaacgcaatccgctggccttcacggtagaggcggctgcccgacctgacggcgatacgacgctggcacaaggcgaacagatgacgcaacccggtgccacgccgtcctcgccgctggggcgcccgctgctgccgtctgagctggcgctgacgcagttacagcatctgggcaatgtggccaccgccatccccaataacggtttgtttagtcaacatacggcgaccggcagcccgttcctggtggtgaccgatgaacgctttacccgccgcgacaactttatcagcagcgactatatgctcgagcgcgtcgggtatgaccctgcgcaggcccataagcgcctgggggacggtttttacgagcagcgtctggtgcgcgagcaggtgctggcgctgaccggcaaaccgtccgtcaagggctgggatgcgatggagcagtatcagcaactgatgaacaacggcagcaaagtcgcccaagacttccatctggtgccgggcgtggccctgacgccggagcaaattgcggcgctgcaacaggatatcgtctggctggtgagcgagacagtgcaaacggaaggcggcccgcaaacggtgtgggtaccgaaggtgtacctggcacagagtacactgcgcctgaccggcgatggcgcgatgattggtggtggtaatctgcagctctcggccaacagcatcaacaatgccggcaacctgtttgccgacaaagccctgacggtcgacgccgggcagttcctgcatcagggcggtgacatcaaggctggcagcattgacgtgcaggccgacagtctgaccctgagcaccaatctgcaggatgcgctgcgtcaggcaaccctaagcgccggcgatattcgcctgcgcggcacggatatcacgctcacgggggcgaagcttgatgcgaccgatacgctcaacctgagcgcgcgtaacgacctgaccatcaccgccgcgcaaagccgccataccgccgaccttgaggttatctcgggctctatgggcaaccgtacccgcggcggcacggaagcagcaggctcccggatggcgcacgtcagcggcgaatggcagcaggctaaggggagtgaacttaacgccggcggcaaccttaatctttcggccggccgggacgttacgttcgcgggcagccaggccaaggccggcggcagcacccgcgtgcaggccggtaatgatatcaacatccgggccgagacgaccaccaacaccacgcacctggatgctaacagccgtacttcctcggtcagcaacgaccgccaggaagagcgtctgacattaagcacgctcggcggcgaccagggcgtcaccctggtggcgggcaaccaactgctggcggaaggcgcgcaggttgacagcaaagcgggtcgcataggcgtcagtgcacaggacgtgactattaaagacgcgcgcacccgcacgcaggaccaggacagcgaaaacaaacgcgagggcaaaaccaaaagccatcgcatcgaacaaaccgagcgcgaaatcagcaccggcagcaccttcagcggacgcgagggcatcacggttatcgggcgtgagggcgatgtcacggtcaccggcagtaccctgcacagtgaccagggcgccatcgccttgcaggcgaaaaaggatgtcaccctcaatacggccaccgagcgcgagtcgcgctacagcgaggaacgttccgagaaaaaaggcttcctgaacaagagcagcagccataccgtgaccgatgaccgaaccacgcgtgagaacggctcgctgctgagtggcaacagcgtcagcatcagcgccggcaatgacctgacggtcaccggttctgccattgccgccgaccaggatgtaaacctgcaggccggccgtaatgtcgatatcggtgcggccaccgaaaccgagacgcattacctgctggaagagaagaaaaagagcggcctgctgggcagcggcggcatcgggtttacgattggcaaacagtcgagcaaacacgaaatcgacgagaaagccacgacacagagccaaagcgtcagtaccgtcggcagcagccagggcagcgtcaatattacggcgggcaaccagctgcacatcggcggcgccgacctggtggcgggcaaggatctgaatcttaccggcgacagcgtgactattgaccccggctacgatcggcgtacgcgcaaagaaacattcgagcagaagcagagcggcctgagcgtggcattgtcgggcaccgtgggcggcgcgctcaacaccgccgtcagctcggcgcaacaggcacgaaaagaaggcgacggacgcctgaacgcgttgcaaaataccaaagccgcgctgtccggcgtgcaggccgcacaggcctgggagcgggataatgcgctaaccgcctcggcggaggcaaaaaacgccgccgccggtttacagccgggagacgaaggtgcggcgcagggcgccaccaacacggtgggcatcagcgcctcctacggcagccagtcgtcgaaaagcgaaacccgcaccgacagccgccagtcgcagggcagcacgctcaccgccgggcaaaacctgtcgataacggcgaccggcaagaatcacaatgcgcaaagcggcgatatcaccatcaccggcagccagttgaaggcgggcaacgacctgtcgctcgatgcggcgcgggacattaccctgcagtcggcgcagaacagcgaaagcaccgtcggcaagaacagcagcaaaggcggcaacgtcggcgtcggtatcggcgccggttcgggcgggtacggcatcagcgtctcggccggcgtcaatgccggcaaggggcatgagaacggcaacggcctgacgcatgccgaaaccaccctggatgcaggcagccatctcagcctgaccagcggccgcgataccacacttaccggcgcgcaggcgagcggcgaaaaggttaccgtcgacgtgggccgtgacctgacactgcaaagccaacaagacagcgaccgctatgatgccaaacagcaaaacgccagcgcgggcggcagcttcaccttcggctcgatgaccggctcagccaacgtaagcgccagcaaggacaaactgcacagtaacttcgactcggtgaaagagcagaccgggctgtttgcgggcaagggtgggtatgacgtcacggtcaaagaccatacccagctcgacggcgctgtgattgcaagccaagctgataaggagaaaaaccgcctcgataccggcacattgggctggacggacatccacaaccaggcggattacagtgcgacgcacagcggcggttcattcagcaccggcgggccggtgggcaaagacctgctgaccaatatggccggcggcatgctgtcaggtgccaacaacagcgggcacgccgagggcacgacaaaaaccggggtcagtgagggaacgctgatagtccgtgacaccgacaaacagcagcaggatgtggcgcagctaaaccgggatatcgaacatgccaacgacggcagcatcagcccgatattcaacaaggagaaggagcagaaccggctcaaacaggcgcagttgattggggagattggcggccaggcgatggatgtcatccgcacgcagggcgatatcgccgggctgaaggcgcagaaagacccggcggcgctggcgcaggccagggagcagcttgagaagagcggtaaaccgacgaacgatgcggcggtgatgcagcgggcatacgacaacgcgatgcggcaatacggtaccggcagcgatctgcagaaggcggcgcaggcggtgacgggagcgctgacggcgctggcgggcaataacctggcgggtgcgctggcgagcggtgcttcgccgtacctggcgacggaaattaaaaagcgggtcggcgaagacaacgttgcggccaacgcgatggcgcacgcggtgctgggcgcggtgacggcgcagctgaacaaccagtcggccgcggcagggggactgggtgccggcggtggtgaactggcggcgcgctacattgctggccagctgttcccgggcaagacggcggagcagctgagcgaaagcgagagacaacaggtgagcacgctcagccagctggctacaggacttgctggcgggctggcgactggcgatacggcgggagcggtaaccggcggtcaggctggcaagaatgcggttgagaataactatctgagtgcgacacagatagatgattttgcggcaagggctaagggctgtgatgcgcgtggtgactgcggtcagatcgtgaaagaaatggaagatttgagcctgaagcagcagcaggaactgatcgctgtatgttctacagacccatccgcttgtaaggaaaaatacggtgatatcactgccaacgggatgctggtacgtgaagcgatagatcgcgcattaggtgatgatgtgccgtcaaaaatgaagaatgatatgtcttcattgctggcacaacagatcgaagcggaaggagttgtatccagcaccgaatttgctcaacggctccagagtatttacggcatcgacaaacagcaggctgaactgttggccggtgccgcgttgggagcggttaccagcggaatgagtaaaggcggtaaaccaatctcaggcattgaaggtaagaatatcgttgttgtggactccggtaagaaaggagcttggaacaaggcgatgaataagccggagcctaacactgtttataaggtcgatgggaataagacttatcatacagatgagttaaccagaaccactaatgtcagtgcatcactaagcctatctaaaaatgatagaaatggttatcagcaatgcaaagcaggtaaatgtggcaatctcggtgacgagggtggtcatttaatcgccagtatctttcatggccctggtgaaaagttaaatctggttccgatggatggcaatcttaacaaaggtgcgtggaaacagatggagaatacgtggactagagctttgaaggatggtaaaaaagttgatgttaatatccaacctatatattcaggtaataatactagacctgatagggtaatcgtaaaatactcaattgatggcggcagacctgtgaatgttgacttcaaaaactctccgggagggaaatga

SEQ ID NO: 434395 - DNA, 273 bp, Serratia marcescens
atgaaaatcagcatattgttgacgttgtttcctctgctgatgccggcatcggtgcttgccggcacggtacagtataccgatttgggcccggtgatggcgcaactgaacaaccagtcagaattggccggtggactgggtgctaacggctgggaattggcggcgcactacattgccggccaactgtccccgggcaagaaggcggaacagcccagtcgtctaagctcccttgatgataatcgcgagtggattcatgaagccctaaataaaacctga

SEQ ID NO: 434396 - DNA, 888 bp, Serratia marcescens
atgcctgttccacagggaaatagagttgacagcaggattgctgcacaactattcactagccaagctataaataagatagcagatggtgatcttacatttctctataaagtgttaagtgattatttaactccgactgtttatcctttgaaagtggctcaagtttttgaattagcctttagaaagctatcattggactataagactgagtatttttttaagaatgcaatagctaataaactttacataagaaggcatgccgagaaaaatgtaacgatgctgtcggaattcagagtaggaaacaacaaggccgactgcgtgattgttaatggaaattcaacgtgttatgagataaaaacaaagtttgatagcttaaagagactaccggatcaactttcttcatattcaaaaatctttgacaaggtttatgtcgtttgtgatcagacacatattaacaatgtattattacatgttccggatgaagttggtgttatcgagtttacagagaaaggggcgttgaaagaggttaagagggctatcgtcaacacccatgaaatagaccgcgaaattttgatcagctctttaagaaaacccgagtatgttttgattgcagaaaagttgacaaacaagccgttagaatcatccaatatgagcatttatgcagattgccttaatatatttaatcaggcaagctctgaagaactgagaaagctttttaaatatgctttaaaaacgcacagaaaaacagactttggctttgttaataaactcccaccatcccttacaaacatggcgattagctttaaacttaccaggtcaaagagattagcacttggaaatattcttacacaaagcattcataaggatgaaatatgtacttcccattcataa

SEQ ID NO: 434397 - DNA, 909 bp, Serratia marcescens
atgtacttcccattcataagaggtaagcaattcgaattggttgctcttagagagcttgctccaaaattaccaaattatgtttacaaaccaataattgaacccgttagagagaatttactacctctagtaaaaaccattaaatccattaatgaatttaatgttgagcctatcattgtagttaactcagatatcggtgatttcaaatcaaaatatgtcgatctatattccagcttactttcattagataacagtttgaattttattccatgtgtcaagatatctgatgaatctgttaattacttcgatattataaacgaactaccaaaaagaaaggctattttcatccctgacctattggatgataaaaacgcaaaataccttgttaactctgaatataacattttgccagctgacactctggatgaaaaattagcgattcttgatactgtggtattattagatgatccattccagaaaaagagtagaaatgctgactacaaagataaatctaaattctcatctcttcataaaaattatcatacccgaccaaatactatagggtttggtgattatacaatagttggttctgaatattctgagactggcggaccagcatacgtagtaacaatccatttgtcatatattgagaaagaacatcatcaaatgcttattcgacacttttcttcgtcaccaagcaagagcccagctaaccccgggggtaaatttgaagaagctctagctaatttcattctatatattaaaaacaaccctaatacatttgacgaaacctttggcatagaagagcttaaaaggctatataaaaatgagcatttccctgggttgggattagttaaaaaaatttcaattcaacatcatgttgagacgatttgtaattatttgaatcattag

SEQ ID NO: 434398 - DNA, 1032 bp, Serratia marcescens
atgccatcctgttgctctgagtgttttcatgatattgaaatagttgagtttattgtcaaagatcacttaaatggcagatgtggtcattgtaaaaaagaaaacgcatttaccataaatcccgaagctttatctcatttctttgaaccatttcttggactagttacggaaaaggaggatggtcgccttttgagtgaggtattgaataacttatttaatattttcagtagcaaggtaaaatccaactgtagactgctatctgaaatattaggtggggattacggtcagaaaaaatatgaattgaaacaggatttccaggagcatatcagtgcttgggaaacattcaaagaagagttaaaacatcaaaatagatttttccctaaaaacactctttattcttctcttttcgatactcgtgaggcaaatattgatggtgatttgtttcaaataattgaacaactgcgagtagaatatgatgaaggtgaggtattttatcgtgctagaataaacgatggcccgctattaaaagttgatatgggtatgccccctaaagaaaaagctaccgcaggtagggcgaatcctgtaggtataccctatctttatcttgctgatcacgaaaaaacttgcgttgctgaagtcaggcccaataatacgagcacaatttacatcgctaatttcacttcaaataaaaaactctcaatagttgatttaacggaaccaagaaaaaggttttcagtttgttcttttgatgaaggccgctttacaacaataatagggataattaagttgcttgaaacactatccaatgagttatccaaaccggtaagacctgaaagttctagtatcgattatatacccacgcaattcctttgtgagtttcttaaagggttcagtaattgtgatggcattgctttcgaaagttcatttggtaaaggtaaaaattttgttttttttgatgatgctggattcgatatcgaagatccggttccgcacaaaataataagtattgaacataattttttacctaagcagtga

SEQ ID NO: 434399 - DNA, 924 bp, Serratia marcescens
atggcaaagcaaaagtttaaaatcaccaactggcccacctacaacaaagcgctcaggcagcgcggctccctgacggtctggcttgatgagtctgccatcgctgcgtggactgacagcacacagcctgagggccgtggccgaccgcttcactacacggatatggccatcaccacagttctgatgatgaagcgtgtgttcaacctgtcgctccgagcagtacagggcttcgttgactcgatttttaagatgatggctctgccgctgcgcagcccggactactctctggtcagcaggcgctcaaagaccgtaaacatcagcataaagacgccgacccggggtgaaatctcgcatctggtcatcgacggtaccggtctgaaagttttcggtgaaggcgaatggaaagtcaggcagcatggggctgacaagcgcagggtgtggcgcaaacttcatctggcaacagacagcgcaacgcatgagattatctgtgccgatttatcgctcagcggtacggcagatgcgcaagccctgccagagctgataaaccagacccaccggaaaatcagggaagcctcggcagatggcgcttatgacacacgctactgccaggatgtgctgctaaggaaaaaaatcaggccgcttatcccgccgcgaagcggggcgcaatactggccggacaagtaccatgagcgtaaccacgcggtggcaaatcagcatctgagcgggagcaacgacgtctggaaaaagaaagtgggctaccaccggcgttcggtagcggaaacagcgatgttccgcatcaagaccctgctgggtggtcatctgagcctgcgggactatgacgcgcaggtgggcgaagcgatggcgatggtcaaagcgctgaaccggatgacgttgctgggtatgccggacagcgtccggatcgcataa

SEQ ID NO: 434400 - DNA, 1965 bp, Serratia marcescens; identical to SEQ ID NO: 76504

SEQ ID NO: 434401 - DNA, 732 bp, Serratia marcescens; identical to SEQ ID NO: 75878

SEQ ID NO: 434402 - DNA, 531 bp, Serratia marcescens; identical to SEQ ID NO: 14377

SEQ ID NO: 434403 - DNA, 180 bp, Serratia marcescens; identical to SEQ ID NO: 91812

SEQ ID NO: 434404 - DNA, 378 bp, Serratia marcescens; identical to SEQ ID NO: 14375

SEQ ID NO: 434405 - DNA, 300 bp, Serratia marcescens; identical to SEQ ID NO: 14374

SEQ ID NO: 434406 - DNA, 264 bp, Serratia marcescens; identical to SEQ ID NO: 14373

SEQ ID NO: 434407 - DNA, 420 bp, Serratia marcescens; identical to SEQ ID NO: 14372

SEQ ID NO: 434408 - DNA, 1686 bp, Serratia marcescens; identical to SEQ ID NO: 26170

SEQ ID NO: 434409 - DNA, 258 bp, Serratia marcescens; identical to SEQ ID NO: 14370

SEQ ID NO: 434410 - DNA, 942 bp, Serratia marcescens
ttgttagagcttggcgctgggtttaatccagagttcacagggcgtgaaaacgtttacctgaatgcatctcttctgggcttaacgcgtaaagaaattacggagcgtttcgataaaatagctagctttgccgatatcggtgaatttctcgagcggccggttaagactttttcgagtggtatgtttgcacgtttagcctttgccactgccattcatgtcgatcctgaaatattaatcgtagatgaaattcttgctgttggagattcacgctttcagcgaaaatgtgtaaagaagtttaatgaaatcagaaatgatggatgtacaatcctgttcgtttcgcacgatgattatcaggttcgaaatatctgtaatagtgcactataccttgaaaaaggtgtacagcgttattttggaaatgcagatgttgctgttcagcattacctttctgatatgcagaagagtgtgatggagactcaagatgccgaaaataaagctattgaaaatgaaataagtagcagattgataaaaatagctaatgtatctcttctcgatcggactgggaattcagtaaccgagctggctagcggtgacaatgttaaactgtctttcgattacaaatatgaaggaagtgacggggaattcgatgggctgacctttgtctttaatctttaccgtaaagatggggtatatatctgtgggacgactacagcaatgcgtggcttagaaccattttccctaagtcgggaaggacgagtgactattgattttcccgcattgaagttgttgtcaggtatttataactggcgagtcgctgtcaatgatcaagatggtatacagataattaacgaagctgtaccggtctgtgagttttctgtagccgataacttcagtgccgttggaatttatgatattgaacatagctggtctgtggtggccaaggggtaa

SEQ ID NO: 434411 - DNA, 1257 bp, Serratia marcescens
atggacacaagaaaacaaatcagaataaaaaacttaaaaagagatgacctgccaaaactatggcaagaactatcagaactagagtttacagaactgattgaaagaagctctccaaaagaaatatcatcgcttttcggtcacatgaattcaccggcgatagcaaaagtcgcaagttatttaagccagagtgcttgggatcacataattcaaacggtactctcgaatacgataaacaaaatattagcatcctgcaacacaaaaaccataaaaaccatactagaaaagattgatgccgaacaactagcttcactaataaataaatgcaatcaagtacaaaaagaaagattattagatgaggttcctgaagataaaagagagaaaatcccctctcggaatcatggtgccagtcgaacatcaaataacattactgattattatttatcgtctgctttcgaaaactcattgaaaagtaatataatagaaagaattagagatcttgaagagaaggagtctattttagagaaaaactacaacattaaagaaaatagaataaaagagcggttaattttatcagagaaacaactatcatcgattgaacaaatgatatccagcaaagaggagcaatataaggaaattgaactaaaacttattcaaagggaagcggaattaaataaaaaaatcaatgaattagaagaaaaacaaaagaaaatagaacaagaaagactggaagtaaaactcccagaatatgtggacacggctgttaatggcttaataaaaaaagcgggtttttttgatgaaaaagcctgtttgtggaatatccaagggggggttgccttgttgctcgctataggttttgctgcctttgcccttatatatggcaaagggaagcttgaaaatgtctctcaagaaagtatcaactggttactggtttccttcctattatttaaaggcctcatcattgtgacattattgtgcgcttgggcaaagcatgctttcaatatagcaaacgcttatgttcatgagtcattgaaaagaagcgataggatgcatgccatcaactttgggaaattttacttggaggtttacggtaacaaagtcaaccaagctgaaatgaaagatatttttgaaaactggaacatcaatacagatagtgcatttgccaaaattaaagactctgacttcaccccaaagcatatagagcaagtatctacactaatagactcgattagaaaaataaagtttcctgactcaaaataa

SEQ ID NO: 434412 - DNA, 504 bp, Serratia marcescens
atgccgctgaacaaattcgtttttcaaccggccataagccgccgggttttgccggcggtcttctgctgcctggcgtttgattgccgcatattgctgagcaacaccctgatgcttgcgcagataatctctgaacgccaaatgtctgatcgcctgttcacttcctgtagtaaatgcatgtacgtgatgcgtgcgatcgccgtttcccttgatgtagtaacgtctgccagcaatgccgttctcgccacgcggcgtatatcccatgttacgcatcccgtcattcaagccatccaacgccgccagactttcaacctccagcaaggtatcaatcgctggtttggccggcagcgccggcctgctgatgaattgccgttaacatgccggccggtatgcgctctgccatttcccgctccagtaatgatgaccggacatgattttctatggcggctacctgccggtattggccagaaatcctctgcttttttgatcgcgctacgtgaaatctga

SEQ ID NO: 434413 - DNA, 789 bp, Serratia marcescens
atggccgaagaaagaaaactccccacagcagaaaatttctttatgaatcaccctttatacgaagaaatttcctatacgcaagatgatactgatgaactattagaaatgcttttcactgacagactaaatgatgttcattgccctgattgtaaaaactctagcctttttagtcttaatagacagccgtctagcggattttatgagcattggcataagggtaacaacgcatattacaaaagggtattcacttgcctaagagatggaaagcatacattaactttctttttcagaattgataactttaaagtccaaaaagttggtcaatacccttcaatggctgacctaaacacatacgatgtaaagaaatattccaccatcttaggcaagcaacaatatagtgatttacgtaaagccatagggttggtgtcacatgggataggaattggttcatttgtttatttaagaagaatatttgaagatcttgtagaaggagcaaaagagcatgccgaaaaacaaggaatgctagatattgacgtatataaatcctgtcgaatggctgaaaaaatacaaatgttagataaattcctaccacaatttcttgtagaaaataggaaattgtatggaatccttagcaaaggtatacacgagctaactgaggatgaatgtttaaaatcatttgacgcagtaaaaataggaattgaaataattcttgacgaacatcttgagcaaaaatcaaaacaagccaagattgatgccgcatcgaaagccattaataaacttcaacattag

SEQ ID NO: 434414 - DNA, 138 bp, Serratia marcescens
atgaaagcgtacagtgactatacggatgatatagtagattactatgcgtcttatgccattaaagaagctccggggataagtaagttcgatgttgatatgcagcctttgtttttaaaaattattgatagattaaaataa

SEQ ID NO: 434415 - DNA, 1047 bp, Serratia marcescens
atgatggaacagggccaactgttggctaaggatatcctcccagcggtaggggaagagttcaaggcactagcccgcaatggtggcgctctcgataaagcggtcaactcgaaccgggcaagcttccagcgactgaagacagcaatgcagaacagcatgggccaattcttcgatggtggctttggtagtgctctcacaacggcatttgataccatttccgccgcgctgaacaacaacgccgataccttcaaactctggggtggcattgccgggaacgttatcgacggagcaacagacgcctttgcatacctctatgatactgtggtcctagtctcttcaatcatcggtgattaccttgaagatatgggcgtgtcgtttgaatccctgaagggatggggtgacatggcggcttacgctgccggtgtaatcctattcgcgggcagtgtctggaaattgggcggggcgctgaagtggatactgaccttcctcaatccactaacaaaattgcttggtgtgctcaagtcgatcagcgtactcggcggagtggaagcggctaccgctggcggtgttgctaagacagcctccaagacgacaggcggcgttgccggtgcggcctctaaggtcggcatggtaggtaaggccggtaagcttctgggacctctgggaacgctgtattcagcatgggaagtaggtcagtcccagtttggtgatccaactgaacggatcaatcaagctagactcgacagcaagccaactaatccttggctggaggccgcaggccgggccgctggaatgtaccaactagccgattctatcgcgccacctccggcactcagaccacaacctacaatcgacctgagtagtatttattcgggtagtgccttcatgaacacttaccgcaaccctgttgaagctgcaactcagaagcaccagatcgaagttacttcagtggtcaaggttcaggatggggccgtgaaaggtcttgtacgtgaagagattgaagagaacggcggacatcagatcaacatgctgatcggcggtggacactaa

SEQ ID NO: 434416 - DNA, 360 bp, Serratia marcescens
atgcaaaagtttgaatacgaaccaactagcattggtgacgttctggtagataccgcctccgacctgttcagccgcactgaactgaaaggcgtcaccctgccgaaagatgttttcgtaggtgacatcctgtctaaagctactttcgaactgttcaaggctggcgacgctgatccaatcatctgcctgtctgaccgttccgccggtacagaaaagacaatccgaattgtggatcgccacgtagtgatcaccgatttccgcctgcaagccgctgacgccgcagcgaagaaagaagccctaaccaagctgaccgctgacggctcgatccgactggcaactaacgctgatttctacaaagcgtaa

SEQ ID NO: 434417 - DNA, 1038 bp, Serratia marcescens
atggctaagaccgttaaagatttgaaagctgcatacgacagctacgactttgtaaccccattcaaggaagtgcgcccggggaactacctgctgcaagagctgggcctgttcgcgactactccgagcaagtcaccttctgcacgcatcgccgacattgtggaaagcgaagcctccgagctgcaacagaatgaccgttacggcaccgacgagaacgccgtgaagatcgacaagagcaccatgtatcaggctgaaattcctgtagtggttcaagctgcatctgttcgcccgcacgattggcaaggccgcattagcgccgttgacggtaaagaaatgagcattgaagaatgtatcgccgcacgcgccgaacgcttcaacatcgactaccgcgaacgtctggaaaaagatctggctatggctatctttgaaggtaaagccgaagcgatccataccgacggcggaaatattgatttccaatcaatcacaggcaaggctccgggcagttatgaaattgacttcggtactgctgatactgccgacatgagttcccaattcaacaaggctcgccgcctgctgaataaagaactgcgtggcgctcgtagcttcttggaaggcatgatcgtgttctgtggcgctgagttttatgatcgtgtccgcaccaacgcctacaacgcacagctgatcatgcataaggtggacggagcgcctaagaacgcatataccaatcagctgatcgctggcttcgaatacttcgactggcagaatctacgctttatcttggtagacgacgagcgctatagcgtggatgaaaaatccggtctggtgcttcctaagttcagccgcgacgacatcaacccactgagagccatccaaggcccttgcagccgtcaccaaggcatcgccgccgagcaaggcgtgcaggcccgctacggttggaccaaggttgacgacgaagggatgatcgaaatgaaacaggaattcagccatctgatgctgaacctgcgtcctaacttcgctctgaagctgacgactaaggcgtaa

SEQ ID NO: 434418 - DNA, 195 bp, Serratia marcescens
atgaaaataacgattaatgacagtttgggttttaacctgttccaacacttcaccccggagattgttaaccgctccgctctgtgccggatcatgggcttcgacgataaccgcttccaccgtcacgagaagcgccacggattcgagcgcacactaaaacactttatcgctgaggctcgcaaggctaaagctgaataa

SEQ ID NO: 434419 - DNA, 309 bp, Serratia marcescens
atgattgaaaacagcgagattttctcgctgaaaaacctggaaaacgccatcagaaaaaatacctcgccgatctacgacgagcaggagctgttcgaagcgtatacgctcgacgccgacagaatgcggcgttttacccacgccatacccagcctgagcgtgggatcggccagcgtttggccgcgctgccccccccctcgctcggcgctggatatcgccgaccaactgctcgacgtcggcgtcgggcctgctcaattactgccgtcgctcggctactacagcatcgtgacggcgcaaaaaacccaggcttag

SEQ ID NO: 434420 - DNA, 1923 bp, Serratia marcescens
atgaaagctatcatagaatcaataaacatttttagtgagtccggagagcatcgcttcattgaattaacaagtgggcttaatgtaattactggagattctaaaacagggaaaagtgctttattggaaatcgttgactactgtctattttctaagacatcaagcattcccaagggagtaattactacatttgcatatttttacagtgtagtttttaagttacaagatagttatatagtagttggtagacatgcgcctaaaaccaatctagggtcaaaagctttcataaaattagaaactagtaaagaaaacatatcgcctttgagccttggatattttgaaaaccaatctccaacaacgataaaatcagctcaatctaaatttgagacatacctaggtctatctgtattggatatgaaagatgaagtgaatagttttcaccatggtaaagcttcaattaggaatgcagtatcactattattccaacatcagaatctgatagcaaataagcacgccctattttatagatttcatgattttgtgaaaagagatagaacaataaaagaacttcctattttccttggatgggtagagggaaattactatagactaatcagagaacgtgatgacacattaaaaaaaatacgtacacaagaaaaaatagagatgtacgcaaaaaactctcaagaagaaaataagaaaataataaaaaatcttgttgaggagtatcttgctactattgattataaaatcgaagataacattgcctacccaaaactattaacgttagctaaaaatttacccccagtgcctgatattccgtatggatctcctcaaacggagaaaaactatcaagatgaaaacaacttactttcagagttaaattcaaaacttattgaggtaaataaaaaaattgcaatattagataactgctcagacatatctattcatcacgcaattgatttaaacagaataaaaagcactttcgatatctttgaacctggagagaaaataacttgccctttatgctctagtgaacaaccacaactcaccgatgagttaaaagaattagaaaaccatcagaaaaaactaatttcagacctaaataaattacaatattttcaagaggatacatctcaggaactagaacgcctaattagactaaaagatagcataaagaaagacataagggtttccaatgcaaaaataaaagattatgaaaaaaacaaggctgaactaactaaatttaaaaacttcagagaaaaagctagtttcatgcgagggaaagtaacttctctaatatcttcattttttaaaaacaatgacataatcaattcaagtgataacttgaaaagcttaaagtccaggctaacaaaaatagaaatagaactatcacaatatgatttagaaaaaaaatacacatccagtgaagttctaatatctaacgtgatgactcaaatttgtaataaattagactttgaagacgaattaaaaccagctgagttacacttctcgttgagggattttaatttttatcactctcacgctggagaaaaaataagtttacatgagatgggaagcggtgctaactggctagcatgtcatttatctctcttcttagggatactattcttattatcaatagagaaaaaatcttgcatacctgcatttttatttttagatcagccaagtcaagtttacttcccttctgatgcagatcgaaaatcagcaaaagataccgacatcaaacaagtcgagaatatattcaacactataaattccgttttagtacatataaaaaacaaatctaaattcatgccccaagttatagttcttgaacatgctgacaatctacaattaaaagatattgaattcgaagacatagttagaaaacgctggagagagaacggtgacaagttaatctaa

SEQ ID NO: 434421 - DNA, 1110 bp, Serratia marcescens
atggatggtgcatccaataatgcaacgaagaaactacttggttttgattatcaaaagcttctagcattagagtcttgtttaaatgctaaagaaaacgaaacaatctggattgagtgctatggagatatagctaattcagataaaagtacagaggtgaaacatcatttatctcgtggtattttaaatgatgcccatatagatttttggaaaacattatacaatttactaaatgaatataaaatactttataactttaatagatttgagttactaaccacatcagaaataaactcatcctctatatttttaaactggaatgatatttcaaaagaagacaagctcaataaaataacctcagttagccccaacaaaaccatatcaaaatattatgattttgtttttaaacataaccgcgaagaattacttagtgtattggaaaagttaactattattggctctcaaccaacaatagatgagaaatacgaggaattaaaatcacactcatcattcctcaccataccggaccagcatgttgataattttatgcataaaatgttagggtatatttcaatgaaagccataaatgatatggaccgctggcatatagagcggaatgaatttaaaagagaaatggaaggctttgcgaaagcattcattgataaagactacccattcccattagtagctaaaagagaggtagataaaagtaatttatctaatttcaatttcatcgatgagctaaggaaaatcgacctcgatgagattacaataaataatgctgtagtagattttctccgtgcagaaaggagtagtttacagatattaaaacttcatacatctatggctgacaaccttgaggactttgatgatacacttagcaacaacctatctctagtcaaactaaagcactctgcaataatctctcgtgaaaagcagagaaaattagagacaatatcaacatcaaagaaaatgtactcagaatgcttattgctaaatgataaaaaaattttaggaatacaggaaattgcaggttattatcaaaaagggagaatacactcaattgtcgacaggaaggaattctcctggcttttttcggagtatggaaaatga

SEQ ID NO: 434422 - DNA, 1272 bp, Serratia marcescens
atggcacaagtaatcaacactaacagcctgtcgctgatggcgcagaacaacctgaacaaatctcagtcttctctgggtactgcgattgagcgtctgtcttccggtctgcgtatcaacagcgcgaaagacgacgctgcgggtcaggcgatctccaaccgtttcactgctaacatcaaaggcctgactcaggcttcccgtaacgccaacgacggtatctctctggcgcagaccactgaaggcgcactgaacgaagttaacgacaacctgcagaacatccgtcgtctgaccgtacagtctcagaacggctccaactcttccagcgacctgcagtccatccaggatgagatctctcagcgtctgtctgaaatcaaccgtatctccgagcagaccgatttcaacggcgtgaaagtattgagcgcagatcagaaactgaccatccaggttggtgcaaacgatggcgaaaccattgatatcgaactgaaagacatcaacgctaaaactctgggtctggataagttcagcgtggctgatcctatcgataccagcaaaattggcaccactaaactgaccgccgttgataaaatggctgcgccgaccatcaacgcagacagcaaagccgcaacgcctaaaaacagcgacggcaaactgtattctaccgatgatggtgcaggtaacgttgcttacttcgttaaatccaccgacggcggcatttatgacgcaaccgtagcggcggatggtaaagtttcctgggattcaagcaccgcaacgaccaaagcgactgcgggtatgaaagaaacttctcaggttaaagttggcaccactaacatcagcggcctgaccggtagcgatgaactgcgcacttacaccgatccagccggcaaatctggctacgtggttaaaggcaaagacgataacggcaacgacgcttacttcaaagcgactgtagacgcttccggtaaagtgaccaaaggcgcgcagcagtccaccgatccaaaaactgccgatccgctggcaaccctggacaaagcgctgtctcaggttgactccctgcgttcttccctgggtgcggtacagaaccgtttcgattctgttatcaacaacctgaacagcaccgtgaacaacctgtccgcttctcagtcccgtatccaggatgctgactacgcgaccgaagtgtccaacatgagccgtgccaacatcctgcaacaggctggcacctctgttctggcacaggctaaccagtctactcagaacgttctgtccctgctgcgttaa

SEQ ID NO: 434423 - DNA, 588 bp, Serratia marcescens; identical to SEQ ID NO: 188967

SEQ ID NO: 434424 - DNA, 210 bp, Serratia marcescens
atgccggatgagatcgaccgcgatcaggaatttaatgaacagcgactggatgagatgattgaacagagtcgtttcaaaccagggccagcgccatcattattccactgtcgtttatgtggtaaacccattccagaaaagcgacggcaagcactgcagggtgtaaccacctgtacggaatgtcaggaaaaacttgaacgcctcaaccgctga

SEQ ID NO: 434425 - DNA, 1317 bp, Serratia marcescens; identical to SEQ ID NO: 188965

SEQ ID NO: 434426 - DNA, 288 bp, Serratia marcescens
atgaacagagaaactgaccgactttcggacgtactgatcgaaatgagcgccaaagcactggtcacatggatgacgcattccgcattgcacgacataccgcgcgaaacattactggttcgcggtcacgattttgtgtatgccttacaagcaaattttgtgctgctacgtgatgtgctgtcagaaacgctggaagatattgagcagcagagccatgacctcgaagaaagactgaataatctggaacagcggatacttgcgcttcaggtagttgctgataaccgggaatag

SEQ ID NO: 434427 - DNA, 933 bp, Serratia marcescens
atgacaccgacggtatttatatcttactcacacgataacgaattacataaagactgggtactgcaacttgcaacaaggctgagatccaatggcgttgaggttttgctggaccgctggaatctaaagctggggcaagatttggctgccttcatggagcgtggtttatcgtcatccagtcgggtagtatgtatttgttcggaagcatacgtcgcaaaagcggatggcggcaaggggggcgtgggctatgaaaagcaaattattacgggcgagctattagccgacttgaacaaaaattgggttattcctgttgtcagaaataattctcaatccaaaaaagtgccaacttttttggtgggtaagttttacgttagttttgaggatgataagctgtatgaaaatcactatgaacaacttttgagagaattactggatgaacctgtattgccaataccacctgtaggacctaatccattcaaaacagcgaagcaatataccgagcaaaaattctttcctgcgagtgagaaatacgtatcgccagcaacaaaggggcgagtaacatttgattattccaataataatggccgttattatattgggcaaaaagagttcgcatttgaattgggtttttcaaagtcgagcgatcatgatatacagttattaaatgatccaagtagtataaataccatcgctattgttaaagataaaaatgaatttatagaaatagatgacgcacgtatttatgatggttcatcaagagttagacgaccaaaaataaatcaaatagcaatattgcagaacaataatggtttttatgctgccatcaaaattctgtctatccaagacgatactcgtggtgttgagtatgacgaggtgacgtttgactacgtaattcaaacgaacggtagcccagactttacatcattaaaattttag

SEQ ID NO: 434428 - DNA, 1065 bp, Serratia marcescens
ttgttaaacaaaaaagtactttctcagatacaggatgtggctggtagcggcaatatgtctcccgcagagatggctgagtggttagatactcattctgaagacatagagcatttggttgcgttgaaaatgttcgagtatttggatgaggctaaaggggaggtattaaaggaccattacgaaaatttagatgcatttagaggacgactatttacaacatgggagtcccctttaaagcggctggatgcattaatttatggctgtactgaaatcagtaatgaggtaaacagtgagtatcgcactggttctggagaaaggtccgcaaaactgaacataactacccgactgcacgcacgtgctgtccaggtttcctgcgagatatctcatcttctaaagggtggttttgcagacggtgcaatggcccgttggagaacgctccatgaaaccacggccatattgatatttatcgcagaaggcgacgaagacgtggcaaaaagattcacggattttcagagcatacagaggcgaaaagctgctaatcgctataataaatatagtgaagagttgggttttacttctttctccccagaagatttaagtcggtttgatctcgaaagaaatgacatcgttggtaagtatgaagcgggtttcggcaatgaattaggttgggccgctaaagccttaggaaaagaactcagtgccagaactaaggttcgctttagtgatattgaggaatttgtcgagctggacttcttgcgaccgcactacggctttgccaaccagtatattcatgcaggaattgacagcattggcttcaagctcggtacatcgctttcaaataaagatctcttgctatgtgggccatctaatgaagggctgttagagccgattcagtgcaccagcttgtccttgatacaggccactcaggcgataatctcagtttcaccagacgatcaacgtctgctatatagcgccgtgctctggttgtggcatgataggttgaaagaggaagttgtcgccgcatcagatgcgcttatgaaaaaaggcgaagcttatagctgtgaataa

SEQ ID NO: 434429 - DNA, 1419 bp, Serratia marcescens
atgccgtctgagtgcgatttatttgcttttcgccgtggcgcgatcacggcccctgcggggtgtggcaagacgcaacttatcgccgatgcgctgacccggcataccggaacaacgccggtactcatcctcactcataccaatgcgggtgtcacaacgctgcgtctgcgcatgcaaaaagccggagttcccgcttcggcttaccacattgccacaattgatggtttttccatgcggctggtagcgatgtttccgcagcgaagtgctattgccgctgcagtcctcctgctccggaatcccggagccgactacccagcaatacgcatggctgccaggcatttactccaaagcgggcacctcaatgaagtcctcacagcaagctatgcccatctgattgtcgatgagtaccaggactgcaatttagtgcaacatgatctagttacagcactttccgtggtacttcccacctgcgttcttggcgacccgatgcaagctatcttcggctttcgcggtaatcaactggtggactgggatacccaggtgattccccattttcctgctatcggcgagctgaatcagccctggcgttggacgaacgcaggcaagcccgaatttggtcagtggcttctggagtgtcggcgaatactcctagcaggaggtggcattgatttacgccaggccccgccggaagtcgtttggatcgagttgcagccggctactgccattcagcagcggctcaccgctgcgttaacacaggctgttacgcgggagggcgacgtgctggtgattggcgatagccgtaatcctcgtagccgccggcaaatggccagtcagacaccgggggctactgcagtagagcccgtcgacctcgccgacctaacgttgtttggaacgacattcaacctgcagactgccgacgcactggctcgtctagtggagtttgccgcggaggttatgacgcaggtcggagtagctgccttgcaacgccgactggtgagtttacgtagggggactgcacacaatccagctactgaggcagaagccgcactgctcgctttcactaatgccccaagctttcccttggccattgaggctctaagcgcgttgaccaggcaacacaatgcccgagtctatcgtccggatgtgttgtattgctgtctacgcgcgatgcaaatagctgcgggaggcagttgcagctttgccgaggccacggtgcgggagcgcgaacgaaaccgacacgagagccggccccttgcgcgacgtgccattggtagtactctgttgctgaagggactagaggcggaagtggccgttataaccgcccctgaggagatggatgcccgacatctctacgtagccttcactcgcggatcgaagaagctggttgtctgcacgtttactcctgtattgatgccccgctag

SEQ ID NO: 434430 - DNA, 1737 bp, Serratia marcescens
gtggttagaatttgcaaaatcgagctccagaatttccgaactatccgcttattgaattggcaaccttcaccaggcctcaactgcctgattggcccgggagacagcggcaagaccactattctcgatgcgattgacctttgccttggtgcccgccgcaatatcagtttcgccgatactgatttttatgggctcgatgtcacccagcccatcagcatcacgctgacgctcggttcgttgcccgatgttctgatgcgtttggattcgtacggaaattatttacaggccttcaaccgtgcaaacgggttggtcaccgaagaacctgaacagggcctagaaacggttctttgcttacgtttgacggtggatagcgagctagagcctgtctggtcgctagtatcacagcgcgctcaggcacaagggcaggagcgcaatattgcctggaaggatcggttactgttagccccagcccggctcgggacttatgctagttccaacctgtcatggacacgtggttcggtactcaatcgactgaccgcagaacgaccaaatcttggcgctgaattggccaatgcggcacgccaggcccgaaacggtttcggcggtcaggctggtgtacagctggccgcaacactgcaaatcgtgaaccagaaagccaatgaacttggcgtgccagtgggtggcggcacccaggcattgctggacgcgcacgctgtatcgatcggcgacggagccattgcgctacacgatgctacaggagtgcccttgcgctcactgggaacaggctcatctcgtctactggtcgcaggaatgcagcgtgcagcagcacagcaggcatctgtcgctctggtcgacgaagtagagtacggactggaaccgcatcgccttacccgattgttgaattcccttggtgcgaaggaaaattccccacccctccaggtatttctaaccacccattccccggtcgctgtccgcgagcttaacggcaatcagctcttcgtggtacgcaagtctccggatggtgcacatcaggttctccaggtaggtgtcgctgatgatattcaaagcaccgtcagggctgatccggaagcgtttctcgctcgtagcgtcatagtctgcgagggtgccagtgaagtcggtctaattcgtggcctggaccatttctggacgaacataaacggacagtcaatgctggctgcagggactgcatatgtgaatgtaggcggcggagagcctgaccggtgttttgttcgtgggcttgcattgcgtcggcttggctaccgggtgctggtcatggttgatgcggataagccgcccactgcggcgaccgtacaggcatacatggatgcaggtggagagtacatcacctggcgaaacggacgtgctttggaggacgagctgtttctgagcctgccggataccggcgtcgatgccctacttcagcgggcaatcgaccttatggacgaagagcttgtggctgcgcatattcaggcacagtcaaacggtcaactgacactcgcccacatccggcaacagcgagaattgatcggcattccgtatcctattgagacgcggcagttgctgggaatggccgcacgtaatcgtcgaaacggctggtttaaatcagtcaccaaatatgaggatattgcacgagatattttggggccgcacatgccagccacagacgctgtgttttacgcacttattgatcgactttacaggtgggcccatgccgtctga

SEQ ID NO: 434431 - DNA, 2142 bp, Serratia marcescens
atgaactacgaaaaaatcaagaacatcttggcgaaactcggtgaagagagcatatcgacggtcgatgtgttgctcgccatcaacaccatcgtcaatagaagcaattcagagtgggagggccgtgatttggtgatccgagcactcgacaaatttaagctttttgactctgtcgaacagtcgctcctgctaaacatggtacgagctgttggactattcccctatatcactcctcacctcagcagcatggcgatttctgaccgcttggcttacgaagcgcacagggtcgagggagtagaacagggcatggtgtttcatcatctgcaggcccatgttttcagcttgatcatgcaaggccgaaacgtagtactcagtgcttctacaagcgtcggaaaaagtctagttattgacgctgtgctggcacagcgacgattcaaaaaggtggtggtgatagttccgaccattgcgttgatcgacgaaacccgccgtcgcctggtcaaacgctttaaggacttcaacctgatcacgcatccgagccaggaatccgtgatcgagacaaccaacgtctacctgctcacccaggagcgtgtcctccagcgtcctgatcttgctgatgtggagttcttcgtcttggacgagttctacaaaatcgacctggggaacgccacagacgaaagcacacgcgctgttgacctgagcttggcttttcataagctcgcaaagactggtgctcagttctacatgctcgggcctcacattcagaagatctctggtctggatgactatgagtaccacttcatcccatccgactacagcactgtcgcggtcgacattcagaatttcaatctggagatgcgatccgaagagcgaaaggaaaaattgctagagttggtcacaactctagactcgcctactttaatctactgtcaggcaccacctagtgcgaatagagttgccgagtatttgattaaggaagctgggctgacgccagtaccagagactcaggaaatagccgcttggatatctaaacactaccaccctgaatggaacgttgctaaggcaatatctctgggtatcgggattcaccatggaggagtgccacgtgcattgcagcagtacatcgtcaagttgttcaacgagggcatcatcaagcgaatcatctgtacatctacgatgatcgaaggcgtcaacacatcggcagagaacgtgatcatttatgaccgccgcctgaagaattcaacattcgactacttcacctacaagaatatttccggtcgcgcaggccgcatgaataagtacttcattggaaaagtcttcatgctcgaagcgcctccccttgagcagggcctaacagtcgaataccccatcggtcatcaggatgaaaactccccattgggactcctcatgcaattggataacgaataccttactgatatttcacgtggtcggctccaagatgcatacgcaaacccggtactgtcgccgacaaccctgatagagaaccggcacgttccgattgagcggcaagtcgaggtagcagaaacgatcattcgtgacctactgcccagcagcaaacttctggactggaaaggtatccctgagccgaaccagctcaattatctctgtgagctggtctacagtttggagggcggtaacctgatggactatgggatatcgtccagttcgcaattgatgtggcacatcaatgagctccgaactcagaaaaacctgcctgcttacctaaaagatgcggtggagaatcgacgacaggaacacacacccagcgaagcgatcaaccttcgcctgaaattcatcagaaatatggtgtgtttccgattgcctcgggacatcatggccgtaaataacattcaggccgacgtgctggcgaaaaaagggatcgaaccgggcgatttcagcttctttgctgagcagcttgaaaatatgttcctcgacccgctactcaccgcgttggacgaatacggaattcccactcagatctcgacccagatcaagaacctcatcttgccatcggaacatctgaacgacctgctggcgaaacttagggccctggctcccagagtagagcaccttcaactgactggctttgagaaaagcttaatgtgttgggctgtgtccgaaatgtag

SEQ ID NO: 434432 - DNA, 1629 bp, Serratia marcescens
atgagtattactagtctatccgatgcaggtggacctgcggcaaggcaaggcttcaagtatcaagatcacgtagctgtcagtttcatcttcaagatgctccgagacagcaactactaccaagtggaatgcgagacagcggatgacatcgtggcggtattccaatgcgccggccagatactaaatgaatacattcaggtcaaaacaaccgaaagtgatggcaaatggaacttgaaagagataacagcgttagacggaaccaaagctaattcttcgctgctgcataaatcgctgaaatgcgacgtacgcccaggtattgcccgcttccgaatcgtgaccaagcgcgatgtcgcaaaaattcttgaaggattcaagaaagagatagataagcgggttctgcctgacataacaacgacccgaggcgttgcactgcgcaagaagtttaaaacgattgtctcacctcaaaaacgggacttcttgtactgggcggaaaactttgtctggcaggtgtacggtgatgtcgaggcgctggaggccgtcaatataaaagttttgtcccagcttgctgaggggcttggaaatcgccctaatttcacgcaactaaaggcaatttacgaagaatttttagagattgctgacaaagcggccacggctagcgtgaagacagctgcagcatctaagatcatccttcgagatccgacgctcgctcaccttaggaagttattagacgaggctgatgacaaatcaacggccacatccaaaccatataaaaagcgtccggatccgttcttggtcgagtttcacgccaaccctaaagagggcttgttgcactcattttctggttttgacgtgcgctacgcgcttaagaaatggcggcatgaaaattacgcaaagcatctcatcgaatggttacccgagttttccctaaaggccagtgaaatcgtaaacatccttgcgcataacgccgaaacgatcctggctaggtcaatcagtaccttcagcgacagtgagcttccgcgtgataggctcattgcagaattaattctccattccatcctgcgcagccgccaaaacagcgagcccgttgcgtgcaaagtcttctacaaatctgctgacaagctttcagaatttggcaatgctcacatcgttcagatgcctgatcaggatgaccaattgtggctaggtcttgcccgcttgatcaaagcaaatgacatggatacgacgctagagcaaattcgagaaattcttgacgaaactatctcagaaaccgtgctgtcggcagagcgcgaaatcattatttctctacgcgaacctttacatcaccagccaaaagcagattccttcaaccaagctctgcatcggaattctcctgtcgatgacatgctgaatattctctgctttcccatcttgttgacctacgacagtgcagcgctttcatcaggctggctcgctgattacgtagacaacctcaagatagagatcgaaacccacttcagcacgttcacctcggaactgccggagaacatcaaacaagtgaaggtgctcatcttcttggtgcctatggaaagcattgaacatctgacaaatgctttcaacgctcgctgtgaaaagctggaagaattacaggcataa

SEQ ID NO: 434433 - DNA, 1725 bp, Serratia marcescens
atgactacccgcctagaaaaattaaaagcatgtaattccaaaccagatttcgcacgacttttaggaattgacccggtttttatgacccgtgtcatatatataagaaatactgacaatctatattcacagttcgctattaaaaaaaagaatggttctgatagaatcagatcagccccagactctgagctcaaagaaatacaaagcaagctttccgatttgctacaagactgtttaaataacttccgagaaaatttaaaagaagataatcatttctctcatggatttgagcgtaaccgcagcattattacaaatgcagaaaagcataagtcaaagaagtgggttcttaatatagatctttgtaatttctttgatgaatttaattttggaagggttaggggttactttctaaaaaataataacttttctctcaacacagagctttccacattaatagccaaaatcgcatgtcatcaggataagttaccccaaggtagcccctgctcccccgtaataaccaacttaattctagtttctttagacaggcggctaagtaatttatgtaatagcgtaggctgcacatacacacgatatgctgatgatataacaatctcaactaataaaaaagagtttcctaagggaattatcagagaccatgatgagaaatctattaccttaaataacaaatttcttaaggaaataacatcttcaggcttcaaaattaatcataacaaattaagacttctcgacaaaaaaatccgccaagaggttacaggattaactgtcaatcggtttgtgaatgttgatagaagatatgcaaaaacagttcgcgcaatggcacatagtttatttaaaaaaggggagtacacattaatagacaaaaaaacacgcaaagaaagagttggtaatatcaatgagttaggcggcatgctgagctttattgatttcgtagataaatataacaacaaattaccgcacgcgatcaaatcctcacataacaatcgtgaaaaagtatattcagattttctttattattctgctttttgggcaaatacaaaaccaacaatcttgactgagggcaaaacagatattacttacctcagggtagctttggatgctgtatcagaaaatcatcccaatctaattgggaataaaaatccgggcaataaaacagtacgagattatgggattaagttcttcaaaaacacaactaaaacaaaatatcttttaaacttagacggaggagctccacacctcaaagacttcattgttggctttgaaaaaaagacagaggcgtttaaagtaatcgccaatcaaaagcctgtgattgttattttagacaatgattcaggcagcgctggtgctaatggagtcttccaaactttaattggaaaatctttccctaacattactcttacaagagatgaactaagaaatcagaagtggacgtgggttacaagaaacttatatataattttcacccctcttaatggtttaaaagatagttctatggaagatctttcccacagttcagtattacaaacaacgcttggtggtaaagtatttaaccgaactaataccaaatgcaaggataatgaatatggcaaagaattttttgctacaggtgttgtgttaaaacagcgtaaaacaatcgacttttcaaattttaattacatctttgaatcaatttcagaaattattgaacataataattcaagaaaaaaataa

SEQ ID NO: 434434 - DNA, 609 bp, Serratia marcescens
atgacactgcttcatatcgattccagcattctcaacgaacagtcggtaagccgccagctcacggcggcgatcgtcaaacacctttctgctgctgagccggatgccaggatcatccacaccgatctcgccgccgacccgattaaccacctttcgagcgccgaatttttggctctccagggcgtggagccgcaagacgagcacgtcaaacaggccgttgcccgcaacgccaaactcgtcgacgacttccttgccgccgatggcattatcgtcggtgcacctatgtataactttacgttgccgactcagctgcgcgcctggcttgaccgacttgcagtaccaggcagaactttccgctatacggaaaacggcgctgaaggcctcgccaaggggaaacgcgttatcgtcgcttccacccgcggtggcctgtacggcgaaggcacgccactggccttcctggaccatcaggaaacctatctgcgcagtttcttcggcttccttggcattacggacatcaccttcattcgagcagagggactggcactcagcccggaaaaccgcactgtcgccatcgatgctgctgcagctcagattgacggcctgaccgcttaa

SEQ ID NO: 434435 - DNA, 903 bp, Serratia marcescens
atgaacaccacgttgacctcaccacccgcgcccaacccgcggcgtattacacaacgcacccgaggccaaggccacggcccgataacccggctgatgagcccttccgacctgggccaggtgattaaacctttcgtattcctcgatctgttcgaggcggatcagcgcaccatggcaatgctggccaacatgccgctgcatccgcattcaggcatagccaccgtgaccgtaccgctcgaaggcgcttttcactacgaagatcctgccggcggcgctgtcggtacgctcggctatggcgcggtggaatgggcgcgtgcgggcggcggcatgtggcacggcaaggaattgtccgccacggatgcgccgcacatccagggattccagctctggttggccttgcccgccgaactggagaacggtgaacaggaaagccgttatatcgaagcccagaacatgcgccaaatcgggccggcgcatgtcatcattggcaaccatgaaggcgtgcaaagcccggtgcccgcgcagaaaggcatcaattacttgctcgtcaccctcaaaccaggcgaacgctggacttaccggccgccagcgcatcattctgtcggctggctcgcgctggccaaaggccgtctcagcaccggcgttcctgtcgacgcgggcgaaatggtggtcttcgaaccgggggaaatgcccattgcacttgaagcatccggcaatgaagatgccgtattcgttctcggttcagccgtgcctcacccgcatccgctgcacctcggcgcctattcggtacatacctcagcatccgcgttggaagccggtgaacgccgcatcgccgaactggggcgcagacttaaagaggccggcgagcgacggacggcatcaggcacgatccccgtctttcgatga

SEQ ID NO: 434436 - DNA, 1416 bp, Serratia marcescens
atggctagtaagaattttattgatagagacaagatagctcgcgactcaaatgaggcgcaagttcataaattaaagattccgccgcattctattgaggcggagcaggctgttttgggcgcactgatgcttgataatgaccgctgggatacggttgttgagcacgtgtcttcggttgatttttatacaaaagcccatcagctaatcttcgacgaaatgcagcatttagtcgaaaaaggaactccacttgacctgataacaatatctgagtcttttgagaataaggggattttggaaacagttggtgggtttgcctacttagctgaattatctaaaaataccccaagtgccgctaacgtaaatgcctatgcggaaattgtacgtcaacgtgcgatcatgcgtgaactcattaaagtctcaaatgagattgctgatgcagggtattcaccagaagggcggactagtgaagatctgcttgatatggctgaatcaaaggtattccagatagcagaaaaccgggctaataaggatgatgggcctaaaagcgtcgaacaaattttggaggccactatttcccgtatcgaatctctctaccaaatgccgcacgacggtgtgaccggagtggataccggctatcaggacctcaacaaaaaaactgctggtttgcagaaatcagacttgatcatcgtcgccgcccgtccttcgatggggaaaaccaccttcgccatgaatctgtgtgaaaatgcggcaatgttgcatgataaaccggtgctgatcttcagtctggagatgcctggagaccagatcatgatgcgtatgctggcgtcgctgtcgcgcgtggatcagacgcgcatccgtaccggccagctcgacgacgaggactgggcgcgcatttccagcaccatgggcatcctgctggagaagcgcaacatgtacatcgacgactcctccggcctgacgccgaccgaagtgcgggcgcgagcacggcgtgtttatcgcgaaaatgacgggcttagcctgatcatgatcgactacctgcagctgatgcgcgtgccggccctgtccgacaaccgtacgctggagatcgccgagatttcgcgctcgctgaaggcgctggcgaaagagctgcaggtgccggtggtggcgctgtcgcagctgaaccgcagcctggagcagcgcgccgacaaacgcccggtcaactccgacctgcgtgaatccggctctatcgagcaggatgccgacctgattatgttcatctatcgtgatgaggtgtatcacgagaacagcgatctgaaagggatcgcggaaattattatcggtaagcagcgtaacggcccgatcggcaccgtgcgccttacctttaacggccagtggtcgcgtttcgataactacgcggggccacaatacgatgacgaataa

SEQ ID NO: 434437 - DNA, 162 bp, Serratia marcescens
gtgaatgagatctcggagcaactgagtctcagcccaaaaacggtgaacagctaccgttaccgcatgttcagcaaactgaatatcagcggcgacgtcgaattgactcacctggccatccgacatggattgttcaatgcggagacgttgttaagcagtgaatga

SEQ ID NO: 434438 - DNA, 174 bp, Serratia marcescens
atgcggcaggtctttgccgccgtgtcgccagtagatgcctccgcttgccgctgggcgacggtcaaccagcgccaccggctgcgcctcccgcttagccgccagcaatggttcgacaactttggcgtagattgcctcggccactacattacgcccatcccgcgcccgcagtcctga

SEQ ID NO: 434439 - DNA, 399 bp, Serratia marcescens
atggataaattcagggagccagagcaatttgatgcaggggtagagattcacgatggcgaaccattcgctgtatgggcgccagcagtgaacggttcacacgttgagacagagcgatattttgccctgctggcagagctggaaactgagcgcaccagccgtgagcaatggcagcagaactgccagcgcaccgaagcgcgcctgcatgaagtggccaccgcctgcgcgacggcagagcagcgcattacggaactggaagccaagctggctacgccggtgcggttgcctgtcgtgctgatggggtatcaatcagacgattatcggattgggtttatggaaggcgtagagaagtctggcgatgaggttcgtgccgctggcttcaccgtagagggggatgagtag

SEQ ID NO: 434440 - DNA, 507 bp, Serratia marcescens
atggataaattcagcgaactgaaagcggccgcaatggcagcaactcccggtcgaattggtgaccgcatcgatggatctgggagcatcaaatatgaatgcactggctacgatggctcgttagttctgcgcaccgatcacaaagatatggagtatggattcgtcggtgataatgctgatgcagatgagctgtttttcagactgtgcgtgccggatgtagttctcgccctgctgtcagataacgagcaccttgcccgtgaacttgtcgctaggaatggcgagaatgaatggttacgaaagagagcggccgagctggaagccattaaagcagacgcctcccaggtattcaaagaaatcggcaaagagcttggctgcaaccccgacaacgagtcgatcatgatggctatcgatacgctgaaagagcgggaaaagcgcgtggtggcgctggccggtggcgacttctacgagtttcagcgcgacaaagccatgaaggagcagagcaatggataa

SEQ ID NO: 434441 - DNA, 483 bp, Serratia marcescens
atgagcgacaaaaaatattgctaccgctatgtggacggcaatgacagcgaagggtgcccgatagtcatgctgtgggaacgggtgattctgcgcgaaactgaaaagactttctggcatgttcacgacttgccgaatatgccacttgagcagatgcgtaaataccactccagaccaggaaataagcaagtgaaacgctgcctgaaaaacgcggctcgttccggctaccacctgactaaagagcaggccatgcaggcattcatctaccgcaaggcgttccagctcaaccggatttggctgactgcagagactgtcgaactttgcctaaaaggactccaggaagccggacacgtccgcaatgtaatccttgatgatgagttacagatcaatcggcgcggggaggttgtcagtgttcctgacagtgagttccttgccgctacgcagccagggccgatcgcttcaaattatagctgggatgaatactga

SEQ ID NO: 434442 - DNA, 843 bp, Serratia marcescens
atgacaaccatcaagcggtttacccctgattatgccatgcacgcggctcgctttgagccgttcgccagagaggctgagcacggtgaatatgttcggtttgatgcccaccagcagacggtgagcgcgcttgaggctgagctcgatgcgctggctgtggagaatgcggcgctgaagcgcgagcgctctgaactgtgtgctatcggtgagctaatccgcacccaagataaccgtataactgaccagccattttttgcagtcatgaccaagctggaaatcatcgcatctgaagaccacgactgcgaccgtatttgctgggttgaaaaccagagtggcaattatgtcgaagccacagagacacagcatcggcgcttggaggccatctatcaggccaaatatgaagttagggatggctggggtagatacgccatgaaagagattgatgtgtttgtgaccggatgctttaccgagcaaggttgcaaagactacatcaataaaaatggccacaacctcaataagccgttcatttacgcctttggaagctatcgaaacgatgaatatcagacagtgcggaaattcatcatgcagattcctgaaaccccagccactgacgcagcacttgcagctatccaggcgcaggccaaggctgaagctattgagcagctagccattcaattagagcagcttcccgatgacgcgtttgacgttcttagtgatgcggcggagttcgaaacttatcaagaagagcaccatacgttcgtttcgattagcaacccgagagcggtagcaaatgctgttctttctttggttgaagagcagtccaccgagctgcgggaggccaaatga

SEQ ID NO: 434443 - DNA, 1971 bp, Serratia marcescens
atgatgccggaactgggcagttttctgctgtgcctggcgctggcgatcgcgctgttgctgagcatctacccgcagtggggcgcggcgcggcaggacagccgcatgatggcggtggcccggccgctgacctatggcatgttcgcggcgattgcgctggcgttcctgtgcctggtgcatgccttcgtggtcaacgactttaccgtcgcctacgtggccaccaactccaatacccaactgccggtgtattaccgcatcgccgccacctggggggcgcacgaaggttcgctgctgctgtgggtgctgctgctgagctgctggtcgctggcggtggcgttgtgcagccgggcgatgccgcaggacgcggtggcgcgggtgctgtcggtgatgggcatgatcaccgccggtttcctgctgttcatcatcatgacctccaacccgttcacccgcacgctgccgaacttcccgatcgacggcagcgatctcaacccgctgctgcaggatatcggcctgattttccacccgccgctgctgtacatgggctatgtcggcttctcggtcgccttcgcgttcgccatcgcctcgttgatggccggccggctcgacaccgcctgggcgcgctggtcacgcccgtggactaccgccgcctgggtgttcctcacgctgggcatcgtgctcggatcggcctgggcctactatgagttgggctggggcggttggtggttctgggatccggtggagaacgcctcctttatgccgtggctggccggcaccgcgctgatgcattcgctggcggtgaccgagaaacgcggcacgttcaaagcctggacggtgctgctggcgatcaccgccttctcgctgtgcctgctgggcaccttcctggtgcgctccggcgtgctggtctcggtgcactccttcgcctccgacccggcgcgcggcatgtttattctcgcctatctggtgatcgtcatcggcggttcgctgctgctgtacgcggtcaagggcggccaggtgcgtagccgtgtacagcacgagaccttctcgcgcgagaccttcctgctgggcaataacgtgctgctgatcgccgccatgctggtggtgctgttgggcacgctgctgccgctggtgcacaaacagctggggctgggcagcatttcgatcggcgagccgttcttcaataccatgttcacctggctgatggcgccgctggcgctgctgttgggcattgggccgctggtgcgctggcgccgcgatgagccgcgcaagctgtggcggcgcctcggcgtagcgctgctggcgacgctggtgctgtcgattctgctgccgtggttgctgcaggacagcatcgccggcatgacggtggtgggcctgatcatggcactgtgggtgatcatcctgacgctgatggagctgcatgagcgcgccacccatcgtcacggtttctggcgcggcctgcgacagctgtcccgcagccactggggcatggtgctcggccacctcggcgtggcggtgacggtgatcggcatcgccttcagccagaactacagcgtggagcgtgacgtgcggatgaaggccggcgacagcgtggatatccacaattatcatttcgtgttccgcgacgtgcacgacatccgcggcccgaactacagcggcggcgtcggtatcatcgacgtgacgcgcaacggcaagccggaggcgacgctgcatgcggagaaacgctactacagcgtggcgcgcagcatgatgaccgaggcggcgatcgacggcgggttcagccgcgatctgtacgcggcgctgggcgaggagctggaagacggctcctgggcggtgcgcctgtattacaaacccttcgtgcgctggatctggttcggcggcgtctttatggcgatcggcggcctgctgtgcattctcgacccgcgttatcgcatgagcaaaaagctcaagcgcgaaggcaagctggaggcgcaatcatga

SEQ ID NO: 434444 - DNA, 426 bp, Serratia marcescens
atggctttttggctgattatttgcgtgttgttggccggcgccgccgcgttgctggtggtgccggcgatgcgccacggcaagcagagcgccgccacgcgcgatgcgttgaacaaggcgttttatcaggatcgcctcagcgagctggagcaggatgagcagcagggcgtggtggccgagcgcccggagctggtcaaagagctgcaacagaacctgttgaacgacatcccggccgagcagatggtgcaggcgaagccgatcaaccgctgggcgctggtgccgggcgtggtgttactgctggcggtgaccgttggcttttatctgaaaaccggcgggttggcgcaggtgctggactggactggcgtctggtgcaggcgcaaatgccggaattgcgcgagcgcgtcgccaacgagcgcgccaaaccgctga

SEQ ID NO: 434445 - DNA, 1341 bp, Serratia marcescens
atgagccagaaaaacctattgactaaatcagctctcgcagctgcagtggcaattatttcttcaaacgtgtctgccgcaggattccagctgaatgagttctcatcagctggtttaggacgttcgtattctggcgaaggcgccatggcggatacggcggcctccgcaagccgcaacccggcattgctgatgatgtatacccgtcccgagctgtccatcggcgcagtcttcatcgacccggacgttgacatcaccggcaaatcgccttccggtgccagcctggactccaaaaatatcgcccctgtcgcctgggtgccgaacctgcattatgttcacccgattaacgatcagttcgccgtaggcggctcggtcaccagcaacttcggtttggcgaccgaattcaacgacggttataccgccggcgcctacggcggtaagaccgatttgactaccgttaacctcaacctgagcggcgcctaccgtctgaatcaacacttcagcttcggcctgggcttcgatgcggtgtacgccaaagccaaactggaacgctacgccggtgaattgccgaaactgcttgcaggtcaaggcctgcaaaccggtagattaacgcctcagcaagccggaatgatcgctcaaatccctggcgatacccagatttctcacctgaaaggcgataaatggggttacggctggaacgccggcatcctgtacgaagtggatgaaaacaaccgttacggcttcacctatcgctctgaagtcaaaatcaagttcgatggcgattacaagagcagcctgccagcacaattcaaccctctgactcaatctctgggcttaggcttgccttggggcaccagcggcagcaccatcccgggttctctggatctgaatctgccggaaatgtgggagctgtccggctacaacaaagtggcgccgcagtgggccattcactacagcctggcctataccagctggagccagttccaggagctgagagccaccggcaacaacggtcagacgctgttcgagaagcatgaaggcttcaaagacgcttaccgtatcgcgctgggcaccacctacttctacgacgacaactggaccttccggaccggtatcgccttcgatgacagcccggtgcccgcccaaaaccgttcgatctccattcccgatcaggaccgtttctggctgagtgccggtactacctatgcgttcaacaaagacgcctcggtcgacgtcggcgtgtcctacatgcacggccagaaagtcaccatcaacgaaggcccttacaccttcaattcggtgggtaaagcctggctgtacggcgccaacttcaactaccgcttctaa

SEQ ID NO: 434446 - DNA, 789 bp, Serratia marcescens
atgttcgaagaaatggatttacctgaccagtttccaaacccacgcgataccttgcctgcgtatgcccagcagtggtgggataggttcgccaatggggcgcaaccggatatcaccgcgttacagcaaatatccgcataccgcattacatgggagttgttctgtggcttcacaggccggaatgcctccggcacggcggcggctttctccgagttaaagaaggcagaacgtaagtactacgctgctgttcgcgctatgtacccgaatcaataccgtgtgccacaaacggactacaacggaatggtgcgggatgcgctggacttttatcaagatggagaaaaacgctcggcaagcggcatcgtcgggggctacgtacctaaagaacatgctcgagctgtggccaaccgcaaagggcagcgtaaacgcatgcgcagggctatcgaggcaaataaaccccaccccgcctacgccgcaataacatcccgtattggtaagcaaggtgtaaacagtatggctcaagataccgtcagcatgactttggttcgcctcatgatggaagctggcacacagcgcacgctcgataccatgtcatatgaggtggccgaactaaaagcccaagtagcagcattggaagcgttccgggtcgcgacagagaaacgtcatactatcgaagatgccgggcaagacccgaaagagctggctcgcagtatgcgtgcatctggtaaatccctcggtgaaattgctaaagccacaggccgcagccgcagcaccgttcaacgatgggttaagtag

SEQ ID NO: 434447 - DNA, 162 bp, Serratia marcescens
atgacaagcaccaataatacaaaaaggcagcccccagagccagacagagataactgctatcaggattgggaaataatgattatttcagagcgcttcgatagctcgggtaatatcatcgatggctatcgcgaataccaatcaatcgctgagggcgagcaatga

SEQ ID NO: 434448 - DNA, 645 bp, Serratia marcescens
atgttacagaaacacgaaaacgtaataagtatgactgtactaagcccgcaagccacccaacagctgatgccatcgttctcctccttgccccacacgcaacacgccgacggaaaatatcgcctgcgccgttactcggtcgtcaaatacctcaaccccaacgtcgccgaagtggggccgcgcactttcatgcagtcggatcagatcaaccactttcagggcaacgtggtgcgccgcttcgaacctatcgacagcgccgtgttgcagagcgccggcatggcagagatgtgcaacctgtttgcagaaagcaacgaactgccggaaggcgccgagatagagatccaccagatgcgcgtggtcgccatcgagaaagacacccaggtggcgccggaaggcattcaccaggacggtttcgaccacatcgcgatgatcgccattcaccggcacaacatcgtcggcggtgaaatcatgctgtatgacgacagtcaccacgatcccttctttaaaaaagcgctggcggacggcgaagccgtgctgctggcggacagcaaactgtggcacaacgccacgccgatcaacgccgtgagcccaacagaagaaggccatttggacctcttcgtcctcaccgcgcggggagagaaagcatga

SEQ ID NO: 434449 - DNA, 657 bp, Serratia marcescens
atgaataatctattagcttcattatcattagcgtggatgctttctggctgtactagtccttatccgatcccggtagaaacacctcggcccgcaccgtggccggtcgaggcagaaaaaaaacctaagattgataacattaaaaaaatcgctttggtttatcggaatttatggcgagaaaaatacataagtctttatcagcaaacttatggatataatgaagtgggtttttttggtactctcgttgctgtgatttcggccgcaagtggttcagtgaccactgcgatgtacagtggcggcattgcagctggcgctaatatctttcccggtcattataattatgcaacgcaaatctataattacaagacggctgcggcatcggctaattgcatgtatgaagccgttaaccttttagatcaggatattgcgttaattattaatgctaacaaggcatactatactgatattggaaattatctctaccagaatctggaggatttggcctatgaattggagatcaggcaggcgggtgttgaattaatcacgcctaatcttgatgcgttggcggaaaccattaaaaaagaacaacaaaataaagaaagattgctgagtgtcacaatgagtcaagggagtaaattttacagtaaagaagacaaatag

SEQ ID NO: 434450 - DNA, 723 bp, Serratia marcescens
atggtcaccgatataggaaaagaatattatcagtactgcctgcagatgattagtaccgcagagaaagcggaatacctcattattaacaaaagcgaaaaacccactggaaaaataaaactaacctgctcaaacattctcctggatcttggcctaacggaagtcctggcgaaattcatgctgcaataccccaaggtcaatttgcatgtgaaaatatttaatcgcaacgtggatattatttctgaagggtatgacctctcattaaaactcatcgccgatgagcccaaaaacagcaacttggtgatgcgtcgaatttgcgctgtgcccaccgcatttatggtcgccccctctgcaactattcagtaccaaagtatcaatacgcccgaagatctctccagtttgccaacggtcgggtggttatcgacccatcttcaggccgcctggacgtttcaacaagccgatcgcgaagtcaaaataaacaacgagtcgcgcatggtgtgcgatgacattcgcctgatcaaggaatcgatcgtaaaaggcgtcggtgtgggctgcctgccgctgaaattagcccgccaggaactgctcgacggcagcctgaaaacgctgctcgacgactggacattggaacaacacaagattgtcgcgttttacccttccagacaaggactccccccttcggtaagggcgctgattgatttcatcgttgatgaactggccgaataa

SEQ ID NO: 434451 - DNA, 1968 bp, Serratia marcescens
atgacacaaattaacttagattttttcatatcagcctcattaccatgggccaaaaaaaccatagaagaaaagatacttcccgttatatctggtaaaatatctagctactttagaaacgcaataaacatgcgaatcttgaatgataacatggagacttttctttcaagagttagagggcagtgctcatcaatcaacacattggcatttcaaaacacccctgttgagcttttaagtgtttatgaaccaatgagtatttcatttgacaacgaaaacgatccatatgaatgcatggtccgtaataattgcgccgtgttaaatgacttcaatcatatattgatcacagacgctgccggaatggggaaatccacattattaaaaaggattgctttggattgcattgataatgataagttcatacccatttacctagagcttcgtggaattcaaaactacaacatagccaaccagataaaaaacagattgggattaagttccgatataccagatcagtatttgaaagacatccctttcatttacttgtttgatggtgtagatgaaatacctcaaaacataaaatctgaaacaattggactgataaaatccttcgcagaaaactttatcaattcaaaggtaatagttacatctagacacgatggttttttatctgagttatatacattctcacgtttcaagataaaccctctagaacatcaccaatcatatagtcttttaaggaaatatgataacaacggcgctatttcaaccactctaataaaaggattgcagcgcgaagaaggtaaatctctagatgagtttttatctacaccactatatgtatcattattattctgtgcatataaattcaagccaataataccgagaaaaaaggaattattttacagtcaagttttcgatgccctatacgagtctcacgacctaaccaaagagctaggatatgttcgtgaaaaattttcaaaactagactctacagactttcattatattcttcgtaggttaggtttttggtgccttaagaatgatggtagagttgagtttacaaaagatgatttagagataacaatatcagaaataatatctaacatctccggtctaagtgtaagcgcatctctatttattaaggatttaatagaaaccgtcccgttatttgtcaaggaaggggcaatagttagatggtcgcacaaatcattaatggaatatttcgcagcaatgtttatttgtcgcgacacaaaagaaaggcaaaaagatatactgattaagctttacaaaagcaacgactcaattaggtataaaaatctctttgagctatgtgcagatatagactacacaacatttagagccagcatcatcaaagagatactcaatgagtatattgcccttgctaaagccccccctttgcttttacaaaataaaaactgcgacaaggactctcatgaaagcagtgttatagatacaatattcacaggtgatgtaatcattttcatattcaataaaaaagatgaatcagaaagtttaaaaaaactaattgaaggtgatatcagtctatttaaggaacttaaaaaagagaacaaatatattaagagtatatttttagacatttctaattactgggttgtaattgctagaaatgtagatataaaaactgacattcttaacattttgaaaatcaggagccctgactattttaaggcacgaaaatcgcctacaagtgatgatcctgaaattgcaaaaatgatgcgcagcctaacaaggggcgtacctgaagtcaaactatgcatgactcaagaaaatgtaacggaatgcacatcgatttgcgcagtaaagttaattaatgcaatccttgaatttgacataagcccgcgcctgaaatacaaaagcgcgttacttgaacttgaaaaaattgaaaaagatgaaagcaatgggattaataaccttctcgaaggattttaa

SEQ ID NO: 434452 - DNA, 372 bp, Serratia marcescens
atggtgggcccgaatctagctcctagccacttggatggcagtggctggtatcactgtggcccgcacccttttgccctccattcaacatatgcacagcaaagacgtttatctgggacgcgtgtgcgcgaaattaacaagtttctggaaatcaaaccgttcgacgacgcggccggcggggtctggaactatataccttcgcgtgcgatcgaaacttgcagtttaaagaggtggaagggattctcgatgatgcgcattatgaattacaacgaccagacgtcgctagagattaaagatttgaccatggtagttgatgccaaactcgtcctttccgttaaggtgctgccgcaagtgatcggcgaacaggcactgtga

SEQ ID NO: 434453 - DNA, 1356 bp, Serratia marcescens
atgacatttaccggatggattgcattaacaggactattgctgctggggatgtccttagcctccaactggctgaagcggggacctttcaccacgttcggattttatttactcatcggtattctctgtggcccttggatcttcgatatcatcaggatagatattattgctcatgctgcgtggatggaacgaattacaagtgtcgccatggccgcttcattgtttattaccggtttaaaattgcggcagcccttcagcaaccaagcctggcgcgtgggctttttactggcattgcccgctatgctgcttaccgtttgtactatggcggctgtggcacattatctcatcggctttgcgtggccattagcgttggctttcggcgccattgtcgccccgaccgaccccgtcctggccagcctaatctccgtaagtaacgccagggacgatgatgctctgcgctcttcgctttccattgaggccggcctcaatgacgccgctgcgttgccattcttgctgttagcgctgctgttgtaccacagcacaccggaggctgtggccgtaacacttttcgcgcgatggggtttgatcgacttgttgtgggcgctttctgcaggtctgcttattggctatctgttgggatggttcattggcttgctggcgatgcgcatgcggcaccgacatcaggatattgcccctaacgacctgattgccctggcgctaatcgcactcagttattcccttgccgattctgtagctgcttccggctttcttgccgctttcgctgccggcgtcgggctgcgccgagcagagaaaaatattgttgcttaccatcttcccggcgccaaacagcgagaaggaacgccgcccgcagaggaactggtcaaccccaatagtcgacatagtctggagagaaacaatcccgccaaatcaataggcctggtggtcggagatgcgatcacctttggcgatacgttggaaaggctcttcgctgcggctatcgtcatcactctgggtatcaccttgtcgcagcactgggatccaagaggcattgttttgggcctcatactgtttatccttgtgcgcccgatcatcgtttatatcgtcacgctcggctcaccgatgccgggattgcagcgtgcgctgattggctggctaggcatcagaggcataggcagcatcaattacatcgcttacgcttacgcgcacggtattaaagaccctaccgccgccgacatgttcaatatggcgctcacgctggtcgtcaccagcgtattactgcatggcctgaccctggcgccgctgttgcgtttacgcaaggcgaagaaaaaggtgccgcagcccgagtctcgccgccgatga

SEQ ID NO: 434454 - DNA, 186 bp, Serratia marcescens
atgaaacttttcgaagtcatgctgggtaatttttcactgtatatggtcgcgcgcaatgagttgcatgccaaaagacaactggcagccatgatggagaagtgctttagccgtcaggcccatccttggatcaccgggtctgtgctgtgcgaagcgggcaacgcggacatctcgtctttttatcactaa

SEQ ID NO: 434455 - DNA, 1140 bp, Serratia marcescens
atgttagatattccgtttacgtcttcacccacgcaaagtatcggcatagagcttgagttgcaactgattgatttactcagcggcgatcttgcagataaaggtcttgaaattattggccaatataatgacgaacgccatgtaaaaaaagagctcacgctttccacgatagaattgaactcatccattcatgcgacgccttttacgctctacgacgaaatgaacggcatcgccaggaacctggcggagatcgcggcgtgtaagaactgtggtttgtgcggtggcgggcgtcatttcagcaatatctggaaaaaccagatcattacaccgaccgagcgctatagggaagtccatcggcacttgggatttttggccaagctgtcctgcgtattcggtcagcatatccatatcggtgtgccgtcgggggatgacgcgatttatctctgccatgctctgatcccgtatatgcctcactttatcgctctcagcgcatcgtcaccctattatcaatccgaggatacactattctccagttcgcgattcagcgcgttgaactcttttcacacgtttggctatatcgagcgtgacgttcagagctggcgtgagttcgtcgactatgtcgaccaatgcgtagatcttgatgttattcaatgcatgaaggacatctattgggaaatccgccccaagccggaattcggcacggtggaaattcgcgtttgtgatacgccgttgaccctgttccacgctgccatgctgggaggatacgcgcagcagctggtgaaatttttattgaagaaccgagcaccgataacgcaagcgcatgatgcggtgacctacgcgaacacattctacgcgcagcgttatggcttcgacgcagactatatcgacagcggcaaacgtcaaaacctcaagctgaaagcgcacatccagcaaacacttgagcaactgcaggaaggcgcggacgccaacgagaacagggtgctgcgatatatgatgtcgtatctgcaacaaggggttaacgacgctgaacagctgcgcaggatggcgcaggggggcatgagcgaagccagcattatccgcaccatgatgaatctgctggtccctgcggagcatatcacctacaactcgccgcaaatggtttaa

SEQ ID NO: 434456 - DNA, 534 bp, Serratia marcescens
atggcctcgcaggtgcatttgcatagcgattttatgaatctgacattcttccatatgcaggccccgttgttgctcatgttggccatggcattattgctgtgttttttccgcacgctgatctcccccagaaaaaagctgagcaataacagtagaacgcatttttaccaggagttaaccaaggccgatggcgtagggaacttattgttcaacagcatggagagcaatgagttgattactcttacgctcatgtcaggtcggcgttatgttggtgtggtttatgccgcgattaacgaaagcacgtcacacggcaatcttatcttgctgccgttgcttgaggggcgtgatgggccaggagagttgggctttaccgtagaaaaaaatcattgtgcattgtatgaagatggattgccgcatactcaacgggggttggttgagcaagccttgaagctaagattggtcattatgagtcatcaagttgaaagtatgagttattttcaattttcgaagcgcagtaacgccaagggagcaagttag

SEQ ID NO: 434457 - DNA, 201 bp, Serratia marcescens
atgtttaatttattaaagcttttgttattttccgggcccgatatgttcttgtcgcctttaagcagtggtaacaaggaacagcgtgacgaccaggctggccgtgttcatgtcgatgataatggcaatgcgttcatcaatgtagaagatgatgaatttcagaaggtttttgccaagcacattcaagcactgaagcgctattga

SEQ ID NO: 434458 - DNA, 168 bp, Serratia marcescens
atgaccgaacatcgtggcggttcaggcaattttgccgaagatagagaacgtgcttctgaagctgggaagaaaggcggtaaggaaagcggggggaatttcaagaatgaccctgagcgcgcatcagaagcgggaaaaaagggtggccaacacagtcacgataacgattag

SEQ ID NO: 434459 - DNA, 2277 bp, Serratia marcescens
atgaaagagaaaaagacattagcaacaaatggggatataagtcactcattgaaaaaaggaaataaggaacctctttcgagcaaggaattgcatctgcaaagtacggcgccggccgataattctcacgagcctgaacgcagccaaacgccgcccggcaaacaaccgacggtacccggcagtatgaaagagaacgccacgaacagcgataagattaagcaactagaatcccagcgaaaatatgataaaaaccaacctctcacaaccaatcaaggaactaaaatagccgacgaccaaaattcattgaaaatgggcgtgcgagggcccacgctgcttgaagatttcattatgcgggaaaaaattacgcattttgatcacgaacggatcccggaacgcatcgttcatgcccgcggttcggcagcacacggctatttcgagctgtataaaagcctggcttcgataacgaaggcagactttttacagcacgaagggcagcggacaccggtattcgtcaggttttcgacggtgcaaggctctcgtgggtctgcggatacggtgcgcgacattcgtggctgggcgaccaagttttatacccaacaaggcgtgtttgatctcgtcggcaacaataccccgatctttttcattcaggacgcgattaaatttcccgattttgtccatgccgtcaaaccggaaccgcataacgaaatcccgcagggggcgactgcccatgatagtttttgggactatgtctctctgcagccggaaaccctgcataacgtcatgtgggcaatgtccgatcgcggcattccacgcagttatcgcatgatggaaggctttggcatccatacttttcgcttgattaacgcacaggggaaatccacgtttgtgcgtttccactggaagccggtcgcaggtaaagcctctttactgtgggatgaagcgcaaaagttggcgggtaaagacagcgactttcaccgtcgcgatctgtgggaagcgatcgaagccggcgattacccggagtatcaattaggcatgcagctcattcccgaagaagatgagttcaaattcgacttcgacttgttggatcccaccaagttgatccccgaagcgttggtgccggttcagttggtcgggaaaatggtgcttaaccgcaaccccgacaatttcttcgcggaaaccgaacaagctgcgtttcatcccgggcatatcgttcccggcatcgactttaccgacgatcctctgctgcaggggcggcttttttcctatacggatacgcaaatcagccgcctgggtggccccaactttcatgaaatccccattaaccgccccacttgcccgtaccacaatttgcagcgcgacggcatgcaccgcatggatatcgacaccaacccggccaattacagccccaactctcttaatgacaactggccacgagaaaccgcctcggcaccggctggcggtggcttctccagctacgcagagcgtgtcgacgcccacaaaatccgcgagcgaagcgcatctttcctggagcattatgctcacccccggctgttttggctgagccaaacccccgtcgagcagcaacacatcatcgacgccttctcttttgaactgggtaaagtcgcccggccttacatacgtgaacgcgtcgtggaacagctcgcgcacatcgatacggcgttggccgaagacgttgggcgcaacctcggtatcgcgttatctgaagagctgcgaaataccttgccgccgaaaccggtcaacggcattgaacgtgaccccagcctgagcttgtacgccttgccgggaggtagcgtcaaaggccgcatcgtcgccgtattggtggcggacaatgccctgtcggcagacgtactggcgatcctgaagggcctgaagaaacgcggcgtgcataccaagctgttggcgccaaaattggggtatgtcctgggcagtgatggttcagccatcgcgattgacgcaacattcaccggggcgccatcgataacgctggatgcggtgatcgtgccgggcggtgtgtcttccgccttattgcagagcggcgaggcaaagcactacttgcttgaagcctatcggcatttgaaagtgattggattgagcggcgacgccatgcagctaaaagcgctttggcaagcagaggccgccgaagacggtgtcatcgaagcgccagccgtgaaggcgccgatgatggagcgctttatcgaggcgctggcggggcaccgcgtgtggagccgcagcggtaaagccggcgaagtgcctgcttga

SEQ ID NO: 434460 - DNA, 483 bp, Serratia marcescens
atgagcgactttaaagagcactttatcgactggttacgtgacgctcacgcaatggaaaaacaggcagaaaccatgctcgatggcatgaaagatcgggtcaaaaactacccgcctttgcagaaccgtatcgtccaacatctggaagagacacgtcaacaacaggtgcagttagaagcctgcatccagcgtcagcaggcatccgcatccggtctgaaagactttgccggcaaggcggccgcaatggggcaagcgctgagcggtgtttttaccgaagatgaagtcgtaaaaggcgtcatcagcgcgtatgtcttcgaacattttgaaatcgcttcctacaaaacgctcatcaccgccgctgaactcgccggcgatatcgaaacgcaacggtcgctggaagccattctgcagcaagagcaggcgatggcggactggctgagggacaatattccatcgattacccaggcctatttgagcaaaaaatga

SEQ ID NO: 434461 - DNA, 285 bp, Serratia marcescens
atgactgatattgttaaataccgcaatgaagtgatcgaaagcgcggaactgctaccgcccccccatcccatggacggcagttgcaagagcagcatcttgatttactgtgaccgcgagccggcgctgagccaaacgctcaatacgctgagcgagtgggaagaaatcattctcgaagtgaatggtgaaaccgtccgttgccaggttgaaaaattcgatcgacaaaaaaacgtcatcgtactgaaaaccgaacggcagcaaagcgacgccgacacgccctatcaataa

SEQ ID NO: 434462 - DNA, 855 bp, Serratia marcescens
atgaaacaggaacaacagcccgcccaacaccaagaccgacaaccgggattggaaggcgaaatgacgcctgcgccaaagtatgacgacccgatgtatcgcgcgagcggaaagctcaccggtaaagtggccatcatcaccggtggcgatagcggcatcggccgcgcggtggctatcgcttacgtcaaggagggcgcgaaagtcgccgtggtctatctggatgaagagcgcgatgcccaggaaacccaacgttgcgcacaggaaaatggtggcgacattctgttgctcagaggtgatctgcgcgaccgtatttttgtgcgcgagattgtcgacaaaacggtggaaacgtttgggcggttggatatcttggtcaataatgctggcgaacaacatccggttgacgaaccggaaatgatcaccgagcagcaattggaaaaaaccttccaaaccaactttttcagcatggttgccctgtctttggcagcacttgagcacttaccggccgaaggcgtaatcatcaacacctcttccgttaccgcctaccatggcaatccgactctgatagactattcatcgaccaaaggcgccatcactgcatttacccgttcattggcggttaaactcagcgagcgtaatattcgcgtcaacgccgtcgcgcccggcccgatctggacaccgctgatcccttccactttcagtgcggaaaaagtccataagtttggccaggacaccccgatgcaacgtccagggcaaccctgtgaactggcgccagcctacgtttacctggcttgcaacgactcttcatacatgaccggacagacgttgcatatcaatggtggcatgatcgtcaatggctaa

SEQ ID NO: 434463 - DNA, 693 bp, Serratia marcescens
atgcatgtcttcgacatgaacagaattctcattaatgcatacccttattcctacttgctggaagttgcttttcgttcaacgtttaccttttttgtcgcctatgtttttttacggttaattggccgacgcggcgtaaaacagatgacgctctttgagatcgtcatcattcttactctgggatcggctgcgggtgatgtcgcgctcaatgaggactccccgttattgccggtggtagtcaccttcacggtaattattggcctgtatcgaattttcacttttctgatcaacaagcggacgcactatcaagtgttgcttgaaggtaaaccggtaactctggtgaaaagtggtagactcaaatttaataatgctaataatcaaagctacgcctttgaagagctgatcatggagctaagagaaaaaggggttgaacacttgggacaggtgaaactggcgctattggaaattgatggcaatctcagtgtctatttttatcccgacaacgaggtcaaaccggggctgtctattctgccggcaacgttacgcgaacgtcactgtgagatcaatgaaatgggatattacgcttgcgtcaattgtagcgacacactttttttaaatccctgcgaacagcatccctgtagggtatgtggtgcaacggcctggacaaaagcaagtgaatcgatcagaataacttga

SEQ ID NO: 434464 - DNA, 132 bp, Serratia marcescens
atgtcacaaagaaagcccaacaaagatcccgcatccaaaagcggtgtgaaaggcccccgtccttatcatggctatgtgatcgccgtcgttattcttattatcgccatcttttacagcattatgtattggtaa

SEQ ID NO: 434465 - DNA, 492 bp, Serratia marcescens
atgtcaattaaatcgctgaacgatcttttcattcatgcgctatccgatgtttacagcgccgagaaacaactgactaaagcattacccaaattagctcgagctgccgatcaggaagatctggttaatgcttttaaaactcaccttgaagaaacgcaaggccagattgaaagattggataaactggtggaaagcaccccagaagtcagaattaaacggataaaatgtctggcgatggaagggttgattgaagaaggtcaagagatcattgatggtattgccgcgggcgcggtgcgagacgcaggattgattgctgctgcgcaaaaagttgaacattatgaaatcgcgacgtatggcaccctttgtgcgttggccgagaaactcggttatactacggcgaaaaaacttttgggtgaaacgctggaagaagaaaaagaaacggataataaattaacgttgattgcggagaagaaagtcaacaaaaaagccgcttaa

SEQ ID NO: 434466 - DNA, 441 bp, Serratia marcescens
atggagatagtaatacgcacggtggctatttattttgccctgtatattgtgttgaagatcgcgggcaaccgcacgttactgcgcatgacttcctttgactttattctgttactgatcatcagtgaggcgactcagcaagcgatgttgcctgacgatctctcagtcacttcggcaattattgctattgtcaccttattcagcatcgacatccttttttcctttatcaaaacctatatcccttttatagataggtttatagacggttcaccgataattctggtcgaaaatggaaaattactgcaatggaggatgaaaaaggtccacttgaccgtcgatgatattcttgaaattgccagaaacaagcagggcgtggaacgtttggaacagataaagttcgccattttggaaaagaatggcgacgtatccataataagattgtaa

SEQ ID NO: 434467 - DNA, 531 bp, Serratia marcescens
atgaataaaagtcagcaggacaaaacacatgacgaaaaaacgagcagggtgatacctgtcaaagagcacataacaatgatgaggctgtcctggcagttggctaaagcggggtatcttgtcatgtttagcatcgtgatactggcgctattaggctttttttctaatggtgtattcagtgagagagaggtggttagtcgggaaggtgattttaagatgaattatgaacgatttgctagaaacggaactcaaacccaatggcgtatgaggttgaaaagcgaagctaaccaaactgttaggttgtatttccccgaatccttggtggaattctatgtgatagaaaatgtacaacctcagtcgttaaacgtcactcatgtgaatcgaaaaataattttcaccttgccagttagtatgaagcgagaaaattatacgctcacgtttacgttacgcccgcaaaaatggggaagtttcagtgctcggttggcagatgaaaatggcgactgggttgtaataaaacaatggatctatccatag

SEQ ID NO: 434468 - DNA, 726 bp, Serratia marcescens
atgatgatcgtttattaccgggaaagaatggctattttaataccagaaaacaatcagcagattattttaaggaataaagaattgaagctatggcattttcttattgaacagagccctaatgtatcatcaagaaaagatctcggtatacatatatgggaagggcgttatgtgacagatttcgccatcaaccaaacgataaattcattgagaagaaagattggtgatgcatcacgtgaaattatcattaccgttcctaaaaaagggtatacgattaatgcagagaaggtcatcattaaagttgatgatgaaaccgagttaatacccaatacgagcactggcacagcggaactggggagcaattcggataatgattcaaaacataaagaagagatatctcctcaccgatttaagaagactcgtgaggttcacgaaactgcatcagaaaaagcgacatccaaacgtgataaagtgaaaagaagcatgctgatgatagccgtattgatatgcagctatattataggcgtttggttttccgtaaaaataaatgaagataaaaatgaagaaaccttataccttgatggatacaggattcactctactggcgatcgcatagaatacgttcacggtgaaaaaaaaaccgtttgttatcgaatgaagagcaatataaatgacaataaaaaaagagactaccttacagaaatcacgacttgtaaaaatgaaggttaa

SEQ ID NO: 434469 - DNA, 513 bp, Serratia marcescens
atgacaataaaaaaagagactaccttacagaaatcacgacttgtaaaaatgaaggttaagggattatttttaattgcttgcatattacttttcatctgtggaactctaagttataaacaatatattttagaatcaatgagcaatagttaccatgggttattatttctggacggcgaagaaaaaataaagctaaacctatacttaaacaaagatagagaaaccgcctacatcagattgattcaaagtgatggcaatcacttacgttatatcactgccgaaatggaactcaatgcattgttaacgcattcaatagccacagcaaaagtggatttgcatgagcgaaatatgacagagagcgcattcagctccgacagtcgcaatcgtctggtatcggttttgttgcacaagaacagcaaacaatattttttggttataaacaaggatgacttctatattccaacaggtaataatgatattaatgaactgattttcctcatttttcctgataaatga

SEQ ID NO: 434470 - DNA, 231 bp, Serratia marcescens
atgttgaaaaatgtagctctgaaagcgtatgtctctatggcttgccgcaacgtcaaaaacgcagaacaaaacgagcgtggcatcaccgctatcgaatacgccatcatcggtgtagcgatggcctctgccctgttcttcatctttgacaaaggcgggttcattgaatccctgagcgcggcatggaacaccatggccacgaagatcactgcttcaggcaacatcctgaagtaa

SEQ ID NO: 434471 - DNA, 552 bp, Serratia marcescens
atggaacaccatggccacgaagatcactgcttcaggcaacatcctgaagtaatagtaaactttcgtcatatagccttcgactcttcgagggctatatttaaaacctatatgttcatagcgataataatcatatctttatacatatcacttaaagatatcacagaaagaagaatacctaacgtagcgcattttatgatacttacggtggcatactgctatattttttcccacccaggcattattggtgcgggccaggtgctgatatggccgtttgccatgctcttggttggtatcattctttcgtcttgcaacatactggggtttggcgataccaaactgctgttcatcaccatgctggtggtgccgccggaacaatacgttaacgttatttacctgactgtttttatgggtggcgtatgggcaatcttatggacatatgccctgtcaaaaatttcgctgatcaagcgctatgataaagtaaggagcggcgtaccctacgccatccctattttaatcagtttatgtacctatacgtttatcggtgcagtttga

SEQ ID NO: 434472 - DNA, 960 bp, Serratia marcescens
gtgcgctttaaatttattgcaatagtcgcactgctaaccatgttagccggcgtagtaggtatatacagcgataaaggcaacgaggacgaggaaaagactaagaacctcatagtgaataaaagccttatctattataccgcaaagcataatattgatgtgggtgccatcgtcaccacggatgacttcgccgagaaagagataaaatatccaccaggctcgccccccgcctggctagacacgatttttggcgaaaaggactttcgcggactaatggcgtccggcggcgtggcatatcaaaatattgcctccggcgaacgggcctcgaaagataaccttggcaacctgttgcagaaaatcgattcgagctattcgatattgcctatttctgtcaccaccgccagcctgaagaaccctaacatcgcggactttggttttatcgatctgttcctggtctccaatgataacaaagcctaccgggacgatctttatcaaaaatcgcgcagcgataacggtaccacggggaaagactacaaggacacgcgggtcaaacagttcgccagcaaggtgtggttctttatgggcaacggcaacctcaataagctgcaaaagttcgatcagtcggggctggtttccagcctgatgaaaacaaccagcggggagaattcgctggcgaatgaggtgcacagcaaccgggccgtcagcgatgacaagtcctcaacgaccatcgtctatgcctacttcaagcccgaggacgtggataaagtcattcaggcgcaaattatggggatgttcttcatcacgcccaccaaggttcacaatatcaatgagggcatcgccaaaataaataacagcacaagagagattaccccgtcagacattgtctctggggcgcccatttcggaaaggcaaagccgcgtggttgaaatcaggggagcgcaaagtgaaattcgtaaatattaa

SEQ ID NO: 434473 - DNA, 1272 bp, Serratia marcescens
gtgaaattcgtaaatattaacaggctggcggtttttcttattgtgatgttaaccgccagctttaacgctgcggcgctcgacgtggacatcaataaaacgaccgatcttgagattgacttcagcgtgaagtcaatcgtcgttggctcaccggaaattgccgacttccgggtggtcgatgagaaccacatctatgtcttcggtaaaaaaagcgggcaaaccaatctctccgttaatggtaccaacggtgagagtcaaacgctgctgatcaccgtgaacgatctgcaaaagaaatccgtcatgttgaataccttgctgatcagcgaggggtttaaagacgtgaaggtcatcgacatgagcgactcgctgctggtcagcggcccggtattttccactgaagatggcgcacggatcaagtcgctgatcgaagagtacgtggatagcgatcaggtcaggtactccttagtaacccaaaaaaatcagcaaattaagatcagggttacggtcgcggaagtctcgaaggacgtgacggaaaccctgggcattgactgggggcggggcaagatcagcaccggcgtgagtaacgatctgactatcaacaacggcatctacagcagcctggttaaggggtttaacttcgactctctgggcgtagccatcaacgccctggcgaaaaacagcctggctaacgtgctgaccacgccaagtatcacggtcaccaacgggaagaccgcatcatttcacggcggcgggcagatacctatttttcagcgcagtgaaaatggctcaacggttgaatggaaaaactatggcgtcatgctgaactttgcaccggtgatcaattcggactcctcgattagcatggacgtgagcgtcgaatcatctcagatcggcgggtactataaatatgagaacaccgagctgccgacgattaacgtgcgtaacgtgaagacctcagtacgaatgcgggatggagagagcttcgtcctcggcggactgatcgacaacagccaaacgcaatatgttaataaagttccaggatttgccgacattccagtgctgggcgccttgttcaagtcaaccgggttcacatctgggcgcagtgaattagtcatcttcgccaccgttgagtatgtcaaacccgtagagagaaactacatcaagctcccctacgccaaattctccagcccgtgggaggtctttttcgatctcgggcacagtgataacagcattaccgatgtctttgtcaaaggagccgactatgtcattaactaa

SEQ ID NO: 434474 - DNA, 465 bp, Serratia marcescens
atgtcattaactaattcgctgctccttatttttatctgcctgggcttaaacggctgcgcgttcgaaaggcagcccgacgaaagaaaggcgtattacgttaagtttgtcggcaaccccgaccgcaccaagatggcaaagcttgaaaactttgttttaagcaagaaaatcggctccatcagcagcttggcgattatttatagcgataaccactatgaccgtgcgatcaggctgcaagaagaaatacagaaacagtatggcattaatgctgtattgcaagagagcgtgaaccagcttgacgcaaactatattgccatcggtaaccggcataaaaccgagcgaggttgctatcggttccggctctctgattttaactggtacagctccgacgagcaggctctggataactattcggagcgagaagtttgctcgaccaatggtaatgatttcgctgagagagcacgttaa

SEQ ID NO: 434475 - DNA, 1143 bp, Serratia marcescens
atgttcatagaaaaactaaagagaaaaaacgaggccaaaaagaaaaaggccagcgtgattgttttaaccaaaactgagactgattttttatcactctcagaaccactctcattgtacgacgtcgatacgatgatcaagcacatccccgctggcgacctgctggagtttattaataacgccctgacggggaaaaattattttgtgctggatgcccagagctacagcgagactgaaatcgcggacatcgccatgatgctgcgtggtcgctatccctccatgctgatcggcaacgaggattcgatccaggcaacgtggcaggctcgcgagctggggttcagcagctattttacccgcaccagtgagatccgcctgctgctgctggggatagtggaacacttcggctatgtgcgctccagaacttctctggtgattgggttgtgcaatacctcgcctgatatcgacattaattatcgcgtttttcacgatctctgtaacagcgaaatgatgaaaggctattcaatgctgtttgttaactgcgacatcgcaaacattttctttgatgccgcattgggggtaaaggccaataaaaacaccgttgagcacgtgctgggctatgagaatgaactggataccacctcgtccctgaaactggtgatgaaaataaaagatcacttcgactacgtttccttcaacattgccaacgacgaggcgcacgttgacaacgttgacgccttcctcaacggcgttgagaaattcatcgaatcgctggcaaactcctatggatttatttttattaatatcccctactattttctcacgctgcacggcggaattaatttgctcaatgagagcgacatccgtgtgctgatgaccaatgggcagatcgagtctatctataaccttaactatctcaagaaccgaattggctttaagcaggataaaggggagaaaagaagggacaagctgatctccatccgaaaacaggccggtaagctggcaactgaaatcacggataaagaaatccacaccaagctgggcatcaaggtggacttcaacaataacgccaacctgctgggggggttgttaaccgctttcaaccgtaagaaagaaagcaaaaacattatagacagcatatttaggtga

SEQ ID NO: 434476 - DNA, 1254 bp, Serratia marcescens
atggatataaaaacctatgaaaaaatcagaaacgcgctgttagagcaaataaaaatagaaaactatgacagctctgccactcatgaagcgctgatgaaaattgaagaactgctcataccggcgctcgatctggaaaatattatattaaccagaagaaagtttgatgagctgatcaaaagctattatgacgacatcttcgggctggggcccatcgaagatctgctggccgatcccagcgttaacgacatcatggttaacgggtgtaaatccatctacatcgaacgggcgggcaaactcatcaagcaagattctcagtttaaatctaatgagcagatcctgcgtatcgcgcagcgtattgttgcgccgattgggcgtcgggtagatgaaagctcgccgatggtcgatgcccgcctggccgacggtagccgcgtcaacatcatcattccgcccgtggccctagatggctgcaccatctccatccgaaagtttaaagaggataaattagacctgatcgacctgatcaactttggctcgatgagtgaggcgatggggcactacctgagcctgatggtcagggccaaggcgaacatcatcatctcgggggggacgggttcagggaaaaccaccctgctcaatgcaatttcgaacgaaatcgatgatggcgaccgcatcgtcaccatcgaagatgccgccgagctgcagctgcaaaaagatcacgtcgtgcgcctggagtcgcgccctaagggtgttgacggcggcggtgaagtctcgattcgtgacctggtgatcaacgcgttgcgtatgcgcccagaccggatcatcgtgggcgagtgtcgtggcgatgaaacctttgaaatgcttcaggccatgaacaccggccacgaaggttcgctctcaaccattcacgccaatacgccaaaagacgcgctggtgcgcctggaaagcatgctctccatggcgaactccaatatctcggccaaaaccattcgcggccaaatatcgcaggccgttgatattattattcaatgcgcaaggttgccctgcggctcgaggaagattaccaacattacggaaatcggcacgctggagggtgaggtcattcaaagccaggacgtgttcctgctcgaaaggcgaaaagagtcggatacggtcacgaagtatgcgcataagcagaatatcgcctactccattctggaatcaaaggccgcgttcgccgggctgctcccagagctcaaaggcatcctgcatgactaa

SEQ ID NO: 434477 - DNA, 906 bp, Serratia marcescens
atgactaacctgacgggcttcctcatcaccctgctgcttctgctgctgatgttctcatacgtcaggcaaaaggccgcgaagaagaaaaagtgggagaactttttcggtaaagcgaagccggctgagaaagagaaaaccaaggaaataaaaaagctcatcggcaagtcttacctacccgacttcgtgtttatttttggcaccaaaagcctggtgatgtctctggtggtcagcggcggctacatcctgttttggtggttctgctgcctgaccttcagcgcctcgtcgtttgcctatgtatttggcaccgtgatcctggtagctatttcgtttgccgcgttgtacggcatctaccagagccgtttcagcgactatttcgaagcacagttcccctatgcgctgcggcttatcagccgcaacctggccgtgggccagacgatatacgcggccattgatgcagcggcggagaacctgagcgatatcatgaagcgagaatttacccgcatctcattccaactgaaaaacggcgtgtcctttgatgacatactcagccggggtgagaaaatctacccctataaaggctactttgtttttagttcgtatattcgtatctccatacaaaaaggcagcagtctgaaagataccctgctgtccctggccaatgacctggtcgccgctcaagtcattaagaaaaaaaccaaagcgttaacctcagaggcacgcggggcggcaaagatcctggcgcttttaccgctgctgatgctggtcgtactctataagttcgccttttggaacttcgtttacctcttcgatgagctttatggccgctacgtggtgatttacgtggtcattagcgtcagcatcgggtttttcattatttcacgcatgattaagggagttgaactgtga

SEQ ID NO: 434478 - DNA, 912 bp, Serratia marcescens
gtgattttctttatctcaacctcgctctttatcgtcggcgttattgtgtttatctggggattaaagagccacaagaaagaagaagagtattatgataaattttactttatcgtttcctcacacgagaacctcgatgactacctcagcctgaaaaacaggattaaagacctgttctctttattaatgagaaagctatcattctacgttgaaaacaacctgtcccatacggaataccatgctctcattaataaggcaggatattactcgctgcaagaaagcaccctattttatatttatatctctagcatatttctcttttcaactctgtccctaacgctgttagcctgcctgggtaatctgtcattctatgtcattcctgttttcatgatcgtgtactacattggctcaaagatttatctcgagagaaaacataagaacgagatcaaaaagttcaggatcaacttcgtctactttctcgatctgtgcgccacctgtatcaaaactggcatgacgctgacggccgctttagaaaccgtttccccggtgctctatcgcttctccggtctgttaggcaacagcatgcagaacttttcacgcacgctgaaatacagcgatataaacatcgcctgcgaaaagctctatgaagaggttcccctaagcgaggtcaaggagtttatcgcaaccgtgcgtaactccgcccagttcggcgctggcatgcagtccggtctgcaagagttatctaaagagatccgccagtttcactttatagaaaccgaagaaaaaattggctccgtcaacgccaagatggggataccgctcattctctttatcatgttcccggttattgttgaaatcattgctcctggcctgctacgcgccatgggcagcctgtcattggagatgatctcgtaa

SEQ ID NO: 434479 - DNA, 759 bp, Serratia marcescens
atgaaaaagttagtcctcacttcgatagtctttcttgctgcctgcgtcaacggcacgcccgatatgttgagaaacgatcgggaaacggctcagctggcggtccgcgtcggcgcctttgaaaaggccagggagatcgcggtagatagtctgcaagcgcaaccggacaatatcgagacacgcttctacctggccgatatctattccaagatgaataaatatgatatggagggccaggaactggagattattcagggaaaaattagccgcgcagatgagaattacccaagggtgattatcgaactaatgaagaacagtctgatgcgacatcaatatcaggaaactatctctctgtataaacagaattttgccgaagggaaaatggcgcttgcccaaagcgctactatgcgcggcaaatcgctgatgtatgccgccattgcctactgtaagcagaataagtatgaaacctgcatcgccgaactgaagcgcgccagaacctacctgccgggagacccggcgctggccgacaacctgaagattgcacaatacatggccaaggccagcacaggggatatagacccttctctgctgtatgccggctatagcaatacggaatctaaagagatgtatgccaacctgatcatggcgctgattcgcggtgaccaagagacccgcgcctttgagctgctcagcatgcgctattcccgcgaggattccatgacgatcatcaacgatcttaacggtatgaaaatcgcaaaatga

SEQ ID NO: 434480 - DNA, 468 bp, Serratia marcescens
atgataagtctattcactagagtagggagtgaggagcgaggtatctcaaccatcgaggccagcgtgctgctgccgatcctctttatcatattgatgatgatttatgaggtgctgaggtttcagaacgatatctcaatcatttatttcaacgaagagtttgcgtcacagcgcgtcgagctctcgtttttagacaacgatgtcgaaaagataaatgaaaacttcctggccgatttaaacaaaagcggcagtgagttttatttcagcgcgctgctctattcggagccaaagataacctgctatgaggatatcaatatcaaagtcagcaaaaagtgcggaaagaaaaccaagctgattaacatcgcctatcagatccaacgtgaatacagcagcgattggataagcgacctactgtctttcccacaacaatttgatcgcgaggtatttatcgtcaatgattacttccattaa

SEQ ID NO: 434481 - DNA, 528 bp, Serratia marcescens
atgattacttccattaacaggcttgttgataatgaggatggtagcgtcgccgttgaaggcacctttgttaccctattcttgtccgtgctgctgatttataccatgcagcaggctttggtcatgtcagtacagtttagtattaataaactggccgatcaaatggtgaatattatttcccatcgtgacagcctgtttggcaatgccaatttaagccaaggcgacgtcgttaacgtcgctaaaatgtttagccagttcaagaacggcggagaagcgccgtttttcgacgttttcgttgaggaaatcgcctacgcaacggggcaatacagcatgtataagctacccgggagcaaagaaggctgccagctcaccaagcggctgactgactatggcatcgatatcaaaacctcattcggcaaatctaactcggtgtatcgggtttccatctgtaaaaaaacagaaccgggattattctctaaaaataaaacgctgctggcagaaagtgccatccaaattggccatcatcattag

SEQ ID NO: 434482 - DNA, 1620 bp, Serratia marcescens
atgccgctgtgggcgattggcggcatgatggtggtgatctctattttttgggtcgaaaactactcctccaccatcatggaaaaaacgcgagaaatgcggctgacctccgtcgtgacccgtacctcgatggtagaaagaggaacggtgaccgccaatgccgggcggctagccgaagcgacaggcgccaatatgaatcaggcaacccatgccttctcggcggaactgcaagaaactacgctggaaaagcttcaggagctaaaagaaaataagcggatcagcgaactgctcgcgaccacttccaacgtcagtcaaaacactaacgttcccttcgatgaaataaacaaaaccattggcctcgacccagaggtcaggatctccacggcggataacgccgtcaaagttttcagaccgttacacgtgattatcgccgtcgaggccagcagtcttaaccgtgcaaacgtgatgcaggcgcgggcggcgctaatgagctcactatcccgcctgtatgccgaagcgccggctacccgaacgacggtgatcccatactcttttcgcgtcaactccgggggcaaatgctataccgggatcgcccggagcgatgccttttcatttgtctggtgggaaagcttctttgcgcaagaagattacctggctgaacttgcaaatacattaagaatggccgaggaatatctcggaagattaaacgcagagattgattatagtaatcagatgataatatatttgaataatgagcttagtcaacatgatcccggcactcaggaatataaagagctgacagaacaaataagttattatcaacaagagataagacttgctgaggcgatgctgccaatggctaatgaaaacataaagattgccaaagaaaatgtcgatgcacagaaagaagttatagacaaccttaagcaacaacaacagtatattgattacttccctctggccaagcattacgcaaaaaggtacgataactattatcttctggatgattataccgataattttgctaactctggaatattttcaattacgcagagtgattttgaacgcgccgcaaagacgacttaccaaagtgcggaatatctatcctccctcgcggtcaaacgcggcgtttattttggcgatgccggcacctgccccgccagcaccgtaaagtatggcctgacctcatcccaaaatgtgaatagcgcgctttccggcatcgactttagcaccaataaaattaaaacgctggaagggctactgtgggcggggcgcaccgcgttttctgcctctcgcggcatggcacgcaacgtcattattctgtttgcgtcggacacaaaagaagttatcgatcccgacgaggtcaccggcatccgacagagctgcgcagccattaagaccggctttatcaataataagtcggccaagctgatcgtcgttacccagaatcaggatggccgagataagttcgaagagctgagctgcgctacccagtggttcaccgatccgggctatatcaaccttgaagatataaacaacgaatccacgccaacgctggaagagcaattcaactttatcttctcgcaagaatccaccaccaggaacattaacgcacatgaataa

SEQ ID NO: 434483 - DNA, 630 bp, Serratia marcescens
atgaataaagttataacgatcgcgctgatgctgctctgcgcccctttttcctatgctaaaagcagcgacgagctcaatcagtccagctgccaaaccggcccgatatatgaacgcttcggcgacgcaaaacgccaggccggtctgctccggttcgacggccgcaccaacgcacggctgagccgtagccagctggtgcagtatcgattcgtcaccgtgttgcacgagtacctgggcacactgtgccaccaggaaaacgcttacgacgccaacagcctcggcgccttgctactgaccaaggaaaacatcgtcatgagccatgtcggcacggtgcatttcgcaagcggtagcgccctggttgatgaggcgacgctggcgcgttgctgctcgcacatcagccagacgtccgactacgacggcatatttattgtcagccgcacggactcaataggcaacgcgagccacaaccgagcactgtcatatcaacgcggctaccgtatcgccgagcgcttacctcaggccagccccattcacctgattgcgctcggcgccaggccagcgcgcagcggccagaggccgatcgccaaccccaacgatcggcgcgccgacatttatctctatcagcgccagtga

SEQ ID NO: 434484 - DNA, 2340 bp, Serratia marcescens
atgagtaagctgtttttctgtctggcgacatggtgcgctcgtcgtcgcacgaggcctaatgcttacgtggcaaagaatgagcggccggatagagggatcggagcggaggcgccgattcagacagcacacgaagatcgcctcagaagagccgaatttgcggctcgcatagcagatgtgctttcggaacttagtttgcgcgagggccgggtgtttgctattcgcgggggatggggcttcggcaaatcatcactgaaaaacctcatcaccgaacggctcgatgccaagagcagcggagctgactggctcgactttaacccctggcaatggggggacggcgacgtaattgcccgcgcgctatttggacaaatagcagatcgcttgggaggcgagcattcgaaggctgaactcgaccgagccaaagcactgcgaagctacggcgcgattctcacaggggctggtaagcctcttaaagaggttgggagttcaggccttctaatctcgacggtgttaacaaatgcttcggttatagcggtcgcgtcagccattggctttgaccttccgacggtcgcaaaagttgcggctgttcttgcgtttctctcggtcggagtacctcttgtcggacggttgctatcgcatctcgggcgtgactatagcggtgagcctctcgacaaggtacgcagatcgcttgaagctcgtcttcgcgaactcgaccggcccctagctgtcttcgtcgacgacattgaccgacttgagccagagcagataaggatgctgcttcggcaggtaaaggcaaatgctaatctaccgaacattgtttttgtgctcttgttccagccgagcatcgtagaacgagctcttgatccggtcgccgacggcgacggccgagccttccttgagaaggttgtgcaggctaactttgatctaccagctgtcccggcatcgctcgtgcatcgtatgttcgaagaggaactctctgaaatagcgggcccatacgcgactgaggctaacgggttctctcagagacgctggggtaacgcttgcattggctgcattcagcccctgcttcgcaacatgcgcgatgcgcgtcgtctcatctcgtccattgttgtacacatgcccctgcatgtggtcggtgacgtgttcgaggtgaacattgtagatttcctgcttctggaaacactccgggtcttcgaacctgaccttcacgatgcactgttccgtgagagaggattggttctccaggaaggacgcttctcccgtgatggccgacggaaggtggaccaagcagcggctgaagagcttcttgagatcgtctcagaggagcgccgaaatatcatttgtgatgcgcttaaagacttatttcctcccctcgaatgggcatatggggggacaaactatgcagacggcttccatcgccggtggttgacggagaaacgaatatgcacttcgcgttacttcccacgttattttgaactccaaacggcggtcggagaaatgtcagagcgccgttttgttgattttctcgatgcaacagcgacagaggacgagctctttgcggcaatcgctaccgtcgaagctgacgggctgctgaattcactcgttgcaaggctcgacgaatccgtcgaccgattaccaaccgagaacgctgctgttctgctcccagggatgttcggacttgctgaaaaactcgcaggtacgaacagcggctctttcgactcgtcatatgtagcagcatggcgagcgacaagttggttcctgaagcggattcctgaggatattcgaggtggtttggctctcgaagctctccgtaaaactgaagcgctatccgtctcctcgctccttattcatctaagcgatccagacgatcaaaatgagagtgacggtggggccttcgaaccggagctcgatctaaacaccgttgcggcaatgaaagcagaatggctgcgattgatgaggggccgcgcagccaacggcaacacgctgttcgccgaaccggatctcatatctctgctctatcgctggagaacctatacagactcaatggacgaaccacgaaagtggatgatgaatgcaattcaaaccgaccagggcttcgcaaccgtggtcacacgcttgatgagccgtggtacaagccacacgtatggtgataggatctccacgccccacaatagtttcaacaaagaaacaattgacgattttattggtattgatgttgctaaggctaggattgactcgattaatcctgaccagttccccgagcacgaagaagccctgcgagtgctgcttaggcatctagaaaagtggcttgggttgagagcaaacgacattctcgatttatag

SEQ ID NO: 434485 - DNA, 1317 bp, Serratia marcescens
atggaaaactgtggattgggggatgagaaaattaataaaaatcaacataattcaagaaaactaatctacactaagcaaggcgaaagatggttaagccaattcgatgcattagaccaggaaactgcgaagcttctgcttaactcactgactcttgtctctcatactgaatttcgtcggaatcttgaagcccttattttggacatttcaacaaagatagtgggtccagtcgccctttatgccgtaagggaactaaaaaaggaacccgataaaggccaattattcagcagtcatgtagtgccattttttgatcaagtgattaaaagtagtaatgggaaaaatgtaaactcgattggtgtctcatcagatcaaggtagcgaagcaattgtcgctcaaataattagacagctttctaaagccaatccggaaaaaatacttaaccacccttcaaaagaagagcttcgagttcaaagatgtgactcgttgatatttgttgatgactacattgggtctgggaaaagagtctctgattttattgacgcattctggagagacagaactatagcctcttggttatcatcaaaacatattaagattcaggttgtagcttattctgcaacggagaaagggctcagccgcctagaatttttgaaagcatccccggaattgattatctaccgagactcagcaacttttacaaccctccccattaagatggaaagaaaagaagcactgctgaaactttgtgaaaaatatggtcgtaaagcactgaaaggaagaaagcacttttggtggggttatcaaaaaagtatgtcttcgcttgtttttgagcatggatgtcccaacaatacaccagccatattatgggatcccgatgagaaaaaaggggagtgggttggtatatttccaaataggacagtggatacaacaacggcttcggtttttccgcctgaaattgtgtgtggcgataccatacaaaccctccatgatgtaggtcagacacgattggcgatgtctggcgcactaatgagacgaggggcgattggagcactcattctcgtagttctaggcttgatcgcaaaaggccaacgtaagcgttcaactatctgctatgcaacaggattaaattcaaaagactgtgagttacttctttcgaaatgtattaagtggaaattccttacacctgaacgaaggatcacccctcgggggctatcggaactatctgcggcaaagcaaatatccttttcaccgaaaggatatcttgccgttggttccgactactactatcctaggcaactgagagagactacatatgactag

SEQ ID NO: 434486 - DNA, 207 bp, Serratia marcescens
atgactagtgctaacgagcaatacaaagtcacccctttggggatgatagagggttgctacaccactttacagtgggtgttgggggatggatttcctgaacctcacgaaaaagcccacgcttggctggagacggcgcactctgcctccgccggcgtaagtcttgggttaccagagtgcgccgtcgcctgcggcgacgcatcggagtag

SEQ ID NO: 434487 - DNA, 1152 bp, Serratia marcescens
atgtggtcctctcaatcctacaaaaaccagggactagccaacgggctctcgctacccttgctcgatgaggctatcgcccagagcgagcttcttatttactcggaatacaccctcccctccattttaagcctcaaacacttggccaaacgtactagcgttgaatatgagtggcttcgcagtttcgtgattcggagtgcactacatggggttgagaattttgaaatttacaagaaattttctattcgtaaacgatctggtgggcgccgttttattcatgttccatcgccaaagctgatgcacactcagcgctggatcagtgaacatattctcaaagacctgcccgttcatcccgcaagtcatgctttcagaaagggcaactcaattaagaaatgtgcttcacgacattgcggagcaaagtggttaattaagattgacatagcagatttcttcagttcagtgtctgagattcaagtctaccgtatttttagagctttaaaatatcaaccattagtagcctttgaacttacacgcctgtgtacggttggcaccgccgatttaagccctagaactgagtttccgcaatggaggacaaataagttcaatgaggctatcccgttgtatcaccagactgtgctaggttatctgccacagggagcccccactagcccattccttgcaaaccttgtcatgaaaaaatgcgatagcgcgttgaataatttggctaaaaagaatggattagtttatacgcgctatagtgatgacctgagtttctctacaggagacaaagattttggacgctctcgggctaagcattttatttttgaggcttacaaaatcatttcgcagtctggctttcggccacaatttagaaaaactacaattgttccaccaggtggtaaaaagatcatattaggcctgaacgtagaatcagaatttccaaggctagcgaagagcataagagattcaattcggcagcatctctactttttggagaaagtggggcctgtgcaacatgccttcaaccgaaagttcgactctgtatgggggctgaagtcacatgtccgcgggttaattgactacgcaaacatgattgaacccgactttgccgaggtgtctcttgaaaaattccaatctattgaatggccagtataa

SEQ ID NO: 434488 - DNA, 432 bp, Serratia marcescens
atgaagaatagtaactatcaaaacataaaaaaagaaatacaaggttatgccaaggatatgaatgactggtggggaaacttgcaaaaagattccgtggcagagtggacgtttctcacgaccttgggttgttggggggtacctaaccaccttttccaaataatttcatttatactcgcaattctctttttctccgtaaagctattgaaaattaaaaacaaaaatccattttcaaaaacagagattctaattaccaaaaaaatcaatgaggcagatcttgacgagaatgaaaaagaggcacttttctgcaagttaaacaaagtgaaaaaatttcggcactatcagagcactttattcatcttaaaaaggaattggcgctttataattagctatactttcctaatgatgtctttcctatctataaccataatgtga

SEQ ID NO: 434489 - DNA, 1164 bp, Serratia marcescens
atgaactttacattgatccgtaatgcgcgagtgattattccgcaagggatcgttaagcagaacctgctcatcggcatgggtaaagttctggcgatggctgaagatttgtctccgccgtcattattcccctgtgagttgtttgacgcccgcgggcgcatactggcacccggaatcattgatcaacacgttcatctgacggggggcggtggcgaagcgggatttcatacgcgaacgccggaggttcaactttcccagttgctgcagagcggcatcaccagcgtaatgggattgctcggtaccgatggtgttactcgccatgtgcaatccctgttcgccaaagtcatggggttgcgcaacgaaggcatttccgcctggatgctaacgggctcctatgaggtgccgaccgtcacgatcaccggttctgtcagggatgacattacgtttatcgagcccgtactgggcgtgaaaacagccatatccgatcaccgttcttcacaaccgagcattgaggaactgattcgcctggcgactcaggctcgagccgcagcgttgttgacgcagaaacccggtctggttgttttgcatctgggaaacgctgccagtgcgcttgacccactggatgccattcgtgagcaatatgacgtgccattgctccacttcctgccgactcacgtcaaccgtcagcgtcctctttggcggcacgccatgcagttagcaaggttgcacggtatcaatctcgatctcaccgccggtatcagcccacatctgggcgctcgcggtgcggtaaaacccagtgaggcggtgctggaggcgctggaggcagggatttcatcggcccagttgacgttaagttccgatggaaatggcagcattccggcctttgatgcagagggtaatgtttgcggtctgaccgtggccggttttgatagcttgctcaatgaagttcgggatctcaatgctacgctgccgctggaacaatgctggccgatgattgccggaaatgtggcgcagcggctgaaactcccccacaaaggggaaatcactgtgggcaacgatgccgatctgctgttgctaagtgatgacttacatcccgaggcgctgtgggctaatggtcggctgatgttggccgatggtgatgtgctggtacgtggaacatttgaataa

SEQ ID NO: 434490 - DNA, 705 bp, Serratia marcescens
atgaaaatcagcgagatgaactggtttcaactgcaggattacttgacccgcgacgatcgcgtgatcctctccctcggcagtactgaacagcacgcttatcttagcctgtgcaccgaccacctgctggcctcccgattggcggaagaagcgggtgaaaaacaaggtattccggtttatcccggccttccttttggtatggcaccttactttaccgagtttccaggcaccatcaatctgcagccgcagacttacaacgcgcttctggatgatgtcttgagcagcctgtatcgcagcggtttccgccgtttattcctggtcaatgggcatggcggtaactcgcctgtccaggttcagatccacaattggctcaaccggcatcccgacgctcgcgtgcagttgcacaactggtgggcctctcccaaagttatggggctggtgaagcacttttccgccaatgcttcgcatgcctcctggatggaaaatttcccttggacgcgtctgcccaatgttgatatgccgcgggaagagaagcctgcactcaacgtggcaaaattggcgcaactgcctgccgctgccgtcaaggtttacatcggcgatggcaattatggcggagactaccaacgtagcgacgaagaaatggcgcagatttgggccgccggtctggacgaaacctgcatgctgttggagcaagggtggatgccatga

SEQ ID NO: 434491 - DNA, 891 bp, Serratia marcescens
atggcgggcacttttcgcgatgacatcgctttgccctcggtacgcgcgctcagcaaacagctgggcgttgcgcaactgacagtcagcaatgcctatcaaaccctgaaaggtatggggctgattgaaaccattgccggcaaaggcacttatgttgtgcgaaatcgccaggagacgcctcatcaagaccaggtagcgcagcttcaactgcgctttaaacagctgttgcaagatgcagccaacgtcggtttgtcggaatcgttctttatcggagcgttgaatcagactgcgtctccggatatctctccacaggtattgaagatggcgttggtcggcaactccaaccgtatcaacctcagctacattgagagcattcaggaggttctgggtcaccgacaaacgatcgatacctatacatttcgggagtttgctgatttggcgcaagagcaattggacagctatcaattctggttgaccatcccgcattgcatcccgcggttgaggctccgggtcgcggaatcgaccccgatattcgcgccatatctcattccatcagaggaaactcgtaccagattggcacagctttccgccgataccggcgtattgctggtgtcacgctatcaaacttttttgcccgccatgctggaaggtgtgaagaattttgcgccacacctgggaaaaatagacgttatcgcgctggaggacgaagggttggctgcttcgctggccagccatcgcaccctcatctacagcaccggttgccatagccatttgcagcccatgctaccggcgacgagcgaagcctttgagtatcggcatacgccggagccacgctatctgcgcgagacgctacgtcccgcctggcatcactattgccaacaccaggaaccttaa

SEQ ID NO: 434492 - DNA, 1536 bp, Serratia marcescens
atgagcaatctcactacgctgttacagcctgaaccggtatccttctatacgactttgagcttgttcttgctgctgctcggcggcattggctggtatgccgcccgcgccaccaaatcgctcagtgactttttggttatgggagggaaagccggtgcagttgttggtggtttcgcctactttgccagccaatacagcatgagtacctttatgggagtgccagccatgacctacagtaccggattcgccggtatgagtgtgtctgtgcccggactggctttctccatgctaatcccggcgctgtttgtcggccgcaaattaatgctgatggggcgcagatataatctgatgaccatgagcgactacctgtccgatcgctatgagtctaatgccatccgtggcgttcacgcggttatgatggtcattttccttatagccatgatgggcgctcagaccgttggggccggcgtcattctcaacaccttcaccgggctaccggaatggatcggtgtagtagtcatgggagtggtggtggtgctctattgcatgataggcggaatgaccggcgcgatgatgacagacgtcttgcaaggcgggctgatggtcgccactgctgtcgttaccttcatcgtttccgtccatgccggcggcggaatggaggccattaccggaaagctggcgacggagatgccgagccatttgacgcaccccggcgcaaagggggacttcccttggcagacctatgtctcgatgatcgtgatgtggagtttctttactatcggccagccaacgctattcaccaagttctttaccatgaacagctatcgcacgatgtttaaagcggtcatcctcggtacattgggcatgctgttttcggcgacgatgattgaatggtcgggggttaacgctgcgactttcatcagtggtttgagtgggcaggaaaccgactttatcgttcccgtgatcctgcagcagaatttgtctccctggatcgcctcgctactgataaccgggattgtctctgccggcatgtccacgatttccgccctgttggtggtcgccacaggtggcgtaacgcgtgatatctaccagaatatgctacgtccacaggcctcgtcccaacagattctgacgttgtcgcgcctgatgaccgttttgttgggcatcgccgccatcatcatcggtattatgaaaccagccgggatctttgcgttgatacgcttcgcttttggtggcctgggtatctgggttgccccggtgatcctcggcatgtactggaaacgcgccacggtagccggcgccatcagtgcggtgattttgggcgaactggcctatgtggcgatgaaactgtggctgcctgactggtcctttggttttgatccgttgattatctgctggagtttcaccatggtggtgatggtgctggtcagcctgttcacttgcccggccagtgacgcgacgctaaaacgtcattttgaagacctgcaagcgttgtgcgtcagacgtgcccggcggcataggggtcactctgaacattaa

SEQ ID NO: 434493 - DNA, 249 bp, Serratia marcescens
atggacgtaacaagtaactgttttgaaagaaaatggttttatgtcttcatgtttatgtatctgttgataatgatgcctttcccattcttctacaacacagattaccaacctggttggttaggtgttccggtgtttatatttggctggttaatacatggtgtaacagttattgccttgattgttctctttgcctggcaatgcttgcaacgcccggagtaccagggcgatattgaggaggacaacgcatga

SEQ ID NO: 434494 - DNA, 1182 bp, Serratia marcescens
atggaaaggctgcctttcaagtcacgggtagagttattgaatacaacactcggcaaatcggaagatgcgtgtgcacagcgctggttggctggccaggacatctacgcgccaggtgaagcggtacaagtcctgcatcgacagattaccgagctctggcaatgcggccaggaaggtgtggcgagttttatgggagggcgcgcggccttctacgcggtagtgcgtaccctggggcttcaacccggtgatcaggtcctgatcccagcgtttacttgccaatgcgtaaccaatgcgctgacctacaacggtgtggaagccagatttgtcgatattgaaaccgaaacctttggcatggatgcggaagcattagcgaaatccattactccccgcacgcgcgcagtgatgatccagtacagttttggcttggtttgccgcgatctggaatctctgttgtcgctggcgagccgccacgggctgtggattatcgaggattgcgcccacgctaccggagccagctaccgcggtcagttgctgggaacgttgggcgacattgcttttttcagcagcgagcgttcgaagatcgtcaacaccattcacggtgggtgggttatcactcgtgatcctgctttgaaaactcgcttgcagcaggtgtacgcgcagacagctgatgccgatccactattcatacgagcgttgctgcgcactttgcgacacgccgtactggccaatcaacaaggaaaggcgacggcggatgcgtcgtggcctcaggaacagcggataccacagatgcagcagaccgaactcagcggtttgtttagcccacagtatcactggcgaatggccgaaccggtcgcggaactcctgacactgcaacttaatcagttaccagagctattactgcggcgccgccgtggtgcggaattctggcgacgctgggcgctaaaacagggatatcctcctgcactgaccctagtgggagcagaaaacagttggctgaggttccccttaatgctctcagcggaacaaaagcaacaaaaggcagcactggaacaagcgctgaacgtcgacgtcggcgtatggtttaccacaccaatgcatcctcaacctttgctgctgccagattgccctacgggcatgctggctgccgccggctgtatcaatttgcccacctggttacccgagtaa

SEQ ID NO: 434495 - DNA, 786 bp, Serratia marcescens
atgagcgaaaataaaaatttgatcaacgtgtgttatgaaggtgcctcgggctctaatgatattaggacttgctatatcgaaggtattttacacttcgcgctcaaagatatattaatcacgctaaacaaagagaatagagggttaggtgacgataatcccacgagacacatacctactttaattaaagcgttggtagtagaccttgactcggatgagtacaccaacgtccccgtaaataatggggtgttcgaggaggaaagggaaatattcgttacccaacctggattaaaccgaatcatgggtaacgataaatccaaagcaggtcgtaaattccagcgttggttatatcacgaagttgtaccatcgttaacaaaacatggcgtctacccaccaccgcaaacgccacagggttctgccttatcacaaatggccgaaattattgcacaaaatgctagggctttggcggatacgattcgtcgtcaagatgagttagaggaagaattttctagcgtaaaagttgaaataaaagatgtagcaacaagagtattgaaacttgagggtgagtctgagtcagaatatattttaactgttcgtcaatggtttgataagtcggagctcgctctgtctctagaaaaagaaaatgatattgttatatggtgtgaaaacttgagccttagacatacaaaacctcaacaaacttgtccgtctggagagaggctgcgcacaaagttttatcaaaccgtaatagaagaagcaaaaagcttagtcgaacgctcaaggtcttaa

SEQ ID NO: 434496 - DNA, 831 bp, Serratia marcescens
atgagagaattggaaatttattattctgcactttttttcagagccgaaaaaaaagacaaataccgcaagcgaattcttttggctgttttagcccttttgattgcatcattttatttctcccaaaaaatattattcattttgagcgccactgccttcattctacaaataatatccatgtttatcaatgcatctagtaaaagcgaccgttcattagcaaatcgctttcaaaaaatatttatgctaacaaaagcctttggtatcgatttggctgataaaaatgagatttctactcttaagattaatgcgggaaataaaatggataaagaagtaactgaaaaactaaagtcaaaaaacaatgaatcaaacattactaacccaatacatcatgataaagtaatggcactactactaatggttcaagaaaactccttttggaatgataatctatataaattatcttatagaaaatccaaggcggtaataattttatctgtgctactaataattacagcagctatatttatgatgatcattctaaaaccagatcctaactatacattattaagattgacattcgccattctatcctttggtatagttggagaattcgttgacactatgcttaagtataaaaactcatcagagagaatgaaagagttagataacagaatatctggcattagaacccctaatatagaaatggcactcgatatattctcaagttatcatcttattaagtcaatcaccccgtcgatccctaaacgcatttactcgcagcataaccaaatgctaaataacgcttgggaatctaggaaagacattaacacttaa

SEQ ID NO: 434497 - DNA, 543 bp, Serratia marcescens
ttgaaacaatcaataacaaatataacctcgggtttgggctcattcgcagtagccgcggcaatatggatgtgggggtactctacaggagaaggtaaaagcgatgccgtcgtttcccttatcaaagaagatagagacatgctacgtgaaaagaataaagaatatttagaaaactccgaatcacttagaacccaactccttcaagcatctaatagaccctcaatcaacactggatcgatagatattaacattgaaaaaaacaatgttaatagtgaagaccactcgaataagtcgcaacagttaactatagatactcaatcaacaggtgttttctttaatggtgaaattgaaataacacttattgctacaaactttaccggaaccccattaaggcaccaagtgttagcaaacgtgttaatcccaggcgctaagcctctcgagataagaaatgccgaccctggtagtgctttcatgtttaaagactatcaaattgtaattacagctgccggcacatacactgcaacatttaagatattcaaaaaataa

SEQ ID NO: 434498 - DNA, 852 bp, Serratia marcescens
atggataacaatcaccaaaaattcgattcacagtcgattgccaatcgggtcagggagctgtttttacattacgggattggaaaacgtcagcatgcccgcgagctcagccgcatcttggatctgagtttttcacatgcgcaccgcaaactgaaagggcaaagcccctggacgctggaacagatcaacagcgtcgcggccgcgctcggagaaacgccggcggcgatcgccgatttgagcgccgaacacgagactcccgagccaaacatggcgcgcgatgccatctttgtcgtggcgggggtggcgataccttgcgtcgggcacatcggcgacgagcttcctgccgggcggccggcggaatttgtggcgctgcgcgtggaagggcagtggcatatctatcgcaccgatgaggcgccggcaggcccgcgttacggcgtcgatctgatcgaaatccggcccggcttcggcgacgacgagcggctgagcatcgcggtattggacgattcgcatcaggcggccgatgaactggccaagtatctgggtggctgcgggttcaacgcggtggcgttttacgacgtcgacagtttctgtcaggcgttgcagcaaagcctgttcgacggttacgtggtggactggttgatcggtgaggaaacggcggatcgctgtatcgctaccatccgcgcctccgacaatccggacgcgccggtactggtgctgaccggtgaactgggcaccgaccgacgcgaatcggaaatcgctcaggcgatgcgcgagtatgacgtgctcggcccttatgaaaaaccggtgcggctccatgtgatcgaagccgcactgcaacgctgttttaatctttag

SEQ ID NO: 434499 - DNA, 1218 bp, Serratia marcescens
atggtctccagtaaaatcccactcggttatgatgtgttggccgcggcgcagaagcggttgttatggacatttaatactttccagaatatttgtctctccttctcaggcggaaaagactccaccgtcatgttccacctggcagctgcctgcgcgcgccagcttcatcggcgtttccatgttttgtttatcgattgggaagcacaattttcccatactattagccatgtcgaggtgatgaaagaaacgtatcatgatgtggtggagagtttttattgggtggcgttgccattgcggacggcaagttccgtttccttgcatcaaccagaatggatttgttggcagccgggtgtttcctgggttcgccaaccgccgacatgtgcgatcgtggacaccaattattttcctttttataagcagaatatgacttttgaagaatttattccatcctttgccgagtggtttactgggcagcgccccgccgcgatgttggtcggtattcgggcagatgaatctttacaacgttttcaagccatcgccaacctgaagaaaatgcgatttgcggatgataagccctggacgacagcgactccacaagggcatgcctggaatatttaccctctctatgactggaaaaccgaagatatttggacttggttcgctctgtctgggaaggcttgcaaccccttgtacaatctcatgtatcaagctggtgttccgttgcgcttaatgcgagtgtgcgaacctttcggcccggaacagcgccgagggctctggctatatcatgtgttggagccagagcgttgggctctgttgtgccaccgagtggcgggtgcaaattgtggaaagttttacgccaatcggcgtggcgatttcttcgccgttcgtcagctcaatcgcccagataaccacaactcttggcgtagttacgctttgttcctgctcgatagcctgccgcagatcaccgccgagcattatcgcaataaaattagtgtttatttgcgttggtatagaaaacatggtttcccagaggacattccggacgaacaggagaaggatttggggagtcgcgatataccttcctggcgaagaatttgcaaagtgctgctgcgtaatgatttttggtgtagggcgctttctttcagccctaacaaggctagtcattatgttcgttactgtcaacgtatacaaaagaaacgtcaacgctgggggcttttatga

SEQ ID NO: 434500 - DNA, 621 bp, Serratia marcescens
atgacactggatttgttgctgaaaaaattagaagcgttactgttatcgatgccagtagatgagaaaatagtagcggttaataatattcagacagcgcttcattgccactcgtgtttcagtaatgagcctgttgactgtgtgcaatgggtaccggtgaatgaaattcagatgaatgactataatcccaaccacgttgcgccgccggaaaaacgtttgttgtatatctcattaatgcgcacgggctttacccatcctttggtggtttggcaaaatgaagaaggtaggtatacgctcattgatggttttcaccgtttttctctcgtgcaacagcggcgaacattgcgccggcggttgggaggatatgttcctgtcgtcgtggtaaagcaggataaaactcagcgtattgccactaccattcgacataaccgtgcacgggggcaacatcagattcaaggtatgtcgctggttgttcaagaattggttcgccttgggtgggatgatgacaagatagcggtggagttgggaatggaggccgatgaggtgttgcgtttgaaacaaattagcggattaatggaaatgtttcggggccgaacattttctgaggcctggacggttaaatag

SEQ ID NO: 434501 - DNA, 1362 bp, Serratia marcescens
atgactaagtataaggcatatccggggtataaggactctggggtggagtggctgggggcgatcccttcatcatggcaaatgtggaaattatcacatacttatgaggttattggttcaggaacaaccccaacctcgaataatgaatcttattttcaaggagatataccatgggttactactggtgaacttcgagaaaaaattatttatgacaccgataagaaggttaaggaatctaccttacaaattttttctgctttaaaaatacatccagcaggctctgtagttattgctatgtatggggcaacaataggacggttaggtattcttggtgttgatgcaacaactaatcaagcatgctgcgtaatgacgaaatctaaaatcattaataatcaatatctttattattggttgcaagcatataggaatgaaattattcgtctttcctctggtggtggtcagcctaatataagtcaagaaaaagtttcatctttgaaagtctctgccccagcattaaatgaccaagcattgatcattgcctttttagatcacgaaatcgcaaaaatcgataagttgatagtgaagcagaagcaactgattgagctgttgaaagaaaaacgtcaggcagtgattagccatgccgtcaccaaagggctaaatcctgatgtgccgatgaaagattctggtgttgagtggttgggggaaatacctagccattgggaaatgaaacgattagcttatcttggtagtgcaagaaatggactaacttattctccagagaacataactgaccaagagtcaggtactttggtgttaaggtcatcaaatattcaaaactcgagtctttgctttgatgataatgtttatgttaatagtagcatccctgaacaatttttagtaaaagaaaatgatttgcttatctgctcgagaaatggcagtcgcaatttaataggtaaaaatgctcttattagcaaagatgccgcaggaatggcatttggtgctttcatggcgatatttagaagccaaattaacacctacattttttgggttttaaattccccactgtttgattatcagtctggatcttttttaacttcaactattaaccagttaactataggtaatcttaatagtatgaaggttcctgttcccacattcaaagagcaaaaagagatagtgcgttatctctctaaaaaaaataatgattttatcgaattgattaataaggtaaataatagcattgccttactccaagaacgccgaaccgccctaatctccgccgccgtcaccggtaaaatcgacgtacgcgactgggttgcacctgatatgcaagacgctgaggagccacaggagaccaccgcatga

SEQ ID NO: 434502 - DNA, 336 bp, Serratia marcescens
atggttataatccatgtaaatagccaaaactataaaaatatagatatggctattatttcattgatatttaaggttatttatttccgtttttttaagcgctactatcggaaaaacttgctggaggtagtgatgggcagaggggatgagttttttgaacaggcgcacccgtatgtagttacggtgctgggaacggcacttatgcagcttcttgttgatgaggctgagatttcacgggagtcgttaactgagatgatacaggtgctgtatcaggatgatgaggctgacttggctgtagagctcgctatagatgtgttagctttgccgcgcgggaaatag

SEQ ID NO: 434503 - DNA, 618 bp, Serratia marcescens
atggcccagcctagcgtttggaagttggtcagcggcggcgccaagggatcaaagaaaaccgctcagatcgctaatgtactgggagtgcgtgcggaatggctcgctgaaggaacggagcccatgcgcgatatcacaacagagtcaaaacgtatcgatttaacagatagcatccgggatgactccgacatctatcgagttgaggttcttgatttggtagttagcgcaggtccagggagttacatgctttccgaggttgttgaagtattgaatgcgattgagtttacttcagaccgcgccaaagcattgtttggtcacagggcggcccaggacgtgaaagttatgacggtagacggagatagcatgtcccctacgataaaatcaggggatcggctgtttttcgatgttgctgttcgtgagtttactacggatggtgtttatgcatttgtttatggtaaaacttttcatgtaaagcgcttgcaaatgcaaggtacaaagctcgccgttctttctgataaccctcaccttgaaaaatggtatatcgacgaaaacactgaagatcagttctttgttatgggaaaagctctactgcacgagtccatcatgtacggaaagctttaa

SEQ ID NO: 434504 - DNA, 222 bp, Serratia marcescens
atggttaaccaagcaatcaagaaggctattgaagtcctgggtagccagcaaaagcttgccgatgcctgtggggtaaagcagccctcagtctgggcatggcttcacaacaaagcgaaggtttcacctgagcacgtaggccacatcgagcgagtaaccaatggggagatccccggatacatgattcgtcctgatctgcctcacatgttcaaaaaaccaaactaa

SEQ ID NO: 434505 - DNA, 294 bp, Serratia marcescens
atggaatcagccgcaaccatgcgcaagaaagcgcgaaacatcgaaagcgaaatcatgagccgcattgcagtacgcggcgccaataaggtggcagcgaagattggcattgatgaatcgcggattagccactggaaaaagcctggtggactcgttgaacgggcgagtttgttacttgccgcaatcgactaccaagaacctgaagggatggtgttgttcagcggggacgagacagcagatttagcacgtgggcttatcgcgatgctggaacacatccgggaaccaaagacggaatag

SEQ ID NO: 434506 - DNA, 1056 bp, Serratia marcescens
atgagtaataccgctgaaatcatccaattccgtgcgcctgtagagcgtgaggagcatcgagtggccgatcttgatgatgggttcacccgtgttgctaatgagctgctggacgctgttctggcttcagggttaaccgaaatccagcttcacatcgtgctggccgtatggaggaaaacctacggctggaacaaaaaaatggactggatcagcaacgaagagtttgagcgtatgacgaccaaggacaggactaaatgctcaacagcaaaaaaccagcttatccgtatgcaggtgcttgttcagaaaggacgttcagtaggaatgaacaagaacatttgcgagtgggaaaccaagtttaacggattcggtaaaagttttaccgaatcagtaaaagaaagttttaccgaatcagtaaaggggtctttaccgaatcagtcaaacacaaaagacactattcaaaagacattaaaaacagatccccctaaagcccccaagggggaattttcggaggaagttctctcacaagcaaaacaagccctggagtattacaacgaactcacaggaggttcctgccgttctgctgaaccattcgcagtgctgctgaccgaaaccaaaacccgcagcgcgtacaccctgcaagacctgcagttggtttgccgttgggtggtgcgcacctggaagcagcgaaataacaccgttgccaagccggcgaacatctgccgggtaaaccggttcgatggctacctgtccgacgccgaagcctggcagaaaacatgcgtagaaatcgactgccaagcggtggtggatatttacaacgaaattacagcgggccgtatggcgcctgtagagctagacagggagcgcgaaatttctatccgtgaactcactacccacctcgccacaaagtcaccggagggctttggcgcgtatttttctgcattccttgaggacgccagagagttttatttcggcggcccgactggggaaggctggcatgctgattttgaatacctgatgaaacctcaaacactgcgcaaagttcgggagggaaccctgtga

SEQ ID NO: 434507 - DNA, 1395 bp, Serratia marcescens
gtgatcaacatcgacatcgaagcaagcgtgattggcggcttgctgctaagcgggttgacaccggatgccgctgacgttgtggctacgcttgacccagaagcattttcggttccgttttaccgcaacacgttcagggaaatttctcgccaggccaataaccgcggcctgattgacagtttgctgatcgctgaggcaatgggggatcagcactttggtgatgtcatggaaacctgccggaaatgtccaagcgctgcgaacctcaaaggctatgcccgccttgtgggggagtattaccagatccgccagttcacaaagctgatggaatccagctacgacctgatcgccggcgcccagaaccatgagcgggcactcgcaggcattcaggatttttcgagcaagattttttcgattgccaagcctcacgatgagcatcgccctgttcacatcgatgagctgctggagtcttacgctgagctgttacagcaccgcatggacaacggcgaagagtcagacacgctgaaaaccggcatcccagagctcgacgcaattaccggcggccttaaccctgtcgatctcgttgtcgtggccgcacgccctggcatgggaaagaccgagtttgcactcaaggtggccgaaggcgtggcaacgtcgaccgttcgaatcggcaatgccgagatgccgcgcggcgttctcattttcagcatggagatgagcgcacaccaggttatcgagcgccaacttgccaatgcgtcaaatatgcctgtttcagcgctccgtaacccggcgcagaaaatgggcgatgaagagtgggcgcgagtttctgccggcatcagtcgcctgcaagggcttcaggtttggattgtcgacgcctcaaagctcaacatcgaacagatccgcgcgattgcagagcgactgaagcgtgaacacccgaacctttcgttgatcctcgctgattaccttgggctcattgaaaagccacgcgcagaacgaaacgacctggctattgcgcatatctctggtggactgaagcgcatggcgaaagatttaaaaacgccggtgatgtcactcagccagctttcccgagacgttgaaaagcgtgcgcctggtcagcgccggccgacaaacgccgatttgcgcgatagcggaagcatcgagcaggacgcagacagcatcatcatgctgtaccgcgaggcggtttatcaggaagacagtccggcggcgccatatgccgaaatcatcgtaacgaaaaaccgcttcggctcgctcggaacggtttaccaggaatttcgtaatggtcacttcatgccgacagatcaagcggctgcatcgcagatctgccgtgccaagcctcagcaaaaacaagagcgtcgatacgccagcaagagggatatctga

SEQ ID NO: 434508 - DNA, 423 bp, Serratia marcescens
atgaacgatttttgcctgcatgaaaccaccaaggcacagctttggcctgttctaaaagagctggtggctaccggtaagcgttaccgcgtgagcatcgttgaatggcgagaaaaaaggtctctgagtcaaaacgcgttgctctggaagtggaatggagaggtagcggctcaacttaccagaaccggcaaaggcaagtttgatcaggactacgttcacaaatatctgaaagacctgtattgccctccgaagccgatcaccgtgatgggggaaacgcgttacgtgaaatcgaccaagttactcgacaccggggagatgactcgctacctggagcaaatcgacatgtgggcacatcagcgcggacttcgtctgacgatcccagcgcagtgtgaatatcgccaactgatggaggcgcaaaacgcgtga

SEQ ID NO: 434509 - DNA, 357 bp, Serratia marcescens
gtgaaaacctacagcatcattccagtgccaaagccgcgaatgactcagcgtgaccgatgggcgttacgccctcccgttttgcgctatcgcgccttctgcgatgaggtgcgacacaaccgcatatcactgcccgaaagcggctaccacgttaccttcgttatgccgatgccgccaagctggagcaagaagaaacgcgctgagatggccgggaaaccgcatcagcagaagcctgatgcagacaacttactaaaagcccttatggacgcaatctactctgaagattgtgccgtttgggatgtccgcgtaaccaaacgctggggaaatgccggcgagataatcatcaaggaaattatatga

SEQ ID NO: 434510 - DNA, 528 bp, Serratia marcescens
atgaaccgattaacgacggcattgggtgctgctctactgatcattgtcattgtgctggcatggctggcatttcatttccacagcagcgcagtaaaggccggtgacaaagttaagcagcttcagagcgacaacaacctgcaggcgaatacaatcgccacacaggcatttcagttccagcgtgccaacgaaatcagcaacgctgcgaatcagtacggcatcaacaccgacgcggccacccaggggaaagaaattgaataccggacgatcctcaagaatcagcctacgtgtgatctggctgttcccgctgctattgctggtgggttgctcgactacacgcaccgtctacgttcccgcgcaatgtcagccgataccatcgtcgctgacgcaaccggtgctggcgccactgcctccggcaccctgacatactgtcaggcggtgctgtggattgatccgctgctggcggcgctcgacaaggcgaacaaccaactgctggcaatacgccggctcgaagaagagagaaaacgatga

SEQ ID NO: 434511 - DNA, 198 bp, Serratia marcescens
atgagcaagattgtactgaccctggaacagattaaagagttggcgcgcttcgcagaagaggaaggccagccgtcctacaccattaccaccggcactattccagcgtttgaggctgaggatggcgagatggttgaggagtacaacggcctgattgcatattcggactcggaagagcacagcgttctgcaattgggctaa

SEQ ID NO: 434512 - DNA, 282 bp, Serratia marcescens
atgagcgaagctaaaccgcaagatggcagcaccgtgaagggataccgcactttaactccaggtgatattgagcggatgaaccgtctcaaagatgccagccggcacttttgcaatctgatcgaaactgagcacgatgatgttgcagctgagttatgtgaaacggggaatcactcagccgaagcgcatgaggccgcacgctgcctggctatcgcccgcaccaagatgcaggaagcctgcatgtgggcctgccgtgcagtggcccgaccggacgcggattgctaa

SEQ ID NO: 434513 - DNA, 594 bp, Serratia marcescens
atggtggaagcacaaataaagtttgttgtagtcggccatcattccagacggacccaggcagctgcgcttgccacatcgcttcaggctcacttgctgattgatgaaggcgacaatggcgccaactggaaccaccgtcgcgcgcttgaatgggctgctgctcagctttgccgtgttgttgtggttgaggacgacgctgagccagtaccaaacttccttgcccaggttgaatggtggttgcagcgctaccctgattcgctggtgagtttttatcttggtaccggccgcccgccacagtatcagatgaagatagctgaacggttgatagttgctgacaagacgcgtgctgacttcatcacgctaccgcgtctgatacatggcgtgtgctacagcataccgccacagcatatcgagagggtgctgacccgatgggacaacagcaaacctgctgattacgcagtgggcgatgccttcggtggcagcgtcatctatccatgctactcgttggtggatcatgccgatggcgagccggtagagcgtcaccctgatggttcatctcggactgaacgccgtaagtcctggaggttacatgtctga

SEQ ID NO: 434514 - DNA, 1662 bp, Serratia marcescens
atggtgcagtggtcaacggcctgccctgattgggaaaagcggctggttgccagcgaatcaataatacctcctccaatttttcctgatcaggctgattatgcccttggtattttcaaagagctccgcgtttctgatttaccaggtaagccaacattcggagagtgctcagagccctgggttttcgattatgtaagagcgatttttggcggttacgaagctgaaacgggcaatcagcttattcgtgaatatggcctcctcattagtaagaaaaatacaaaatcgactattgcagctggaattatgctcacagctttaattctctgctggcgagaggatgaggaacacctgatcttggcgccaacaaaagaggttgctgacaacagcttcaaaccagcagccggcatgatccgcgccgatgatgaactgtctgacatgtttcagattcaggaccatatcaggacgataacccaccgtgtaacgcgcaatacattgaaggttgttgcggctgatactgataccgtttcaggaaagaaagctggtcgcatcctcgttgatgagctatggctttttggtaagagacagaacgccgaggccatgtttatggaagctcttggcgggcaagtatcgagaaacgaaggttgggttattttcttgactacgcaaagcgatgacccgccagctggtgtatttaaggaacgccttgattattggcgtgctgtgcgtgatggcacgataaaagatccaaaaacactcggggttctctatgaattccctgatgctatggtggaaagtaaggcgtacctgttgcctgaaaatttctacatcacaaaccctaatattggtcgttccgttagcgctgaatggatcgaggaccagcttagaaagaaccaggcaaaaactgatggcacactgcaacagttcttggccaagcatcttaacattgagatcgggctgaacctgagaagtgatcgatgggctggagttgatttctgggagccacaggggaaaaagcaagtaacgtttgatgaaatcatgcgacgttgcgaggtggttactgtaggaatcgacggcggcggattagatgatttgctcggtatgtcggcggtaggtcgcgataaggaaacgcgagaatggctttgctggtgccatgcatgggcacacgaaatagttttaaaacgccgaaaaagtgaagcatcaaggctgcatgattttgtggccgctggcgatctcacattggttaaacagatagggcaagacactttagaggtcgcactttatgttaagcggctctatgaggctgaattgctggataagatcggaattgacccgtcaggcgttgggcaaatacttgacgcaatgatagaagaggatattcctgctgatttagtcgttggtataagtcagggctggcgccttggcggagcgataaaaaccactgagcgtaagctggcagaggggattcttattcatggtaatcagccaatgatggcctggtgcgttggtaacgcccgcgtagagcctaaagggaatgcaattctgatcaccaagcaggccagtggcaaagggaaaatagaccctttgatggcgctattcaatgctgtctctctcatgtcgcttaaccctgaagcgaaaaagcgggattaccaggtatttttcatatga

SEQ ID NO: 434515 - DNA, 1938 bp, Serratia marcescens
atgtcgctgaaccgtgcatgcaccctcatgaaagtgaaggcgattaacgaggatgaacgggttattaccggcatcgcctctacgccttctcccgatcgtgatggtgacatcttggagcctgatggcgccaagtttcgaaatgacacccctttcctttggcagcatgaccggagtcaaccaatcggtagttgcaccccaaaaatggtgaaggaggggctacaaattacagccaagctggtaaagcccactccagatatgccttcccagcttgtggctcgattagatgaggcatggtcctctatcaagtcaggactcgtaaaaggattatcaatcggatttcggcccattgaatactcgtatatcgatgatggtgggattcgctttatttcatgggacctgctggaagtttcagcagtaaccattccggctaacgccgagtgttcaatccaaacagtcaagtcgtatgaccgtcagttgctagccgcgtcaggcactgagcaaccggtggtaaaggctaaaactaccgctggcgctacagcaaaaaaatctactgaaattaaaggaaaaaccatgaatattgcagagcaaatctcaagctttgagaacaaacgtgcagcgctggcagcatcaatgaatgatgttatgagcaaagccgcagatgaaggccgcaccctggatagcgaagaaactgagcaatacgataatgtgtctgctgaaatcaaatcagtagactcccacctgggccgcctgcgtgatatggaagcgaacatggccgccaccgcaaagcccgtcacgaaagcagcaagtggcgaagtcacaacagtaacaacttcagcgccggctattattcgtgtagagcagaagctggaaaaaggtatcgcatttgctcgcttcgcgaaggcactggccgctgccaacggaagtcgttccgaagcattagagatcgcgcgtaaacagtacccagatgatgctaagctccatcatgtactgaaagctgcagtcggtgccggtactaccaccgatcctacctgggctggcgctttagttgaataccaggattatgctcaggactttgttgagttcttacgccctcaaacgattatcggccgattcggtcaaggtagcattccagccctgcgcaatgtgccgtttaatattcgtgttcctgcacagacctctggtggttcagccaactgggtaggtcaaggtaaagcaaaacctctgactaaatttgactttgagtcgatcactttcagttttgcgaaagttgctgctatcgctgttctgactgatgaacttatccgtttctcaaacccagcggctgatgcgctcgtgcgtaatgcgttggcagaagcagtagtcgcgcgtctcgatacagacttcatcattccaagcaaagctgaagttcctggtgtttctccggcgtctatcactaatggcatcactgcaattccatctacaggcattcctgatgatgatgctgccgcagcatttggtgtattcgttgcggcaaaccttcaacctaatggcgccgtctggctgatgtcgagcaccactgctctggccctgtccatgcgcaaaaatgcgctcggccagaaagaatatccagaagtaacgctcctgggtggtacgttccaggggttgccagtgatcgtgtcgcagtatgttggtaatcagttggttctggtgaatgctccagatatttatctggcagatgatggtggcgtagccgttgatatgtcacgtgaagcatcattagaaatggcgacagatcctactggcgatagcaccactccaaccggtactgagctcgtttccatgttccagactaacagcgtggccattcgagctgaacgctggattaactggaagcgccgccgtacagcggccgtggcagtgatttctaacgttaactatggcactggtcagggcagttaa

SEQ ID NO: 434516 - DNA, 1350 bp, Serratia marcescens
atgtggaatcctttccgtaaaaaagaaaaatcactgcaacagccatctggtcaaggaacttggcagcgtatattttcttatattcgtgagccttttggtggtgcatggcagagaaatcttgagataaataaccaaaccgtaatgtctttctacgctgttttttcatgcatctccttaattgcaagcgacatatcaaagatgcctgcaaggcatcagcgccgtgactctaatggtgtatggaaagatcaggtaacaggttctattccagccttgctggaaaagccaaacacattccagaaccggatacagttttttgaaaattgggtaaactcaaaattatgtcatggcaacacctatgtcatgaagattagagataataccgatgccataaaagaactaagaatactagatccaaacaaagtaattcctctggtagcagatgatggatctgttttttatcagattaatcctgacaatattgcagggttgccaacgcaggtaacagttccggcgcgggaaattattcacgatagatttaattgcttttttcatccattagttgggttgtcgccgctttatgcagctgggcttgctgctatgcaagggcatcatattcaggaaaactcagcattcttctttaagaatggtggaaagccaagcggtgtgattgaggttcctggttctcttactgaggaaaacgccaaaagtattaaggctaaatgggatacaggatacacgggtgagaatgctggtaagacgggcatcctaagtaatggagcaaaatacaatccaatatccatgtctgcagttgatgcgcagatcgttgaacagcttaaaatgacagcagaaattgtctgctcagtttttcatgtcccttcttacaaagtaggggtaggtgatccaccttcatataacaatattgaagctctggagcagcagtattactcacagtgtcttcagatcctgattgagtctgtagagttacttcttgatgaagcacttggactatcaggaaatgaaggaactgagtttgaagtaaatgcactactacgaatggatacagaacgcagaattaaaacgctgggtgaagcggttaaaaacaccatcatgtcgcccaacgaagcccgtcgcaaagagaatcttccaccggttcctggtggtgattctctatatctacagcaacagaacttcagccttgaagcattggcacgccgagatgcttctgatgatccgttcagcaaaactgcaccggccaccacaagccaagcagccagcgatgatagtaaggcactgtcagaacctgaattgaacattgccaaggtcatgattaggggattattagcaaaatga

SEQ ID NO: 434517 - DNA, 903 bp, Serratia marcescens
atgaatgatcgcgacttatccataatcaaggtgatgtcggaagagttttcaaaagctcttataggcgtcaaagaggatttcaataaacggattgaagaacagcaagagacatttaacaaagggattgctgaattgaaagaggcctttgcaggcttaaacctagtgactaaggaagatgttacattagcgattgaggctgcagtagaaacaattacccctcccgaaatttctgaattacccgatgtatcaaaaatggtttatgaagctattgctgaattgcctgtgcctgcagatgggaaaagcctcactccggaagatattcgaccattgctaaaagagatggttgaagaagctgtttcagatatcccgatcccacgtgatggtaaagatgccgatcctgaagcgataaaagcggcggtttctgatgcaatggccgcattgccagcacctgaaacaccaaagcctggtgcagatggccgcgatgccttgcagattgaaattcttccaggtattgatgccgataagagttacccgcgaggaacctatgctacgcatagtggtggtctttggcgttcattcgaaaaaacagtcggcatgcgcgggtgggagtgtctggttgatggcatctctgctgttgatgttgccaatgacgatgaacgaatgtttaccgtgacagtcacgagagcaagcggcgcatgtgaaaaaaaatctttcggtattccagtgatgatctatcgcggtgttttcaaagctgaaagcagttatcagccaggtgacacagtgacctggggcggatctctctggcattgcgacgaaacaacagcagataaaccaggtgagctcggatcaaaaggatggacactggcagccaagcgcgggcgagatgggaaggataaatcatga

SEQ ID NO: 434518 - DNA, 327 bp, Serratia marcescens
atgatcgaactcgtaacgctggaagaagcaaagctacacctacgcattgatgacgattatggagacgaagaccttaccctgaaaattcagggtggaagcgccgccattctctcttacgtgcagggaagccggcagttgattgttgacgatgccgggaaagctattgaaggtgagccgctttcccgagttaaaacagcattgcttgttctgcttggtattttggatcgtaaccgtggcggtgaagaagaggaaaaattgaagcagggtgagttacctttttctgtctcaatgcttatctacgatatgcgccgaccaagcattttgtga

SEQ ID NO: 434519 - DNA, 498 bp, Serratia marcescens
atgtctgtattgacacaaggcacgcagttttatgtcctcgccaacggcgttgtaagcgaagttgaatgcatcacatcattcacccctggtggcaaccctgctgatcagatcgaagatacctgtttaagcgagcgcaacagccgcacctataaaaaagggctgcgcacaccggcatcagctaccgtcacgctgaatgctgatccaaaaaacgccagccacctgatgctgcataacctggcagaatctgacgacgaatcactgctgacctttgccgttggttgggcagatggcgaatcagaaccaactgccgcggcccctggagctccaaatgctgtagatggtctgctgttgcctgacgatcgtacctggtttgtgttccaaggctacgttaccgatttcccattcgatttccaggcaaacacggtggtgagcacgacagcaactattcagcgttctggtccttcagtttgggtgccaaaggctcaagccggcagctaa

SEQ ID NO: 434520 - DNA, 2568 bp, Serratia marcescens
atggccagtaaatcattaggcacgctaactattggcctaattgccaaaacggggggatttgtctccgggatggataaggcagagcgggcatctgaaaaatggagaaagcaagtacagaaggatgtggctgatactagcaaggcccttgctggaatagccacagcagcgatggctgcagcaacagcagtgggtgttgctggatttcagcttttgaaatctacatcagagcaagtcgctaatactgacaaatgggccaagtcattaaagatgtcaactcaggagttgttggcatggcaatttgcagctgagaaagctggtttgtcaggcgaaaatatggctgacatttttaaggatctgggcgataaaattggtgatgctgtattaaataaatcaggtgaggcggtagatgcattaaatgctctaggtctttctgctgaaaaattagctaaagcatcaccagataaacagatgttggcgataggcgatgcgttaggtaagatcagtaccaacgcagctaagataaatatcttggaaagcattggtaatgatctgtctaaactgctaccactgtttgataataataatgaaaaattaaaacaattcattcaactggcaaaggattatggtgttgcacctgacccatcatcaatagatgaccttgtgaaagtcaatgatctttttcaagatatggaaagccaggttaaaggcttgaaaattgaaatagcatcaggacttgcgaaagttgatttgtctccattacaagattcacttgatcaggttagatcagttctaaccgatcctacagttcagcaggggcttgttgatttagtcagcaatgttgctcagcttgctgggtggtttgttaaaactgcagctgcggcaggggagctgctaaagtttcagaataatagggttgctgttcttggtggtaacattgatgttaataatttagatcaagtaacaggaagaataaaacaactacaagacatgattgataaccgttctccattaaaaggagatgggcagtcttgggttggaaaacttttaggtgatgatgattctgtaggagcactaacaaaagaacttaataatctcctagtagttcagcaaaagttaaaagaaaagagttttgtcggtaacagcttacctactggtctggctacagttgttagtaatcagtttgggcttggtaaaggtgaaacgaacggcaagcctaaatctgattctggtgcaaaaaaactggagtctgcattcaaagctacagaattaaattacatgcgccagatcgcgcttattgaaacaacaggtaaaaagacagctgaggttactgaagccgaaaagctaagatttgatctagcgagcggtaaacttgttggcattaattctgagcagcagaaacgccttattcaactagctgatgagttagataaacttcaagctttgaaaaaagccaatgaagaaaatctaaaggtagctgcatttgcagaaaatctaaagtcttcaaataataatgaccgtcaggcgctttcttctgattttgttggtgctggcatgggagagaaaacccgcagcagaatgaaagagctgctgggaattcaacaagactttattagtcagcaacatgagctacaaaaacaatatcagtctggtgatatcaccaaatcattgtatgataaagaaactcaggctcttcagaatgcaatgaatgaacgccttgaaattcaggaggactattacaagcagtcagacgagcaacgagatgattggtcgtctggtatttctgatgcgctggtagattttgctgatagctcaagagattactatcagcaggcagcagatgctatgacatccgtcttgggtaccgccaccgattctatatctaatcatctgtatgatgtcattaatggtactgaatctatgggagaggcaattaagggcgttttctcagatctaggacaatcggtaattaaagctctaattgatatggctgctcaatggttagtttatcagggggttcagctattggtaggaaagacggcgcaggctgcagccatacctgcgatggttgccaatgcgcaggctacagccttacaggcccagcttgcggcttttgcctctacggctgcaatacccattgttggccccgcattggcgccggcagctatggccacggcggcaactatcactgaacctatggtagcagccatttcagcagctggtctttctggtatggcccatgacggcattgacgctgttcctgaaacgggtacctggttgcttcaaaaaggcgagcgggtaacgacagcagggaccagcgctaaactcgatgccacgctagatcgagtggggcgagatgcgaataccggtggtaatgtaccttttgcaccggtcactcatttaactgtcaacggtgatccagacaaaagcacgatacgcgctatcgaggaggcagtatctcgcggtaataaacgcctgtacggtcagatgacctcagatgtcgctacggggcgaggtgatttctccaaagctctcggtgctggatggcaaactaaacggagaacaggttaa

SEQ ID NO: 434521 - DNA, 3078 bp, Serratia marcescens
gtgatcagaatttatccttctcgcctgcctggtgaaccgcttgaaactcatcaacataaagctatgaccttgcaccagtggttcgtcgataacgtggatggttatcagaatgtaatgcgtcatcctgtctcggttgaggttaacggtaaggggataccccctgaagagtggccattgtgttatatcagcgctgatacggatgtgcgcatattcccaattccctatggcactggcttagagattgctgcctgggctgctgtagcggtagctgtagcatctgctgcttattctctgatcatgatgtcccagatgagcaaggatgggatggggtcagccagcggtggggattctctggatttatccccagcaaaagccaacacagcaaaacttggcgatccaatccgtgaaattcttggaagagatcgcgtttatccagattatctggtacagccggtaagccgcttcgacagcagtaacccacaaatttacagaacagatatgtttctgtgcgttggcgtcggcacgcatgcaataaatcagacgacgataaagatcggaaatacgccggttagcagttttggtgatgatgttagttttacgatttatccgccgggtgctagcgtcgcttctgaccacagaacagaaaattggtttgcttcaactgaagtcggtggtacgacatcaggcacagctggacttgacctagcatcgacaggacctgactcggtcagtatcacagcagatgcaataaccatatctggcaacaacgttacagtaattggcgccgtggatgatgctggtgatgcggtaattcctgattcttgggttgtaggaacagatcttactatccaggtgccagataccttcacggtagcgctcgaggctggtcgtaacgttatctatggagattttgctgaactcaacccgtcagtaggccttcccgtatccatgacatggaatggaactcggattgaccttttcatttcagcttatgatcctggctcacctgcagtcccaggcgtaggtggtaacgcagccagcatcaccgcatccgcatcaccaacaacatacgacttcagcgctaatccactttcatttacattgacatgggctggtgtgaactatgtcatttctttgacagctaactacgtaactatgtcaggtctcacagatgagatagatgatcaattatctgggtcaggactggaagttgtagcgatagatacgaaggtagtgatcagggaaaaagaaagcccattcagtggaaatagtattggtttcagtatactgccttcagttttgtttggtacagatcctgttattgtggccggcacggcatcaacaggaggaacccccgcggttatggagcacatagctttatcatggggcagcgtgaccggtgatccattcattggacttccaaacggatcccaacgtatagcctttggcctacgaggatatcgctatcgtataactaacattgatgggcaaaccatcagcgttgagagactaattgaaaattcagatggctcaacaacggtagatccctcttggcctgggtttaccgggcgcacgttgttggattttacagtcactggattgagtgattcctatgactggatggggcctttcctttgttgtccagaaaatgaaacaacgactcaaatagaactaaatttcgtctatccacaggggttgtgcgatgtgggaagtaaagacggagccattcactggcatgatgtagcgatgaccgttcaatatcgcttgtcaggttctgatgattggaccagcgtacaaataacgcatgggaataacacggttaatgaggttggttacaccgaggctatcacgtttcctacgcccggaaattatgaagtacggattaagcgagatacgccagtatggggtggtactactcgagactccgtccagtggcaagcaatgcgcgctaaactgtctgctcgcaagaccagttaccccaatgtgacgacgatcgcgctaactattcgaactggaaaccgtttggccgctcagtctgaccgccgagttaatcttgtcgcaaccaggctctatgatgggcatgcgtcgagaagcatcagcggggcgttctaccacgtattgaaagaccttggctatgcagataaccagatagacttctccactatcaatgcacttgaggctaattactggacgccacgaggcgaaacctttgactggtcagcaggcagtgataacacttctggtttggaagtactacaacggatcgccaatgctggtatgggttactttttactgagcgatgggctggcgtctgccggcagagagggggtaaaaaactggtctggcgtaatcagcccgcaggaacaaaccgaggaactccagacagctttcaaggcactatcgcaagacgactatgatggtgtcgatgttacctacattaacgccactacatgggctgaggaaacggttcaatgccgtttcaacgacaacccaacacctcagaaggtagaggactacacccttgatggagtgaaggatccagacagggcttaccgtataggcatgcgcaggctgatgaaatatcgatatcagcggctaacgcatacaaccagcacagaaatggatgctctttgctataactacggcgatcgcatcgttcttaccgatgatattcctggcagcaaaacgattagttgcctggtggtagatgaacagcatgatgctaacacggtaaggatccacgttagtgaacccctggattggtcatttgaaaacccgagatgcttaatcaggtttcaagatggttcggcatcacccctgctggttccaactcgcattgatgactacacgctatcgttgagcaacacggtagatgttcgtattgatgaatggataataaatgattcatcagtagagccgccaaggattgtattctgctcttcttctagggttgggtacgattcaataatggactcaatagagccaggatcagatggtacgtgtaaagtgaatgcggtgcagtatagcccattgatttatcaatatgatgacgcaacctatccagggaatactcagtaa

SEQ ID NO: 434522 - DNA, 198 bp, Serratia marcescens
atggcgatattattactggtaattattcagagggtaaatattttggcaccatggatcagtgcggggctgctggttttgggcgcgacggtcggcagcgttggcgcgcatctgcaggtgaacgcgatattggcgctcgccggcgtgatgatggcgctcggcatagtggcttctgcgtttaccgaaggcgacggacactga

SEQ ID NO: 434523 - DNA, 2481 bp, Serratia marcescens
gtgcagccgatagagaggctatcgacgcggcgtttcaacctcaagccgctggcgtttgccatgctgagcatggcggccggcggctggctgccgtttgcgttcggcgacgatctgcccccaccgcccagtgccgtcagcatgccggacaccacgctgtatctggagccggtcgtcaacgggcgccaaaccggcaacgtcgtgccagtcaactatcgcggcggccattactacatgacgccccagcaactgctcgacgccgggctgccggtagcggataaacaggcgaaagacatcgccgtcgatcggctggagaaggtggatgtcagctacagcggcgagagccagcagttgctgatcaacgtgcccaacgactggttgccgcagcaaaccatcggcgcccattcaccgctgcaacgcttgccggcgcaaagcagcctgggtttgctgtttaactacgacatctatgccagccaaagcaacggcaatggccgaccaggctacctgtcggcgtggagcgaacagcggctgttcgacggtttcggcgtcatcgccaacaccggcatctaccgcagcgggtttaacggcgggccaaacgacgatggcggccgctatattcgatacgacagctactggcgcttcaacgatgaccagcggatgctgagtgtgatcgccggtgacctaaccaccggctcgctcccctggagcagcgccgtgcgcatcggcggcttgcaattggcgcgcaatttcgcggtacgcccggatcttatcacctatccgctaccgcaattttccggccaggcagcattgcccagcagcgtcgatttatacatcaacagctataaaaacagcaccaccaacatcaatcccgggccgtttaccctcaacagcgtgccctacattaacggtgcgggtcaggccacggttgtcaccacggacgccctcggccgtcaggtcagcactacggtaccgttctacgtggccagcaacctgctgcagaccggcatgagcgatttcagcgtttccaccggtttgctgcggcgcaactacgggttgaattctgccgattacgggcaatgggttggtagcgccagcttacgttacggcgtcactgattggttaaccctggaaggacgtgccgaaggcgcagccgaattggcggtcggcggcggcggcgccgacattcgcgtcgggcaatggggggttttcaacgcgtcctacagcgtcagccaggccggcgacgaagcgtttaacggtggccggccgatacaatcccccacgtattatgacccgctgaccggcaggccgttgcaacagccggatccccagcccgtctatcgctacaccggcaaccacggcgatcagagcagttttggctacacctacagcaactcacgcttcagcctcaacgcgcaacgtatcctgcgcagcgccgattttggcgacatttccgtgtataaaagcgactaccgtctgagccgccgcaccgatcaattgaccggcagcgtcagcctgggccggctcggcagcctcggcgccggttattttgacgtacgcgacgccatcgcccaacgaactcgcctgatgaacctgtcctacagtgtgtcgctttggcgcaacagcagcctgtacgcctcgctgaaccgggaaatcggcagcagcggttacagtgcccaactgcagctctccattccgttcgacagttggggtaccgccagcttcagcgccgcgcgcgacaacaacaaccgctggagcgaacgcgtcagctacagccgcgccgcgccgactgatggcggtttcggttggaatctggcctacgccaataacccgagcggcggcgattaccgccaggcggatctgacctggcgcacccgcaggctcgaagcccgagcgggcgtatacggtacccgtgatgaaaccaaccactggggagaaatcagcggttcgctggtggcgatgaacggcggcgtgtacgccaccaacaccatcaacgatgcctttgcgctggtgtccacacaaggatacgccgacattccggtgagctatgagaaccagccgatcggcaagaccgatgcccagggctatttactggtgccgaccgtcacctcttactaccatgcgaaattccagattgatccgctcagcctgcccgccgacgtcgcgctgccgacggtggaaaaaaccgtcgccattcgcgatcacagcggttttctggtcgagtttcccatccaacccatctccgccgccgacgtcgaactggttgacgagcaaggcaaaccgctggccaacggcagccaggtggcggtggttggcggccatcagcaaagctatgtcggttgggatggcacgacctatatcgacccggtgcaacaacacaatcgcctgagcgtgatcccggccgacggcggcccgccgtgccaggcggaattcagtctggcgaagcctcagggcatccagcgcgtcggcccggttgtctgccgctaa

SEQ ID NO: 434524 - DNA, 243 bp, Serratia marcescens
atgcggatttttgttgaggtgcgagtagacaagaaaaaacagctgcccgccggcgcagcttcggcattggcggtcgagctaaacaagcgactgcagcataaatttcctgatgttgaagccactgttcggatggccggtatagatgggctttcagtacgcaatggtactccagcggacagagagactattgaggaggtactgcaggaaacgtgggaaagcacggacgactggtttcagccataa

SEQ ID NO: 434525 - DNA, 603 bp, Serratia marcescens
atgaaccaatatcaaacgcgatcgcctcgtcttagggcgcgcatgcatgaatcagcagatagttctgtgccggatttggaaatccaccgcgctgacgaaaactcgaaccaaatgggatcagtagttgagagaaccctatcaagaatacccagcagtagttcaactacgccacataaaacgtataatgatagtaatttaatagaggatatacgctcaattttatcaccactattgaaagatatttccataacagacaccccatatagaagtaataatggcttggttcaatatagacatgatgataatcaccaaaaagttagagcaagaagagttaaggtagcaaaggagtttgggatgagccttggtgatgctgtgaatgatagaaactttcaactatcacttgctgataaagtttctaatgagcgagatgataaaaataaattattcggacaatgcgcggaaatggcctatttagctgccagcaaacttgaggggatagctaaacaagcgaaatataatgtatttactttccaacaaccagatgcaaatcatactatcactcttttctcaaaaaacgacccacacatccaattcattgattga

SEQ ID NO: 434526 - DNA, 654 bp, Serratia marcescens
atgaaacactctcatgtgcactctcactcaaggcaatcgtcaagccgggcaccggatttggatgattctgacaacgaattaccattggccactaagtcaacgacagcgcagcaaaatgctctgagtttgcgctttcacaggctcggaccagaagcaaaagcccgagaaatgtttgtggaaaataaccttgaacataattggagttatagtgagaatgacaagttcactattctctcagacagtaataataggcctgaagatatgttctctaatgaatacaggccagaaaaatggtcgtttaatgtaaactacaggggccaacatcaagatttttacgcaaatgatgtcgttcgatttcagtacagtaaaattgccaaagcccttggcttttttggtatcatgccaaaaacaattctgcgaagcagcgtcataaacactgaaacacttgagaaagtaaaaggcttggaaaatggctctgataatttgcgtaaggttttccttgaagatacacccaatggtaaatcaacggcaagaatattaaaggattttggattgtgcccttcacgggtaaatattttgccaggggatgactttgagattattgttgaacctgaaatgacattggcgcatgaagcagctgtcttgaacagttaa

SEQ ID NO: 434527 - DNA, 423 bp, Serratia marcescens
atgagttacgggtatagcgcaaaaaccaatatattttatgtcattgaagacaaagagggatatgaggcatttggcaactggccggacgatgtcaaatcaatctcggatgaggtttgggaaaaattcagtgtacaaggccctgcgggaaagatgcgaggtgctgacaagtcggggatgccgtgctgggttgtcataccgccgccaacgcgcgagcaacagacagaggcggcagagaggaaaaagcggtcgctgatggccgatgctgaaggtgtcctggcgccactggcgcgcgcggtgaagctgggtatggcgacagacgatgaaaaggcgaggcttaaggcctgggagcgctacagcgtgctactgaaccgtgtggatacccacaaagtaccagacattgcatggccggataagccggagtaa

SEQ ID NO: 434528 - DNA, 1161 bp, Serratia marcescens
atgcatcgaattgatacacctacggcgcaaattgacaaatttgggccggggaagaacggttttaccaatggcgatccggctaccgggcgccgcgctaccgaccttaacagcgatatgtgggacgccgtgcaggaagaggtggccaacgcgatcgagggtaacggtattgcgcttgacaagtcgaaacacaaccagctgcatctggcgatacagaaggcgatcaccgatccgggctttttgaagaaagcgaataatctttctgatgtcgccgataaatcgaaagcacgctcaaatctagaggtctattcgaaaggtgagtcagacgagcgattcgtcaatgcctttggcgacaccatgacgggccaattaattgccccctctgttgccacaacgccaggggccataccgtggggcgctgggcctttttccgaacaattgaacaatcaggcaccattctttcagcctaattggcaatggcctgtaacatctggcggtgtttatgtgccaatagttaaaggggtgtcaactcgacaagggcaaggttatccaactgcagtgagttttggatatttgctcagtggtacgccaagttttgctcaagtctgcattcatgcaaagggcgataatacagatgttaattggcgatttgacgcaaatggtgggaatttttattgtcccggaggagtttatgcagctgacgctatctttcatgtcgacgggaatattaccggtaatatctggggtgggtatctcagtaactggctgaacaatcagttcacggccagcaataacaacatcaataaccgtgttgactgggcaacgttcaaccgtgaggtgggggccagggcaaccactgattacgtcaatagccggtctaacgtcgccggtgggcgtggtggttggtggtacaaagacgaagtcaccgggctaatcttccagggcggtgtcgtgaatcgtgctgatcatgcaacctgggttggttttccgcgcggttatgcacgggagtgctttggcgtgcagatgactttagcgtggacaaatggaagttggtatggcgatagccgtgtcaatattcaggcgcgtgacgtgggtaatggcgggttcaatgcctatatggatggtcaggaacagtctgcattctggtgggcggtgggggtataa

SEQ ID NO: 434529 - DNA, 588 bp, Serratia marcescens
atgtcacttgaagatgattacacccagctgctttatcatctgctgccgccggggccagcctgggaaggagacaacccgctgctgaatggtctggcgccgtctttggccgccgttcaccagcgtggtgatgacctgatgcgtgagattgacccggcgcagacggttgagctgatcggccgttacgaaacgctctgcgggctgcccgattcctgcgcgccggccggcgtgcaaacactgcgtcaacgccagcagcggcttgacgcaaaaattaatatcccgggcgggattaacgagcggttttatcgccaacagctggatgcgctgggttatcacacggcgaccattgaacaatttcagaatctggatgccaccccggatccggagtggggtgataaatggcgctattactggcgcgtgaatattccctctgatgccaccgtagcctggcaaacctgcaccagcgcgtgcaatagcgccattcgtacctggggcgatacggtggtggaatgcgttatcgaaaaattgtgcccatctcacactgtggtggtctttgcctatcctgaaggagaaaacgatgcatcgaattga

SEQ ID NO: 434530 - DNA, 1074 bp, Serratia marcescens
atggttgacagtggtttcagcaggccgcccctgccgcaacttatcgcgacgatcagaagcgatttgctcacgcggttcaatgaagatgtggtgctgcgtcgtctggatgcggaggtgtatgcgcgcgtgcaggcggcggccgttcatacgctatatggctatatcgactatcttgcgcgcaacatgttgccggaccaggcggatcctgattggctggtgcggcatggcgcgatgaagcgttgcccccggaaaccgccaacggcggcggccggctttgtccgctggcaggatgttagcggcacacctgaattgcccgctggcacggtgttgcagcgcgatgatcagcagacgtacaccaccaccgaagccgccaaggcggtcggtggtgtattgcgtgccccgatactggctgatgtcgccgggcgagagggtaacgctgatgatggcattgccttgcgcctggtgacccctgtcggggggctatcttccacgggctatgccgacgatttggcgggcggggaagatatcgagccgcttgaaacctggcgtggccgcatcatggagcggtggttctacaccccacagggtggcgctgatcatgattatgtgatctgggcgaaagaggtggccggcattacccgcgcctggacgttccgccattataaggggatcggcacggtgggggtgatggtcgccagtggcgatgccacccatcccgcgccaccggctgaaacggtgaccgccgtacgggagcacatcttaccgctggcgccggttgcgggaggcggattgtttgtgttccctgccaccgagaaggtgatccccatgacgattgccctggcaaaagacacgccggagatccgggcgtccgtcattgctgagcttaattcgctgtttttgcgtgacggcattccttcgggaacgatacacctgtcgcgtatcagcgaagccatcagcatcgccaccggcgaatatgcacaccggctggatgcgccgaccgccaatatcgtgttgggtaacgtggagctacctgttttgggaacggtcacctggtcaaactacagcgcggggtaa

SEQ ID NO: 434531 - DNA, 417 bp, Serratia marcescens
atgatgatcctgaccgtcaatggcgtgcgttaccccggaaacgcgccgctcgatcggctgacgcgatcggttgtgatatcgctcttttcctggcgccgggctgagccggacgataacgcgcagcagccgatgggctggtggggtgatacctggccaacggtacaaaatgatcgcataggctcccggctctacctgttgcgccgaacgaccctgaccaatcagacgccacctctggcgagaacgtatatcaaccaggcgctggcctggatgattgacgatggcgttgccgtgcggattgatacgcgagtggagcgtaccggcatcgatatgctggcagccgcgatcacgctgtggcagcgagacggcacccgccacacgattacatttgacgatttatggagtgaactcaatggttga

SEQ ID NO: 434532 - DNA, 537 bp, Serratia marcescens
atgcgtaatccgatggaggccatacagcgaggcctgtctaacctgcttgcccgcgcggtggtgcggggtctgaacagtgcagccaaatgccagacggtggatgtcgcgctggtggctggcgaccccaaatccagcgttgagcatctggaaccctacggctttacggccgcggcacatcccggtgcagaagcggtggcgttgtttttgtcgggagaccgttctcacggtgtggtgatcactgtggccgatcggcggtaccgactgagtggcctgcagagtggtgaggtggcgttgtactccgatgaaggcgacagcattgttctgcgccggggcaatcgggtggaggtgaacaccaaacactatgttgtcaatgccgagcagaaagccacctttaacacgccgctgcttgaagtgcccaatggtgagattgccgataaaaccagcacgctgagcaaaatgcgtgagcagtacaacgggcatgaccacgacgacacgcacggtggccagaccggcaaaccgaaccaggagatgaaatga

SEQ ID NO: 434533 - DNA, 1071 bp, Serratia marcescens
atgaataataccgtcacgctgagagtgaacggccgcgagtggggcggctggactaccgtcaagatcgcggccggcattgagcgtctggccagggacttcaacgtgcagataacccgccagtggccgggggagtcgggcagtgtcccgctggccccccgggttaagaagggggatgccgtcgaagtttcgatcggtgatgacctggtgatcaccggctgggtagaggccacgccgatacgttacgacgcccgaggcattacctttgggatcaccggccggagtaaaacggcggatctgattgactgcaccgcggcgcccacacaatttgccggccggacattggcgcagattgccacgcagcttgccaagccgttcaaccttaccgttgttgatgccggcgccccggcgggttcactgcagggcgtccaggcggatcacggtgaaacggtccatgaggtgttgaacaaattgctgggccagcagcaggcactggcctatgacgatccgcaagggcggttggtggtgggtgccattggcagtgcgcacgccacgaccgcgctggtcttcggcgagaacgtactgagttgcgataccgaacagagcattcgcgatcgcttttctgattatcaggtttcaggccagcgcgccggcggtgacgatgattttggcgaggcgacgatctctgccattcgttcgaccgcgaaggatagcggcgtcaaacgctatcgcccgcattacatccaacagacgggcaatgcgaccggcaccacctgtcaggcgcgatgtgagtttgaggcacggcagcgcgcggcgcgcacggacgaaaccacctatacggtgcagggctggcgccagggagacgggcagctatggcaacccaaccagcgtgtgattgtgttcgatccgctgctggactttaacaaccgggaaatggtgatcgccgaggtgacgtattcccaggatgaggggggcacggtgaccgaattacgcgtggggccggaggatgcgtacctgccagagccacagaagcccggcaagcggaaaaaggccaaacaagaggatgatttctga

SEQ ID NO: 434534 - DNA, 1302 bp, Serratia marcescens
atggctggatggaaaagcaggctgcaacccgcgtcgttccgtggtgtgcctttcagtgttgaaagtgacgaaggcacattcggccgccgggtgcagacgcatgaatatcccaatcgggataagccctataccgaagatctcgggcgggcaacgcggcgattcacgatcagcgcctacctgatcggggatgattatattgaccagcgcgatcggctcattgcggctgtagatactccggggtcgggaacgttggtacaccccaactacggtgaaatggccatctgcgttgatggtgaagtgcgcgtcagtcacagcaacaacgaagggcgcatgtgccggatcagcttcagtttcgttgaagcgggggaactgtcgtttccgacttcgggtgtggcgacagggcaggtgctggtctcgtcctgctcggcccttgacgacagtattggcgacgctttctccaggtttggcctggggggcctgtcggattttattcaaagtgatgtgctcagccaggccacggcgatgatcaataccgtggcggatgccttcaccatggtagatgaggggattgccgcggcggcgcgtttactgcagggtgatctgtcggtactgctgatgccgccgtcttctggcatgaactttgtcaatgccctgcaaaaaatgtggcgcgccggcaatcgccttagcggtgatgcatcggatctggtgaccctgatcgatacgctttccggcgtgacgctggggtatgatttggcgccgcggggggtatggaatactgacagcacgacaacccaggttgtgaagacgcagcagaactacgttgccgaagccattcgcactacggccatcagcgaagccgcctatacggtgacactgcttccgcagcctaaaacgccagtcaaccagcgatcacctgagagcgtaacgcccattgtgtcacatccggcgctcaatgatgccggcacggataatcctgtgccggcgcccgtaacctgggacgatttgatcgccgtgcgcgccgggcttaatcatgtcattgataccgagctgcaacgcacggtcgatgatggccttttcctttcccttaaccgggttcgcacggataccaaccgggatatttctacacgcctggcgcaggtggaaaaaacggtgacccgtaccccaccagacgtgttgccggcgctggtgcttgccgccacctggtatgacaacgccgcccgcgagaccgacataacggggtgtaatgccgtgaagcatcccggctttattcccgttcagccattgagggtccccgttcgatga

SEQ ID NO: 434535 - DNA, 1899 bp, Serratia marcescens
gtggctgacagctttcagttaaaggcgatcattacggcggttgatcagctgtccgaacccatgaagaagatgcagcgcaacgtcaaggggttcggtaaagagttttcctccattatgaccggcgctgcggcggtgggggccggtatcgttggggcgctgacattgccgataaatcaggccattgagtttgagtcggtgatggccgatgtgcgcaaggtcgtggattttgataccccggcacagttcaagcagatgagcgacgatgtgctgaacctgtctacacggttgccgatggccgcggaggggattgggcagattgtcgcggccggtggccaggcgggcatcgccaaagaagagctgctttcctttgccgagtctgccgtaaaaatgggcgtggcattcgaccagaccgcggaagagtccggccagatgatggcgcagtggcgtacggccttcaaaatgacccagaccgaggtggtcggactgtcagataagatcaactatctggggaacactggcccggcaaacgctgccaaaatatctgatatcgtgacgcgccttggaccgctcgggggcgttgccggtgtggcatcgggtgaaatagcggcaatgggggctaccattgccggcatgggggtagagtccgaggtcgcggctacggggatcaagaacttcatgctgtcgctgactgccggtagcgcggcgaccaaatcgcaaaaagaggtgatgcgaaaactgcgcatatcgccgaagaaattggcggctgcaatgcagaaggactccaaagccgcgatgttgatggtgctggattcggtagcgaaattgccgaaggcagatcagtcgtcggcgttgatcaggctgtttggtaaggagtcctcgggggctattgcgcctttgctggcaaaccttgatctgctgcgtaccaattttgaccgtgtatcggacaggcagaagtatgccgggtcaatggagaaggagtacgctgcgcgcgccgccacgacagcgaacgccattcaactgcttaaaaaccaggtgtcggccgttggcgtgacggttggcgagttattccttcctgcgattgttgaagcggcgaaaaagctacaaccgttcgttgagcaactgcgtgattgggtgaaggcgaatcctgaactcatcaaatccgttgcaaagtttggcggtgcgttgatcgggttaggcgtggctgttggtagcctttcgcgtgcgttcaaaatgctcaatgccgtcatgaatctttcgccggcgaaactggcggtagcggcgctggcggcgggcgcttttttgatcattgaaaattgggatcaggttggcccggttatcaaagacgtgtggcagcaagttgataaagtcgcccaggcgatggggggatgggaaaccgtccttggggggattgggctttacatgacaggcgcttttaccgtcaacaccatcggttcattgaaaacggcactcacgctggccaaacagctttctggtgtattgggcaagatcgcctccctgggtgtcgcaaccatccagattgcagtggccatctacatgtttgagcaactcaaagaaattgctgatgcagccaagcaggccgaccatacggattcattctgggattcgcttaaaaaccgttggaatgcgggcggctggtataacaacaaggagcaggttaaccagcggcaggcggaagggaagccgacagggtacccgtcagcggtctctctgagccggtccaatcagctacttaaaccagctggtgcggcgcagccgccagagggggaattggttgtcagatttgaaaactccccgtcgggaatgcgtgtgtcaccgacgccggattcttcacccggtatttcctacgatgtcggctataaccgatttgccaaaccctga

SEQ ID NO: 434536 - DNA, 324 bp, Serratia marcescens
atgaaagaaatcactctgagtaagccgatcacggcgcacggcgagacgctgcatgtcattgagctgcaggagcccacgtatgaccaggtggcgaaatttggtatgccgttctcgctgacggagtccggcggcgtcaagctggattccgcctcagcgttggcctatatcccggagcttgctggcattccgctttcctccgccaggcagttggcgctgtttgatgtttttgctatctcaatgtctattctcggtttttttacggggtcgaaaaccccgaagaactccgaaagcggctctacaacactgcctatttctggcgattga

SEQ ID NO: 434537 - DNA, 357 bp, Serratia marcescens
atggctaagatcgccggtacctgttacctaaaaattgacggtcagcaactgtcgctcaccggtggcattgaagtgccgatgaacaccgtggtgcgcgatgatgtgattggcctggcgggggacgtggatcacaaagagacccaccgcgccccttatgtgaaaggcaccttcaaggtgccgaaggcgtttcccatcaacaagctggtgtcatctacggccatgaccattaccgccgagctggcaaatgggatggtgtatgtgctgggcagcgcctggttgcacggcgaggccaatcataaccccgaggaaggcaccgctgacctggaattccacggtgaagaaggattctatcaatga

SEQ ID NO: 434538 - DNA, 1518 bp, Serratia marcescens
atgaccgtgagctttaataacatcccggcggatgttcgggttccgctgttttatgcggaaatggacaacagcgccgcaaatacggcgcaggataatgccccgtcgctgctgtttggcatggcgctacctgattcggagattgcggcaaacgaactggttatcatgccctccgcggatctggcggggaaattggccggccgaggcagtcagctggcgcgaatggttgcggcttaccgtaaggttgacccctttggtgaactgtgggtgattgcgttgcctgatggttcgggaaccgccgccaagggaacagtgaccctttccggcacggcgacggccgccggcagcatcagcctgtatatcggtaccatccgggtgcaggcagtggtggcgactgaagataaggccaaggctgttgccacaacactcgccgccgctatcaatgcgcgtccggatctgcccgtaaaggcagaagttctggcaacgtctggcggcgatgtgcagggggtagtgacgctgacggcggttaacaaaggggtatcgggtaacgatattccgctggcggtgaactattacggcagcgtgggtggcgaagaggtgccggccggactgactgctcagattggcgtcatgaagggtggggcgggttcccctgatctggcgccggcggtggcagccatgggcgatgcgccgtttgattacatcggactccccttcagcgacatgccgtccctgcagctgatggcgatggaaatgaacgacagcagcggccgctggagctatatgcggcagctgtatggccatgtgtataccgctaaggtcggcgatttgtccgagctggtggccttcggtgacgggctcaataaccagcatattaccgttgccggctatgagccggattgccagacgccgttggatgagctggttgccggccgccttgcgcgcgcggcggtattcctgcgtattgatcccgcccggccgacgcagaccggtgagctgacgggcgcaatgccggccccggtgggtaagcgcttcattatgacggagcagcagtccttgctgacccatggtatcgcgaccgcgtatgcggaaggcggcagccttcggatccagcgggatatcaccacgtacaagaaaaatgcctacggtgtagcggataacagctatctggacagcgaaacgctgcataccagcgcttatgttctgcgtcgtctcaagtcggtgatcacctcgaagtatgggcgccacaagctggccaacgatggtacgcgctttggaccgggtcaggctattgtgacgccggcggtgatccgcggtgagctttgtgcgacctatcgccagcttgagcgcgagggcattgttgaaaacttcgagctgttccagaaatacctgattgttgagcgcaatgccaatgacccgagccgcctggatgtcctgttcccaccggattacgtcaatcagctgcgcgtctttgctctgctcaaccaattccgtctgcagtacaacgaggaggccgcctga

SEQ ID NO: 434539 - DNA, 561 bp, Serratia marcescens
gtgaaattaacccccattattgctgcactgcgtgcccgttgcccgcggtttgaaaaccgggtcggaggcgcggcgcagttcaaggctatccccgatgtcggtaaactgctgctcccggcggcgtatgttgtgccggccgatgatacacccagcgagcagaagagccagacggactattggcaggatttgaccgaagggttttcggtcattgtggtgctgagcaacgggcgcgatgagcgtgggcagtgggcgtcttttgacgcggtgcacgatgtgcgggccgaggtttggaaagccttgctgggctgggagcctgatccggatgccggccccatttgctatgccggtggcacggtgctcgatttgaaccgcgccgaactttattaccagttcgattttacggtagaccgggagataaccgaggaagacacccgccaacaggacgatttggactcgctggacgagttcaaaaccttgtcgattgatgtggattacatcgaccctggcgccggccccgacgggaaaatcgaacaccacaccgaaatgcatttcagcgagtaa

SEQ ID NO: 434540 - DNA, 519 bp, Serratia marcescens
atggcggcgaaagcgtctttacacgttgatttccagcaaccgacagagttggtcttcaaccgtgcccgccttcggcgtgcttttgtgcgcatcggtcagatccacatgcgcgatgcgcggcggttggtgatgcatcgtggccgctcggcactgggggagaacccggccttccgaactggtcgcctcgcgcgttctatcggttactacgtcccgcgggcctccaagcggcgcccaggcttgatggtgaagatctctcccaaccagaagaacggcgagggcaaccgccatattaacggggtgttttaccctgcgtttctgttctacggggttcgccgtggggcgaagcgtcagaaaaaacatcatcgtggcgcctcggggggcaccgagtggcggattgctccgcgtaataacttcatggtggaggtattggagcgccggcgcagctggacccgatacaccctttcgcgtgaattgcgaaaatcgctgcggccacagcgccgcaaaaggaaaacagcgtga

SEQ ID NO: 434541 - DNA, 411 bp, Serratia marcescens
atgaaaatccgtcaggcgcagaccagtgccagctatttgctgcccgacccgggcgagctggataaacggatcgttctccggcggcgtgtagacgagccgacagacagtttcggtttggcgccgacttttcccgagtcgttccgtgcctgggccaagatggcgcaggtgggggcggccacttatcaggcgtcggtccagacggagacgaccgtcacccattacttcaccttgcgttaccgctctggcattaccgccgatcacgaggtcgtattgtccggccaggtttaccgggtgcggcgtgtacgcgatctgaacagtaaagggcgcttcctgttgctggaatgcgaagagctgggcagcgaaacccgaaggagtgaacggcatggcggcgaaagcgtctttacacgttga

SEQ ID NO: 434542 - DNA, 324 bp, Serratia marcescens
atgttgctgaaactcgaagaaatcaaggcgcaatgcaagttggagcctgattttactgaggaagatgcattgctagaactgatcggccgggcggttcagacgcgtaccgagacgtttcttaatcgaaaactctatgcacccgacagcgagatccccgagtccgatccggatggtctgcaccttcccgacgatatcaagattggcatgctgctgctggcgactcactactatgagaaccgctcggcggtgtcggactttgaaaaggccagcctgccgatgggctttctgtggaacgtgcaaccctacaggtatatcccgctatga

SEQ ID NO: 434543 - DNA, 1239 bp, Serratia marcescens
atgtctgcgtccaaattgcatgaactgaagcaaaaacgaaacaccatcgccaccgacatgcgcgccttgcatgacaaaattggtgacaacgcctggaccgatgagcagcgcaccgagtggaagaaggctcagggtgagctgcaggccatcgatgagaaaatcgagcgggaagagtccttgcgctcgctggatcagtcgtttattgagcagcaggaagaggagcagcgccaaaagcagaataaagatccgaaaggtgaagatcctgagcagcgcgttgccgtgtttgataaatggatgcgtcacggtgcagccgagctgaccgccgaagagcgccaggcgctgcgtgagctgcgcgcgcagggcattgcgccggatgagaagggggggtataccgtaccaaaaaccttcctggctaaagtggttgagcagatgaaagcctatggcggcatcgccggtgtggcacagatcctgaccacctctgacggccgaaccatggagtgggcgacggctgacggcacggatgaggtgggtgtgctgctgggcgaaaacgaagaagccggcgaagaagataccgaattcggcatggacagcctgggcgcgttgaagttgacatccaaaatcattcgcgtgtccaacgagctgctgcaggatagcgcgattgatatggaagcctaccttgcccgccggatcgccgagcgtatcggccgcggtgaggcgcgttacctgatccgtggtaccggcaccggtacaccgaaacagccgaaaggtctggcggcttccgtggataaaactaccgcgaccgcgtcggcaacagcggtgaactggaaagaggtcctggcgctgaaacactccatcgacccggcataccgtcgcggcgaccgtttccgcctggcctttaacgataatacgctgaaactgatcagtgaaatggaagacggccagggacgcccactgtggctgccggatattgtcggcgtggcgccggcgtcggtgctgaacgtgccgtacgtgattgatcaggagatcgatgatattggcgccggcaagaagttcatgttctgcggcgatttcaatcgcttcatcatccgccgcgtcaattacatgatcctcaagcgtctggttgagcgttatgccgagttcgatcagaccggcttcgtcgctttccatcgcttcgattgcatcctggaagatacctcagccatcaaggcgctggtgggtaaaggatcggccagcagctga

SEQ ID NO: 434544 - DNA, 1227 bp, Serratia marcescens
gtgttacttgatgcgctatttcgcagtgagccgctggaaaatccggccaatccggtcaccgccgaaatggcggaaatggacggtttgctccaggtggacgtgtatgtcagcccggaaacatcgatgaagctggccgcggtttattcgtgcatttacgtgctggcttccaacgtggcccagatgccactgcatgtgatgcgcaaaacggaaaaaggcgtgaatgtggcgcgcgatcacccggttttttatctggtgcatgacgagcccaacgactggcagaccagctataaatggcgtgagctgaagcagcggcacattctcggctggggtaacgggtttacccgggtgcaccggacgcgccgcggcgaggtcagcgggcttgaagcgtgtatgccgtgggaaaccacgctgctgaataccggcggccgctatacctatggcgtctataacgagcttggcagcttcgccatcagccctgacgacatgatccacatccgtgcgctgggtaataaccagaaaatgggcctcagccccatcatgcagcacgccgagacgatcggcatgggcatgagcggacagaaatataccagttcctttttcagtgggaatgcgcggccggcgggcattgtgtccgtgaagggggagatccaggacaagggctgggagcggttgaagaaagtctggcaaaaggcgtcgctggcgctgcgtggccaggagaataaaaccctgctgttacccgcagaacttgattacagggcgctgtcagtgtccccggtagacgcccagatcatcgacatgatgaagctgaaccgttcgatgattgctggcatattcaacgtgccggcgcacatgattaacgatctggaaaaagccaccttcagcaatatcaccgagcaggccattcagtttgtccgctataccatcatgccctgggttgccaactgggagcaggagcttaaccgccgactgttcacccgggcggagcgggcggcggggtattacgtccgctttaacctggcagggctgatgcgcggcacgccgaaagagcgcgcccagttctaccactacgccatcattgacggctggatgagccgcaacgaggcccgcgccttcgaggatatgaacccggtagacgggctggatgaaatgctggtcagcgtgaatgcggccaatccaaccaaaaacgcaatcgacgacaaaaccaaagaggaagacgccgatgagtga

SEQ ID NO: 434545 - DNA, 162 bp, Serratia marcescens
atgaaaacattgattatcgatgctatcggtctggccggtttcggtctgctggtggcgggcatctacctgcagtttggcaccgccattgcgcttcagagcgccggcggcggtttgctggcattcgcgctgatcgcggccagaagggggaaacgtgttacttga

SEQ ID NO: 434546 - DNA, 1734 bp, Serratia marcescens
atgaagagaaaatcttaccccaacgtgaatgctgccaatcagtatgcgcgtgatgtggtgcgcggcaagatagtggcctgccagtatgtggtaagcagctgccagcggcatcttgatgatctggccgaagaaaaggggcgaaagtttcgctaccgctttgacagggaccttgcagagcaggccgcgcgattcatccagctattaccgcacaccaagggcgaatgggcatacaagcggatgccgatcaccctggagccgtggcagctgtttatcgtctgtgccgtctttggctgggtgcacaaaggcaccaagctacggcgctttcgcgaggtctacaccgagatcccccgcaagaacggcaaatcggctatctcggccggtgtggcgctctacgggtttacctgcgacggcgagttcggcgccgaggtgtattccggtgcgaccaccgaaaagcaggcctgggaagtgtttcgcccgacccggctgatgtgcaagcgtacgccgatgctgatggaggctttcggtattgaggtcaatgcgtccaacctcaaccgccctgaggacggcgcccgctttgaaccgctgatcggcaacccgggcgacggttcatcgcccagcctggcggtggtggatgaataccatgaacatcaaactgatgcgctctataccaccatgttgaccggcatgggcgcccgccggcaaccgctgatgtgggcgatcaccacggccggctacaacatcgaggggccgtgctacgacaagcgccgtgaagtggtggagatgctgagcggcaccgtgccgaacgatgagctgttcggcatcatctataccatcgacgaaggcgacgactggacaaaaccggaggcgttggtcaaggccaaccccaatatgggcgtctcggtttacaaagacttcctgctcagccagcagcagcgggcgatcaacaacgcccgccacgccggtacattcaagaccaaacacctcaatatctgggtcgcggcgcgggatgccttctataacctggtgagcctgaagcgctgtgaagacaccacgctgacgctcgagcagtttgaagggcagccctgcattctggcgtttgacctggcgcgcaagctggatatgaacagcatggggcggctgtttacgcgggacattgacggtaagcggcattattacagcattgcgccgcggttctgggtgccgtatgacacggtctacagcgttgaacgcagcgaggatcggcgtacggcggagcgcttccagaaatgggtggaaatgggattactgacggttacggacggcgcggagatcgattaccgctacatcatggaagaggcccgggcagccaaccggcttaacccggtagaggaatcgcccatcgaccccttcggcgccaccggcatatcgcacgagctggccgatgaaaacatgtcgcccattacgatcatccagaattacaccaacatgtccgacccgatgaaagagctggaggccgctatcgagtctggccggttccaccacgacggcaaccccattatggtctggtgtctcagcaacgtgatcggcaagtatttgccggggaacgatgatgtggttcggccaatcaaggagcaggccgagaacaagattgacggtgctgtcacgctgattatggccatcggtcgcgccatgctgaatgagccgggcgattttctttccaatatcgatccagacgaagacctcttatatctatga

SEQ ID NO: 434547 - DNA, 495 bp, Serratia marcescens
atggccggaacggcaggccgatccgggcggcgcccaaagccgaccgcccgcaaggaattggccggcaaccccggtaaacgagccctgaataaggacgagccggtattcaccccgataaagggcgcggagccgccggcatggtttgaagaagaggggctccacctggcaacggtaatgtggcaaatgaccaccaaagagctttgcggccagggcattctgtgcatcacggatctggcggtgctggagcggtggtgcgtggcgtacgagttttggcgccgtgcagtcaagaacatcgccaagcagggcaatgtggttaccggtgccaccggcggcccgataaagaaccctcaattgacggcgaaaaaagaacaggaaacggagatgagcagcaccggcgccatgctggggctcgatccgggaagccgccagcggctaataggactcgccggccagaaaaaaacggataacccattcattaagttgatcacatcatga

SEQ ID NO: 434548 - DNA, 624 bp, Serratia marcescens
atgaaatcgttctatcagcatcttgaatctgagctggtgtatgtgccagcgctgggtatcggtcgctacccggtaccagtgaatcagcggccgtatgacgcggattattttcacaagtatcagcagttggccgacacgcccatggggcatgcactgacgaaggcccgcatcgaattagtggcacggcattatcagggtagcgtcgttgatgtcggtattggcgcagggcagtttgtggcggcacgtaaggacacgcttggctatgatgttaaccctgccggtatccagtggctgcaagcacgaaatcaatgggctgatctctatgaaggcgagtatccggcgttgagctgctgggattctctggagcacatcgaccaacctgagcttaccgtggccagggcaacgcagtgggtgtttgtgtccatccccatttttgccaacggtgatgccattatgacttcacatcactatcgaccgaacgagcatattttctacttcacgcatgatgggctgctgcggtggtttgctgagcagggatttacctgcgttgagagtaacacgattgaatccgaccttggccgtgttggcattgggtcttatgccttcaagaggacaagagtatga

SEQ ID NO: 434549 - DNA, 873 bp, Serratia marcescens
atgtcgataaagcgaaacatctacatccgtgggatgtatggcctgggcgacagcatctaccagcgagcatttgttcggcaattccccggggcttacattcgcacaccctggccggagttgtatgcggatcttgatgtgaaattcgtcaagtccaacacgttgctgcgcacccagcggaaaaacgaagatcgcacctggttgaggtatgtgcctgaaccgacgaaagccgaagttttcacggtgttctatggggcagacgagctggcacgaggatccattatcgatgccatgaccctgcaattctgcaaggtggcatcccaatttgatttgccttcctatgggccgtcgccggtgatcagtgataagcccattgcgattattcgcccggccacggttcggcgtgagtgggccaatcctgcacgtaaccctgaccccaaatacatcaacgaggcggcagcgctgctgaagaagcatttttatgtggtcagcctggcggatctggaagagggcgaagagtggcttgttggcgatgcgccggcggccgatctccagctgcacgccggtgagttgtctgtaacccagatactggcgttggttgagcatgctgctgtggtggtctctggtgtgggttgggcgcttcctgccgccatctgctacaaaacaccggtcttcatcattcaaggtggctgcggcgggcataacgcgcctcatattgttaccgatcaggagatggacctttcccgcgtaggttgggcgcagcctgacaattactgcctgtgtggtcagatgaaccatgcgtgttccaaacacatcaccggctttggcaaattatttaaggactggctcaatgaaatcgttctatcagcatcttga

SEQ ID NO: 434550 - DNA, 387 bp, Serratia marcescens
atgaagacagtaacttatacccagatgcgttctgaattatcggatattcttgagcttttgcgggaaggaaaaagcataacggttactcaaagaggtaaacccgatattgtggtccgcggttcatgcgaagtgaacgaagctaaccccacacttggcgctatgtcgaaaattccggaattcagggtttccccagaaatttctgagggggtaaaagaaatgagcaaacagctaaacaacgttttgaactcacctggtacccgggaggctatagccatggcggctaagatggcatcaaggcttaattcccttccagaggagtttgcaaaggcgctctcgcacacacagagcaagcacgctgaaatcatcaagaaactggaagataaataa

SEQ ID NO: 434551 - DNA, 921 bp, Serratia marcescens
atgaaagacaagaaagccgaaatcctgcgcctgaagcgagaaggcaagggatataaaaccatctcacgtcttaccggtgtgaatctcaacacggtaaagaccacctgccgccgctcggggctgtttcgtgataatcctgaacaccgggtgctcttcaccattccagagaagaaatacagcacggctgtggcagtgcccaagccgttaccgcctcagcgcacaattacgggcgataaacagaccgatgcctatttgtgggtgctggaggtcatcaagaccggtgagcctgcacacattgccgcagcggaagacgccttgaaaaagctgaccatcacgccgaagcaggcgcaggagaactacacgcgccacctgcaggcacaaggggccggttggacatcggtattttccaccatgtggatggacaatccgcaacactacattgaccaggcgaaggcgcagtacgaaaaagcgggagccgtgcgtggtgtatttggcagtttggaagctgtattcaaacctgttgaagccgagcgccgtatcgaagaagtctatggggcgtaccaggaaatttattgcgattacatggcagaagggccaggagaatttgccttcactgatgtgttgcctgagccttacacgctgagcgatgtggtaagggaaatccaatattgggattggttgtcatccatgcgcaatggcgcgttcagggagttgtatcctagtgaataccctaatgagaatgggcacctgtgggagcgggagcaatacctcgatcacctgctggaaactatcaggccacttacccggattgaggcgcttgatgtgctgaagtggtatctgaaatatccgcgctatcaggatatgaatgcagacagcgatggcgtgtatttgaatctgatcggcatgcatgaagtggcttag

SEQ ID NO: 434552 - DNA, 345 bp, Serratia marcescens
atgacggcacatatcgcagcacacggccggctggtggctgatgtgcaaaccaaaaccaccagcaacgggcactcgatggcattgggcagaatggccgtaccactgccgtgtcacgatgccgaagaggggcaagcgacattctggctggcggtaacggcttttggcaaacaggcggatttcctggcgaaacacagcaaaggcgaccttatcagtgtttcgggaaccctgaatatcagtcaatggaccggcggcgatggacagacgaacaccgggtatcaggtgctggcggactcggttatcagcgcccgtacggttcgcggtggtggaaagcgccagagtcaataa

SEQ ID NO: 434553 - DNA, 2712 bp, Serratia marcescens
atgcgtaacatcgacctgatccgagaggtaaaacgccagtcaacgggggggtggtcccagcttttaccacagtgtggcgttgatgttcctgcccgtgatgggcatggaccatgccctgtctgtggcggtactgatcggtttcactttatcgacgatcacgacggcggcgagtggcattgccgtcagtgtgatgcgccgaatcatggcgatggccttgacctggtagcgcgtacgcaccgtatcggcatcactgaagccgccgaaatggtagccggggtactgggtatcggtgaccgttcaacgcaaatgccagcaatcgtcacgccgccgtccgtcaaacctgcccgtgaggacagggacgagaagtcgatcgcagaccgtgtcgcagaattgctgttgaaaacccatccgggtgatgcgctttacctcgccaacaaggggcttccaagccccttcgaagccctgctggacgatggctcgatggtgctggtgttgcagtcgatagcgggggcggttaccggcgcgcagatcatcaaaccgacaggcgaaaagcgtctgctggccggcaccaaaaagaaaggcgcgtttattgcgtcgtggccgctacctgaggaggttgaaacggtcgtgatcgccgaaggtaacgccaccagcgttacagctgcgttactgatgcctgatgtgttgcatgtcgccgcgatagacgccggaaacctgctgcccgtggcgcaggcgtttcgtgaggcatacccagcagcgcggatcattatcgccggtgacaatgactggcacgcgccgggtgaagttgatgaacagggtaagccgcgcattaacaccggcaaactggcggcagagaaagcggcaaaagccgttgatggctggatcacgctcccgccgggggaggtaaaagccgattgggacgaccaccggcagttgcatggcgttgatattgcccgacaggatttcgtcaatggcttgtatcagccggcaggtattcagatcaccgctgcggacagccgtccaacgaaagacgacctaaagccttatatcgacgggcgccgtggcggtctgtactgggtggagcccaagctggacaaggacagcggggaggttgtcgaaaaagaggtgtggctctcgtcgttggtcgaggtggtgggcgtgggcgaggatgattcggagcgttaccttattctcgcctggacgccggagggcagcgatgaacggcgcaccgaagcggttcccttgcgtgatatcggggagcgtgacggctgggccaaactcaaggccggcggcatgctgatcacctcgaaaagcggtctgcgagccattcttgccgatcacctgcagcgcagtggcaaacgtgacatgtgggtgattgccagcgccagcggctggcagagtggcgcctacatcatgcccgacggggaagtgttgggcacaccagaaaagccggtgctgttcaatggacgctctgccgctgcgcggggatataccgtcaagggaacggttgatagctggcgtaatagtgttgccaaactggcgaagggcaacccatcgatgatgctcggtattgcttgcgcattggctgcgccgctgattggcatcgccggcgcggacggtttcggggtgcacctgttcggcggctcgtcggcggggaaaaccaccaccggcaacgctgccagtaccgtctacggcgagcccgatgcgttgaaactcacctggtactcaacggcgcttggcctggtgaacgaggcggcggcgcacaacgacggatttatgccgctggatgaaattggccagggcagcaaccgcaaggcggtagcggaggcagcctatgcgctcttcaacggcgtgggcaaaattcagggcgccaaggagggcggcaaccgggatatcaaacgctggcgcgcaatggcgttcagcaccggcgagattgaccttgaaagctacatccgtgctgacggtgggaagatcaacgccgggcaactggtgcggttgctcaatgtgccgatttccaaggcgacgcagtaccacggctatgccgacggcaaaacacatgctgatgcaatgcgtgacgcctgcaaacagaactatggcgttgtggggcgtgaatggataaaccagcttgccggccagaagaaggcggctgttgatgcggtgcgtgctgctgagcgccggtggttgggattattgcccgaagaagcgagcgaacaggttcggcgggtggcgtcacgttttgccgtattggagggggcgctgatcctgtcgaaaacgctcacgggttggagcgagcaggaaagccgcgacgcgctgcagcacagcttttacgcctgggtcaatgagttcggcatggggaaccgtgaggccaaggcctgggtagaacaggcggaagccttcttacagcgcttcggttacagccgctatctgccgcatccacacacagaccctcgcgatttgccaatccgggatttggccgggtatcgggaagaacgcccagggcttgagacgctgatatttcatacctacccgtcggtgttccgcgatgagattgccgccggtgccaatcctgtcgcgtttgcgcaggcgctggcagatgccggcatgctggataaaccggccaaagggatgaccaaaaagacgttgaggattgatggcaaacagccgcgctttgttgtgctgatgatgcctgacgacaccgaggaggacatgtaa

SEQ ID NO: 434554 - DNA, 357 bp, Serratia marcescens
atgaaacctttaaccaagaattttcgcctgaatgcgctggcaaaccagttttcaactgccatcttcaaccttattcgccaacagaacggcggtgattggttcactgtcgatgctgatggacaggaaatccatgtggcggttatcggcggcgtcagcggcatgcgggagctggtggatgcaggttttctggcggctctgaaggaggtagcgccgcagtgggagggcgtcgctatcaaatggctggcgcagtgtgttgttgagggggagctgaccgagcgaggcatggagctttggacgtccatgcgggcagacatgggtgattcggttgccaagcgcggaggtaacttccatgcgtaa

SEQ ID NO: 434555 - DNA, 633 bp, Serratia marcescens
atggaaaatattattcatgccgcattcgggaaaaatgaaactgtcggtaaataccgcgcagaagctacgtcagccggtgtccgcattctgcgttgcaaccatgaaggggtattcgagcaggtagacctggtgccgtttgctgacgttatgcgccgcctggacgccggtgaatgggaggatgaaatcaagctgtcgttcgacattctcaaggcctgggggaaaaagccaaaggacacaaaggaggccgcgacggacgaagaactgttgctgctatggcgctggctgatagcaacggcgtttatccgtgaacagcttgagaaaaacggatctgcacgcgtggagtggcgacccggtgaatttaaggattgtgcgctttatgtcggcaagcatggcggcatgaacctttaccccatggcagaacgactggccatggcaaataacattgaaggggcgctcattgagcgttatggcagcgagcaaggcgttaacaatgccatcgagttctacatgatgatggcgggtgaagatcacggattgtcggacgccggtcgggaaatcctggccgatttgcacgacagctttattgaacagatgaaccgtgaaggtttaccgacgactccaacggcgcactga

SEQ ID NO: 434556 - DNA, 369 bp, Serratia marcescens
atgaatcgctcaattgaattaaatcgcaaacacattgccgaggcgtttgtggattattgcaagcgccgcagtggcggacacccggtgttctctgtaacggtaaatcgccagcaggtcatcctgggcgaactgagtgcagaggccgtgtaccgctgcctgacagactgttttgaggtggagtgcttcaaaaagtacgggcaggcaaacagcctcaaactgttggaatctacctatgccggcatgctgaataaagataacagcaaattatcaccggaaggcatcgagtttatggcatcgctgatgagtaatgcggtggaaatggcattaaataacccgcaggacaatacccttggtctggagatgtactaa

SEQ ID NO: 434557 - DNA, 306 bp, Serratia marcescens
atgagccatattgagcaggtattaacccaggcgaccatgcaggaagaagataccgatgcgctgttctacatccgccagcactctgacgcggcctatgaggggatcatttccgggctgggcgcaatcggtaatttggctttctgggcgtgtgacagtgaaaattattcggaatcaaatgcgcgagaggatttgcgtagtttgggcgaaatgttaatgcatctgccgggaattgccgccgcactgaaaacgaatgcggaaaccgcaaactttaatattggtgagcgtgagcagaaaaagaaacgctaa

SEQ ID NO: 434558 - DNA, 744 bp, Serratia marcescens
atggctaagaaaactgaactgatggctggtggcgcactgaattctggctctgactatatcgattctcaggaattgctggggctggtcaatgaagctcgcaaagagtgtgggcaaaagccgatccgtaataatggttttgttgcccgtatcaaagatgagctggcaggggaggcttacgaaactttcgtaacccccatggacagcaaaaaaggtggtgcagatcaggaagtcatccgaatgcaccgtaagcaagccctacgagtcgctgcgcgtgagtcgaaagcggtgcgccgttctctggtcgataagctggaggctcgttaccagccggcccccgtgcagcgtgaattgtccacgatggagatcctgcagattgcgatggcatcagagcagggccgccttgcagcagaagagcgcgctgaccatgcggaacgcaccaagtcgcaaatcagccgcaaacgtgaagcctcagcccttggcaaactcagcgcggccacccgcaaatgccgtgaccttgaagaacgcctgggagaaagcgtgaagcatgcgacgatcaccaaggtagagaagaaaaccggtggtgagtttaagtttgcagccctgcgtaaatggtgcaaggaacgcggtgtaacggttgtggatgtgcccgaccctcgttatggcagcgtcaagtcctggccggcgggcgcgtggttggacgtgtacggcgtcgatctgcgcaaaatcttcggaggtgaggcatga

SEQ ID NO: 434559 - DNA, 234 bp, Serratia marcescens
atgaataagacctacacctatcaggtgaatgaggatgtgctgctgcacctgcagcggtcgctggatctgctgagctgtgcgcagctcattatcaacgcacaggacaagcatatgcagaaatacgttatgtcgctggtggatgtggccgaggatttcactcaacgggcagctaacgcgctggatctcggtgagcaaccaacggtgaaaaatgaacagggggtgtgcaatggctaa

SEQ ID NO: 434560 - DNA, 171 bp, Serratia marcescens
atgcgtaacgttggttcgctcgatacgttggatgcgctcgccaaaatacaggctttggccgctgctgccggttacctttctgcgaacgataaggaaaaaagcctgtgctttgagcttttggacatcatcgaaatgacagcccggcgctgtgtggaggcagacgatgaataa

SEQ ID NO: 434561 - DNA, 201 bp, Serratia marcescens
atgtcgcatgaaacttcattgccagagattagccgacaggcagaacagctaaacgcgttgttggtagcgatgaatatcggcgctgacgatctcgatattacggacatgaatacgctcgtcacgttggcgattgatctggtcaacgggcccgccatttggttgcaagaagagcagcgtcgccgggagaagaaaaatgcgtaa

SEQ ID NO: 434562 - DNA, 222 bp, Serratia marcescens
atgcataacatttcccctgaaattttaaccctgattggtatttaccctggcaccaccggccgcgtgatgttgtacgtggagaacggcgtcatcacatcgaacctgccgatccctgagcatcatttctgctgttcggtagagtcgtttatcgaactggctcagcgcgccgggtggcatgtttcaccggaacgccctgatttggaggtggccaatgtcgcatga

SEQ ID NO: 434563 - DNA, 780 bp, Serratia marcescens
atgatgaccggcacttggaaagaaaaaggcagcaccgcaaatgctgccctttggggcgactgctttctcaatcagaagctctatcagtatattgcagaaccgcaggatcggcactacgaaagtttcgtaggtcagccctctggtgattccttggcttttttccgctgccggcgtttgatctcgccctgcatggcagcgacaatgaattgcccagttgtttctccgtcttctttgactgactccatcgcttccacgacctcatgtggcgcgcgggcctgcaccttttgtgatttactatttatgtggtctctctgcacgactgaactccattattacaggtggaatccagtatacaggaaaaaagagattgaaaaagggttgatgtggaatccagttagtgcctatactggattccagttgagtgttgcagcgctcaataatagcgaagctccagtggattgcagtccgcctggagcctctaaccacaacgtaactgagacttacattatggcatgttcacatgatacccaaactcgccctaaatttgtatacctgttcctgggcacccctaacgaatttcccgactccacaccggtggtgcttcgtactgaggcagataccgagaatgacgctcgcgccaaatttcctcgctggacgctgacttttgccgctcaaatccgcacggctgcaccttgccgcctgcaaatattctccactgacgacggctttatgtgggtttacgagcagctccaggcggtgccagaggtggcttatgcataa

SEQ ID NO: 434564 - DNA, 648 bp, Serratia marcescens
atgaaactgaaaaatacggccattcttggtcggggccaaactcatcctgaattcactgccggcgccaatatcgccgagcttaagttccatgaccaggtggtaatcccgttcgataatggcgacgggaaaatatggttcacggctgagcaactggctaagctgctcggatatgcggatgtgaagcaggttaacaagattttccagcgccacaaggaagagtttactgaaagcatgacgaccaaagtgacggtctcggataaatcaatgggttacggtgagttgacgatagaagttcgtttgttctctcttcgcggcgctcacctgatcggcatgctttcacgtaccaagatcgccaaagagttacgcatttggttgctggaccttgctgagcaagaaacccagccacaggcattagatctggcaaacctcagtttcgcctcattgaaggatttgtcggtaaaacagatcaccgattttctcgttaaggcggaggaatattcgaagcgggagaacggtaccaaaggcagcatgaaaatgcaccgccgaaaaaaagagaagaaagcgatcgagaatgcggatcgggccgcaaagcaattcatctttttcacgctggggcttgagttctctgatggtgaggtgtgcaaatga

SEQ ID NO: 434565 - DNA, 960 bp, Serratia marcescens
gtgttgaaaggtaaaatactcaaagtaaaaaaatggcttgatttaaatgaagccgccgcacgattatcattggctatagaagaacctgttagcgcgttagatattcttgaacttggtattgatgaagaagttacattgtccattcgtcttccatatacccataaatatgttgttagagaggcgaagtgggtggcagctccttacgtcgattttctgaagaaagtatgtgaagtggacttttcagtaaagaagtgtaagccatacaaagaagtaactaaggaatacaaatcttatgaggaagaatacataaaaaatgagtattcgaagtatgttgagagaattgatagtagcagtgattcagttccagaacacaataaaacatatgaatattttatcaacgaacttcaaagggtttaccttgagtattctgatgaactgctttaccttgagggttatacctacgaattgcctatgattggcgctgaacgtctcgatgcaatggctctcatggatataaacaggaaaagaaaagttaatgagctatgtaacttagatggggcatttttgagggatgaggaaggtcggatttataatattatggagcgatttgatgatgcttacctgaagcagagatacaaagattcaaatgacggggaaaggggaggttatttaaatcctagagattatttccctgctgatggattacttgatggatgtgagtttggcatatccccttcaaaccttatagagtttgagcgtaaattatctgacgaagatgatggtgtctccagtcagcagttattaaaattacttggtggcgtccttaatgtagttacctcaaaggcaaaaaaatggacacagggggatctcgctgttgctattgctgagaaaaaacttccaaatcttggcgagcgggttgtaaatggtctattttctaaagcaaataaatcaatcaaataa

SEQ ID NO: 434566 - DNA, 246 bp, Serratia marcescens
atgagtgaggcgagtatcaatcaggttatcaagcgcattggatatggcggtaaggtcactggccacggcttcaggcacaccatgagcaccatactgcacgagcagggctttaatagcgcctggatcgagctacagctcgctcatgtcgataagaacagtatcaggggcacctacaaccatgcgcagtacctggaaggccgtagagagatgttgcagtggtatgctgactatatcgagtcgttgtag

SEQ ID NO: 434567 - DNA, 369 bp, Serratia marcescens
atggcactgactgacgctaaaatccgggccgctaaacccgacgtaaaaccctataaactcgccgacagcggcaacatgtttttactcattcaccccaacggttctcgttactggcgacttcgctatcgtcaccttggaaaagagaaaaccctcgcccttggccaataccctgacgtctctctatctgaggctcgcgagaaacgtgacgaagcccgaaaacttgtggcccaaggcgttgacccctgcgagcagaaacgtatccaaaaagcgatcccatccactgaacaaactttcgaagccatcgctcgccagtggcatagttgtaataaaaatctatggtcacccccgtttttgcaacaccgattttga

SEQ ID NO: 434568 - DNA, 399 bp, Serratia marcescens
atggcggatgacgaggccacgcagcgcctgctgagcattcccggcgtcggcatgataaccgccagtctgttggccacgaagttgggcgatgggaaaaattatgccggcagccgggacttcgccgcctcgacggggctggtgccgcggcaatacagcacaggcgggaaaaatacgctgatgggcatcagcaagcggggagataaaaatttgcgtcgcctgctggtccaatgtgcccgggcctttatgcagcggctggagcataacccggggcgtctggctgagtgggtgaaggttcagttgacgcggcatcactcgaacgtggtggcctgtggactggccaataaactggccaggatagcctgggctatcacggcgcatcgcaccgtttttagccaataa

SEQ ID NO: 434569 - DNA, 597 bp, Serratia marcescens
atgcaaaacattacgctcgtcggtatcgacctcggcaaacatactttccatgtccacgcgcaggataaagacggccatgccttgctgcgcaagaagttttctcgtacccagctcaccgcttttctctccacctgcagcgcggccaccgtcgtcatggagtcctgcgccggcgctcactttatggcgcgccatatcagccagctcggccatcaggttaagctcatctcgccccagtttgtccggccattcgtcaagagcaacaaaaacgacttcatcgacgccgaagccatctgcgaagccgcctcacgcccttccatgcgcttcgtgacgccaagaaccgaagaccaacaggcaatgggggcgctgcatcgtgtccgggatgcgttcgtcaaagaacgggtaaaaaccaccaaccagatgcacggctttctgctggagtttggtatcagcatgccacgcggtatagccgttatccgacgcctgaccgccgtgctcgaagagcatccattaccgccgtatttaacccggctgctgctgcagctccgtcaacattacgtctatctcagcgaacagattgaggcgtcgaacaagagttaa

SEQ ID NO: 434570 - DNA, 945 bp, Serratia marcescens
gtgaccatctcattatggtcagagtcacatagcgaaaagacgctgaaaagtctcgaaacgcatgtcttcccatttatcggctcacgcgatatcaactcgctgaaaacccttgatctgcttgttcccgtcaaagcagcagaagccaaggagatatatgaggtcgctgcacgtctacagcaacgtatctcagcaattatgcgatacgccgctcagtctgggatgattcattacaatcccgcagtagatatggccggcgcattaacaacagcgaaacgccagcaccgtcccacccttgcgttggagcgcatccctgatctgcttgagcgcctggataactataagggacaaccccttacccggctggcaacaaggctcacattacttatcttcattcgctcaagtgagctccgttttgccagatggcccgaaatcgactttaaaaaagccatgtggacaatacctccagaacgtaaaccgattgagggcatcaagtactcacaccgcggtgcaaaaatgcggcccccacacctggtgccgctttccagacaggcattggagattttggaacaaatccacaatatcagtggtgaacacgagctgattttcaccggagaccataatccatggaaacccatgagcgaaaataccgtaaataatgcactgcgattaatgggctataataccaaagtggacgtatgtggacatggcttcaggacaatggcatgcagttcattgattgaatccggtttgtggtcaagagatgccgtagaacgccaaatgagccatcaggagcgtaatggcgttcgcgctgcttatatccataaagcagaacatctggaagaaaggaggttgatgttgcaatggtgggctgattttctggacgcaggtagagataacacgcttgccccatttgattacgcaaagttcaataacccaatgcggtga

SEQ ID NO: 434571 - DNA, 705 bp, Serratia marcescens
atgtatttttttcagagaaaaaagcatgcaggtaaaaataccgagcaaaatgatcgggaactgtcatcacaacccgttgagttagcggaagatgcttatgagtctttggttagtagggcgaaaaaaataaatttaaaggaggtgccggcaatagataatctttatctagcaagaactttcatgagaagttactcatctccattaaatcagaagcaaccaatagccaaccaaaacgatgtgttttatttaatgatggacaacgaaaatccgtcaagaaggatcatgtcaagaaaaatgggttcgcgcgataatacagcgagtaagaaagaagttccggatggagagtatatttttgtcaacagggtggatgagcccaatgtaattaggttgatatcattaacagtgaatgaggttggacacacatctttaacaaatgatatcaaggaatataaatacaagagagtcgctaagaacgatggaagttatgctggctttacctcggttaaaacaagtcttattggatcacacagttacgagcctcatgacgtttattttgcaggggaaattttatttgacaatggtgaaatcgtctactggaacaatgacagcgggcattacaggccggaggaatacaacgtgatgcatctgacagggtgggtgaggaaactacttccgccggaaaaatttgtcagttttaaattttaa

SEQ ID NO: 434572 - DNA, 909 bp, Serratia marcescens
atgcgcgaatattcactacttattggaaatggcataaataatattacaaatggaaactcttggcttgatgttttaaatagtctaggggaaatatatggaataaaaattgacacacatggaaaaccatttccactagcctatgaggagatttattttaatgtttcaagtaatcaaatgaatggattttcagaaaataaaataaaagattcaattgcatcaaagatgaataaaataaaaccaaatgaaattcatcaaaaaataatagagttagagtgcaataacattttaacaacaaactatgacttggcttttgaatattgtctggatgacaacattaggcctgaggatttaaaaaacgaaggtgtgataaaagaaagtaaatacaatgttttcagacatcacaaggtgaaaaacaaaaacatatggcatatacatggagcattgaataatccaggttcaataatccttggctatgagcattacagtggttatttgcaaagcatgcggggttatacaactaccggaagtcagtattccaataacttattcaacgagccgcttacaaaacggctgcaaagaaatgatgttggtaatagttggatcgatgatttttttactaaggatatatatatcttaggcttgaatttagattttgttgagattgatctttggtggttgcttacattcagagaaagaaataggattacaaataaaataaccttgcaacataaggtaacatattacattcctaatcattattataatgactctgcttccaaaccaaaaatcgatcttttaaaaagcgttggggttataattaatcatgggttcggattagtgttcaaagggaaggagaaagagtattacctaaatgtaatcaatgacattaataatagaactaatagataa

SEQ ID NO: 434573 - DNA, 1683 bp, Serratia marcescens
atgaaccacagacaagaagaacagatcaatgcccaagtcattgccgttttcccagataaagtacgtatagttgtggatgacctcgaaaactttaagatagcggaagaatcattgaaagttggttcttacgtcaaaattgctgacaacgaaaacgcagttctcatcgcaatcattgaaaacttccagattgcagttagcgttgatggaaagcgggatcatatcattgaagcttttcctttaggcatcttaagaaatggtaagtttgagcgtggtggtgattctctagctattccgccaaaagaagttcagccagcaaccatcgctgatataaagaaaatctatgaagactcagttcctaaagaggcatctttccgttttgctacattagcctcaaatatcagtgttcctgttcccgtcaacggaaataaattttttaataagcatattgcagttgtcggttccaccggttccggaaaatcacatactttagcgactattattcagaaagctgtctccgaaaaaggaggtgatttctcactaaataattcacatgtaattatattcgacatccactctgagtacaaatcagcatttccatatgcaaatcacattgacatatccaatttagccttaccatattggatgctgaacagtgaagagctggaagaatttttccttgatactgaggccaatgatcacaaccagagaaatatttttaaagaagctatagtaaaagatagacttgcgaaattctctggttcagatgctgaaaaacaaaatatccacctcgacactcctatcctgttcgatattcaggaagtccttgcatacacgatcgcaaaaaatgaagagatgattgatactggagaagtttacgcggcaagcaataaagaaaaagcgggacagccaaaatatacgcagggtagtctccatggaaaattgacgaactttgtaaatcgacttgaaaacaaactaaatgacagtagattaaatttctttcttggtgaaaaatccatgaaaaccacatttgaagaaaccctcaaaaatctgctgggatactcttcgaagagtgaatcgaacgtaaccgttattgacctaagtggagttcctttcgaagttttgagcataacggtatcccttatttcacgcctcgtcttcgaatatggttatatatataagcgcatgcgttgcgccagaaaccctaatgagaaaatcaataatgatattcctattttattagtttatgaagaagcacacaaatatgtccctaatagtgatttgtcgaagtatcgttcttcaaaagtagccatagagcgaattgcaaaggagggtagaaaatatggtgtgacgctactgctagcaagtcaacgtccgtccgagatatccgaaacaatattttcacagtgcagcaactttattgctatgcggttaaccaacccagcggaccaaggatatgttaaaaagttacttccagactcgctcggttctttgatcgataaaatgacatcgttccgtcaaggggaagcattactagttggtgaatctataattctcccctcaatagttcaaattgaaccatgtactcactccccatcgtcaaatgatattccttattggcaactctggaaggaggaatggaaattgatggattttggtgccattaaggctgagtggtataaataa

SEQ ID NO: 434574 - DNA, 1212 bp, Serratia marcescens
atggccgacagaagcgcagttgatacaatacgaggttatttttatcaatttgatctgactattctcagcatcttaaaattaacatccttagacgaatctgttgaaatcgaatgcattgaggacattgatattcgaactgcaactgacgtcactgccacacaatgcaagtattatgccaagactgaatacaatcactctgtcataaaagatgcgattaagcatatgctatcacattttaaggaaacgctggtaggtacgaagcaaaaaatgttgtattccatttacggacattatgcgtatggacaagaaaaactagatatagagatagacattgatttcctaaagaagcactttcttacctacaccaaagaaaaaattacctaccatcatcatcaggatttacaacttaccgatgcagatcttgaagagtttctgaagcggttaactataaacatcagagcagtggattttgatacacagtttcgtgaagtgatcgatgttctaaaatcaatatttaatactaagtcgttttcagctgaatacttttattacaataactctctagctgttatacgcgagctttcaataggggctactcaaaaaaaacgctcaattaccaagggcgatttcctgaaaaagattaacacttctagtattctcttcaatgagtggttcgtagagaagaaaggaaagaaaacacatttttcagccctgcgtaatgaatatttctcagaagtgaatatatctcctttcgaacgtttctttctagtagagctagatgcgacttcttacgtcagatacgagctcaagaatcttttttttgagatttcccgtaagtggtcaaaattgtcgaagcgagagccttctccgttctgtccgtacatttatgtgcatggagtaccagaaagtgagttacttgcactaaaaaatgaactcagcatcgaaggttttaagatcattgacggtcacgactttcatggtgctgagtttaattgtcaatcgattatgctgaaagccacgcatggcaatggtatccagcttaaggttatgaatactcttcaaaatgttataaatactattgatgccattactaaaactcggcgtatttaccaattccacataggccctagcttttttgaatacgaaaaaccagcagtccaacacgtcaaaattcagatagaacaactttcagatattaaatcaataatctag

SEQ ID NO: 434575 - DNA, 612 bp, Serratia marcescens
atgcctaccccttcagaccctataaaaaagaacatcagtaatcttcagataacgggaaaccctgcccttggggaaacgttgacggccagttatgagtttcatggtgcaggagaggatgattccatatgtcagtggtactggcgtgaaaatgattcagccagttggcagcccagccaccgctcaggtaacaccccttatattggaaaaacatttgtccctgtagatccgggctatgccggtgagcaggttcgtgttggcgtgaaagccaaaggaacactttctgaggaggtgactgaagagcagtttagccccgctgtgataataaaatcgacacaggatgcgggagtatgtatgactgaactaccgaatggcaaggttaatgattattactcttatgattttgatgaaaacatcagagcttcctctttagctggtagtattcctgatggattacacatacataatgctattaatgggtgtattttaaaaggaactcctgttaaaaaaggtgagtatcaatttgtgattacatctcagtatactaaccgcggaggtagtggttttaatatcccacctgtaactcatgtttttttcaaaataaaaataacctga

SEQ ID NO: 434576 - DNA, 180 bp, Serratia marcescens
atgaaatcacaatccgccaaacgctatccccctgaactgcgtaggcgcgctgtcagaatgttgttggaacaccgtgatgagtatgactctgagccggatactattcgtgccatctcgtcaaaaatcgggtgccattacgacaccctgcgaacctggttgttaccaacggtgcaaaagtga

SEQ ID NO: 434577 - DNA, 2313 bp, Serratia marcescens
gtgtatcaagcaaaaacagttaaaaaagcgtctaaaaaatatcaagaccaggatgatattgatgtgcaacgttcattagcacaggaagtggcaacttcgtctatagttagaaagcgaagttttgaccagttgaacactgtgccggggaccgaaccgttaattgtaaaaaaaataaagggggcaatttatcggggtggaggcgagactgtatcctctatgtgtgttcccgacaccgaagtggttaataacggacttgccgtggatgattgcgtaaaattaatgcctaaagatgaaaagattgacggtagtgcgcttgattacggtgttagactgaaaatgaaatatgagcatcttttaattaaggatgtcgcagagtggttaggtattaatccaaaatcgttgtcaggtaaaatagccagaaaaaaaagggtgttggctttagatgaacagccaaaaaaaacacgcgatgatggtgtaaaaaacgaacaggtaactattgatgaggctgtcaaagagctggaggaagcaggggagaagaaaaatgatccaaattttggcatttatctaaaaaatagatacccacacttgctgataaaacatatttccgttcatctcggagttaaagaaagtacgatgaaagacagggtttatagggctaaattacaagggggagtgagtaaaacattggagatgtgcatgaaggaaatgccatttgatgatgataaatataaagacactgtagattatggtattcaactgaagaatatgtataaccaccttgtttggggagaggtggcgcagaagttaaatgtaagcaaaaatacaatgaaaaagagggttcaacaaaaaaaagaagcggaaaaagtcaccgcgaaattacccggttattatgtttcgttgcaagagatggggcgtgtaataaatgttcagggaggtgcatcgtcagcgattattgattcgccagcggacagcaagccttcgacctctacgccagtctttgtactgcctaaaaaacaaataagaggaaggttgagtgaaaatattaatgattgtatacgtaacaccccgagagggactgaagattcagatgactatgcttatgccataagtttgaagaaaaaataccatacgacactcacgtaccctgctattgctacgcactttggcattaataagaatactctcatgacaaaggccaagagaacggaaaggaatactacggattataagggtgataacaagattgatattaaagaatgtatgatggatactccgcgtgatgaaggtgagaatgaggattatgattatgcaattagattaaaactgaagtatgaccatctttcatacagagcattggaaaatgaattttctaatatttcgagaacagggttagagactagattaaaaaaatacgttgccgacaataatatcaaaggcgaggagaagttaaatataagaaaatgcgtgaatactctggttgatgaagggatgtcacgtgatagcgatgattttggttttcatttgaaaagtcggtttccgagcctgtctgttcgtggaattgcaagagagcttgggattgatcactcaacactaagacaaagaattgctaaagtggaggagagaaccagaaagttggaaaatacattaacactggaggaatgcctggaagaaatgcccttcaaggaagacgcttatgctgataaatatgagtatggtattctgttacaatgtaagtattctttcttgcatctgactaaaattgcagagaaactaggtttaaacaaggataagatcctgcgtcaacggggaaagatgagggaagggattgaaaatggtgagaagccgctgagcttaatatcaattaggaaaagaataaaagagttaaaggcgaaatttaaattgaaaaaagatgtaggggaggacgttaagagtgaactgagggtaatgtgtcgaatggtccacgaacaattggaaaagatagtacaagataaaagtactactgctgtaggaattgatgtgagtggtaaaaaatttttagcgtctagtgatgcatacatgaacaaaacaatgaaagactgggctcatgaaaatggggttgttatggcgaaagggatgggacattcggaggagaagatgttgcgacaattccctgatattgttcacattgaggtgtctcgcgatatttgtcttgagtgtgagatcaggcttctagaaagtggtgtgggcacaacgacggagttttcggggaaatttagtcaaaacgcgattagaaacattcaaaaagtagcgtcttcctcccaaaccatattgtga

SEQ ID NO: 434578 - DNA, 558 bp, Serratia marcescens
atgattattgaaagttatgctgttgatttaactcatgaagtactgaagtctgattttgcgtatcaacttcttctgggagttgttctactgaatgcgcagtcttcacatgttgtggattttgatgcttcgtataacgaggggttactgtcactttataaagatataattaattatttaactcatgtgttaggtgaacaggatgtgcctgaatactctcttgaggcgattggtgagcgtattcctgatacggagatgttttcagaaaattgcggtacgtttgcgcaaatagcaatgatttcagcgtggaatctcgtatccttttgtaaggataagaaagcagaacatttgcttagaactattaatgggtattttgaaagtaaagacatggaaaatcaaatctctcaacatgcgttggccgatgaaattttttttcataaagtgaatgttaatttgggtgcggctttcaaaaaaataaaagaatgtgattattatgataccgcctcagtcaacgcaaatgttggatctattacattaatgcttaatccagcccagagttag

SEQ ID NO: 434579 - DNA, 4806 bp, Serratia marcescens
atgccctatgcctatcagcaaaaaaaaaacgccccgttagccatgccagaagaagacgaagagctggaatggataaatgacagcgcctgctatagcgggtatgacgccgagggtttcgcccaggccagtagcagcgccgaggggcccgaccatacactcgggcagaagttattacaggggtacataacagataagcatcgacagctgcaagagttccgtgaacatggatataaccaggaagagttaaaggtggatctggccctgctaggtgacttgcaacatggatttgcgggggtgtcggagtgcaaagattggcacatcaccgaggccagtgaagcggtgcagctgatgattaacactgtactggccatggatattaaacgcctaaagggtgaacagaaacaggtgatgcgcggcgtcatcgatttatcgtgccaagccactgacgcggtgatgctggcggcgctacacctgccgctggggcaggccctgctggcggcccgggaggggaaagaggcggtactaccgacggcgcaagacattagcgaggcgacggccaacctggcaacggcgaaaggagccattaaaaagtgggccactgccgctttggggtgtattgagcagatacctaaggataagatcttcttgcgtcttaaagtggacgtaaacgctgtgtacagatgcctgtactggctgggagaagggcaagtgaaccgggtacaaaagacgctaagcccagataaatcggtgacagagaaggcgaaaagtctactccctagcacggtgaatgtgctgaaaacagccgggacaagcacggtgaaggggctaaaaaaattccctaccagccaagaggcctggcttggggcggggcataaggtcagtaaactgacagggcaagtaggaagcgcgataaataataaaaggaaagcggtgctgccgtccttgaatagcctgacggtaacgatgggtcggggaataaaaaacaccacgatgcagggttggtatggcagttggggaaacagcctggcagaagatgcgcagaaagccgaattcagagaatcgctaaagctgctggttgagccaatatactttgccgtctcggtgtatctaaagcactcccaggcactggcggcgacgtcgccagatgaagtagaacaaaggataagcttacgccatcaaaggcaagcagcgattgagcaggtggaatatttagagaacaacttggagcaggaagccactgccctcaaggaggcgtatcccgggcaggaagacaaagtcacgccctttttagaacaagtgtcccaggcactgagtgatttctggcaggcggcggaacggctggacgctgtgctgggcagtctcatcccagtgccggaaagcgatgcggaagaggtggattttacgggcaatcaacaaggcgagctgattagcgcagaggcagctgtcactgctagtcagcataagttgaaagttatcgtgattaaaagccacaggtcttttgatgagctctcggtggattggcgtatcgcgcgagatattggccgttatttttgcgcccagcgggaagcgtatccgcagaccgacatggaagagtttgacgcggcggttgaggagatcatctggacacaaatagcagggggatttaagaaagcgcattctccccgagggaaacagatggcggtccgggcgacgcagtcgtactttgaggcgatagttggcacactgcaccgcggtaaaacgacacaagaaatcgtcaatgagcgagacaacgtgggtgactatctggccaaaaccgggcagaagagtctgccaggcaggctggcttttgcgggggggagcggagatatgagccgactgatccgggttaatcaacgtaatatgctgatcccgaaccttggggtagtgaaggtgctgtttagcccgctgtcattttggagtgattaccgcaagctatcgcgggcggtggagccgggtgaggcctttgcgtgggagaattaccgcaagatggcgatgcgtaatgccttcaaacaggccttccgactgctgaaattcgtgttaccgaatgtggccaagtttggcctgtcggcagcgttaaccgcctgggcgctgtaccaaaaaggggtgatagatacggcgcaaaaagcgctgacggaggggctgattgatgcgccgctcgccggtgggttcaaagcagcaaacacattggcgagggctggcctgggagggggagagcaaccgcttacaccagcggatgactcgactccgggggatggaagaaaagttagggtgaaacgatacagacaatcagcagagcagagggaaaaagagttagcccagttgcgccaaatagctcaaaaataccataagggtctgtggcaggagaaccccggcggaagcaaggcgttgacgtttaatggtaaagacacttttgtggtaggaaaagttataaaagtcactgtcacgcagcaagatggctatcggaaagactatgaattttcatcgcatcaatcatccccatctgcagccgcaaaagagataactaacgccatcaacgcgaccattccagatgtacgacttggagagaaaataggcgattccttattcacagcggatgttccagagcgtaatcaattctggattaagtcaggcagtggaataaccgtgagttatgaaacaatctataacatccccagtgacgaggaactttctcagcgaagagaagagatacagagcaaagtgactaagcttgatcatccaatacttcatcatactcagagaatcgacgactatctcaataagaaaatcaaaaaatatcaagaaaacaataaacttgacattggcctggatgatgaggtttgtgtcaaattagttcccaatggagggaaaagtaatccgaattttgtggggcctaagcaaccgcagcctaagtatgcatattataaattacgcgatatcttgacaggggtgtatctttatgacgtcaataaaaaaatcgcgcaggaaaatatagcatacacaccagaaatcaaatcgaaatacaattactttattaattcattcgatcggacaaaattacaaaaagagctgcaaaacgaagttgatgaatatttttctgaggatatcaaaaaagcgcgctgtaatctaatggaaggggtaataacaacacggataatggagtttttagccagtaatgataaaaaaaatgaattttataagagtgttgctgatttttatgaaggtaacaataaagctaaagcgctttatattaatggcgttaaggttcccggatttttttcattcacagcaggtagcgggaacaatgctaaaacactagttttaaatatttatagcgataagcaatttatctttaaaactgaatcatttctacgcgtccaaagtagtattcctaacggtgctaatttggagtcggtaaaagttcagacgattgcttcaccctctgactggcctgcattcaatcagacagtcatcgctgcgttgccactttttgagaaattcagatatgaagaaaaaactaaccctttcgaatataaaaaaaacaatggtaatggtggtgcttattacgcccccatatcatttcaggatgaccataactataatacgttagcaccctcaatgaccgatgcgatacaagaaagaacaaaaaaagactatgatactcacatctactcccacaaagaagaaatggtcgatgtgactcttgatatgtttaggaagtttgctactctcgcaggagtcacaaccagcgttgccgctttgtcaacatctggcatggccatgaaaacgctactctatctggttggcttggggattgatgtcgcgagtgttggcgctatatttacacaggcacatatggctgacaggccagataaacgtgatgacatgatcaacgaaggtatttttgaatctgtatttattggaataggcactgttggtgatactgccggtgccgcagtgagtagctatcgagcattaaaaccacggctcagaaaaatattacaaacgatgcagcagaacccgaagataaaatccagcacaactccccttggcaacgcagatgctccttcggccaccggcctgaaagagaaacccgttggctcattgcctgcagtaacagaaacattgccaggctccaaactgccagtgattcaggtcacaaatgaggtcaccgaaagcggtattcctactcttaaagggcatcgttacatttatcaaattggtgaaaccggtggagaaaaatggaaattgttcgaaaattatgtaaagagctcaaggagacgacatgacattccactagaaaatatctttggcgagttaagagcaaaccgggagagtacaatatttaatcaaccccaacctgattccttatctaaactgaccaagagtgacagattggatattcctgttcacggttcatcattcggcccatcagatgctggaagtcaaagcctggatatcccgatgaaaaattacccagcaaaagatatcgctcaaaaactttatgatcgtggtttaagagaagttggcgtattaagaattgactcgtgcaacttgggggatgggagatatcttgatgacttgaaaagagagctggataagctgggtattaagtttggctatttgtgtgcaccaaacggctatttacaaaccattcacctccccgggacaaatatgcgcccggtttggacatggcgcttcatggaaccatggcgtgtagtcaaggggaatactgatgttaacttccctggcactaagtataataaagaaaatattccacaaaatagttaa

SEQ ID NO: 434580 - DNA, 708 bp, Serratia marcescens
atgaaatttgttccgccaaaaagcccggagcagcaagatattcaggctttacacagggctaggcaacgcgttgtaagccatcgcacagcgacaatatgtcaaatacgagggctgctgcttgatcgggggatccctattggtgctgctatcacgcgagcccgtcgcgcaattcccttgatccttgaagatgcagaaaacgggctcagtgcccgtatgcgcagaacgattgcggagctctatgatctctttttagatctcgcacggcgcgtaggattttttgataaagagatcgacaccgtttttaaacagtctgaagcctgtcagcatattgccaaagtgaaaggcattggcccaaaaaccgctacagccgttattgcggcgattggtaaagggacagaatttaagaatggacgccattttgctgcgtggcttggcctcgttccgcgtcagcaatcaagcggggaccgacaggtgctcatgaacatgacgaagaaaggcgacaagcatctacggaccctgtttattcatggtgcccgtgctgtcgtcagagtggctacaaacaatagcgatagctatttaaaccaaattaatcaactaaaagagcggcgtggatttaacaaaacgattgttgctgttgccaacaagaatgcccgaattatctggtcaattcttcatagcggaacagaatatcgacccgcagtaatgtaa

SEQ ID NO: 434581 - DNA, 555 bp, Serratia marcescens
atgaaaaaaaggaagtatttaacaaataatgaagtagagaaattattttcggtaagtgcacaaggtgtctatggggagcgtgattattgtatgctgtatttgtcatttatccatgggttgagggtgagtgagctttgttctttaagattgtcagatattgacctgcaagagaaaactatttgtgttttcagattgaagaatgggttttccaccatacatccattaaggcaacgagagatagatttattggagaagtggttggggttaagaaattatttcaagggggcggacagtgagtggctttttctgtccagaaagggagggcggctttcaagaaaaagaatatatggcttgattactgaattgggcgtgcaagcagaaatcgcggtcaaagtacaccctcatatgttgagacactcttgcgggtacgctctggctgaccaaggtgtcgatacccggcttatccaagactacttgggacaccgcaacatccagcatactgtgacttatacggccagtaattcagcgcgtttcctcaagctttgggagacgtga

SEQ ID NO: 434582 - DNA, 747 bp, Serratia marcescens
atgatgaaacgttttttgttcgtgaacttaactgtatttctattctttacgcgtagtgccctcgccgtggaaattacccaaaaagtagagtcttactcaattgggtttggcgcgacaagaataatttatgccccttcctcgaggggggcagatctccccgtgtggaaccctaacgattacccaatgttagtgcaaacagttgtgctcaatgaagataaaaagggaaaggcgccttatatcgcaacccccccgctctttcgtctggaggggcatcagcaaagtcgcatacgcatcgtgagattgggtaatgtcgtcgatagtgacagagagacgctgcgatggttgtgcttgacagggatacctccggagtctggagatgcctgggcgatgacaacagatagtgtagaaaaacgaaaagcggtcacattggatgtgaaagtcaagatgacgcgctgtattaaacttttcgaacgtccagactcacttaagggaagttcgctggatagggggggggaattagtctggcgactgcaaggtgatcggttgatcgtcgataatccgaccccgttcaacatgaccctggcatcattacatgtcggtggtagagaaataaccgtgtcagattacattccgccattcagttcaaggacgtttcactatccaaaaggaaatgggaatacggtgcagtggacgctgatttctgatttaggtggtaaaagcaaggtgtattcctcctccttaaagtaa

SEQ ID NO: 434583 - DNA, 2508 bp, Serratia marcescens
atgaaaacaccatttcctttatatctggcagggttgatatttatcatttctaatgctgctctcgcaaggtcgtacacgtttgatccaaacatgcttggagtgcaacgagacaacatcgatatagacttattcaatcaaggagggcaacttcccggtacatatatggtggatgttgaggttaatggtgagcaggtagattctcgtaatgtcacttttaccttgcaacataatgagctgggtagtccatttcttcagccttgtttgagtgtagaggatttgtctcgctacggcgttaacgttgagaattacccggagcttaatgtaaagggggggtgtgcaacgttgtcggcaatcccacagctcacctataattttcagtttaataatcagttgttattactgagtgttccccagcaaagtttgcggaaaaaaataacaggtattgcatctaaacaattatgggacgatggcataccggcatttttattaaactacagtgccaacacaacccgaacggagtaccgcataggtaccggttatcgtgcagactccagctatgtgcaacttaatcccggtgtgaatgtggggccatggcggttgcgtaatcagacaaactggcagcatcaaacgcaaggtggaggaaaatggcaaacggtttatacctatgctgagcgggggattaacggtatggagagtcggctgacccttggagaacgctcaacacccaataacgtctttgatagtgtgccgtttcgcggcgttatgttggggtctgatgaagccatggtgccatacaatcagcgcgctttttcgccggtcgtacgaggcattgcccgaacatcagcccgggtggatgtaaaacaaaatggctacactgtctatagcgcgatggtgcctgcggggccgtttgcattagacaacttctctacaccaggatcctctggcggtgacctggaggtaacggtttgggaaactgacggtagaccacaagtttttaccctaccttatcaaacccctgccatttcattgaaggaagggtatctggaatacaacctgatgacgggacaataccgtccagcctattcgggcattgatacccccttgttggcacaggcgacggtgatgtacgggttgccttgggatgtgactgtctatagcgggctgcaaggagctgagcatttccagtctggagccctcggacttggcatctcactgggggagtggggggcggtatcggtggatacgatcgcctctcgcgggcagagacaacatcaaagcacggaaagcggggccgcctggcggatacgctatagcaaaaatgtggttgcaaccaataccacggtaacaatgagcagctatcaatacgcatcgccacattataataccttatccggtgttatggacacctggagggaccgtgtggtgcgtgatgaatggtggaacattcaggttgatgagcgtcgaaaatcgaatacctctctgcagctaagtcagtcactagggggctggggatacctcaatttaaatggcaatcggaatgaatattgggggcgtgcggggcacagtgattcgtatggtgcgagctatggtgtgggtttcggcggtgccagcattacagtcggctggacgcaaaacaaacaaaataacaacagcggagctcaacgaaccaacaggcaagtgaacctgtttgtcagtattccactggaacgctggtcaggaaaggaaatcaatgcaacttaccagatgacttcagcatcgcgggacggtcgtgcacaagaggtgggtgttaacggccgagccgttgaccgacagttatattgggatgtgcgtcagagtcatcgttctggcgatgataatactgacgtctctaataacagtgcaatgcgtctatcatggtctggcggatatggtcaagctggcgttaactataattacggttcaactttgcgacaaataggtgtggatgtcgccggtggcgggattattcaccgtgacggtgtgacactgggacaaccttttggggataccatcgctctggtgaaagcacccgaggcttctggcgtatctgtaggagggtggccagggattaaaacggattttcgtgggtatacaaccgttgctaacctggtgccttatcaggaaaacgtgattagcctggatccgtctactttctcaccgaatgttgatgtctcgcaaactgacacaaaagtgataccaacaaagggtgccgtctctttggccaagttcgctacgcatgtcggtgaacgcgctctgatgacactgacacgtgttgatgggcaacctgttccatttggagcctgggtcacagtcaggggctcagggggaaccggtgtggtcggtgaaggggggcaggtctatataacgggtttgcaaaagcaaggtgaaattgttgcaaaatggtcgcagcatcaatgtgtggtgagttatcgattaactgatgagcccgacgcgtctggcattcatctatgggtaggcaaatgtcattag

SEQ ID NO: 434584 - DNA, 147 bp, Serratia marcescens
atggtttgctcttggggcgcggggatgtcacatatcaaaatgaacatatcggatttcaagtttgggccgaagagcagcccactggggggcaaccgaatcgatatgtattggtggggaaaaatgatagccgacataagttatacataa

SEQ ID NO: 434585 - DNA, 147 bp, Serratia marcescens
atgcaaatggatatggatggcaggcgcggtgtgttttttttaattggcgatggacgcgtgacatttgacatcattgccgatggagagcaggtcgttattcctgatctatatgccattgaattgagggcggccgcgttgctgccgtaa

SEQ ID NO: 434586 - DNA, 531 bp, Serratia marcescens
gtgattataatcaaggttattcttaatgctattttagtttgtgggtttttatacgttcccttcggatattgcatggcgttaagtcctgtggcaaatgcccgggatgttatcaatatacgggcggaggcggctgtcattactattcatatcggtgtcaggaattcatatttatccccggtgagagaaaatgagcggcttggcagtgtggctatttcctgtgtgtctgggtgtccttcggggggcgatgagcaaatatattataaactcaccaacggattaggtgtgggtgagtgtcgtggtagaggggaacaacgcgttaattggttagcagagaatgggagtcctgtattttcaatactggtctctccgcctgctgatggctcatgccagacggccagtgggcaagagggtggtgagtggagtcagctctttgatactacgccagcggatatccctatcatcgcttctatgcagggggatacgccaggtcgttaccccctgattgttcaggcaggtttatatgtaccataa

SEQ ID NO: 434587 - DNA, 1950 bp, Serratia marcescens
atgcccatcccttcagaccctaatgcacaaaaatccacactgacggcaacgccggcctatctgttggctgacggtaaagcccagtctgttttggccctgaagctcgtcaatgctgacggcgctccgctgccaggtaaaaaggtctcctttacccgcatgccggaaaacagggttgaggccaatgcggtcattgacaacgatggcgtctacacggccacgataaaggcttcgcatgacggtggctttctctcggttacgctgggtgtcattgttgatggcctgacgctggagggggtatcaaccaccgtgcaactctacaacccgcctactatcacggggttgcgaattagcgttagcggcgagaaaaaggtgggcagcctactggcagctaagtatggcgtcgcgttgaacggcacgacaaaggaggtgtcaacgttccagtggcaacatcggcatttgggcggcacttttgtggatatcgcaggggcgacaggcgaggagtttaccccgaccagcgagttcgcgggcgaagacattcgtgtgaaggtgacaccaagaggtgaagtgccgaaagaggggggcggtatccagactgtgtcctcagacgctaccgtaaccagtgggccggtaaaactggcggataaacctgtcgaggtgttgccgccatcagtgagccatgtccacattgagggggcgccgatggaggggcagacattgacggcaaaatatgattatgaaggccatggggagggggataatcattcctatgttgtatgggggcggtctggctctaatgacggcccctgggaggagattgctagaagggtggagacatttacacctggaaaggatgaggttgggaactatatccacatcactgtgacaccggaaaaggtgactaaaaccgaaaccttgactgggtcacatatgagcagcccttctgtgttagtggaacctaaacctgtagaggtgttgccgccttcagtgagcaatgtccgcatcgagggaaaccctgcccttggggaaacgttgacggcaagttatgagtttcatggtgcaggagaggatgattccatatgtcagtggtactggcgtgaaaatgattcagccagttggcagcccagccaccgctcaggtaacaccccttacattggacaaacatttgtccctgtagatccgggctatgccggtgagcaggttcgtgttggcgtgaaagccaaaggaacactttctaatgaggtggctgaggagcagtttagcccccctgtgacaataaaaccgagcatcagtaatcttcagataacgggaaaccctgcccttggggaaacgttgacggcaagttatgagtttcatggtgcaggagaggatgattccatatgtcagtggtactggcgtgaaaatgattcagccagttggcagcccagccaccgctcaggtaacaccccttatattggaaaaatatttgtccctgtagatccgggctatgtcggtgagcaggttcgtgttggcgtgaaagccaaaggaacactttctaatgaggtggctgaagagcagtttagccccgcggtaataataaaacagaaaaaagtgcggcttacacactacaaaatatacgagccttttagtggtgctgagttatctgccaaagttgtggatgaagatggtaatggggttccgggggttgttgttgtctttaaaacacactattcgtattctgcgggcgcacttggagcggttcaacatctggagggtattgagactcacgagagaacaacaaacgaaagtggggagacaggtgaacttaaggtttcctttcgctctttcttgatatacatcaaatccatccaagaggaggataaggaaaaattacattacatggataggccggttaatggtaatggccatcttgaagcggttcctgatgcgtggcaggtcttggtcaaaatttaa

SEQ ID NO: 434588 - DNA, 210 bp, Serratia marcescens
atggagctgctggcagaatggcaacatggctataactgggagcgagctcatagcgctcacaacggtaaaacaccgatggagcgctacttcgaacttgcagagaaaacgccctactctgatgccgccaacaaaaactattacctcagcaaagagcatatacaggaacaaaattacaaacttgaactgaagaaattgaaacgatgcctatga

SEQ ID NO: 434589 - DNA, 450 bp, Serratia marcescens
atgtcagttgacgaaaaaaccattgcaaatacgtaccctatcccaacctatcggtttgtggtctcggtgggtaaagaacagatgagtttcagtactgtttcgggtctcgatcagtctgttcaattggttacttataaagatggtacgggaggtttgtttcagatgcccggccaaattgaaccattaaccattacgctaaaacgtggcgtgatgcctaaaaagagccagctttatgaatggttcaattcaatttcttttaatcgtgtggagaaaaaggatctgtccatcagcttaaccaatgagacggggtcagtgctcttggtgacctggaatgtcatgaatgcttttcctaccaagtggactgggccgagcctcgatgcaacaagcaatgaagtggcatttgaagagctcacgttagcagcagaccggctgacggtgaagtttcactga

SEQ ID NO: 434590 - DNA, 1215 bp, Serratia marcescens
atggcggtttacacagttcccggcgtgtatgtggaagagccctttggtttgtcattatctattcagactggccaaacggcagtgcccgtttttgcgtttgatagcggggccaagtgggttgatgataaagacaaagacaaggcaacggagttcgcgtcatggctggaagttagcgagtatatagacacgcattacgcccccccgaataatgacgctgagactgatgcattgaagaaggctgatgcattgaagaaggctaatgaattgaagttgaaagaaacttctcaggataacctttatttgtctctgaaactgtatttcctcaatggcggtggccattgttatgttgcccttgtcgacaagtttgaggcgctcgtgccgacattggacgatgcgacattgttagttcaggccgggacagatctaacaacgttcgtgagtaaagtgaccccattgtgcgataccggaaaatcgttatttgccttgtttgatggcccgaaaaatgaacttaaaacaggagatgtgagtaaatatgtaacagtgtacccctcaacgccccatgctgcggtgtattacccctggctgacggcaccaaaggaggcgttgcccgatgagccgaaggataagccgtatcctgaggtagacatcccgcccagcggtgccgtggccggtgtgtatgcgcaggtcgaccgtgagcgcggggtgtggaaggcgccggcgaacgtcgcaatcattggcgctatgcccaaatttaaaatctcggatgccgtggacggggagtgcaatgcaccggttgccagcgggaaggcaatcaacgttatccgcgcatttcgtggaaccggcccgttgatttggggggcgcgcactttagcggcagataaggacacctggcgatatgtgccggtgcgtcgtctgtttgatgccgcagagagggatattcgtacggcgatgagtcaggctttgttcgaacccaacagcgcacagacctgggaacgggtgcgtggtgcggtggagagctatgtgcacagtttatggcaacaaggggcgctgcagggggagacgccagagcaagcctatttcgtgcagattgggcttgggatcacgatgacccaggatgacatcaattctggaaagatgattatgaaagtcgggctggcagcagtacggccagcggagtttatcgtgctgcaacttatgcagaagataccggcctga

SEQ ID NO: 434591 - DNA, 1686 bp, Serratia marcescens
atgagtgacgtgtataacgtgccgggtgtgtatgtagaggaagttggtggactttctttgagtattcaaaatggtgagacggcggtgccggtatttgtgggcgtttttaaccctaaagtgcgccccgagacaccagtcaacgcgccggcttgcgttcggatcgacagttggttggattttacccgccagtttgcaccttcggatcggattaaggttgacctttccaacgctgataaaccgcaagtcaggggggtgtcctacatggggtcgcatagcctccgcttgtatttcgagaacggaggtggcccctgctacgtgcttgcgattgacagcgacaaagacaagcggggtaagacgctggcgcaaatcgttacagccattgaacagtgtcctgagatcacgttgttgtgctggtgcgaatatggtggtcctgccgttgataatgaggtttataggacactggactcgttattgggggcgggtggttcggcgttcgggaatgccgggcgctttttgctggcggatgcctggccggagacgacgtcggcggaggatcgaaactctccttcaaagtggacttttcaggctcccaacctgaaagcgagttcgcaggtggccagctatttcccggctctgcagacggggtacgtgcgggactataacgactatattactggcgctgaccaccctgtattaccttacccacatctggtgagcgttaagggaatcccgccggaagaactcgaacgtttaaaggaacttcttatagcgcgagactttaccgttgaagcgttaaaggcgggtgccgaggttcccttcgatattcttcaggacgccattgctaaagtggacgccaaagctaaagaagacgtcaaagctaaagaagacgccaaagctaaagaaggcgccaaaactaaagaagacgccgaacctaaagaagagcagaaactaacactgccactgttggaagcgcttgttcagcggattctgcaaacacttaagaatgaactcccagatgtgacaaagaagagtgcgccggtggtattgcgcgctagcgtggcgatggcgggggtttatgcccgtgttgaccgtgagcggggggtatggaaagccccagccaacgtaggtgtctttggcgtgacatccctggtggctcagggggtggtggctcagggaggaggggggcagggtaatcctgcaacacttacaaaatgggattctatcgcccctgtagggcttgacgatgcgatgaatgagaagttagtcaaggatggtatcaatgcgatccgcgcgtttcgggggaagggcactctggcgtggggcgcgaggaccatgcttccatctgaacagacggactggcgttatatctcggttcgccgtttgttcaatgccatcgaacgtgatgttcgagaggcgctgcgtagtgttgtgtttgaaccgaatggcgcgatgacctgggagctggtgcgcagtgcagtcgaccactatctcaatgcattgtggcgcaagggagcgctgcagggcgatacaccagaacaggcgtactacgtgcagataggactcgggatcacgatgagccaggttgatatcgaccacggcaaaatgattgtaaaaatcggtgtggctgcggttcgtccggcggagtttatcgtgctgcaactgactcaggacgtcggagcccgttga

SEQ ID NO: 434592 - DNA, 1254 bp, Serratia marcescens
gtggtggaaaaagaggataagtggtcggcgccgggtatccgattgtcgtcgtcggtgaggacggaagacgacaggagcggagagcagccgagtgcgatacccgtatttattgggtgggacaactcactagaattcggaggaaaagacgcggagtggagcgcgtccttagtgcctgtcgctacatgggaccaatggcctgcttgcttcagaaaagaagagggttcgtgcctgcaggaaaccgtgcggcattattttgacaatgggggcgacaaatgtttggtcctcatggccaaacagcctccacttgagtcggcgctaaccgaggagtggtggcgcaaggtcagcgtgccgttgttacaagagccgaccatcactctggtggccgtaccacagttggccgaacacctggaggcgaaggggggaaaggaagctaataatagggcgattgcggcggaatttatcattcagtggcattacctgttaagcgcctgtagcaaacggcacgacctgttttttgtgctggatgcccccaggtgtgtggatatcgccaacgagtgcattaggcaattgcgtgataagccgggattgggggaaggagcgatgcacgtggcactttatggtccgcacttggtcacggattatccttctggtctggagaagaagctaccactgacattgcctccctgcggtgccgttctgggagtctatgctcggactgacgtggcggagggggtatggaaagcgccggcgaatgaactgctacaccatgtgatcaagccggagtttgacgagacccacacccatagatggtttgacgtcgagcatgagtcaatcaatgcgatccgcagttttgcggggcgcgggacccgtatttggggctgccgcacattatctcatgggacgccttttcgctatgtccaggtccgtcgtaccgtgacctggatagaagcgaatctgaaacagatctgtcgttttgccgtgttcgaaccgaataacgaaatcacctggttccagatccgggggctgtgccgagcctggctgcggcgactttggctagaggggggcttagccgggacggatgagacggatgccttttctgttcgaatcggcctgcatgagagcatgacggcggacgacattgatgccggtcggttggttgttcagatcgaagttgcggtattgcatgcagccgaatttattgaggtgaagttggaattactctcgggtcacgcgcaggggggggaaacatcatga

SEQ ID NO: 434593 - DNA, 381 bp, Serratia marcescens
atggatgcgcggtttgcacgtgtctcgggtttaggccgtgagttacagaccctgcaattacgcgaaggtggagacaacctgggggtggtcaatttggcagaacgtgtgacgcatggcacgttggtactggagcgtgggttgacgacggtgacgccactgtctgcgttgtttgaattggcgctggggcaatttgtcggcacctacctgaatgtggttatcctgttattagacagtcagtcccgcccgctgtgcagctggaccctgacagatgcgttgccggtcaaatggagcacgggagatttggatgccacggggaataccgtattgattgagacgttggaactcgcgtatcacgaaatgcactggatggggaggctctga

SEQ ID NO: 434594 - DNA, 171 bp, Serratia marcescens
atgctggaaatccgagagttggtgattgaagcgcgggttgttgatgatacaccgtctggtcgccagaacgtcgtgaggcccgacgttgcggacgtcgagttggctcgttgggtcgagctgataagtcgacgtgtgctagatgtgctgcatgaacaacgggagagagaataa

SEQ ID NO: 434595 - DNA, 669 bp, Serratia marcescens
atgggattgctagagcgcggtttggcgaagttgacgttggacgcttaccagggcgacaaccaggaaaagcatatcggtacgtttcctgccatgtataacccagagtcggtgagtttggattaccaagcggactataaaacggccgcgggcgtgaaccagcatcatgaggtgagctggtaccaacaggtacagccgccgacattaagactgacgctggttttggatagccgagggccgcaaggcgggcaaccggtggaccaacaactgagcactttgcggcagctttgtttcactgttggtaacaagggggaaccccccttcctgcgtgttaactggggcagtatgagttggcatggacacggttatttttcaggacgcttaattcatttggctatcgcgtacaccctgtttgatcgcaatgcgaaaccgttgcgcgcgacggtgacgctggtgctgagggcgcaaaccagcgatgagatggccaaaatccaggcagggcgagcgccgacgcaaaagatactgaaaattcttgataaaacatcattaccacaactgttggctcaatccgcggtcgcggcaggtagcgcggcatatctggccacggcctatgccaatgatgcggataatttgagcggctttatccccggtcagacgttgctctctcgctaa

SEQ ID NO: 434596 - DNA, 2199 bp, Serratia marcescens
atgtcattcaaagaccgcattgaccatgtgatccagatgggcaaagagttgacggagtcggttggggtcacggagctggctgaggtcgttgtgggggctagcgccttgctggcgcagactgaggccggatgggcgagcagcgtaggtcatgcattaatgcgaagcgagggcgctctcccccatcatcagactgcctcgggtaacgtggtgacgcaagcccctgtcgccgtggatgtgttgataagggggcaagcgttaacgtcagcgttaccgtctgtttttgtgacgcaggcacagactcgccacgcggtcaatgaactcccttcggcgacgttgctgttgagtattcctcaggccccgccgggaggatatgtaacgctggaacaggtgatgcacttgtgttctgtcgggagcccaagcgtgttgaaaatgtcgggcgcgacggtgtttgacggcattgtgggggcggtcaaggtgacgtcggatgccgcaggaataaaggtcagggtacagctgaaacaccgtttgcagatgttgaaggcgacgccccgcagcaggatttggaaggcccagaaggatgagacgctgctccgtgaggttttgcaggctcatcagatccacgtgagcggcgctatccagttggctggcactgaggttgaacagcggtttcagtggaactgcacggactggcatttcctgcgcgcgatattggggatgcacggtgcctggctgtggcccttggcagagggcagtgtggggatccatcgccctcggttggggggaaagacgcacgctatatcggccaaacccggtgcaggagagctaatgcccttggaagctgaatggtattactcggggttgacacaaccgcgaaaactgacgatgcgcagttgggatatgagcaaacaggtcgtagtgagaatgggggcaaagtctgtggtattgggggaaggggggctagtaccttcgtcggtgaaaccgctcggggcggacggtgacgcgatactcatgggaacgtggcccggtccgttgcagcaggcagccgtcgatgcctggctgcttgcacaacaggcgcaggcggtcagggttcgtttaacattacccagcacaaccgcgtgtcaggtgggagatacggtatcgctgaaagggttcggtgggcacctggatgggaaggggatcgtaacccagattgaacacgagtgtgatgtggacaaccgtgctggcagaaccgtggtgggcgttgggctggatgacgcatcaatggcgccgtcgttgccactcccctccggtctggttatcgggcaggtggcgtcctatcagacagatcctcgaggaaaagcctggaatcgagtgccggtgaaagtgccggtgttgggtgcagaagtactctgggcgcggatggggcacgtttatgccagcaagcacagtggcgtgaccttttaccccgaagtcggtgatgaggtcgtactggggtttgacggttctgggccggtgatcctgaatgccttgcataatccgcaacggccggcggctatcgacccggatgcgaaaaatgtgaaaaaaggggtggtgctgcgacataacggtcagcgtattgaactgagctttgagcgtgataagtcaaccgcgacgttagcgctgggagcagataaaaagccggaacaacagatggtgatcgacgcccaggcgggtatcacaacgtcgagcttgaaaggggatctcaccgcagaggtgaaagcaggctctgtgaccgtgaaagccaaacagaaggtgacggtggttgccgagtcgacaatgacgctgacgggacggcagggcgtggtggtcgacagtgacagaaatgtgaaactggatgcgaaggaacatctgacaggactgggtaaagcgagtgtgaaaatggccagtgcagaaggaaaactggcattgtcaccggaaaaggctgacttgtcagccgggcaggtccaggttacggggcagatgagtgtgcgtattaaggggaatgaggcggtgacggtgactggagcgaaagttgacctgaccggtcaggcgaaggtatccctctctgccccggcggtcagtattgatgggacggcagaggccagtatgaaagccccccatgtgaaggtcgctggcgaaatgacggatgtgggtggcgcggggatcacgaatgtgaagggcagtctggttaatttgggctga

SEQ ID NO: 434597 - DNA, 279 bp, Serratia marcescens
atgcgtccggcctatggttgtgatatgcattctttcatgttcgccaacctctccgaagggacgttggctgccttgcgcaaccggattgctgagagtgtggcacgtcatgaaccccgggcggaagatgtgaccattgaactgcaggaagtgaagcgacagtggggcgcattgcgtatcacggtgagatatcgtctcgcgggacaaccccagcaagtttcgggcttgatgcagaggctggaaggaacggatggaggtactacgtgggcgctctcatcgtag

SEQ ID NO: 434598 - DNA, 324 bp, Serratia marcescens
atggtgaacggtaaaccggggtgtgtgatcggggatttggcgaaggtggtggtgccgggtattccctatatgaccgggagtttttcggtgcctggcgtggggatgatccaactggtgatggcgggagctgatcaggtggctcacaaggtgttgagtggtatgccggtattgctcaagggcagtgagtgtcaggcggtatttattcccacagcacccgcgatggcgccgagtcttacggggctgataccggacccaacagttggggtgccaacgcccggacgagggcagttcatagtgacacagttcaaggtaatagcgaactga

SEQ ID NO: 434599 - DNA, 3594 bp, Serratia marcescens
atgactgatgacacgaaaaagttggcagggatgacggcgacacataacgcacgagcgttcgagctggatgaccgttcgattggggatcgattggatgcctttcgaaagtattgccagcacttgccctataacgacgctagcggtagtttgccgacggcaaactgggcacaggtgatttttgggtatgctgccgggatgtatgcgccgcttactgataaatggcatcaggctagagaggacgactgggcattcgagcgagaacggttagtgcaattgtatgagaagccggagttggctgatgggacgttgcctcctgagcgcgctttcttgctgggactattaggcatgctggagacgccccgtgccttgtttaatcaatttccggcacaacaccgctcaatgtactaccaacagatgctggcgcttgaagcccgtcaggcgaaggccgatcaggtgacggtgcattttacgttggccgatggcgttcgggagcaggttttacctgccggattgcggttggaagcggggcaagatagcgcaggcaatacgctgcagtatgcgctgatgcaacctcttacggtgaatatggcacgggtcacggatctgcgctgggtcgttgccgatgcatgtacgccgggaggttatcgggcgcgggtcgtatttgatgagagcgcagagcaaccttggccagtggatggtgtgcgtctgtttggcgcctctccggctcgacctggagagcaggctagagcggatgcggatcgcgttgttgagcatggacggatcgtcgagtcatcagtcctgagcgttgcaggaggggagcgaacgtggaccgtagtgctcaaaaaagccttgccgggtgagtctttgttatgcgcagcggtgagtatggaagaggcctggaaggcattgccatgtgtgtcgaatgaatcgcggaaagtttggacaatgaccttaccgccggagggcggtatgccgacgccggtgacgacgctggatggtctgacctcggtggcgccgttactgcggttgtcgagtaccgagggggacgcggttccccaggtagaatgtctcaagctgcaggtgatgggggcggtcggtgtgctctgcactcgcgatgatggcactgtgctatcgggggggggattaccctttggcgatgggggaaaggttggctgcggtgtcaatttgatgtcgccagagtggtggcggttgggacctaaattgacacaggtaacgtgcacaccaacctgggcagggttgcccacgacatcgtttttggaatggtatgggccggacgttacgcaaaaggatgacgattggttgttgcttgatcaagatctgaacgtgacgcgtgatcctgcaaagggaaagagacctaaggccctaaacgagcataaggccgatacgttggccagtcgtgttaccaagaccaatagggacgaaattggcacacaaatcacggctgatcgtggatatccgtcgattaatcgattgagcgaatctaaaaatagctatttctccgttgaaagcgggttgatacacgcggggaagatggtctctgaggcgcagtcgttgccattatttggtggggaaaagcaacctgagggactgccactgagcatgtcattgaataacgctccttctgctctgacgtcaaccgtgccagatgatgaagatccggcttgctggccctggtatctgcggttgcaactgaaaacctcattctttcacgatgaatatgatgcacatgaggcggcacctttgcaaatcgtgaggtttcagacggaacagacgcatgtgcaacgggttccggtcctaaagaaggaccagaaggaccactgggtgtatgagatggtcgaggtgggggacaataagctctcaatgcccgcgatgcaggaagagaacgtgacgtttgtcacaccggtgccggtcacggtaccgaaagcacggtggcatctgccgtataccccgcaatgggctggcatgcggattgattaccaggcgattgacaagcaggtcgatcagcgggtgatcctgccctttgggttctccaggcagagtgaggtgcaagaggcgttggctgaggctgaggtgtatctcggtctggaggggatcgaagctggtcagctgttgacgctgcactggcaactgaaaagtcccggtgcattcgtgctggaatggcaatacctggctgtcggggagcgctggatgcgactgtcggtaaatgatgccactgacggatggcaatcaagcggcattgtatcggccgactggccgggggatgcttgccgtacatcgacctgtctgccggcagggcggatgtggctccgggtacgcgtacagcaattgttaacgccggatcggaatttggttgcgctgccaacagccccttggttggccgggatagcgaccaatgctggtttggctcgattgcaagatgaaactcgagtggctgaaactcactttgcggccgatttgctggaagggagtatcacgcaggggctggatatgccggacacggtgcaatcggtcacccagcgttggtgttcttttggcggttgtgcggctgaaacgcatgcggcgtttgaggcgcgagtggctcgtcgattacgtcaccgcgagcgggggttgaacaatcttgacctgatgatgttattgcaggcagagcatgatgggatccgggaactggcggttttaccttctgcagaacctgagctgaatggctcgttgagacaaaccatcgtggtgatgccaacgcaggcatggagtgatagcgcagatccctaccgacctggattgggtcagtcgcatttgaacgatatggcaacgcggttgaaggcagtgatctcgccttggctgacgttggtgtgtgtcaacccgaagtatatccccctcagtgtcagctgggatgtcacgtatgtccaagggatcagtcgatcgacggggcatcagcgggtgcaggcagcgttggaggccgtctttttaccttgggtgcaccctgccgataacgcgccgttgtcggtcattgggcgcacgataacgtatggggcggtccacgatgttttgcgccagttgcctgaggtggcggcgatcaatcatgtttacctcaatggtgacgatcagaacccgcctatgctgttagcggggcagattgcggttctgtcgtgcatcccgctggagtataccggcctgacgctggcctggaaggggctgtcacaagccaggttcggcgaatgccggttgaaaagaggtggccaagccattgtgcaattgaggatgccaacacggattgacgcgtcttctgcagaggcttatctgattgacctggataccggattacagttgtcggacaagatgacggtgacgaatttgttcgaagaagataagccgaaagacaatgctgaagaccaaaacgtatatgcggatccgcggggatgcatactggatggcaagagcataacgcgatatttcaaggtcgatgtgcctcgcgatgtctgcggcatatttcgtattggggcgcacctgacggttggtcagaagacattccagtcagcgagcatccgggaatgtatcgttctgcattgtgcgcgttga

SEQ ID NO: 434600 - DNA, 3597 bp, Serratia marcescens
atggcagaaacttccaaggtcgtaccaacagcggtgaccggagtgagtgaggcggtacaggaacagatccactttgacacgctttgggcgaccacgcaaagcgcgttggcactgtacgcggggaaatcctggagtgcgcgaggagaggatgatccgggggtgacgttgctgcaggcactggcctatggcgtatcggatatcagctatcgacacaccctgccactgcatgatttgttgactgaaaaaaacggtgacgagcatgcccccctcttccctcctgagtttgggccggaatgggcgctgacaagcagcccagtgaccatggaagattatcgtcgagcgatcctggatttggtgccggaagacgataagaagaacggtgatacggcgcgtttttgttttcgcgatgtgcagatagcgccgctgccgcctgagcaaagttatgaatatgtttatgacccagataattatgcttttcgttttgcctcattggaaaagccagctgacaaacagagtctctattatgtcgctgggcactatcagttatgggtcacactgacacccggaatggaagagaaggtggctcttcaggccttgagcaatttcctgaaaaaacaccgcaacctgtgtgaatgggagataacctcgccgtgtgttgttccagtcagagtgcaaacgcccgcttttcaattggtgttggaagacgatcagttggtggaggttgaggccatagcgaaggccgttgcccaggccatttttgcgatgaaccaggtcttgttgccagcaccggaacgtaaacgggcagaggccctgttgaagcagggggagagtgccgagcaaatttataccggtcctcgactgacacatggctggatcccccatcttccccctgagcggccggtttctacgatggtgatgttgacgttggaggggggggctgacgctttgacgccgggcatgttgattgaattgcagaggacaggaacaccccctcagcagcggtcttctcttgtgatccataattctcttgtgatccataaagtggaggagcacgcagtttctattcagttagaacaacaggcttggttggaagtgggcatgtcaatgccgttgccaaaggatgttcattggcattggcgggtgaaaggggggagctcctggcccgccgatcaagttgtggtgtcttttgagccaaaaagtgtgctggcgacgcgcaatgttccggtccattctctgttggctgcagtggtgggtaaggtacccgggatctgtgcggtcaattgggaagatattacgcctatagaaattgccgagggtgagcaaacgcagctgtggatcaaagatgagggggcgccacaggcgtctttgagctcgggtattaaaatttacaggcgtggtcagttggttttgaattgggactcggaaaaagtcttggcccaggaatatcagcggttgaatgacgtggcgtaccaagccaaagtggatcctgtccgcaaggtcctcaaaggacggacgcgcaatccgggattctatcgtacggtgggggcaagtttaccggcggtatatggtttgcaacaggctgcggaaagagtagctgatgacaaagatgctgggcgtttgttgcagtttttacgcccctttgagcagtgtctggccaactgtgccgatcaactgaaaaaattaccgcggttactggcgttcgatgggcgagatcccagtgcttccatatgggggggcgctgactggccgaatagccacgatgacgctctggcctgtgcgcagacgcagcaggtatttggtaaatggtttcggaagaacatacggcacattgtgtcgacacaatcgaaggatattgaaaaggaactggccattttggatcacctgttgggatactttggtgaacaacgggcttctcgtgtgttgaatatggccactcagggtgagccggaatttttatatatacagcaggaagccctgcggcaggtgacacgtttagcctatgggcgtgccgtcatcagtatcaaccatgtgtcggcgttacaacgcaagatagccgcccgactgggcattgggaagacgctatttgaggtaggtctgcaaggcgagggggccttctccggcaaatctctgccgttttacgtgatagagcatcaggaattgctgcctgttgctccaaagcctgaaaggctgtctacgccctggccggccgatcaaatcgtgaagtcttttgatgaaatattgacgttgacgttgcagggaccgatttcttctttaacgtcaggcacgctgattgaattgcagcgggagggtgagtcccctctacagctgtcttctcttgtggtccatgaggtgaacgagaacagggtctccatcctgttaaaacataatgctgagttgcgccagagcatccccgcgttgcaggacaaggcggcacgctggcattggcggagtgcgggggcctgctcgaaagagcaaactgtggtgtcttttgatgagatattgacgttgacgttacagggagagaacgccccgttgacaccgggcatgctgattgaattgcagcggaaggaaccgcaccacctgcaggtatcttctcttgtgatccatgaggtgaagaataacacggtttcgatccagttaaagcaacatactcggttgcgctcgagcattcctatgctgcagcaaaatcaagataaagttgtgtggaattggcagatagcgcaggtttggttgaggcgagtggtctatgatctttccttccagaacaccccagaaaaggatcagtcagatgtggtactgaaggtcagtccctccttcccgaatgagttggttgagaagacccgttttgcactgcgtccgaaagcgcgttggatgacctggccaactcaggctgatttggttgacaataaggccgctgaaaacccggatgtcgtggttgaagtggtgaaggctgatccattcagggggacggtgaaggtcaagtggatccgccaagagtcagcggagagcctaaagacgcagagcccaacagtggcccctgtggatgttgatgaaaccgttacggaagctacaaaaggagtgaccccggactggtcggtgacgcagaataagtccttcccttatgcctggtcggtgccttgcaaacgcgagagttttgcgttcaccctgagtctggtgttggatcgttcatggctgaaagatagccagacaccggaagagctggatcgatggattacgcaaatcgcccgtgaggagatgccgagtcatctcaatttacaggttcattggttggataaaagcgacttcgatgctttttcgaataagtattttctatggcagaaagacgggcgacctgtcggcgatcattcgtacgagttgttgcgtttgttggggataggcgaacgccctgtcgatggacgaggggggataggctttactcagattgtctcagtgggcaagcgtgacgaaattgaaaagcggctcaatgaagagcaagaaactaaggataaagagcaaaacgctaaggataaggatcgtgataggttgcttcaacaagagggggtcgtttatgtgcgcggctcgggcatgacgttctga

SEQ ID NO: 434601 - DNA, 1632 bp, Serratia marcescens
atgcaaaaagttatcttggcgcgattgcggttccggttgcatacgcaggagcggcatgctgaggccattcaagcacgctgcagtctttggttcagggatgaactgatgcccgagttgcggttgctgtttgccgattgtgcggggggagagggagagatgcgaacggttgaacgcttgacggtgaatgtgggggaggtccccttgtcccagttcgagtcaatcatgcaggcgcgcatccttacccaattgaaagaacaactgattaccacagcgaccgtaacagagaaaggcgggagctggggtgaggaaatgacgctatcgacgtctttctctcaactgttacattatctgggtacgggcgtggtgatggatgctcgcccgtggttaaccctggctgggcgtgatgcctggctgcgtgagagccttgatatggcgacaccgatgcaggaaggggggaaacgtcttccaccgcgcatcgcattggccgtgcaactcctgcaaccgcgagcgtgtcagcgactgataacaacttggccgggcccggtcttgagccatctggcggcctggctattggcgccgcgtcatttgccgtccatgtcgctatccgatgcagtatggatgttaccactggcggcactgctagcgttgcgccaccatccggtggaaagtgactacgtgtgggcgttgccagcgatgcctgttgtcttgtcagcgtcagtgccgttttctacgttagagtctggtgttgatcctgtgaccgagtctgctgtggcgacggtaggtacatcggccatcgaagaaagtgtctcgtcgatggggaggcgtctctctggcattaggacgtttgaggcctggttggttgcgttgtttgacggcgggctgccgagggatttacggggtgtcttgatgggatggctgtgtggagagccgctgaatagccgaccgccagcgacatacatatcagggatatcggcatcggtgcgtcgccaactgcaggatgtctgtgagccattgttaatgtcgacaccacgtccgcgtgttctgacatcggatgtgcgttcaaccgaacgtgtggcgcttgccggtacggaacgtgctatgccccggcccggggcgaagcgagactctgagtctgatgagcctaggattgtgccgggggcgggagtggtaatgctctggcctttgttgccaaatttgttcagtcagtgtggttggctcgaagaggggcattttgttgatgacgaggcgcgctggcacgcggtggcgagcctggattggttaacttggggtaaggagccattggcggaatggcggactccgtgtacccgattattgtgcggtattgacccggatgtgccgtttgacgctgcttccccctcagtcctgcgtcaggccgagctggatgactggttgggcagggcgttgctgacggtacccctgttagaccgctgtagtggcggtgatttgcggagctttttcctgcagcgcacgggaacgcttattaacgagcctatgacattagcggtcgagccggctgctccagatgtcttgctgagccatttgccatggacactgacaaacatcatgttgccgtggttatcggtgcctattcgtgtgaactgggctatatga

SEQ ID NO: 434602 - DNA, 1359 bp, Serratia marcescens
gtgaagcgtctcagcctgcggctgcgcctgatcctgatcttcagcctgctggcgctgctgacctggagcaccgccagcgtggtggcctgggtgatgtcgcgcaacaccatcaacgaagtgttcgatacccaacagatgctgttcgccaagcggctggcgaccgccaacctcggcgatctgctggccgatgaaagcgcgcgcagcctgccgaaaaccaagaagctggtgcaccacggcaagcgcggcgagcaggacgacgacgcgctggcgttcgccatcttcgatcgcgacggcaagatgctgctcaacgacggcgagaacggcgctgatttcctgtttgacggggagcgtgaaggttttaccgacggtgagcgcaaaggcgatgacgacagctggcgcctggtatggttgaccagcccggacgggcgctaccgcattgtcgtggggcaggagtgggattaccggcgcgatatggcgctgggcatggtgacgggccaattggtgccctggctggcgacgctgccggtgctgatgctgctgatcgcgctgatggtggggcgcgagctgcggccgctgcgtgcggtggccgccggtttgcgtcggcgtgcacccgatgacgccacgccgctggatgcgcgccaggtgccgaccgaggtgcgcccgctggtggatgcgctcaatgcgctgttcgctcgcatcaacgctttgctggtgcgagagcgacgcttcacctccgatgccgcgcacgaattgcgcagcccattggcggcattgcgggtgcagaccgaagtggtgcagttggcgggggatgatgcgccgatgcgcgagcacgcgctggacaatctgacggtcggcatcgatcgcgcgacccggctggtggatcagctgctgacgctgtcgcggctggattcgctgtcggatctggccgagctgacgccgatcgactggaacgatctggtgacgatgaccctggcggaacaggatcggcaggcccatgcggcgggtgtgacgctgcgctatgaacatcggggaacgccaccgccgcgtcagggggaaaccttgctgttgtcgctgctattgcgcaatttgctggacaacgcggtgcgctataccccgcagggcggcgtcgtcaccgtgacgctgagcgaacgttcgctgacggtggaggacgacggtccgggggtgaccacggagcatctggcgcggctcggagaacgtttctatcgcccgccgggacaggaacaaaccggcagcgggttggggttatcgattgtgcagcgtattgccggcttgcatggtctacagatcggtttcgccaatcgcccggcaggcggatttgttgcgcggttggcgctgtag

SEQ ID NO: 434603 - DNA, 816 bp, Serratia marcescens
atgaagattagtcttgatttggtcgtggcattagatgcaataaataaatttaaaacactttcttgtgccgcaaacaaattatgcaaaaccccatccgcacttagttaccagattaaaaaagcggagtctatacttggggtagtaattcttgacaggaaacagtacagaaccacctttaccgatatgggacgacttattctagaagatggattaaaagtcatcaaagcagcaagggaactagaatctaaaattgaaatgtcaaaatttcatggtgatcttacgttaaaggtgcttatatctaatcgcctcccagtcatgcttgctaagtgttttatatctagctcacgtagattacctgtcatagaagtcattttttatgattctgaggatatgattaatgaattggatcctgatgtggttttgagcgctcgaaaagagtctattatgggttttaagatgcttcatatgttagaagggacaatgtttcttctctcaccagaaaaagtatttagctctgtaccatatgtttctctcagaaacgaagatgttatatgtgatgctagctaccatcgaaatgtagtaacatcatctttctctgataaatggagtctaatgcaattattgcctgcatctggagttattcctgatattttagtgagtgagtttatgaaaactaatagtttcataagcaagccaaccaatcttacttactcatattctgtatgtcatcgagaaaatcttcgggatgaatatgtcaaacacctcatttatatggtaaatgatttacctaaaagattaatcggagcaaacgactga

SEQ ID NO: 434604 - DNA, 966 bp, Serratia marcescens
gtggggtcagtccaattcaccgtcgcggaagtcaaaaataatgaggtcataccatacccaaatgcgaaaattaatgaggcagttaatagccagcctggaagtcacttcctgagcgtacaaagtgttgtggccgatggacagggaaaactttgggtgttggatactgctgcgcctaaattcgctaaacccgtggacggtggtgcaaaattagtggctatcgatctgaataccaacaaagtagtcaaaactatcgtcttacataatgacgtgatcctgcctaccacatatgttaatgacgtacgttttgactaccgagttggtaaagcaggtatggcttacattaccgattcatccttatctggtactggtggcatcatcgtagttgatctggattcaggtaaagcggtacgccggcttaccggtgatcgttcaacgtcaccggagcaaagttttgtaccggtagttgaaggggaaactcttctgcagcgtaattcgaatggggatactgctccatttagcgtggcttctgacggtattgcattgtctgctgacggtaaaacgttgtattacagccctctttcggggcgtcatttgttctcgatctcaactgaaatgcttcgtgacccgaatgtgtctgagcaacagttgtctgcagcggtaaaagatctaggagagaaaggggcttctgatggcctggaagctgatgcaacaggtgccgtatatgccggagactatgagcgtaacgctattcgtaaaatggataaaacaggtaactggacaaccattgctcatgggccgcatatactctggcccgatacactttcgattggtcccgatggttacctgtacttcacagtgaatcaacttcatcgtcaaccaggtttccatatgggtaaagataaacgacagaaaccttatgcattactcagggtgaaaattaacgccgcaccagcgagtaccaaataa

SEQ ID NO: 434605 - DNA, 771 bp, Serratia marcescens
atggaatacgtggcttttggtgatgagagtggtacgacagggagtgaccgctgttatggcattggtttgctgtgtgtgcgtaaagacacgttgcacatcttcaatgagcgtgtccagaagctgaaagataagtacggtattgtcggtgagttgaagtggtctaagataaagaacagcgcagggcaggcaaacatctgcattgagctgctggctatggtgctcaagaactcgtgctgcttccactcgattgttgtagtgaagaacatttacaacaactggctgacggacagggagctggctttctaccagacgtacacaatgctcgttaagaacgttgctaagcagattaagagtgacattgaggtcatcatcgaccagaagattgataagtacaaaaagaacgatgaagttacgggtattgttgctaacaacatgctggctagggcagggatgaagaagttggttaagtctgtcacgatgcacgactctaaacatcatcttggattacaggttgtagacatcctgaccggggctgtgaactctgggtacttgaagtaccttaatcctcgactggaactatcagtggctaaagagctagcctttgaacgcatggctgctctgcttggctgggatatgttctactacgatacattcccgaacaaggattttaatatctggcacttcccgcaagagatgcgagctatgcctggttcaaagagtatccgatctgattatagtgttccgttggttaaacgggaagagctgtcctaa

SEQ ID NO: 434606 - DNA, 369 bp, Serratia marcescens
atgtccgacatgattgccctgatgaatagacttgcggtgcaagagggatacaacctcactgccctacctgatgtgcgaattttgcgttccgatcgcccgcttgccagaacgccggtgctgtacgatccggggatcgtgattgtctgccagggcagcaaacgcggttatttcggtcaacagacctatttatatgatgagcagcactacctggcggtttcggtgccggtgccgtttgtgatggaaaccgacgcgtcggcagcacatccgctgctggcgatttatatacatctggattttcagcttgccgcggaactgatgttgcagattgaacaacatggcgccccgcatcggcccggcgcgggtacgtga

SEQ ID NO: 434607 - DNA, 1275 bp, Serratia marcescens
atgagcaaaaaactgatcggtactcttatcgcgttggttgccatcttctctttattgattttgttgattgctattaacttcggtggcgtaaaagagcgctataagcagatcgagcccaatctggacaactactcggtggccgagatcctctttctggcgtttgaaaggaccaaaaccgcgctgctgctcagtgaaaataacgactacgacgctttcctgatcaagaagaaaatcttttactcgaagattcagatcctggagagccgttcgaccttcagcgactctttttattacgacgacgagttcatcaagaatgttgcgctgctgaagcagcagtaccgcacgttggacgatctctccaccggcttgctggtggggcagaaaaacaaggcggatattctctcttatatggatgatatcgagggcacgctggtcgatatccaggaaattatttatcggatacagattaaaaactttaccgaagtgaaaggcatcatccaggacaactcgagtaaagccgagatgtttgccctcttttcgctgattttggtgttcctgatgatgttcctggtgctgagaaatgccttctcgttaaaagagatcatcaagaataagaacatctttatctcttccatctaccacgagatcgccggctcgactcaggccatcgtcattgctgcggatatcatggagcacgagctggcgcaggaagagttgaaaaaagaagctcgcctgatctcctatcacggcaataagatcaccgaacaaacgcgcgaggtgatggattattcgcggctagagatgggggaggtcaaagtgaatatatccaccttccgtctgaatgagatggtggacgatgccatgaccagtatcagcgccgggcgcggtaatcgcatcgtggtgcgtcgttcatcctatgttggtttgatttgctccgacaaatataagctctaccgaatattggccaatctgctcagcaacgcggacaaatttactcaccacggtgcgattatcctcaatgtgaaggtgtgccacggcaatctgtatttatgggtaaaagacaccggcatcgggtttaacgtcgataatctggaacgattatataaggcgttcaatcagggggtggaaagggaaacgcgacagggattggggctggggctgaccattatcaaaaattacgtcacgacgatgaaaggcgccatcaaggtcaaatccgtcgaaggggttggctcgtcgtttttgatccgcatcccggtcaaactaattaaagaataa

SEQ ID NO: 434608 - DNA, 1059 bp, Serratia marcescens
atggttgataatatcgatgtgactatgttaaagagcgcctttaaagaaggagcgacacctaatcaggatgattatgcgcagcttatagatttggcggcagtcggaagcaaggcattaggtgctaaggataaagatgccactaatcccaatccaggagtaggtctgacgctcgacgaggaaggcagactcagcgttaaacccggcctgggggtgaaggttgatggcgagggtgttgcggtgaaggtggacggcaacaccattatcgctacagcagacggtctggctattgcgatcgcaaaggataaagggttagacacttctgataaggggctgtacatcaaaacggcgccaggtctgaaggtagggagtgcgggactggaaattgactgtgccgataatggcgggttatcgatgcaggaggggaaattgagcattgtactggataagacatcgggactgtgcctcgataaggataacaagcagagcattaagttaaacctgaaaaaggcaaattatatcaaattgacgaacgaagctttaaccattgacattgaggctatcgaaaaaaaatttgaagagggggcatttaacgcgctgaagaaggctgtttcaggaacgacaaagagttctaggcaaattgcagatgccgacaataaaaatgacgtagatgcatcgctggccaaagaaatatcacaggaactgaataatgcttacgaaaagggttatcagacacggcgagaaaaagagttggacgttactgtaaaatcaccgggcaacgtacccgcaacacctggggaaaaggttgatcttgcaacgcatgttcaggtaacacaagaccaaacggtgtatttcattccaggaagcactcaaccagaacagtggaataagatagtcgacagcttctgctccagcggtaggttgagcctcaaagccaatgtcgggggggcgatttccgtattggtagtggttgttttatatgttaacgggttgccggatattgccgcgaaggaggtgaaggttgttgttagcgaaccgtcgactgccgcggtgaaaaaatag

SEQ ID NO: 434609 - DNA, 594 bp, Serratia marcescens
atggccgaaccagtaaaaataagtttaaccatgcttaaaaaagcgtttgatgcttggaaggtgccaatcgataaagattttgcccaacttattgatgtggccgcgctgtcattccaagcgggacacggattaaccggtggcgatccgtcgagtcaggcaaacgttgttgcagtcgggcaagtaaaaccgctaagcgtaaaacgaaacgaaaacggtgcgatggaactatcgttagacggcggtattggcatttgggttgcacagacgggggggctcagcggggcaggggacaaactgagagtcatggccaaagataacagtatcgattgtactgccaagctcaagcttggtctcaaggccactgggggattaacaatcaacggcgcttcattgttggcgcttgatcttgataaggaatcgggcctcagttgttctgatcccgataagaagttgagcctggcggtcgataaaaaagcgctcatcattgacgggaacatcctgaaggtaaaatgccggccaggtggggggctgaatattacggagggttatcttgatattgatatccaggcgattttagacatgaagtcaccatag

SEQ ID NO: 434610 - DNA, 2304 bp, Serratia marcescens
atgtctaatgccattaatatttttattacctctgatgtgggtaacgttttaaatttctctgaattaatcgaagcaataggaaaaaatgtaaagctcagctttaatttggataaaaatattcatatagaattgctttgtaagaacgtgcataaaaacagaaaaggccaaatggtatggtacggagaatcaactaagggagagttcgcttatgcaaccattaccctcgctggcgacacgaaaccacattattttcatgctcaactcatcaccgccgaaaacattatcgttgcacatttgctcgataaacaggggacggtatccatcagcatcaaagaaaaagaagaaaatcaacacagctgccagttatgcagcgttagtacccactataccgggcacataaccgactcgtcagtcaactttgctgatgcgagtcagagtttacagaccgaaacgctcagtctggatgaacaaaacagggactgggaaccctttcatggacatacagagagtgaagaaacagcaattataagaatactggccatttacagcagcgaatccaaaaaacaggttgaagagctggttggcaaagatttatacatcggcggagcaacaactggcgaaaaaatcatggagtatttcgctcagtgcgcggaagatagcacgaatatcgcctttgccaattccagcatcaatgcacaaatccatgttatccccatggaggttaaggatgtagggccgctttctggcaacctgagtaatttattaggacgtatttattcctcgccagaaatgacggagaaattagtgaggttaaagtcaaaagaaaatgccgatgtaatttgtgtattttcatctggccgtagggtggggatagaggctggcgttgctcactcaattccagaaacattttctgaaatggtggctatgagtaatgtcacaaaatcttctgaatccaatcccgcacatataggaggtttatttgctgttaatttatatgaagatcataagaacaacctcactgaatcgttactttttccccatgagttaggacatgtattaggagcaaatcatccgtacggcgtaaacaagaattatatcgctttcaagccattcattgatggtgtggcaaacaaaaatagaacgttctggatgcggggatacaatttcccgacggaaggtcgtttgagcggttactcaaccattatgggctataaaaatgaaattccatatttttcctctgcaaacaaaatcacaaacacagaaatattcttgcatgatctgaaaattggaagtgatattaccagccctgtggcctgcgacgtttctgccgggttgagagtgaatacgaaaattcttttcaaaaagtatgcctacagccacccgattgagctacatgttgaacccacacaggaacagtttcctgaaccgggtctggtgacacaagacttactgggcgatgaccagttgaagctgtccgcgcgacctttcagtcatcgagcaaatttcagtcactgggtagtgaacggtaagaatgttgacgcggggatatcggatattatcatcaacactgcaaagcctgccaacgttgttgcgtatttcacgcccatcgcttctcgctaccgagtgacttttgacttagctcatgaaaccaaaagttattttattttttatacggtttttgataacggtcaccttaagaataaacaagttgaaatcaccaaaaaggagacaatggaattttattccggtacggacattgaattaagtgactcgccatggatagaaggaatgtcatggcccaagcagtttcatggctataaaataattcctgatcaaggaaattcttttcctcttccgttcgatcagggaattccaatcatcagggtcactgagcatacaacagtcactcaggaaattggtgttgcggagtcatctgtggatgatatatttctgcttgataggagttcgcgagaaatatatgttcgtgtcattgacgaaaatggcgaggatgtgccaagggccggtttgaaaataaaaattatccagcaagatgaggcggtcagcaattcatataaagaaatcaatgataggaatttctttattttaccaaatggaaggaaggtttcatgctacgttggggtttcggatttggatgggatttgcaggatcccagaaattgatttcagcatttttgacagggaaaaggataaagatttgatgttaatcgcgacatgccagcaaactcaagagggagtagtagagagcaggaagatgtcactattatcattattaaaatcagtgtga

SEQ ID NO: 434611 - DNA, 1107 bp, Serratia marcescens
atgtacgcacaagctaaaaaaaataaggcgaaacctgctagcgatactgaagagttattggttcaacaaatgtcacaggcttcggtgtcggggcgtcaacaggctcaaagctcatcacaaatgcattttagtaatgttggtgaaagatatggtgttcagcctgattcggaatacatgaagttgtctgataggaaaaaaggtgttgtggaccgcatggttgcggatatgttgtcgtccgagacgatgtatagccgtagtgccctcgcggagggctattatgcttattttagagataaccgagaactgacgcgtatatttaaagagtctaatgtagaacaggggcgttttgagacgctttatccaatagctcaacgggaatataataaggtagtgggcactgataaatatcaaatggaacgtcagcaaaaaaggaaaaaagcagcagatgaaagaaggttaaaagaaaaaaatgagttggaacaaaagaggcatgaatatcttgatggtatgaagaacgtctggtcgacaaatgagggctatcgcgccatgaagttaatgtcggccggaaaaccgggggcaatatctgggcgtgaagtgattgcagagttgaccagaagacatggggatcaacagtttacaggtaagaatggggcgaggatagcatcatcattgtccagcatagtagggggcatgtcagtagagaaagtcagtgagttcaatcggctaatctacaaaaaagattcaggatctgaaagggaaaactacaaaaagtactacagagggacgcgtgtccctgtagacgtcattacccgttaccggcaggcgaaaagaggagatttgtttagaagtcgtgagcttatggctgtcagctcaagccagacaatggctaaaagctttatgaataacaggactaacagcggggaacctttgttgatcactataatcggatttagcgctgaacctatgggggcgtctttggtggtgcttagtgaggtggagagcctgttctctactttcgccacgtttaggtttgtcagttttagtgacaatcatctggttttagaggaaacagaatcgagtaccaaggtgaaatatattttgtattaa

SEQ ID NO: 434612 - DNA, 858 bp, Serratia marcescens
atgagcggaaaagatgtgagtaaggacaatccaaataaaggggatagaaagggtgtgtactgtccagatgaagatacattcatgagtcatatgggacagttgggagcaagggggacgcgggtaggtgatgccatgacacatgatatgcgcagtgagcattttgtgggcacgaaggcgaccctggcttaccgtcatgtcaaccggacttcggcgattactgtcgtcgattcttgccaatatggccgacagggactgcagcatatgctgatgcctgatacctctcaggatagagatatcaggggctatgctcgggtggaggaggcattctctgattggaatcctgtcgagcggtgtttgattttacgtttgccgccgaagccagccctggcattgcagcagctgttgtatttggagaataaaaggatgaccacagcagggttcctgcgtctgatcgtgctctccccctttgaggttaatgttatctgcaggcgggtgctggtgtgttgtgggatacgccaaccggttcgtattgtgtgtgcacagagtcccgttacgtggctacgccgagtggtgttatcgcaggggacgctgttgcaggaaggtgatgatgagatgttgccgtgcatgcctgcgttgagactctcttcagccgagcgtgaagtgttgtcgaactccttgaaagaaatacctattcatctgcaatctcaacggcgggggtgtaacagtaagacgttgtatgctttgcaacaaaaagccttaaggaaactgaatgtgtcggggttgcaaggcttgatgcagcgttttgtatcgacgagtcagtacggttggcttagcgaaatgggggaagggaaaagatga

SEQ ID NO: 434613 - DNA, 885 bp, Serratia marcescens
atgtctgaagatactattgtgaaggtgaatacggcgctagaagcggtgttggaaaaatatttaaaaaagggtaccgaaattcgttttgatctgccggaaatgaacagtgtgcaatcggcaccgacggtgagtgtatttttgtatgacgtacatgaggatttggaactgcgacaaagtcggcacccttatttgagaactgcgacagacgcctcgcatgcgagttgggttaatttaaactgtaactatcttattacttattgggaaacccaatcaccgggaaaagacagtaaaggtccggatagtgtccccgataacccggcgatacagactatcacccaaacgctgaaggccttgttgaatcatcgtgtcctggaagggattgaaggagcctatgccagagtgatccccccgcaggaaaacttgagcagcttaggaacattttggcaagccttagggcaccgtcctcgattatcactgttatattctatcaccgtaccattcttgttggacgatggagagaagtctgtgccgattgaaacgtttgatgcgagggttatcgatatcaagacggcacttgcgagtattaaattggaccaggttagctatgtcgccggcggtgtgatggtggtgacggtgacggtgaaaaatgcgcaggataaagcggagactggtctggcatcggtactgaaggtgaacgtaccgcacgcccagtcacaggcggtgagttggacggacaataacgatgggacctacgtcgcgcgctatgtcgctggccaggcgggtgtcggcctgacagcgacgttgatggtggggatgacgagtgtacagtctaaggtgtatgcggtcacggcgaagacggccagtaataagattgcaccggcataa

SEQ ID NO: 434614 - DNA, 2076 bp, Serratia marcescens
atgacattcacatttgatcctttgccgctttttgcggagcgcaacatccacgaacatgagggctttagttatcatatcgggcgcattgccttgctttttcagcgggattatttgctgcgtgttggtgagccgcctgagcctatgcagcctctctttttgcctgtcgaacatatcgaccgttacttgagcgagccgcatccgccttattttgatgtggaggacatcgggatttatcttcctgaccaggatgatgagttgagtcaccgcttgcagttcctctcgtcggcttttgacctgaccccgtttgaacagggggtgctgttggcggccttgttgccgcgtttgagcgatgattatagtcaattgccttatggtggattacaagacggaatcagtcgggccgtcttggtccgattgttttccagttcgcaaataaagtatcgcctgctgcaggccgccttgcatccggcctccccgttatttcagttcgctctgttatctgaaactcaagccggaaaaggcagtgcgatagcgcagtcttatgtcctccacgagtctgtctggcagtttttttgtggcaatggaacgctgtccagtcaacgctacgcattctatcgtcgggtagagtgcgacaatgtgccctggagtccgccagaacttgcgtcggcgttgtcctgcgccgcctcttcttttctcgaaatccccgcgccggttgttgtgattgaagggcgcgagcgagatggccgggagcaagcgctggccagcatatcggctgcagaaggacgtacggtgtcatgctttgatgtcagcgatatgcatgagttgtctgtggaaaagcaaaaacagataaccacggacattgtgcgtgacaccctactggataatgctgtgttgattttggggagtttcagtgcgcccgagacaggtaagagtagcgttatccgaacattggataaattgctgccacaggtttgtttgccgctttttattttgccgacaacacctgctgaagtgcctgcgttcagggcattaccctacatctatttggctatgccatccccgtctctggaggagaagatgagggggttacaagtagcgtggcctgttcttttcggcgatgaaggagagcaagcagtacgggcgcttgctcagcgctatcatttttgtcctgcggatgtctcacgtttggtgaatgaagcggattattatcgtgcgataaaagattcacccgaacttttaatggagaatttgcactcggcattatcgtatcgctcgcggatgaatttcggcaagttggcacagcgcatcacgcctcgtcgcacctttgacgatttagtggtgtctccagagttgaaagggcagcttgaggagattctgtcgaccattcggttgaaggagaccattatcaatacgcattttcagcgtaaggccggggctgaaaccggtgtcagcgtgttgttctatggtgagtccggcacggggaaaaccctggcggctgaagttatcgcccaacatctgggggtcgatttgattaaggtggacttgcccaatgtggtggataaattcattggggaaaccgagaaaaacctgtcgcgtattttcgacctggctcaggctgacagtggtgtgttattttttgacgaagccgatgccttgtttggcaagcgcagtgagaccaaagatgcgcgtgatcggcatgccaatattgaagtgtcctatttgcttcaacggctggaaacttatcccggtttagttattctggccaccaataaccgcagtcaccttgacagtgcgtttaatcgacgatttacattcattatgcgctttacttatccggacctcgccctgcgggaagagatgtggcggacaatatggccgtcgaccctgaacgttgctgaggatgtcgatattgcttctttggcgaccaggagtgagctgacgggcgccaatatccgtaatgtggcgttgctggctacggtgctggccattgctgccggcgctgaaaaaatacagttgtatcatattgagcaggcgattaatcgagagcttgctaagttggggcgcttaccgctctga

SEQ ID NO: 434615 - DNA, 666 bp, Serratia marcescens
gtgaacaagccgcagtcgacctggcaggcaacaggatccaatcaggtctggtcgtgggatatcacctggctggcgtcggcgacagctggcatctggttttacctgtacctgatagaagacgtgttcagccgtaaaatcgtcggttacgaggttcatgtcaatgaaagtggtgagcaggctgctgcactgatgaaccggacagtgctgagcgagggttgctggcaacagccgctagtgctgcatgccgataacggcgctccgatgaaatcgcaggtgctccaggtgaagcttgcggagctgaagataacaccgtcgcacagccggccgtgggttagcaatgacaacgcacacgttgagtcactgttccggacgctgaaatacgtgcctcagtggccggagaaaggcttcgcgacgctggaagatgcacgagcctgggtagatacatttaccggttggtacaacgaatctcaccgacacagtggtattcactatgtgacaccgggccagcggcatcggggggaagacgttgctttactggaaaagcgcaaatcggtgtatgaggctgccaatttgcggaacccgcaccgttggtcaggtcagacacgaaactggagccggcaggatgaagtgtggctgaacccggagcgggaaaccctggcagcataa

SEQ ID NO: 434616 - DNA, 603 bp, Serratia marcescens
atgtacgcgtataaaaaaagaccgtcgatatcgagaaaaaaatgcagcgatttcaacattggtgatctggcatatggtttgaatgagtctagaacagctttttttgatttaaatggagtggttttaaaaagagagttaggtgcaactatagattcatttgctgcgacagggactgagcatttattgttggcaaaaaaaactgaaaagtatcctgaaaagcaagatgacttcgtaaagactctattatcccacccaaagtatggtaaaataagaaatgagcttggctttctgattgataataaaaaagtactcgacaatccagagtggattagcaggaagtgtaaagctgggctttattgggcggccaagaaaaatataactgtacactttgttttagatggtattgatatggatcgagttgtttttaagaaggatgaatctcacactgcttcagagctgagatggctttttagaaataaagatgatgctaatgttaaacgagtggttaaatattggatggatgggaagtatgttccagcaccatgggactcgggcgaaggcatggcgttatgggtgaactataagcctaaatcccataagtga

SEQ ID NO: 434617 - DNA, 501 bp, Serratia marcescens
atgcttacggattggtttgacatcaccccattgacatggagtcacattttatcttgcttgatatgtggttcattcattggcgtagaacggcaacttcatggcaagccggtcggggtacgtacttctacattgataatgcttgggagttgttgctttttgtcgacgagtagccatttaagctctgaagtcgcggatcaatccagagtgttagggcaattgataacgggcatcggtttcttaggggcgggagtcatgatgactcaaaatgggcaagtgaccggggtgacctctgctgcgacagtctggatgctggcagcacttggtgcaatgattggtctcgatatgcttcggcaggccatcgctatgactttggttacctttatggtcttagtcggagtaaattggcttgaaatcagttttaagtccctacaacgtggtatttaccaccgtaagaaaactgaccatgaaggaagcagtcacgatgattacaatgggagttga

SEQ ID NO: 434618 - DNA, 369 bp, Serratia marcescens
atgcgcacaacatccgcgtcgccaaaacaagcggcgctgccttgtccatccccgcttaccgtctggcgtactttactcgctcacctgctgatgcagcactacggcctgacgctgaacgatactgcgttttgcgacgatgccgtgatacaagcacatatcgacgcaggtatgtcgcttgctgacgcgctaaacggtaccgtggaaaagtttgagctggtacgtcttgaccgccggggcttcacttgtcaggaacaaacgcacttcgtgaccaatatcgatatccttcgcgcccgccgggtctgcggcctgatgacgcgaaccggttaccagagcacaacccgggctattcagggagaaaaatgcccatga

SEQ ID NO: 434619 - DNA, 207 bp, Serratia marcescens
atgagccaagacagacttaccgccagcaggttgcttaccggtatccatgataaaagacacggcactcagtatgaggatgaaatgtttactgttaaatactttcagaagggaagcgcgcatattacgttcaaacgtcctgacctgatagaaaagatgaatgatatcgttgccaggcattttccttctgcgctcccctcacgcacctga

SEQ ID NO: 434620 - DNA, 795 bp, Serratia marcescens
atgcgtgactatcatattcttattggtaatcgtggtgagaaaaaagtccagatctacaaagctaaatatgcagtggatagtatttatttgacaagggatgaacttgtttgggagtcgccagaagttgagtttatgacagaggtaaaaccagtgacatataagggaaagaaagctatcctgtcaaccacaggtaatggtgctgttatttttgaattaagtgatacaaagagtgttttgttccacaaggaaatcgtaggttatgataccaatatacattctgcacacccattacctaatggtgatgtggtttttgcagactcatctggatggttaggtatcttgtcatgtgaaagtgagggtgttgaacagccatcagaatcgacgacatggtacccgtttcttcatgcacatgcaatcgcttatgatgaagtccggagtaagctatatgcaggtgggcatatggaaataaaacggtttaattataacaaggatggaggtggcctcactgaggaagtcacttatgatataagtcactactacttaagatgcagagattataatgaatgtaatgaagatcaggattgggcagacggaattcatgacatatatcaggctaatgacagagaacaaggggtctattttttgtcaacaggggaaagagtctttttgtttgataccacaaaaaaagaaggtatgaaagatggaagggtttttttacatcatgttaagccattctatgaaatagatagtcataaatcacaatcaattgcatcaatttcaaaaaagaaaagataa

SEQ ID NO: 434621 - DNA, 384 bp, Serratia marcescens
atgaaaaaaatgattgctgtatcgttatgcctattcccattatttcaagcaaccgctgctgattgcgacaatgttcaaactcagttggatatgaatgaatgcgcctatgcagactacaaaaaagcagatgaagagctgaatacgacctaccagaaaatcgtgaaactgatttctggcgatcaaagaaatctgctgaagtctgctcaaaacaaatggatcatttatcgcgatgcagactgtaaattccagacgtataaatccagtgatggcacggtcaacccgatgaacacagctatgtgtcttcaggccaagacaaaacagcgaactcaagaactcctgagcgtactgaactgccctgaaggtgacgtcagctgtcctctgtga

SEQ ID NO: 434622 - DNA, 570 bp, Serratia marcescens
atggcaacttcaataaatgctcctaaggataacgttctgccaatggtgatgaatacgctcggtctttttggcatgagtgctgtactgttgctggctttctattatcaactggcgctgtttgatttaccctgcccactgtgtttgttacagctcgtcggactgatattgattggctgcggtttcttatttaatgtgcgtttcggcattaaaggtgcacattacggcattgcgttgtttggctgtgtggtgactggttcgatcgccgcacgtcagatgtttttgcacattcggccaggcgatgccggttacggttcaaccttcctcggtctgcatttctatacctgggctctgctgtcatctattatcgccgttgtggcgattgccgtgatgatgatgctgggtaacgatcggccggtaatagaagaaacattcaccatttcgttatggggaaaaattgccacggtgctgtttgccctgatgattacggccagcatggtctcaaccgtgctcgaatgcggtggcggacaatgcgttgataatccaaccttctatcaattgctcggacagtag

SEQ ID NO: 434623 - DNA, 2076 bp, Serratia marcescens
atgggaaaattaaattccgtcgtatttgatctcctaatcggagagcggccaggaaagggaattgtggtggcgaaggatattgatttggacctggttgatttgggtaagaaaccgtttgaattaaaaaaaacatcggtcacggggcgatgccctgatgccattgacactgtcacaacaccaatgctgtggaatggcagtcccgtggtaatgactgtttcaacagggaataatgtgttttttttagattatgataatctgacaaaaattgatgaggtgggattaaatttatcatcatctaaatttggtgggtatcatggtgttgaagcgattaacgataaccggtttgccattgccgtatcgaatagtgagggaaaagtttatctggtagataaaacagggacagaaatctggcaggagaccttaccgggcgctcaccaggttatctgggacaatactactgaaagactgtttgcgttgggcaagactgagttacgtgtttatcagttgacagaaaaatctggcgttaaacgctgtggaacggtggatttttccgagctatacaccgagatttataatgatcgttctgataaaagcggtcagaattgggccgatggtgggcatgacctgtactttgatgcaggtaacagaaagatgtttctgacaacgggagagcgtgtttattccttttgtatcgacagtttactcactcaactttctcatagtgaaaaaattgtctggcaactggatcaacttttttcttttaacgccattaatccggtaaaaagtctgtatcaggttcgcagtgtcccgtcagatgactatattcactctgactctgcgaggaaagagtggcgtccccctaataaaggcgggtgcaaggcgttaagtcgtatcccggggagttcattgattgtgtcacactgtgccccggattattatggagctactgacgctccctatgcgactaacacattagtggttagccgtggtgacgaagacctgccaaacctgtatgaattcaccccgggtgccggggactattcttccctgaaaatactgtcttatactcttggtgataacaagaaaagctcaacctaccggtgtcgtataaaacccaaactccccctgacggcctacaaaacaaggaagctggaggagttctcgatgacgaacctgatatttaagggagtttccggagggttaggtaaagtaggcggcccctatatccagctggtaataaaaggtgaacagcaggaaaagctggttcagaaattatatgacgattttcacgctgcgcgctcgtctgatgatttcagtcaggatgtctatggattttgccaggttgaaattgatgaagtgataaatgaggctatttttaaagtttatacctcaaaaggggatgcgggtaacgggtatttggtcaataaagagttaaacttataccttgctgtctacacatgggcagaacctgttcagctacactggcaactgggggcagatttctcgcttcatggacagttaatcgatatgcgcaatgacagaacactggatgcgctgtggatttccctcaacggggagccagcttttgagattcgtaaaggcattgatagtgaaaatattgatattggaaacattgattcggacaacagatgtttcacgatttacctagacaagtacaagccattaacatcgctggcactgtatgccattagcgatgaagggtatctggcatgtagcggtgaacgccagttgatgccgcgtattcttccaaagattgaggatcttaagctgagtgaaacagggacagttgaggttggaaccacactggaggctatacatcagatgtggccggattgtgactacacttaccagtgggaatgggttggaccaggaggaggtgactggaaaaatcccaaaagcgatacagataagaagtggggtaaagagaaaaaatttaccccagataagagctatggtctagaaggggataaagtacgggtgacggtaacagcaacaagaaggggcttgagcggctcagctacaagtaacgctgtaaccatgaaacccaaatcatga

SEQ ID NO: 434624 - DNA, 405 bp, Serratia marcescens
atgcccttgctggataaggctttctgtcagcacaagcgcactgtgggccgacgctggcgaatggatgagacctgcataaaaatcaaaggccggtggaaatacctgtaccgtgccggtcgtctgatgaaatacctgaacctgggtaattgtcagcctggaaaatatcagtacaaaaatgcccatcaggagcatacatgcccgctaattctgctcgaacgcagttcgctgtaccggagcctgaccgggtatggtgcggagatattacgtatagggtgcccggatttcagggcgagcatggagactcaaatgaaccacgagtctatctggaatattgaaccggcaactcaagataagaaacccgacaagcccaccgcctgtggcggtggtgaacctgagcggcagtga

SEQ ID NO: 434625 - DNA, 378 bp, Serratia marcescens
atgaaagcccatgaaagcccattcgcacaacgtctgctggacggcattggtgttcagagccagaacggtagcatgaagcggcgtggtcatgccttactggctgataaagcatactccggacatgtgttacgcaacgaattgaaaaacaaaggtctaaaaactgtcatcccgcgtaaatctaatgagaaaagagcgtccgatggtcgttcaaagttcgatcgtgatgcctaccgcaatcgcaacgttgttgaacgttgctttggtcgcctgaaagaatatcggcgcatcgccacacgttacgaaaaaacgacgaggaattatctggcgatggttaaactgggttgcatccggctattttacaaaaggttatgcaattaa

SEQ ID NO: 434626 - DNA, 675 bp, Serratia marcescens
atgatgcacacttatatgacgcaaagcaaaataaagcccgctaatgatacggaaagtttaacacatcaaacgtcacaggcatcgataacgtcacaacacccaagtctttctcctgcgcttcaacacgctcaaagcgagttacaaacgaattttcaaaatattggcggttggcataataataaacatcaaggtcccatacaaatttatgagagcaaagaacctgcccaaccttatgcaccactctcagttacaatgtttttacacagagataatgagaattaccatggggttaccattgaagggaatgagataaagcatcttgatggaagatatttatttgtaaatagaactggcttaattaacgccaagaaaatggataccagaaataacgaaagtgactgcattcgaattatgaaagaaccaacagatatcgctcatattgtcaatggaacaacaggccatacgtccatggcaaggcccgggtttggtcatagttataaaatcatcccaatagactcagtttattatgccggggtcgcgacatttaaggatggaagattagaatcatggtcaaacgagagtggtcattatcgtccagtggctccacatgaaatacctatacctcagaccatcaaacgttattttcctctaaataaatataagtctgaacattaa

SEQ ID NO: 434627 - DNA, 264 bp, Serratia marcescens
atgctgttcggtacccgttcagaaaagctgcatcggcaggttgaagaagccgaagtcctgctgaagttgcaggagcagcaaagcgagcgttggaagacgatccgcatgtaccccaccagttgcggcagtcccgccgtcgtcgcccattaccaggacaccttcccttcgagatacaccggctggagccagtggaaacctgctgcccaggttgcggtagtgatatggaatatttcaatgaagtcagcgcggagcaactgggactga

SEQ ID NO: 434628 - DNA, 258 bp, Serratia marcescens
atggcgcatgcgcggcggaaaatccacgatgttcatgcccgcacaccgaccgacatcaccacggaagcactgagacgcatcggtgagctgtacgccatcgaagcagaaatacgcggcagcccggcggagaagcggctgtcggtcagaaaagtgaagactgttccgcggatgcaatcgctgtacgactggctccagacacagatgaagacgctgtcgcgccacgcggagacagcgaaggcattcacctacctgttgtga

SEQ ID NO: 434629 - DNA, 984 bp, Serratia marcescens
gtggctgaagagcggttcagtcctgctgtgataatacaacagagaatcagtaatcttcagataacgggaaaccctgccgttggggaaacgttgacggcaagttatgagtttcatggtgcaggagaggatgattccatatgtcagtggtactggcgtgaaaatgattcagccagttggcagcccagccaccgctcaggtaacaccccttacattggacaaacatttgtccctgtagatccaggctatgtcggtgagcaggttcgtgttggcgtgaaagccaaagaaaaactttctgactgggtggctgaagagcagttcagtcccactgtgataataaaatcgagacaggaaggagaaattgcacatgatatccatcccgatatccatcccgatatccatcccgcaagtcgttatgtaggaaagtggttttatatagagaacaatcgcggaaaatgcctaaaattagctgccgacgcaaataacaatggagagcgtgaagcatttgtcagcgatagccttccgacctcagactcacacgatcgagcgaagtggactcttgagtacgccaacgaaaaacgtggaaaagacgcgtattttatactaaaaaactttaaattttcactgcccttgcgtgctttcaaaataggaggtagggataatgagcgaatggcctatagcttatggggctctgacgttcattacgaaaataacgaggatagacccgtaggtataagtgttggtctggaaagtgtttctatgggacgtggcggggaggatgacctgaatttttatataactttcgtttctgggagccatctttacgttattacgcacgaaaatcctatttcaggcagtgatgccgatcatcgtgtgtatgccttcgggtttccacatgctgacggggcgatcgggtcttaccacaacggacaccgtgctacctctcatcattcaccggaagattcttggtatttccgcctcgcataa

SEQ ID NO: 434630 - DNA, 285 bp, Serratia marcescens
atgggcacaccacgatttacacctgaatttaaggaagaagctgtccgtcagataacggaacgcggttattccgttgccgaagtatctgaccgtttgggtgtttctgcacacagcctctataagtggctacgggctatcaaacctgataacagcgaacagcatgccagggatttactggaagccaaaagcgagatcctgaaactacgggcacagctaaaacgtaccgaagaagaacgggatatcctgaaaaaggccgcgcggtactttgcaagggagcccgactga

SEQ ID NO: 434631 - DNA, 810 bp, Serratia marcescens
atgacgatgtgtcgggtactgcatgtcgcccgggccgggttctacgcgtggctgcacaacccggtctcggcgcgtgataaagataaccagcgtctgctgacgcttatccgtgattcatattcactgagcggaggcgtatacggttatcggcgggttcatggcgatctgaacgaaatcggggaaacctgcggcaaaaaccgggtgggccgtattatgcaactgaaccggattaaagccgtgcggggctataaagcaccacggcgtatcgccggccgaccttcggtggttgcccctaatcgcgtacagcggcagtttaccgttgtccgggccaatcaggtctgggtcaccgacatcacttacatccgcacctggcagggctggttgtatctggcggtggttatcgacctcttcgcccgtaacgtggtgggctggtcgatgaagccgactctctcacgcgaactggcactggatgcgctgatgatggcggtctggcgacgtaaaccggacagcgaggtcatcgtgcactcagaccagggcagccagtacggcagcgacgactggcaacggttctgtcgggccaataacctggcacccagtatgagccggcgtggtaactgttgggataatgcagtggccgaatcgttcttcagttcactgaaaaaagagcgcatcaggaagagaatatacaaaacccgggatctggcccgggcggatatcttcgattacattgaagtgttctacaaccgggcccggcgtcacagtcaccttggcggcgtcagtccggaggcctttgaacgggcctcgtcgtga

SEQ ID NO: 434632 - DNA, 663 bp, Serratia marcescens
atgagtacgtcagaattgagtgtgaggtttttctcattttttaaaaagtggaagagcaaagccgttttcagttttgttggaatcagtcgttatatttctgatttgcatactacaaacggattttttaatgaagatagatgttcggttatctataatccgatagaaccgcttcgctttgaagatagagaaagttcaacttttagagtcggatttataggtcgccttactagcgataaaggattcgatgaatactgtcgccttgcagatgaatataagaatagggcagatgtcaagttttatgcggcaggtaggtttaatggcgatgaaggtaatgccatgaaaattttggcggaaaaatcaaatgttgaactgcttggttttattgcggtagaagaatttatggcaaatgttgatgcagttatactgccaacaaaatggaatgaaccatttgggcgttcagttgcggagtgtgcgctttctgggaagattgtctatactaatttcatgggggggatttcagaaatagcagccatgagtagtaatgttaggccgctaaactctttcaaagttgaagatacacgcacacacaaagaacgcagcgtcgtggagagttttgatattgataatatcgcgaaacgatatgtagaggtttacaataactaa

SEQ ID NO: 434633 - DNA, 555 bp, Serratia marcescens
atgacgatgcgcgcttcaatttgcggtttgctgttctgcctgccgctttccccggcccaaagcgataccggcgtcaacgacttaaccaaaagccagccgttcaccgtcaatgcaaccgtggttaaaggctgcgtattgggcagcggcgtcagtgacgtgaccaccttcggcaccctgaacttcggccagttgtcctcactgagcaacgcagtcagcgtcgtctccagcagcggcgccggttcggtgctgtttcgctgcaacccggggctgagcgtcacgctggccctcggcgtcggcaatcacgtgaccggctccatcgccggcggcagaaaattacaaaacgccgtcacgtcggaaacgctgctgtatcaactttatcaagacaacaactacgccaccctttggggcgatggcgctaacggcggcgcggcgcagaccgtcgccgccaccggcagcacgcaagaaatcaaggtttacgcccgtctgttttcgaccagtaccctgcccaccagtggcgtttacagcgatacggtcttgttgacggtcacttattaa

SEQ ID NO: 434634 - DNA, 210 bp, Serratia marcescens
atggccagcacggcaggtgccttcatcagctataacctgtaccaggatgccgcacgcaccaccgcctggggcagcggcgccaacgcgcggaccggcaccggcaccggcgccgccgttccgctgatcgtgtatggccgcgtcccggcggccggttctaccccggcggcagacacctataacgacaccgtcacgatgacggtcacctggtaa

SEQ ID NO: 434635 - DNA, 258 bp, Serratia marcescens
gtgccgttggtgcatttcacccgaatggcgccggcgttttgttgcccggcgacgctggttgcggtgctgagaaaatacagcgtgccgaaattcagcgtgccgaagctgacattgccgcctgagctgctgccggcctcacaggcgctgagcaaggtcgcgctgacgccgagggtcgcggttttactgtcggcctgcgccaacagactgcacgcccataatccgcagcagcaaagcgcgcgccgcaccgttaccaggtga

SEQ ID NO: 434636 - DNA, 4149 bp, Serratia marcescens
atgagcgtcatcggcctgatcaatctgatagaaatggcgaaacagggagcaacattcggcgagctgtcgcctcgacgccaaaccattgagcatgtcaacgccgccgccctcagtgcggtgcaggaagacatcaccgcatttttatctgtctgtacgccagataatgcagtgcgagacaccggggagaagccttgttacaccgtcaatcactacgcggggcaatacctgtggctgtatgaaaacttcaccaagaacagcccgctgtataacattccgatcgccaaagagatcctggggccctttgaacccacgcgtttgctcgccgcgctgaaaaaactactcaagcggcacggtgcgctttgcggccgctatcggctagacggggaagccatcaccgttgacatcgtgcatcctgatgaaaccattttcgaacacagtctcgaggacatcagcgggcagaatagtgaggagcagcaaaaaagtatgctggcggcgcttaacgcccagtgcacgattccgtttgatctcggtgccgagtatcccctgcgctgccggatcttgagaaagagcgcgcagcaccactatctgttcttgacttttcaccattgcgtggtcgacggctggacggccaatttgctggtggatgaactgagccgtggctatcacgcgcacgaagagcattgccattatgacaacggccaggcgtttttccgctaccttgaagaccctttcctcgccgtcgccaatgtcgatgacagcatggcgttttggcgcgatgaactggatggtgcgccggaaaaacacgcgcttgaatacgatatcgccatcaccgcggcaggaaaaacacagaatatcgtcagaacatcgctgacgaacgaactgcagtcggctctggcccagttagccaaacataacggtacgacgctgtttacgctgttgcactccgccttcgcgttactgattgccagagaatctgcgacggatcgcgtggtcatcggtagcccgatcgccaacaggaacgagccaacgttaaacgatgccgtgggcagcttcgtcaacacgatcgctcaccaatttatcatcactggcgacgacagtttcaccgcgctgctgcaaaagaacgcgaataaatttgcgcgcgctttcaaacatcagggtttgccattctcttacctggttgaacaactcaagcccacgcgcggcaagtttcaccccatttttcaaatcatgttcgtctgccaacatcgcaaaagcaatgagctgaatgttggcggtgcgcaggttaacaccctgccgagacgctatgcgccgcccaagtttgatctggttctggaggtgatttccagcgcggagggcattcagttggaatggcaatacaacgccaagctgtttacgtcggagcgcattgacggattggcgcaagcttacgcattgctgctgcagcaaattgcctgcgatccctcgcgggccgtcggccactattcgctggcgtcaatggccgataaccggcaattgcatcagctctccatcggacaggcgatgccggcattcttgcggcaacctctttccgatcggctgttacgcactgcccaccagcatgcggatcgcccggcgttgtacgagggcgatagcgtatggcattacgatcggctgttgcggcacgccggcctcgtggcgcattggctgatcgcccataccgccccaggcgcgctcatcgccatcgatcttccacgcggcgctcatcaagctattgcggcgctcggcgtgatcctcgccggacgcgcctacttgccgttggccgaaggattgccggatgcccgcgcagcggccattatgcggatatcaggttgcgcctgggttttgagcaaccaggctcaccatcgcgcccgctatccgcagactacccgcattcaagatctggaggcgctgttttcccctcatgtcacagacacagcgacgaccttcccgccaggcgaagcggaagcgctcgcctatgtcatttatacgtcggggacgaccggcacgccaaaaggtgtggctatggaacagggtgccgtcaccaataccttgctgaccatgaaccgacagtttaacgtttctcatcgtgacaacgtattggcgctcgccgatctggccttcgatttatcggtctatgacctgttcggcagctggctagcaggcgcatcggtaacggtgctatcgccgcatgaagcgaaagagccgtcagcatggctaaatgcgatacgccagcggcaaatcagcatctggaactcggttcccgccatcttgcaaatgttggtgcaatattgcgcacaagaaaacatcctgtcgctgcctcaactgcggcatatttggctgagcggcgatcgcatctcttcgcggctgatcgccgaggcacatcggctttgccccaacgccaccatcaccagccttggcggtgcaaccgaaggggcaatatggtcaatttatcatccggttacacgagatacgcactacagaaacgccatcccctatggaaccgcattgccaaatcagagcatgtgggtgttggatgaaaaactcgagccgtgcggtttcggcgttaccggcgacatttatatcggtggcgttggggttgcccgcgagtattggcgcgatagccaaaccaccgccggcagctttgtgcttttcccaaccaccggagaacgcgtgtaccgcaccggcgatcgcggccgttggcatcgcagcggttacatcgagtttctcggccgcgaagaccaacaggtgaaactgcagggttttcgcgtcgaattgggtgacgtcgaattcgcgctcaaaagcagcgagctggtcgctgaagcgtgtgtcgtctgtcgcgatgaaaccgggaacggcacaccgcatctggaggcttacatcacattgaccgaggcggggaaaacctgcattcaagcagagcaaagaatacgcgagctggttacggccgcattgcccacgtatatggcgccatcccgctatcatctcattgaacgtttcccgctttcacgcaacggcaaattggatcgcaccttgctatcgccaggcaccgaacggagtcaggccagcgatgttgcacccgcggcgtccgcggaactcatgctgctacgagagctgttggcgaatacgttaggctgtaccccagacaagatcgacccccatgccagcttcttcagcaatggcggcagctcgctttccggcatcacgtttttgggcaacatcaagcgcgcccttaatgtggaattaaccctggcggaaatccttggctactcacagctcgataaacttgccgagcgtctgcgcgcgaatgcgcccctgccgttatcgatgctgtccggctcagccgatcgccccactctgcccaccttgtatttggtgcatggcgccggcggccaggtacatcaatatgcaaagtggacaaaacagctttgcgcctgcgccaacatcattaccatcgccagcccggggttggccgcgccaggcgcagacgacacactcaccctgcagcgattggccgcctcccacttggcggccataccgcgtgccaaacgcgacacggccgttatcgccggctggtcattgggtggccaattagctgtccatatggcggcgctggccgcggaacaaggcgcgccctttgcgcatgcggtggttgtcgacagcggtttgcccgcccagcagcccgcagtgaagcgacgtttcagcgtggcccaaagttacctcagtctgttcgactccctcggtattgcgcgccatttgtgtcggcgtcaagaaacgagtgcgatagacagcttcgccaacgagataaaaatacactatgcgctgaatcagagcgtgcttgcggagaagatcacgctggaacatgccgaaaccttctgttgggcgctgaaaaaatcgttcgaactaacgaataacgccggccccctgccgcagatagcgataccgctaacgctttggctcagccagcaacgtcagcgtaaacacccccatcttgcacaacgctgggagatgcaatcctcgcatagcgttcaactcagttattgtgcagaaacgcattacagcattttaaacaacgctcaacttcttcgagcgctgacgcaattgctgcacgcgttgtcaacatcattggaataa

SEQ ID NO: 434637 - DNA, 1641 bp, Serratia marcescens
atgtcaaacacggcgtcacacaaactgtcacacacaatccaacgtggccggacattctacacaaattttagacttaatgattccaaaaagtttgttcggttatcacttaatactgacagtttgaaacaggctcagttggtcatgtccaaaatggcgccttatattccgttggttcagtctggagcaatgtccgtggacaagttcaaggcaaagctcaacggactgaaggacctcaccaagcaagatttggatacattcctgttgcgccaccttgaagacgactatgaagaggtggaaaggctgccaaaactcggggcactaacgaaacaatatttcggcggcagcattgaccgtgaggcgacgaaaaatgacgccacaggctatgcgagagcaactatagataatcttcattcaggctcagattttggactggccgcccttaagcattccctacggcataaggggattaatcctgaggggctaccggatgaaatgagcgacgtcgttagccagattgatatgtcgttggctatgaagcatcaagcctatgaggcgttttattcagatgacttcttgaagtatcgccaaattttgggttcgctcaaagagcaggtaaagagcctctcagatagagcgccgagtcaaaaccacgccccacaagttcaatcgccctcgtccgctataaagctgtctgaagcttggaaaatgtatgttgcagataaggggcagaaatggcggcgttcagtcgccagtgagaatcaacgattctacgatgttctgttcctcgttgtgggagatattcccgttgatagcgtcaccaagcagcacataagggaagcactgaagattgccgagaatctccccactcgaacccgatcaccctactccagcatgaccctagccgaatgcgttgcctatgatgtcccggaggaggatttaatctcaagtgaacacgtccacaagcatttgaagatctggcgctcactgttcaaaacgtaccttgtcgatcacaaggacattttgacgatctcacctactgacggaataacctatgaggtgattcctaatcgagggggtcactatagcgctggtgaaatgcaaaagttgaaaaaggctctgtccaccctccccaacacagactggagaaaagattacttcctcacgctcatttataccggtgctcgtcgtgcggagattgccgacattcgtaagcggcacatacggcgcgatgatgagacgggccgacattacatattcatcgagggaggtaaaaccgatcacgctcagcggcaaatcccagtccacaaaaaattggaggggggcctgttcaaacgcatagccctactctcagatgaggatctggtgtttgggggcctacctgattacacaacgatcacgaatgggtgggttgctatattggacagtctggaaatcccgacctatgacgagtttggattaaaacgccgaattcatagcctgcgccacacatttataagcacagcgattgccagcgtctcaaacgcggctctggtccagttcgttgtggggcatagtcggacccaatcgttggggattacctcgcggtacacacacagaccgcccctcaaagagctattgtgtgttgttgattgcatcagttga

SEQ ID NO: 434638 - DNA, 279 bp, Serratia marcescens
atggctaataacttgttcgttacatatgacctgatcaaaactaaagattatgaggccgtatacaaagcaattaaatctttgggaaattgggctaaggttacagaatccaactggtatgtgaattcagcttatacgactgaacaggctgcaaggattgtgagagcagcaatggataatgatgataagctaatagttgtggatgctaagaataatagcttccattgctataatatattaccagaggttgttaagtttatgcagaatcactggtatatataa

SEQ ID NO: 434639 - DNA, 126 bp, Serratia marcescens
atgttaaagcgaaaagttggccgcagcgccattacaggtcaatttgtgaccgaaaaacaagttaagcaaaacccaaaaacaaccattatggaaacgatcaagtatccaaagaaagagaagaagtga

SEQ ID NO: 434640 - DNA, 870 bp, Serratia marcescens
atggacattgtcgcgctggccggcagccgccatgtgacgcgggactatggcgcgctgcgctgcgtcggcagcttcaccaacgcgatcaatttcctgacggaaaacgcgcggctgctgacgctgcaccgcgccggcagcggcctgagcccgatggggtggcagctcggcgcgcgggatttcgatcgcgtgcggcgtgcggtgccgtctgtacgacgctgcactttctccgccgcaggcatcacgttggatgcgctccttgttcggcccgccgcgatggcgcgggatctggcgctggcgcagcgggcggccattgccgatcggccgctggcggcggtattgcagcgctgcacggcgcagtgcgggttgcacggcgaaatcggtcggctggtgaagcggccgttaacgccggagctggccaggctggcgcgggatttctcccgttggctgcggggcggcgcggtcgactggcgccatacgctgggcaaagggccggggctgacgccgagcaacgacgacaccttgctcggtctgttgctgagcgcgcacctcgacagccgcatccaggtcgccgggctgacgccgtttttcgcccagacgccaccgctggaagcgttgaccacgctggtgagcgcgcactacctgcattacgccgagcggggcgtgttcgccacgccgctgcatatgctggcgcaggggctgcaggtacctaacggcgtatcggcggcggtggcggcggtgctgaacctggggcatttctcgggggcggacacgctgctgggcgtatggctgggggtgacgacgattaacgcactgtgcggcgcgcggtgtgaacatgagggccggatcgcggatccggccgggacggtatga

SEQ ID NO: 434641 - DNA, 2400 bp, Serratia marcescens
atgagccaaagatataacaccggtaatcctcgcccttcaaatagcatgaaggacttaaacgacaatgcgcttgcgtatgatgatttcttgaatagtgatgatgatgaggcattggatcgatttcaaagaccttttcctacggttcgaaagcaagtagctgaacggatcgatgagatcactggcgcgcaaaaaagtattgagcaatatacagatgaggctaagcaagctgctgacaatgctcagaacatcgcagatgccaatacctactacacatcaccatcagaccccgacgggacgattgctgggattgccgggacgccagatggaaaaatgtttcgcgtagcaattcaggatggcgctggcgtgactgtatcgttcaattattataaaaatgacgcgggtactgctattttcataaattccgaccccagtaaaagatttgttgatgccacgaatgaaacggcaaatcttgctatggctggcgttgatgaatttaattcactgcgcttgtattacactctgaacggaagcgggcaatttcctttctatttaggaaatggggctgatggtgcattagcaatagacagggatcgcggggcgtggtttgctggtttgcaggccgcaattcaagattatgttaatcagttgattcctcgagcggtcggtgcatattacaaagggctatcgcatgtaattacagacatcaccggaaaaaatgcattgcagtatttcgatgctgataatgccgcgcactttgccggattgagcgaatcactacaagcgcacgtcattcagttaatccctcgcgggcaggctgtaaaatatcgcgataccgcacatgtttttacagatgagaccggcaaggcaggttttgggcgaattaacaggaagggggaatggtttattccgggggttgatggccccttgcaggatgcgataggcaaaacaagtgcaactattgagatggtaaatggtaaaccggctttgtactggaaaggtacaaaggtatgggatgattactatgctactagtgccagaccaatatcagaaagcgcagctttgtttacctatgaaaaagaagatggaacgaatggatctgggttattgttcatcccaagcattcgtgagatccctgttacatcagcatttattctctgctacatctgcctggggcaaagcctaggagctgcatttgataagccagggcaaaatattcgagttgtcggcgctgatccactgctgcgtgggcgttgcctatctccgtctggccgcgctgacggcaacagcgccccagtgagtcagaccgatttagatcgcattactgacatgggctacaacattgaccggcaaggacacaacatcccgctcgcaaacggcctgatgtatgaaatgcgtgatgcaggaatgaatctgccgacgattattaatgcgccgtgcaacgctggcggccagccgctatctgggatttcaaaagggacgttcgcttacacgaagagcctggcaatgttgtcacgcattactgagctgtcactgtcaatcggtaagcctctccgcaacgacttcatcttgtttgagcacggggagacagataacgacaacggaaattgcccaacgccgggtagctacttgtcattgctcggcccgtattttaatgactgcctcacagacttcaacggcatcaccggcgccacaacgggcccgattatcgtgattgaccaggttggcagccgcatcaataccaaagccaacgatgtagatgatgaggggaacccgattggcgatccgatagttgttcagccgtattcagttaccgctaccgatcagctcacatatgtgcgccagcatagcaattctattacgtgtggaacgaaatactggctcaactggctatataatgacggctcactttctcacctgaaccaatacggcaaggtgttgcagggcgaggctattgaaaaggcggtttattggcatctttatgaccctgccaaaaaggggacatggaagggtacacgggtacagagtatcgctgtcaacggcaacgtgattgacgtcaagtattacgtgccgttcccgccgctggttatcgacaccgacttccttggcgactgcgctgggaaagggtactccctggaagcagggagtgcgtcggtagtatcagtgtctgttgtcggcggtgacacagtccgtctgacactcgaccaggcgccagcgaccacagaccacttgctaatcgggttcacaaacaccaccccggcaaataacggaaatatttacccgcttgtttgcgtgcacgattcatcgccgtgggcatcgcgttacatcacgaaaaacagtaatccggttccgctctataactgggcaaccctcgatcgcattccattaactggggagttttaa

SEQ ID NO: 434642 - DNA, 897 bp, Serratia marcescens
atggcaacaggcattaataccggcgtagcattcaacactagccgctggtcaccgattgatctaaccggactcattttgaatgcgacaacactttttaatacccataaagcccgtgtacttgcggatggcggtattattcccgacgaaactggttgcctttcgcgtttcaagttgttagttgataacggcatgtatgaaaatgtcgctgtttcactaacaccgcgctttgggctgaaactttccggtgatggtgtttctgtacagaaaatttacaacctatccggcccagattttatcagcgtaactcaggctggtagctggctgccgcaatggaattcggcaactggctctgttcgcgtgcaagttaattcatcagtcgcaggctatctccagtctgccagtaatatcacggttcaggttggcaattcatatgttgtcagttgtgtagggaaagatacagatccgactgatgcggttggtctgacactcggcgcggtgatcggtaatttgccgatggcctattgccgtatccaaaaaacaccgactcaggatgaggcgtatcgctatggaacgcgaggtagtgattataagagcccccgcagcgcgggagaggcggtaagcgtattcaaaactccgtacatcgattatcagccgtctgccgcatttttcgatgtcagcgcgggcgttgtgacgccgttcgacaacggccgcattgggacaccggcaacggcgacaaccggcgcgctttatgcgatgcgttccgctacgcctgtaatcatcggaaacccggcgtttacaggttctgtgatgcaaaactgcgatggttcgttccgagattttacaatcctgagctctgctcaatccgctgatgcgctgattttgtctcgcatcgtgtaa

SEQ ID NO: 434643 - DNA, 240 bp, Serratia marcescens
atgggaagcataattctcgccggcaggcagatcttcattctcaacgaaaacgacagataccctgagccacagcaaaatagcccaccgatgttcgcaatccgcgaagacgaagaaggccagcactggctttatgtgtggcataaagggcgctggccgcttgtttcggaaaagccattcgaaacagagggaaaagccgttgatgcagcactcgcattcgactttgccacgctttacaaatag

SEQ ID NO: 434644 - DNA, 1155 bp, Serratia marcescens
atgtattttccgctcatcagcacccctaacagcacccctcaaatcgtaccgaatggtttaactatggcctattacagcatcgaaaaaagaaccaaagcagatggtactgtacggtatcgctgcactgttggtgtccgtgaaaaaggcgcctatctattccgtgaaaatagaacgttcagcaaacaggcgctggcaaagacatggggcattaaccgggttgctgagttggaaaaaaacggcatcccaaactctaatgacaccgaccggataactgtggccgaactcatacaaaaatatcttgatgatccagaaataggtggaaaggcgggaaaagataaatcctctactctgcgcatgttgctgaccgcagagtttagcttcttagccctatcaaagctgcaggccaatgacatcattgatcactgcagacgcagggttgctaacggcgccgctccatcgaccgtctctcatgacttgagttatcttggcacggtattgaaagccgcaaagcctatatacggcatcagctacaccgctaatccgattgatgaagcaaagccacttctggctaagatgcgcctaatctcgaaatcgaataggcgaactagacgccctgacgaaaacgagatagatgttatcgttgctgccttgcaagagcggcaaaaccatccccgctccaggataccatttgtcgatattttcaatttttctattctttcgtgcatgcgagtcggtgaggtttgccgtatagaatggaatgatattgattatgttcagaaatcagttcttgtaagggatagaaaggatccgaggaagaaagcaggaaatcacatgagtgttccgctgcttggtgaggcgtgggagatagttatgcgccaagagagggtttcaaaatacattttcccttataactcaaagtctatatcagcagcattcatcaaggtgagagagaagatagggatagatgacctgcactatcacgatcttaaacgggagggagcaagtaggttgtttgaggctggatttagtatcgaagaggtagctcaagtaactggacataaaaacttaaatacattatggcaggtttataccgagctatatccgaaatcgcttcatgaaaaatttgatcttcttaagaaatcaaaggacaaataa

SEQ ID NO: 434645 - DNA, 1371 bp, Serratia marcescens
atgtcttatccagccgaaccttttcgtataaaaagcgttgaaacggtaacactgctctcccgggaagaaagaataaaaaaaatagaggaggcgggttacaacactttcctgctgaattcgcgggatgtgtatatcgatttgctgaccgacagcggcaccaatgccatgagcgataaacagtgggcgggcatcatgtcgggagatgaagcctatgccggcagcgaaaactttttccaccttgaacgtaccgttcgcgagttgtttggcttcaaatatctggtgccgacccatcaggggcgcggcgcggaaaatttgctctctcaggtcgcgataaaaccgggccaattcgtcgccggcaacatgtatttcaccaccacccgctatcatcaggaaaaaaacggcgccacctttgttgacgtcatcagagacgaagcccatgacgccggcgcgattctgccgtttaaaggcgatgtcgatctgcgcaaactggcagcgctgatcgcggaaaaaggtgctgaaaacatcgcctatgtttgcctggcggtcaccgtcaatatggccggtggtcaaccggtatcgatgggcaacatgcgcgccgttagcgaactgacccgtcgacacggcattaaactttattacgatgcgacccggtgcgtggaaaacgcctatttcatcaaagaaagagaagagggattcaggcagcggtcgatcgcggatatcgttctggaaatgttcagctacgccgacggctgtacgatgagcggcaaaaaagactgtctggtgaacatcggcggatttctttgcatgaatgacgaagaaacgtttaacgccgtgcgggaattggtcgtggtgtatgagggaatgccctcatacggcgggctcgccgggcgtgatatggaggcgatggcgatcggcctgcgcgaagcgatgcaattcgaatacattgaacatcgtgttcagcaagtacgctacctaggcgacaggttgctcgcggccggcattcccattgtcgaacccgtgggcgggcatgcggttttcctcgatgcgcgccgtttttgcccgcatcttcaacaggagcaattgcccgcgcaaagcctggccgccagcatctatatcgcaaccggcgtgcgcgccatggaacgcggcatcgtttcggccgggcgcgatgcgaagacaggcgacaaccgtcggccgaatctggaaaccgtgcgcctgaccataccgcgtcgcgtatacacctacgcgcatatggacaaagtcgccgacggcattattgcgctatatcagcgcagagcaagcattcacggtctgcagtttacttatgaacccaaacagctccgattcttcacggcgcgttttgcttaccgctaa

SEQ ID NO: 434646 - DNA, 1023 bp, Serratia marcescens
atgcgtttagcggtaattcctcctcgttgtcatgacagaaacattcttgatatcaccatgaatttatatacttatccaaccatcattatcgcgcaccgcctgggcgtatttgaattcatgtctaaatcgccaagaaatattaacgatatcagtacagaactgcagattaaaaagcggccggcggaagcgatcatggccacgctgcgcgcgttgaatctggtcgaactgaatgcgggcctctttaggctcacgtcggaggcacaagagtttttattaaagggcagcccaaattacttcggttacttttgggacatgatgtatgaaaacagtgaaaacttctcgctaaaaaatctggaatcagccatcaggaaggatacggcccaagtttatcgcgaacgcgctcttttcgatacgcatgctcatgataccgagaaagcgcgcaaattcacccacgccatgcatagcctgagcatgggctcggccagcgtttggcccaccgcgctctctttggcatcacaccgcaaggcgctcgatatcggcggagcatcaggcgcgcacgccatcggcatggctgcgcattggcccaatctccagtgcaccattttcgatttaccggaggtttgccccctttcggccgattatatacggcaatatggttttgataatcgcatcggcacctattgcggcaatatgtggcaagatgattaccccgctgcggatcttcatttctactccaatatattccacgactggccgacggaaaaaaaccgttttctggcacaaaaaagctatgcgtcattatcgaaaggcggaaggatcgttattcatgaaatactgtatgacgacacagctccggggccacttgccgctgctgcctacagtttgatgatgctaggctggacggaggggcaacaatactccggcaaagaaattggctctctgttatctgaagcgggattcgaaaacattgaagtatttcccgcccttggttatttcagcatcgtcaccgcaataaaaaaataa

SEQ ID NO: 434647 - DNA, 951 bp, Serratia marcescens
gtgcgcaaaataggattgtgcagcgtggcgctgctcctgctggcgctcggctgggtcatttacgtcaacgactttcgttttgtcactgaaccggtcacggtgaccgccggcggcaaccggctgaccggcacgctggtgttgccgcagcatgcgccggtcaagcccggcgtcgtggtgttcgtacacggtgatgggccggctaacgccagccgcgacgaaggctattacggcatttgggaggcgatggcgcagcagggctacgcggttttatccttcgataagccgggcgttggcggctccggcggcaactggctgcatcagaccatggcggatcgcgcgcgggaaaccgccgatatcatcgactgggcccggcgggacgggcgcttcgatgcgcgctgcgtggggctgtggggcaccagccaggcggggtgggtgatgccggcggtggcgcgtttgcgccccgacatcgccttcacgctggcgctagcgccggcaggggatgatgaagcgctgatccaggcgcgcgaggcgcattggcgccacattcagacgctgctcgaacagccggacggctacgcgcagtaccgccgcgagtatggcgccgccgctgcattgagcgccgaccgctggcgctttatccgcgctaacatggccagcgacgcgacggcggaattgcggcatttcaccacgccggtgcacctgatcctgggcgggcgcgacgtcaacgtggacgcggacgaaaccgagcgcgtgtatcggcaaacgatcccggcctcgctgctgacggtgacgcgcatcgacgaggccgatcatgtgatgatcaaaccgctgttcgcccgccatccatggctgatcaacgtggttggcctgtttgcgccgcgctcggtgcaatacgacgcctaccgacaggacgtggcggcctttctggccgctcagccctgcgggcgctaa

SEQ ID NO: 434648 - DNA, 237 bp, Serratia marcescens
atgccagtaaaacaacgaacgacgcaaagtgtgaccatgacgctggaacgcagtttgttgagccgtgcgcgtgaggcggggattaatctcagcgcgacgctaactgctgctttagatgctgagttacgtcagcatgagaggataaaatggcaggaagaaaaccgagaggcgcttgaagcgcttaaccgatttaatgatgagcatggttgctttagcgacgaatacaggacgttttag

SEQ ID NO: 434649 - DNA, 546 bp, Serratia marcescens
atgaatccgttaacaataagaattgacgatgagaatagttatttctcgttgggattacagctgtatattaccgactatgccagggaacataataaatcggtgcggtttttaagccggggcgatgaagaacaccccggtgtggtgatcaccacgcgggggcggcgcatcacgcactggtgcacgccctggcagggagggcacctgcaactggtgctcattcgggacagggcgcccgcgcaagcgagcgaggtctggcgtgaaatttatcgcactgtgccgctcaaggcgcttgcgcccttattggcacggctgttcgccgatgtgaaaggcggtcggccggagaaggcctggcgattcacgacgcgtgagaaacaggtgatgaactacctgcgcaaaggctgggatcagtccaaggcggctaaagtgatgggcgtcagcgtaaaaacggtgcatagccataaacgctcggtgatgagcaaactgcagctcacccgcagccatgatttcatctattggctgttgtcccacgagggagattattcttaa

SEQ ID NO: 434650 - DNA, 528 bp, Serratia marcescens
atgaacaagttgtgggcgttgctgttggggtattgtgcgctgctgccgccgccggtggccgccgcggccgataacctgcatttttccggcgcgctggttgccgagccttgcgtgataccgcccgggcaggaaaccatcgcgctcgatttcggcggcgtggtggacaaatacctataccagtaccggcgtacgccgggcctggcgttcgagatcgtgctggccgactgcgatccggcgctgggcaagacggtctcggtgaccctgcaggggagcgagagccgggcgctgcccgggctgctggcgttggcgtcgggcagcggagccaccggcatcgccatcggcctagagacgccggcgggggcggcgctgccgatcaaccgcgccagcgataagatcacgctgctgcccggcgccaacgcggtgcgtctgcaggcctatgtgcaggcggagccgggggcgctggcgaacaagacgcttgagtatggcgcctttggcgcggtggcgacctttaatctcaactacgaataa

SEQ ID NO: 434651 - DNA, 486 bp, Serratia marcescens
atgacacgaaaggcgtttattttggcgctggtgctggccggtgcctcggtgcaggcggcggaagaggcggcaatgaaatttcatggcacgctgcgcgccccgccgccctgcacgatcaacgacggcggcatcgtggagaccgatttcggccagcgcgtcggcatcaacaaggtcgatggcgtcaactatcgccaggcggtggcctatcgtctcagttgcaatcgcaacgacgcgctgccgtgggaactgacgctgacgctgaaaggcaatgccacggccttcgacaaggccgccctgcagaccgacaagaccaatctggggatccgcctctatcgcaacgatgagccgtttttgatcaacagcagcctgaatatcgatcccgccaacccgccgcggctggaggccgtgccggtcgccaggccgggcgcggaactcagcgaaggcgccttcagcgctacggcgacgctacaggcggattaccaatga

SEQ ID NO: 434652 - DNA, 492 bp, Serratia marcescens
gtgaagagacagaataaagccgggcgactgtggatgggcgtattgctgtgcgccgcggcgttgcccgcgcagccggcggcgaccctgaacgtgagcgtgacggtgttggccccgttgccctgcgtggtcaacggcagcaagccaatagacgtggattttggtccggacgtcatgaccacccgcatcgacggcaacaactaccgcacgcccatcgactatacgctgacgtgcaacgagccggcgaataacgccatgcgcctgcagattgtgggcgcggtcgccggctttgacagcaggctgctgcaaaccgacgtcgacggtttaggtatcgccctgctgcgcgacggcgtgcgcttagcgccgaacacctggcaaaacttcacctttcccacgctgccgaagctggaggcggtgccgatgaagcaggccgccgccacgctgcgcaccggggatttcagcgccgccgccacgctgcgcgtcgactatcagtga

SEQ ID NO: 434653 - DNA, 657 bp, Serratia marcescens
atggcagggaaaataatggccgcgcgtcttgggtattggggccgcagcgaactgcgttattacgccgccctgggcgggctggcgctgatggcgccactcagcctggcgatgctgttgtggctgctgccggcggcgcaggcggtagataactgggatgtcgagggtgccagcggggtgctggagatccggggagcgctgaccgaaagcgcctgtcggctggaaatggacagcgcacgccaggaggtgtggctgggagagatcgccaccggccgcctggcgcggccgggcgatcgcggggtggcggtgagttttgcgctgcgcctgcgcgactgcctgcgcggtccggcggccagccgggacgaacgcaccggcgcccgctatgccgcggcggatcagccggcggtgagggtgagcttcctggcgccggccgatgcggacaacccgcagctggcgcgggcggaaggcgtgtcggggatgggcatacgcctgcttgacggccaggggcaggacgtacgcctgggcagccgtggcgaaccgctgtggctggcgcccggcaacgatacgctgtcctaccgcgtggcggccgagcgcaccgccgcgccattaacggccggcgcctaccgcgcgctgatgacgttcaacctcagctatgactga

SEQ ID NO: 434654 - DNA, 378 bp, Serratia marcescens
atggcggcgggggggggcggggggattactccgccgataaagccgttgaattgctctctcagcgacatttccctgacgcacggcaccatcgattatcgccggatcccggaaagtgaggcgatctactctgccaccgcttactgcaatcggcaggcgacggtaaaaatcagcgttgccaacggcgggagggttaatttgaacagcgatggcacgttttattcactggtttcaatcatggataaaccgggggacgctcagctttccgtaaacggcaatactcccgtcaaattctcttcgcggctttatgcgaaaggcggcaacgtggtaatacgcggggcttttagaggcacggccgtcgtcgtcatgaatgtattgtga

SEQ ID NO: 434655 - DNA, 537 bp, Serratia marcescens
atgccttttaaggctactgtaaggtttttatacgatgttcgtattcgacagtgcatatatctttatttgactaccggtggcaatgattacaaattaggttcttcttgtgacggtgtactgccgcctttgccgcccaccacgccaaagccgccggagccgctttcttgctcggtgacatggcaaagcagcggtgagattgattttggcgtgatgacgccgggtgaaaataaagcaaagggcattgccgccaaacttgcctgccagggcgggacttcgggaaaagcgcgcctcagatttaccgatgtcaatcaggtgggggcaaataccgtcacgctgcgtaagagtggttcaaatgatgaaataaaagtgaaattgtcgattggcgaacctaacttgcctaatgagcagataattgatgtctcgccaggctttaatgcgacctatgcctttgtcgccaaattggacggcgtgcagctggctggtgttgatggcggcgatttttccggaaatgcgctgattgtgtttgaagttatttag

SEQ ID NO: 434656 - DNA, 1128 bp, Serratia marcescens
atgcaggcactatcaccgttatctcgctaccagcaggcgctggaggcgggggaatatcaggccgatgaggttcaacgccgggccgtcactcaactggatcgcatttatcaggccttgctgcaaaaaccggcggcgagcgcgccggccggcgggctgcgcggcaagctcagccgtttgctgggcaaaggcggcgaaacggtgccgcagcgcccggtgcaggggctgtatatgtggggcggcgtcgggcgcggcaaaacctggttgatggacatgttcttccacagcctgccgggcgatcgcaaaatgcgtctgcacttccaccgcttcatgctgcgggtgcatgaagagctgaccgagctgcaagggcgggaaaacccactggacatcgtcgccgacggcttcaaggccgaaaccgacgtattgtgcttcgacgaattcttcgtgtccgacatcaccgacgccatgctgctggccacgctgctgcaggcgctgttcgcccgcggcatcacgctggtggccacgtcgaacatcccgccggacgatctgtatcgcaacggcctgcagcgggcgcgtttcctgccggctatcgatctgatcaacgagttctgcgacgtgatgaacgtcgacgccggcatcgactatcgtctgcgcaccctgacccaggctcacctctatctgacgccgctgaacgaccagacgcgcgcgaccctggatcggatgttcgtcaaactggcgggcaaggcgggggaggaggcgccggtgctgcagatcaaccatcggccgctgcaggccattcgttcggtggacggcgtgctggcggtggatttccacacgctgtgcgaagaggcgcgcagccagctggattacattgcgctgtcgcgactgtatcacagcgtgatcctgtataatgtgcaggtgatggggccgctgaaagagaataccgcgcgccgtttcctggcgctggtggacgaattctacgagcggcacgtcaagctggtgatcggcgccgaggcgtcgatgttcgagatctaccagggggaacggcttaagttcgagtaccagcgctgcctgtcgcgcctgcaggaaatgcagagcgaagagtacctcaagctgccgcatctgccctga

SEQ ID NO: 434657 - DNA, 498 bp, Serratia marcescens
atgattttcattcgttccagtgagattcgtttcgcccactggtctgaaattgatttcaaaagtaagttatgggtgccccccgaacagcgtgaagcgattgaaaacgccaaacattcgacttgtggtgccaaaatgaagcgtaaccacttcgttcccctttgtaagcaggccatgagaatactgaaagagatccgacaactgacttatgaagaaggccatgatgacggactgatcttcactggctgttatggctcgtttaagcccatgagcgaaaacaccatcaacaaagccctgtgcagtatgtgctatgatacgaagcaggacatctgtggacacggttttcgcacgcaggcctgtagtgccttgatcgaatccggtttgtggtcagaagacgctgtagagtttcaaatgagcgataaggaaagcaacagcgtccgtgctgcttatacccacaaagccaagcaccttgaccagcgccgcctgatactccagtggtag

SEQ ID NO: 434658 - DNA, 684 bp, Serratia marcescens
atgtcactaactgatattaaagcaaaaaatgcaaaaccccttgagaaggaatacaagctaactgatggctttggtatgttccttcgtgttacccctaaaggttcaaaatactggcaaatggcttaccgttttgaagggaagcaaaaactcttctctattggtgtttaccctgctgtttctctgtctgacgcaagacaacgccgtgatgaggccagaaggcttcttgctcagggcattgaccctaatgcaaagaaacaggcagaggttaaagagctaaaagccaagcgtgataaaacacgctctttcaggatggtcgctaaggcttggtttgccacgaaaacaaaatggtctaaagattatggtgattccgtatggaagcgccttgaaacctatgtcttcccgactattggagacaaagatgttgacaagctggatacaaggaacctgctggttcctgtgaaaaaggtcgaggcacttgattatcttgaaattgccatgcacattcaacaatacattactgcgatcctccgccattctgtgcaacaaaaactgatacgtcataaccccgcctataatatggaaggtgcagttcagaaaccacagactgaacaccgccctgcactggggctagaagaaatcctccaactactgaaaaaattgccgaatacaaaggtcacaggctaa

SEQ ID NO: 434659 - DNA, 159 bp, Serratia marcescens
atgcttttttacgctttagttaagcgcaggcgaaaaacggggagagataggatttttaccgagggaatggcggatattttccgctatttcaaacgactggcgaaattgaaaaataaagacacaattaagcgcatcgcaaaagtgacaactgctatgtaa

SEQ ID NO: 434660 - DNA, 570 bp, Serratia marcescens
gtggagcagctggcgagcctgcgcgtgaccccgaacatgagcacctggcgcccgtgcgaccaggtggaatcggcagtggcgtggcagtacggcatcgagcgcaacgacggcccgaccaccctggtgttctcgcgccagaacctgacccagcagccgcgcagcgcagagcagctggcgaacgtgtaccgcggcggctacgtgctgaaagactgcgcgggcacgccggacgtcatcctgattgccaccggctccgaagtgggcatcacggtggaagcggcggacaagctgaccgcggcgggccgcaaggtgcgcgtggtgtcgatgccgtcgacggacgcgttcgacaagcaggatgcggcgtaccgcgagtcggtgctgccggcggcggtaacggcgcgcgtggcggtggaagcgggtatcgcggactactggtacaagtacgtggggctgaacggcgccatcgtgggcatgaccaccttcggtgagtcggcgccggcggagcagctgttcgccgagttcggcttcaccgtggacaacgtggtggccaaggcgcaggcgctgctgaagtaa

SEQ ID NO: 434661 - DNA, 942 bp, Serratia marcescens
atggccattcgaagaatcgcttatgcttattatgatccccgatgggataaattaacaatgcctattgttgctctgagccgaactgaggttgaacctttagaatatgaagaagaaatgaaagggcatttacattgcccctcttgttatgagcctttgttaagggttcctggagatccagcagtagctgttatggctaatggagctgatgctctttttcgtcatttccctgatgaagatgcaccatattgccgcttacggagtggtattatggttggaaaaaaatacgattcagaggctgaagcagctaaagctgttgaagatggtgatctgattattattagcggctttaaacaggaaaggcctcaaaatactgctaggcagcaagatgaagagtatggcgaaccggttgaaacagaatttgaaagtgaagatgggccatcagttaacgttccagcatctcgtcatgaaggtcagacgtttaatctaccaagtaagataaccagtgttcaatctctatgtgcgaattttcgtcaaaattactaccgagatattcatgtagtggtaggagaaaatgtgcaccagtatgttttagcagaatgtttgaaagacgcttctgaaataaatgctgaagatgacttccctagattctattttggggaaattgtacgcatagatcggtttgaaaataaaagtcatgtatttttaagacaccctagacttgttggtaacgtcgattttagaatatcagccagtaacggcgatctggacgctagaggaattactcagagtaatgcattaagacgaattcttctattttttggaaaaatcgacccatgtggtgcaggatattggtctaaagataaagcatggggggaggttggtattcttcctgtgaaatatgaaaattttcttcgtgcaaactataaacgtgatgagaattga

SEQ ID NO: 434662 - DNA, 276 bp, Serratia marcescens
atgcgggtaatcaacaaaacggaaaacgtcgaacgcttctttgatgaggaaaaagtcattgaagagcgcgaaatactttaccagttcagcaacggcgtcatcatcttgtgcaagatggagtcggatacctttcaagccgacgagctgtgccgcgaatgctggataagctacgaagtcgtacacggcggctgccatgccgtcccgccgagaaaaaagcagctttataatcgctgccaggaagcgtgctgggtgaaaatgcagtcggagcacacctga

SEQ ID NO: 434663 - DNA, 1953 bp, Serratia marcescens
atgtcagttaacaccgctcccatcattgcgttggataacgtctcgcgcgagtttcaggcgggggagcagaaaattgcggtcctcaagcgcatttccctgagcattcaacggggggaaatggtcgctatcgtcggcgcctccggttccgggaaatcgacgttgatgaacatcatcggctgtctggacaaaccttctcagggcgacgtgcacatcaacggggtggctattgggcaagccgacgccgatcgcctggcgcagcttcgcagccggcatatcggctttatcttccagcgctatcacctgataccctatctgaccgccggtgagaatgtggcgatcccggcgttgtataccgccatgccggccgccgaacgccgcctgcgggcagcgcatttgctggcccggctcgggttggcgcagcgcggcggtcatcgcccggcgcagctttccggtgggcaacagcagcgggtcagtattgctcgcgccctgatgaacggcgcggaaattattttggccgacgaaccgacaggtgcgctggatagcgccagcggtcaggcgttaatgaccattttgcacgagctgaacgctatcgggcataccgtcgtcatcgtgacacacgaccggcggatcgccgaacaggcgcggcggatcattgagatcggcgactgcgagatcgtggcggatcgtcgccatgaagccacccgacatctttctacgttcgaacgaccgctggcggcgccgctgaaacgcatggcgccgggcgcggcgttgaaagaggccgtcggcatggcctggcgggcattgctggggcaccgggtccgggcattgctatcgatgctcggcatcattatcggcattgcggcggtggtctccgccatcgccatcggagaaggcacgcggcgtaatattctcaaggaaatcagccagcttggcaccagcacgctggagattcgcccaggcctcgggtgggagaaaccgcggcccgaccttgcgcgctcgctgagcgagcgggatgccgcattattggcggcgctgccttacgtcgacagcgtctcgccggtgatcggcacccaactgctggccgttcgcgaaggcaaacaggtgccgcttgccgtgatgggcgtcggcgaagggtatttccgcacgcagggcattcgcctgctttccggcggcctgtttaccgcgcaggatctgagtgagcgcgcaccggtagcggtgattgatcccttgctgaaacaggcgctgtttgcttcccggcaagatccgttgggcgcggtagtgctgatcgcgggcgtgccttatcgggtgatcggcgtcgcgcagcgccgcggcgctcaatacgccggctctcagccgcttgcctggctgccctatacctccctcaccggccgcatcgccggcgatatgccgctggaatccattgtgatgcgagtgaatgaaaaactgacgctggaagaggcaggacgggatgcgacccggcgtttgatcgtagaacacgggcggcgtgatttcttcacgttgaccgacgatcagctgacgcaatccattcagcgcgcctcaggctccatgcaactgttgattaccgcgattgccgccatctcgctgctggtgggcggtgtgggggtgatgaacatcatgctggtctcggtgacggaacggacccatgagatcggtattcgaatggcggtgggcgccgccgagaaggacattatgcggcagtttttgattgaggcggtggtgatctgcagcttgggaggcgtgttggggatcgcctgcgccgcgctggtcaaaggggttctgagcggattggcgccgcaggtgacgatgatctttacctggccgccgttgctgctggcctgcggattttcggcgttgatcggtgtcgggttcgggttctttccggctcgcaccgccgcgcgcctgcagccggtggaggcgctggcgcgagaatga

SEQ ID NO: 434664 - DNA, 198 bp, Serratia marcescens; identical to SEQ ID NO: 37011

SEQ ID NO: 434665 - DNA, 1500 bp, Serratia marcescens; identical to SEQ ID NO: 312112

SEQ ID NO: 434666 - DNA, 174 bp, Serratia marcescens; identical to SEQ ID NO: 16562

SEQ ID NO: 434667 - DNA, 309 bp, Serratia marcescens; identical to SEQ ID NO: 86308

SEQ ID NO: 434668 - DNA, 900 bp, Serratia marcescens
atggaaagggcaaaagagcgggacaaagcgttgtcacttgtccgcaagcctccacaaggcgacgctcagccagatttttttgcgcccagcctttatgacgtgggcggccgcgacaatcgcagcgtcatggatgtggccgtgttccgtttatccaagaaggacaagcgagccggagaactgatccgctacgacctgccggatggatacgtggaagtgtccgcaggagcgcacggaatggcctccgtttgggactacgacattgtgctgatgatggtgtctcacttgaccgaagctatgaaccgctatcgagaaggaaagggtggcaagccggggagagtgtttcggctgcatgttagcgacatcctcagatttgcccgacgtggtaacggtagtagtcaggttaagggagtggaagccgcgctagatcggttgcggggtactaccatcaagacagtgcgcgaaagcggcaagttccggacaaccgaagccgaggggctgatcgcgcgctatcgtgttctgtcacgcacggacaccaagaagataagttctgtcgagattgaagccccggagtggatttatcgagaagtcaccgagggcaagcggccggaggtacttacagtacaccgggactactttctgatcgagccgggcataggacgctttatctaccgactggctcgccgtgccgcaggcagggatagcgctaaatgggctttcaagaccctttacgaacgcagtggaagcggtggctcgttcaaaaaattctgtttcttccttcgcgggatcatcaaagccgatgacctgcctgaatatgccttgtgcgaagaagcggggaaggatggccctctactggtcatgaggcaccgcaattcctcgtcggaaccgctgggcggttcctaa

SEQ ID NO: 434669 - DNA, 1554 bp, Serratia marcescens
atgctaaaaaagattacggtgaaggctgggctgatcgccctgctgagcctgatgaccatgctgctgatcatggtcagcgttattggcgtcaacgcgattaacgaaggatcgcgctcgatccataccttaaaccagatcctcggcgaagagctgggctcgctggccaacagctccaacctgacgctgcgcgccagaaccgccgcctcgctggcggtgcgccaacgggagatcggccagactgatgtctccgacgccaccgtgggccgcatctacggttacctcgagcagtcgaacaaggaaatggcgcgctttgtcggcgtcggcaccgtgaccgagcgcggccgcgaactctccaaccgcctgcaaaacagctaccgcgcctatctggagcagggtgtgaagccgatggccgccgccatcaaggccggcaagattgatgagtattatcacattcaggagacgcgaatctccgcgttgagcatcgcgtttgaaaaggatctcagcgatttccgcagcttcgccatgaagctcggcgcgcagcaggtgtatgacgcggaaagcaatgccagtaccaagatcacgctgatcgtggtggcgggcctgctcagcgtgctgctggcggtgctggcctggttcgcgctgcgggtgatcattctgcgcccgctggacgagtccatcgcgcagctggaacacatcgccggcggcgatctgacccacgagatccgcggcgagggcgataccgagatgggccgcctggtgcgggcgatgcagcgcatgcagcaggcgctggccagttcggtcagcaaagtgcgcgacgccagcagccagatcgacaccggttcacgcgaactggcggccggcaacctgcatctggcgcagcgcaccgaagaatcggccgcttcgctggaagaaaccgccgccagcatggaacagctgacttcgacggtgaaaatgaacgccgagaactgcgaacaggccaaccaactggcgctgagcgtgtccgatatcgccaaccagggcagcgaggtggtcagccaggtgatgagcaagatgcaggcgatcaccgacagctcgcgccgcatcgccgacatcatcagcgtgatggacggcatcgccttccagaccaatatcctggcgctgaacgcggcggtggaagcggcgcgcgccggcgaacagggccgaggttttgcggtggtggccggtgaagtgcgtaatctggcgcagcgcagcgcccagtcggcgaaagagatcaaagggttgatcgaagcgtcgcagaaccgggtgcaggaaggcgagcagatggtggagtcggcggcgcagaccatgagcggcattaccggcgaagtgggccgggtgacggcgttgatgcgtgagatctcggcggcgacgcgcgaacaaagcagcggtatcgaacaggtgaacctggcggtggcgcagatggatcaggtggcgcagcagaatgcggcactggtggaagagtcggcggcggcgacgcgctcgctggaagatcaggctcagctgctggcgcagagcatggcggcgttcaagctgtaa

SEQ ID NO: 434670 - DNA, 1380 bp, Serratia marcescens
atgcgcattcacattcttgggatctgtggcacctttatgggcgggttggcgatgctggcgcgctcactggggcatgacgtcaccggttcggacgccaacgtctacccgccgatgagcacgctgctggagaaccaggggatcgatcttattcagggttatgatccggcccagctggatccggcgccggatctggtgatcatcggcaacgccatgacgcgcggcaacccgtgcgtggaggcggtgctggaacgtggcatcccttacgtttccggcccgcagtggctgcacgatgccgtgttgcgcgatcgctgggtactggcggtcgccggcacccacggcaaaaccaccaccgccggcatggcgacctggatcctcgaggcctgcggctaccagcccggcttcgtcatcggcggcgtgccgggcaacttcgacgtatcggcgcgccttggcggcagcccgttcttcgtgatcgaggccgacgaatatgactgcgcgttcttcgacaagcgctccaagttcgtgcactacagcccgcgcacgctgatcatgaacaacctggagttcgaccacgccgatatcttcgacgatctgaaagccatccagaaacagttccaccacctggtgcgtctggtgccgggcaaaggcaagatcatcctgccggacaacgacagccacctgaagcaggtgatggcgatgggctgctggagcgagcaggagctggtgggggaagagggcacctggcgcgcacagaagctgacgccggacgccagccattacgctgtgttcctcgacggcgaacaggtcggcgaagtgaactgggcgctggtgggcgagcacaacatgcataacggcctgatggccatcgccgccacccgccacgtcggcgtgcagccggcggacgcctgccgcgcgttgggcgatttcatcaacgcccgccgccgcctggagctgcgtggcgaagccaacggcgtcacggtctacgacgacttcgcgcaccacccgacggcgatcctggccactctggccgcgctgcgcggcaaggtcggcggcacggcgcgcattctggcggtgctggagccgcgctccaacaccatgaaaatgggcatcagcaaaaacgatctggcgccttcgctcggccgcgccgacgaggtgttcctgttccagccgcaccacattccgtggcaggtggcggaagtggcggatgcctgcgtgcagccggcgcattggagcgcggatctcgacacgctggtggacatggtggtaaaaaccgcacagccgggcgatcacattctggtgatgagcaacggcggtttcggcggcattcacgaccgtctgctggacgcgctggcgaaaaagcaggaaccgaaagtcacctactga

SEQ ID NO: 434671 - DNA, 279 bp, Serratia marcescens
atgtacctgactccctttgtcaaagtggatgccattttgcgtcagcagcgtttcataacggattggaggttcatgatcgataagccaatcatccgccacggcttctcggtaggagtagatgtaaatcggtttgccgaagatatcgctggtgtgtttcgccggggtggcggtaaggccgatttttaccgcgtcgaaataatcgagcacccgacggtaactagagaggtattggctggcgtcacgggtcgagagctccccttccgtcatttcctgatctaa

SEQ ID NO: 434672 - DNA, 813 bp, Serratia marcescens
atgtcacatagcttatacccaactaccttgtttcattttactgaaaagttagataccttatttgagatacttgactcaagtgattttcgaatttctttcgctagagaatttatacaaggccagagcacgaatagaaatttcggtataccgatggtttcattttgcgatatcaggctaacacagcttacccagcatactgaaagttatggacattatggcatcggattatctaaagattgggcaaacgaaaatgggcttaatccagtaatttacatgtccaagcactcttccgttttcgataattataatctagagattaggagtttaaaatcagagattgataagttattaaagcacttagaagaaatgaaatcttcaggtacaaaagctcaattaactaatgcaaagcggaaatataactcggcgcttctaagttacaagaaaactgtagatcctttgcgatacatgaaaaattaccaggcaactttgaaacgacgcaatcgcccggaggtgcctaactatatttttgcagatgagagggagtggcgatttgttccaggtatagaaaagtcaattggaaaaccaataattgctgcttcgaaaaacatatcaactcaagatggcaaggaaaagtataacgaatattatgataatgacaggttaccattttctcataaagatattaaatatgtcattgtaaagcatgaaagtgatgttgaaaagatgatggactttctgcatgaaaagtatggttcaaaaagtagcttgattccaagggttctctcaactgaattgatagcgaatgatatgtaa

SEQ ID NO: 434673 - DNA, 1338 bp, Serratia marcescens
  misc_feature (280)..(313): n is a, c, g, or t
atgctcgatctgcatggtgaatatggtaggtgcttaaaagacagagcaaatatatttaaagtcaatgcagatcctaaccctattgtgggtgaaaatgaattatatataccctattgggcgcttaattttgatgaactttcagaagtatgttttggtgggatagactcagaaaaagaacgtaatatcttacttgagaaaatacaaaaagtaaaaagtgagtcgcttaaaagaacacctcgcgatggatcaaatcaggatactttaagcgcagattcacctnnnnnnnnnnnnnnnnnnnnnnnnnnnnnnnnnncacctatacctttcaatttacacagtttatggcatcaattgtatacagaaacctttgggacatacattaaaacccaaggaaaacaaccaattgacacattagcttatgaaacattagatgatggatctgagttgaagggtaatgcactatcgggtatacctcccattttcaagaatgtatcaaatgaagccggttccacaaagataaactacctcccatcccctcttcctttaggtaagcaactacaagcattaggttcaaagctcagaattccaagatatgacttcattttcaaaccaggcgaatggacaccatcaatagatggtgatattagtaaagatttagatcagctacttaaaggctggattggagataaacctgtaactattttagatttatctggtgttccatctgatatattgaaaaccatcataggtgctgtattaagaatattatatgaagctctattctgggcaaggaatttatctcaaggtggtaggcaccgaccattattaatagtcatggaagaagctcataattatttgaatagtcaagacaatagtatcgcatcacgtatggtgcaaaggattgtaaaagaaggaagaaagtatgggataggaacaatggttgtaactcagcgtccatcagaaattgatccaaccatactttcgcaatgtggcactttttttgctcttcgccttaacaatgcctctgatcgaagccatataacttcagcaatgtcagataatcttgatggattgacaagtatgcttcctattcttagaacaggagaatgcattgtattaggtgaggccgtaaagttaccgatgaggacattagtaatacctccaccaaaggaccgtagacctgatagtcaagaccctgttgtatatgataccctcccacaggatgaatcaatgacccccggtggctggaatatattaccagaaaaacaaccaaattatgccgaaatcatcgaggcttggagatcgcaaagcccacgaataagtaaagtaaaattatag

SEQ ID NO: 434674 - DNA, 645 bp, Serratia marcescens
atgaaagagaaagcaaaaattattatcaaagtaataataataatattaatctcatctattattttcctgagtggttatgcagcttataaagatactaatgctagcaacatagccacactaattggtgcactagttgctctgctaacccacgaaaagtggccattttttaacagaccaaagacggcagaaaaatttattagtagtcgagaggaagttcacgacaagaaaataatattagagataatgcaaatgctcccgttagaggacacaaaatattgccttgagtacgcacatactaatggcgctcctctcgaatttctaagaaaacttgatagaattgaaagcgcatacctttctgtggaaaagaaaatatacaacccggcagttgaagaaaaaaagaaaattttcatctctgcggtgaaggattttaatattcaagctgcacattttctagggttgcaggaaaatcctggcggtaacgtatgtttgcctccttaccattggaagaattacaaaggcgaatcagaggatcgttactactctttgcaagaaaaagtacgtgactctgcttataacgccgttgatagatatacggaatttttagattctgtacatacctcaaaaattctgctcgcgacagattga

SEQ ID NO: 434675 - DNA, 1047 bp, Serratia marcescens
atgctggtaaagtattatggcttgttttttaatgaaaaaatgcagcgtttttcaccaagagttgattttatatcaaatggtttatttagaataactcagcctaaatacctaaatgaccaagggagcgaggctaggttatggccatattttaataggttttcaccagctgattatgcatgggcaaagaaagaacatgataaagttcaaattaatccttcctatgtcccgtcaattgaagagttggaaaatatcttcttgaaaccatgcggcttaagatatggtgaaacttttccgcatatgttacatctagaaggcttcaaatcaatggatgaatatgaccttgctcaattgactatggttgcagaaaaagttaatgcgtttctggttgaggcattgagctgtcatctaggggttctatctttatcaaagtctgatgtaaatgagcttatgtggacacattatgcttcgaatgggcagggactagcagtaacttttaatgaagaacatcatttttttaagcagtttccagccaaagaagttagctattctaaagataaaagggcatctcttacatattacaaaggtatgatgaggatgaatggtgccccactaaaaaaattctatgcagaaaattttaatgatccaattggtttgatgcaaaccctcaatgggaatggtattgatattgaggattttacagagcgactattatactctaaagatgaaaaatgggactatgaagatgaagctagaattctctgtcctttaattttttgtgaagagagtcgtgggccgctaattcaaccggagtttgcatctgaattgcctgatgaacaatcaaatgttttcggaagttattttgaggtgaatttaaaaaggataccatttgatgcatttgaatctatagtgttagggtatgctataagcgagaatgacaaggctactgttttggagttggttgggaaaaatcctggcttatctcacttgaaaattcgcgtagccaaacacaatatttatggaatggttgaggttacagacttagcttaa

SEQ ID NO: 434676 - DNA, 453 bp, Serratia marcescens
atgtttagcggaaagccgattgattaccaggatgagccgctcaaaaacgccggattttggccggacttgaacctgaaagatttccaggcgcagcggtcattaccgcccgatattgacgccaacactatcgcgcaagcgctgctggcggcagtgacggaagttaacgcggagctggaaactgtagaggcgcgatggagggtgaaaggttatctggcggcggctgatgttccaggggtaagcctgggcgaccttaacggcctgtgcgcgcagtacctaaaagcagtattcgccagggcgaaagccgatctgttgggggagttcgccacgattgggcgtcgtgatagccaccctgggcaggaaagcacggaaacccgcgcgggattgttggcggaggcgtctgtagtgatccgccgcatgaaagggttgaagcgggcaacggtgaaaaaggtatga

SEQ ID NO: 434677 - DNA, 702 bp, Serratia marcescens
atggcactttctcccgcccagcgccataaccagcgcattgagatggagcaaaagctaaagcagagccaggcgcttgaaagcacggaaagcctgcacctgatgatcagggcgttggaagccgatgttgagcatgttcgaagcctgcctttgattgccgatcgtgttgagttcaagcgcgacgtgctgttgccgcgttggatgccaacggtggaagcctatttggccagtggccaggtttatgcaaaccctgttttggcgtggtgcgtgatctggttattcgatgtgggcgagctggataaggcgttggatctggctgacattgcgatcgggcagcaccaggccacgccggagcagttgcgtagcaatttccccacgtttgtggcggacaccatgctggcatgggcgcaagagtcggcggggcgcggggaaagtgttgagccgtatttctctcgaacgtttgagcgcgtggcgaacacctggcgcttgcatgagcaagtaacggcgaaatggtacaagttcgcggggctggaaatgctgcgtggtgacggcgggcaaaaaacggcgtcgggtgtggatgatgttcaaacgctggaaaaagccgatcagctgctggctaccgctgaatcgcattactacaaaatcggcgtcaggactgcgcggcagaacattgcggcgcggatgcgaaaactgacgcagggttaa

SEQ ID NO: 434678 - DNA, 1023 bp, Serratia marcescens
atgtatcttaataatgaagcacgggatttactggataaatattcggctggtatggcggcgcattatggtgcccgcgatacctcccgttatttctccatgaataacccgcaggaaattgcgctacgcctggcgatgctggagtctgtcgaattcctgaacatgcttagctgcatggacgttgaccaactgagtggccaagtgatttcagtgggtgcttccgggttgcatacgggccgcagtgagaacgggcgttttcacaagcgtgttggcgtagacggtaatacctacgatctggttgaaaccgacagcagcgcggatctgcgctgggatctgctctctgtttgggccaacgccggccaggaagaaaacgagttctttaacctcgtacagacgttttctacccaggctttcgcgctggatatgctgcgcattggttttaacggtaaaacccgcgccaagactaccgacccggaaaagaacccgaacggggaagacgtaaacatcggttggcatgagcgcatgaaatcgatgctgggcggtagacaaatcatgactgatccagtggtgctggatgcggccggcgattacaagtccttggattcaatggcgcaagatttgattaacgccaagatcccggagcaataccgcaatgacccgcgcttagttgtgcttgtcggtgccgatttggtcgctgctgaacagtaccgcctgtaccaggccgccgatcgcccaaccgaaaaaatcgccgctcagatgctgggttcaaccatcgccggacgcacggccattattccgccatttatgccgggtaagcgcatggtcgttacgccgctgaaaaacctgcatatctatacccagcgcaacacccgtatgcgcaaagcggagtttgtggaagaccgtaaacagttcgaaagcaaatacttgcgtaatgaaggttatgcggtggaagtgccggagctgtacgcggctatcgatgaatccgctgtaacgatcggcaaggttaacgaacctctggagggctga

SEQ ID NO: 434679 - DNA, 330 bp, Serratia marcescens
atgaagaattggcaaaagctgtttggtattaaaccgaagtttgaggaagaaaccccacaagacgattcggcgcaaaacgacgataaattgcaggcgttggcaaatgcgttaaacgatctggaggcgcgtgtagccaccattgaaaatcagcttaattccgtgaaggaagacgtggacaccattacagaagtggtagacacggaagagttttcagctattcgcgataacgcgaaagaaattgttaaccgtttcaattccctgggtaatggcggtaaacgtaatccaggccgtaaacttccgtctaaagctggcaagttcaattacctgtaa

SEQ ID NO: 434680 - DNA, 1773 bp, Serratia marcescens
atggctaaatactctgaagaattaaaaggcgttgcgcgcgctctttacctgcgccgctatacgcctaaggaaattgcatccgaattaaatctgcctaatgggcggatcgtttactattgggctgaaaaatatggctggccggatctgctgagtgttgagagcacagaagacgcgatcgaaaggcgctatcagctacttgccgggcgtgataataaaagcgatctcgacctgaaagaaatggacttgcttatcgcccatgccacaaagctacgggcacagcgcaataagcataaagagaagatggcaggcagccagggcggagaaccggcaggcgaacacgcaaacgacgaggaaggacgcaaaggcaaacggaaatataagaaaaatgatatttctacgctgacgcaggaagatttcgatacctgggcagaagaacaccttttcgcctaccaaaagcacctgcgccagaatattggccagcaggtgcgaaacatccttaaaagccggcagatcggggcaacctggtatttcgcgtatgaggcgtttgaaaatgcagtaatgacgggcgatccgcaaatattcctttccgcgtcaaaggcgcaggcggaggtatttcggtcttatatcgtcaacattgcagagcaatatttcggcatcaccctgaccgggaaccctatccgactgagcaacggcgcagagctgcgtttcctctcaacaaacaagaacacggcgcagtcatacagcgggcacctgtattgcgacgagtatttttgggtgccgaacttcacccaccttaacgaggtggccagcgcaatggccacccatgacaaatggcgcacaacctacttttctacaccatcggccaaaacgcaccaggcatacccattttggatgggggacgaatggaaacagggcagcaaaaagcgcacggcggttaaattccctgatttcgatgaactgcgcgacggtggccgggtgtgccctgatggccaatggcgctacatcattacgatggaagacgcgatcgccggcggcttcaacctggccaatattgaaaaactgcgcaaccgctacaacacggccacattcaacatgctctatatgtgcgtctttgttgatagcaaggactccgtttttagcttcgccgacctggaagcctgcggcgttgaggtggacacctggcaagatcacaacccggacgccttgcgcccatttggcgatcgccccgtttggggaggttttgaccccgcccgcagcggtgatttgtcgtgctttgtgattgtcgctccccccatgtttgccgtggagaaattccgcgtattgaaggtgatttactggaagggcatcaatttccgttaccaggcaaggcagattgagcagctgtttaaaaaatacaacttcacctacctgggggtagacgttaccggcattgggagcggtgtattcgacaacatccagcactttgccatgcgtgtggcggtgcctatccgttatgacgtgaacacgaaaaatcagctggttttaaaagcggctgacgtggtggaaagccagcgcatcgaatgggacaaaaacctgaaagagatcgccgccagctttatggcggtgcgccgtacaaccacccaaagcggtaatgcaatgacgtttgttgctgaccgtagccaagacactggccacgccgaggcgttttgggcgatcacgcacgccctacataacgaaccccttaactacgagaacaaacccaaatcccgatggggagtgaaaaaagcagcatga

SEQ ID NO: 434681 - DNA, 1053 bp, Serratia marcescens
atgacgaaaaagaaaaagtatgtgaaacgcgagcaccgcggcccacagtcaaaaaaaatgagcatcatctcatttgataagcccgaaccagttttaaccacggggacggattaccggaatatctggtatgacaaagccgccgatcactacacgcagccaatcgaccggttggccctggcgcaacttatcaatctcaacggccagcatggcggcattattcacgcccgcaaaaacatggtgttgtctgattaccagggcggcggccttacctatgaccagatggaggcggcaatttttgattatttgaccttcggcgatattgcgttagccaaagtgcgcaacggatggggggatgtaattgggcttgaacccctgcccggcctctacttgcgccggcgcagaactcaggaggatgggcacgatattcctggcgattatgtcgtactgcaagaaggggaaccgcaggtgtaccccgaggaagatattatcttcatcaagatgtatgacccgcagcagcatatttacggattgcccgattacatcggtggtgttcactcggcgttgcttaacagtgaagcggtcatttttcgccgccgttattaccataatggggcgcataccggtggcattctttacacccgagatcccagcatgacggatgaaatggaggaagaaatcgaacggcagttgcgcgacagcaaaggcatcggcaacttctccacgatcctggtgaacattccaggcggtgacggcgacgccatcaaatttattgagatgggcgatatatccgcaaaggatgaattcgccagcgtcaagaacatcagcgcccaggacattttaaacgcgcatcgcttccctgccggattggcaggcatcgttccgcagaacacagcgggattaggcgaccccgaaaaggtggatcgaacgtataaaaaaagcgaggtgtacccaatcgggcgccgaatggcaatggccatcaagaacgatcctgaaatccctccgcacctgtatctaacttttgcttctgaaacaacagataaggatgcagcatga

SEQ ID NO: 434682 - DNA, 273 bp, Serratia marcescens
atgagagtcctgaaaattgaatgcccggagtgcggctcaaaggctgtgattcgcaagaccaaccggaaacaccggcagattgcagatatttattgcgcctgcgctgatgtggagtgtgggcatacttttgtcatgaatttaaccttttcccacacgattagccccagcgcgaaaacaggggataaattgctgaaaaccgttgttgaaggcatgagccaacaacaacggcaaatgatgctcgatttattgcagggtgccgcctccgccgcctga

SEQ ID NO: 434683 - DNA, 564 bp, Serratia marcescens
atgaaaatggcaactgatggcgcggcctccatagatagactgatggaggcttacggatttaggtttaaaaacgacctgtgccgccacttcgaaatttcgtccagcaccctggctacctggattaaacgagatacgttcccggcagagttgattattcaatgcgccctggaaaccaatgcatcattgcaatggctggcaacgggaaaaggtcgcattttcgagcattctcaaagtgatattgcgacactgaatagctaccttctcaaagatggttctttgaaaaactctggtagcttgatgtttgataaggtttttctacctaacaacctgaaagagccgtatgtaatccgcacggaaaacgaggcgttttttgttgataaaggctttacggatctggttgatggtcgctggctagttgaagttgaggggaagcacaacattagagaattagctttcatcccaattaagagagttaaggttatcggcggcggtgtaccttttgactgcggcatcgatgagataaaaatcattgcgcgggtggtcggtgtattcaggaaggaatga

SEQ ID NO: 434684 - DNA, 714 bp, Serratia marcescens
atgaatgaaaataaagggattgttaaaacaagtcgcccagctatagcacaatcgaatgaactcaccgaggcagcttactatctctcgctgcaggcaaagcgagtactgtggttatgcctcatggaaacctatcggcaagaagaccatccgggtacgtttacagtgcgggttgcggattaccagcgattgttcaaggtgagtcaagctacggccagtacagatgtcaggaagggcattgatgccctgtcaaacagctctgttaccttctttccatctgatggggagtatgaggaacggaaacgcccttggctggcagaagctggtttaaaacgtggcagaggttcatggaacattgaattcaataataaagtgatgccctaccttcttgatcttagtagtcaattcactacttataatctatatgattgtggccgcattaacagcgttagagctatccgcctttacgaaagcctttgtcagtttagaaaatctggcatatggatcacaacaccaaattggttagctgagcgttaccaactcccacaatcgcaacgagataattttgctgagatgaaacggacgttcatcaagccggctctggataagatcagtaaagaaacccctttaacggcttcgatgtcagagaccgaagacggcaaactaatttttaccatcataactaaaaacccagaaccaaccttacctaacatttga

SEQ ID NO: 434685 - DNA, 876 bp, Serratia marcescens
atggcgacgttgtttattgatttacttatcaaaccgcgtaaaagattccggctcaaaacaacctctcaggatgatttgattcagcaattagtgcgatacgtgcagcatcactacatccgacagactggttgggagctctataaatatggtcgtagctggggaaatttgtgccatgttgtaccgagcccatttgtcgcttggctagaaacgcacaaagacaaccctcgagctgtcgaaatagttgatagctgtaaggtatacctacgttcagaagaaggggctgttgacccttctatagctgtgtacatccctctcagttggttatgtattacgatccctccaatgaacgaagcattgcgcgaacattggcaaacccggataggtaccgttttgtctgatccgatgcccgtgagtgtcccaacgcttaagccttccgattattatctgttgtgtgaaggaagggcgattcctaatgtctggcagcaccattttgagctgtgcatgagaaatagcatgccgtttattgtgttgtggcactttccacccaaacaggctcgttttgttacacgatatgacatcctgttttcttgggagcctttggtcaaaagccatcagcacgttttcgaaagccctgagtatcctgacatagctaagatcatcaccaagcgtattactcagttactgaaagaaaggcgtcacctggatgggtttaaacgggtcactctgcaaaatgttctaggtgaagggcaaatcaacattcttaaactcagttttgaagcagcagaacagttgacgatagacctggtgaaaatgatgcagatgatgatcgacgaaatagaattgaaactgaagaaaaagacaattgggatgccttga

SEQ ID NO: 434686 - DNA, 1047 bp, Serratia marcescens
gtgactgagcaagcaatcaactatcaggttcgccctgaacctgtctattgtccaacccgtcgcggtgaatcaaaccgtttacggaaaggactaccaaaaatccactgtcgccatgaagcggtgttctccggtaccgtaccgcgtggtgcagctgctaaagtcgttgctcgtattcgtcagcatgactggaaccggaattctgcgttggttgctttgcgtcaacgtggatatatcccatatcgacgtcgaaacgatccaagttataccccgaaacctatgcgagtgagcacacgtgaagaaagccggcgtgcattgaccgcactttccttagcattagcagccaactgtgactataacccggatgctgattacccgtttgagattattgctccgttcgaggaaatcgctcgcgccatcggcgtgctgcatatttatgagagtggccgtaaatcttgtgatgtggctacccatgctagggatgtgatggaggagttggattacctggttgtgcatcgggcttgggatgctgatgctggccaatataaagcgatgcgtatttttttgacggaacgcttttttactagccgcgggatatctgttgaggaaattcgcttatggcttcacgggtatcgccagtgggcgatagtcaatggcctcactgaatcactgcgtaagaagcacgaacgtcatcaactacgcatggcccgccttggtattgatattgattcacaccattcgctaaaaaaccgcctgcgtcagattaagaggtgggtcgtaagtcccgatctgctgcaagagaagaaggcgattgttgaagatctagggaaagagctagatgaactggcgtctaaaatgcgaacgcgcaatggaaaaatagtgaacaggtatcaaatgacctgggttcgttggtctactagtgctgaggctcacccaataaagattatgcagctcaagcgtgttctaactgatgaacacccgtctttagagcgggatgatcctgaacagtattaccggctgttgctggaacgcgccggcgtactccactaa

SEQ ID NO: 434687 - DNA, 1029 bp, Serratia marcescens
atgaaatcattcctccccgtcgctctcgctccggtggtgttgactgggtgtgctcttaatacccacacaccgccgacagtaccggcacagcagtttgtcactacgctgatccaagaacagatacccctaatccaacaggcacaggcagaactcgctaaagccagccgtgtacatctctcaccgggcacgccattacctttacctgcttcatcaaaagccctgctggcaaaacatgcaacggagacacctgcactggcgggtcaggctgttcccacattgcatgctattcgttatctcggggagcgtgttgggacgcctgcgctggcgggtgcaggcaaatcccagacacttcgtcaggctttgcgccagatagtgccggcagggtggcaagttgctttctcgcaagaacttaagccggatattcgcgaaacactgcaatggaccggtaatgaccaatggccattcgttttagacgacatcttgcagcgacagaacaaggtggcgttgctcgattggcaagctcagcgcgtttccgttgcggccaaatcagcagcatttaaaccaggaacggcagtaacacaaccacaaatcaaaacgccaggatctgcacctacaaccccagcgagcaccagtaaacaaagtgtggttgcatctggtcgcaatccattcgatggaaaatttccgacgccacgtcctgctgcagctgttaaaaccactgcatttgtggccttgcctaaaacagttattaagccaaaggtatggcggatagaagccggtagcacgctgaaagacaccctgtttaattgggctgcaagtgaaacctgctctactccgggagtcgctaattggactgtggcgtggctgacacaagccaactatcgtatcgatgctccgttgcagtttgaggggagtttcagagatgcgctgaacggattgttcacgctatacggtacggcaaaagtgccactgtatgcaggtatgcgtaacgaacaatgcgtcatatcggtggacgataaggagatccactga

SEQ ID NO: 434688 - DNA, 426 bp, Serratia marcescens
atggtctattggctgttatcggtgtttataggtttcctcgtctggtcaaacatatcaccccatgaccaaacgggctcacagctgcaggatagcacgctgagtcagcgcgctattcaaaccgtccgttatatcaatgatatcaatgactggcgctataacaatcctgcgcaaaaagacggtgtaatcccggacagcgccttcggctggtcatcccttcctgcgttacataatgtactgcaggctgaccgtgtctatgtctaccaacctgaccaacccggactgatgtctgcgctgttagcacaaagtcagcactcagccttagttggaaaagttgttgcgagacgcctgttggacagttttggcaacgacatgcaggtaaatgtgccggatagcattactgacggcagcctggtgtatctcaactaa

SEQ ID NO: 434689 - DNA, 1017 bp, Serratia marcescens
atgtttatggacagtaaagcgagctttggctccaaaaccgtgagtggcaccacctcctcgatgggggctacgggcgacagcagcggcggtgggctcagtggagactccaatacctcacaggcgactgagatggaaataaagtccagcctttatgaggacgtcaccaataccatcaagtcaatgttgacgccgggcaccggccgcatgaatttatccgccggcgtgctgaccgtcacggatacgccacgtgtactcgaacagataggccgctatttggatgaccgcaacaatgagctcaatcgtcaagtggtgctcaacgtacaggtctatagcgtggaaaaacgcacgcaggatcagtacggcattgactggaacgccgtattcaacagtggcagcgtcggtttgtccctgaccaacgcgtttaccggcgcggcttccgatgcgttgaatggtggggtttctatccttgatggcaaaggggcaggcaccaaagcctttatcaaagccctgtcggaacaggcgaatgtcagcgtgatgacagaggcctcgagcatgaccactaacctgtcagcggtgccgatccaagttgcactgcagcaagactatgcctccaacgtgactacggagaacacagctaacgtcggctcatcgagcagcatcaccaaatcaaccatcacgacgggcttcaatatgactgtgctgccgttcctgatgccccagtcgccaaaaatgcagctgcagtttgcaatcaatatgtcggatgacccgacgatgcgcacgttcaccagtgacaacacctcggtcgaactcatgaaaacgcgactcaagacgtttacgcagcgcgtcattatgcaatccggccagacgttggtgctgagtggttatcagtctcttaataataccgccaaccgccagggtgtcggcactttccgcttcttcggactcggtggcggtgccaacggtgaaaacaacaaaaccatgctggtcattcttatcactccggtcattttgggataa

SEQ ID NO: 434690 - DNA, 1305 bp, Serratia marcescens
atgaaacaacagactacctatacgttgcagaatgggagtgcctggctggttgccggattgcactggcagtatctgccgctacgtgggcgccgtagcatgcgattacgtgctaaagaagcccatgccacacattgggcggcgttacctaccggcgatggccaggcgcaaggcactttgctgggcaccgtcaccctgtcggacaaaacacgccgaaaaggcggtcgacatacattggcatcaatggcgttagccgtcctgccggcattaccggaggcctgttacggtgttttcccgttaccggatggccaatactggtttgtggctgtcagcgacggcatgttgtccccgtttggcgatatcgtgggtgatgacgcggccatacgaatagcagtgtccaattttctgcaaatcacctctgcgccggtgacgggttggaccatatatgccccaaacggctttttccccgaacaaggcaccgaagataaggcgctctcgacactgaccgacaataagatcggtttgcgacgagcccgcctgagtaaaacccataatccgcagatgctgtggttgtgggggattgcggtggtggcgttgggcgtagggtataccggctattcggcatggcaggcgcatcaggaagaagtgcgtattgccgctgctcaggcggcgctgatggccaggcaacaattggaacaacaggctccggccgacaatctgaagccctgggcaacgcaaccgcgattcccgccgatgctcagcgcctgcagtagcgtgtggaaagatgcgcagatatctattgccggctgggtattcaatacggcgacgtgtgatgctcacggcacgatcacgctgcactacaccttgccgaacgggggcaccgtgggggactttgccttgcggttacccgttatctatggctcagatattcaaccggtgttcaatattcccggcagcgcggatgacgcttcctttgcgttaccggtgtcgatttcccctcctgaacaccccgaagcactgctcccgggcagccagcaaatccagcatctgaccagctatgcccagcgtatcaatgcccgtttgcgccttagcgaaatggacgcgagttcccaattaacgcagggtgacgtacaaaacctgccttggcgcacctacagctttacgttcattaccgacattccgcccgatcggttgtttgcgccaacgcgcttcaacagcagcgggataagggcgtccagtatcacgacgacgctcaagaacaaccgtctggaatacaccattgagggacttctgtatgccaaccgttaa

SEQ ID NO: 434691 - DNA, 585 bp, Serratia marcescens
atgccaaccgttaaatcatgggtaacaccctgggcattgtgcctggtgttgaccgcacccggtgtattcgccgcgcctgtcgctgacataccggcggctccccctgctacaccttcggctgaaaagttggtgaagccgccaacgtcagcagagatttccctgccaaccacgttcacccgcaccgaggctgggcgagcgttaaatctgggtcagttggaagccatacaggctgagacggtgctgtatgaagctcagcttgccagggcaaaggcgttgaatgaactgcaaaagaacggctatgaccgtgccttggatcagccttttaatccggcgccgccttctcaggacaataaggcggaggtcaagggggcggctcaagatgctgttccgccacaaatcgtggagatcaccggtaccggcaaggggtttacggccgtgctggctctcagcaacggcaatcaggtcactgtgcagtcagggaaccgcattccgggtacggaatacgtcgttaaacggatcaatctcaatgaggtcgttgtcgccgggaagaaccaaacgctggtatctctttcctttgcggggtaa

SEQ ID NO: 434692 - DNA, 1491 bp, Serratia marcescens
atgtatgagaaacgtggttcaacctatatccatttagatttggccaattctgacgccccaacgctgtatgtgtctgacgcgcacaataacagtctggccgtcacgtcagagattgccggcgcgtataagaaataccccagactgcaggttaagcgggttcagctcgacaagctgaaagagttgcagcaaagccaggtaaccgacaatcccgcggctaacgattattccgctcaacaggcgaaaatcatcgggttttttcgggaagccaagaagaaaggcgccagtgatattcatctgctgatcgggatgaataatgtgactgtggtgcaatttcgtgtgcacggcgaccttgaaacgttgacgcagctggatcgcgccgaaggaatgacgctggcgtcgacgattgtgatgtccatgtgcgatgtggccgagaaaagctttaatcccaatcgcgctcaagatgggcgggtgcgcaaagagtttctgcaggggcttaagttattcggcgcacgttatgcgcacacgccggcagaatttgggttgtatgtggtgatgcgcattttgcctgatgaaggaaaggccccccccacgctggacgaactgggttttttaccggaacagcaaacgctcattcgtcgcatgctggcgcggcctgaaggcgtcattatcctctccgggccgaccggctccgggaaaagtacctccctgcgtacattcagcgagatgtacctgtcttttaccggtcaccgcaaacgcttgatgacgctggaagatccgccagaggggttgattctaggggcagttcagacccccatcattgccgataaaaacgatccggatgccgttagtcgtgcctgggttaggtctatttctgccgcgttgcgcttggatcctgatgccatggtcgtcggcgaaattcgtgatgccaactcggttaaatctgcactgacggcggccaagtccggccacctggtggaaaccacgctgcatgcgaatgacgctgtcggcattcttgaccgtctgacagacacgttgggcatccctatgggacaggtggccgatcctcaagtcatgatcggtttaatcgctcaacgactggtacagctgctgtgtccgcactgcaagaaaagctggagtgacgtcagtgacggcctggaagacgagaaaaaagcgttacttgagcgcttttgccgcgtggagacgttggcctttcgccatcctgagggatgtgagcactgttataagggtgtgacgggccggcgtgtcattgctgaagttattcgtcccgacgccaaattcatggagctgtttcgtcatgagggcaagctggccgcgcgcagttattgggtgaatgtgctgtgcggcattacccgcggtcagcacctattgcgttatctcgatgccgggctggtcgacccgattgatgcggattacatcagtccgcttgacgaggacagtctgaccttgctacccccggaggtcatatcatga

SEQ ID NO: 434693 - DNA, 1116 bp, Serratia marcescens
atgatttcccgcttgcgtgaacgtctgacggcattgcggggcaatatgccgtcatcggaaaaaatgaatgagggcttaggccgttggttggcgcagaaaaccttctctacggccgaccgcctgacgctctatgaagacctggctttcctgctcgacaataaccttaaagtagaaaaagccatcaattcaatgatagggagctacgggaacaagcgccccccggtggtctattgtctggaggatatgctcagtgcattgcgtcagggcagatcagtcgatcagggattggcgccatggataccccgacaggaagccgccatcctcagctccggtgttcaggacggtaacctggctgccgccttatatcgggcgatcaccgtggttcaggggatgtcggatatgaaatcagcgctggtttccacactggcttacccgacgctgctgatggcaaccacgttcgccatgatgaagatggtgactgtctattttttgccccgcctggtgtcattatcctcccgagaaaactgggcaggagggctgtggtggctcagtgccatctcagaattctttgtcaataatgccgtagttctcagtgggctgatgatcttgttaattgggttcgttgtttggtcaatgcccaatctgattgggaaaatacgacagcatgttttggaccgtttattgccctggagtgtgtatcgcgacgtacttggcgtaggcttcctgctgaatttcagtgcgttgatgcgtgctcaggtgaagacggaagacgccatcgagatgctgagtcgctatgcgccgccctggttgtatgaacgattggccgccactcagcgtcaggttaaacaaggtgaccacctggggctggcattacgcaatgccggctacggatttccctccccacgcgctatcgacaagttggtcctgctaaccgatggcgataacgctgaaatcataattgaaaattttgcacgggcctggcttgtgcaaaccgtagcccggatcaagcggacggcatctttgctttcttacatcgcattgagcaccaacgctggctacatgatcctgatcctcctggccacacaaaacctcaatgacctcgtgggtgcacgttag

SEQ ID NO: 434694 - DNA, 591 bp, Serratia marcescens
atggaactgacacaaacccctcactcggccgtcaaccgtggagctctcaacctgcttgaagcggccattttttttgttcttgtactcctggtcttagctctagccattacccaaggaggcgctttatttaatcgtaacgacgccagcactgagtacgccaatgctgcagaacttatgaccaatactcggaccatgttgaaaacctcgggtacttataactttgctgcagctgatgccatgacgggtgcactgatccagtttggtggggctcctgccaacatgacagtagtaggcacaaagtcatccgggtccgcgaaattacaaaacctgtggggcggcgcggtcacagtgcaacctgttgccactgcaggcggtcaaaaatccacattctcactgacctacgcggcaatccctcaggaagcctgtattaccctagcgaccaaactgagtgcggcaccgagtgttgtgaccactatggtaaacggcacatcgactaatggcgcgatcgctgccagcgccattggcgcgcagtgcactgcagataaaggctccgttggtcaaaacaccctcactttcaccagcaacacctga

SEQ ID NO: 434695 - DNA, 486 bp, Serratia marcescens
atgttgttttcatttcaacgtgccttgtcctgcctggtgctgggcggggcgttattattatcgctgccggcacaggcgttctgttttaacgaggcgggcgcccgctataaagtcgaccccttattactgcgttcaatggccaccgttgaaagcagtcttaacccacgtgctatcggcaataatcgcgataaaaaaggacgggtcaccagccgagacttcgggctgatgcagattaatgaccgacacataccccagctgcgtgcgctgggcattattcaaagtgagcaggacctgctgacaaatacgtgtctcaacgtacagataggggcctggatactggcaaaacatctcaagcaatgcggcgtcaattggcaatgcctcggttcctacaatgccgggtttgctgacaacaacggtccgcggcgcatgatatatgcgcggaaagtgtatgcgatgtacatgaaacttaagggcggtgcagcctga

SEQ ID NO: 434696 - DNA, 669 bp, Serratia marcescens
atgaccctgtatctcctgaagttctcgttactgatggccttcgccagcgccactttgtgcattggtgcccaaccgttggttcacggggcgaaacaattcttgcggaagcatgatggtccgccactcacccggctgcaggtcagaggcgtcacaatcgttttcgccggtaccggtactgtcctgatcgcaacaacagcactcgcgggtttcccctggttaggaacggtcaaaattctggggctgtttgcgtgtgctattcccatggtgctgcttgatatgcgcaattactggctcccgctgcgttatacctccgttttttggctgacaggtctgctgtttacctgtttgcctgggagcacactcaccctgacggaggcgctcacaggcagtatcggtatgtttatgttcctctatgcctttcactacggcgccaaacgcctgcggggtgaagaagggtttggtctgggcgatgtgcatttgattgccgcgctgtgtgcctggtttccctggcgattggctagcgtgctgagtggatgtgccttcttgctgtttatcgtcggcgcgttgctgacgaaaaaaacggttcaaccttatgccccctggctgttcgccttactggcgattttggccggaagcttccctcaactgaccctatcaggtgccttatga

SEQ ID NO: 434697 - DNA, 1386 bp, Serratia marcescens
atgactgctgaaattgccaaccctcgtatcaaccgggggatgtcgttgatctcaatggccatcgtgcttgggattgtgttgattgccgcccctatcgggctggaaagatattccaactatatagaggaacaaacctgggtcgtgacagccacacacctgagcacggtgagccagggtgcacgccgatacgtcaaagataactatgatgccttgctgaatcaggttaaagggggtggaaacgtcacggtaaccggacagactctgcgcgataaagggtatttaccggcgggcttttctctgaccaacaataacgcccaaacctatattcttgccgtgacacgcaatcctgcgcaaaccgacaaactggtcgcctttgttttgaccgctggcggtcagaacattgcgttcaagggccaacgctatattgctcagaatacttctggcttggggggttatatcgaacccgttaatgtggccaacggcgccggcggtggctggcaggtcaacctatcgaatttggggctcagcgggcagagtggtcacttggcagcctatctgacgtctgatgtattggctggaggagcggaagaaagtgatcgcctgtatcgtttccaggttaacggtcgtcccgacctcaacaaaatgcatactgcgatcgatatgggggccaatgacctgcataacgcaaatattgttgatgcaaatacgggtaacttcaagcaaaacgtcaacgggcagaatgtctatgcgagtgcggatatgtcggcaaatcgtatttcatccaacacttcggtttgggccgggggctggattggggctgtcggggatgtccggagtgatactggttggctcatcagtaaacacgggaaaggctggctcaatgaagatcacggtggcggattttatatggatgataatgactggatccgctcggttaataacaaaggtatatatacaggagggcagctaaaaggcggaactgttagggccgacgggcgagcttccgttggtgaatatttgcaacttgatggtacagccaacgcagggtggggatgtagtccaaatggactcgtaggaagaacgcccgaaggtattctactttcttgccagaacggaatttggaaatcattaggtgcgctagatacatttaatgtaactagcgatgagcaatgtcaaaatctcaaagaagcgagagcctattgccccgcgggaacaaaattagtgtctggaggatatcgactgtctcgttggacggctagtgatgcagcacataactctcctgacgctgcttatcctgatatcttttcaaatagctggattgtggttacacctaataatgaatggcgcacgacgtgctttcaggctattgctatttgtactaaatga

SEQ ID NO: 434698 - DNA, 1077 bp, Serratia marcescens
atgaaaaatgataaattggcaagcattcaagtactgagaggacttgcagcgcttgctgttatgctatttcacttccgctggaatataaatctgtcctatcctaaattgggcgatcagttattcggatggggggcaattggtgttgatatgtttttcataatcagtgggtttgttatcacgctttcagcaaagaaactaacaccaggactatcggcggtagggatgtttttgaaacaccgcgcaaggcgaatactaccgacctactttattatcctgctaattactttccttttgtctggggccatgagtacgttccattatccagagaaagtgagtaattttgcgagcgcactcactttctcaccaatcgatgccaataacgctccattctatgttgatgatggcggtgtctatggtattcgatggacattgaactacgaagtttttttctacttggcaatggcaatttgtcttatatcaaaatatcgatggccactgttgcttggtgtgttttcgttaagcctggttgttttacctatgttggctgggcaatcaccaaccttggcggttagtggctatcaatttcattcagcttacttaaatttaatgactaatcccatcatatggcagtttttggttggtgttgggtttggacttatctatccctatgcaaaaaaattaaatagtcaattatgtttagcaatgctagctgtggcaatagttgttactgggtactgcattctatttacatcatcactgggtcatgggttaatgatgtcaggatggtatctgtcaattttgtttattgctgtaattttaaatgacgaacttatagcgaaatacacgccaagatttttagtcacttttggagaaatatcattctctctctatctcatacacacgctaatgaatggtgggataggaaatcgtcttgaaaatcttggtgtacccgatggcaccccaagatttatttggtcatgcgtcatttccataggattagcctacttgtcgcataggtttattgaaaaacctatgcgttggggaaaaataaaagctgtaaagattcaggaagcgtag

SEQ ID NO: 434699 - DNA, 789 bp, Serratia marcescens
atgacacgaaaagccctggccctgtgcctggcacttgtcacggtgccggctatcggggctacaactgaatcatccccgccaccaagtattgatgcctatttgtcacccaagacaatagacaaacatggccttaacgacacgctctggcagctactaaatgatgcaggtcaaaccgttggttttcgtgggggaaaggctcaacgcgcctgggagcttcaacaggctctgaatggtcagaacgatgcgcttaatcgcctatatacgttcgcccccctcatcagcagacaaggttggttacctccggtgatcgtagcatctgaatctctggcccacattaccgatagtcagatccgcacagctaacaaggtctacaacattctcgttcccgagcgatttgtcagtaacccgccgacctggcgccaatatttgctggctggcttgggcatcaacacagacattccaacggaaatccgtcctaaaaatggagatgaggaaaaagtctggagggcagccatagagaaagggtggcaggaagggcgagaaagtgccgaccgaaccctagaaagtaattttggacgactgacccgggattacacaggaatggtgcgttattccacccttgtacaacagggcatgatcacaccaccagtggtcagcgaacaactgcagtctgtcaccggttcgaaagacaagctgatgctgggcgataaagtccgtgacctgaaacaacgtgccggcttcgagctggataaaaaacgctggaagcccacgataaacacccaacagtaa

SEQ ID NO: 434700 - DNA, 1158 bp, Serratia marcescens
atgacggatctagacagttttgatttcaggggcggtcttaccgctgacaaactccgagaattcttcgttcactgctaccgccacaacgtatcggatattcatctgcaaagtggcagtcccatcgttgtcgatcatcatggtcgtaaggtggtcgccggtcagttccctctggagcatgccaatttggttcgcctgattgatgaggtatataccccggatatcaaatccctcgttcagggggggcaaggggccgatcgtcccctgcagttagaaggtgacaataatggccgttttgggctcgaacgcggtgagcgtgtcagatttcggaccaacttcatccaggcgacgatcggtgcactcaataccgccattgccatgactctgcgtatcatcccgtcgaacatccccatccttgaggatatggggatagaagaggatttgttccgcagctttttaccgatggatggcatggggttggtctgcggcccaacgggttcgggaaagtccacgcttctggcctctgtataccagcattacggagaaacaaaccctaacggcaaattggtgacctatgaggatcctgtcgagtatttgttaaatagcccccgattgttgctgcgaccgcagcagtctgaaataggacgcgatgtacccagttttgcccacggcttgcgtctggctttacgtcgggcaccccatattatcggcatcggtgaaatccgtgaccttgagacgctccaggctgcagtcgcttgcgcccagtccggacacttaacgttaggtacacttcacgccttctcacccgggcatgcgttttcacgctgtgtcttaatggcgcccaacgactcacgtgaacaaatcgccttcgaccttctggatgccatgcgctttgtcgttgtgcaacacctgttgccgacgatcgatggcagacgccaggccgtcagggaatatgtgctgtttgatgacgactggcgccaccggcttggactcgaacactactcacgctggccagacatgatcaacgcaacgctacgggaaaaacaaagtcggatcgcagatcaagcctggacgatgtttgttgaaggccgcatcgatagccgtgtcgcagaaagagtgatcggttggcgggagttcaccgataaacaacggaggcattga

SEQ ID NO: 434701 - DNA, 267 bp, Serratia marcescens
atggataacgactattccccctggctagacagtgggcggcccgccaccttctggggcattcccgtattggtttatctggtgtttcttatctgggtcattaggccaagtctgcctatgttcatattttgcatcgccttactgattttttacaaggtgctggccatcttcggttacacgctaacggtgctattgcaacgcctgctgcaccggctgcgaggaaacatcattaccgggcgaccttggtggtatcgaaaattttttgaatag

SEQ ID NO: 434702 - DNA, 138 bp, Serratia marcescens
atgaaagaacaatatgcaaaatctgacacgccattgctggccggctatttactccaatccctgatataccgccctactcgcatttggattggtatctattcgggtaatgtcgacgaactgggctgggaggggatatga

SEQ ID NO: 434703 - DNA, 3234 bp, Serratia marcescens
atgaaagtcaccgaaccgacttacttggtgatcccgtttgagcaacttaaagaagccaagcgccaggcaggcaaacttgaaaatggccagaatgcccttgagttcgatgcagataaaaaattgtggttcgccagacccggtgctgacctcagtaagttgtcgcaatggcgtaccgacactgctctggtgatgtctgcacagggcgatccgcaacaagaatttggcgactttatccgcgtccttgggggaaaactcagcgggcctcctgaaatggatggaaaagctcaccgtatcgcaatggatgatgataaacccgggaaacagtcaggggtttatgtaggccataaggatggctttgccaacggctggttcaccgaccatcgcgcgggagatcaccgtaacgtttggtcatcagcctctgtccggccagatcctactgttattgctcaccaaaaggcgatagccgctcaggagcaacatcggcgtgaacaacgcaagataaaggaacacaatcaggtcgcacaggcatccgcctctcgttacgcccccctcaatcaggctggccataatcatgcttacctgaacaaaaaaggagtcaaagccgcaaaaggtctccgctcagaacgagaaaatctggtcattccgctcagcaatgcggccggggatatccgtacactgcaaaccatcgcccccgatggcagtaaacgcctcagtaaaggtggccaaaaggagggtagtttctttgtcgtcggtggatcattgaaaaacggcaatcccatcgtctttgccgaggggtacgcgactgcatccagtgcggcaatggcccttcagcatcccgtcgtcatgacagttgactccggcaacctggtaaaagtggcgaaagccctgcatgaacactatcccgacagccctaagctgtttttgggtgatgacgacctgccaaaacctaaacgccctggtaacccaggcaaagagaaagcagaagaagccgccaacgccacgggcggcacggtaatactgccaacgtttacgcagtcagaacgccaacaaggcctcaccgattttaacgattttcaccaggcccgggggttagaagcattaacgcaattcctggcaccaacatttgccgcattgaatgtcactcaagtggagcacaccgtggaaaatacccccgtcgctgaaccggcacaggcaccggtagacgatatgccacctccgtccataccggaaccaaccgaaccgaaaatcagtaccaacgacgctaagatggcagcgtcatccgatcctgagccagctgtcacggtcgcagcatctgctgaaccttcgctgcccgtccaggaggactatgccgactacagccatattattgcagaactggatgaacaggagaccctggagtattcaccgacagtccctgccccagcatccataaaggatgagcaggaaactgatgaagctaaattattagataaacaggcaaaaactgcacccaaagaattaacatcacttaccacggcagcggatcatgtcgaagacgttaatgagcctgtttcatttgcccgtcggctaacacccgcaccgaatccagaccccgtaaaggaaacaaccaatacatctccaactaaaccgcgggcttccgacattgagcccgaagttgacggtatacggatagaaatgccagacggcaaacaaactcgccaggtaatccctcttgatctggatgcattaatgcaacagatcactcatgaaattgcagcggatggccgttctgtaaagtatttgttctccggtgagccggcttttgttgaccacggtgaccgactcacgatggccaatgccacggcgagccaaaacgatgccatgatcttgactgccctgctggttgcccgtgagcaatatcggggacgtattgaattgaccggaagcgatgagtttaaacagcgtgctgtgacgttgatcgccgagtacaacctcgatgtcaaaatgaagaacccacaacaacagttgatgctggatgaagcgcgcaaggcattaagcaatgaacccgcaccgggagacaccccaacgccggtcggaacgcctgcggcggcgattgtgccagaacgagagtcaacatcaccttctgttgccctctcagaaaaaaacagtctcccgccggaactgagaccgacggtattgtcgaccgatgaaccccgtaacgccagccgcaaagagagcgaagccggactgaccggcaccttactggggcacggtcaagctcgctataacttcgacgagtcggagaacaacagctactacgtgcatttacgcacggccgggggcgaacggtacatttgggggaaagaacttgcccaaatcgtacccgccagtggtctcaagaaggatgacgttgttacgctgagatggttaggcaataaagaagtgactgttacggctaaagttcgggatgaaaagggaaaggtcattgttaatgccgacggtactgagaaaacggaggaaatcgccacccatcgcaaccagtgggaaattaaaccagctatcgacccacaattactggtcagccacgagcaacaggccacgccaccggcaacattggttgcttacgacatgacccactttaccgcattgcagcaacaagtgatccaactggccaaagatgccggtatcacgctgccgccactcccagaaccttccaacgacttggtgtggcttaaacccaacggggaaggaaccgccgccccggcaacacgcccggcacaaccaaacctgccggtacaaacccaggatgccggtacggtattgatgaaagcaatggacagtgaaaatcagctcaagctactgctggttaaaggcctgggtgagtatgttcagggcgttgtgcaatatcagggcgaatatcatccggtgctgggcaaactctgcaccaatgacaagggccatcgttatctggcactcaatgctgtgactaccgacggtgtgacagcgatcggttatggcaatgcagtcaatcatgaggctggagccaataatgcctttgttttccggctgaaaggggaaaaggatcgcctctacgcaccactggttgaaccggcaaagtgtcccccggccctgcataaacaacttgggtttacgcacgactacactccaccgtcgcaagccccgcagcgccgggacatcgatattgtggagaacacctcccggcctaccccgcagtcaccccgtcctggggtgtaa

SEQ ID NO: 434704 - DNA, 675 bp, Serratia marcescens
atgcaaaagaaacaacctgtgcctccttcacaggagttacctggtccctacgacgccgccatcgcgcagcatcaggccaatcaactgaatgttagcttaacccgcaagtcattgaccgccaacgtgtggcaaagcgccaccatcaccctctgtctgttgattattggtgtgttgatctacgccgttttacacccgccggtgaagtatttcgccacacaggatggtcgcgtaattccccttactccaacagaccaagccgcgtacagcgatgccgatgtgaccgactttggtaaccgtgtgatacgtgaagccttcacgctcgacttcgtcaattaccgaacgcagatgaataacctgcttccgcgtttttccgatgagggatttcgcagttactacaccgcgttgacgacgtccaacgtcctcgcggccgttaaagacaagaaaatgaacatgtccgttatgacctctccgggagtcatcgtcagcaaagggacgctggagaacggtgtttatgcctggaaaatccagtaccccaccaaattcaagatgacaggccaaacgtcgtctctgcccgaacaaagttttgttgtgtcgctgctgattcaacgtaccgatccccggttgaaaaacaccggcatggaagtgtcccagctcattacctatgaggctcaatag

SEQ ID NO: 434705 - DNA, 1008 bp, Serratia marcescens
atgaaaaccccttttgccggtctgttattactgactgtcgccaacagttttgccgccactaccgctgatgttaccccggcaccgaacgcttggcagcctgcccaaacgatgggcaacgccccggcagcaaatgtggttcaaaacaccccggtaccggtgcaggcaacgacaaactcggcccctaatacccctttacctccggctgggaatacaccgttgccctcaccggcactgacttatgccgaaggtcaaatggcccccctttccccggacgatgtaacgcacctgcgtagcacattcgatcagctgcagcgcagtgagagtcgctccccggtgactgccgtcccgcgggtcagttcactgacagtgaatctgtcacctggagcatcgttacccatgctgcgagcactaccaaacttcccaagcaccgtatcattcaccgatgaaaccggcgccccctggaatatcgcggcccccccggtgaacggtaacgaaagcggtttctatatccagttcattccaaacagcgcagtgatgtccgtacaggcaaggcgtgcctatgactccggcagcgtcacggtttacttgcaaggcttgccagtaccggtggtcattgcgttatccagtggtgagccggataacgcggacaaagctcagataactgacagcagccttaacctgcggatccccatgcgcgggcctgcagccaaagcattgccgatcgcaagagagaaaatcagtttggataaccccacactgcaagccttccttgatggtaccccgcccaaagaagccaaacggttgaaaaccagtggcaatgtcccgatgaccaacgtctggcagataggtgatgacctttatatccggtctcgcagtgagctacgggatgcctttgttgagacctcctctgccgctgacggtacccacatctggaagctgccggtgaccccggaagtcgttttctccgttcaagggcgtaatgccactctgaacatcaacctggagtaa

SEQ ID NO: 434706 - DNA, 1233 bp, Serratia marcescens
atggctattgaaaaagatgccgccagcgacgggaaaaagaccgccatggtcatagcaggtgccgtcgtaattatcggtgcaggtgtctaccttgggtggggctacctaaaccgccctgaaccaaccccatcgcagtacaaactcaatcgtgtcgctaataatgcgcctcgcaacagcgccgaaaccgtccagtaccagcgactgcaaagcgaggccaacaccatcggctataaaacggctgacaatggtggaaccagttttgtagcgtcattgcgaatgagtgacatcaatgcagaaatgccagcaccggcaccacagccggtcagcctgaatacgacaccagttgatactcaggaaggcagcaatccacaaaatggcggtattgccgaagaccaaaaagcggcgttgaagggttatttgaaaacactcaacgatcgctggaagcccgggaatatgcagttggccagcgcctttggtcagggagctcagaaccaacaaggtacaaaccaaccagctgacacatccgcaggcggttcattcgggaactggactcaaagtctacctgggaatgcaccaacggtaacccccgccagtctggaggcacaagccaaaacccgggcagacatcgtggtcgtaccgccaaatacccgtcgccctggtgtaatcgacagcgctgtggattctgacaacctcaactccatcgttctcgcgcatattcctgcaggcgtgctggcgggtgccagtttcaccgctcagggtgttcagttggctggcgatggtgtcgtgatccactttacccgcatgacgcttaacggcgctgattaccaggtagacgcttacgccctgcaggacgacacgttgcaatcggcggtagcaagtgatgttagcaaccgctacttcagccgcatttttgtgccagcccttgcctcgagcgtcggcggccttggagatctctacaagcaacagaacacccaaatactgtccaccaatgcagggacgatttccggcggtaccggcaaggtcagcggttcagctgtggccggcacgattgtcggcggcctgggagccaatgccggcaaggtgatgaccaatgatgcttctcgcctcccggtcaagcaggtcaaagtgttcaaaaatcaaatcgtggccatccaatttatgaaaggggtgtatgagagcgacagagtcaataaaagcgcagtagttacaccgctcaacgcaggagaacagtaa

SEQ ID NO: 434707 - DNA, 744 bp, Serratia marcescens
atgtccaagtcccattttgatcttgatacccccccaccggagccattggcggaagataccgatatccctgaaacgcccatcgtcagtaagcccataaaacaaaagctcattacattgccgctcggtatcaaggtgacaccgattcaggcaggaataatggcgttgagtctcatcgggatcgtgatgttcggtgtgatgcgcaacaacccacatgacagcggtgccccgccacagtttgcggcccaggaggtggtgagtccgtcagttccgacaccggtaatatcctctcctgctgcccccgccactcgggatcagccaacgtcggcagcaatgccaatccccgaacccaccgagcacgccattgttactgaagcaacacagcgcgctatcgagaacaaccgtgtatttagtgagaacaaccgggaaggaatcaaggcactcgacgagagaatacgcgcactggaacgccaggttaatgcgctggcacagcgctcatcgtccgcaatggttaccccgcaacctacaaccgtggctcgctcagccaatcatggtcttcgggccagcacaaaaaaccattcccttcgtggtgcaacgatcgcaagcctttatccggggctagcatgggttaattaccaaggcagcacctgggcgctacgtcccggtgatcgcattggtaatgccaccgttcagagtattgacaccacacaacgccaagtgatcaccaccgccggtgttatccggtag

SEQ ID NO: 434708 - DNA, 531 bp, Serratia marcescens
atggatttggtccaaatgctggccaatgccgtcaataacgtgaccgctgtcgggatccaactggttcttgcgctgggtgctgttggcggtctggtcatgttggcgttgcactttggaaacattgccagcaaagccaggcgcggccaggtacaggatggcgcagggaaaatcctgtccgtcgtattggtgtgcggctgcatcatcgcactgcaccaagtcatgaacgcgacctcgcagcagatggctctgggcaatgtcacctttggcgcaattgcttatgtgtcagagggcaaatatggcccggctgcggtcgccattaacgccggcctgactttgctgcagtgggtcggcgttatttatgcgttgcaaggtttactccggttgcgacgttcacagaaggacggccataccggactcagtgccggtgaggatgtttcaagcggcgttaaacgaatcattgtcggcacaatgctcgcagtcagtccccgggtactcgatgcccttcaaaacacacttaacattcattggtaa

SEQ ID NO: 434709 - DNA, 402 bp, Serratia marcescens
atgaaagctcgtcactccctgaaagatatccccctgttcgtcgcggttaaaggtgccctcatggccgatgcagtacgccggtattatgcccgtgccattgccgggggactcgcgtggttcctgacccctctggcccatgctgacgatgacatcgccggtatgatcaaagggtggcttgatgggatttactcgcttaaagaaccgatcgtcaatgcctccatggtcatcggaattggatgcattgccggagcaattggtctgatggccactaagaaaaacaaccctcaaattaaagttgggcacattctggtcctgttggttgctggcgcatgctttattgcactcgatcagatggccagccgtagccagaagcagatgacccttaacccagtaggcatttaa

SEQ ID NO: 434710 - DNA, 606 bp, Serratia marcescens
atgttggttttttctatttcccagcgggttgctgggttttctcgatcggcaaaacaacaagaaattctagatgtgactgcacgccagagtggacactgctgcgaattctgcggttatgagtcgcttaagaacacggcaattttccgcgacaacaatcctttgaatacagcccctgaaaacctcagtgttgttgatccgctgtgccaggcgtggcagcaactcgataccgttactgcagaagccggcgtaatgatctacctgccggcgttacagcccgaagatgtcaatcacctgcagcgggccattgcccaagcactgagttcagaagacgaagactaccgccgggacgccaaggccttgctggattggctgacgtcgcacgacaaaccggtacaacaggcctggggaacaacacatccacaggcattcggcgatgcacttaaacaattacctaccgatcgccgaagtcttcttctatcacgctgccgtcacctggcgttagcgctgcaccctggccgcattgtcggccgactagccaccacgggtttggatgctggcaccacctggtggttacacctgtaccgtgattacaaagcccggagttga

SEQ ID NO: 434711 - DNA, 3075 bp, Serratia marcescens
atgattattgataaaatcgaagacgcacttgccttcttctcccgctataccctgggcagagatttcgcgcagtattgtgacctgcgcaccgtcattggcatgacgcccgacgatagaattcgtcacccgtctctggacgcaccttacatccatgtcacccacaacaatgattacgccagctgttttgaagtccttggcgcatttcgagaatttagcgaaaacgtgcctaagacaccgaccgaacaacccgaggccgacagctacctgcgttttgtgttgaaacttcgggatgcactaacaggcgactttaaggctctgggccataaaatcagcattgttttcgagcgggatcctagtcgcggtaaagaagaaatttcccgattggtggaaccccagcggcaggcctatcgcaaactcgggttaacacttgatgatctggtcgatgagcaaatcaccaaaatgtccccctatgttgcccgcgagcgtgtatggctgacggtttacacggctatttcctccctgcccgcagcggaacgtaaagaagaaacacaacgccaggagcaacagtttaaaaatgtaccggaggcccgattcggtcaaaatccggtgtttgctgagtttgagggactgaaactccgacacgatgcctttatcgacaagttggccaacgacctcactaatggtaacgagggggtgatggttcgcttactggacgctcacgaagcagggcatatcttgcgcgacgaaatcgaacgcctcagcacggatgaaagctggcaacctctgcttcctggcgaccgggtgatcccacatggaaaattgcgcgatgacgatatcagtggtgcattggctcctcacctcaatttccaatattgcgataccgaggtaacaccccacggtaatttgatcgaagttgacggattgttccatggccagctcgcaatgacgctggcaccacagcggccagaacctttcagccaattgttcaaaaaggttccccggcaaatcccctggcgcttacgtctggatctgatgcccggcggtggtgctcatctcaataacaaacagaacctgctgtcttttgtcgctttcgtaccgtctctgcgtgatatctacaaatcagtatcctggttggtgatgcaagataaaaaagaaccggtgtgcatgatgagcataacagccagtacctgggatgctgataaaagccggttgaagcgcaacctgacgcttctacaaaaatcgattcaggcctggggagtcacctccgtcacccgaacctttggtgatccaatacgagcctggataaataccttgccactggcatccagttacagcgcgccaaatctgatgtttcctccgttatccgaaggcatcaagctgatgcctctgcagcgccctgccagtccgtggggcaatgagggtaactcaatacaccaaaccgttgatggcaagccctatccgatcgggttagccagtgcgctccaggaaaaacataccgagttactggctggcgctccaggttcaggaaaatcgttgttggccaacagcctgcaccttgatgcgataaccaatggcaacagtgatttgccgtttatggcctttatagataaggggtttactgctcaaggcttttacgatttggttcatgacagccttcccgttgaccagaaagacaagatcatcagcatcattctgcagaacgtcgcagaccattgccgcaacccatttgatattcaattaggtctgaaataccccatcagcactgagcgtgattacttgctgagattattgaccagcctgtgcatcgatccacaaacaggtctcgccccggatgcgacgtcatgcaaacagatcctgtcccgcgccgttgacctggtgtttcgcaaaaacagtgacaccgaacccgtgcggtatggcccgacactggttccggaagtggatgcggcgctcaaaaacagtggctgtatctctcagcacgacacgcaatggtgggaattggccacatggtacgaagttcgtgacatgttgtttgaacatggccatgtctatgaagcctctcttgctcaggcgcaggcggttcccgagctgaatgatctccagggcgccctcaatagtgaagagttgcgaacggcgtttggcatggtcaaccgcccgggatcggatgaaacattactcagttacgtttcgcgttgcctgactcaggcgctatttgattatccactgatttccggtcgcacacgatttaccgtcagccccaacacccgcatcaggatagtcgacgtcaataacgtggccggtaacgattcgcccgaaggtaaaatccgtaccggtatcatgtaccaatttgctcgccatttagcgggaggtactgacttctatctgccacaaatacagacagaactgtatgccaaattggatccgcgctacatccaactgcaccgcaaacgcatcgagcagttggatcaggagatcaaactcatcttcattgatgagctgcataacatcaaaggcattgatgcactctggtcggccttacaaacggaggatagggagaaacgcaagtttggtgtccgtactgttttcgcatcgcagtacctggacgattatcctcaaaccatactggactcggcgaactcgctctatttacttcgggtacgtactcaggacttcgacattctacaaaccaccttcaaagtcccgcgggccacattattgaaactcctgaacacaaccaaaggcccggcaccagatggcagtggtgtcaccttccttgccgtgttccaaaccaccaatggcaacgtcgcacagctgttgaaaaataccgtcggccctctgcgcctctgggctttgaactccacaccggcaaacagagcattacgcaatatgttgtatgacgcgctggatggcaaaaccgcacgacggctcctggctgatgcctttcccggtggctctgcagagaaccatatcaagatgttgaaaaagcgtgccggcaacgacgatgaaggtggcgccattcgtcagttggcaaatgaactcatcgccaaagccggctatatccaggggaatgctgcttaa

SEQ ID NO: 434712 - DNA, 1227 bp, Serratia marcescens
atgttttggaatcgtcaacatccctgtcaactcagcctgctggcagtactggtgctagctgcatatctgccaggcaaagcggtagcttatcccgttgaagtcacgagcagccttccagtcgaaacgcaggtggcgccagcacttggaaccataaacggtacactgtcagaaatcgccggtacccagcaccaggtcggcgccgctatcaaccagaacggtggcaaagttgccgcacagattgagcaggcagcccaggcacagcgggatcaggacatattttcccggcagaccgagcgattggaacaagcacgtcgtacctacagcgttcctgacagtatttgtaccgaatccggttcaggcatggccgctcaggtgcaaagcggtgcccgagctcgccagggagccttggccagcggtagtgggatcagtaacagtaccattcgtcagggtgttacctcaccaaccccgcctccggagcagacacaattccgaacggccgcaatacatgccgactactgtgatgccacggattttgcggcatacggtggaacagccttgtgcaaaggcatctccgatttacctggtggcgacaagagactgacagccttgttggatggtgctggtcaggaagggaaagccccggatttgaccttcaaccaacagcaaaccgatgcagcgatggcctataccctcaacagtgcaccggcgactgcaggtaagcagttggggaaaggtgaagtcaaaacgacatcaggtcagcagtacgtagggataatgacacaatatgaatcggtgaattctgcagcacgcgaacccatgttggccatggtcgcggccagtcagcctaatgaagctacccgagatgtgttgaaagaaacgctgcagactgcgtctgcaactgcgtattttgggcgtactgcgtcggaggaagcgcaacgtagcggcatgatgtccgaacgtgagtttgaacagttcgaagtaggcagacgctatgccaatacggactaccaaactgatctgcaggcaatggagggggataatttagcgcgtgagtctatacggatccaatcactgcagaactggttattactggggataaagcaacagctgcaaaagaacaatattctgcagggtcaacagctgtctatctcagcaacagaaaactatcgtccgcagttgcaagcaaaaatgcgtgaagtcagtgcaggagctgtccgtcatgactga

SEQ ID NO: 434713 - DNA, 564 bp, Serratia marcescens
atgactgaaaaaaacgagaaaacatcgccacattggggccgtcgtgttggtaagggtgcgtattacaccgccaacatttttttgccactctcagaactgcgatataccgccacgaaaatcggcccctcgctgattaaccacctgaaacgagcacggcacctctcaccgtcttataaactggagcaaaaactgagagaacccatgctgggctttgacgacgccgttgcagccagcggagtgtcgacgacggtattgataaaacgctttcaccggcgcaaacaactttgcctggcactgtcggcagtaccggcatttctcatcatcagtgtcatgctggtcgtcctggccagcaatatctacacgccgttgttactggccaaaacgttggccctggtgttagccctcttgtctttagccgcaatccccttcgttcaggctctcgtttgctcatggcgtttgtggcaactccgggaacgccgggcatctcagcaagaacgtgggggatttaaggacttcttggcagaaaaccactggcttaaaacaacgctttcacttcggcagtaa

SEQ ID NO: 434714 - DNA, 2622 bp, Serratia marcescens
  misc_feature (2144)..(2153): n is a, c, g, or t
atgaaagccatacgaaaattgatggccggcgttttgctgtgcctgtttacggccagtgcctgggccgataccgcggttagttttgacaccatagaacaagcggccaaacggtcgagtgacctgtctcgccaaattctggttatgatatttggtgacgttgtcaccaatccattatcaactgaatcaagcatgatcggtcagttattctttgtgtttaacgggatagtcatggccattgctgtcgtctggttcttgttggtcacagtcaaacatctggtacaagccggacagcacgggaaaatattcaaccagggcagctcaatggtcggcccagtcacaacgaccgcggggttcctaaccctagtacctacggtctctgggtggtccttggcgcagctcatcttcctttgggccgcctctatcatggggataggcagcgccaatgtagtaaccgatcgaattgtggatttattggaagaaggttactcactggtggtacaacccgttgcaccacagacagtaagtgctgcccgagcgatttacgaaatgaatttatgcatgtatggggttaattcggaactcagcaacatgtaccaacagtatggtcagggtggtactccactgatgagtatcaagtcactacctgacggctttgagatcggcaacggtagcgctttgtgtggttccgcccgcctaccggaaagcctggcagaccagacgaccagctggctattccccgttcccgtgaacacagacagcataatcaatgctcagcgcagtgccatgaatgagatgcaaaacacattatcacaggacgcatctcagtttgtttctgctctggccaacaaacaggtgaatggcagtggttcattaccagatgctgaaactgacatccagaaagcggcacgagcctatgaagacagaataaatcaggcattgaaagcacaagggcaatccgacgaactggcttccgttctctcggcacagctgaaaaaaaatggctggctggcactcggatcctggtaccaaacgtttgccaccgccaataacaagttcaatgacgccgtccagttaaagcctgtaatttcaggtatgtctggcctgggtgatttaggggccagtgacaactactccaatataaaaacagcctataaagctcaactgcagaactccccctacacacccccactggggacacaaggagcgaaagatactcaacaagccattgatgcatctgaaccatcagcagtattcgttggtataacaggttcatatatgcaaaagctaacaaataccattgccacctctaaccttggtacttctggtattgatagtgatcaaatgaatcctttgttaaaaatgaaattcattggggacattacgctgggaactgccgaggccaccttaggggtgtttacagttgccaaagtggcagcggcggtctctacaaacggattttgggggaaagtaattggcgcattctcgatgaatgcaactgaaggacttgctgccgttttggacgcattgtctccatttgtttattttatattatttttgctatttgggatcggattcaatttatcaatttacttgccattcattccttttatcttttggcttgctgcagcagcgaattggcttgttagtgtattagttggtgcgacaggcggaacactatgggcagcaactcacattggttccgagggagatcgaggacacaggtcagcttatggttacatatttctaattgatgtgatggttaggccaatgttaatggtctttggtttcgtattcgccagcatcatgattgtaggtctaggttcattattaaacatgatgtttggcccaacaattgccaatgttcaagctaattcaattactgggatattttctcttcttggaatccttatgctttacgcccgtatttgtacaacaacggtgacacgtgtttttagtttgcaagtaaccatgccagattacatcatctcatggcttggcggacgggaagcagccagcattcttggtggtatggttgagtcaacaaaaaacatatttgctggtttttcacatggactacagagatcgcctggtgtaaaattcaaccatagaggatctaaccgcgagaatggagatggtataaaatnnnnnnnnnnaaccaatgctctctggccctatgttttcttggctcaagggcttggttttatttatttattttatcgtattaataaaaagttagatgctaaaacagacaagactataaacggttacttttgcaaaaacttcactccaacagatggatatgaagttaaatctctttatgatggtaattattttggtgtggatacaaaaaatggaaccatgctcttggtttcaaccgccaagtccatttataaaggcatgagtattgctgacctggttggatacgagtgcagagggaatatgctcacattgaaattcaatgatgttcttttctcaaatttcaccgtcggcgtcgataatgaaaggaagtgtatggagttaggccataatcttgatgtattactttcatctacttatcggccagagcgagatgctggaaatgattttagcgaatttgtacaaaaaaaatcactagcactttaa

SEQ ID NO: 434715 - DNA, 1053 bp, Serratia marcescens
atgaataaaacagccggcattttgttagcaccactatcagtgatagttgtagggagcatgattgcagtacgcaaccatgcgagtaaccggacacgaagagatattaacgtatattccctacctaaaattatgtctcggttctctcccaatattgtacctgccctatgctacggcgataaggaaacacaactgctgaactgtgaccctccagagcatagaagtgcgcagtcaccggaagagtttgccaaacaacaccagttggtgatcggtgaacgccttgatcatgaaagagctcgcatcgtcttcgaacagcaactgggggccccactcaaagatgcatccagttttagcccccatgagcgcgccttagtcgctgttttcgggcttcaggcattcttaaaggaccgcaaggcagctgagaaattgctggatagcttgaatcgctcctgcctcatcaaaagccgtcgcgatagagggaacagggggtatccagttttaggactggcgaccaaagcattccaacgcgtgatcagtacccccgaggcaaaagcctggctaggtcgacatagcactacccgtaccgcaatgttcgctttacatgaccaagacttgcgcctgcctggtccgcgctttcgctggctaaaaggtctggatcgcacattgtggtataccctaacctcaaccggccggccgaaagtctttgttgaaggtgctggcgtgattgccgtttcaaaatgggaaaccctggttggggaagtatcagaacgactcagagtatcggtacccgtgccagaaagtcgaatggacaaggctatccatggcttggaaattgatttgcggaacctagggttaaccatagaagaaaaaacagctaccaagcctattgaatgcaccccagatgctgatatggaagacgaagtgggagatgtggtgattttgcgcaatcaagaaatcgttatacccgcagccaccattgcaacaacacgttcgcctgagcaacaccccggcaaaactcgcacattcactcgccccagaacacaacgcccgtcttaa

SEQ ID NO: 434716 - DNA, 1014 bp, Serratia marcescens
atgaatactcattttactgcatccctgcagggtaaaaccctgtctgtttactcacgaaaatccggcagcgaacaggctattgccattcttgagctgggtgctcattcccgcttttatattaaagataacaacgtctaccacgattgccgtgctctgaaccaagctatgatccatcagggaacatcctatgaggacgcccagacaatattacatgcgataaatggcgccgttatgcgccagcacgacaggagggctcagtgtcgcaaactgaccgcaggagtcattctcggtgccgccgttaccatggctattgtcactgcctggagcctaggtgcatctggaaccagaccccttttggttccggcaaaacaaaattccgcatttcaagcaccagtagtatctttacctagttcccacgtagctccgactcaaccgactcctgcagtaataatatcagcagattcgacgccaactatccgccaggttgaaccagcaggcgccctccccaaagccgccgattatcaaaaaacggcagagattttgcgtaagacagcccaaagtggccaatacacgatcccgttgtcatcaggccacgcacgcacgttgtatgtgtttgccgacccgttgtgtcacaactgccagatcattgaaccggcattagaagccctgtcagaaaaatacaatgttgagattttcccggtgacacttgttggtaagcaacagaccctgaacttggtgagtcctatcctatgccaagccccttcgtcacgtatggcactatggaaatcacttttccgcacagacgctggtttagcgtcaggtgaaaacgccccacaacctgcatcatgtgaagccggggaaaccgcaatcgccaaaaatgacgttgcctttgattactacacactcccgggcaccccttctttattggcagatgatggtcgctacatccctctgcagtcactgaaaagtgacgatgcgctggaagccttcctgaactcatcaaccgtccagtaa

SEQ ID NO: 434717 - DNA, 2178 bp, Serratia marcescens
atgtcacgtcctgtagaagtcgacccgcgccgggtgcgcaggccgctaggctatacctttataaatgatgcgttactttctccaataggggttcaactcagtctactagctggcttaattgtgggttttgttatgccagccacactgttacttaccgtccccgggttactacttctggtcatgctgtttgccgatcgtccgtttcgtatgccattacgcatgccaacagacattggcggcatggatctcacgaccgaacgtgaaatgcccaagtaccgcaaaggcctgggcggatttttccggtatgtggtacgtacccgaaaatacatgccggcagccggtgtaatgtgtctcgggtacgcccgtggtaaaggcctggcacgtgaactatggctgacgctggacgacgctttgcggcatatgctgctattggccaccacgggttcgggtaaaaccgaggctctcttgtcggtctttctcaattcgatatgctggggacgtgggatctgttattcggacggtaagggccagaacactctggccttcgccatgtggtctctggctcgtcgctttggccgcgaagatgatttctacgtgttgaatttcatgacaggggggacggacaagctactgcaactgttgctcaacgataagaaacggcaaccatcaaacaccatcaatctattcggaaccgctaacaccacctttatcatccagctgatggagtccatgttgccacctgccggcagtggagatcagggctggcaggacaaagcaaaatcaatgctgtctgccttggtttatgccatctattacaaatgcaaacgagaaaaacgccggatctcgcaaaaggttatccaggaatatttacccctgcggaaacttgcagacctctatcaagaagctaaacgggacggatggcaccgtgaggcatacaacccattggagaattacttcaacacattggctggtttccgcattgagttgattaacaaaccatcggagtgggaacaaggggtatacgaccaacacgggtacctgatccagcagtttaaccgcatgctcaccatgtttaacgacctctacggccacattttctcaaccgatgccggcgatattgatatcgaagacgtactgcacaacgatcgcattctctgcacgaccatacccgcgctggaactctccaagggggaagcatccaacatcggtaagctgtacatctcagccatccgcatgaccatggccagagacctgggctgcgagctcgaagggatgatgaacgatgtgctgatcgtcaaaaaatacagtggcaagttcccctacccgatcgccatggatgagttgggtgcctactttggcccgggtatggacaacctggccagccagatgcgaagtctggggtatatgctcattgtttctgcccaggatattcagaggtttatcgccgaacacaaaggcgaatacatgacagtaaacgccaacctgctgaccaagtggttcatgacactgcaggacgagaaggacacgttcgatctggccaggatcaccgggggtaaaggatattatgccgagctgggttcggtagaacaggcaggcgggtttattacgcctaactacgaagatgcagccaataactatattcgcgaaaaagatcgactagacctgggtgacttgaaggatatgagccccggtgaaggcatgatttcctttaaaagcgcgctggtaccgagtaatgccatttatatcccagatgaccagaaaatgacgtcttcgctgccaatgcgtatcaaccgtttcatcgacgtggaaactcccaccgaagctgagttatttacgctgaacccgtcattgaagcgcaaattaccgcctaccgcgcaggagatcgatggcatccttcaacgccttgagcaggcaatggatacaacaacatctgccggcatgatggatcccgtactcaaacgcgttgctgcagtggcactcgacctggacaaccgcgccgacatcagttactcaccaactcaacgtggtgtgttgctatttgaagctgccagggaagcactgcatcagaataaacgcaattggcgtcagttgccgtcaccaccaaaacccatccgcgtttcaaaagaagtcgcacagtcattggcgaacgccggcacaaaccaaatcactttccgctag

SEQ ID NO: 434718 - DNA, 537 bp, Serratia marcescens
atgcaacgctctgttatccgaccgctcacactggcatggctgctggcggtgccattcgtctcgcttcccgtacaggcctcaccaacattcagcgtaggcttttccccttcttactcagccaaaaccgccgtattggatgtgattaaccaggcacaacagacgttgaacgtcgaagcctattcgtttactgacaaggggatcgccagggcactacttgccgcaaaaaaaagaggtgtcaccgttagaattatcgcggaccgcaaagccaacagcgataactataccgcggtaacgtttatgtccaacagtggcctcaacgtccgcctcaacgacaaatatgctatatttcacaataagataattctggctgacggtcataccttgcaaaccggcagttacaactactcctcaagtgcagataaacgcaatgcggagaatgtattggtagtacgcaaccaaccccagttggtgacagtctatcaacaagaattcgaacggctatggctggaaagccagccccttcctcctaactactga

SEQ ID NO: 434719 - DNA, 324 bp, Serratia marcescens
atgagtgacaaaaacctggactatcggcgcggctatactgaactggtaaggctgtgtgcaatgatgttgatggctctgacggaaacagagtccagggaagatgacaccagaccggtgttgacaaccgagcgggcggagaacctgcgtgatgagtgcgccagattgcttaatctctttgtcgcccaagaacaattcgatgtcgataagcatgatgcgattatgcatcgtatgatggccatattcactgagataaacggtaacgacagtaacgcttggctaacgtatcagccagcgctgcaacagttgcacaaacacctcaactga

SEQ ID NO: 434720 - DNA, 1956 bp, Serratia marcescens
atgattattcgaatcccggaaaaacggcgtgatggcaagagcagcttcttacagctggtcgcctataccgttgtccgcgacgaagataaacccgataccccactggaacccgagcacccaggctggcgacgcccgcgttcgaaagatgatatcttcaaccaccttgttgattacatcagtcgtaatggcgatgcggacttgcagcaaatcatgcatgctgatcctcatggtcatacccaggtgatgtttgatggcgtcatgtgtgagacaaactgcttcaacatcacgactgcatctgtcgagatgaatgcagtcgcactgcagaacacgcgttgcaaagatcccgtgctgcattatttcctgtcatggccagaaacagataacccgtcaacggagcacatctttgatagcgttcgtcacagtttatcggcactgggtatgtcggaacatcagtacgtcgcggcgatccataccgacacgaacaacatccattgccacgttgcagccaaccgtattcatccagaaacctataaagctgccgatgattctttcactcgcatacgtctgcagcaagcggcacgtgaactagaactcaagtacaactggacaccgacgaacgggttcttttcagttaacgagcagggcgaaattgttcgctccaaacgcgagaaaagcctgactccctctggtgcaaaggcactggaatattacgccgatgttgaaagcctccatacctacgccgtcaccgagtgtgggtttaaaattgatgaggctatggccgatcctaacctgacgtggaaggatgttcaccgcattctagttaatgccgggttagcgttgaaaccgaaagggaaagggctggccatctattctatcgacaatcacgagcttcctccggtgaaggcaagtagcgttcatcctgaccttacgctgggctgtctggagaaagatctgggtctgttccagcccctggaaaatgtgggtacctatactaaagatcacactacgacagcgactgatgccattgtgcatgagttccgctatgagccaacattgcatgcgcgtgatttgactgcccggctcgagcgccgcctggcgagagcagatgcacgtgcagatttaaaggcgcggtaccaggcgtataaacacagctggaaacgaccaaggttagatgcaagtgtcgtcaaacgacgctaccagaatgagtcaaaacgctttgcctggcagaaggcgcgtgccagagtcgccgttggcgatccgttgttgcggaaattgacgtaccacattattgaagtcgaacgcatgaaagccatggcagcattgcgtctcgcggttaaggacgaacgtgcggccttcaaagccgatcccgctaaccgtcgactgtcttatcgtgaatgggttgagcagcaagctttgagtcatgatcaagccgccatcgctcagctgcgtgcatttgcgtatcgcatgaaacggacacaacgtaccgcaccgatatcaaccaacagcattgtgtgcgccgtggctgacgatacaccggcctttgcattagaaggttatgccactcaggttacgcgtgatgggacggtgcagtatgtgcgtgatgggtgtgtcgagcttcaggataaaggtgagcggatcgaagtgggtaatcatcgcgtgaatgagggagagcatatcgccggtgggatggcgttagcggagaataaaagcggggaacatcttaagtttgagggcgagtcggcatttgttcagcaggcctgttccctggttcgctggttcaatgaaggtggggatacacctctgccattgagtgatccgcaacaacggattatggcaggctatgacgcgtcttctcaggctatttcaacgggcgaggggcaacataaactttctgccgctgaacaacccgatgtcgagcagagcaaaccccgctcgggatatcgtcctcaacagtga

SEQ ID NO: 434721 - DNA, 129 bp, Serratia marcescens
atggaactccggcgccttggtggcttgcaaaagcacttgtttaaagagggcggtggggtgatgagtaaagagtattctgatgtgttgatggcgatccagaaggcaatattaaaagtgggtatggagtga

SEQ ID NO: 434722 - DNA, 303 bp, Serratia marcescens
atgagaaaaaccgtcgagataaagcggtgtctggtgtgcagcacggcacacatgacatttgcagacaatgaggttcttgggctgattgctaaagagaagtacaactggatcatggaatatgagtatgggtttgttattgacctgtggggataccgatacatcgttttgcgattgaaggcgttaggattgtcaaaggcatttagaaagtttgtctattcaatgatacttaagcacgatttgaacatgattcagtttgatgctgatggggatacaatagacgagatgcccacgtattactggtga

SEQ ID NO: 434723 - DNA, 819 bp, Serratia marcescens
atgcaaagattatattcaggtttccgtagcgcaaatgtcattcgtaaagatcgcccattgaccaacgacgagttggcaacatttgtccccagcgttttttctgaggagaaacatgcctcccgtagtgagcgttatacctacattccaacgatcagcctgttggataaactccgggaagaagggttccaaccgttttacgcctgtcagacaaaagttcgcgatgaaggcaagcgcgggcatacacgccatatgctacgtctgcgccgtaatggcttcggtcaacatgatgaagttccggaaattattttgctaaacagtcatgacggcagcagcagttaccaaatgatccccggcgttttccgtttcgtgtgcaataacggtttggtgtgcggtgatacgttcggtgaagttcgtgtacctcacaagggagacgtggttgggcaagttatcgatggggcttatgaggtgttgggcttgttcgataaagtgacagaatcacgtgaagagatgaaatccataacgttaaatcgtgatgagcaaatgctctacgcagatgctgcattgggttacaaatacttcgacacgcatcaacccatttccgcagaacaagtgttgcaggcaaggcgcagagaggacaataacccggacttatggacaacctatcaacgtgtccaggagaacatgatcaagggggggattgatggtcgaaacgcgaaagggaaacgtagtcgaacgcgggcagtgaatggcattacgggtgatatcaaactcaataatgcattgtggaaaatggccgaagcgatgaaagcattgaaataa

SEQ ID NO: 434724 - DNA, 150 bp, Serratia marcescens
atgattattgatgaatatatcgaaacgatcgggcgctacatcttgcaacaacgtaatgcgcgtaaacctgcgcgtgtccccgccttaaaagtgtttgagtgggcgcagttactgcgctatctggaaattcagcgtggttatacctgttag

SEQ ID NO: 434725 - DNA, 453 bp, Serratia marcescens
atgtcaacgatcgagcaacaacagcagatggttttttatgtgccggggacaatgtggccggttggtgtggctatctggctggatggggagtatgtcacatcctgcggccagaccttggcgcagttacaacaggtcaagccagcttgcgaactggtgacgttcgacgcggccctgcgtgcgatgaatgatgcggcaaaattgccggttcagcgcatcagcaaagacgaatacatggaaaagctggaaatgttgccgccgctggattggcaatttagcgcgggttattcgtccttcaaaatgatggaaatgtacagcggtaacataaccgacatttacgtcaaactcggggacgaacatttcaaactccgcgatcatgtcacgctgccacacagccagatcatgacgtgtgtgagtgcatttcgtgaaacagaatcggcgcaagttgctgcctaa

SEQ ID NO: 434726 - DNA, 444 bp, Serratia marcescens
atgactgttgccactcatatcgacgccgccagtgccgaaggcatgatcgcgacatttgccaacgcggtgaaatgcattcctctgatgaccggtgataaaagcgaggctgaatataaaaaagccctcgagctgattgagtatcttgtcgatcgcgacgagctgagcaacccgctttttgaaccgcttgcggccaaaattacagagtatgaaaacagcgccccggaatttgaggcgtttaaccgccgcttggcggagatccctaccggggtcgccgcgttgcgtaccctgatggatcagcatggtttgaaagcggctgatctggaagatgaattggggtctaaaagcaatgtcagcaacattctcagtggtcgccgtgcgttgactgtgcagcacattaaggcgctggcgacgcgttttgatgtccctgctgatttgtttatctaa

SEQ ID NO: 434727 - DNA, 312 bp, Serratia marcescens
gtgcatgtgatcagtagacagccgtttaatgaggctgccgggaaataccctaatagcgcgttggcgcttctggatctgatgagggttctggaaaaaaagacctttaacagcccggatgagatgaaaagagcgatcccgtcactggataacttcaaataccgtaagaaatggtgggtgattgatgtgtccggtaacacgttgcggttgatggctttcattgattttgaaaagcaaaagttttttgtaaagcacattgcgactcacgccgaatacgacaagttaaccaagtactatagggagcataaagaatga

SEQ ID NO: 434728 - DNA, 729 bp, Serratia marcescens
atgatcccgaataatcgcgcactggtgccagtcaacgaatatcagcaagccgccgtccatgccgtggtgttggtcgagcgtaagaaagagcagggcaagcggctcgccgcgtttccgtatgccaaagcctttttcaaggttctgaacaacggtcgagggcagattttagcgagcgatattcgccaaatatcgtcaaactatttcccggatgagcggggtggatcatccatccagcaatacattgaggcgctggacaggcttattgagagcggtggccaatatagtccacttccgctgtccggcgatgttgctgcaaccctgttccccgcctatggcgaactttgccgggaacggcgggaaggaaagtgggatatgcaggccgaacggaaagaccgttggcagtcgagggaaaaacagcaacagcgccgtcgctatcagaatcagctggcgcaggccgaagtcgaactggcgtttgtaacgccaagcacggtcggcgcatggtatgcgtactggagtaagcgtgacatttacgaggacgacctgaccgagggatttttcgcgtggttcgagcggtttccgcgcatggctggctgtaacctgcagcattacaaatctgatgcgctgtgggcggtgatggaaagattgcagcaggttgaagctgatttgactgatgacgaacgggcattcaacgcgttgcttattccgaataaactgccacgtaaggtatga

SEQ ID NO: 434729 - DNA, 465 bp, Serratia marcescens
atgaaaaatcaaagattgagccttgagcagttaaccgggatgagtgctaccgaactggaagagtatcgcgatcggggcagggcgtggcggagaatgctgaacaatgccgtgctgggtgcgctggcgctgccgaaggggtgggtagcgaacgcagaagaggtgtgcgaattttgtgggcaggtacccgtggtgtgtcggattagcccgaagggggatgatgttaccgcgatttatctgtgcagcgcgggggcggatgtgccgggctggtctgctgttcttccgtaccagggaacatcgttaaccgctaaccagggcgactgcattgcctgggtgcataccgctgacaattttgagccggagacgattaatcgggtattgaacgtggtcggtgagtactaccgtcatggattcacccgcccggagaaactggcggttgcgctgagaatggggggattttgcgtatga

SEQ ID NO: 434730 - DNA, 2037 bp, Serratia marcescens
atgtccaagaccacgaccaaaccaagtgcaaaaaaaatcgtgaagactgaggctgctcagtttgtcgaagcgaccttggctcaggccgagttgaaatatgtcatgctcaaagagctggctgcgacggatctcaatgcgcgcataacgccccgtacgaccgcagatattgaagggcgagcggccagtattgagggcgctgggctgctgcagaatctcgtcgtgtatctcatggctgatgggttgtacggggttgctgccggtgaaacccgccgtttgggcctcaacgtgctgatggagcagggacggtctgcggcaggcgttcctgtgacgccagagttcagggtcgccgtcttggtggtgtgtgaagacgacgctcatgccatctccatcgcggaaaacgtacagcgctctaatctggagcctgctgaccaactggaaagcttccgcgtcatggcggaaaagggaacgtctgttgaacggatcggggccattcttggttacagcacggctcatgtcaaaaaatgcctcaagttgacgaccgtcgcgccagccctgctggaactgctgaaaaccaacgacatcaattttgaccagttagccgcactgggcgcaaccgatgatcacccgcgtcagattcaggcatgggaaaagggtcattattacgagcaataccgtacacccaaggcgttgcgtgaaagcgtgctgaacgatgaagtgtcagcggtagagagtgatttggtcgattttgttgggctggaagcctaccaagcggcaggtggtgaaacccgtgaagatttgtttgctgacagtatcatcctgacaaatcggttgcagttggaaacgatggcgcttgccaagctgcaggacgcggcggacgttgtcgctaaagatgaaggttgggcttgggcacaaggccggtgcaaggaagtgaggagctggggtgaggatgcaaaggttttcgacgtgctctatgcccatgccacgttgagcgacgagcagaatgcagaagttgatcaactggagtctgagaaaaaattgctcgaaagccagcttgagggcgctgatgccgacgacgagtgggagcataccccgcgtatcgggcaaattaacgcacgtcttgccgagatcaacgaacacgctgaaatcaacaaatggtcgctggatgtacgcgacacggcgggtgtggttgcctatctgcaagacggaaaaattaatatccaacgcggtttgatgaagatggaagacatcaagctggttgagaaaaccgagcgtgaaaaagccaataaagaaaccccaccgtcagagaaagggttatcgcaggtgttggtcaacagtctgtctgccgaacgcactctggccgttgccgcctcgctggcacaaaattcgatggttgctcttgtcctgcacaccttcacattgacacgccggatctttggaaagaggtatctcagcgaactgcatacctccgtggacagccaacgcagcaactgcctgaaccaatccgcggacgcaggcagtgaaaacggcctcgctaaccagacgctgaacgcgctgcatgagagctggctgagtcgctttccgcaggcgtgggtcgacgggttcgactggttactggaatggccacaggaagacgtgctggcgctgctggcctactgtgtttcccacggtctcgatggcagagagtgccaattgcatgacaaccgcgtgggtaccaagctggcgcgtgttgagaaggcgctgaacttccagatcggcgactggtggagaccgacctctgccaactatttttcacgcatcgccaaagaccagattgttgacgcactcaacagtgccggtcgcgccggtaatgccagcgacgccgagggcatgaaacgcaaagaagcggcggagttcgccgaggccgtgctgaaagagacctcttggttgcccgcctgcatgtcacccgcagcgcagccgcagcccgtgctggagagttccactgatacggggactccccttaacactgattctgctgctgacgtccgcgctgccgcctaa

SEQ ID NO: 434731 - DNA, 507 bp, Serratia marcescens
atgaatacctcagtaaataccgtccaatccgatgcgggatccgtgaccaaaatcgaagttaccgatgcacgacgccgtttggcctttgttccgaggctgtttgcgacaccgctgggtgagagtatggcgatcagctttctgcataaacacagtaattacgaggggggcatgtgggctttttatgaggttccgcgcggactcagcggccatgttgctccgtggacggatatcataacaacccggccaacgggctacattgccccgactgagggctcgtacaggttgagtattccggggaactacttcgatgcagaggtctcggccgatgccgctggaattatagcgaccctgtttgtattgaatcagcttgcctggaaggtttccgagatgggaagcgaatatgcgttgacctgtcagggacttatcgaccgtcaggatgcgctaaaagattatgtcagtatcataagtcaccctgagagagcgctgatttttcgcgcaattgattga

SEQ ID NO: 434732 - DNA, 333 bp, Serratia marcescens
atgtttgaacgaatgacgattgcagggctgattacccgtttaaaacgctatcccgaagacgctttgtgtgtgggcagtttttggctggatgatgattttcttgagttagacggtgcgctgactgcctgcgaaattgaggcggcgatggaaatcgttcatgacaaccatgatgccaatgttgggatcaactgggatgctatccagcacgcgattgatatcgtcaaagcgggcggaaggatagatcgctttcactggccgccattggcggccgctaaggaaagccgttgccaacggcttcactctgagcctcgttatacgtgctgtcggcggtga

SEQ ID NO: 434733 - DNA, 405 bp, Serratia marcescens
atgcctaactggtgtgcaaaccgaattatcgtgactggaaacccagatcaactgaccgccgtgaccgattttgcccgggacgaaggagaagtgagttttttcaacgaggccgatgttgatgtgacagcctttgaagggactgtgcagattgattttgatactcgttgggcgcctccggaatgtgccgatatccgggcgctgagtaaacagttttcctgtcacgtcattcatacgttcagtgaggcaggcgaggggttctgcggttatcacgtctatgcgtgtggtgaatatatcgacagtgccagtgacgatctggaatggtcagaagagcgtgatgaatacggttacgccgaggttgttggcccggaatatgtattaggtaacgtcccgaattacggcgggtaa

SEQ ID NO: 434734 - DNA, 558 bp, Serratia marcescens
atggatgtttttgaattgagattatggcgtgccggtcaatactttacgctgtctgaggcgcgttcgctacgtcctggtagccattggcggcaagaggatgctgcccaggctctgggggtgtcagaacggacttaccgaacctatgaaaatagcggcgtgtcccgatcggctcgtctggggatccagacactgatgttgatccgcctgctccccgatttgctccggatggaccaaccgcaaattgttttgcaactgcaggcactaacgcgccatgaccagacaacaccccagtccaggggcgtgatatcgcttgttatgccttctgcaggtatgaaggcctggcggggctcgctgggttggacgcaaaaacagaccgcggattatctgggggtttcgctgcggaccgtcaagcactatgagcaggggcttttgccacgtcggctgatgctggccgcccaggctgttacgctggccacgttgttgccggtctggtcaagttatccgtgtgccaggctgctgcaggtgctggaacaactggtcaatatcgacgtgaactag

SEQ ID NO: 434735 - DNA, 405 bp, Serratia marcescens
gtgagcgataacagcagtgagacccgccgtaaatttaccagctatttgcagctggactgcgaagctgaccgccatgccctggatgtggttgaatctatttcgcagcgagtacgcggggatttcctgcgtaatgccatcatcacaacggcggcattacatcagctcgatccacggttaccggtgttgttggccacgatgtataacgggcagttgaccagcgagcagctggtcaacctggtcggccagacaaccggctggaaacccgaaatggcggcgatccgcgacgtgattacggcgttgtccggtgatgattgtcgatcggtggttccggtcgaacctgttcagcagccgagcgaattggctccccttggtgaagcgcgtaagaaactgggtaaattgctctaa

SEQ ID NO: 434736 - DNA, 675 bp, Serratia marcescens
atgcatatttgctgtgatgatggttctaccaatgtgaaactggcctggtatgtggagggggatttacgcacgaccttgtcacccaattctttccgtcagggatggaaaatcgatggtatcggcagccgtcgcacgttcaactatctcgttgatggcgtgaagtacacctttgacgatgtcagccaacaggcgatcagcacgaccaacattgagtatcagtacggtgataccaacctcctggctgtgcatcatgccttgctaaacagtggtgtggagccgcaagcggttaagctgaccgtcacattgccgatcagtgagttttataccgaagactgtcagaaaaacacggttaatattcagcgaaaaatcgacaacctgcttcgacctgtgacgttgaacaagggggaggcctttaccgtggaggctgttgaagtgatgcctgaatccctgcctgcagtgttttctcccctggtgcgggagaatgtcgggccgctggaaacgtccctggtatatcgatttgggcggcacgacgctcgatgccggagtcattgtcgggcagttcgacgatgtgacggcaatccacggcaatccaacgattggtgtttcgatggtgacgcaggccacgttgacggcgctgcgtatggcggacagcgatacgagcgcctatgttgctga

SEQ ID NO: 434737 - DNA, 372 bp, Serratia marcescens
atgtcgtctgctaaaaaattggatatcactatgaataacaagatttgtttcaaaggtaaaaagacatttgaggtgatcacacatgcacgccaacaggggtgtgatgtgctgctggtcaaagatgaaggggtgtatttgatggcggcagcgcgtaccaaaggaaagcggttactggcctatgcggaagggttggatccgacgatccgtgacagtggtgacgtgtttgaggacgcctgccggttatgtggtggggacgactttatggagcgcctcccgtcggacgatccgacctttgaccacctgctcgagaaacaaggtcatctcgaatttctcattacacaaaccgagttctgtatgacgtcggtgggttaa

SEQ ID NO: 434738 - DNA, 495 bp, Serratia marcescens
atgacgaaatcattgaaagaggttctggctgaactggccagcaaccagacgaacagtgcgctgcaggatgaggccgctttggtccgcgtctccggggcggcggaagccgtattggcgtttctggaacgatgcccgggcgatgatcgcgatgtcaccacggttttcaccgatttgatggccgatctctaccaccttgggcaacacctgcacaccgccggtgtctatgacgattttccgttatggcgacaggcagtattactgacagcgatggggcactttgacgcggaaaccaccgggtttaccgcgatggaggcaagtcacccggatgctgcattcgcacttctgacctacatcaatagtcgcaagcagcatgatcaacatttcagcgtttcggcccgattactggcgacagaactggtcctgctgagtgcccgtctggagccgttgtcgaacccgaatgcactgacgaccgtcatcgccgaagtctacaaataa

SEQ ID NO: 434739 - DNA, 771 bp, Serratia marcescens
atgagcaaccaactttccttcgatgcactgttagcccctgaaaccccggctcaatgtgcgccgcatatgacgccacgcgaagccaggaagcaattcatcaaaacgttctctgttatcgcgacctatcaccgtcgtctcgatgttttccgcgacttcattcgcctggcggctaacgaactcgatttggcgcgagtacggtcagaggagggcagggaagaagctgttcagatttgtaagcgatacgaggctgttgatctgcagaggatgcagcaacttttttgtttcttaatcggcgcgatggaagggggaatggatgacctgttgggcgggatatttatggagcttgaatttggctcgtcatcgatggggcaatttttcacgccatgtgaagtatcacgactcattgccgccctgacacttggcgaccatgttaaagagctggagcatcgcccgtttatcacgttggatgaacctgccagtggttcgggcggcatggtgatcgccgttgctgaacacctgctctctaaagggtataacccgcaacaagtgctctacatccgttgtacagatatcgatcccttggctgcggatatgtgttttatccagcttgcgctattgggattaccggcctcggtctataccggaaatacattgacgatgaaaatgtcccgggtcaggcataccccgatttattacgccaacgactggagcgaaagacttcgtatggttgatatggtcacgaaattcaagacgttattccacgctgtttaa

SEQ ID NO: 434740 - DNA, 798 bp, Serratia marcescens
atgagatctcgcgcaccatcagacaacaatcaaagtaatatcattttaatatcattacagtctcataaaacaggcttgacacacaaacccaaaagactattatttaaacctcatttcactatcaaagtaatattaaaaaaaggtagaaacgatatgattataacagtaggtaacaccaagggcggggtaggcaaaaccactttggcagtaaacatcgctgcagcacgagcacaacagggtcgagatgtattattgatagatggggatcgacaaggcacggctcaaatcgctgttggtataagggcaaatgatgattctctgccaggcatcgcctgtgtgtcttatcccgaaggaccgatccttcgtactcaagtgctccagcaaaagatgaaatatgatgacatcatcattgacgcaggcggcagagactccacagcgttacgtgctgctttagtgctatccgatgcactgttggttccataccgccctggaagcttcgatgtttgggctcttgaagacatatctgcacttatcaaggaagcgcggagtgtgagagatgggttgaacgttttcgctattatcaacgctgctgactccaatccacactcgattgataatcgagaggctgcagaagtgattgcagacttcccagaactgacactaatccccaaacatattgtggcgcgtaaagcgtggtcgaatggggcagcatcagggaaatgtacgcttgaaatgaaaccaagagatcccaaagctgacgctgatctggaaagattaatttcaatcttattttcatag

SEQ ID NO: 434741 - DNA, 459 bp, Serratia marcescens
  misc_feature (27)..(36): n is a, c, g, or t
atgatacaagaagttatggaaaaaaannnnnnnnnncaagaagttatggaaaaaatcattgccctggccgattaccaaaatatgattagccctgggagccacccagcaaaggggcaattcgttgtcaccggcacaacccgcggcgataacgcaatacgtttgggttattgcattcaggttcgaaaaggccgcggtcaattcggctctgacatggtttttctgcgccatccggacgggacaataaacacacatgagaatcagttctatctcagcatgacagacgtacaaattcagcttgctcgttcggtcttcagcatcatgccagaagacgaagatgactcacggggctattgctgctgcggaaaaatccgcgaattcgggttcgttgtcgaaaactcagggacagttccaacaccagaccacccgtttatgataacggtctctagtgaaaaagcttaa

SEQ ID NO: 434742 - DNA, 141 bp, Serratia marcescens
atgaacactctctacttagtaatttatcttttcatcgaactttcaaaagttgcggacaagcttattcctctatttaccagcgcatctttgttagttgcgttagtgactgtgctgacccttttgttcaaaggaaaagcgtaa

SEQ ID NO: 434743 - DNA, 702 bp, Serratia marcescens
atggcgaaaaaactctggataaaaatgcccacaaactggattcataaggatggcttgcgagaatttagttggtcagtccgttctgtaaaagtgagcaatgcacataaaatcgcggcgctgcaattgtatgtagcgatagctatgacatgtgaggatatggagataactaaccaagaggggacgtcgctaacctgtttcgcgtcatcactaacttacaacaggctgctagttatgacaggactgagtagagcgtcagttgctggcggtctgtcacttcttgaaaacaacgaaatcattaaggttttcagagaggggaggaaaaattactacagcccggctgactataacggcgtcagtgggtggtgtaaggttccgtatcgcagactactgaatgaccagggtaatgtgacagcttttcacgcatttaagttacgaaggaaagccgaactgcatgccctgaaactgtatctgtacctatgctatgcacgtcctaacacgtctcactttacgatggcctcctatgaagccatcaataaggcgacaggtattcctgaaaaatgtatcccatcggcatataccgttctggttggtacgggactactttcacacatagataaaagtgccgaggaaggtgccacaaacaaaagaatggcaaactcctactacattaccggctatagggatctgctccaaaatttttaa

SEQ ID NO: 434744 - DNA, 726 bp, Serratia marcescens
atggttcttcttagcaagaagggaattaatttgatgagtgagataaatactccacgagacgtgaaaaatgcccttaaagcgatagatattgaactgctggatcagctaataaggcaaagcctgagagaggaaaggacttaccctcttcaaaccctccagctttacaggtgcggttcgtatgtggcccgagaattatcaaactttgaaaatgctgtctctgcacatggcagggctaaatccgcgaaaaagcgcgaagaaacggggtactcagcccgtaaagctggcgataatttatcctttgcagtaagtcagatgaaatcgagggtagatgtggaagaagtcgacgcactgctctttggcatcgacgagcaaattctatggccacttcattttagtgaacgtttgacggttagggtttgctaccactggcgccagtctgtagaggatgactggtcatacagctgcatcacttttctacacaatgctgacttgcggccggactattcatccccacatccggcccgcaaactcagtgcggctaaacaagagcaaaataggcaaagtgagttatctcatgagtgggagcatctaaaatcgctagggctccaatcagtgcagcaatattttagagaagggagagacggtgcattgatccctgactcgtatcagacaacgacaggtaggctgaataattttagcgccgatttctggcgtgacagcctctga

SEQ ID NO: 434745 - DNA, 777 bp, Serratia marcescens
atggctgggctcgttaccctggggcagcagccaggaactgcagctcagctgccggtgtccatcgactacccggctgcgctggcgctgcgccagatggcactggtacaggacgaactgccgaaatacctgctggctccggaggtgagcgccctgttccactatgtgccggatctgcaccgcaagatgttgctggctacgctatggaataccggcgcccggattaacgaagcgctggcgctgacaaggggggatttttcgctggcatcgccctacccgttcgcgcagttggccacgctcaagcagcgggcagagaaaaccgcgcgaaccgcaggccggctcccggccggcagctcggcacaccgcctggtgccgctgtctgatccgttatacgttgcacagctgcagaccatggtggccacgctgaaaattccgctggaacgccgggaccccaaaaccggtcgcatggagaaagtacgcctgtggacaatcactgacagaacggtgcgcagctggctggccgaggccgtggacgcggcagcgcaggatggtgtgacgttctcggtgcctatcaccccgcacaccttccgccacagctacgcgatgcacatgctgtatgccggaattccactcaaggtgctgcagtcgctgatgggacacaagtcgatcagctccacggaggtctatacgaaggtgtttgcgctggatgtggcggcgcggcatcgggtgcagttctcgatgccggaacttgacgccattgccatgctgaaaggaacatga

SEQ ID NO: 434746 - DNA, 819 bp, Serratia marcescens
atgggaagcatgaaagacctgatgttggatattgaagctgaacgatttgatgaatggcttgcggaaaattacccggatgttgtccccgactctgaagaatgggagcatgccgcgaacttgtactactgggagcaggaggcgcttgccgatcaggctcagtgggatcatgaacacgggctgtttgtggcttccctgaacaatgttcatcagcgttacctgcacgcaaatcaggagctgaagaagttatatgccctgctcgataaagagcagcctgaactggtgtacaggatgtctttcgtccatgccgtgactgtcatggaggcgtacctgatgtactgcgccagggccctgctagaacatgactggccccttaaacgcttcagggatgcgtattacatgaagtccaaacgaatcaaaaatccggaaaaacatgctgcccgtgacatggatctgtccctgttccggcctgcggcgcagaattttgtttcccgaatgacgtttcataacgttgaaaccattgagcgctatttcggcgccgtgctgcacatcccccccatctggccggttgagccgctgagcatgatcgcagactggcgaaacgacctggtacaccgtaacggcgtggatgaacatgatgtgccaagagcgatatccgcgcagcagctacagaatgccctgcagagcgtctctgaccttatagaggcggcacaccagtccctgcgcctggaagtgggctatttcggtaacttgcgtaatgaggaaaaccgggaaattatagcgtcagcactgaacatacctccagccggagaggcatcctga

SEQ ID NO: 434747 - DNA, 198 bp, Serratia marcescens
atgggtgactggtttattgccactgagggcgtgaagatcgtcaaagacagcgccggcctgtggccgcagatcaccggcataccctcttcccgcctcgacaaataccgctggtctccgcagaaaacgctgtggcaatgctggcgcaaagagcgaaagtcgcggaacgagcaacgactggccgagaggaataacgcatga

SEQ ID NO: 434748 - DNA, 360 bp, Serratia marcescens
atgggacgttcaaaacctgtgaagattgggcagaaggaatttaaatccaaaaaagccgccgtggactatttcatggatcagcgtgaagcagtcaaagcagtgggtccgctgaaagagggagggttgtttgatgaattgcgcgacctttatctgcgttactgcgaaatcacagaccatcgcctgggcaaccggggggtttacgcattcagcgtaaattatgaaactcgtcataccgaccagaactacggtacgtatctgtgctactgggtacatttttcaccgaaagataaggatggattgtccttttcggttaaacaagcagtggatgcgatcgccagcgctgcggctgaacaaccctga

SEQ ID NO: 434749 - DNA, 2466 bp, Serratia marcescens
atgtatcccgtatttgagaatggatcctgctgggtcaaggtggattttcatcttcatacccgtgcagataaagaatttcgctatgtcggggaacccgacagctatattcgtgactacgtcagtgccctgaaagcggctgatgtgggagtaggcgtgatcaccaatcataataaattcgatcccggagagtttaaggcattacgcaaagccgcgcgccgtgaaggcactgagctgcttcccggcgtggaactctctgtcaatgatggtcaggccggcgtgcacacgcttgtggtgtttgccgatgactggttcatcaacccgcagcagacgaatcatattgaaagtttcctgacggccacgtttgcgggcgttgataattttgagaacgaaaatgcccgttcaatagaaaatatcactcagaccatccagcgccttgaccggtatgaacgggattacttcattgtgtttgcccacgttgaagcccctaacgggttatggcgcgggttcagccctggccggatcggggagctttttgataatgagcttgtccgccggcgcgtgatggggtttcagaaggtgatgacccacgacctgcgggttaaaattcacggcgttcttggtaggcgctatcctgcagaagtccagggatgcgatgccaaaacgctggatgacatcggtgccagaaaagtcgccagctatctgaagctgggtgattacagttttgacgctgtccgatttgcgctgcaggatttcccgcaccgcgtcagcggggaaaaaccggcccttatccacagccatatccgtcagatagcattcgagggagccggttcgctcggcggaaccgtggtgaaattatctccggagctgaacaccctgattgggatccgcggcagcggaaaatcctccatacttgaagggatccgctatgccctggacattccgtttggcgagaaggcatctgaccgcgactacaaagaaaatctgatcagtaatttactcaaaagcggggggaaaattaccgtcgacgccgtgtgccgtctcgggcgggcatatcagataacccgaattttcggccaggaaccgcaggtcatttttgacggccaggccaggcacggggtcgcgctccgggaaacggttctgcacaagccagtgtattttggccagaaagatctgtccaataccggcgcagggtttgaacacgatctgattgaaaagctggtcggtgagcgactggttcccgtgcgagaaaaaatccggcagcagaatacagtcgtgctcgacaggttacgcctgcttcgtcgcctgaaaaaatcgggagaagcactctcagaatggcaggcaaaaaaggcggatgcgcagttccgcctgcgcttttatgcccagcatggcatggaagaaaaactggagcggcagaccaccttcggacgggacgagcgctatctcagcaatacctctgcccaggcaacccaagcgctggacagtctgcaggacggtatcagggagacactcgacgagttgaagcaggagcagaaacatgaatcagcgcataaccaggccgagatcgatgactattgtgagggatatgatcgcttcacgacccatctcaactccctgaacaccatcgtcgacggcgcccgccagctcctcacagaactcgatactaagcagcaggccttccagcagaaaaagcaggcgctgacggaggaatttgccgaaatagagcgaggccttgcagaagagttgcggcgggccggggtggaaaaagccgatccggccgactttctgaaactaaaggctgggctggaaactgcggaagagaaaatagatgagttaacccgggctgaaaccagtcaagcgttacaggagaagagcctcacagaagcgctgagccggttggctgaactctggggggaagagtatcacgaaattgaagccgtgctggccaccatcaaccaggcagattcgcccttgaagatcgtgccggcctttgcaagcgacaaaaaagccatgcaatcttttctgaaagaaacgtttattggcagccggttgcgggaaagtacctaccagaccgtagctgacggcttcagcgattttggcgaactctggctgaacagggataaactccaggggattatcaacggctctgctgagacgttcggtgtgtatctggaacagcagatagaatcgctaatcgtctggcagatcccgaatacctacaccattgaattccgcggaaaaccactggaacaacactcgctgggtcagcgcgcctccgcattaatgctgtttgtcctgaatcagcaggataatgatgtggtgatcatcgatcagcccgaagacgacctggacaatcagacgatttatgacgacgtgattaaaatcatcaggacgatgaaaccccgcacccaatttatctttgccactcacaatgccaacattccggttctgggggtcggttccggctga

SEQ ID NO: 434750 - DNA, 762 bp, Serratia marcescens; identical to SEQ ID NO: 101528

SEQ ID NO: 434751 - DNA, 861 bp, Serratia marcescens; identical to SEQ ID NO: 229648

SEQ ID NO: 434752 - DNA, 465 bp, Serratia marcescens
atggataaattcagcgaactgaaagcgaccgcaatgtccgcaacgccagggccgtgggcatatgaggcctatggcgataccgggcagtatggcgtcggtgttctgctgaacgagaatgatgaaccccagagcggtcggcaagagcaaggtgaaatgcttgtcgtggaatcggtggcgtcactggtaaacggggtgcctaacgccgcattcatcgccgctgctaaccctgctgtcgttctcgccctgctggcagagctggaggcgaaggataagcgcatcgccgagttggaagccgaggcgaaggtttgggagtcggcagcgacaaagcatctggctcgggccgaggaagcagaaaagcggctggctacgccggtgcggttgtcatgtgaaacgcatcctcgttgccgtactcagcatgccaaagacgttcgcgccgctggcttcaccgcagagggggatgagtag

SEQ ID NO: 434753 - DNA, 240 bp, Serratia marcescens
atgaatcagctggtgaaaatttaccggaatgatgatggggatgatatcccgaagagcgaacaatactggcatttgtctatgccatcgtgtggcgagccatcggtattttgctctggcgaatattacacatacggaggctcatgcaatgtcatcgccgagcagcgagaaaaagaaaaaggcggcattacctgcccgctgtgcctcgagctaatcagaaaaattaaggcggtgaaactgtga

SEQ ID NO: 434754 - DNA, 684 bp, Serratia marcescens
atgaaagagcgcccagtgattttcaactctgaaatggttcgcgccattctcgacggacgcaagacccagacgcggcgggttattgccaatgtcagccccgataactgcattccactgcataagccgaccaaaaccaaagacgggatttacacgcatgtcatggatgcgccggggcatggtttatgcccattcggccaggtaggcgatcggctgtgggtacgggagacgttcgccgttctcggcaacgaagacggttgtcctatcgattgggacggaaacctgattaagggcgatgagaagcatgcggcgcggatttataaagcgtcgtgctggcaagagccgggaaactacggactgtggtcgatacctgaccgagacacccaatacgaaggcgcatggcgcccatcaatccacatgccgcgctgggcatcccgcatgacgctggaaatcaccgcagtgcgcgttgagcgcctgaattcaattggtgatgtcgaagccatgcgagaaggcatacagaatcttacgacatgttcccatgccgattttggaatcccgggcgtcgtaaacgcacagcatccagtgcgtgcctttcagttgctatgggaatccatctacggcgaagaaagctggagcgccaatccctgggtgtgggttatcgagtttcgtcgtgtgggaggtgcgtga

SEQ ID NO: 434755 - DNA, 339 bp, Serratia marcescens
atggcacacgtaaacacagcacagcagatcgaacaatttaaaaagatagctcaggctatcgttgaaaacgtaaaagcacttgtaaccagcgaaatgggaacagacgaaaccatgcaagccattcatgaagaaatcctgagcttcttcattaagcaacaacggatggcggttgaatacatggctttcaacaaagagcagcgcgaggaattttccttactaatgtacaccctgcttgagccgttggcaggaaaattcaaaggaaaagaaaaccctaaatactccgcctatgtagccgaaacggggaaaactggagcacttaatttcatggttaacgcataa

SEQ ID NO: 434756 - DNA, 378 bp, Serratia marcescens
atgtccgatccattaactgcgactggcaccactgcgctggtgtcggccacgattgcggcgcctgcagttggcattgattacggggttatctttggcgcgttcatcggtgcgatgttctacgtcacccaggccaaagacattccgcgaatcagacaggctttctcgttcgtcgtctcatttggcacaggcgtactcggtgcgagtgttgccggcgctaagctttcagcatggctaaattacaacgataccccgcttgagccgttaggtgcgctaatcatctctgccgtcgcggtcaagttgctaaccttcgtcagtgagaagatggaggatccgacatcgctgttttccagattccggggaggcgcgaatggcaagtaa

SEQ ID NO: 434757 - DNA, 357 bp, Serratia marcescens
atgctggtggcagtagctctcggattggtcgcgtggctggccgtcagcaactggggttaccgcaaagagctgcagttgaccggccagaggctttcaacggagcagttgaaaaacagcaagcaggcggggttgatagctacgctgcaggatcaggatgctcagaaccgcgcactggtggctgcacaacaacagcacgagcaacagctacgccagcagtacgacattttgcagaggaaattccgtgaagcgattaaagataatccctgcgctgctgagcgtatgcctgattctgtcgttgagctcctgcagcaaaactccaccgccggcgccagagcaggtaataatcctgccccctga

SEQ ID NO: 434758 - DNA, 321 bp, Serratia marcescens
atgaaaaacggtatctatttcgttacattcaaaagcaataacaatgatgttggtcaagggactgtcgttgttaaagacaacaccattaacggtggtgattttggtttcacctaccaaggtcatatccaaggaaataaattggatttgcatgtatcacagcataaccctcaggcagttaatgttatccaaggtgtaaataattacaccatggaaatggtgattggagaggaaggcggtggctatgtattgactggcgctgtcaaaggaattcctcaagcacagctaaaggttattgctaagtttattggcaacttggtttaa

SEQ ID NO: 434759 - DNA, 1878 bp, Serratia marcescens
atggccaagtcatttgactttgagctgacggctaatgatgaggcgtcagccgcaattctgcggattgaggaaattgtaaagcacctcaatccgctgttggacagaacgcgcgatgcgttggcgttgggcggtcaggaatccagagataaccttgacgatttgggcagccgttttgatgtgttggctaaaaatgccagaagcggcgtccagttcatcggcgatttggtcccgccgcttaaaatggtcggtggattaaccctcggactgggtggcgctgcagcggtcgtcaatgttgttaaaaacaacctgaccaattttgccaacgccggctaccggatcgataccgttgcaaaaaacgtcagcatgacggcggacgcgtttcaggaactgactggcgccatgattgaaaacggcagcgcgcgtgaggctgcggaaggttcggtcagtgagttgtttgaaaaggcgaatgatgctgtacacggccgtaatgagggctttctcgccttgctgaaacagcgagggatagggatcagcgaaaccaaggatggcctggccgatgtaggcaagctgattaacgacctcaaccgcgccatgcaatcactccctgctgggcagcaggcgctgtttgccaacaaattgggcatttcgcccgatcttctcagctatctgcgcaacacgaccagtgaagttcaacggctcaaggatcaggcccgccgggatggcctgatatttaccgagaaggatctgcagaatgccctggcgttcaagcagcagctgaaccagataggtgctgcctatgacggcatgctgatgaaagggcaggcctggctgggccagtcggaaaccttggcggcttcggtagaccagatcaagcaggtcgtcaccaatggtctggacagtacggctatcggttcgatcctgacgtttaacagcggcgggaaacaggccgatattttgcggcaggctcaaggcgacgagaaatttaaagacacgctttcatggaaagagaagctggatttaaaactgggctatgcgtcggaagatctgatcaagaaactgaacggttattataagcccgtatggcgcgccgaccagctgagagccgataccgagaaaatttcaggttacccggcgctggctgaaaatggggcgatgttgccgtatggccagccggggaataatgcactcgggctgcgtaacaataatcctggcaatctgcgttcagcaccgaatacgactggccgaaacggcggctttgtcacgttcgaaaatcccaatgatgggctggcggcgctttctcgacagctgatgctgttcggcgatcgggggaataatacgttaaaccgaatgattaggacttatgcgccacctaatgaaaatatcacccaggcctatattgatggtgtggcaaaacaaacaggctttaaccccgcggaaccgctggacctgcattcaccggcggtgcttgaaaagcttatcccggccatcatcaagcatgaaaacggcgcccagccatacagccgcgatcaaattttcagagggatcagcgattcggtctttgatcctcgctggtctggcttgcgtgaccagaataatctttacgggcagcgagcatctggtttgttcgaactctctgatcaggggcagtcattacagccgccaacgccaaaggattcgccaactcaagcctcgctgtttgcaccgaatgatcagcgagaggaaaccatcggccagatctctgatgccatgtctaaggcgatcgacgagaacaaattccaactggaaattacactggtcaatccccagaccggcgagcgccgcaaggttcaaactgaaggcggtggccgcgtggccttgtcaatgcaatcaatatcataa

SEQ ID NO: 434760 - DNA, 735 bp, Serratia marcescens
atgaatacgatatgtaaaatgattttttctctatcattaataccgttatatgcgcactcaagtacttgtgaaaacagttacaatatgggatataaaggctttaccttcccaattataaccaactcgagaaacacaccagaaaaagcctgtttcagtggtagaaacgttacaagctggattacagaatctgatggcgccaaacttacctcagttataaagctagatgatgaagaattcttctacgtgaccacatacaatgaacaaaacggaaatagcgtattgtatggggtttatgaaaattcaaaaggcgaaccgaataaggttaggctgctttttaacgaccccaaaaaattcgaaccaaaacaaacattagaaaacatgagattaaactcatacgacaaagagaatggagttgtctatttttcaacaatggcatggaccactagtgacgccatacacgcatttagcgtgccaatgcaaaaattaaaaatagcctctcaccaattaaaagagagatttataacagacgggaatttcattgcagtagcaaattccgaaagatgccaatcatgtattgtcgtagaaaaaataagtcatgatgaaaaaggggcttatttccctaaattcctcgttaataataacggtgaaaacttctgccaaatcagcacaaaagatgcagcttgggagttagcaccagaatgcctatcaaaaggagatgaagaacgcccacgatag

SEQ ID NO: 434761 - DNA, 1185 bp, Serratia marcescens
atgaataaaaaaagcaaaagagtttcgctttggaagtggatttgcgtgagggtaatttcccagtctgtcggggtggttgttattattgcactctgtatgtggttgcgctatgccatttatagtacctgggttttatatcatgaaatgccggcggatgtccgaaaggaattcctgtacttgcttaataatcccaatgaagatttatatagattttatagcctttttcactactggtatggcattgactttgctaatccatcgatcacgtcgggggattggattatgctggctattttggtggttgtcgccatacctctcatggtcttactggggctctatatgtcgcggccgttggcgaagcaattttcctacctggtcgctgccgcgagaaaagtcgcggagggagatttctctgtgcaagcaaaattagaagagaaagcgccggaagaacttcttactctaactcacgatttcaatgagatgaccaaaaaactgacttattatgaaggggagttgcgtgcttctcatatcgctatggcgcatgaattacgctcgccgttgacggcttcaatcgcacgccttcagggaattatggatggcgtttttgagccggacaagcatcagttaaatctggtcatgcagcccttgaccagcctaaatcgccttattgatgatcttcaaacgctgtccttgtcgcaagccggggcgttatcattagaaaaataccacgttaatttgtgcgagttgattcaggagcgtttgcaatggctaaaggctgaagtttctcaggaagatttcacgattgaatttgaaagtcctgctcccgtattcgtctacgccgatccattccgaattgggcaagttgttacgattctcataaaaaatgcaatgcgctacgcgtattccggcaagaaactgacaatcacggttaatcattttaataatgaggttgtcgtctgttttcgtgattatggtccgggcgtcagtgaagcgtttttacctttgatgttcgagcgtttttcacgggaagaaagttctcgatcgagaaatctgggggggagtgggcttgggctttctatcgccatggcgataagtcgggagcacggcggcagtctcagtgctcagaatcatcctgacggtgggatgctatttcaactaattcttccaatgaaaatagagtcttga

SEQ ID NO: 434762 - DNA, 288 bp, Serratia marcescens
atgagcatccgagacacgatcagcaccaaaatgaagcctaacgcctgcgccgtccaactgttcgagctgactcaaccggatccgcgtgttgattcgctgttgccactggtgaccggcaagacgcctaatcagattgtggatgcagtctatagccgcaagcttaccctgggtaagttggaactcatccggcaggacctgaccctgaaccggacccacacaaatattaaccgcctgattgccgcctctgtgggcctagcgattagcattctcaaagaggggatcgaataa

SEQ ID NO: 434763 - DNA, 786 bp, Serratia marcescens
atgatcacagcagtaaataacaccaccccaaacactgaaactttcttcatgtcttattacggcatcaagggagcattgaatatccaaaccccgaaaggcgcggttaaattcccagttgccgcgcgtgacacattgctctatctcatgagctggaaaacagaggaagtgtttccgagcctcccgagaattgcggaaatggttggacactcccgcacagtggttgcggaggctgtggcattcctcaagaaacacggattcattaccattggtaaaaaggtcactgcaacgcagcaggttaatctatatacagtggtgagtcttcaggaagcaatggaaattatcggcaattcgggggaagtaaaaaatgaatcaggtcctactgttggaaataaagcacaaagcgttaagcatccaaatagcccaacagagagcacgcctgagaatacacacgacgctcgccctgttgggattgacgatagtcacagcgccgagcctgttaacactgaacaacctgcacagccttcacagcttcctcctgtaatcgttgaggaacagccagaagagccagttgaagcagaggaagagccagacttcaactcatacgccgctatggcggcccctgtggctctctctggatgggtgacaacccacaacgccaccgtagaactgaaagccgcctacgaggcgcacaggaacacctacggcgaatcccacagcatcccgagcaatgcacatcacaccccgagttactcaacagctgaatatgacgccggggaagcattctaa

SEQ ID NO: 434764 - DNA, 168 bp, Serratia marcescens
atgaaagataaacgccagcatttcgaaattactctcaataaagagttaaaggccctcctgttggaaaaatcagagaaagaaggccgctccacccaatcaatcatccgcgaggccctcgcctcctacttagtttctggagaaacaaacaatgatcacagcagtaaataa

SEQ ID NO: 434765 - DNA, 264 bp, Serratia marcescens
atgagcaatccaaacccaaataaagaaaaccggttcgcccctaaagattgggcagcagtcccaacaaaagaaattatcaccctgttggggatcgggaatattactgttaacggtcttagcaactggcaacacagaaacggaaaatctccaaatattgaggcagcaattaagactcatcgaattgtggagaagattaagaagcataacgccgagattgaagagttaggcatgagcagcctgactatgtacccggtcttttcttaa

SEQ ID NO: 434766 - DNA, 1611 bp, Serratia marcescens
atgcggcctcagccacatagtaacgctacgttattacctgtccatcagcccctatctgtaagtctaccgacacaaggtagacacaaacctgttagtcactcgttacttctccctgaggtcacagagtcaactcccaacgaagtcaaacctacagtctcagaccgaaagcttgctaggtcgcagctatcacaggtagccctactagcgcttgctaggccgcagctcgttaagcgcagtgactcagggtattatacttaccgtctccgcatcgtaggcagcaccaagtctctgctcgcgttatctctcaagaccaaactaaaaggcgaagccatgcagcgttacgaccacctgtcctctaccctcaaggcgttcatgttggataagccagacgccaccagagaggagctaaaggagcatcttcgggtcatggccgaacagttcctaaccgacagtgatgctcgtgggtattggaatatggtcgaacctgatgctgatggaactatggttaatctggtggaggatacggtctccagtcttaaggaaattgcagcaactcagcagttatctatcgaccagcaccggcacctcgtggatgcactgagcctgatggaagacgtaaagtctaaagctcgtggtgaggctcgtgggctgcttaaccgaatggaacaaccgaaagacgctcacaatgaatccttaatcaacaatccttccggcctctcaaatgctactgaagccctaagcatcaagaccttatcgtctatctacctgtcggaacacgcagtcaacctgtcggcctctaccctgcgagtcgtgcagtctgctcataagacactatatgaggcttcggcggctgtaggctgtgttgatatggctaatcatgctcgtgctgacctcgtggctattagagagtatttggctcagactcgaagtaattccactgtgaatgccttgctggcgaaacttattactttactcagctgggctaaattgaacggtcatataaacaatgattacagtgcgaaactgaagtatacgaaggatattgactccaagcgcaaagccttcagcaatgagcaggtggtcaacctattgaaaggctcgaagggaacgcctatagcggctttggtgacccttgctgctattaccggggcaagacttggggagctgatgcaattggatgtatcggacgttaagacgttcgggggaataactttcatcgacattaatgatagcggtgaaggcaagagcctgaagaataaatacagtaagcgtgtagtcccactcgtagacggtgctctgggatttgacctcaaaggattccttgagggtctgccgcttgatggaggcaaggtcttctctatcagtcgtggggttgcaagccagcatttccgaaaccttcaggataaaaccaaggcagacggtgagggattgacgttccacagcctacggcattctatggccgggagactgaaggctgctgacgtggctctgacgacagctcaggcgatattggggcacagcagcaactccattacctacgaccattacggcaagggtgcagtggcggagctggtcaagatgcaggatgcgataaagaaggcggtgttgtga

SEQ ID NO: 434767 - DNA, 510 bp, Serratia marcescens
atgagcagtaacgaatacaccattcacatcttcggtcaagacatccagtcccaagacggcctgttccgactcgatgagattcgacgcattggcattcagattggcaaggtggctgatggtcgctcgactgaagttacccgcttcatgcgtaccaatgtaggcaggcatcttatcaacccgaaaaacgggttcataaagaaaatagatatgggtcgcctcggcaccagctggttagcaacacctgaagccgccattgagttcggacgctggttagactttgagtacggactggaagtcactaaggcatttgtggcaatgacctccagcgcttctgtacaggccgctgtggctgctgacgacagcattgataccaacgctcaggacttcatctcccgacacgctgtgaagcattacagcagaggcaagctggtctcagaagaggtctacgaggagagacgtgtaggccgctgtgacttctctcagctgaagcgccggagcatccagtcatga

SEQ ID NO: 434768 - DNA, 186 bp, Serratia marcescens
atgacccacagcctgaaccctaagtcatcacgtgaccgctacgaactaatgctacgtggctacaaggtggagaccctcaagtccatgcttggcctcgacccagagtcccgactaccgggcacaccccaagaagtaatcaatggtctcgctaagcagttggcagaccgtaagtttaaccatcaataa

SEQ ID NO: 434769 - DNA, 468 bp, Serratia marcescens
atgaaactgaacattatccacctcgacctgaagaagaatgaagccaacgtgtccggccagcctgtgaccgtggattatcttcaggacgtcctaatcccgatggccttggcaccgtaccagagtcgcccacgtcaaggcgctacgaaggttctgctgcccctgatggaacagcacccggagttagaccttacccgatacggtcatttcactaccggtctgcgcgagttactggcagagcagaaagctgaaaaggacatgcgacagaaagacgctgacacgcacgctgcgcggttcgcaagctacctgccgcctaccagtaaggactttgagaagcgggaagagcgtgagcgtaagcaggctgctattcgaaaccacttcgctgacctgcgggcgcagactcgtagcaaccggccacagttcactcaggctgacggtagcaactacagcatgttggacgagaagttctaa

SEQ ID NO: 434770 - DNA, 993 bp, Serratia marcescens
atgaaaccattcaactatgaagcacctcaagacctgcaagtctccaacctgtcgaacatgaacagctctgtcgttatcgctgatgctggcgacactctggctggggctaatacctcccacgattacgctgtcgctctggaggaatccctgcgcaccagcctgaacagtgacgacaatcaggccaccgctaatgaagtattcccgaccgaatggctaccgaccaagcaagaccagccgaccccagtacaagcctcattgctggaagaccggagcgcatggctgaacctgcatggcgattggtctaaacctgaaaagggtgagctgttggccggtactgaaatcttctcactgcctgctgacaaagcactactggtctctcaccagttccacgtgaccgacttcgccatgatggctggatggacttcagcagcccttgagcagcacctgacgcaaatccatgttgcccttcagtctgcaatcaatagcaagctggttgacgtcctgctgacctctagcgctatgcgtaccaccgagcaggataagccttccggtaaaccacgtgagatggctgaagacctactcgacgtcatcaccatgagtcttgacccatcggtgggcaacgaggtgtctgcttacggttatctggtacatgctgacatgtatcgcgccctgacccgtgcggctcatcgtgcaggactggaagatgtggacgacctgctgggaacccatgtgcgttactacggtggtgaagaccgtggcgtctttgccctgcctaagatgttctccgctattgccttcagccctctggataaagatggtgagtggttctctgtgaagcgtacccgtattcctcaacgtcaggcttggagcttcgagattctggctcgtgcctacgtgatgactgaagcgactgccaaggttaaagacaaggagcacatggctacggttgacgctaagttcccaatcgtgacccggattagctggaaggcgtaa

SEQ ID NO: 434771 - DNA, 765 bp, Serratia marcescens
atgattaataaacaacctgaagtcttgaccaatgagtcgcagctgccagccctgcccatcgtaatcgacgggaaggagttccatgcaggtgaagaccggatgtggtcactgaacgagattcaccgtgagttgggactaccggtcaataaagagcctagccaatggcgcgatagaattaaagatgtgatggtcagctctgcaaatttgcagacctccgatggtaatggtacttgggcaactgagcatggtgcggtcgcctatgcaatgtgggtgtctcctgagttctacctgaaggttgtcgatgcctacgtcttgatgcgcaacgacctgattctccgggagcgtgtagccgtcctccagttagctgagaagaccgctatcattgataagctggagcctgcctccgatgtgttctttgaccgcctacggaatggtggagccgctccgtggtctgcctgctgtaagtccctgcggctgccgcctaacttattgaaagaagggctattgcgtagcggtaagttcaccaccaaattctgtcacgacagaggcgacgatgtgattgtcccacacgctgcgggcttcaagctgggactgttcgtcatcgacactagcctctacggtcgagactcttggaaggtgacagccaagggctatgcgtggatgcaggagaatgcagcccgatggtctgaggttctggagcgtgataagcaggccaaggccgcagcgacacgagccaagaggaaggcaaccacccgcaggagataa

SEQ ID NO: 434772 - DNA, 642 bp, Serratia marcescens
ttgacaccgaaaatgccttgggaattaaaccctgctttagaaaaacagcaccttatcactgttgccaaatttattgctgaagttcgcaactctgtcgttgatcttcatgatgaagatctgggggatacgaaccaatctttgggcttcagagcatatgaatgctgtcgtagccgcatcaacaaggcagtgcttgtagaaaagatttggccgtttctttcaatagttcgtaaaggtggcaaattcacttttgcgataggtaagactcctgtcagattttacaaaggaagccctagctgcatagaagaaagacgccaaattccttgttcagaagcagtgaagcagatgtctcttctagaactagataatccagattactctcgaattatttggtactttgttgttgaaactgatcaatttaaatatgccgaatctgtaacattcgcaggttatctagatggtgtacaagtatctgcttacgaaattccattagatggtttagtccctctcctgtctacaattggcacatctaataatgaagatgacgtaattgataaatccgtcaagatccctaaacctaaagtgtctcctaagaagccaaaacaggatgacgatcaagcaacaacagcattaaacaacgagtaa

SEQ ID NO: 434773 - DNA, 3819 bp, Serratia marcescens
atgagcctggttaaaaagatttgtctcggatttctggtcgttctgctgttgctgatcggcggcctggccttcctgataggcaccaccaccggtttgcatatggtcatcaacggcgcggcgcgctgggtgccggggctggagatcgccggcgtcagcggcggctggcgcgatctgacgctgaagggcgtgaagtatcagatgccgggcgtgacggtcaacgccgggcagttccatctgtcgctcgatctctcctgctttaagcgcagctcgttgtgcgtcaatgccttgaccgcccaggatgtggacgtggcggtgaacaccaaagagatggcgccttccgcgccggtggaggagagcagtgagccgaccaccaatctcagcacgccttacccgatcacgctgcgcctgttggcgttgaacaacgtcaaggtcaccgtcgacgacaccgccatctcgctggccgagttccgcaccggcgcgcagtggcaagagcgcgcgctgacgctgatgccgaccaagatcggctcgctgctgatcgccttgccgaaaaccccgcaaaacccgctgccggaagcggtgcagccggcggtcgaggtggcgaaaaaggtcggcgagcaggttaccgacgcggcgaagccggcacctcagccggaagagaagccgctgggcgaaacgctgaaggaactgttcgccaaaccgctgttgccggatctgccggacatccgcctgccgctggatatcaccgtcaaagagatcagcggcgagcaactgcgcttgaccggcgataccgacgtgctgatcacgagcctgttgctgcaggccagcacgcaggatcaacatatccagctggacaacttcgacgtgaagtcgccgcagggcacgctgtcgctgcaggggcaggcgacactgaccggcgactggccggtgtccctgaccgccaacagcgcgctgaacatcgaaccgctgaagggcgagaaggtgaagctgaacgtcggcggcgggctacgtgacgagctgaaggtggcgctgaacctgtccggcccggtcggcgcccagctcgatgtgcaaacccggctggccgaagccggcctgccgctggcgctgacgttgcagagcaagcagctgaaatggccgctgagcggcgaggcgcagtatcaggtcaacgatttccgcctgcgctttaacggcaaggcgaccgactacgcgctgtcgacgcgcgccaatctgaaaggccaggacttgccgccggcggtgctgacgctggacggcaaaggcaacgtcgagcagttcaagctggagcgcctgcgcttggcggcgctgcagggcaataccgatctcaccgcgttggtggactggagcaaggccatcagctggaactcgcaattgacgctgagcggcatcaataccgccaagcagtggccggaatggccggcgaaactcgacggcaagatcaccacgcgcggcagcctgcacggcggcagctggcaactgcaggtgccggtgctgcagctggacggcaacgtgaagcagaacaaggtcacggcgcgcggtacgctgagcggcaacgccgccgggcagtggaaaatccccggcatcgatctggcactggggcgtaaccaactgaacgtcaaagggcagctggacgagaagagctggaacctggacgccaacatcgacgcgccgcgtctggacggcgcgctgccgggcctgggcggcaccgccaaagggctgctgaagctgcgcggcaatctgcaggcgccgcagctgctggcggatttgaccgcatccggcctgcagtggcaggcgctgcgcatcaaccgcgtgaaaatagacggcgacgtgcgctccacggatcagattcaggggcaactggcggtacgcgtcgagcagctgaagcaggatgcgctggaggtcagcctgttgaccctcgacgccaagggcagcgagaagcagcaccagctgcagctgaagatcgacggcaaaccggtctccggccagctggcgctgcagggcagtttcgatcgccagcagcagcgctggcgcggcaatctgaacaacactcgcttcgatacgccggtcggggaatggcgcctgacgcgcgccatcgcgctggactacctgaacaccgagcagaaaatcagcgtcgggccgcactgttggcagaacccgaacgccgagctgtgtgtgcccaagaccattgaagccggccagagcggccaggccagcgtggtgctcaaccggttcgatctggcgatgatcaagccgttcctcggcccggaaaccgccctgagcggggtgttcaccggccgggccgacgtcagctggaaaccgggcggcgcgctgccggaggcgaaagtcacgctggccggcaacggcgtcaaagtggtgcagcaggtgcagggcaacgcgctgccgatcgccttcgacacgctgaccctcaacgccggcctgaacaacggtcgcgcgctggccgactggcggatcaagctgaccaacaacggccagttcgacggcaatatccaggtggcggatccgcaggtgcggcgcaccatcagcggcaacgtcaatatcaccaacatctcactggcgctgatcaacccggcgctgatgaagggcgaaagcgcggcgggcatgctgaacgccaacctgcgcctgggcggcagcgcgcagaagccgctggtgttcgggcgcctggcgttggatcgggcgaaggtgcaggggcactggatgccgttcgatatgaccgacgcgcggctggcggtgaatttcaacggcatgacctcgacgctggaagggctgctcagcaccacgcgcggccagctgaatctggcgggcgacgccgactggcgcgatatcaacgcctggcgtgcgcgcattgccgccaagggcgataagctgcgggtgacggtgccgccgatgatccgcatcgacgtgtcgccggatctggtgttcgaagccacgccgcagctgttctcgctcaacggcaaggtcgacattccctgggcgcgcatcacggtgcaggagctgccggaaagcgcggtgggcgtctcttccgacgaggtgatgctggacgaccagctgaagccgattcaaccgaagaccgcctcgatcccgatcaacagcaatctgatgatccacgtcggcaatgacgtgcggctggacgcttttggtctgaaagcccgtctgaagggcgacctgaaggtggtgcaggacaagaaagggctgggcctcaacggccagattgacatcccttccggccgcttccatgcttatggtcaggatttgatcgtgcgtaaagggcagctgatgttctccggccctccggatcagccgctgctgaatatcgaggcgatccgcaacccggaatccaccgaggacgatgtgaccgccggcgtgcgcgtgaccggcctggcggatgcgccgaagctggaagtgttctccgatccggccaaatcgcaacaggaagccctgtcttatctgctgcgcggccagggcttgagcagctccggcgccgacggtaacgccatgacctcgatgttaatcggcatgggggttgcacaaagtggtcaacttgtgggtaaaatcggcgaggcattcggcgtgagtaatttggctctggacactcagggggttggcgacagttcccaggttgtcgtgagcggctatgttctcccaggcttacaagtaaaatatggggtgggcatcttcgactccttggccacgctgacgttgcgttatcgcctgatgcctaagttgtatcttgaagcggtgtctggtctcgaccaggcattagatttgctctatcagtttgagttttag

SEQ ID NO: 434774 - DNA, 177 bp, Serratia marcescens
gtgaatgaagtgttgggtctgcgacaggttgaaatcgatgacgcacgctggcaagaggcgatggacgccatcgccgattctatccgggtcacaggtaccagtcagtacctgcggatttacgagcggcagccaaacggcaagtacgagcaaattagcctagatattgccggggtctga

SEQ ID NO: 434775 - DNA, 234 bp, Serratia marcescens
atgagtgatgcgttcgaccgcgccagcgaactggaaatggaagaccgtaaacgagcgttaaatacccatttaaaccgggttaaagaggcgcccgtcgagtatggctattgcaatgactgcggggatgacattcccgcgcggcggttggcgtcgctacctgatgcagtctgctgcgtgacctgccaacaaatcagagaacaacgggaggcccagcgtggattgggaggtcgttaa

SEQ ID NO: 434776 - DNA, 1686 bp, Serratia marcescens
atgcaattcccccaccgcccccatcggcaccgggcgcccgcgggcgtccagcaagtaagcgcgggtattgccgatcggtttcccaatcggcaagcgcgcctccccttcagcccgctcgatacgtgccgttgtcgcaaaggtggtgatctccgtcggcccataggcatggatcaggtgcaccggcccccgctcttgcaacaaccgcgcataagcgcccggatcctctttctcccccccgctgatcagatatttcaactgcgccagtgcgccgctgatgctgtgcacatactgattgaacagcgcagtggtcaagaacagcgtggtgatgcgatggcgttgcagttcggccgccagacgctcggcctccatcatcacctccggcgcgatcaccaccagcgcaccgccattcaacagggcggcccaaacctccatcgtgctggcatcaaatgccggattggcggcaaaggcgatgcggtcgtcggcgtcaaaggcggcgtagcggttgttgcgcaccagacgcgtgatcccctggtgcggcgtcatgacgcctttcggcgtaccggtcgagccggaggtatacatgatgtaggccgtcgcgccgctcgacacgcgcaacgccgggttaccgttatgatcttcagcttcgcgatcctcgaccgtcagctgcgggatctcctcgtcgccgatggcgtccgtcagcatcaggcaggcgccgctgtcatcggcgatccacgcctgacgcgcggccggcagttgcggatcgatgggtacatacgccgctccggccttgattaccgccaattgggcgcagaccagttcgatgctgcgcgccagccgcaccgcgacccggtcgcccggttgtacgccgcgctcaatcagccgatgcgccaaccggttggcgcgcgcattcaactgtgcgtagctgagccgttgcgcatcctggatcaaagcgatggcctgcggcgtcagccgcgcctgctgttcaaacagttcgtgcacgcaggtatccgccgggtaagcttccgccgtatgattccagcggcacagctgcagcgcatactcttcatccggcatcacctccagttcacagaccggtgtctgaggcgcctgctccaatgcctgcgccaatgcgctcaacgcctgcgccatatagccacacacgcgctgcgcttcaatcggctgcctgacctgcgccgtcaggcccagcgaatcaccgccgtcctcgaccgacagcacgaacggatagttggtgcgttcctggctatcgagcagcgttacgccggtcggcaatgcggtgtcctcgccactgttatgccggtagttcagcagggcactgaacagcggcgtgcccgcggcgacgccgctgcagcgctgcgccaacgccagcggcgcatgctcatgggccagcagcccgctcagccggatgtgcgcctgcaacaccaccgattccgcgccgacctcgttgacatccagccgcagcggcaacgtattgataaacaatccgagcgcccgttccgccccgtctccggcctgcatgcggcccaacaatacggtgccgaataccacctcatcgcggccggtagcgcgcgccaacacctgcgcccaggccaggtggcacaggctggccaggctgacgcccagccgccgcgcctgccgccgcagctgttggttgagcgcaggcggtaa

SEQ ID NO: 434777 - DNA, 1056 bp, Serratia marcescens
atgaaaaagacagctatcgcattagcagtggcactggcaggtttcgctaccgtagcgcaagccgctccaaaagataacacctggtacaccggtgctaaactgggctggtcccagtaccacgacactggtttctacggtaacggctaccgcgtagacaacgatgcacgtaaagaccaactcggtgctggtgcattcttgggctatcaagctaaccaatacctgggctttgaaatgggttacgactggttgggtcgtatgaaatataccggccgtaacaccggttccttcaaagcacaaggcgttcaattggccgctaaactgagctacccaatcgttgacgatctggacatctacacccgtctgggtggtatggtatggcgtgcagacagtgacggcgtaggctctaacggcggtaaccacgacaccggcgtttctccgctggctgctgttggtgttgaatacgcactgaccaaaaactgggctactcgcctggattaccagttcgtaagcaacatcggtgacgcaggtaccgttggcgcacgtccagacaacaccatgctgagcctgggcgtttcttaccgcttcggtcaggatgacgtagttgctccagcaccagctccggctccagctccagttgttgaaaccaagcgtttcactctgaagtctgacgtgctgttcaacttcaacaagtctactctgaaagcagaaggccaacaggctctggatcagctgtacagccagctgagctccatggatcctaaagacggttccgtagttgttctgggttacaccgacgccgttggttctgaccagtacaaccagaaactgtccgaacaacgtgcacagagcgttgttgactacctggtctccaaaggcatcccgtcagacaaaatttctgcacgtggtatgggtgaagcagatgcagttactggcaacacctgtggctacaaatctggccgcgctaccaaagctcagatcgcttgcctggcaccagatcgtcgcgtagagatcgaagttaaaggtatcaaagacgttgtaactcagcctcagggctaa

SEQ ID NO: 434778 - DNA, 984 bp, Serratia marcescens
atggttgaagtgaagagtccggggcagggtctgcagcctctttatctggagcaattggtcggtaagaaagccaatcgtgaccacgaaaaaggcgggtatttctatgagtcggatctaaatgatgtggcgatagaagccaaggactatgatttcaatcgtccgttcggcattccagtgcgctaccacgattatggcaagttgaagaataaatccaatctggacttcgtcgagttccatctgagctatcaggatatggaactcgatttgacagaattcttctccggcgctgaaaatatcggttttgcggtacatagccccgagctgtttgccaacgatcatattttggatctggcgacggatgatcccgtttatcttgctcattcgatcaaacagctgcagcgtgtctgcgatgtgactcgcgcgttgaagcaatatttcccgaaaactgagcgtccggtcatcgtggtgaatgcaggcggtttcaataccaccggtttcttgccaaaagaatcacgccaggcgatgtacgaacgcattggcgccgctctgggtgaaatcaatcaagaaggcgttgaaatcatcatccagacgatgcctccgttcccatggcactttggtggtcaaagctaccataacctgtttgtcgatccggacgagattaaagcgttctgtgagaaatacggctaccgcatctgctatgacacgtcgcattccatgatggcttgtaattactaccaatgggatcttcatgagtttacccagaaggtcggcccttacaccgcacatatgcatattgttgatgctttgggagtggatggtgaaggggtacagatcggtaaaggcgatgtgaactttgacgagctggctgatgatctgcgtcgtcatgcgccgggagcgcagtttattcctgaagtgtggcaggggcacaaaaaccaaggggaagggttctggcatgcgcttaacttcctggaaaagtatctgtaa

SEQ ID NO: 434779 - DNA, 171 bp, Serratia marcescens
atgttcgacaatggagtctttcttcgtaccatgcgtatgaaggatgtagtcgtcaaaattcgctcgactagcttcgagataaacgtctttagcctcagcatgaactgcttggccgtcgggacgaatgacactcagagttctcccttcgtggcagctttctacaaaccctaa

SEQ ID NO: 434780 - DNA, 216 bp, Serratia marcescens
atgacggagctggaaaaacagttgctgagcgcattagagcagctacagcaggactactcgaaaaggctgggcgagtgggagaacgccttcgcggaatggcggacgatgtctggtcttatgcaacgggagaacgcggcgctgagcgagcgcgtatcgagtttgagcaggcaggtgcagagtttgagcgagcagctgcgccggttgtcgaaaggctga

SEQ ID NO: 434781 - DNA, 486 bp, Serratia marcescens
atgaacagtcttttaacgctggcgaaggacttagagcagaaatcgaaagcgcagcagcagagtaccggcgagatgctgaaagccgcattcagcgagcacgaacagtgtgtaaaagcggaattgaaagccagcgcgaagcgaatcagcaacgctatcagcgctcacgaacaggggatgaacgccgccatgcagtcgaaccggctgagcgtgctgcgtatggtagggcggacgtggctcacgattaccctggtctcggtgctgctgatagggacgagcgggagcgtgctgtggtggcaggggcagcagatagtcgacaactacgagaccctccgggagcagaaggccacgcaggccatgctgtcggagaagaacagcggtgtgcaactgtcgacatgcggggacgcggggcgacgctgcgtgaaggtgaacacggaggcgggacgatacggcgaggattcgagctggatgatactggcggggaaatag

SEQ ID NO: 434782 - DNA, 345 bp, Serratia marcescens
ttggcagataaacgcagcaagatgctcacgatgtgggtaacggaagatgagcaccggcgtctgctggagcgctgcgagggtaaacagctcgcagcctggatgcgccagacgtgcctggacgagaagccagcgcgtgtcggcaaacttccgtcgatctcgccggcgctgcttcgtcagcttgccggcatggggaacaacctcaaccagattgcccggcaggttaacgggagtggcggtaccggacatgaccgggtgcaggttatcgccgcgctgatggccatcgatgccggactcgagcggctgcggcacgcggtgctggaaaagggggcagacgatgatcgttaa

SEQ ID NO: 434783 - DNA, 342 bp, Serratia marcescens
atgtatttgaataacatagaaaacatacatgaaaaaaaagagatcatcctgaacacctcaaaaccgttctatgaggtcctcattgaagaatttaaaaatgaaaaaaaactaataactgaggccagaaaaactgagttcacgatgtttagtgataacggaaaactctatgtcataaattcgaaagggaatacgcgcaggctagaacccatgtatgtgaataatttctttgaagagtataaaaagacaggaagtatgagtacatctagctatcaagatataaccttcaactcatcttatcttttagctgcactacagtacctgatggaaaaagaactgatttaa

SEQ ID NO: 434784 - DNA, 216 bp, Serratia marcescens
atgacagagctggaaaagcagttgctgagcgcattagagcagctacagcaggactactcgcaaaggctggacgaatgggagagcgccttcgcggaatggcggagcatgtgtggtcttatgcaacgggagaacgcggtgctgaacgagcgcgtgtcggacttgagcacgcaggtgctgagtttaagcgagcagctgcgccgcttgtccgggagctga

SEQ ID NO: 434785 - DNA, 492 bp, Serratia marcescens
atgagcagtcttttaacgctggcgaaggacttagagcagcaatcgaaagcgcagaagcagagtaccggcgagatgctgaaagccgcattcagcgagcacgagcagtctgtcagagcggaactgagcgcaagcgcgaggagaatcagcgacgccatcctcgcacacgagcagagtatgagcgaggcgatggagaaaaaccggctgagcgtactgcggactgccgggcggacatggctcaccatcctgatggtgtcagcgctactgatcggcacgagcgggagcattctgtggtggcaggggcagcagataaccgacaattacacgcatcttcgtcagcaggaagataccctggcgaaaatgaccgcccggacgtggggagtgcgctatcaggagagcagcgacggccggaggtttcttatcctgccgccggggatgcaaaccgaagccatcccttacgacgggacgacatggatccgcctgaaacaggagtag

SEQ ID NO: 434786 - DNA, 324 bp, Serratia marcescens
atgctcaccatgtgggtgacggaggacgagcaccggcggctgcttgagcgctgtgacggcaggcagctggcggcgtggatgcggcagacctgcctggacgaaaagcctgcgcgcaccggaaagctcccctcaatctcgccggcgctgctgcgccagcttgccggcatgggcaataacctgaaccagatagcccgccgtgttaacgccggcggcggcaccggccatgacagggtgcagattgtggcggcgctgatggccatcgatgccgggcttgagcggctgcggcacgccgttcttgagaaaggaacggacgatgatcgttaa

SEQ ID NO: 434787 - DNA, 1569 bp, Serratia marcescens
atgagtaataataacgatatcgtacaaaaactgtggaacctgtgtgatgtactgcgtgacgacggcatcaactacagcgattacgtcaccgaactagtgctactgctgtttatcaaaatggtgcatgaaaataccgaagcagaattattagatcagcataccttaccgcagggctgccaatggaatgacctcagcagtttatcgggtctcaacctgctcaaccattacaaacaaatgttgttgaagctttccagcggcaaagacgctgaaggtaattcggttcatgccgacccgctgattagcgccatttatgccgatgcgcaaactcgccttcgtgagcctcgtcatctcgaacagatgatccgcaccctcgatcaaattgactggtttagtgctaaaaaagacggtcttggcgatctttatgaaggtttgctggagaaaaacgccggagaaacaaaatctggtgcaggacaatactttacgccgcgagccttaattaacagcatggtacgctgcatcaagccacagcccggagaagtgatccaagatcccgctgcgggcaccgcaggatttttgattgccgccgatcaatacatcaagcaacaaaccgacaacctctacgacctgacggccaaagcgagaacctttcaaaaaaataaagcctttgttggtgtagaactggttccgtctacgcgccgcttggcactgatgaactgcctgctgcacggcatggaaggggatgacgaaggcgtcgtgcatcagggcaacgcgctgggcatggcgggcgctagcttgcccaaagccgatatcattcttgctaaccctccgttcggtacggcgaagggcggtgaagctagcattacccgtgatgacttaacctacccaaccagtaacaaacagctagcgtttttacagcatatctaccgtaacttaaaaccggggggccgtgcagccgtggtgctgcccgacaacgtcctgtttgaagcgggcgttggcaccgatgtacgccgcgaccttatgaacaaatgcaacctgcacaccattttacgtttacccaccgggattttttacgcgcagggcgtgaaaaccaacgttttattcttcaccaaaggcagcgctagtaacaaatatcaggatgaaaactgcacagataacgtctgggtatatgatctgcgtagtaacatgccaagctttggcaaacgcaccccgtttggtgagcaacatttaaaaccctttgaagcggtttacggtgacgatgccaacggtcaaagccagcgcagtgaaggggaatggagctttaactccgacgaactcgacgcgcccgataacgccgaaaatcagcacgttgacgaccgcatggcgaccagccgctggcgcacattcagccgcgaatggatccgcgatgttaaaggtgattcattagatattgcatggctgaaagataacaacagcgttgatgcgactaacctgcctgaacctagcgtattagcgcttgaagcaaaagaagaattaaccactgctttagcagaactggatgctttattgactgtattaggagcaactcgctga

SEQ ID NO: 434788 - DNA, 1323 bp, Serratia marcescens
atgtcatctgaattcgcaatttcagtcaaaaatatttcgaaacgatttgaaatgtacgcaaacccgaagcatcgcttatatcagatgctctcgtttggtcaccgtacgtttttcaaagagttctgggcattaaacggcgttacctttgacgttaagcgcggtgaaacactcggtattttggggcgtaacggcgaagggaaaagcaccttgttgcagattatcgccggtacgctgacagcaacctcagggagcgtcgaagtcaatggcaaactggctgcgctgctggaactcggcgccggtttcaaccctgagtttaccggccgtgaaaacgtttatctgagcggcataattcttggcatgacgcgcagtgaaatggatcagaagttccctgagatcgaagcctttgccgacatcggcgaacatatcgaccaaccggtcaaaacctactccagcggaatgtatgtacgtttggcttttgccgttcaggcttgcataaaacctgaagtgctcatcgttgacgaagcactgtcggtcggtgatgagaaattccaacgcaaatgcttcgactatatcgaatccctgcgcgcgcagggatgttcgatcatcctagtgacacattcaacatcgaccgtagagaagttttgccagcgcgctattttattgcgtaaaggtcgggttgaagccatcggtagcgctaaggaaatcatcgatcaataccatgccctgctttattcggacgaaaagacctaccttcgttatctgaataacatcgctaaaaacaccaataaatcagccgacgcgccggtaaaagaaagccaggacgccgtcgctgcccatgagggctcaatcgaggaacaagccgaaagcgacctgacaagcggagcactgattgaaagttggattatcaaagatatccacaatcagccatgcgatcttttccgcgtaggcgaaaaggctgttatcagctttgatattagcgtgtttggaccaatagcagaactgcaagccggtttagtcatcaagaccgttgaaggcatcacggtatttggcaccagcactttataccataaaaagaatatacatgatgctaagggcggcgatattcttagggcaacgtttgaacttgacctggctctgtgcgaaggcagctattttgtttcattagctatcgccaacgccatcagccacgctgatatgtcctaccttgataagaaaactgacgtgatcgttcttaaggtcatagagccccgtacaactatgtcaggtattgctgccttgcctgtttcgttatcactcgaaaagtggtcaggagaacatgaataa

SEQ ID NO: 434789 - DNA, 1005 bp, Serratia marcescens
atgccccgacgccagcagccgctcaagcaccgcccggcccagcgcattgccgatcaccccaaagccggccgcttcggcgcgacgcaccgcgtcatgccgtaccgccatgcccgcgtccgaccacgcgccccactgaacggacagcacccgctcgcctgcctgcgaccagcgctgcgccagcgcatccagccccgcgttggccgccgcatagctcgcctgccccgccgacccgaaggtggccgccgccgaggagtacagcaccataaaatcgcacggtaccaggctgtcatgcaggtgctcggcaccccgcactttcaccgcccacgcctgcgccagcttctcggccgactggttggccagcgtgccgtccgtcaggacgcccgcggtgtggataaccccggccaccgccggccactcctgcgccgccagccagtccccgaccgccgtcacgtcggcggcgtccgccacgtcgcaggccaggctctgtacctgcacgccctcccacgccggcaacgccgccgcccggccgctgcgcgacagcagcaacagatgcgtcgccccctgctctgccagatagcccgccgccacctggcccagcgcgccgttgccgccgctgatcacataggtcgcgccggcgcggatcccggcccgttcgccggccggcagatgacaacgctgcaggcgctgcgcctgcagttgccccgtctcgtcaagacgcaccacctcttccagaccgccggtcgcgcacagcaccagcgcgcgcggcagttgctccgccgccagctccatataggtcagcgcccgttccggctgctccagccgcgccgtacgcaccagccccgacagcccggcgtcgccctcgcggtccgcacgcttcagcagcacccggtgcgccgtcgtctccgcctgcagcatcgccagcgccagcgccatatcctcttcttcgccttcactcaacagcgccacggtctgccacggcagttcgttcagcgcggccgccagtga

SEQ ID NO: 434790 - DNA, 165 bp, Serratia marcescens
atgttggtcaataacgggcagaacgtgaaggcggggcagaagattgcgaccatgggcagtaccgggacggatacggtgaagctgcatttccagatccgctataaggccacggccatcgatccgcagcgttatcttccggcgcagggcagtaagccgaagtgttaa

SEQ ID NO: 434791 - DNA, 1035 bp, Serratia marcescens
atgatgattattcgccctatagagcgtcgcgatctggcggatttattgacgctggccggtaaatccggcatcggtctcacttcactgccgcaaaatgaagataccctgtcggcacgcattgagcgggcgttaaaaacctggcaaggcgaacttccgcaaagtgaccagtgttatctgttcgtgttggaagacagcgagcgccgtcaggtggtcggggtctgcgcgatcgaagtggccgtcggcctggcggaaccctggtacagcttccgcgtcggcacgcaggtgcacgcttccaaacagctgaacgtctataaatcggtgccgacgctgttcctcagcaacgatcataccggccattcggagctgtgcacgctgttcctcgatccggattatcgtcacggcgagaacggcaagctgctgtcgaaggtgcgtttcctgtttattgccgcgttccgcgaacgtttctcccggcgcctgatcgccgagatgcgcggtttctccgatgaaaacggccgatcgccgttctgggagagcgtcgggcgccatttcttctccatcgagttcgccaaggcggactacctgagcggcaccgggcaaaaggcgtttatcgccgaactgatgccgaaacacccgttgtatgtcgatttcctggccgaagacgcgcagaaagtgatcggcgaagtgcatccgcaaaccctgccggcacgccgattgctggaggcggaaggcctgagctatcagggctacgtcgatatcttcgacggcggcccgacgctggaagccgagatcgaccacatccgcgcggtgaagcagagccgcctggtgaaagtggtgctggatgacacgccgatgcgcgccgatgcgccggtgcatctggtggccaacgacaactatcagcactaccgcgcactgttggtcaatgccgatctgtatgacgaccgcctgcatatcaacgccgccaccgccgcggcgctgggcgtcgaacagggcagcccggtgcgggtgctcccccttattgcacaggagaaagcatga

SEQ ID NO: 434792 - DNA, 234 bp, Serratia marcescens
atggctatcgacattaccgtgaaagtagaaagcattggctcaattgtaaaaaccggctttcgctctgatttggaagtggagctttactgcgctgaattaaccgaagcgatcgatgcgaaaactattatcggtgaatacgataaagaagaattgcttgaagctattggtgaagattatgtccagaagtggttagaggaacaaggattcacggtttcttacggtgatgacctatga

SEQ ID NO: 434793 - DNA, 294 bp, Serratia marcescens
atgagcaagactattatttttaaattggcgcaggtcagcaataacgtggcaaaagtgttttcaaatggtgaagtcgctggatatatcgcactcccggaaaacgagcaccagaatcaacgccctttcgctatcacccaaaatggcaaggatattggctacgagcattgcgaagtttgcgcgattgaagctgttgtccgccgcttcgagcgcatcgcgcttggggttgaggcgcacctcatcacgcctaaagagccagccagctctataaaaatcaacgtggtatcgattcgttaa

SEQ ID NO: 434794 - DNA, 270 bp, Serratia marcescens
atgagtaactcaatcgaattaactcgcgttatcgaatggcttaaagaacatgaagaacgcttaactgcacaccaatacgccattcagagccttttagccttattgcctcaaagcaagcttgaagaggcaaaagtaattctcaggaacactataaaatttaacgaattcgaccgacaaaagattaatgatgaagcttggctcgaacgtaacaaaggcgttcgcagagagcttcctcacattattcccgggttatttgacgaagatgagtag

SEQ ID NO: 434795 - DNA, 219 bp, Serratia marcescens
atgaagaatgaagagctaaaacacgtaatcgcgctgcttctggaagatgcgaagcgccgtcaggagctggagccaaatgcaggcaccgaagcccgcattcaggccgctcaaaaaatcctgggagcagataagatgaaaatcatccatgacacccgcgaactaggggagtcggcaaaatatacctactcatcttcgtcaaataacccgggaataatgtga

SEQ ID NO: 434796 - DNA, 408 bp, Serratia marcescens
atggaaaccatcatcgatgcattgaaagcgatggggaaagcctcatcaatcgaaatcgccgcgcgcctggggctggatcggcaagaggttatcgatcagctctgggaactgaaacgagcaggtgaagtaatgcagttgggccagcagtgggcggccgttggctctgaatcaggcaacgaaaaaaccgaggtagcaacaggaatgaaggctgacgatctgatcaacatcatcgcgaaaaaggggcctatgacggccgaagagctggcagctaccgcaggcgttacgactcgccgagtcgcatcatcgttggcaatggcgaccagccgcggaaagatcgaacgcaaaccggttggtggcaaattccgctacatgctgcccggggttgaagtggcgcccgataaggcctga

SEQ ID NO: 434797 - DNA, 546 bp, Serratia marcescens
atgcggaggtgggccgtggctgaacaaaaaacagctttctcacacggcgagctatgcctcattgcagaacggttcctgcgcaataatgggttcaaagtggcattccatgatcggttcgtagcttacgtttcttccggcgagcaacccgacgcaatcggcttccgtaatttggcttcctgcctaatagaagccaagtgctcacgcgctgacttcttcgcagacaggaaaaagcggttccgcattcaacctgagctgggcatgggggattggcgctttttcatctgcgaacctgggctgatccgcattgatgagctgccagagggctgggggctactgtacgtcaaaggcggtcgagtccataaggttcatggctggccaggcaacgctgtctggtactcgcataagccctttcaggccaataagcaggctgagtgcgattacatgtacagcgcactgcgtcgcatgcagatacgcgggcacctgtcagaggtttatgacggatttccgaatccacagcgggccgaggcccaggagcaagcattatga

SEQ ID NO: 434798 - DNA, 603 bp, Serratia marcescens
atgacactaacgactgagaagtacaccgaaggattgtgcggggatggcgcggcgatcctatgcgatggcgttccgatgagcgtcagcgaaatcttggcgacgctgaatgctgtggtgagccgggaggcgcagccggtgcaaagccttgagctggcaggctggcaattcaaatcagtaaatggagactggctaggtattcttgatgaactcggcaagaaccaggctgttcgtgagggttgcgaggttcgcgaggtttacgccatgaccgattcacctaatgaccgggatgcggttcgcgaagctcacgccgaatggtcacgatcaacattcggcaatgtcggccccattggcccgttgaagcacctcagcaaagaagcgctggaagccgcagcccagcctgatgacctcagcgagtgggctgatatgcaattcctgctgtgggatgcgcaacgccgcgctggcatcactgacgaacagatcacccaagcaatgatcgaaaagctgaaggtgaacatggcgcgccaatggccagaaccgaaagacggcgagccacggttacacatcaccgccccgccagcgccagcagtgccggagggcgagtaa

SEQ ID NO: 434799 - DNA, 792 bp, Serratia marcescens
atgacgattcattttcacggcacgcctatatggggtgactcaggttcggttcatcgtatagctgtaaccggagctggtgcgtttgtttcgtatgtgaggcctgaccagcttgtctcatcaatcaaatatgccatcgatgttggcatcgataatggtgcattctcagcctggaaacgtggtctctcaatcgattggttgaaattctaccaatggttactgaactggtatcaccaccctaaagtgaaattttttgttattcctgatgttgttgatggcggcgaagcagacaacgacgcgctgattaaacaagtgccgccgatgttcagagaaaaggcggttccagtgtggcatttacatgagagcatcgaccgcttggttgagctctgcaacaattggccacgcatatgttttggctcctctggagagtatgccgttatacgaaccgagcgctggcatgcgcgcatgtcagaggccttcgaggccatctattgccatcacaatttcaaaaccaaagtgcacggcctgcggatgttggacgggcgtgtgctcggtagctaccccctgactacggcagatagtacaaacctggcttgtaacgttccgaagttcaacaataaatatcctgagcttacccgggctattcgtgaggctgactttgccaaaggcttggaagagaacgagctaaggtcattaattctgcgcagacgctgcgcaattttaaaaaatgctatcgaatcggttctgccaccaactcctgagcaatggatgtccatatataggggggctgcgtaa

SEQ ID NO: 434800 - DNA, 288 bp, Serratia marcescens
atggccaatttacggaaagaggcccgcggccgcgactgccaaatccggatccccggagtttgtaatttcaatccagaaaccaccgtgttggcgcattaccgcctggcgggcacttgcggcggcggcatgaagccagacgatgagcagggcgcctgggcttgcagtagttgccatgatgcgatcgacgcccgcacgaaaactgaatttgaccgtgaaaccctgcgtctgtaccacgccgagggcgtattccgcacgcaaacaattttgagaaagaaaggaaaactatga

SEQ ID NO: 434801 - DNA, 285 bp, Serratia marcescens
atgagcgaagctaagccgcaagatggcagcactgtgaagggataccgcacgttgaccgccgacgacatcgcgcaaatgaacgatctgaaagacatcagccgtaatttttgcgaacaactcgaccttgaacgcacacacctctcgatggagacggtagaggctggctccccagaggagatcaatcgcacggaggccatgcgctgtctggctatcgcccgcaccaagatgcaggaggcctgcatgtgggcctgccgtgcggtggcccgaccggacgcggattgctaa

SEQ ID NO: 434802 - DNA, 174 bp, Serratia marcescens
atgacaaacgacatgaccaccgcagagcttgaaaagatccacgccgaaatcgccaagctaatggctgagacggcgaagattaaccgggaaacgatgtggtatccggtagccgtagcaaccggtttaatcggcgcggtggctacggtaacaaccatcatcatcaaatttatttaa

SEQ ID NO: 434803 - DNA, 2424 bp, Serratia marcescens
atgatcaaaatatccggcgtataccgcgatccggccggcgtagccatgcctggcgctttgatagctgtaaagtcgaaaaacaacacattggaaacgttcaaatgcttgtgtgtagaaaccgtgacggatctcggcggagaatatgagttctcggtcgctcctgacgattacgaggtatttgttacctataacaatgggatccgccagcgcctcggcttcatgcgtatcgaagatggagcggcggatggttcccttaatgattatctgatgtatgcagatccggagctggcccggccgccggtttattctgacattaaacggatgtccgaacgggcaaggaatgcagaaattgcatcctcagaatcggcgcgtgcatctgcgggatatcgcgatgctgcaatggatgctagggatgttgctgtagcagaaagtaaaacggcgaaagcgagcgcgcagtcggccattaccagtgaaaagggtgctgcagaatcagccgcatcagcggaaacttcagctaaggagtccaaaacagcagaaggtctgtcaaaaaaatattcggatgatgcccgggattattcggagataacacaatcagtatctaatgcctatccagatgaaatcgccgcacaaaaagcagtagatgacgggaaggaaactcgtaaatatttttgggtacattcgcaatcaacgagtgaattagcgctcgaatacacggtttcgaatgggcgcattgttccgaccggtcgatggtcaatggcgggggctgcggtaactgaagcactaaacgaaatgaaaacgcgggttagcaatgttccaaatacgccagctgggatcgcagataatattgctgctggtgttgagttcgccgatggtcattttgcgccgctgatgttggatgacgggcgtcatgcctttatagatagcaatggcatgctgcgagttgttgcggctgattctgacatcgctgtgcgtccgtacattgaatcgcagccgtatacgttacccgatggcgcagtgtgcacgaaaatcattgtcgatccctacaacaacattaccgaggcatggactgaagacggcggctattattttgctactccagatggccttaaacgcgtcggtgatttaaagccagcagcacagcaaataaaacaggctacagctgttaacgatctggtgatgaactacggcgcgacgcgtatctccgttgccgatgatctgcgccctgtgatgtacatcctccccacgttcggccaatccctggcgcaggggtggagcacttacgccgatgacgtgttgatcgcaacgacgcagccctatcccgacaatgcatggatgttcaaatctgaccggggcgccgggaaggagaacccgaatcgcggcgcagggctgatcgatgaaattgtgtcgctgaaagatacagttaacggtggttggaaagaaacggcatgctcgtcgtctgcggcgcacattatcagcgaagtagagaaactgaccggcaaacgtattcatatcctgcgctatgttgctgcggatggcggcaaggcatatcgcaatctcacgcgagggacggcggcctggtctgccttggtgcaagggttgatcgatgcgaaacgaatttgcgaacggatgggatttaagcctgtagtgctcgggctggacgtcaaagccggcgaaacggataccgacggcacgccaggtatgttccccgagctttatacccgtttcctgaggaatctcgatcgtaactataacgctgaagtgaagcgcattttcggtggcgatcatccggaaacgccgatctttgttgagcagtgcagcttccaaccttggggagagtgggacagccgcgttaggcaggggcaattggacgccgatgggcttggaaacatccgatttaccgggccgggttatcaatacccacacccgggcgacgttattcacatcaacagcctggggcaaaataagcgcggcgtggctttagctcgcgccgtagcatttgaatgctttggcacgggttttatctctctcaagccgcgttcagtttactggtcaagcgcaaccactattgatgtgtattgcgcttcgtcagtatcgatcaccaaagacgagtctgacgctatcgtgcattctgcagggcttggccctggcgctgggttcaatattcgtgcgcgcgatggttccgagataacaatcactgacgtttccccgctcggtacgacgggaatgcgtctaactgtgaacaatccgacgaatacccgggtggtgcaactcggctatggtcttaaacgaactggcactaataaccaatccgggcctattgatggtgcgcgcggtttaattcgcacaacaaaaggcatcaccaatctttatacaggtgagacggaatatatgtggctggccgcatttttatgggagttaagttaa

SEQ ID NO: 434804 - DNA, 828 bp, Serratia marcescens
atggcaaacgcaatggttgtcttcaaggccgaccgcccggcgaataaccctaatctaccgaagctggggatcactgagcaagagatcgctatcttgaaaatgaacccgtcggcatggctagaggccaaaagtggggttgtttcgagcggcggtgaggtttctctcgttcgagataaaacaggccgtgctaattggaccccggtagccgcgctgaaaccacgggttattgccgctggaaaagggtatgcgctacggttcggtcgtgctgcgtcaaactctggtgcgctgctcgcgcagggtagttatgaatccctgccagcagatgggatttatgctcaattcattttgtatcggatacctcttgcaaacacagaaggttacacaggaactggcggtaatatctgcgggaactacacgactgcgccggactggctgcgcgtcaggttcggtaacgactcgttccagacggacgctgtttggattaaccacggcgggacagcggcaagtgacccaagcaactacccgatcaatacgacgattgcagggtttcgtgataatcagtggcatattgcagcaatcgaggcgacgagctcgtatcatcgttgggagcatgacggcgcactattgcagcagaaagagatccctgctaagccgttcgcaacggctgcatcgcgccagctgatcgtcggcggtgcaggcaacccgttgagtaatggttttcagggagacatcgccgcgaaaattatcgtccctggtgttctttcggttgatgcgaaaaccacgctctatgcgcgattcaacgctctgaaagctgaattgcaagggtga

SEQ ID NO: 434805 - DNA, 1743 bp, Serratia marcescens
atgagcgttgagaaactgattaccgatcatatcgatatctggtcctcggccctgcaaacccgctccaccgccgggcgcggcagcaacggaaaaatcgatctctatggcattaagaaactgcgcgagctgattcttgagctggcggtacgtggaaaactggtgccgcaggatccgaatgatgaaccggcgtctgaactgttaaaacgtatcgctgccgagaaagtagagttagtaaagcaggggaagattaaaaagcagaagccgctgccggaaattagcgaggaggagaagccgtttgaattgccggtagggtgggagtgggtgaggttaggggagctatttaactcgatagcgagtggaggaactcctagtaagtccaatcctgacttttggaatggagatatcccttgggccagtgtaaaggacttgggtaaagagaaatatattgcaaaaactcaggattacatttctcatcaaggtttggacgcgggaagtaaattagctgatgaaggtgatattttaatctgcactcgaatggggttgggtaaaattggaatcgcatcatgccccgtagcgttcaatcaagatcttaagtcggtgaaactgactagtggtgtttctcttgattttttctttaatacttattcaacggtaaaaataaaaggaacaggaactacagttgagggtataaaacaagaacaacttcttaattatgttattggccttccatcgggtaatgaacagcaccagatcgttgaaaaagttgacgaactaatgtccctctgtgaccaactggaacagcaatctctaaccagtctggacgcccatcagcaactggtggaaaccctgttggcaacgctgacagacagcccaaatgccgaagtgctcgccgaaaattgggcgcgaatcagccaacatttcgacacgttgtttaccactgaagcgagtatcgacgcgcttaagcaaaccattctgcaactggcggtgatgggcaagctggtgccgcaagatcctaacgacgaaccggcttctgaactgcttaaacatattgagcaggaaaaagcgcaactggtgaaagaaggaaaaatcaaaaagcaaaaaccgttgccgccagtgagtgatgaggaaaaaccgtttgagttgccgaaaggatgggagtggtgccggttgggttcattatttaatttccaaaatggatatgcatttaaaagtgaatggtttagcaataatgggattcgattggtaagaaataccaatatttctcatggcaatattaattggaatgattcggttaatatacctttgtcaatgttctcagagtttgaaggattcagcctgaatttaggagatgttctaatatctctggatagaccaattattaatactggattgaagtatgcatttgtacgtgagtgtgacttgccttgtcttttattacagcgagtggctaaatttaacagtgtagggaatgttattcgcggtggtttcttgagtaaatggctggaatctaattattttattaactccatcgacccaggcagaagcaatggtgtgcctcacatttcgactaaacagcttgaaatgactttgttccctttactgtctcaaagggaacaagacaaaataattttgttaaccgataagcttattcaactttgtgtggactttaaatcccgcctgcaatccgcccagcaaacccagcttcacctggcggatgcgcttaccgacgctgcgttaaactga

SEQ ID NO: 434806 - DNA, 618 bp, Serratia marcescens
atgttaaaaagaactcgctcagtgtatgaaaactgtattaagcccgaactgaacatttattcagtcggcatgcttttcatgtttgcgatatcgatactgttgcttttattcggtttgctggggggcgctgaatttgtcgcctttgttatagcgagtgctgtcctagctatagtaattaaaatgctgcctgagattagtgaattctctttggccggtaatacggttaagttgaagcaaaaattggatgaggctcagaggctgactgatgagttaagggccttgaaactttcaactttgaggactcttttccaattactactccgccatccggggggctttgccgcgagttatggtgatgggagactgcctgatttcattaacttctttgaagatgttaaagatactgagtacgagaaggagtttatcgaggaaatgctaaagtatgcggaagttttccaggccatactagaacaacaaattacgaatttcgacaccaagcaagcaggtggtgagaatctgagaactcgtgatatggaagggattgagttagtgaagggctatttaccacaggtaaaagaaattatcgcgcaccttaagaataatacattgacccagtaa

SEQ ID NO: 434807 - DNA, 174 bp, Serratia marcescens
atgcacgatccgcgcggtgtaagcgcggagtcaatgaatgtaggccgtggacgcgcttccctggctagggagcagatcctcggggcattcgtcgccgcgcagcaccagcattcggtcggccttgaccttctgatgacgaagtaccgtaacgatttcaaagcagaacagcggtaa

SEQ ID NO: 434808 - DNA, 783 bp, Serratia marcescens
atgtcaacgagactttttttaagttggtcaggagaacgcagcaagttagtagcagatcttctcgatgagtgggtccaatgtgtattacaagcttgcgagccttggatgtcaagcaaggatatcgataggggagctctgtggtttactgaaattgcaagccaactccatacatccactcttggtgtagtctgtctaacaaaagaaaacaaggaaaagccatggattcttttcgaggcaggcgcgctggcaaaaggtctttcttctagccgagtttgcgtttttctagttgaccttgagccaacagatgttggaaatcctctagctcaatttaatcatacactcccgaataaggaaggtgtatatagtttaattcgaacaattaattcatcattgggtgagttgatgttaaaggatcaggtgctggataaagtatttgaaacgtattggccacagttcgagcacgacttcaataagataattaatagtactccagatgcaggtcaagttgctgaacgcacggaaagtgatatccttagtgaggttttacaaactataaggtctgttgacagaagggttagagagctcgaaaaaccaaagagtaacattcttaacttttcttcctcggatgaaagttcgaaattaagcgaccattacacaaagagtttaaataaaattctttcatccatgactcaggaagagcttaaggactaccttaaaatgggggggaatactgttttaaatctaaagtttaaaaacgataccctagatgaaggtaaagaatga

SEQ ID NO: 434809 - DNA, 786 bp, Serratia marcescens
atgagcgaaagtaataatttggtcaatatatgctacgagggtgcttctggctctagcgatattagaacttgctatattgaggggattttgcacttctcacttaaggatattctcatagttctaaataaagagaatagagaattgggtgataataatccaacaagacacataccaactttaattaaatccctgatagtagatcttgattctgatgagtatacccctatgcctgcggataaagcagcatttgatgaagatagggagcttttcgttactcagccgggtttaaacagaattatgggaaatgataaatctaaagcggggagaaaattccaacgctggttataccatgaagttgtaccatcattgacgaagtatggcttctatccgccaccacaagttcctcgaggatctgccttatcgcaaactgcggaattgatggcacaaaatgctcgagtcttggcggatacaattcgccgtcaagatgaattggagcaagtggtttctggtgtgaaaatagaaattaaagatgttgtgacaagagtacaaaaacttgagggcgaatcagattcagaatttatttcaacagttagacaatggtttgaaaaaaataatttagagttgtctaatgagaatgagctggctattgttacatggtgtgaaaaattaagtattcaggatgcaaaacctcaacagtcttgcccgtcaggtgaaaggattcgtaccaaattctatcatgttgtaattgaagaggcgaaggctatattggaaggcatgcgaacttaa

SEQ ID NO: 434810 - DNA, 255 bp, Serratia marcescens
atgattatcgtgataattttaaacagcattgatgccgttgcagccgttggcacaaaggtgaggttggaagtgcgcggtgggaagatcaaaaaagtgcggcgccagccagacctggaggagctgactgttttgattgagtgggcgggtaaaacgcttatcgatggtatccggatcagggattacctgatccatattcccaatgaggggaaacgcgggcctaaaaagctgcaagggatgcgaaacgtcttgggttaa

SEQ ID NO: 434811 - DNA, 612 bp, Serratia marcescens
atgaatgtagagatgattattactagcggaataattagtgtattgataagtattgttagtgcatatttaacaatgaagtttgcattataccgattctatcgcgaaaaatggtgggataaaagagcaactgcatatattgaattgattgatatactatatgattttaaaaaggattacaggactatagttgatagcgtatttgcagagggggctattgatgcctaccctgagattagtcatcagatattagataaagctcgagagagtaacttattgaagagtatagacattacgcatagaaaacttgataaaataatcggcctgggtcctcttatctttactgaaaatgcgcttgaaaaacttaataattttaataaacgggttgaaaaagctgatggtgaagtcgatgaggaaagtttttatgtgtactcgtattataaagagttgagtgatggtgctgatgatttatataatgaatttaaaatctccgcattgttagagttaaaagttaatcatgacgataataatatcttgagaagggcaaagcattggatgttaagtcaatataccaaggctagagatgattatcgtgataattttaaacagcattga

SEQ ID NO: 434812 - DNA, 609 bp, Serratia marcescens
atggtatacgtccatcaattacatcgtgacaactcgggcatccaaacacaacccaatagtcatcgcttttgtatcctataccgtgtgtgctgctgggaagatggcatagaaccgttgtttcctggttcccattacatatgcctgaaatctgcagcgtacagcattgtccctgtgccgaatcgcgcaaggaccttacttctgaatactggcggctttcgcatatcagtattccatcagccgattaacggcctattccatctcatactcatcggcaaaatactgctgcagattttcgttccagataacgccagcgacacctcgataaaccttatcgaacttctcctagctcacattgatgaaagcgatgctctaacgctacctcagcgttcctccgtcctgattagcagtcagaccatagaaaccgatcttcaccatgacgtgattgaaataagcctccgttgttttaacggcttcggcgtcaaaacgacgctgtcgctacgtcgcaacgcgctgcaacacgctgtcggctatccgcagtacttaccgatccctgaagctgctcaagcgcagccacagtggttcccgcttgctatggatcttgcctggtaa

SEQ ID NO: 434813 - DNA, 1503 bp, Serratia marcescens
atgaaagaatcaagtacaaaagaaaatgaatcaagtaatttaatctatgaaacactaccctacacacttcccgacggtgccatatgcacagatatatatataacagaggaaaggttaattactgaggcctatactgaagatggtggtcattatgtagcaacacctatgggactaaggagaactgataacacttctatagttgaaggagtcgtaaactatatcagcagtgtcggtatgacttgtggagtgactacaacgagagtatctattagcagcgatgaaaatatatgctacatcattcctatttggggacaaagcttagctcagggatggagtgatcaaagaaatgacaccttgactgcagttgtccctctctaccctgataactgttggatgtttaaatcggaacgtggggaaggaaaagagaacccgaacagaccagagtattctgtcatggatttagcatcattgaaggaaaccattaatggcggctggcaagaaacggcagcgagcagtaccgcagctcatttggtatatgaaatcgaaagtaaaacgggacatcgcattagaaccctgtcatatatttctgccgaaggcggcaaagcctatatggatctaactaaaggcacaacttcttggaagaaattaattcaaggcttagttgatgcgcgtaacatttgtataaaaaagggttggaaacctatactacttgctatagatgtgatggccggagagtcagattctgaagaaataaaagtgacaaacatgaatactgagcgctacaaacgccaattacaacagtttgacaggaacatccaggaagaggccttacgtatttttaaccaaaaatccagcgttccaatcataatatcacaaatagcttatacccccattactcgtgatatatgggatcaaccggtaaggcaagcacaatatatttctgatggcgtaggtaacttgagattgtgcggccctatatatcatcttccatctgccgatccaatacatataaactctcttggtcagaacagacgagggcaaatggtagcaagagccattgtttgggaatgtttcgcaacaggttggcacagtatacgttgcacggggtatacttggataacagaacacattttacaccttatccatgaagttccctgcgcaccgctcgtacttgacacctcgaatgaaataataaatacagaaggattaggtgcagggcttgggtatgtttttgatgattacacgtccacgccacctcaaatagttcgcgttagcattttttctccaaccattgtggagatcgagttatcatcaccgccccaaaatttatcatgtcgtatagggtgcggaataaaatgcaacgataataatgaaaccaaccaaagcggccccgtctcaggagcccgaagtgtcttacgcgatagcagtgaacacatctcactctatgaggggattactcacgcaaactggtgcccatcctatgtaatgtcagttaatcgttga

SEQ ID NO: 434814 - DNA, 822 bp, Serratia marcescens
atgcgagtattcagaagcttatatgaacctgcaaataattaccttccatcatatgaaatatcaactatcgaggagaacatactgctaatgcaccccctatcctggcttgattctgatgtaggtgttagccttaccaacaatataaatgtaacagcaattagcgatcgcacaaatgcaaccacatggctacccttgaaatccggctttatgccccgactggttacatctgctagtggaaataagttcctcaatttcggattaggtcgaggcccctctgcgcctggcgctatcttatctaataatgcttatgagcaacttcctcccgacggcgtttttgccttagcgatagtttttcgtgttcctctgaggcaacaagggggatatgatggtacgggaggaaatatattaggcaacaatgataacagccccaatatattccgcttacgcttccgtgacgatggttatagagggaacatgttgtttttgcatcatggtgcaacatcgccaataactcagaataattatccaataaataccacattcaatgatgatgggctctggcataatctactgctggaagttagagcagacatgcatcaaattgagatagacggcattattaaacaacaaagattagttcctgcaataccattcgcaagctctgcgtcacgtcaactcatcatcgggggcgcaggaaatcctctaagcaacggatttttcggtgatatcgctatggttctcattgtacctggtattataagcgccgggcaaaaagaatcgatttataattatatggatcaaacaaagtcaaaatatacatga

SEQ ID NO: 434815 - DNA, 942 bp, Serratia marcescens
atgagcaatgaaaaagacacggtggactacaccgtgaggggcttcacgaagtcgtttgacaccacgctgacccacctatccattctgaggaacaagccgaagtctgtcatccttcgtgaactccttgaagagcaactgaccgacaggatcaaaaccttcggcgcgctgagtcagctggttgccggcatggacgaggtgctggccagtcacttcggcgcgaagctgagcgaaaacccgctggagaaccacttcggtacgaagtataacctggcgatgtgtgatgtgctggacatcaagacggatgagcagctgcagcagatccagatccgcaacacgccgtacatcacggctcgggccgatcaggtgatggcgggttgcaaaacggtcatcaagggtcagtcgttatggttcgccctgttcgctgagctggcgttttcagatgaggaggttgttcgaaggggctggaacgaggtgttttactcaatagatgaagaccgttattacagctattacgagcacgttaaccagctgaggagcatgcgcggtatgagcagcattcaggcagagaaaaatgacttcacacacgagggcaggctctgccgcctgaatgtgaccaaacccgccagttaccagtatggtgcctggcgagtgtccataagcctgaaggacggtgtgaacgtcaccgagccggacgtactgaccgggctgcactatccacggcttcctcaccgcctggtgatcgccgaccgtgacgaaccttactgcagtgtggccagtggagaagaggacaacgagccaggtttccggtttgttgatggcgtctgcgaactggacgtctacagcaacggtaaacccgagcggagtaacccgacgccaatgacgaaggtggcagaggcgttagccgctgagatcgacgcccggctgaagccgttcacgggctga

SEQ ID NO: 434816 - DNA, 1566 bp, Serratia marcescens
atggcagccaggcaaaacattccagcacaattacgcttgaaggaaatacagattcagagccttaaaggcatttcaaactgtacaatcacatttcctgctgacagcaaagttactgccattatggggatgaacggctccggtaaatccacgattattcatgcccttgcctgttgttacaaaccccgggataaatcctcaaaggaaaataaccggttctctgatttctttacccctcacgttgataacaactggcgtgacagtggttttacagcccatttttacgcgggaacgctgaacaatcagagtaacaaaatattatttgtccccacacaggcacctaatgacacttttactcagccttattataaagtcgcacgctggcagccagtgtatgatcgtcgacccgttaaggagtcgctctatctgggtctgcaaacgcttggcactttgtccgacgatctggcggcttcacgtcatgcgaaatatgtaagccaaagcttcgaacccgccaatatcaaacaaaaaatactggaatctatgtgtcgcgtgcttgaagcggattactcagatctgatgacctgtacgaccaacagtggcttcacattcagtaaatttaccaaaaacggaattacctacactgaacataccatgggagcgggagagaaacgggtttttgaagtgctgaaagccgctcatgacccccttctgaagcctaatggtttactgctgattgacgaactggatgtgcttttgcatgaaaaagcttttaaaaaactgattgaagaattgatttccatagctgaagacgctctgcttgaaattgtcttctcaacgcacagggaatctattgttcagttcagaaggtcaataaatattgtcagtatcttcaatatgggcacagggatctctgcttttcctggtgtttcagctgatgccctacgacagctgaccgatattcagcctgaaatggtcagtgttttcgttgaagatgaactggcacgcacggctatcaatgtgcttctggaacgagaggctctgaccgataaggtgaatgttgagttattcggagccgctgaaaactcggccgtcgttctggcagggctaatgcttgccggtaaggatattacaaaggttatgtgtgttcttgacggcgatgttcaccgaactgtcacggagagacacaaaatagtaaacaagtgcctgacaggaacagataaaagagaacaacgtcgtgcggttatgacccggatttttgagtttagtcttgctgatttccctcaaaaaggtgctccggaatataatcataaacgctggtttgaagcgatagatcctgccactattgcggcagaagagtctgctgaatacataaagctaagaggattttctaggtcaattaacggactggcagactggcatgaatactatgaaaaactgaatcagtttgccagaaaatccaatatagaacataccgtcctgagctatatcagcaaatactcaccggcctgggataattatattttagcggtacgtcaggagatcatagaccgggccggcgaacttgaatga

SEQ ID NO: 434817 - DNA, 270 bp, Serratia marcescens
atggccagtaaaaaaccgatactgaatttgacctacagcgacctgctgatgaccacagaggtgatcctgcgccattcgttgcgtttgcagcagggcgacacccctgagacccatgaccgaggacttcgtcgtggcgtgatcctgcactggtatcatctggccctgctgagcggtgcacccgaagcacagtgccaggccgacatgacgcagttgtgcctgctggccggtataccgggtgacagcgaagagcaggcgaacgatgggcgctga

SEQ ID NO: 434818 - DNA, 591 bp, Serratia marcescens
atgggcgctgaaacacagcgacggccgtcaccgctgcagagacggatactgattgtgctggccgccctcgatgcgaaacgtccggggccggtggcgacaagagatattgagcgggtgctggagcagggcggggacgcgccggtgtacggaccgaacctgcgcgcctcctgccggcgcatggaagccgcgggctggctgcgcaccctacgcgccacgaacatgcagctggccgtcgagctgacggacgccggccggtcggtggccaccccgctgctggctgacgaactggccgccgcgcacgaacagcagcgccgggaggacgtgcgcgtgctgccggtgcggtcggccgacactctggccgaccaggaactggtgatcgccggcatcacctataccgcctgccgcggcgtgtttgtggtgcggctcgatggcaccccctgcctgcaactgtggcgcgcggacggcacggtcgtgcggctggagggagacgcgctgcagatcgccgacgggtatcaggccgcgtataatgccggactgccggtgcagatccaggtgaacgaaggcagtgttcgggaaagtcttagttcctaa

SEQ ID NO: 434819 - DNA, 870 bp, Serratia marcescens
atggttgtattctccttgcttgagaatgcgttggattcggttgaaactggacttatgtattttcgtcgcgcccatgaaagtcaggaacgacgagactacaaacagtgcctgttgaatctttttcaggcaaccgagctgctgttgaaagccgctgtcagtcgccgtggggctgggctcatctttaaaccggattcattgaagaaacactgcaccgatccgcaaacaccaacacaaaaagaactatatcgctgcatatccgttaacgtccgtgaattatgtaaattggtggaaaaacactatccatcagcctttacttcacaagggctggaaatggtaggaaacgtggcgcagctgcgtaataacctccagcatttcacactcgaaatagatccacagcatctagttatgcaactgagctcactgtatcggcttgttttcagacctgcgttcattctcctgcaggaagacgaagccgaagattcttggaactccgcatttcgccggcagttcatcacgcttgagacgcaattcttggagatcacgacacaccaggagtacgagctggcacgttgtccggtctgtggtagttggtcgcactttattgtctatgacggtgaaagtttccccatcagctcacactgtatctgctgtaatttcactctaaccgaactgcaggtatgggagtttcagatatgtccagattgcggttggccttcagttatctatgtccccgagtacaaggctggggcctgcttggctcatacttgtacttatagtaaggaagagggatttgtacagatggaaccctgccagggttgcggaggatatcgattggaagaccattgccgagagtgcgaccctgaggagtaa

SEQ ID NO: 434820 - DNA, 2190 bp, Serratia marcescens
atgaataatatcccctcttggattagggccttctttggcgaaagcaatttgctcagccttgataaactgctaagcgactcccccggtgcttacgcgcccgagcagaaaaatgcgctgttgcctcttgtggagagcgcgctggacggtgaatggcccattattctgccttggtgcgaccgccaacactgggttttcttcgcgatggcagaagatgagcgcaccctgcaggaactcaccaaagttatcaatgcccggcttggttcagccgacgttgagcccgaccgccgaatttacttgagcccgacttctggcccgacttttacggcagaaaccgcgctgctcgaacatagcccagcagggtttattcgtattgagttgctggaaggtaaacgtgaggataagcaggcaaaaacgagggtttttgctgccctgaaagagttgattgacctgttccgactgcgtccatctctcgttcgcacccgcaagcgcccgtttggtcgtatccttagcgatttcatgctggcaacaaatcaaaaagaggtggaggccagcaatgactttctgcaagaactgcgtgataacggtctgctctccaaacgcaatctgctgctgcttgagcttcagcaggtcgggaaatggcaaaattgggatgccctgctaaaccaccaagacctgccagatctgatcagagggcgcattccctcgtcgctgaccagaatgctgcttgccgcttatcagcaccgctatcttggccatgataccctgagctactcgcaggagatgccatcggctttgcgcccagctttccttgccctccaaccgctttttacgcaggttccactgctaggaagcgaggaaggggaaattaacacatggagaagttgggcgattggcgtggcgctggtgggtgaacaaagcctgctcagcatgatacctgacacgctaaaatcaggatggcttcaggaattacagcactgggcagaactcaagagcaccgtgtacgatactccggcctcttctcctgtctcgttgtcgctgccgccaacaacacttgaatctctggccagttatctacaaacgtcgttgacagccacagccgaaacgctggggagctatgctgagatgctcagcaagatagatccacaactgcttgatcaagctcagaaaacccctcttctaaaaacgctgattgagagcatcaaccggcttactgctacgagcatcaccggctgggacaactggttctcgcgcctgcgcgaacccgatgccgatagaaacgctctgatgcaaattgtcgcgctggagagtgagcactggccagccacctccttccaagaatcggcctttgttcacctgctggcgcaggattttccgccgcatgccttttcaacactacgcaacgccatgcccgcctttatcgagtggctggggaaaaaccaactgcaattgcagagtacaacatggctgaaatggatggatgttctggcgatggaacaaagcgtcagtccggcggacatcaaactggcgaccctagcaacccaatatttcctgcaaggtcctctcaccctagctgaataccagaattttgttgctacattgcaactcattattgagcgctgcagttcaattaaaaatctgacctcgcttgaagagatgatcgaactgtttctggatgcaccggagcacgataacgccacacgaaacgcgctatggatggatattcagacttttgctgttggtgtatggccgcgcctcgatcactcaaaccgagctatcatgcgtagtctggccatcaacgtattgggcaatggtgctgattcagcgtttcctccggaaccggcacgaagcgataatagcgagcctgagacactaccggatctctcgggtaaacgcgtcgccatttataccctgacagaaggacctgcccgccgggcccgggggatgattgaagtgttgtttcaggggatcagagtagatgtgaatcatgaccataacgcaacggataagctggtcaatttagcaaaacaggctgattactttatttttgccgccgcgagcgcaaaacatcaggcactgtatgcgataacgcctcatcgtcgcgatctcatttatcctgaaggtaaaggtgcttgttcgattctcaatgcctttgttgctcgtcttcaacaacccatgagtattgacgtataa

SEQ ID NO: 434821 - DNA, 531 bp, Serratia marcescens
atggaagagcaacgacaaatatttctccatggacctctcggacagcgacaactgagggaagtactgagtgcgcagttcagtgggcttatcctgtaccctgaactcatctggctgatctcgccatggatgagcgattttgacgtcattgataatcgcggggggcaatggagttttcttgatccgtcttggggtgccagaatggtcagtttccaggagcttctggcgacggcggtgaataacggctgtccactcaggatagtcactcgcccggacacgcttaacaaagtgttcgttgagcgactgcaggcaagactttcgccggatcatgatatgcaatgctcctattatgagaacctacatgccaagggcatgttaacaaagcacttctttctgaaaggctcgatgaactacacctggagcggtgcgaaccttaacgatgagcatttgctattctccagcaacaaaaccctcatttctgacgcgctgattgaattcggtgggcaatataccttcggtgacagtgatgaataa

SEQ ID NO: 434822 - DNA, 4431 bp, Serratia marcescens
atgactgctgaggatataagtcgtctgcatgcggtgctggatgtactcgaagggcgcgaagccgagttgctggtctggggagacacggaaggcgcctttacggatgcggatattctgtccctgtttgcccaccattttcctgatgataatggcaaagtgctgatgcaggatcttcaagacgccgcgatgttatttagcatccccaatactcagggaatgaggctatatcgcactcgtatggcggaatctgttcatctctttcgccatcagcgccagtggtttcgcggccagcacttgaatcgcacacggtcgctggtggctgactatcgctttatccgccgcccgcgcagttacccggcaaggatatatccggctgaagaggtgctgaatcaatggtccgacgttgagtggatgaacgacattaaacgtcaggccctgctaacgcttatcggtgatttctccatagccggttttcagtccaaggctacggcgcgcatcctgcgggcatgggattttcacagcagtcacccacatgccaaagaagcaaccgccaccatcgtatgtgccggcaccggcagcggtaaaaccctggcgttttatctgcctgctctaacatcacttatcaacgatctgcaacgcgaccgctcagcgcgggttcgctcactggccctgtatccgcgtaaagagttacttaaagatcagtttatggagacttggggaaaatgccgcgaagtggacacccaggcacagaaactttccgggcgaaaaatccgcattggctccttctttggcgatacgccgtacagcatccagtacgttgataaagacaaagatcttccttttgatctgctacgctgcagcactccaaaatgccaaggcgaaatgcgctggaaagcggaagatatccgtcagggcaaagagatcctgcgctgtacgcactgcacgcacagcgtgggtgaagatgaagtggtgctcacccgcgtctcattgatgaataacccaccggatattttgtttaccaccactgaaatgctcaaccagcatctaggcaacaacaaggccagccatctgttcggcgtcggcatgaatgtaattgcaccgccagtggttttgctcgatgaggtccatacctattcaggcaacagcggcgcgcaaactgcctatctacttcgtcgctggatgcaactggcgcgctgccgcccgcattttgtgggcctctcggcaacgttgagcgatgctgagcggttcttcgcagacttggtaggagccaacaaaaaacatgtcatgctcattgagcccgctttccaggagatggtagacgaaggggctgaatatctgttggcactgcgaggcgatcccgtttcgcaaacggcgctgctctcaaccaccatccaaaccagtatgctagcacgccggattatggatacccgcaaagccacgtcgcacggcacctggggtcgcaaaaccttcgtatttaccgacgatcttgatatcaataaccgcctctaccaccagctctgcgatgccgaagggtggcgtacgcgcggacaacaacttctgcctaacgaaactccgctggcagctcagcgtaacgaaaacaatggtgcttccgacgcattgacctttgccggtcaaaattggcgaatggtgatcgatattgggcatactcttgatggtcacgatcgtgccatcgtggcgcggacatccagccaggacgctggagtcaatcctaaagccgacattgtcgtggcaaccgcctcgctggaagtcggctttaacgatccttcagtcggggtagtgattcagcataaagcaccgcgcaatgtcgcctcttatctgcaacgcaaaggccgtgccgggcgctcaagaaccatgcgcccctggatggtggtcgtgctgtcagaattcggccgcgatcgtgtggtgtaccaacgttatgaggaactggtgacaccggaaatcaagggccagtcactccctctaggcaatatccatatccagaaaatgcaggcagcgatggcaactctggactggctaagcatgaagatccccggcagtaacatctggtcattgctgaacaatccgcccaaaagcaaagagcagcaagggcatctggagcgcatgctcactttgatttccgccgtgctggaaaagaatgtctctcagcaggaactcgaacaatacttattctacgcgctcaaaataaccgagctgcaacttcagcgcgttatgtggtctccgccacgctctatcatgatggagttgctcccgaccttgaagcgccaattgaccacccggtggtcgctgatgggtactcccggcgcagacagatcgacggggcgttcaccactgccttcatttattccagcagccctcttcagcgagttgaacttgcctgaactgagcatccagcttgaacgccgctttacgaaatatgaaaatctgccatttattcagggtctgaaggagtttgcaccgggtcgcatctccaagcgctacgccatttattccgatctggaagccgattggctggtgccaaacaattttgtgccgcaactgaaccaggtttcagacatcgatttcgagatcaacgaggcatttggtgatacctggcagccggagtgtctgttaacccttgcggatgcatcgcagctaaaagtcattcgtcctctgcaaattattacccgagctcttgatttcaaacagaatctgactgagaagagtaattctcagctaacgtggcacactcacttttccacagatgcccatgccgaagcgatggcgatccccgctgggccatggagcacagtgttgcggtccgccacgttttatacacatcaacatatgaccccccttgaactgacgcgttatgccaccgccgccagcgcttcgctgcgcagtaaaagtaaacagcaggcctgggtgaattttagatgggtcgaaaacggtcacccggtcgcagttggtgcccgccagtgggtggatggcatgaagctgagttttacgctgccttccgcactgcatcagcaggtcatgaatgatacaaagttagccgggtctctcagaacgctctatttccgccactgtattagcagtgaagctcgttttgaatatgacagtttcaccgctgactggatcttcgagtgctatatggcggcgctgaccaaagaagttgtcagcagtacagccctcactgatgcaattcacgctctgcgcacgccggagggcagagagtcgctggcgacaattgccgattcgctgttccaggccgaaaatatttttgaaaacaacgacgatggagagggctccgcggagcgccaagagctacagcagcaattgaggagtctgttcaacgagccggaactgcttgcaatgcttaatacgcatagcgccgtgttgactgacgacctcagccaaaatgcctctttttgccagtggctccagacgttgttgatcagcaccttctctggtgccgtaaaacagaccagccatatgttgctgcctgaggtggacgacagaggactgctcgttgacgccgttcttgatggggagcaactcaatatctggctcaccgaatcagagcctgggggctgcgggattatcacccgcctcgaagaagcgttccacggcgatccggtcgccctgctgaatctgtttattcgtagctttgccgccagcgactacgagcagatcgatgacgatctcttcgaactgctctcgcgactcccttcaaacaccacattgcagcagacgctgaacgatttacgcttggcggggagtcatcatgatcgccggattgcgaatggaaacctacgcactgagttaaaaaaacaaggagttgcgctttctcacagctttatgtctgtgctgcatacccgcatccttcgccctggcagccagctttctcacgatcggcgcttgctggactatctgcgcgaatggcgggcgctggaggccaaagctggttatgagattaacctgaatatttttgcccatactcaggcaattcaggaacttcccggagcgaacgtcacaaaaattttcgaccgtttttgccagattcagggcatgctgtggcagcgtggcaatactatccgccagtcgatactcagctactacaacccctttgataacgggccaaaactcacggaaaggctgctgctcagcaccttgttctggcaacctgcgacgcaggttgatgtgacagacagcgactggctttcgcagatccacacggcgatctctcgcgaagggtttgctgaattactgatcccccgggaagcccgccaaaaggtggtacaggccgtatccgcgttacaactggtacctgtcgattatttcggcctgcacctctacccgagaattggggccgtcgactatcgaggcggcaacatcgtgttgcgagtcgaactggctgaagctctgcagtaa

SEQ ID NO: 434823 - DNA, 822 bp, Serratia marcescens
atgagtacattacgccaacagcttgcagagatgcagaagcaactggatttgagcgtccaggcgagtaaagccacgcagattattgagaaatgcggcatagtgctctcaaaaactgacaccgtcgctgggcattatggtcgccttaaatgccagtacccggccctacaacttctgccgtctgaactgagggtcagctggagagaagatcaacgaaatgaactcaaaaatgtggttaacggtgtcaataacttgctgtctcagtggagccgctggctgaataatcagacccaagtagctgccgatacgcaagcctcggatgaaccgctggatggagtggtcgcaacgcaggaacctaccgcatatgacatcattcagaatgactctctaaccaactgcgtgaccctggcgcttagcctgcaccgcacactgaatgaccaactgaaaaacgcatgggaagagtggcaacaaatcctgcatcagcagattcaggttgacggcaaaactctcgacgctcaacagaaactcgagaaattgaaagaaattgctgacgaatacttaggcctacgcgacaaatttgatgacctgatccagcctttgcctgagaacggcgagagcgtgacgaagattcgggcaatggcggagcaactgaacactctgcgcggcatgatgaaaaccgactggcctgaagcggtacagcatttcctggatcgaatcaatggcccacagcgaagcaaaccgacactgagtgcactgacgacagaagtgtttgagtggctgcgagatgaagacatgttggaagaatttgtgattacaaggaaatag

SEQ ID NO: 434824 - DNA, 3156 bp, Serratia marcescens
atgagcatcatgaattattggccgtcttttgagaacatcgtgcactgcatacgcaacgaagccgaagagttgcaggatgatgtgttattggcagtgcatgagccaatgcttctcacccgtcgcgacgtcaacagtaaacaggaactcctccgtgacgaggatttgtttacacaattgctctctactgagcgcgcgattccgctgataggccgttcagggatgggaaaatcgcatctggtacgctggctggactgtcgtctcaaaagccatctgcatgcaaaaggcgaactggcaaaatgggaaattgttcgtatcccgaaaaacgccagcctgcgtcaggttctgctgctgatcctgaaaaatctgcacggcgatttttttgatgatgtgcgcaaaagcgtcgacgatgtggctgaacaacactcagctaaagatctcgccgatctgatgctgaccatgatgtcgcatcagttggaaagcatgtacaacgaggcgatggcaattggccaggaatacgaatctcaagggaaagagattccagccgaaatcggtaaccgtcttgatgcgattatcgaagaagtgagcaatggcattggtaaactcattaccgatccgaaattcaaagaagacatacttcagcctgagcattgcatctacaaacgtgcgagccgcatgagcgatgggcttaaagacggcgatgaggatcacgataactacgaacttgtacctgacgatctctttttccagaaaaatatcgatgatctgtcgtcacctgcccgagagtatattcgccattcccgcatcgatgaagagggaaatgagagagcccgcattcaggcggtaagcgttctgaatgaagcaatgcacgcagcacttaaatcattattttctaaattattcaaactcaacggcggtaacttccaggaagtatttcagcaaatccgcagtgaactgctgaaacaggatcgccgcctggtgatcttagtggaagatatggcggccatttcggccattgaagacgtgctgatcgacagcctgatccaggaaggcatgcgcgatggggtaaaaacgctctgcccggtgcactcagtcattgcagtcaccgatagctatccgggctataagcgccgtcaggaaacgctgatgacacgcgcaggctatgagtggatcattgaaagcaccgatagagacaacaacgaagaacggattgtgtctctgtgcggtcgttacctgaatgctgcccgtcatggtgctgcggccctgaaacagtccagggcgcaaggtttagccgactggccgccaatatggcatgaggaagaagagccggaatggctggcagattttggaattacacctaaacagcgcattccactattcccttttaaccgcaacgccatccggggactggcaaataaatactgtagcaacagcgacggtaaactgacttttaacccacgaattgtgatcaaccgtatcctactggatattttacgtgattgtcgcgttgaggcagagcgcggggaattcccaccaccaaaccttgccggaattgatgctggcacagaaattttctacaacatccaacagttaaccaaaatcagacttgccagtgcagcatcattgaccgcactttggagctatggctgtgactcctgggaaaaagtctgcaaacaactgccgccgggagtagctaaagcttttggtctcactgagttggccgaacgtattaacggcaaaattccgcccctaccaacaggcagcaacaatgatgaagaggttatcgacccaatcggtattacagatccagaaccagaaccagaaccaaaatctgagctggctttcgtcaaacatctcaaagcctgggtcgatgaaaaaaccgttttacctcaactaattgccagtgatctgcgcgcaggacttaacaattgctatgaactctatgcccaagtggaattttccagtatggcagagcaaccttcactgattgagcgaaatcctttgattagcctgccactggcggcttcagatccctcgaacgccattgtgaaattctatgaactcaaagacctcaacgatccgctacgcaggatagagatctacaacgtgtcgctggcgattttgcgtatccagcattacgccaacttaagcgaagggcttagctaccctgaagcgatggaagactacgcccactatgaaaactttgtcagttggtgggtgccgcaggccgcggagattgcaatcaaccatgcccgggcgcgaaaactgaagcctgcgctgcgtaatcattaccaaaaagcgctgctgctgggcctgttgagtggcaaagagaatcctgcggagctcattgatgcgctttgcctgacgcagaaaggcgtcggtcgaactgagggtaagaatcaagggcgaacaatcaaaacaagcccatccgatctctgtttctacggactcgaggccaaccagaaaccacattccagcataaaagtggctgaagcccggcaggcagcacttcaggggtgggacgacgcccgcgacgcatggctttctcaggttgccgtccctgaattaagttccgggctcacctcaacccgcgcacttgaagccgaagtggtaacctccgcgttgcgagagatccagaaagaaccgcttggagcggatgtgcagcgtgcggcagagacagcccgcaaagagatcgcctcaacgatagaaaatgcacaactctttgaaaatataaaaaatcaggatgacttcattgctcttctcgatgagtggcagatgtttatcgaagcggtacgcacccaatattaccctccagaatctgagcagatcagaaactcatcatggttgctgggtgaaattgaagcattaagagtagacgcagaggccagcctgaacacgctgctcacgcttaattctctcgtcagacagaaagatgccttcatgctgtggcatgacatttcccatctggatggtgattacgtcagccgaatcggtaaccttcttgcgcaatggcagaatattcaatcgaaaatcagctttacgctacagcagataaacagtaagggtgacgcaccgaaactgaaaaatgcctgcacgctggttgaagagcgactgaaaaatctggcggctgatatcagcgcctctggagtgaatgaatga

SEQ ID NO: 434825 - DNA, 834 bp, Serratia marcescens
gtgctgatccccttgtttgatcgcattgtgcaaaatgcccaggcaccgctttccccggaagcggttgtggctcgctatcggcccaataacctgcccgctaacgataacgcctgggggaagataaaagagaacctcgccttttggtgccgactggggctctggccgatggaagaagggagaatcctgccgcagcccaatgagactcgtccgctctatcagcgcgtgctgcaatgcaccattgatgcctgcaaagaaaaaggtatcgctgaaggtaaggaatgtgagccattatggcgagtacttacctgtttgatgaatcttcagcagcattcattaggtggcaaggaaccgttggccccgaatatcatcactgaaaagctgcaaagatggcttccaaccgaaaccgttaactccaataccgaaaagctggtcagggaatatggacgctatctaggctttctggaactggccccggaccagaactactacaccgatccaacccgggcgattcagtgctttttgccgcagatttttggcgaacaaaaaagcctctccattaaagccttcttggccaatatggctgaagtgatgccgatgatggacggtggtgagttccgggtaaaaatgcagaagatcatgagcgaacggaactggtctgcacccgaaggtaagaatatcagcaccagtacatcacttgcgctgcgtcgtctggaagtgagccaacagattacactgaccaccggtagtgacgatatctcatcaatgtcattaccactaccaaatggtactagcatccttgtcagctacgtcagcctcagggagagcgcgcaatga

SEQ ID NO: 434826 - DNA, 2481 bp, Serratia marcescens
atgactgaacaatggtcacgtctgcagctagcgttaaccacctattttaccgatgaagttactttcaaagaggggattgaaaatcccttcttcctgcggttaatgaatataatcatcgacccttctgcgggcctgaatgatattttcgcaggctatgccgatgcccttcgcactgcacaggtgagcggcatagaagatccctggctgccttctccaccgacgctgacggagaccccagattcactttggggcctggaaaaatccgtcgcaggacagacgctgtcactctctgtggaagcggacctaacgagcacccaagccacttaccagcgtagaacccgacgtaacttattgcagccggaaatggatccggcgctcaagaacctgttggtcgacacacctcatacgcactatcgtggcttcggacagcaggcggcaatccgcacgctactcacctccgacgtcaatagcaccctggtggtgaatctccccaccagttgcggtaagagtcttatcacgcaaatccaggctatcaatacaccattcggttcgttaacgctggtgattgtcccaacagtcgccctcgcaattgaacaagcggattttatgcgggatatgttgcgtctggctgagcaggatcacggaggaacctacgcctgggttggcgaccaggatcaaacaacacgccagacgctgaaagaacggttgaagaacggctcacaacgtgtcctgttttgttcgccggaggcggcaaaatcgtcgatggttccggtactgtttgatttggcgaaaaataatctgattggtgctgtcgttatcgacgaagcacatcttattgaccaatggggcgctgaattccgtcctgattttcagctgattgcgccactaattcgttcattaaaagcacagccaggatgccgttttcgcaccctgctgctctccgccacgtggagccagaacacccgtgatgtgatcgttgagcagttccgcgcagatgacagcgaactgattgagattacagcgaacttcctgcgtcccgaacccgaatactttgtgcatgctgagcccaacccgggtgcgcaccagcagcgcgtggaggagttgctgatgactctcccacgcccgctcatcctctattgcaccacgaaggaagaagctgaaaactggaatcaccgacttcaacaacaacattaccagcgtattggtctgttccatggcgacacggaaaccccggtacgcaaaaaactgatttcacaatgggcaagcgatcaactggacatcatgattgccacctcggcgtttggcgtaggaatgaataagagcaacgtccgtacggtcattcatgccgccattccggaaaatatcgatcgctattatcaggaatgtgggcgagccgggcgtgatggcaaagcctgtcaggcacatctggtctggcatcccgctcagatggaaacggcggagagcctctcgtttgaaaagctcatcagtgtcgaaaaaggctacctgcgctggaaggcgatgtttggacaacatcagccgagtcacatagccagctactgcgtctcactggataccaaaccagatcacattgactatcagggcgaccgaaaccaggcctggaaccgcaggaccctcttgctgatgcagcgtacggggctgattgagctcgtattcgctgcgcctgaactaccggaaagcttacggaaaggtggagaagaaaacgatcaagcggttcgcgactggtttgccaactactacagcaaagtgcatatccgtcattgcaacgattcacaccactctgaagactactggaacacctttgttgacaaagcccgtcatgatgaactgaccaagcgtcgcgttgcctttaacctgctgaaggagtggatcctcaacccccgcccttcactgtgtcagatattcaggaaattttatatctatcagcaccatgcgccagagctaacctgcggtggatgcccgggctgccgggagcaggataaaggctcattctcccccactgtaggggccgacgtggaaattttacaaacgacaccgaagaaacgagcacgcttcatcggagccgaaaaaaaagtgtattacagtgatgaactggatattcggtctctgctgtcagaactgcgcgtgccgctccgcctactcatcggctctggcgattacgagacaatccgggcagataaggccgatttcaggcatctggaacgcgccatggattctgtatcccgcttctggtgtatacaaaaacttgccgcgccaacctctgacagcgcggaaattgtgattgtgtctaacactgccactgcgctacctgacctaccggcctcgcgatatgaacgcattctcatcgccccgcagcacctggccgatccgcagcatccttacagaaaatggtgggaaagcgcaggcaacgcgcaacccctggacacttttatcaggcaactacagcatgtcaatcatcaataa

SEQ ID NO: 434827 - DNA, 3114 bp, Serratia marcescens
atgatgagcatattacctatagggtcgttggttgtttctgatagttttgaaggtatcggaaaagtcatcagccttgatatcgaggcaggcaatgcaaaagttgctttttttgagtcacccgcacacccctatacacgtcaggttgcaattaaccttgaaaagttgacgccgacgatcccccatgaagaaactgtgatttactgtcttgaaccacaaagccagcggtgggtccgcgcccgctttggcggttcccgacccaatggcgagtttttagtaattattcgcgaagatgacgcaactacgcttcctatcgataagatcttcgtattgaacaaagcgctcggtaaacctattaatcctgcacatttcctggcttaccaggctaatgacgctcctttcttctttcctcgtcgacactcttttatcaaaacctacatccagcaacgcgcttcctgcaggggtctagcatccatttccagcagcgctgtcgaactggaacctcatcagctggccgttgtacggcgagtattacaagataaaacgccgaaatatattctggcggatgaagtgggtcttgggaaaaccattgaagcaggtatggttatccgtgaacatgcactggaagaagcggggcatgtcagtatgcttatcgccgtgccaagccaactcgtcagccagtggcgggaagaattaggcgaacgttttcagctaaaacagttgctcgtgggtgtctcgacgatgctctccctgttaaagcaagacgcttctgcgcaagggattgttatctgtagttattctgaggcctgccttctgctgagcagagggttctcaccttccctgatgacaatcgatgaagtccaccaaatcgccgactggccgtggtctacggacgaagaccagcgtgatgatttcaaactaatgtcacaagcatgccagaaagcacattacgcattgcttcttaccggtacgccactgcatggccatgagcgcaacttcctatcgatgctgcactgtatcaacccggaagtattccagattgatgagaaccatctgcatgcattcaccgaactagtgaaaaaccgtgaaagccttggcggtgttttctcttctttagttccatcggtgtctaatattagtcttcgccgtaaccttgatgaggttttggtgcagttccccgacgaccatcagttggcaatgctatgccaggaattatttccgctgatcggacgattttctcagccaacacctgaacgtgaagcgggtattaaagcgatacgactacatcttggcgagcattaccgcatccaccaccgtctgctgagaaatcgtcgtcaggttgcactgagtcaggatgaaagcaaaaacctgaatctggatcttctcttccctggtctgaatggcgtgagggaatctcactggcaaaccgagggactcaccttggatgagttgctggaagagtatcgctctatggccgtactgccgcaaaaccagcattggtcgttaaaagaagcgcactacatcgcctggattgacgatctcttttccagtccgatttgtgttctgcagcgggcaaaagccattctcacagagtcaacgggactgcccaaggatgagcaagccttactggaacacatcgtctcgacggctaaaaatgagcaacaagctatcgacaatatgctggccgcatcgcttaatgattggctaaatcaatttccagatggcaaagcgattgtcttctgcgatcgccctgaactggcacagcacctgtcagtaaagatgagcattctgctggactacacgatagaacgctatcagccaagccaaccactgcagttcactcaggcgcaaaaccccgttcgggtgctattgtgcgatagaagcggcgaggatgggctgaatctccacggaggacgtcgtctggccgttcactatggtctgccgcgatcctgcagccgaattgagcaacgtctcggccgtctcaaccgctacagcgccaacctgcgtggtatcaaaccagttcaaagcctgatactaaaaaaccatgtgaccgatagcttacgcaatcagtgggccgacattctggtgaacagcattggcgtgtttaacaacaccatcgccagcctgcagtttgtgctggattactatatcgatgatgcctggaatagactgttcctcgaaggcccacaagtgctggaaaaccttgctgcagaattccccggtgaaaatggcgtcttggtcagagagactaacaaaatcaacatgcaggaaaaattgctggcgatggatgaagaagtctcgcaagcggcacttttcgcacaacagctaagtaatgacgacctcattgcagcagaacagtgtaaagcactgacgccatggatctctcaaggattgcgtttccgttcatcaggaaatgctgaagaagggatgcgttttagttttgaactagctgaaagcagttctgggacgctggtagattttaaaacatttctgacgacctgcatgcttagcttcgacaaagagggaggcaacccaccgtctacccatctaatgagtgcagaacgtatctctgccattgacgggataacggtttatcctttgcgttacggtcagcctttcgtcgatgcgatttggcagttactgaatcaggacgcgcggggcagttcggtagctatgctacgtatgattaacgcggaactgaatgaacctcgctatttcttccagatgagttggcttattaccggctgcgacccattaagcccttacgccactcttcgtcaatgcgatgaactggtgccaccacgcattgttgaggagtgggtggctgccgacggttctcaggtgacaaatccacaactgcttggaatgctgaacagcgagtacagcaagaccccttccgccacaaaaagctatgtggacctcaacctgcgagcctcaagatggcaagagattgaagagctgatctccgctgatgcatggaaagaacaggtggagcaggtatatgataaagcgctgcagaaacaatgcgattttgctgaaaccaacgcatacatccagttgatgtcgataaaagcgattattctatgtagcagcaatattttatctggagtcgcctaa

SEQ ID NO: 434828 - DNA, 1779 bp, Serratia marcescens
atggctcgatatgaagatactactcagtatgaacgcgacgttatgacttctttggggtaccactggcggggagaaggctggcaacgcggttttgatctttctgatggcgatatggttgttgaggcgtgggtgggtgaccgattgccggacaggcaaaaggaactcagtaatattacgcatttgtgggatcaaaaaattagcgatattaataaaccgattagcgcttttgatcaggaagatgatgacattattccattcagtgagaaggcaaagaacagttttcgagccgattccgacaaggcgattaaattttcagcagataaagaaaacgatctgacgaaccaaattagtgagatgcaaaaagatattgatgacctaagtagtaaactcaaaaataaatcgcaaacgccgctagaaaaagcgagccttgaagctattatcgcgaagattaaagtgggtaaggagcgtttagacgttctgcgtaatgaagcaaaaaaaagaaaagtgcatcaggagtatttaaaactaaataatgagaattggtttttatccagagaaaaaccaacgtcgggggttaaacaacaacaaaattcaaatagaattaaaatgggggtgcagctagatgaggaaaaaaagatacagtctgccatcgatgccaatatgagaaatacgcaacaatatgaaaatgagctgcggaataaagagagtgaagtcaatcgcctcaagaatttagatctttctaccgaagaagggatcaatcgtgcggagaatgaggcgcgcaaaaatgaacaaagcgctcagcatgcactgaacgatgcgaaaaatcggattaatcaggcgaacgacgacaaagcaagggcggagaatgtcggcagagagcatgaaagaaaagccgctcaggctgaagaaaaaaggaaaaaacacagtcagctgcttgatgattttgtaagatggaattcggaagtcgattatggcaaaaaagcttggtggaatgagttcaatgccgcaagtgacttgatctcgaagctggaaaaagagcgcgatgatgcattaagtgtcatgaatgcatcgagagagtcggcgagccgggccgcaaaccgccagcaacaagcgacccgagatcagaccaacgccgaaagtgcgcttaacagcgcgcgtaaaactctggcggatgtgcaggcgaaaaaagcgatgattgccaaagagaaaaaagaggcggaaactaaggctgaagaggagcgtgtaaaagatgcaatcaagttcacagcggatttctacaaaacggtaactgaaaagttcggcgaacattcgtcaaaggtcgctaaagagcttgctgaagcggctaaaggaaagtcgattaaaaatgtggacgatgcattaaaagcctttgagaaacataacaacgttttgaacaagaagtttggcgtgaaagatcgagaggctattgcaaaagccatggagtcggtcaatcgcgatcagatggccaagagcttggcaaaattcagcaaagcatttaattatattgggaagacaatagatcgttacgataccgtagtggctattggaaaagctattgaaactaacaactggcggccggtatttattcaaatggaggcgttagcggcaggaagagctgcaacggcgctcacggctttttccttcagtatcatccttggcacgccgatggggtttttaggttttgcgataattacgacacttgtgggcgcttttatcgatgaagcgttagtcgaaaaaataaacaaggaactggggatttaa

SEQ ID NO: 434829 - DNA, 1113 bp, Serratia marcescens
gtgaaaagaacaaccggtttcttgtttgatgaacgctgtttctggcacagcaccggcctgcacgccaccaccctgccggtcggcggctgggtacaaccgccctcgggcgccggccacgccgagtcgccggaaaccaaacggcgcatgaagaacctgatggacgtgtccggcctgtcgcgccagctcaccctgctgagcgccgaaccggcgacggaagaagacctgctgcgcattcaccccgcccactacctgcagcgtttcaaacaggtgagcgacagcggcggcggcctgctgggagaggaagcgccgctggggccgggcagctatgagatcgccaaactctccgccgggctggcctgcgcggcggtggaggcggtgctgcagggcgagctggataacgcctatgcgctgtcgcgcccgccgggccaccactgcctgccggatcaatcgatgggcttctgcttcctggccaatattcccatcgccatcgagcgcgccaaggcccgctacggcctcggcaaggtggcggtgctcgactgggacgtgcaccacggcaacggcacccagcacatctattggcagcgcggcgacgtgctgacgctgtcgctgcatcaggacggctgcttcccggcgggctattccggcgaacgggatcgcggcgaaggcgccggggcgggctgcaacgttaacgtgccgatgctggccggcgccggcgacgacggctacctgcacgccatgcggcgcatcatcatcccggcactggaaaaattcgagccggagctgatcatcgtcgcctgcggttacgacgccaacgccctcgatccgctggcgcgcatgcagctgcacagcgacagcttccgcgccatgaccgcgctggtgcaggacgccgccgaccggctgtgcggcggtaaactggtgatggtgcacgaaggcggctacgccgaatcctacgtgccgttctgcgggctggcggtaatggaacagctgagcggcgtgcgcactgaagtgcaggatccgttgctggcgttcatccagcaacagcagccgcgcgacgcctttaatcgcttccagcgcgaagcgctcgacgaactggcgcgccagttcggcctgtaa

SEQ ID NO: 434830 - DNA, 633 bp, Serratia marcescens; identical to SEQ ID NO: 52831

SEQ ID NO: 434831 - DNA, 507 bp, Serratia marcescens
atgccgccaaacgcagactcccgacgaggttctcatctgcgagaacacctgcttttcctgctgctgttgctgaccctgaacgtcttcgcaccaccggcgctggcgcaaaacgcgccgcccgcgcccgccgacaagagcgagcagcagaaggccgcctacgccgcgctggccgatctgctgcaagacgacaaagcgcgcgcggcactcatcaaccacctgaaacaggccgccggcgacgcccccgccgccgccccaacaacgccggaggaatcaacgccggccacgctgagcgacagcctgaactctctggcgcaggaaggcatcggcacctttaaccagaagctcggcgcgctgcaaaagctgatcgactccggcccgaagcgcattttcaatcccgccggctttttccgcgcgctgggtgcgagcgcgtggggcatcagccgtttctggtgcacaccgccggcggcgacgtgcgttgccaagtggcggaagacgcgcatcagataa

SEQ ID NO: 434832 - DNA, 1137 bp, Serratia marcescens
atggcaaaaagaaacttaaaaatgatatccgtgttgatatcgataagcttggtcagtggctgtactgtgtttcctggtcagcatctgagtacgatgggaaaagagacggtaaaacaagaagatagtgattttaatatcaatgagatggtgaatatctatcctgttactcccaagctgttgcaaaaattgcgtccggtcagtgctgtagcgcagtccaatgctttactggattcgtcgttaaaatcctacgagtaccgtattggcgttggcgatgtactgaatgtgacggtatgggatcaccctgaactgacaacacctgcgggtcaatatcgcagcgcaagtgataccggtaactgggtacaatcggatggcaccattttttatccatacattggcaaagtgcgggttgtcggcaagacggctagtcaagttcgctctgaaattgcaaaccggttagcacagtacatcgaaagtccgcaggttgacgtaaatatagccgctttccgttcccaaaaggcctatgtaacaggtgaggtatcgaaatcgggccagcaagcgataacgaatgtaccgctgaccgttttagatgctatcaatgctgctggtgggcttacggaaaatgctgattggcgaaatgttgttcttactcataataacaaagagcatcggatctcactgcagaggctcatgcaaaacggagatctgacgcaaaaccatctcttgtacccaggtgatattctctatatcccgcgcaatgacaatctcaaagtttttgtcatgggcgaagtgagagagcccgccacgcttaagatggatcgtagcggcatgactttgaccgaggcgttaggcaacgctgcggggctaaatcctactggatctgacgctacgggggtctttgtcatccgtcccctgcacggtaccgaaggcaacaaactagcgaatatttatcaattgaatatggcggatgcgacagcaatggttatgggatcagaattccctcttcaaccatatgatattgtttatgtgacagttgcgccaatcgcacgctggaatcgcctcattggtcaactggctccaaccattgcgagcttcaatgatcttactgaaggtgctttgcgcgtccgtaattggccgtag

SEQ ID NO: 434833 - DNA, 249 bp, Serratia marcescens
atgaaaaagactcacctgttcatcgccggatcgctgtttttcttctccgcattatcacaggcggccgtgacgattaacggcgaatctctcgcccccggcagtcacaccgtggacagttccggcaacgttattcagaccggcgctactgacagccaggggaatgccaccggcgttaacattgaggcaggcgtaaatgcaaaactgtgcgccaatccgtttttgaaaaaaatcctgccgcagtgccgttaa

SEQ ID NO: 434834 - DNA, 609 bp, Serratia marcescens
atgaaaaataaaatcatcatatacattcaagacagcgacatgttttttaccaaaggcatcaaatattccctgctggactattttcaccaaaaagggagcaacgttatctttaccgataacgttgctggtagccccctgatagatttcgcctttatctctgcgccactgaccaagcgagcctgttactgtaatatctcaccgcacacagtccatcatgacacccgattctttaccatcagggagcggcggcatcatagcctgggtaatctcccgctctgcgaattggagtatggcaccttataccgccaggaatccggcgatgccattttgcaactgatggatagcgtgatgaataagcctttcaccggcaggcgcaaacagtgcagaacgtgttccggcaatcggctgacgcggcgggaaagagaagtgctttcctatctgtgcaccggggcgagccaaagcgaaacggcaaaatatatgcacctcagcgtgaaaaccgtacacgcccacaaacaggccatgatgaaaaagatggatctgagacgaaaacaggactttatttattgggtattaaaaaatggacatcattgcctgccgcgtattgattag

SEQ ID NO: 434835 - DNA, 834 bp, Serratia marcescens
atgaccaatcgaattctgataatactcttattatttatgtcaagcgccaatgcgggatcatggggaggggcacacgagactatcatcgagggtatccaggacagagtgatgtatgttagttatgattggggcatcatgccgcccaatgacgttcccggcacggtgcaatgtggcgccgcctcttgttactttggcccagttctgcgagccggcgtcggccccattaacggtgattattgcgatggcggcggcgtgtgcagtggctttgccagtaatgtcctgcctaactttatggttatagtacccaatggtacgccgtacgccactgcatataaaacctatagcgcacggtttggcttatctgggcggtatgtgcggttccgcatggggaagtatatacctcaatctatcgcctggggacgactttgcgtaggttttgccagcctccccgtcaatgctgccgccgtttcaatcctcgctcccgacagcagctgcggactggtccctcccccggagatatcttgcaatatccagcttccccacgttctcgacatgggtactcctgttgccggcagggctgtgccaccagtgagtgagcaaggctatgctgattgcattggcgatgcaacgatatcagcggcactattaaatgctcccaagctggatgggaatgccgtaacgatttcaatcaacaataaagtgctaacttcaacgtcacagagtgttggttctggcacaaacattatccttaataccgttgcttcagtatcgaccccgtttcaacgcgcaggccactatgaaacagatgccatattgctgatgagttactactga

SEQ ID NO: 434836 - DNA, 573 bp, Serratia marcescens
atgaaacgaaaattaaacgatcttttaaccgttaatctcccgattattatagcgacctctttattgctggagctatctccagtcacgttgttttcattcgccaatgcgaatgaaaacaacgtatatttacacggtgctctggtatcggagccttgcgttatcctgcctggggatgaagatattcagctgaatttcggcacaatcattgataaatatatctatacccacacgcgcacgctcggtcagaaatttaatattcgcctgagtgaatgcgatcttcacctgggtcaaacattgaaaatttctttccaaggccaggagagtacggcattgccagggctattggccattaacgctgagggcggcgctaaaggaattgccattggactggagaacgccgatggaaaaccgttgcccctcaacacggagagtaacgcttactccctggagtccggcagcacgcttatcacgctcaaagcctatgcccagggagagccggatgccatcgctaatcacactatcggattgggaacgtttggcaccaccgccaccttcaaattggaatatgaatga

SEQ ID NO: 434837 - DNA, 492 bp, Serratia marcescens
atgatacttagcaaaaacgtgctgtggttcgctggcttcagtgctatttgcctcgttgctcatgcaggtgacagtacaatgtcattccacggtacgctgctgaccccccctccctgcacgattaatgatggtcaacagatcgaggtgaattttggcgcccggattggtatccatagggtagatggcgttaattatcggcaatcgctgaattatcaaatcacctgcaacacactgacccacaccgattgggcattgaccttaagcctaagcggcgtggccgccggattcgacaaggaagcgttgctgactaaccagcccaacctcgcaattcggatatatcaaaataataaaccattcgctcctgggaatattttgcgcattaatttagccaatccgccaaaactcaccgccgtgccggttaaaaaagaaggtacagagttaaccgaaggcgctttcgaagcatgggctactctacgcgctgagtatcaataa

SEQ ID NO: 434838 - DNA, 480 bp, Serratia marcescens
atgagattccgtaatctgtctcgcgttgttttggctgctctgtcggtcactttacccgttaaggctgtaacgacagtgaccataaaggtgaccgtactggcccccttatcttgcgtgattaatgacaacaaaccgattgaggtgaacttcggcgagatcctgacaacccgtatcgacggtatcaactaccggcaacaagtacggtacaccctcaactgtcccggtgcaggatccaacgcgatgaaattgcaagtgcatggtactggcgcaagttttgatagcacagtgctgggtaccaacaagaatggattggggattgcattgttgctggatgataacaaagtcgccatcaacaattggctaaactttacatatccgaccctccctgaattatgggctgttccagtcatgcaaccagatgccattctgaccggcggcaagtttagcgccggcgcgacaatgaaggtggattatcagtga

SEQ ID NO: 434839 - DNA, 648 bp, Serratia marcescens
atgcaagacacgaacaacaggctgggcagcctggactggcagtattacctgacgctggcggcgctggcgttgatgattccgcttagcgccatcgcctcgctgtggctgctgcccgaagcgcggggccaggcgccgggaggccactacgttgacggtagcaacggcgtgctgtacgtgcgcggcgcgttgaccgaaagcgcctgccggctggaaatgagcagtgcgcgacaggacatccggctgggcgacgtcgcgaccgggcaattgcagcgcgtcggcgatcggggcgcaccggtggggtttgaattgcggctgcaggactgcctgcgcagcgcggtcggcgggcgggacaaccgcggcggcgcctgggtctgggcgccgcaacagccggtggtgacggtgagcttcagcgcgccggcggatgccgataacccgcaactggtcaaggtgttgggcgcttccgggctggggctgcgcctgttggacgccgccgggcgggatgtgcgcctgggcagccgcgggcggccgctgctgctgacgccggggcaaaacagcctgcgctatacggtgatggcggagcgcacggctgccagcctgctggccggcagctaccatgcggtagttgatttttaccttacctatgactga

SEQ ID NO: 434840 - DNA, 765 bp, Serratia marcescens
atgaacatgaattctgtaatgaacaaaaacagcctgaccgttaccgccctgttgggtgccctgctggctccctcggcgcaggcggcgatcgcgctcgatcgcacgcgggtggttttcgacggtggagagaactcggtcagcctgaacatcagcaaccagaacaaacagttgccctacctggcgcagggctggctggaagacgaacaaggcaacaaactccaaagcccgctggtggtgctgccgccggtgcagcgagtggagccgggcaagcctagccaggtgaaaatccaggcgctgccggcggccaaacagctgccgcaggatcgtgaaacgctgtactacttcaacctgcgcgagatcccgccgaagagcgacaagcccaacacgctgcagattgcattgcagacgcgcatcaagctgttctaccgcccggcggccatcatgccgacccaggcgcagatggccacgccgtggcaggaacagctgacgctgagcaagcagggcgacaaatatcaggtgaacaatccgacgccgtactacgtgaccatcgtggatgccgccgccaggaaaggcgtggccggcgtaaaagatttcgaaccgttgatgattccgccgaaaggcaccgcggcgctgggcgcgagtgcgacggtgctcggcgccagcccggtgctgacctacatcaacgactacggcggccggccgcagttgacctttaactgcagcggcggcgcctgccaggttgcgccggagaagcgcaagtcataa

SEQ ID NO: 434841 - DNA, 2541 bp, Serratia marcescens
atggtgttctctctcacagggaagcgatttcgcattcggttattgaaagcctgcatctgtttggcctgcggctatgccatattgccgacccatgccaatgatgcaatccaatttaatatcgacgtattggatgtgaatgaccggaaaaatatcgacctgagtcagttttcccgcagcggttacattatgcccggcgtttacaatatggcgatccatctgaataagagcgaattgccggaacaaaatgtcaatttttatccgccggataatgatgataaaggcagccaggcgtgcctgacggcggcgttggtggaacaactggggctgaaaccgagcatgctggagaaattgacctggtggcacaacggcgagtgcctggatcccgctagcctgaaaggcatggaagcgcgtggcgatctggcgacgtccgcgctgtatctgagcatcccgcaggcttacctggagtataccgcggagaactgggacccgccctcgcgttgggatgaaggcatccccgggctgttgtttgactacaacctcaacggccaggttcagcgacaacagcatgacggctcccggagttacaacctcagcggcaacggcaccgccggtgccaacctgggcgcctggcgattgcgcgccgactggcaagggcgagtctctcgccaatccggcgcggggcaaggtgcagaccatcggctggactggagccgttactacgcctatcgcgcgctgccggcgctgcgttcgcgcctgacggtgggtgaggattatctcaactccagcctgttcgacagcttccgcttcaccggcggcagcctggtgtcggacgacaacatgttgccgcccaacctgcgcggttatgcgccggaggtggttggggtggcgaaaaccaacgcaaaggtgaccatcagccaacaggggcgcgtgatctatgaaacccaggttgcagcggggccgttccgcattcaggacctcagtgaggcgatagcgggcgagctggacgttcgggtggaggaacaggacggcagcgtacaggcgttcaaaatgaacaccgccagcatcccgtacctgacgcgccccggctcgctgcgttacaagctggcgagcggccggccgtcagactggcagcatcgcagcagcgggcctttcttcagcaccggcgaattctcctggggggtgagcaacggctggtcgctgtacggcggtgcgctgcttggcggcgactacaacgccctgtccctgggcctcggccgcgatctgatggcgctgggcgcgctgtcgtttgacgtcacccaatcgcgggcgcgtttgccacagcaagacggcacgctgagcggcggctcttatcgcctgagctactcaaagcgcttcgacgattatgacagccaggtcaccttcgccggctaccgcttctcggaacagaattttatgagcatgagcgagtatctggatgcgcggcggcaaaatatgcggctcggcaacaacaaagaaatgtataccgtgaccttcaaccagcagttccgggatatcggcctgagcctgtacctgaactacgaccaccagacctactgggatcggccggtgaacgaccgctacagcctgacgctggcgcgctatttcgatatcggccgcttcaggaatctgagcctgtcgctgatggggtatcgcaacaaatactacggcgccaacgacgacggcgtcacgctgtcgctgtcgatgccgtggggcaacaacgctgccctcagctataacgcgtcggcgaaccggcgcgataacacccatcgcgtcgggtattacgaccggatcgacgagcacaacaactaccagttgagcgtcggcagcgcacgccagggcgtgaatatggacggctattactcctatgagggagacacggcccaaatcagcgccaacgccggctatcaggaaggcagttaccgctcgctcggcttcaccgcccagggcggtgcaaccctcacgccggaaggcggcgcattgcaccgcatcggcatgccgggcagcacccgcctgctgctggataccaacggcgtggccggcgtgccggtgcgcggttacggcagcaccatcgataccaaccgctggggcaaagcggtagtgagcgacgtcagcagctactaccgcaacagcgccagcattgatgtgaacaaactgcggagcaacgccgaggccaccaaatcggtggtgcaggccactctgaccgaaggggccatcggctaccgcaaattcgatgtgatcgccggggagaaggcgatggcggtcatcagactggcggacggcagcacgccgccgttcggcgctacggtgatgaacgcgcaaaaacagggtacagggatcgttaacgacggcggcagcgtctacctgagcggcatccaaccgggtgaagccatgacggtgcactggaacggcgcggcacagtgcgccatccagctgccgaacacgctgccggaaggcgtattaaacaatctgctgctgccgtgccgcacgctgcaggcaaacgcaacccctaatttgaatcagtaa

SEQ ID NO: 434842 - DNA, 546 bp, Serratia marcescens
atgagtgactttcccgggaaaaacatattcttctgcatattggcactgttcacgttcagccagatgactcaggctgacgaacagccttggttaaaagggagcgtcaatatgcagggggctatttttgatgccgcctgcgcgattgcaacggaaagtcgtgaacaaattattgatatgcgcacgctgccaaccgccgagattatacagcgcgggcaaggagaaccccacccattcgccattaaattgatcaactgcgtgctgattcagcaggatcgcgagccaccaaatggccattatttcagaatggcttttgatggtgaagcagatggggaattatttcgcatacagggctcggcaaagggcgttgcactgcagattttagacgaaaagggaaatgtagccattccggggatccccttctcctatggggagatatcctcgaacgccatgcaactgaaatataacctaaggctggtgagtaacagtacaccgttacatgccggggaatattcatctgctctgcgttttaaactggattactactga

SEQ ID NO: 434843 - DNA, 561 bp, Serratia marcescens
atgaaactgaacaaaattatgatggcggcagtattggctttcggcgcaacttccatgatgactcacgcagcaccgaaagatcagggccacggcaccgtcacctttaaaggtgcgattatcgacgcgccttgctccattacgccggaaaccgttgaccagaccgtgagtctgggccaggtgtccaacgtggcgctgaaagacggcggccattccacgccgaaaaacttccagatcaaactggaaaactgcgacctgaaccctggtgatgcgcaagggaatggcaagaacaacgccgtttccatcaccttcaccggcgcgtcttccgtggaagataataaactgctgggcatcaccggcaccgccaaaggcgccggcattgcaatcactgacggttccggcagcctgatcgaactgggcaaagcctccagcgcacaaacgctgggcaacggcaacaacaccctgagcttcgccgcttacctgcagggcagcaaagcctccggcgccgtcatcaccccaggtgaattccagtccgtcgccgacttcactctggcttaccaataa

SEQ ID NO: 434844 - DNA, 777 bp, Serratia marcescens
atgaaatttataataaatggaaccattgtttataatgaaaaggagggcacgcttgagcgggttaatgatgatggcagcaagactttgctacaaaacccgacccggcgcctgctgtctattttcgttagaaataatggggagatcgttcaccgggaaaaattgttaagcgatgtttgggaagagtatggcctgaaggcatcaaacaataacctcaatacctatgcctctagcctgaggcgttctttcgctcggctgggtgaggaggaaattttaattacctatccgaggcagggttttatgtttgctgctggcagtatcagggaagaggcatgtgtgacgaaccatcatggtgtcgcaattaatcagcaggcacagcagagtgaaatgcgcaggttttggtacaggatatgcaataaacggctaagaggaagcgtatgcgccttgacgattatttttctgttggttttgctgttggtggagattgtgctgtttatgggcagaatggatcagcagccaccgatggcaatgaatatcgcgcgaaaggggatgtataagaactgtgaaatttacattatcaagaatgaaagtgcggatctggacgagataggcagggctatatcccgagccggttttgattgtagcctgagcgcgaatgtctattactctggtagagccgacgggcagagaatgatgctggcatattgccctgtggacgtactttccccctgtaaaaactcaggtgccgagttaccgcttcagagtgaacagaagaattaa

SEQ ID NO: 434845 - DNA, 489 bp, Serratia marcescens
atgaaaatgagaagctttaaatcgctcccaatcagaacctacatcgtggccatactgttactgtgcaccgcgatcgctctcctgcaggttcagatgcgccataacagcgcgccagaagcctgcgctaccgtgctgcggacgtttatcaccgtcgaccagcggccgacgcgtggcgtgattctggttaacacggtgcctggttcgctgggaacactgaaagtgctattaagcggcaagctccaagagggagacgaaacatatactatcgcccgagaactgcgggttaaatacaccaacaaggatgagtatcatcccatgatagtagacaaaagcatccaaaaggacagagatactgtctcccaggcccatctggataagatattcccgggagagggccaatacctgcatatcaagatcaatcggctggacgaaaatacctatgcttattcggataactactccccaatattcgtttgcactacccagtga

SEQ ID NO: 434846 - DNA, 786 bp, Serratia marcescens
atgaaatttatcattaataagagaatcaggtatcacgaggataactccagcatagacacgctggacgactcggcggagcctattattctgacggctacgctcaaccgcctactggcgctgtttgtgaaaaacaacaacctggtcctttccagagaacacgttttggaaaaagtctgggaagaacacgggcaggtcgcctccgacaacaacctgaataattcgatgtcggtactgcgcaaaatcctggccacgctcggtgaagaagatattctggtcacgctgccccggcaaggcttctcattcactgcaaaagaaatcaacaccatagacgatcaggcgatcatcaatgagcaagcaactgcctgtagccaaagtctcacgccgcctccccgcactcgcgcgccactcaagaccgcgctgttgctgctgacgcttctgctcagcggctggctggtatttctcctgtggagttataaaaacagcgccgctttttcccctgatgactctttggagcttggcgttttcgacaactgccaaatttacatcatgtcaccccagcacaagatttcccgcagtcagctaaaccttgaagaagtggctgataaagcacggcaatttggtctggattgccatatagcggccaagctttattactatgatatcagcctgttaaccaaaggcggcgacggtacggcccactcccgctttatcgcctactgcccgttgaaacccggcacgaaccaaatattccgctgcgaaaactattatgaaaatgagaagctttaa

SEQ ID NO: 434847 - DNA, 1242 bp, Serratia marcescens
atggcaagaaaaaccaaaccgttaaccgatacggaaatcaaagccgccaaacctaaagatgccgattatcagctgtatgatggtgacgggcttactctgttaatcaagtccagcggtagtaagctctggcagttccgttactaccgacctctgaccaagcagcgaaccaaacagagcttcggtgcctaccctgccgtctcactctcagatgcacgtaaactcagagctgaatctcgagttttattggcgaaaaacattgatcctcaggaacatcagaaagaacaggtgagaaattctcaagaggccaaaaccaacactttcttgttagttgccgagcgttggtggaatgtgaaaaaagccagcgtaacagaggactatgccgacgatatctggcgctcgcttgagagagatgtttttccagcaatcggtgatatcagtgtcactgagattaaggctcatactctggttaaagcagttcagccggttcaggccagaggggcattagagactgttcgacgcctttgtcagcgaattaatgaagtcatgatttatgcgcagaacacgggcctgattgatgcggttcccagtgttaatatcggaaaagcgttcgagaaaccgcaaaagaaaaacatgccgagtatccgtccggatcagcttccacagttaatgcaaacaatgcgtacggcaagtatcagtgtgtcaacgcggtgcttgttcatgtggcagcttctcaccattacccgccctgccgaagcagctgaggctcgatgggatgagatcgatttcaatgctagcgaatggaaaattcctgcagctcgaatgaagatgaaccgggaccatacggttccactatctgatggggctctcgctattctggagatgatgaagtctctcagtggtggtcgagaatttatctttcccagtcgcatcaaaccaacccagccaatgaacagccaaacagtgaatgcagcactcaagcgtgctggcctaggaggcgtactcgtatcacacggtttacgttctatcgctagtacggcactcaatgaggaaggatttccgcctgatgtcattgaagcagcactggctcatgtggacaaaaatgaggtacgtcgcgcttacaaccgcagcgattaccttgagcaacgtcgtccgatgatgcagtggtgggctgattttgtaagcaaggccgacagcggatgtattgttgaagccgaaaaaaaggagttcaaacttgtgggttaa

SEQ ID NO: 434848 - DNA, 756 bp, Serratia marcescens
atgggtttgcctgacgcgaaggtttttctgttggtttgtgaagggccaacagatatagaagtaattaaatccattgctgaaaaagtcaaggataatattggtacgccagttgaaataagagagctaagtccaactcaggataaaacaacaggaacgtatccctctcaaggttggactgctgtaaaatcttggtgtgaaacatactcgataaataaaaatattgtaattccagcagggatagaggactggagaagagtattacttaataaaaaaaatagttttagatgggatacgttgattaaaatttctggtgcagccggtattattatccaaattgatactgatatcgctgagcaaatggcacatgcggactttttgacaagtggaatctcaagaaaagctttttctcataatgcgataaatatctggttaaatgaacaggaaaaaccagacgagttttactatttgatgtcaacgttttcgacggaaacgtggcttttggcgacgcatgaaccacttgataacaaagatgttttaggtgacttggccacagtggttgactatgagacggtttcgaattcggaagaaagattaatagctttgggttatgctaaaacgagaaaaaatgggcaggttcgcttaaagaaagaacctgttatttataaacggtatggagaaagaattgttctaaatattgataaggtcagggcaagatgtgaagaggctgattttttctataagtttttagaaagctga

SEQ ID NO: 434849 - DNA, 1215 bp, Serratia marcescens
atgagttctataataagaaaaatgaagattgatggttttaaatcaatacttaatgaaacgattgagttcggcaagttgaatgtatttataggaactaatggtgctgggaaaagtaacttattagaatctatagctatggtttcagcttcattagaaggtggagtagattacgatagattggcacggcgaggagctcgtctatctgcaccagagatattcagaagctcttttaaaaataagaaaagaaaagctgtttttaggatagaaatggagacggatgattattcttattcaatgggagttagtccgaaggagggatttgcatatcattctgagtcccttattcgacatagtgatagcagatgtgtagctggaagatcaaataatggagcaaaaattgatggaattcctctttcgtcaagaatagatcgagaagctagtattatatccttatacaatactgtccatgctgattttgacgatatgaagggcatcaggaactatgcaatttactcaccgtcgacaccaatattaagaggtgttagtaatgatggaagtaataaagctcctttgggcctttatggtgggcgtttagcagaggcgcttaaagaaataatttctaacaaggaaaaaagaactagacatatcaatgagttacttatatttttcaagcttatggattggttgcaaacaataaacactacttcggaaattgattctaagcttgcatctgaacatataagtcttggacgcagtgtactggagtatactgacaaatacatgaagactaactttaatagtctctatgcttatgatgtgagtgaaggtgctctttatatattatttactcttcttctgttaatacatgaagatgctcctgacataattgcaattgataatatagatagtgcgttaaaccctggtttgatcagaagcttgatggatcaagttacgggaataatgagaactaaacccaataagcaagtcttcttgaccacacataatccaatcactttggacggaatcgatttatttaatgacgagcatcgactttttgttgttgaaagggacaaagaggggctaacaaaagttagacgggtttctcctcctaagggtactacaaaagaacaatgggatgagaatttctatggtatgaaattatcggaaatatggttgtcaggagcgattggagggattccttatgggtttgcctga

SEQ ID NO: 434850 - DNA, 1383 bp, Serratia marcescens
atgcactgcactttgcatgatttaggagaggaggggattgtagtacgctctagctctcggtggatgatatttgataaccatatttataaccacaatggtgacggtattcttttgaaaaccggtagccgtgattctagagatggtaaagttatatataaccgcgttcatggcggtgccgatcgttatggacttaagggaactaatggcggtgggataaccttaaatgacgaggtaaagggttcttcaacttatttccataatttgttagtgcaaggaaatacagttgagaatacctcttacggtatttcttttacaaacatagaaaacctgaaggttgtggataataatattacggcagtgcaaagatttggcattgtcatagataatgcagtgtataataaccctcaaaagcattctagcaataagacgctgatttccggaaattctgttcaatatacccagcaggcgggaatctcatttagctcgcaaaatggtgttgatgtagagaacactattatctctcaaaactttgtatccgattgcgcattgtctgaaaaagccgatttcccaggcatttcagctaatcatgcaacgatatcaaacaatcgagtttctcgatgcagaacccttcttagcgcaagagattgcatcattgaaggtaattttttttctgatagtttgaagtcgaaaccaggcaagaattctgccgtgttgaaaatagggggggggacgactttctcaggaaatgtagtttctgaaaaaaacatggggcatattatgctgggtgatgtgtctggcagtatattttccggaaacagaatcagtactgcctcaggttttgctgttttttactcggaggtcaatcttacggacacggttcttttcaaggacaacataataagtaatgattctgctatcgttttcaagttaaacccaacttcattgagttacctgtcttgcgatcatgaatctttggggtataaaaccacgtactttggtctcccaaaaaaaggaaggtttaatcgaggtgatagagcgattaataaagatgtttatccgggtatgccttgtgaatgggtatgcactaaggaggggagtccaggggagtggcagattgataaattcctcgatcttgttgtaaagacagaagtatatagggtttcagtcgctgtaggttcttcagccgagctgacggtacgagatgatcggataaaggaggggtttcttgttgtctctgttactcccgcactcggtgtaccaggtgtgatttattcagctatcgttcagagggcaggtcaggctattatcaatattgtgaatgttgggaaggaaaccgcatctatcaatactgcctttattttgaccattaatagcggttactga

SEQ ID NO: 434851 - DNA, 1089 bp, Serratia marcescens
atggaacgaaattttattttggcggatgatatgaacagagacctacctcagcagaaagctagttccggggtccctgggcgattggagtatgtggattccatacgtggcttagctgctattggtgtcgttatagctcattttattgttcctttatatttgagttcttcggtcatatttcatgactttattgatattggaaagatcggcgtcgtgcttttttttatcattagtggatttattattccttttagttttaaagaaaagaatggcggtgtgaaagcctttctcatctcacgttttttccgactttatccggcctactgggtgtcgctttttatttttttagtcgtcagctattttgttggcacggcatatcctactcatcaaatattgtctaatatcactatgtttcaatctgcttttggggttagagatatcgttggtgtgtattggacattatttattgagttggttttttatgcgttatgtgtttttctttttgtgatggggatattgaataatctcaggacaaatttttatctttctttgataatgctcggttttgctttgttattaggtggggttcgctattttagtgggatttctcttcctgttgctttgccacttgctttatcgttaatgatgtttggcgggatgtggcgcgcatatattctccatggtgattattacgcgaagaagttatgcggaaggtatatttttgtttatgtattcatgattccagtgatatgtagttttgcatatggtggtttatttggtaatggtattcgctatatcataacttatctgttgagtgtcgtgctctttttcatttttacaacgaaagtaagattgcaaaatcgtttctttgtttttttggggacaataagttactctgtttatttgattcatccttcaattcttgtcttgttcgaacatttttccgatacgctcgattcaaattggaagctcttctgggccattatgggagtaattgtaacaatcccaatttctcatgtgatttataagttcgtagaagaacctgctgtcgcttttggtagaaagttgaaaaatcatatagttagtggctag

SEQ ID NO: 434852 - DNA, 2265 bp, Serratia marcescens
atgaataaatcaatacttatcataactcagtattactctatcggcgggttagagacctatatagacacccaggtaaaggatctggttgcccacggttatcaggtacatcttatgtctgccgctgtagcagactcgacattattgcccgaagaactgagctcataccatgaaaattccgatttgaatataggctcaatcagccagctcattcaggcgatcgacacgatacgtcaagtaatcaaagaaaaggatattgatctcgttcatgttcacccctttgattgcattttccccgcagtgattgctgcagattgtgagaaaattccctcgctattgacgctgcatggaccactgtcgctgcaacatttcaccaagaacatttataatcaaacgctggccatctactttctaaagacactgcaaacaatattctgcgtgtctcaagaaatagcagaccaactggcggaaattatcgaccatccgtcggtcatgatcgtccctaatctgatcgataataaccaaattcacaacacagagatagagtgccctgagaataaaagctggctgatcgccagcagattagatagtgacaaatccgatggtattataagcttcatcgatttcgcaagccgctgcgaatccataagcggcttagatatttatggggacggtgataatgcacacctaattagaacttatgtaagtgataacggttacaatgagtgggttcattttaaaggtatcgtgagcgatattcccgcagtgatgaaaaactatgctgggttcgcaggaatgggacgtggcgtacttgaggcgggttttagtcagcttcctatctgtctggtaggatatgacggcatcaaaggaatacttgatgacgaactctttaagcaagccgcctattgtaatttttcaggcaggaacttgagcaatgtcgatgaagaacaactcatagctgcattttccagcgctcgtcctctttctccatcactgctcaaccaatatcaaagtgaaggtcgatggagccaaattttcgaaggtttcacggctcctgataaagaaagatatgacaacagcgattctttaagcctttaccaaaatttagcagaaccccctgagttgcagcacgacgaaaattatttatacgctaacgaatttattaccgctattttcaaaacggtagcaaatcgtttattagaaagccgcgctataataaccatgcacgatgaatgtttaaccgagaacgtcggaatgaaaaataaactcgataaggaaatgggggattttcaaagtagtacgatcatccctccgagtgccgagcagtctgtgatggcaaaattaagtgaactagagcagcaaaatcaatcgttgcaacaagacgttaaatctctggttcaactattgacctctatggcggaacagcaaaaccagcatatgcaaactcaagcacaagccttgggggcaacctcactgcaaaagctcagatattggttccagctcaccagccagtctgtcaccagaccagacaaacgttatgaattagctaaaaccctttactggaagcttcccgagcctctaagagtgaagctacactcacaacgtcatcgctacgtgcaaaaatatttccagtatcgctgcaatgccgctgcaactgaaattacagcgtcggaaaacttgccgacatggctcttagaggtgaacaacgcggaaaaaatcatctttattccttgtagctttgaatttgacgaactggtcaaccaacgtccgattaatgcggcaaaatattttgctgaaaaagggtataaggttattttcatcgcctggcaatggacaccgcaggagtccctgtcgaaaggttgctctcaggtgtggcaaaacgtttaccaagtgcctttgtatgaattcgtcaactttaccaaacaatgcaaattgaatggtaaaacggcgctattcatcattactctgccagcacaggtatttataccagctatctacgatttcagagcgcaaggctgtcacattgcttacgatatcatggatgagtgggagtgcttcaatcaagtgggtcaagcaccttggtatctgcgagaagcggaagaaactatcatattacaaagtgattatgtatgtggcgttgctccatcactgcgcgataaattctcctcgctccgaagtgatattgaggttattggcaacggttactcagagaacgtattgggcgatacacgaaatatcgcgcagagcacctcaaataaagtggtttga

SEQ ID NO: 434853 - DNA, 360 bp, Serratia marcescens
atgaagcacattactctgattatcaccgtggtgctgtcgatgtttgtgatgcagggatgcaagcaaggtagggatctacaaccacaagattactttgaaggaaagcagctggacatcgccaacatcatctacgagggtgacaggcaaaagctggataaggttttaccggcggtaagcaaagaaacgttaaatcggccggccaaggcggagatgacgttattattctgggcgataaataacgctatctttgacaagaacacgccagagcgactcaagatcattacagatttggtcaaggcggggcagacccactgcagcctaggccggaagggagaagtagccccgctgaatttgttatga

SEQ ID NO: 434854 - DNA, 330 bp, Serratia marcescens; identical to SEQ ID NO: 235989

SEQ ID NO: 434855 - DNA, 366 bp, Serratia marcescens; identical to SEQ ID NO: 235990

SEQ ID NO: 434856 - DNA, 543 bp, Serratia marcescens
atgaataccgcattatccccggtgtcaacgcagcctgaaccctttccactggcgattatggccccgcatggttatttgctccctgcgacctccggattaaccccctatgcccaacgcaccattcgccgcgctatcaatctactggataaatatctgcgtcagtccggcatatcctttacctcaagtacggcagcccgtgactggcttcggttacagctggcaggacaagaacgggaagtgtttatggtgctctatctcgataaccagcactgtttactggagagcgaaacgctgtttgctggttcgattaaccatgtccaggtccatccccgtgaggtagtgaagtcagcgcttcgcttcaatgctgcagctgtcgtactggcgcataaccatccatccggtgacccggagcccagccaatgcgaccgcaacattacgggcaggcttaaagaagcgctggcactggttgatgtgaacacgctcgatcatctggtcatcggttcagagggcattgtgtcgttcgcagagcgaggctggatatga

SEQ ID NO: 434857 - DNA, 444 bp, Serratia marcescens
atgaatacacaaaatcatcagttcgcggagcataccgcaattactgcctcagtggtcccggacgagttacgtatcggcttctggccgcagcactttggctccatcccacaatggataacccttgaacctcgcattttcgcctggatggaccggctgtgtgtcgattatcacggcggtatctggcgcttttcgacgctcagtaatggaggtgcttttatggctccagagtcagagagcgatgagaagtgggcattgttcaacagcatgaacggcaatggcgcagagcttaccagtgaagctgcagggatggtcgcctgtctgatggcttacaaccaccatgcctgtcgcagcgagtgtgacgcgatgactgagcactattatcgcttacgcgactacgcgctaaaccatccggaatgcagcgccattatgcatctaatcgactga

SEQ ID NO: 434858 - DNA, 822 bp, Serratia marcescens
atgcgattagccagccgctttggccgtataaaccagatacgccgtgaccggcctctgacccacgaagagctgatgagccatgtccccagcgtgttcgggagtgacaagcatgagtctcgttcagaccgttacacctacatccctaccattaccattctcgaaagcctgcagcgtgaaggttttgagccgttctttgcctgccagacaaaggttcgcgaccagagcaagcgggagcacactaaacacatgcttcgcctgcgtcgtgccggtcaactgaccggacatcaggcgccggaaatcattctgcttaacagccatgacggctcatcaagctaccaaatgctgccgggactgtttcgtggcgtctgtactaatggtctggtctgcggtcagtcattcggcgaagtgcgggtaccacataaagggaatgtcgttgagaaggtgattgaaggggcttacgaagtgctcggtgtgtttgacagggtggaggagaagcgcgatgcaatgcagttactggcactgccagaaccagcccgtaacgccctggcgaatgccgcgctgaagtatcgctttggtgaagaccaccagccggtcacggtatcgcagttgctgaccccacgtcgccgggaggactacagcgatgacctgtggaccgtataccagcgcgtgcaggagaacctgatgaaaggtggattgtcagggcgaaccgctcaggggaaaagcagccgcacccgtgctgttaccggtattgatggcgatgtgaagctcaatcgtgctctttgggtgatggcagaaaacatgctcgaatttttcgggcgttaa

SEQ ID NO: 434859 - DNA, 231 bp, Serratia marcescens; identical to SEQ ID NO: 195727

SEQ ID NO: 434860 - DNA, 450 bp, Serratia marcescens
atgaagaagctgaaaggcgttatctcagttttcgctctgagcctttgtctgctgtcaccggctcaggccgaagaacagcgttacatcagtatccgcaacacagacatggtctgggtgccaggcaatgtctgcgtctggcagtttcgcctggacaacggcggaagtggtgaaggattcgggcctttgacactttccctgcgtctgaaagataaaggggggaacacgctggccatggggaaaatggcggtggctgcatttggcgacagcgatgccactcgctctcaggaagcctcgctggagaacgaatgcgtggaaaacgtcagctccgtcgaaatcatgaaggcaacggaagagcgtaatggttaccagattgacctgccactgtctgttttcgacccgcagtattaccaaccgctgcaggtcacggttgtcggaggtaaggcgtcttag

SEQ ID NO: 434861 - DNA, 453 bp, Serratia marcescens
atgaagaaattgtatccacctgtgcttgccgttctgacagttatcggtgcaatgagtgcctctggctgcgacagcaaggaagatgctggcgtgaaagcgatagcccggtttaaggacctgactccaccaccattcagcaaggttgtctcgcataaatccgatattgcccaggaatgggtaaaaaaggatgccttcggtacaccgcaatatacggtgatgaaaacccgccagtcaccggaaggctgtgagtcaggcaattattactacattgctgatatgcagcagaaaacggtgcagccactgatggcagccctgtgccttacggacaatatcactctgagcttcagaattgaaaccgacagctatacgggtgaaaaatcggtggtgtattcgcacgatggcaaggaaatgggaaaactctatctgccggagaatcaggagaaaaatccatga

SEQ ID NO: 434862 - DNA, 570 bp, Serratia marcescens
atgaagaaattactgaccacaactgcgctggccgtcagtctctgcgctagcgctgtctttccggcgtctgccgaaactgtcgtgggtaccgtcaaattctggcagtacatgcaggcggatggctggaaatcggccgatggcatggataacgacacgctaaacaatacgctctatcaggccagtgtgattggcaattatccctggaccaggcaattcctgctgcgtcagcgtggtggtggtgcttattttctcgccgataaaaaaacgcataccgtgcgcaagctgaatctgaaacctgccagcggttattactccgacttgacatcggtctatcagggggaagaccaggggaaagggtgttacttcactatcatcgacacccagtatcagttggagctagttaatgaacctcacagcaagcaggtgcttgctgcatttccggaaaactgtgtcaacaaacagcagcaggctgccctggcggcgaagcgttctgcctcagagcagaaattgcagcagtgggtagcccaacagagtctggctgagttgtgccgacgaactggcaactgctga

SEQ ID NO: 434863 - DNA, 705 bp, Serratia marcescens
atgtcccagactgagcgtcgccatgaacggctggcggttcggctgtctctcattatcagtcgccttgttgctggtgaaacactggatatggctcttcttgccacagaatttggcgtgtcagtccgcacccttcgccgggattttcgtgagcgactgatgtacctggacctggaatatcgcgatggcacctgtcgtctgctctcaggtagccatcaacgcgaactggctgtactgacttttgctcgtcagtcaggtgtggtggcgttgtttcctgacatggatagccacatgatcagctcactgctgagtggacctggtgagtctccgtgcctcatatgggcagaatcggagtcattgtcgccgcccaggccaggcatatttacacgccttgtcagggctatatcagagcatcgtcgcgtgacgctgctggctgaaggttgtcgttgctcagggcttgcaccctaccgcctcgtactctgtggcgggcattggtatctgactggagagcatcatcatcgcgtggcagtgtttccgctgaacgatatccatgcggttaccttgcacccgaaactgttcgtgcctgaccttcagattcgcaacgttctcgccgaaccagagttcctcagagctcttccccattttcacgtttttcactcactgctcgccagaaccggcgacggtcttttacctcataaggaatcatga

SEQ ID NO: 434864 - DNA, 876 bp, Serratia marcescens
atgcaaaaatataacggccttcaggcccttgagaagcctctggcttcactgccacaccagattcgaaacctcatccttgaacgtctgcgtagcattacgcagtacgaacctgtgataggtattatgggcaaaacaggggctggtaagtcgtcactctgtaatgctctctttcagggagaggtaacacctgtcagtaatgttgactcttgtacccgtgatgttctgcgctttcggctccgcaatggcgatcacagcctgatgattattgatttgccgggggtgggtgaaagcgatcaaagagataaagaatacgccgcactctatcgtcacatccttcccgaagtggatttggtactctgggttatcaaagccgatgatcgcgctctgtcggtggatgaacacttctatcgcaaggtgatgatggcgtatcagcgccgggtgctgtttgttgtaaatcaggctgacaaggccgagccctgccatcagtggagtgttgccgataacctaccttccccggctcagatatcgacaattaaggcgaagcaaaatgccgtacaaaagcagttcctgtcgcatcatccggtttgcgtggtgtcagcccgaaccgggtggggtatggaatccctggtagataccatgatgagtagcctgcctgaccgggccaccagcccattgacgacacaactgcatggcaggctctgcacagaaccagtaaaaaaacaggcccgcgagcgctttggtcatgcagtagatgaaatgattggcactgtggagtcttcatcttttttgccagcaccggtaagggcggtgattcggaccgtccgggaagccgtggtgtcagttgcccgtgctgtctgggactggattttcttctga

SEQ ID NO: 434865 - DNA, 786 bp, Serratia marcescens
atgcttgactctcttgaaaaactagcagaatcggatgaagatcctcgagatttattgaatgatttaattaccaaggctcgtcaaggagggaaagaaagtagcagtgcaaaaaggacacaacaaataataaatgatgcagtgacaattttcatgggtgatttcagaaacttaagaatcgagctaaaaccaacattacatatttcagttgaaaaaaatgatataaaaatcaatgtgcttcaactatctcagggtgaaaaatctttactcgcattggttcttgacatctgtagaagaatgataatacttaaccctttatcagaaaaccctttactttcttccgggatcattttgattgatgaaatagatctacaccttcatccggaatggcaaagaagtatattgcgtaagttaagcaatgttttcccaaactgtcaatttattgtatcaacacactcaccccaaattattagtgaggttacatacgataaaatattcatactcggcagagatgacaataataaattcaactgttcatcacctaagcagtcctatggtctgacatcaaaccaagttctcaatgaaataatgaaaactgggattactgatttagatcgctctccagaagtgcaggaaagaattgataaaatatttttgctaatagctaatggaaaatttgaagaagcgaaatcaaatatttctgaaatggaaatagagctcaatggagagatccctgaatttattggtgctaaactcgatatagaaattcaggggtgggatgaagaatga

SEQ ID NO: 434866 - DNA, 633 bp, Serratia marcescens
atgagaggtataaataaaggaaatgagcctcgttcacttaccatgtatcgtgcagcaggtggagtatacgacgggcatgattttaccccggtaaagcatgcgataaaattatcccttttgaaggagcaggggcatctttgcgcttactgcatgagtcgaattgcaatagataatatgaaagttgaacattgggcatgccaatccgacaacccagcacttcagcttgactattcaaatttgctaggttgttgcaagggagatgaaggggagaaaggggttaatcagacctgcgatagccgtaaagggaatagccccctgaaatttaaccctagttgcccacaggatagaattagcacaataatacagtacggtgggcaaggaaaaatatattcaactgatgcagttttttcgatacaactaaatacagtactcaaccttaacaaggcccggcatgtaggcaatagattgcaagttataaagtggttgcgttcaaaactttcatgcaaatcaggaaggcgtcgtactaaggctgaaattagacgattattagatgaatatatgattgttaatgctcaagggcacttgagagcttattgtggtcttgttgaaaattatctttcacataggctatga

SEQ ID NO: 434867 - DNA, 1146 bp, Serratia marcescens
ttgaaagattttaataatgaaactataaatcctcaagataacgaaaaagtacagatagagttagttagagtcattagctctaaattagatgagattaactcccaagagttatctttgcaaaaggttagcgatcataaaagttatataacacatcaaatatcatctacaaaagacaggctgaataatcttttggatgataaaaggaaatatgaagatctgaagaaaatcgcagcttcttctgtatttgaaaatacgcatttgaatagtaatgagtgcccaacatgcggggcgacatatagtgataatttattagatctttcatcacaagaaaatctaatgacctatgagagtagtttaagttttatcaaagatcagattaaagcctttgagtttgttttgcatgattgtgaaaaacagtatcaatataaaatttcggagcagagaaaaattgaggagcgtatcgcttctttaaaagttgatatcgataggttgagaaaaagagataattcatctgtagccttacaggaagaaatgttacgcaaaaaaataaacctagaaaattcaattgaaagtatagatgatgcgtatgtttctttggctgaaattaaacttgaattaaatgcaattcattcaaattatattaagctccttgcgaaaagaaaggcgttacctcaaagtgctctttccattaaagatcaagataaactgcaatcgttgagagttggtttggtcagtaggcttaagaagtataatttttctagttttgatgcggacttaattaacatttctgaagaaacttatctgccaacgagggagggttatgatattgggtttgatacttctgcaagtgatggtattcgtattatttggggatatttgattagcttgttttctgtcggtaaagagtattcaacaaaccatcctggggtagttgtcttcgatgaacctcggcagcaagaggcgaacaaggttagtttcgctgagttgcttagagatgcagctaagtcagcttcaaacggtggacaaataatctttgcaacttctgaagaggaaaatgttcttgttgaagcgttaagagatcatgactatagaatagtatcatttgataaaaatgatgggaaattactaaggaaattagatagctga

SEQ ID NO: 434868 - DNA, 210 bp, Serratia marcescens
atgaacgtcagtaccaacctactgcaaagcagcgatatgatctccattctttctctacggctggcgcagcgttatgccagtcaggggcagctggcgatcctgaatctgccgaagattgagcaaaaaggcagtgtgggcgtcttctggcgcaacagcgagccgccttttgccgcactgagccgctttttgcagctgcttacgcaggcttaa

SEQ ID NO: 434869 - DNA, 990 bp, Serratia marcescens
gtggcgtatggcctatggatgaacggaaaaacgctggcgtcggttaatagtatttcgctattagccaacgataagcaaccctggtttgatggtaatgggcaaaaggtttatgtgctaccggattacaaagctggtaaccctgtttttttggtcggccaaactgggtggatattcggtagtcaaacgaatcccccatcttacggtggggtaacgggatggagaactcagggaaatcaaatcattgttgatgcgacatttaagaatggagcctctttgtttattgagtatagcatttaccaggttcaacagccagatagcgcatctggaacttatggaataatgattcaaaactcggtggactggatgagcattaacagttcgtccagactgggttttgttgcatggaaaggggaagtgacgattaacggcaaatggacattgccagtcgttcaaaacgataacaccaaggttgtctttgttcggtgcgatgaccccggcgtttctatttatcacgctgtgcaatataacgaattaacggtatcgcgtgataatcggttaggtgagcctattttaaccacagctaatgtgaaagtggtcattatgaatagtggctattacccgccgacgccaatcggttatgggatggtgattaagaatgctgccggaaataatacattcacaagtgatacagaaccgttagtttgggatgggcgctctgttaatgtcggtaggaatccagaggatttagttgatacaggaataactagaccgatgatcccccttgcagttaatgcgtttatgcgtggtaactcagaaatgaatggcggagtttataactactacagctgtggttatcggtttaatggtagctctgtccaattctggcgcgctgaatcaggaacaaaaattcagacaaaatggaatacatcaaaccgatggtactcgtcacagatgccgctcatggttattaacgctgaccattatttctaa

SEQ ID NO: 434870 - DNA, 705 bp, Serratia marcescens
atgaaagaaaaaaccgtggcggccattatggcgcacgccagggccgagtatccgcgcgaatgctgtggcgtagtggcgcaaaaatcccgcgtggagcgctatttcccgtgccgtaacctggcggacaaccccaccgagcagtttcatctggcgccggaagactacgtggccgccgccgaatggggcaccatcaccctcattgtgcacagccacccagacgccaccacgcagccgagtgagctggacaaggcgcagtgcgacgcgatggagttgccctgggcgatagccagctggccggagggggatttacgtatcctcttgccgcgcggcgaactgccgttggtgggccgccagttcgtgctggggcataccgactgttgggggttggtcatgagctacttccggcaggagcacggcataacgctccaggattaccgcgttgattatccgtggtgggagcggggtgaaaaccgctatctggataactggcatgcctgcggctttcgcgagttcgatggcccgccgcagccgggggatatggcgatcatgcaggttgcggcgccggtggtcaaccacgccggcattttgctggcagatggtctgttgctgcaccatatgtacggtatgctcagccagcgggtgccttacggcgggtattggaaagagcgaacggtgaaggtgttgcggcacaaagccctgatgtga

SEQ ID NO: 434871 - DNA, 1335 bp, Serratia marcescens
atggggcccccaccccctgattatccattggatatggcaagtacagataatcgtggtcgtgagcgacagcaggctctagagcagtaccaactgctgcggcaggaaatcgagcaggcgcatctgagcagcctcgacaaaatcacccaggatgaacaaagcgcacaggccaagctggcgtcagcggccaaggcggccggtgccgggcaagccgatgtgcagcgtacgatggcgctgaacgccgagaagtaccagcggcagcggcaacagcttgctgaacaatacgcgccggggcaggcggcggtgcgtaaagagcaggaggtcggcaaggagctgaaggcgctatatgacgggcggctgctgaccgaacgcgagtaccagaccgccagccggatgcagcagcaagaaacggcgcgccaacggctgaaggccgaaaccgacgcgctcgctgcgccgcgcatgaacattgccggtgatgtggatcctgccgctcggcttaacaaccaattggtgcagcagcaggcgcaataccaggcctactaccagcaaggcttgctggataaacagcgctatgaacagctgatgcaggcggcgacgcaagaatcgtcggacgctcagtatcagcaggcgctgagtctgttcggcgggcagagccgcgtgcacaagatggcgctggggctggtggacatgacgcgggaacggacctccggcatgatgttcgatctgctgaccgggacgcaaaactttaagcaaagcatgctcggtttgatgacctccatgacgcagtccatcgttcagcaactgatcgatctggcgatgcaggcgctgttgaccagaacctttctctctacctttatgagcataggcggcggtttgctgggcggcgctgcaagcgccggcgcgggcgcggccggctcaggcgcgatgggcatgccgaccggttggcaaggctatgtccccaacgccaagggcggcgtatatgcctcgccttcgctgagcgcattcagcggtgagatcgtcagcaatcccacgttattcgcgttcgccagaggcgccggtttgatgggcgaagccgggccggaggccatcatgccgctcaagcgcggcgcggacggttcgctcggcgtgcgggcgatcggcggcggccagcagtctgcggcggcgccgaatgtctacatcaccatcgagaacggcggcaacgtcagttcgcaggccgatccgggatggggcgagttcggtaaacggatggggaatatcgccgcgcaggaaagccaaaaggtgatcaaccgcaacctgatgccgggccagccgatttggaaagcaatcaaggggatgtaa

SEQ ID NO: 434872 - DNA, 297 bp, Serratia marcescens
atgaaaaacgagcaaaaaatgcacctgcaggagatgcggcgagagcgcctgatcatcctgatcgataacctcggcatcgggggccaaaagcgccttgccgaggcgctcggcattgccgcagactatgtctctcgcctgctctacccgccgggcaagaaaggaaaaaaaggcatcagtggcgatatggcgcgaaggattgaacagtacttcgccgtgcaaatcggctggctggacggcctggagcaaaccggacgccgctgctggcgtggacattgccgttgtctcacgaacagctga

SEQ ID NO: 434873 - DNA, 2424 bp, Serratia marcescens
ttgcccgccatcgaagacctgcaattctttaacgggctgggcggattctccagcgacggacgcgaatatgtcattgcgatgaacgagaacaagatcactccggcaccctggtcaaacgttatcgccaacccgctgtttggcacggttatctcagaaagcggtcaggcctatagctggtacgaaaacgctcacgagtaccggctgacgccgtgggataacgatcccatcagcgatcgcggtggcgaagcgttttatctgcgcgacgaggaaagcggccacgtctggtcccccacgccgctgccggcccgcggtcgcggccactatttgacgcgccacggctttggctacagcgtgttcgagcaccgcgaaggcggcatcgacagccagctgacgatgctggtggcgcaggacgcgccggtgaagctgtttttgctgacgctgaccaacggttcaggccgcacacgcaaactctccgccaccggctacatggaattcatcctcggcgatttgcgcagtaaaaccgccatgcacgtcgtgacacaggccgcgacgacgacgggcggctgcggcattctggccaccaaccattacggcggcaacggttccgagcgcaccgcctttttcggcgttaccggcgcccactgttccatcagcggcgatcggcgtgaattcctcggccgcaacggcacgctggccaatccggcggtgctgaaactgcgccggctttccggcagggtcggcgccgggctggatccgtgcggcgcggtacagtcggcgctcagcctgatcgacggcgatcagcgcagcctggtgttcgtcctgggactgggacaaaacgccgacgaggccgacatgctgctgcagcgctacctggatgaagatcgcctgcaagacgaacggcaacaggtcgccgcctattgggacggcatcctgaataaggtgcagatcggcacgccgcatccggcggtcgatctgctggctaacggctggctgctgtaccaaactctctcctgccgcattcaggcacgcagcggctactaccaatccggcggcgcctttggcttccgcgatcagctgcaggacacgctggcactgacccacgccgcgccgcaacggctgcgcgaacagatcctgctgtgcgcctcacgccagtttatcgagggcgatgtgcagcactggtggcatccgccgcagggcaacggcgtgcgcacccgctgttccgacgactatctgtggctgccgctggcgatgtgtcattatttggacgccaccggcgacgagagcattttgaccgaacaggtgggctatctggaggcgcgccagctggcgcccggcgaagagtccgcctatgaacagccggcgcagagcgcagtgcgggaaagcctgtaccagcacggcgcgcgcgcgctgaaacacggcctgaccttcggcgagcacgggttgccgctgatgggggccggcgactggaacgacggcatgaacagggtcgggctggaaggccgcggcgaaagcgtctggctcggcttcttcctgttttccatcctgcagcgctacggcgatctggcggaacgccaccacgatgacgacctggccgcacagtgccgccgccaggccgccgccctgaaggacaacctgcacaaccatgcctgggatggcgaatggtaccgccgcggctatttcgacaacggcgaaccgctcggctcacacctggccgcggagtgccgcatcgacgccattgcgcaaagctggtcggtgctgtccggcgccggcgatccgcagcgcagtcggcaggcgatgctgtcattggatacacatctggtcgacccgcaggccaggctgatcagactgttgacgccgccgttcgacggcaacggccccgatcccggctatatccgcggctatctgcccggcgtgcgggaaaacggcggccaatacacccacggcgcggtatgggcggtgatggccttcgccgaaatgggtgacatcgaacgcgcctggcagctgatggcgctgatcaaccccatcaaccacagcctggacagcgccgccgccgaacgttacaaagtcgaaccttacgtggcgaccgctgatgtctacgcagttgagccgcatatcggccgaggtggctggagttggtataccggctcggcaggctggatgtatcgcttgattctcgagtcactgctgggcctgaaacgccgcggcgatcggctgacgatcgatacgcgtctgccggccgactggccgcaattcacgatcaactaccgcgaaggcgccagcgaatatcagctggtcgtgcgccagggagaaggcgaaacgcagatcatcgttgacggcatccctcagtcggagccgacgatcgcgctgcgggacgacggcaggatccatcaggtggaagtgattttggggaaagaagatacgtag

SEQ ID NO: 434874 - DNA, 690 bp, Serratia marcescens
atgctctgcgggcagcagcgggcgatcgctggtggcggtttgctgcggctggggaatggccaggccgccggtttgcaacagattcagcacctgctgcagctgtggtgggctcagctggctcagtaccgtgtggccgaactgctggcgaataaagtcgctgaccgcctggcgattgttgccctgcggcagcaattcggccagctgttgcaacagctggcgcccggcatggttttgctgcgcctgcgtcaggcgcgtttgcagcagctgttccgccggttgaaaatgacgcgccagcagttcaccgccgttatcggcgccgagatcgtgacgcagagtcgcccagatctccgccggctttgccgggctgagcgtcatgattttcacgatcagcttttccagcgtcgtgcgctgcgccggagagagggggtgatcgtcagtggccgccgttttgcccggggagggagggcgttcgccggcgattggggtgcccggcccactcaaaggttgcatatcaccagtccttcgctgtgtatccccgcagaatgcctggaggagagaatcatcatcgtacccggcgaaaagcacaggcttacccactatgatacctgtaaatcgccgccatcaataccgccgctcagacatttctttaccgacaaaacgttgctaatcgcgcccgcgccgctaagatag

SEQ ID NO: 434875 - DNA, 306 bp, Serratia marcescens
  misc_feature (244)..(253): n is a, c, g, or t
atgaattcagttcacgacatcctccacgttgatgggattagcctgaccgcccacggcggggcattgatactcgacaacatccatttcgcgctgcgcgccggtgagaagctggcggtgatcggccctaacggcagcggcaagtccagcctgttgcgtgccctgatcggtgaaacgcggccggacagcggcggcatttactggcgagggcgcgccttgtccgcgtggccggcggcggagcgcgccnnnnnnnnnnagcatcgcctttctggcacaaaacgattcgccggatttgcggctgtcggttga

SEQ ID NO: 434876 - DNA, 852 bp, Serratia marcescens
atgaaccagaacaaggttgttttactgatgttagctatcgccatgagcggatgcgccgagcgccccaccgccgtctcccccgcaacgccgccgaccgacgtcaccgtttcgccgccggctgtgcaaccgcagatggacgccagcacccgcagcaaactgcatgagatcctcgcgctgcgcgccggttggcccgccacgcagccgcatggccgcaccgtcgatttgatttcgcgcgagtttctcggcacgccctatctcgccaaccgcctgatcggttcgcagagcacgcccgagcagctggtgatcgacttccgcgggctggattgcttcacctacatcgattatgtggaagcgctcagcaccgcccgcagcgagggcgagttcgtacagcgtctggtagacattcgctacgtcgacggcaaaatcgccttcccgcagcgcaaacacttcttcaccgattgggcgcagcggccgaaaaaagtggctgaagacatcaccgcgcggctcagcccgcacgccgtcaccctcgtgaaaaccctcaaccgcaaagcggatggcggcagctacctgcccggcttgcccgacgtacaacgcagcgtgacctatatccccagcgaccgcatcgacgacaaggtgctggcccagctgcgcaccggcgattacatcggcatttacaccaacctggacgggctggacgtgacccacaccggcatcttcgtgatgaccgacaacggcccggtgctgcgcaacgcctcatcgcgcaaggccaacatgcgggtggtcgattcgccctttatggattacgtgatggccacgccgggcatcgtggtgctgcgttcgctcagccgataa

SEQ ID NO: 434877 - DNA, 1101 bp, Serratia marcescens
atgaaaaaacacatcttgctgattatcgacggcctgccaggcggcggcgcggaaaacgtcactctgacgctggccaaaggctttcagcagcggggctgcgcggtcacgttgctgtcactcagtgctcgcctcgactatgagatccctacaggggtgaactatatcgtcgatcatgacaccaacaacgggccgtttcgcaaaacccatgaactgtcgcgccgcgccgcctcgatggatcgtttgctgcccaacttattcgccgagttgggcaaacctgcactggtgatttcccatctgcacaaaaccgaccgtattgtcgttcgctcgcgcgtgctgaaagagtgcaatgtttggtactgcatccacggcatgttttcccgcacttatcttgggaataaaacagggttcagtcgctggttaaaacagaaaaaagtgcagaaggtctacagaaatcgcaaggtcatcaccgtgtccgaagccatcggcgccgacctgatcgagcagaccggcattcgccctgaaaagctcattacaatttacaatccttttaatatcaaagaaatagaaaatcgcgccgcacagaaaaacctcttcgccgacgaagattacatcctgcacgtcggccgttttcatcaggtaaaacgccacgatcggctgctggcggcgtttgcactggctgatctgcccgcaaagctggtgttgataggccagggagaggccgccgttacacacgccattcaagaaaaaattacggcccttaacttgcaggaaaaagtcgtgctcacggggttccacgccaatccgttgccggcgatcaaaggcgccaaaatggtcgcgctcagctctgacagcgaaggtttgccaaccgtcttgatcgaagcgctgatttgccatacgccgatcgtcagcaccgcctgtccgggcggcgtggccgaaatcatgtcgggagcattgcggccttatctggcggaaatgaacgaacaggcgttggcggaaaaaatgcgtctggcatggcaaacgccgccgcaaatcacagcagagatgtacagtaaattcgattacgaaaagattctcgataaatatttatcgttggcggagtga

SEQ ID NO: 434878 - DNA, 1092 bp, Serratia marcescens
atgagagaaaagaaaaaacttaagattaggctgtgcgatttctttctcagcctgtttttccgcccggcgaaaagcacgccggagaaaaaaaatgccctggcctcgatgacgttcgacagcatcctggtctattccactacggcgttgggcgactatatgttcaattcgccggcgctgcgcgccattcgcctgcgctatccgcaggcgtgcattacgctggtcgcacatcccaaatatcaaaacttgctgacacagcacgacttctacgatggcgtgttgttctggaacaacaaaatcagcgatatgccggcgttggtaaagcaggcgaaacgctataagccgcaactggccattttattgcattctcatctgccttatgacatcaccagtgcggccatggccggctgccaatatattgtgcgcgacaattacgccaagccggtgggtaaaatggcccgttggttgacttatgggctcgatgattacgacgaacacgtcattgcgcgcaaaatgaagctggtggcggcattaggctgtgcgaccgacaatgtcgatatggcgttgccatgccgttacgaagtgcagcctaagccggaaggaacggtgcgtgtgggtttccaacttggcgcttcgacgctgatacgttgttggccgccggaatattacgctgctcttgcacagcgtttattggctgagaacgaacgcattgaaatcgtgttgattggctcgccgcaggaaacgcctttggctgaggcattgatgaaacatattgatgcggcgtttgcggacaaaatcgtcagtttcgtggggaaaaccacgttgccgcagttattgggggtgatcgcctctatggatctgctggtgacaggcgataccggccctttccatctggctatctcgctgcatgtgccgaccctgagcctgttcgtgacagaagatccacgccgcagcggtccctatcaggaccgcgagctgcatcagaatatttatctgccgttgagcgatccgcgtgtcaccgacaaagaagcgcctctgcgggcgatcgctgtcgatgatgtttacccgcgcgttatggcgatgcttgcggcataa

SEQ ID NO: 434879 - DNA, 1017 bp, Serratia marcescens
atggctattttagtgactggcggcgccgggtatatcggctcgcataccgtgctggcgttgctggagcgaaatgaagacgtcgtggtgttagataacttggcgaatgcctccgcggcttcgctgcagcgcgtagcggagctcgcgggcaaagcggccattttctaccctgacgatgttcaagaccgaacggcgttaaagcgcatcttcgccgaacatgacatctcttccgtcatccatttcgccggcttgaaatcggtcggggaatccacctccaaaccgctggagtactatcagaataacctcggcggcacgttgatcttgctggatgaaatgcgccaggccggcgtgcgccagtttattttcagctcttccgccacggtctacggcacgccggaacaggttccactgcgtgaaacgtcgcgcatcggcggcaccaccaacccttacggcacgtccaaactaatggtggagcagatcctgcaggatttagcaaaagcggaaccggatttcgcgatcaccatcctgcgctacttcaaccccgtcggcgcacatccttcaggccggatcggtgaagaccccaacggcatccccaacaatctgatgccttacatgtctcaggtagcaattggcaagctggatgcattagcggtcttcggcgatgactaccctacgcaggacggcaccggcgtgcgcgactatatccacgtgatggatctggcggaaggccacctgcaggcactggaacacatccgcgattctcagggcgtggcggtttacaacctgggcaccggcgtcggttactccgtgctgcaaatgctgcacgcctttgaacgggcctgcggccataaaatcacctaccacattgcaccgcgccgccctggcgatattgccgaatgctggtcggacgcttcgttagccgcagaaaaactgggctggaaggctcgtcgtggattggaagacatgatgcaggacgcctggcgttggcaacagagtaacccacgcggatacgatgactga

SEQ ID NO: 434880 - DNA, 1245 bp, Serratia marcescens
atgcttcgtcaaataaaaaccatcaatgccatgacgcttgcattcgttttagccgccatcgcgatctcaacgaccctgactgacaccacgcttaaccgcaacgcgttttatctgtccgcgctcattgccgtcattgccctgcttgtacgccgcccgcacagcattccgcgtgaagcggcgatggttgcgcttggcgtgtttatcgtcgggctgagccaactcatctggcattggcgttttccggccgtcagcatgatggaggccgatgaagactacctcaccacctcgctacggctgatcgcgggcgcagctctgatattggcgctgggcacgctgcgcgacagctggggccgaaaaacgttgcttacggttaaggtgttgatcgtcgtcggcttcttatacacctcatacatggggctatattactacctgaaaaccccggacgtacgtttgcaaatcaagacggtttccaccatgaccgcctacatttacgttttgcagtcactgctgacgatatatgtcattgcatcgttgaacctgcgccgtaaatcattggccattgcggtggtcgttttgatcactatcgggctaattttattgacggaaacgcgctcttcgctgctgctttacccgatcattctgttgatgatgtttggccgcaggcaccatttttcactccgtacaatggcgatcgcctgtgtcattacgctgctcgccgccgctatcaccagccatttcttcagcaaagccactgaacggctgattggcaccgcagccgaactaggcaactatcaaaaaggcgacggcaactcgtcactgggctcgcgcatcagcatgtggaaagcgggcgtcgacgcgatcctgcaccaccctaacggccaaagcacggccactcgattggcctcgacgaccgattacatcaaccggcacgagggcggtaaccccgaagcgttgcgcaacttggtgttccacctgcataacgatgtgattgatgcgagctctctgcaaggtctcatcggtctgacggcggtcgtcctgttttacctgctgacgttttacgccagccgccttggcaccacggcgaggcccatcttgctgctggtgctgctgcctacggtcgtgattggcatggtagataccttgttcatcgatcaccgttatgtgaccaacttgacgttgctgctggccatttacctgtgtctgtcgccttcagcagccgccaacgtaggcccaaacgaaaaataa

SEQ ID NO: 434881 - DNA, 1164 bp, Serratia marcescens
atgaaacggctgcacgtcatcaatctggaaaaaatgggcggggctgagaagatatttctgcaattcctggccaacaccacctcaggcagcgacagcatcctgtgcatcagcaacaagatcggcacagagatcgcgcgtgaattgggcgatacgccgctcacgttcgccaaccggatcgtcagcggcagctcgctgaaataccctgtttttatgcgaaaagcggcgcttttgcgaaaaatcgaacggcagcaaaccgacctggtgatcttctgggatttcgtccccaatctggcacgtaaaatccgcggcatccaaaccctttattacgatcatggctgctcatggcgctatccgttaactcaaaaaacactcggcttctttgaaaaagtggatggctgcatcgccgtcagccacgcctcgaaacgcgtgatggaagagcgattcaagctcacctgcccgatcgagattgtcagcaactgcgtgccacctcccaccgccgtaatgcccaaaacgcaacagcccggcccgcgaatatgcctaggtaccgcctcccgtctggtttctctcaaagggatcggcgtatctatcctgacactgcaggcgttgctgaaaatgaacattgacgcagaactccacatcgccggcaaagggcccgatgaggacgttctgcgagcgctggtagaaaagttaggcctgcaacaacaggtgcgcttcctcggtttccgccaggacctgacggaatttttcgcgaaaatcgatttctatatcagctcgccagtcaccgaaccttttggcttatcttgcatggaggctctattccacggcgtcccggtgatattcccgctgatcgatggtcaaccggaagtgatccccgacggtaagtgcggcatcggcatcgcccccacactgactttcgcgcagtatcagtcactgaccggcatcgacatcgacttcccgcatcaggtgttcaacgcagtgacccaacgcatgatggatccgctggtgctgtcaccggaggcgtgtgcgcgtcaaattgccgccatgttgatgcaaaaccagtacctgaccatgagcaacaacgcgctgcaatatgcccgcgatcattttgattacgctcggttcgtccaggcactggagcggggcttcgcatgcttcgtcaaataa

SEQ ID NO: 434882 - DNA, 468 bp, Serratia marcescens
  misc_feature (407)..(416): n is a, c, g, or t
atgcaggtgttaatcgtaaaaacctcctcaatgggggacgtactgcatacgctgcccgccctgaccgacgcgctgcaggccattcccgatatccgcttcgactgggtggtagaagaaggtttcagccaaatcccgacctggcacccggcggtggatcgcgtgatcccggtggccattcgccgctggcgcaagaactggttcggcaacgacacccggcaacagcgctgcgacttcaagcgcgcgctgcaagaacgccgttatgacgtagtgatcgacgcgcagggcctgatcaaaagcgccgcgctgatcacgcgcatcgccaaaggcgacaaacatggcctggactgcaagagcgcgcgcgtgcgttccaccgcgtgctgctgcttgtctatctcatggctgtctcnnnnnnnnnngcaagagcgcgcgcgagccgttcgccagctggttctacaacgtgcgccatga

SEQ ID NO: 434883 - DNA, 597 bp, Serratia marcescens
ttgcgccgccttgaggcccgccatcgcggcgggagagaggggaaggcgtcgcggataggcttcggccgcgtagcgcaggcgttttatcagcagccgcaggcggtggcgatcgtagccggtatcggccaatgcccggcgcaattgctgttgctggcgctgcaggcgtcggttcaggcggtgtttggcgccgcgccgcgcggtgcggcggaagcggcgcggccaggcgtgcaacagcgagggaaagtcgatgatctgcggatgggcgagcagttgacggtagcgggcctgaagatcgctctggcgcacgttggcctgccaatccaggcgatggcgcgccagttcggcgatcagtacctcgagatcgcgcagcggcgtcgtgagcctgcccaactcggcggcggcccgatcgagccgcgttgcgccggggcgtcttgcgcctgttgcagccgcaacagcgcctcgttcagcgccggctcaagccggcgaagctgggtgacaatatctgcgacgaaagccatgtgccgtgctctggagaggatgaccctttcagtatggcgcgtcgtcgcggattacgccttgatcagcgcgccggcatag

SEQ ID NO: 434884 - DNA, 351 bp, Serratia marcescens
  misc_feature (260)..(269): n is a, c, g, or t
atgccatacgccatgctgagaaaaaccctcgtcatcgcctgcctgctgcaggcggccgccagcgcctgggccgatccgccgcccaccgaagcgacgcccgccgcaccttacctgctggccggggcgccgacgttcgatctgacggtggtcaaattccgcgaaaaatacaaccgcgacaacccgaagctgccgattggcgaattccgcgccattcccgccgccattatcggttcgctgacgagaaagctgtgcggcgcacnnnnnnnnnnattcgccgctgctgacgcgcgccgtcagcaaactcaacgaaaacctgtacgcctccaccgcgctggagaaaggcaccggtaa

SEQ ID NO: 434885 - DNA, 420 bp, Serratia marcescens
atgacgttacaacagtggtgtttttcttttaagggccgcatcgggcggcgcgacttctggatttggatggggctgtggctggcgctgatggcggcggcgtttacgctggccaattatcagctgatcgccatccaatccatcgccttctttatcgtggcgttgctgtggccgacggcggcggtgctggtcaagcgcctgcacgatcgcaacaaggccggctggtgggcgctgctgctgatcctggcatggatgctggcggcggggaactggcagatgctggcgccgatctggcaatggggcgtcgggcgtttcattccgacgctgattatcgtgatgatgatgatcgatctgggcgccttcgtcggcacgccgggggataaccggttcggcccggaagccgaaccggtgaagttccgctga

SEQ ID NO: 434886 - DNA, 747 bp, Serratia marcescens
atggctgaatgggtaaacggcaaggttacgcaggtaaaacaatggaccgacgggctgttcagcctggtggtcaatgcccctatcgatcctttcaccgccgggcaattcgccaagctggcgctggagatcgacggcgaacgggtgcagcgcgcctactcctacgtcaatgcccccgacgacgccaatctggagttctatctggtcaccgtgccggaaggcaaactgagcccgcgcctcaatcaactgcagccgggctcggacgtgatggtaaccaaagaagccgccggcttcttcgtgctggacgaggtgcccgactgcgacacgctgtggatgctggcgaccggcaccgccatcggcccctatttatcgattctgcagcagggcatcgggctggagcgcttcaacaacctggtgctggtgcacgccgcgcgctttgcgcgtgacctgagctacctgccgctgatgcagcaactgcagcagcgctacaacggcaagctgcgcatccagaccgtcgtcagccgcgaagaggcgcccggttcattgaccggccgcataccggcgctgatcgaggacggtcggctggaagcggcgatcggcttgaccatcgacgccgaaaccagcctcgtgatgctgtgcggcaacccacaaatggtgcgggacacccagcaaacgctgaaagaccaccgccagatgcgcaagcacctgcgccgcaagccgggccatatcaccagcgaacactactggtaa

SEQ ID NO: 434887 - DNA, 636 bp, Serratia marcescens
gtgcacctgtcgcgcttcgccgaagacctgatcttcttcaacagcggtgaagcggcatttgtcgagctgtccgaccgcgtgacctccggctcttcgctgatgccgcagaagaaaaacccggacgcgctggagctgatccgcggcaagtgcggccgcgtgcagggcgcgctgaccggcatgatgatgacgctgaaaggcctgccgctggcgtacaacaaagacatgcaggaagataaagaagggctgttcgacgcgctcgacacctggatggactgcctgcagatggcggcgctggtgctggacggcatccaggtgaaacgcccgcgctgccaggaagcggcggagcagggctatgccaatgccaccgaactggcggattacctggtcgccaagggcgtgccgttccgcgaagcgcaccatatcgtcggtgaggcggtggtagaagcgattcgccagggcaaaccgctggaagcgttgccgctgacggacttgcagcagttcagcgcgacgatcggcgacgatgtttacccgatcctggccttgcaatcctgcctggacaagcgtgcggccaaaggcggcgtcgcgccgcagcaggtggccgcggcaatcgccgcagcgaaacagcgtttggcttga

SEQ ID NO: 434888 - DNA, 651 bp, Serratia marcescens
  misc_feature (546)..(555): n is a, c, g, or t
atggaacgactccgtcgacaacataatgcccagtggtatcacgaaacccaaagcagcgtacggggcgatgcgccgctggagccgcaggcggccaccctgcgcgatcgttttctgctggggctgggcgccttcgccgacgaagcgctaaatgctgcgctcagcgcccgcgccggggtattcaacgcctcgctggccggttaccacgcgctgtttcccgaccaggtgtcgctgtcacgatacgtgacattgtcaccctacgatcgcctcagcaccgcgttgaccgtcgctcaggtgacgggcgtgcaatcgctttgtagccactacgccgcccgcctcgccccgctgcacagcccggacgcctcccgggaaagcaatatccgccttgcccagatcacccaatatgcccgccagctcgccagccagcccacgctgatttgccgcagggcgctgcaacagctcggcgacgtcgggctgagcccggcggatatcgtaaccttctctcagacgatcggttttgtcagctatcaggcgcgcgtagtggcgggnnnnnnnnnngcgtcgcggcgttggccggccgcccggcggtggtggtgcccggcttcccgaacgtcgaagacgccgatggcgtcgctttcagcgccgacgagttga

SEQ ID NO: 434889 - DNA, 603 bp, Serratia marcescens
  misc_feature (577)..(586): n is a, c, g, or t
atgcgcggccagaaatacgtgctgcaggtagcgccggaggattgcaccggctgtaacctgtgcgtcgaggtctgcccggcgaaagatcgccagaacccggagatcaaggccatcaacatggcttcgcgcctcgataatctgacggcggagaaagacaactacgacttcttcctgcagctgccggaaatcgatccggcgcagctggagcgcatcgacattcgcacctcgcagctgatcacgccgctgttcgagtactccggcgcctgctccggctgcggcgaaacgccgtacatcaagctgttgacccagctctatggcgaccgcttgctgatcgccaacgccaccggctgctcgtcgatctacggcggtaacctgccgaccacgccttacaccaccaacgccgaagggcgcggcccggcgtgggccaactcgctgttcgaagacaacgccgaattcggcctgggcttccgtttaacggtcgatcaacatcgcgcgcgagtgctgcgcctgctgaatgctctggcgccgcagctgccggagcggttggtcaatgccctgcagatgggcgacgtggcgnnnnnnnnnncatctgcagggcattga

SEQ ID NO: 434890 - DNA, 375 bp, Serratia marcescens
atgtctggcaaaataacgtctgcggtggtgatcctgttggcggtaggggccgtggtcggctctggtgcctggctggcagcgcggcactaccagccgacgattgaccgcctcaatgaggcgctgacgcagtgtaaggatactggccggcaacaggcagcgacgatcgatagccagaatgcaggcataactgatctgcagcgtaaacaggaagagatggaagccaaggccaaggcagcgcagggaaaagcccgcagggaggcgcagggcgactatgagagggcaaacgaggttatggcagagcgaaccactggcgaggtgtgcgcggcggcgtctgctgcgtttgacgcagagctgcgccgggagcgtgtccaatga

SEQ ID NO: 434891 - DNA, 777 bp, Serratia marcescens
atggctatcggattcattgataaatattcagatttaagcgggaagacggatttcattatcccccctgtgagccgggggatcctcggttggggttatcttggcggcagcctgcagcgctcattgcagaatctggcgcgcggtaacccaggattgaacgtagtcgggacgccgacaatccacgataactatgcgtcgtttgttggctcaaatcattatttccagacggcgatcttccagcgcatgcagcacacaattttctgtgtcgcgcgttcgctcgatacctttgttgataatagtcacaagccgatgattttcagctcgttcaacggacagaacacatctgcgccggcttacgcaacgcaggggctttcgctgtacgtcgagaactctggctatccgccaccggtcgggaagctgacgggtatcgttggggcatatgacccgaacgctcctggtccagccacggcgacaacagtgcagatcgagcgtgatatgtcgcagttctcgatcatgtcgctgacgcaatcggcatcaacgatccaggttcgagattggacgcttggttataccgcgatcaacccaattccagccggccgcgttattgcgccatctaaccgagcatttgccattggcagcccggccaatccgatttcatataccggttctgttgatatcgctggctgggcgattttcgagggcgtactgaacgagctggaacataaccttgttgtggctaagttccgtagctatttcgccaagcgtgggatggcagtttaa

SEQ ID NO: 434892 - DNA, 2436 bp, Serratia marcescens
atgtcggtaccgaaccagaccccctataacatttacaccgccaatgggatcaccacggtgtttccgtacgagtttatgctgctgaccgccagcgatttggatgtgtcgattaatggcgcctctatcacatcagggtataccgtgcagggggtaggtaaccctggcggcggtgaagttgtctttgtaacccctccagcagccggcgctacggttatgaacctgcgcaaactccctatcatgcgaaccactgactaccaggacaatggcgacctgcgcgcggtaacgctcgataatgattttgaccgtctctggatggcgatgcagcagatttttctgagcgatagcttatcgttaaagcgcccattattcggcggcgattacaatgcgtttgggctgggtatcgttggtctgcgcgaccctatctatccgcaagatgcggcaaataagcgttgggttgaaagcacttacgcagttccgattgaggaagctaaagaggcggccaggcaagcaaaagccgcgcgcgacgaggcgcgactgatcgcagataaattcggtgatgtggaccatgcgatttcagtcgcgcaaggtgctgcggattcagcgaagcgctcagaggccgaaagctcggctaacgctgatcgtgctgaggctgccgccagctccgcgatgcttgaagcggaaaccttcgactccgtcgctgccggcttggcggccaccacgtccgggcagtatttccgcgtatggcaggcctcaagtaccggtatttcgttcattttctacaagaacaacgggggcgcagcacaagagcttactgactacccgagcgggtctgctattgacttcatctcatttggtcaggccggggatggtattgcgattactgacccacaagggcgcccatcattttcaaccgtcgacggtaatatctttgccggcaatctcgatgttgttcagctgcctggcgatggcgttttctggattgacccagatggctacgccatagagctgcagcttaaaaatgacgatcaagagtcggctgcctggctcacagagcagactgagaaaagcgaggtgttggcgcgccagagtcgcgaagcagtggcctcccgcggtaataacgcgattcgcccgctggcgcagattatccacgatttattttatggacaatcgttccagaatggtacggaaggaacgccgcgtctgagttccactcagccgctggacaatctgatgtttggtgattcgattatgccatcgtcgccaacggctgcggtatttactccccgcaatggtgcggcgttaaaaccattgatcgctacatgctgcgacgccaatggcaacgcactgactgattcgcaagtggctgctctgccgccaggaacgatcgcgtatggcgagtcacccgttgaagggtgcctaaactcatggcgccgccgtcacctcgatcgcctcggtctgtcatctgaacctaaccgcctctttgttggctcagcaacgggcgttggcggccggacgattgcgcagctcagtaaaggcgcaagccctgaattgtacaaccgtttctacaccgcaatgacgggtgtaaaagccatcgctgacgcttccgggaagtcatatcaagtcggctgcatcgttcacatgcagggcgagaacgattaccccagcgccacaaaggagtatttcaaaacagccacgctgcagcttcgcaatgacatgtacgcagatgtcgcggcagtgacaggacaggctcgtatgcctgcattcatcacgtatcaaacaggcgcctcattcacgcgggacgagcgggatatggccgttggtatggcgcagatagagcttgccgaagagaacgaaaactggttcctggcaggccctacttatccctacaccgacaaaaacggacacctggattcaaacggctatcgctggtttgctgaaaagcttggcgagatttcgttcagggtgtgcgagcttggccatgactggaagccgctgcagccaatcgctgccgtttgccgtggcgttgatgttctgttgtcgatgcatacaccggcgccgccgttgcggtttgccgcgccttatgttgtcaacgcggcgcaagaatacgctgacaaaggcttcactgctatcgacagattcaatggctctgacacgccgattagcattttgtctgtagaaatccgtgggctttcaacaattcacatcacgctgacgcgcgagccgctcggcacgctattgattcgttacgcagacaaggccaatcacaacggcaacggcatggtttgcgattcaagcaatggcctcagtgaaagcaaatacgtctatctcccgggcagcggcatgtacccgtcggcgaacatccccgaactcgttaacaaatactatgacctccgaaactggagcgttgcatatcagataaccgctgaggaggtttaa

SEQ ID NO: 434893 - DNA, 1989 bp, Serratia marcescens
atgcgcgccaacctgataaagaccaacttcaccgccggagaaatttccccgcgcctgatggggcgtgttgatatagcgcggtatgccaatggagccaagcgcatagaaaatgcggtgtgtgtggtgcaaggcggtgttatccgcagcccgggcacgcgctttgccgctgccgctaaatttggcgaccagcgcgccaggctgatcccctatatttttaaccgcgagcaggcttacatactcgaattcggcaatgggtacgtgcggtttttccaaaatggcgcccaactggtgaacggcgacaacagcccgtatgagataggcagcccattcagcgccgacatgctgccggctgtgaaatacgttcagggtgccgacaccatgtttttggtgcatccgtctgtaaaacctcaccgcctgcagcgccgcggccaattggattgggtgctcgagccatgcccgtttattgtcgaaccattcgatgaattgcgcgacactccggaaaaatggtgtaagccatcggttaaggaattcgtcggatccgaaattacgctgacgctgagtgacgaagagccgccaaaagactcggacggagattttaccggtgccggctgggtagccgaagacgttggctcatacgttcggattaacagcgggctggtactcatcaagagcgtaaccagcgcgcagaaagccgttggcaccatacgcaccgatctcagcgcgacacaggcggcgtcgcctggcgcatggacgcgcgaggataccgtatggactgacgctctggggtatccgggagcggtcaccctgtatcagcagcgactcgttctggccggcagcccgcgttacccgcaaaccatctggttcagcgaaaccggcgtttacctttctttcgagctggggaccaacgacgacaaggcgatcagctttacgttgtcgtctgaccagctcaaccccatcgtgcacctggcgcagatgaacaccctgatagcgctgacgtacggcggcgagttcacgatcaccgccggcaacgacgcggcgattaccccgacgaacatctcggtgaaaaatcccagcccatacggatgcaacgatattcgtccggtgcgcgttggcaccgaaatcatgttcatacagcgtgccaataaaaaactctacgccgtggcttatgacccggacagctacgtttcatactccgccaatgacatgaccgttttggctgaacacatcaccggtggtggggtgattgatatggcgtaccagcagcaaccggatgcgtttatctggctggtgcgtaacgacgggatcctcgcatctatggcggtagaccgcgcgcaagaggtgatcgcctggtcgcgccgcacgacgcctggtggttttgagtctgtggcatccattccgtcggcaaataacgatgtgctctatgcactggtgcggcgagaaattaacggtcagaccgtccgctatatcgaggttttcgacgtatcgctaaacactgatgcagccattaccgggacaaacgaagctggtgcggcggcgtggtctggatttaatcacctcgaggggcagaccgtagacgtgttggccgatggcgttgtgatgaaaccactggtagttaccggcgggcaaatcacgctgccgcgcaccgccaagcgaattgaggcgggattgcattatgaaaccactatcgagacgctcacaccagaagtgggaaccactgaggggacgacgcagaacgcgcggaagcgcaccagtgaggtaacgctgcgtttcctcgaaaccactggcgccgaatgcaatggccagctaatcccgttcaggaagttcggcctcggcatccttgataagccggcgccgctgtttactggcgatcaccggctggggactctcggctgggatcgcggcgaggacacgctggtaattcagcagcgccagccgctgccgttccaccttctggccattatcaccactttcaccagtaacgggggctga

SEQ ID NO: 434894 - DNA, 564 bp, Serratia marcescens
atggcttccagtatttccatctgctcaaacgctttgctcatcctcgggtcgcagcccatcaatgactttgatgaggggactgatttcgcgcgcctgtgctcgaacatgtatccgtcagtgcgcaacgacctgctgagaaagcacccgtggaactgcgcggtaaaacgcgttgtcctttcgcccagcaccacgccaccggcgttcgggttccgcaatcagttcccgttgcctggcgacctggtgcgtgtgctctctgttggggaaatccacgacgatatcgcataccgaattgagggcagcaaactgttggccaacgagtcaacgatcaagctgcgctacatctggcgaaacgaagttgaatccacctgggacgaggcgctggtgcagctggcagaaaccacgatggcggcaaaactggcgtacgcggttaccggctcggccagtctgcgggatagtctgacacaagaggccgcgtttctgctccgtcaggctcgctctatcgatgggcaggaagatccgccggaagaaattggcggctatccgacttttgagtcgaggttttaa

SEQ ID NO: 434895 - DNA, 405 bp, Serratia marcescens
atgtccgacaaagaaatcgagcaggaaatccaagccaaaggaaaaaccgcgccgcgcgtgacgcctgatcatatcgagagcgttgtcaccagcgaacattacttcactgggtacgacggccgcattggcgcgttggccaatggggaggatattcctgctgtagagcttgatgacgcgaatcagcttcgcctgctaacgttttgcgttctggttttagagaatggctttaccgtcaccggcgagagcgcctgcgccagccctgagaacttcgacgccgagatcggccgcaagatcgcccgcgacaacgctgtgcaaaaaatctggatgcttgagggctacctgctgaaacagcgcatgcatgacgacgcgcacctgcgagaactgctgcgccagaaagaagagtaa

SEQ ID NO: 434896 - DNA, 498 bp, Serratia marcescens
atgggacgaccacgtaaagaaatccaaaccccggggcaggaaaatcagcggccggaagaaaacgccactgacgcactgctgttgaattctgtcgtgcagcagcccgcaaatacgccggaacagctgaacgctgccaccgctggcgccacgtccattactgcaggcgaatcggtacccgaaggcgatggcaaaacagcgattctgcagcagcgtgttgcgaagctgctcgacggcgcagcactggaagagcgcaacgcgatcctttccggcctgaatgaacagggcgcagcaatcatcgctcgattcgaagggctggagttcctcgacgcggacgatcaccgcctgaccgataacctcgaattcctcaccctggtgaagaaagccaccgatgtggctaccggtggcgccggcccgatggtgacgaacgaggagggcaagaagcagccggctccgggcaaacctgttttaaccgaacacggctggcacgtaccaggctaa

SEQ ID NO: 434897 - DNA, 723 bp, Serratia marcescens
  misc_feature (691)..(700): n is a, c, g, or t
atgccgaccaagcgtctttcgtcatccgcggccaagcagggccgtacccccgtcagcgcgttagcgatcaccgtcgctgcggcgttgggcacgctggcgatgccagctttttccgccgacgccaagccggccgccaaggaagacatgattaccgttgtgggcggcagcaataccgcccagcaggaaagcgcctgggggccggtcggcacctatgtcgccaaacgcagcgccaccggtaccaaaaccgatacgcagttggtaaaaacaccgcaatcagtgtcggttgtgacacgtgagcagatggacattttacagccaacctccgtcaaggaagctctggggtacacacctggggtgatggtcggtagccgcggtagttccaacgtatatgatgcagtctacattcgcggttttggttcagttaaccagaatgaatatctggatggattgaagctgcagggggactactttaacgaagcctctattgatccctatttcctggagcgtgcagaagttttacgtggcccttcttctgtgttgtatggtaagagcagccctggcggaatcgtttctctagtgagtaagcgtccaacgaatgagcctattcgtgaagtgcagtttaaaatgggcactgacagtctgttccaaactggtttcgacttcagcgatgcgttagatgaagagggtaaannnnnnnnnngggtaaatatgcgttccgtctga

SEQ ID NO: 434898 - DNA, 984 bp, Serratia marcescens
atgcacttcgatcacctgcgactcttcgcgtttgctgataatgcgatccagcagcatggtgaaggccatttcgcccagacgctctttcggctggtgaatggtggtcagcgccggggtgaagtagcgggcgttgcgcacgttgtcgtagccgatcacggaaatatcctgtggcacccgcagccccagctcgtcggccgcgcagatggcgcccatcgccatgatatcgccgccgcagaataccgcggtcggccgctgtttttgcgacaggatttggtgcatcgccttgtagccggactccggttcgaagtcaccctggacgatccactcttcgcgaatgtcgatatgcgcttcctgcagcgccttcataaagccctgatgacggccgccgccagtgttgcgcgacagctggcccggaatggcgccgatatcgcggtggccgcgctcgatcaggtaacggccggccagatagccgccttcgaacgcgttatcgatgatggtgtcggtgaagtcgccgcgcgcggcgccccagtccatcaccaccatcgggatgttgcggtaatcttccagcatgcccagcagctgatccgggtactcggagcacatgaccaacaggccgtcgacgcgcttttgcgccagcatcgccaggtaggcgcgctgcttgtccagattgttgtgcgagttgcacaggatcagggtgtagcctttgctgtagcagctgttttccaccgcctcgatcacttcggcaaagtagggcgcttcgctcgaggtggccagcaggccgatcgacttggtgtgattgactttcaggctgcgcgccacggcgctcggcgagtagtgcagctctttgatggcggcccacacggccgctttggtctcttcggcgacgaaacgagtcttattgatgacgtgcgaaacggtggtggtggaaacgcccgcgcgtttggccacatctttaatcgttgccatgtaaggaatgactcctga

SEQ ID NO: 434899 - DNA, 408 bp, Serratia marcescens
atgcgcttactccataccatgatccgcgtcggtgacctgcaacgcgccatcgacttctacaccaaggtattaggcatgcgcctgctgcgcaccagcgaaaaccccgagtacaaatactcgctggctttcgtcggctatacggaagagagcgaaggcgcagttatcgaactgacctataactggggcaccgacagctacgacatgggcaccgccttcggccacctggcgctgggcgtggacgacgttgccgccacctgcgacagcatccgccgcgcaggcggcaaggtcacccgcgaagccggcccggtgaaaggcggcaccacggtcatcgccttcgtcgaggatccggacggctacaaaatcgagctgatcgaaaacaaacacgccggtcagggcctcggccactaa

SEQ ID NO: 434900 - DNA, 1230 bp, Serratia marcescens
atggcgcgagttgcattcataccaatagctgtagcccggctccgtcaccgccttcagccgcttgaggcgcgcgcggtacagcgtggcgcgctcaaaggcggcgtccagcagcgccgaacgccccagcgacagtttcatcacgtcataacacagctccaacgcgtcatcgagcagcaacagagcgcgctgcacgttcggttcgccgagcacgtcacgcagattgccgcgaaaacccggctcgcccagattcagacggaaatcttgcgtgctcaggctgagacggtcggcgcttttttgcagttgagcggcgtcgcgcacctcggtgcggtaggcgatggtgatgtccttcgccagatccaacagttggcggctggtgagctgttggccgaaatactggctggcgatgtcggggatttggtgcgcttcgtcgaaaatcatcacctcggcttccgggatcagctcggcgaaaccgccctctttcaccaccatatccgccaggaacaggtgatggtttaccaccaccacatccgcatccatcgcgcggcggcgtgccttgaccacgaagcaatcctgatacagcgggcaatcgctgcccaggcagttgtcattggtgctggtcaccaatggccagacgaagctgtcttccgccacttcgctgcaggtgctgatgtcgccctctttggtctgcgacgaccacttgcgcagttgcaccagatcgatcagcgtctgccccgccagctcgccgccggccatcgactgctgctccagccgctccagacacagataattggagcgccccttcagcagcgccagcttgcctttgtacttcaacgctttggcgacggtgggcagatcgcgcgcatacagctgatcctgcaacgctttcgaaccggtagagatgatcactttgcgatcggcgcgcagcgccggcgccagataagcgaaggttttgccggtgccagtgccggcttccaccaccagctcctgcttgaaattgattgcctcggtgacggcttgcgccatctgccgctgcggctcacgcggtttgaatcccttgatagcctgcgccaatgcgccgtctgttgcaaaatcgtctgtcacgctgtctctctgccggtgtcattcagcggtgattatgccaagcctgccgcccggctaccacccactttatcgccgcgctttttcattaccggctgtgctacccttagcgggactatgatatggagataa

SEQ ID NO: 434901 - DNA, 456 bp, Serratia marcescens
atgctgaaacttgacgcccaaaccaccgctctggtgctgatcgatttgcaaaacggcattctgccctacgccggcggcccgcacagcgccgaccaggtggtggcgaacgccgccctgctggccgcccgttttcgtctactgggcgcgccggtgctgctgggcgacagcgatattctggtcatcaagcgccaatggggcgccttctatggcaccgatctggatttgcagctgcgccgtcgcggcatcaaatccgtggtattgggtggcatatccaccaatatcggcgtggaatccaccgcccgcgccgcctgggagcatggctatgagctggtgatcgccgaagatgtctgcagcgcgcagaacgcggaaatgcaccgtttcgcgttcgaacacatcttcccgcgtttggcgcgggtgcgcgacaccggcgaaattcttgccgcgctcgagcggtaa

SEQ ID NO: 434902 - DNA, 936 bp, Serratia marcescens
atgatgaaacgcagtgtattagccttagctgtcgccctcggggcgatcacctccttcgccaacgcggctgaaatctacaataaggatggcaataaactcgacctgtacggccgtgttaacgccaagcattatttcagcgacagtaaatccaacgacggtgatatgacctatgttcgcctgggcttcaaaggcgaaacgcaaatcaatgatcagttgaccgggtacggccagtgggaatacaacgtccaggccaatcatgacgaagcgcagggcactaccggcaccaaaacgcgtctgggcttcgcggggctgaaattcggcaactacggttctttcgactacggccgcaactatggtgtggtctatgacgccgaggcttacaccgacatgctgccggagttcggcggcgactcctacagctataccgataactttatgaccgcccgttccaacggtttggccacctaccgcaaccgtgatttcttcggtttggtggacggcctgaatctggcggtgcagtaccagggtaaaaacgatggcgacggacgcagcgtgaccaagcaaaacggcgacggttacggcctgtctctggactatcaggacatcggcggttccggcatcggcgtagcggcggcgttctccgactccaaccgcaccagcgctcaaaaagcgctgcagtacggtaaaggcgacagcgccaccgcatggaccaccgcggtgaaatacgatgccaaccaggtttacctggctgcgatgtatgccgaaacccgcaacatgacgccgatcagcgtcaacggcacttccggtttcgccaataaaacgcaaaacttcgaagttgtggccagtatcaattcgagaacggtctgcgtccttccgtggcttacgtgcagtccaaaggcaaggatatcgaagggatcggtgatgccgacctggtga

SEQ ID NO: 434903 - DNA, 501 bp, Serratia marcescens
gtgcaggccaaccacggcaagcgcgagtcgctgctggtcggcggttacccggtaggccggcatctggggcatctcccctcgccgttcacgccgcagttgccgcatcccggcatgggctccatcgtggtggcgctggcgaccgacgcgccgctgctgccgcaccagtgtgcgcggctggcgcagcgcgccagcatcggcatcgcccgcaccggcggcggcaccgaggattcgagcggcgacattttcatcgccttcgctaccggcaacgacggcctgccgcccgccgactacgccaacaaaggcgccttcaccacgccgctgcgcatggtgaacaacgactacatttcggcgctgttcgccgccgcggcggaagcggtggaagaagcgatcgtgaatgcgttgctggcggccaataccgtcagcggcaacggccaccgggcggaagggttgagcgccgagcagctggtgacggcgctggagaaggccggctggcggcgctaa

SEQ ID NO: 434904 - DNA, 1185 bp, Serratia marcescens
atgcctcacgacaataatcgccggctgaaccggcaagactacaaaacgctgacgttggccgcgttgggcggcgcgctggagttttacgacttcatcatcttcgtgttcttcgccgccgtggtcggcgatctgttcttcccggcggacatgccggaatggctgcggttggtgcaaaccttcggcatcttcgccgccggctatctggcccgtccgctgggcggcatcgtgatggcgcactttggcgatctggtcggccgcaaaaagatgtttaccctgagcattctgctgatggcgttgccgacgctggcgatgggcctgctgccgacctacgccagcatcggcatcgctgcgccgctgctgctgctgttgatgcgcgagctgcagggggcggcgatcggcggtgaggtgccgggcgcctgggtcttcgtcgccgaacacgtgccgcgccggcgcatcggcttcgcctgcggcacgctgaccgccgggctgacggtgggcatcctgctgggctcggtggtggcgacggtgatcaacaccacgcaggcgcgtaaagcgctggccgaagagctgccgctgaagtcggtggtgctcaaccacaaacgggaggtggcggtatcgatgctgctgacctggctgctctccgccggcatcgtggtggtgatcctgatgaccccgacctatctgcaaaagcagttcggcatcgtgccggccttgacgctgcaggccaacagcatcgctaccatcatgctgatcgccggctgcatcgtcgccggtttgtcggccgatcgcttcggcgccagcaaaacgctggtggtcggcagcgtgctgctggccggctgcagttggctgttctatcaaacggtgggcgtgcgcccggaaatgctgttcgcctgctatgccttggtggggttcagcgtaggcgtggtgggggccgtgccgtacgtgatggtgcgggctttcccggcggaagtgcggtttaccggtatctcgttctcatataacgtctcgtacgctatttttggcggtctaacccctatttttgtgacgctgatcatgaaattaaccccgttagcacccgcttactacgtgttggcgctgtcgctcatcgggctgctgctcggcgtctacctgcatcgcgacctgaacagcgaagccggggagcggcaagccgattcctacagctaa

SEQ ID NO: 434905 - DNA, 267 bp, Serratia marcescens
atgatcggttttaaatccttctttatgcgcaccattattttccaggtgctggccattttattattgtgggggctcctcgtcgcctgggtgaaatattggtattaccccgacatggagaaatatttcgataatcagcaacgcatcgtcgccgcaggcatcgccaatattctcgatgaaaccggcactgacaatatcgattatctcggcatcatcaagaccattgaaggcatgtacctagattctacgtcagtacttcaaaaagcataa

SEQ ID NO: 434906 - DNA, 180 bp, Serratia marcescens
gtgacggttatcgttaacggcgacgtgacccagtgcgacttgccgcgcggcgtgaaatccggcctcagcgatgccctggagcgcttcgaagaggacgagatgatcggcgttatccgctttgaaaaacaggactgcgtgcgttccgctttgtgccagcgcacgctcaacgcttacagttaa

SEQ ID NO: 434907 - DNA, 132 bp, Serratia marcescens
atgttgagagaactgaccagccgtaacggcagggcgattggcacggcggcggcctcagcctttgtcaacataggcagtcatgcactaaaggatccggcaacgatcgcggcgtacctttccgctgacgcttaa

SEQ ID NO: 434908 - DNA, 846 bp, Serratia marcescens
atgtcagaccttaccctcaccgaacccgaagtcatcaccggccacaccgatgtgatttgctccactagcattgagcgtattgtcacgggacgtaatgccgctctggcgcagattgaagtgctcatgcaacaactggacgatgtttcgatgctgacccgcagtatcgggggaaaaaccgcgctggactgggctatgaagcaggatttccgttgcggctgctggttgatggagaaaccagaagcggcgatgaaagctattacccgtaatctcgatcgcagcatatggcgagacctgatgaagaagtcgggtatgctttcgctcatggatgctcaggctcgtgagcagtggtacaacagcctggaaaaggacgatattccggctgtcagcgaagagaatattctcagcacctttgaacagttgcatcagagcaaaggtgaggtgtttgagcgtggcgtcattaatgtgttcaaaagcctgtcgtgggactttaagacaaactcgccctgtatgtttggcaggaaaatcattgtgaccggactggtgaaatgcgacagatggggatttggtctcaattggggctggcagcgggatcggctagccgaccttgagcgcatgttgatgatcctcaatggtcagcccattcctgataatcgtgaagatgtcactcgtcgtctaagcgatcatatccatgagaacaggcacagcacccgttatgaagatgagatgtttactattaaatactttcagaagggaactgcgcacatcacttttaaacggtccgacctgacagaaaagatgaatgatatcgtggcgaggcactatccggggatgctagcagcgagatga

SEQ ID NO: 434909 - DNA, 204 bp, Serratia marcescens
atgccggaattaaccactgaagcggctctcaacattctgactggctggctgcaggacaacatcgattgtggcagcgagattatcttcgacaacgacgaagacaacaccgattcagcaaagttgttgccccgagttgaacaggcattacagaacgttcgcgatatccaccatcttcagcttttgcaacaggccagtacagattaa

SEQ ID NO: 434910 - DNA, 492 bp, Serratia marcescens
atgaagctgtctctgaccgtgaaggctgataccgtcaatatactggccctcaatatgggccgggtcgctgttgatatcgacggaattgaactggccgaactgattgatatggtctgtgataatggctactcgcttcgtgttgctgatgccccggggaaactggttgttgaagatccgcttccgcccgtcgcccgcgttaacggcattcagtgcagtaccgcacatataacggaggaagacaatgctctgctgtttactctttcacaccagcatgaagactttggtgagtctgaatggattttgtacaccggctcgggttatctgctccacctgggcgcgtggtcgtttccggtcttacgcctcaagcgcctcggggtgtcaaaatcctgcagtcagttagtggtgacgcttatccgtcactactccgctggcatcattcatctggatgcctttggcgaagtgctgccgggcttcgctacgtttgactggtag

SEQ ID NO: 434911 - DNA, 378 bp, Serratia marcescens
atgcaaacccaaccactatcctccacgcaggaggcttcgccacgtccgacgcccgttgaaatctggcagcaacttcttatatatctgctggaacagcattatggcctttcacttaacgacactccgtttggcaccgatggtgtcattccggaacatattgacgcaggtatttcactgtgcgacgcggtgaatttcatcgtcgaaaagtacgatcttgtccgtatcgatcgtcgcagtgtcagtgcagaaacacagtccctgctcatcagcagtattgatatactccgcgcccgtaaggcctgtggattgatgacgcgcaacggctacagaatggtaaccgatatcaccaccggcaaatacagcggagcgactcaatga

SEQ ID NO: 434912 - DNA, 363 bp, Serratia marcescens
ttgtcgaataaaataccggcagaaaaccacgatatcactgacccctggtgggggcttaaacgcagtatcacgccctgttttggcgctcgcctggtgcaggagggcaaccggctgcactatctcgctgaccgcgccagtatcaccgggcagttcagcgacgcggatttacgccatctcgaccaggcatttccggtactgctcagacaactggagttaatgctggtttccggtgagctcagtccccgccatcagcactgtgtcacgttatacgcaaaagggctgacctgcgaggcggacagcctcggctcgcatggatacatgtacgtagcgatttacccgacaccatctgaagcaaccgcgtaa

SEQ ID NO: 434913 - DNA, 222 bp, Serratia marcescens
atgaagattatcagtaaacgccaggcaatggcgatataccgccagcatccgcagtctcggttgtttcgcttctgtaccggcaaatataagtggtccggcagtgtctgccactatgccggtcgcgaggtggaagatatcagaggggtactggccgtattcgcagagcgtcgccaggaccgcaatggcccttatgtcgtattacgcagcgtcacgctgaattaa

SEQ ID NO: 434914 - DNA, 480 bp, Serratia marcescens
atggaacaacagttaccactgtttgcccgtgaattagcccctaccgaccagcagacggtcagggaagccttaaccctgctggagggccagctacgtgaacccggcgcgtcatttacttccagccatgccgtccgcgactggctgcgtctgcagcttgcttcactggagcgggaagagtttaccgcgctctttctcgataaccagcatcgcctgatagcccatgaaacacttttcaccggcaccatcaaccatacgcaggtccatccccgcgaagtggtgaaggccggtctgaagcataactgcgccgctgtcatcgtggcacatagccatccctccggggaggcggaacccagcaaggccgatcatcaggtcactacgcgtattcagcaggcgctggaactggttgatattcgtctgctggatcacctggtggtcggcggtatggagatcgtctcgttttctgagagaggctggctttaa

SEQ ID NO: 434915 - DNA, 480 bp, Serratia marcescens
atgaccgacattatcaacctcaacgacgctctaccgttaccgttacaacctgcaggtaccgcttctgcacccgcgttgaccgctaccctcgtacaggacgagcagcgcgtggggttctggccgcagcacttcggcagcataccgcagtggataatcctcgaaccgaccgtcttcgcctggatggaccgcttctgcgctgactacagcggcggcatctggcagttttacacgctgaacaacggcggcgcgtttatggccccgaaatcggagaacaatgaaccctggacgctgttcaacaccctgaacggtaacggcggtgcactcagcgctgaagctgccgggatagcagtttgtctgatggcatacagccaccacgcctgccgcactgaatgcgacgccatgacggaacactattatcgcctgcgggactacgcgctcaaccatgcggaatgcagcgctatcatgcacatcatcgactga

SEQ ID NO: 434916 - DNA, 255 bp, Serratia marcescens
atgccaccgctgcccgataacgcccaccaggcgaccctttatccgaccaccctggagaacaatccctgctgccgctccatctccgatgacgacctgtgcgcctggtgctcgcaccttctttatcgtcccggtgaacttagcctctgcggcttaaacatcactgaaagtcactggccctcccactgtgatgaggatggctatgcgcagtcctgtccgtcactccggctgaatctgcatccccaacccgataaataa

SEQ ID NO: 434917 - DNA, 819 bp, Serratia marcescens
atgcgattagtcagccgcttcgggcgtataaatcagatacgccgtgaccgccccttgacccgtgaagaattaaagcaggtcgtccccagcgtattcggggaaaataagcacgcaaccagaagcgaaaaatatacttacatcccgacaattaccctcctagagaacctgcagcgcgaagggtttcagccgttttttgcctgccagtcgcgagtccgcgatccgggtaagcgtgagcataccaaacacctgctgcgcctgcgccgtgcgggtcaaatcacaggtcagcatgtgccggaaatcatcattctcaacagccacgatggggcgtcgagctttcagttactcccaggaatattccgaagcgtatgcacgaacagcctcgtctgcgggcagtcctttggcgaaataagggttccgcatcgcggcgatattgtcggaaaagtgattgaaggcgcttacgaagtgctcagcgtctttgaccgggtggaagagaagcgagaggccatgcagtcacttcggctaccagcacctgcacaacacgcactggcgaacgccgcactgacgtatcgctttggcgaagaacaccagccggtcaccgcaacacagatactgacgccccgacgctatgaagaccgtcaggacgacctgtggtcagttttcaatcgttgccaggagaacctgctgaaagggggtctgccaggacgaaccaccaaaggcaaacgcagtcatacgcgcgcagttaaaggcatagacggcgacgttaagctcaaccgggcactctgggtaatggcagaagaactgcagcaggtactgagctga

SEQ ID NO: 434918 - DNA, 675 bp, Serratia marcescens
atgaacggcccggacagcggattaattccggtggacgttggtggtgagaagtggctgcagggctctgtctgcgagcggggtaattgcggtgaccattatctgaaaatactgtatatcccctcagaacatgttattgccggtttttattacaacggtggtgaggaaaagatgtttggcgatatcggggatgcggaagcacgaatattacgccgtgatgttcctgacgttacgccagtgcagcaggctccggcattgccggtaacacctgcagacggcgcaccggcagacacgatctggacctttaagggtgacagcggcaaaacgttatggcaggtctgtggcggtcagagcagcagttgcaccattatcgccaacactaagtattacgttgccgttctgaaccgtaagtcagcgacgggctgtgctttcggtgatttttatgttgccgcccgcgataccgcatcatggcggcagtacgataccggcacctgcagtgcggatgcgtatatccgcaggggcagcatcaacaacggtcagtatctgtccgtcgatattggtatcaacggggtgctggtgaagcagttcccgattggttactggtcaatgcagaaggaattttccggcaaccgacgcccctcatggtcaaaagttaaagagaaaaatcagcagcattaa

SEQ ID NO: 434919 - DNA, 522 bp, Serratia marcescens
atgccgcagggtctgtacaggccctgtctgtcgttcatgtacaggtttagacccatccgcaattttcgccacacaatcatttttactttaaaaaataaacaggatgaatatatgaaagcattcatattgccattaatggtttcagtttttttattgagtacatcagttaatgctgcagcggttaaattaccccggacagtaattgatgtgactgacggcagtgagcaaatgtgcggaagtgaggacgtgaaagacgggacgtgccgcctcactggtgtttcagatgatggtaaatatgccctgctgagcagtcctggaggttcggcctgttatgacccttatctcatcgctgtcaacctcgctaccggcaagggtaaaatgatggattataaccgtcatgcaacatgtagcggtgaagccaccgcgaagtttgtccgctcaccagagaatggtcaccttactgtcgttatttacgaccccaccatcaaaaagaatgtcggtcttaatactattgacttttaa

SEQ ID NO: 434920 - DNA, 216 bp, Serratia marcescens; identical to SEQ ID NO: 105341

SEQ ID NO: 434921 - DNA, 147 bp, Serratia marcescens
atgaaaatcagaaatatcacacctggttacccgacatctggcaaacgctgtccggactgtggctctcacgacaccattccctgggccgatggctggatgtgccgcgactgcggctgtgaatggggtaaggacaatggctatctgtaa

SEQ ID NO: 434922 - DNA, 696 bp, Serratia marcescens
atgactcaggctgagcgtcgccatgaccggcttgccgtcagactgtcgatgattattggtcgtcttgtagcaggcgaaacgctggatatgcgcaaactggccgccgagtttggcgtgtcggtccgtaccctgcgccgggattttcgtgaacgactgatgtacctggacctggagtatcgtcagggccggtgccgtctgctgtccggtagccgtcagcgggaactggctgtaatgacctttgcccgtcagtcgggcattgtgaccctgtttccgggactggacgggcatctggtcagctcgcttctgggcgggcagggtgagtccccctgccttatctggcagggagaatctgcacaaatagttaccgacagtggggtttttacccgactggtgaatgctgtccaggagtgccggaaggtgactttgcgcggcaacggaagctgtcattcggatatcgctccctaccggctggtcctctatgccggtaactggtatctgacgggggcacaccagacccgcatcattgcgctgccgctgactgatatccacgctgtcacgcttcaccccgacagttttaccccggacgctactgtgcgcaacatcctggcacgtccagattttttacaggcattacctcatttccggttcatcggtgaaatgctgtccggcttcgcccctgaaccacatcccccatag

SEQ ID NO: 434923 - DNA, 876 bp, Serratia marcescens
atgagtaaacaagaaggtatcaacgctatcagcaaggcaatggccgcgctgcccacacaactgtctggcaccatcctaaaacacattcactcgcttaccgactatgagccggtgatcggcattatggggaaaactggagccggtaaaagtagcctctgtaacgaactcttccggggtgaggtctccccggtcagtgatgtgaacgcctgtacacgtgacgtgctgcgcttccggctacgcagtggtcgtcacagtctggtgattgttgatttaccgggtgtgggagaaaacgggcaacgggaccatgagtaccgtgccctgtaccggcgtatattgccggagctggacctggtgctgtgggtcatcaaggctgatgaccgggcgctgtctgtggatgaacagttctggcacggtgtgatgcagccttaccagcagcaggtgctgtttgtgctgaaccaggccgacaaaatcgaaccctgtcacgaatgggactcccgcaccagcacgccgtcaccacaacagcaggtaaatcttaaagtgaagcaggctgccattagcgcaatgttcagcccccatcacccggtctgtgtggtgtcagcactgaccggatggggcgttgaggagatggtggcaaccatgatgcactgtctgcctgaccgtgccaccagcccggtagcgacgcaactgcacaggaggctctgcacagagccggtaaagtcgcaagcccttgacagttttggtgaggcggtggggagggtgtttgatacggcagaatcatcgtcgttcctgcccaagccgttgaaaacagcgattcgtactgtacgggatgcggtggtgtcggttgctcgtgccgtctgggactggattttcttctga

SEQ ID NO: 434924 - DNA, 504 bp, Serratia marcescens
atggcggtgaacgggtggccgataaactccagccactgctgcagctgcgagccgggggtgaccagccgcgcgccgatggtcttcatgccgaccagcaccagcgggcacagcaccagcgccaggctgaagccgaacgacggcaaattgcccttggtcaacgtcggctcgttctcttccggtggcatcggccagttgacgaagcggctgataaagctgccgtacagcgggccggcgatcagcatgccgatcaccgccgccaccaggccgatggcgatcatccagccgaagtcggccttcatctgcgaagccagcagcatcggcaccggccccggcagcaggaaggaggcggcggcggccacgccggcgaacagcggaatggccagcttgacgatattgccgtcggtgcggcgcgccacggcgaacacgatgccgatcagcagcaccaccgccacgtcgaagaacagcggcagcgcgcagatcaggccggcgatgccgagcgcgtag

SEQ ID NO: 434925 - DNA, 123 bp, Serratia marcescens; identical to SEQ ID NO: 8077

SEQ ID NO: 434926 - DNA, 1317 bp, Serratia marcescens
atggccgctaatcttaccgagactgctatacgcggattgaagacaaaaagcacgtcgtactacgtgtggagcaacagtgctcagcgtggtaccggcaggcttggcgttaaggttcagccttcaggcagcaaagttttttatttccgttactacgttgagaaagggaagaaagagaaattcatccagttgggcatctggcctgagatgaaactggtgacggccaatgagctggcgaaaaaatatggtgcctggcttattgaaggaaaagaacctcagcaagagcttgagcaacagcgcctggccgagcagcacatcatgcagcttcatcgctcgcagggatcgtttaaagagttggtacatggctacgttaacaagatgaagctcgacaataagcggacctgggccgatgttctgaagcgtcttgaaaaagagtgctattcagtcattcctcgagagaccaaagcgaaggatgtcacgccattacagatcaaaacgatcttatctggcatcatccagcgtgatgcagtggtccatgcgaatcgaattcgttcctacctgatggcggcttttaactacggtcttaaagccgataacgatccgatgaataccagcgtgggtattacgttcggccttgaagttaatccggtatcggccataccgaagcagtcctcggcggagaaagtgggtgatacatggttaacgctggaggagctacgttttgtcatggagcagttcgctcaggcaactaacgttgggccgttgatgcagcacctaatccgcttctgtgtttatgctggcgggcagcgcccgtttgaaatgattgccagccaatggagcgcgattgactggcagcaaaagacgctattggtcatagccgatgtatcgaaaaacaagcgtgagcacctgatcccgctgactgaatcggcactacaggaattagcctcagtgaaagagctgactaaggagagtaacagtccctacatctttccactctcgaccaacgccgagcgtccagtacgtaccgacagcctggcacgttccattatgtattttcgggcctttaatcccgagtttaaagtttttacagcacgagatttacgtcgcacctgtaaaacgctgatgggggaggcgggaataagcaaagagatccgcgaccgtatccagaatcacgctttgaatgacgtcagctcgaaacactatgatcgttatgattacttgcctgaaaagcgtagggcgcttgagatctgggaagatagggtcaacaactatcagcgacagcaggaaaacaacgttgtgaacttgtttggacggaggtaa

SEQ ID NO: 434927 - DNA, 2700 bp, Serratia marcescens
atgtttattcacaagggaaccacgccggccggccgattggccacggcggtacgcgccgcgctggcggcgatgatgttgactcagccggctgtggcgctcgccgcccaggctgaggcgaacggcgcgcaggctgcacagcaaaagcatttcaacattgcggcgcagccgctgcaaagcgccatgttgcgcttcgccgagcaggccggcatgcaggtatttttcgacgaggtgaagctcgatggcatgcaggcggcggcgctgaacggcagcatgagcgttgaacagggcctgcggcgcttgatcggcggcaatccggtggctttccgcctgcagccgcaggggcagatcgtattgagccggctgccgacggcgaacggcgacggcggtgcgctggcgctggacagcctgacggtgctgggcgccggcggcatcaacgctaacgattgggtttacgacgaaccgcgctcggtcagcgtcatcagccgcgaacagatggacaaccgcccggcgcgacacgcggccgatattctggagcagacgacgggggcctattccagcgtcagccagcaagatccggcgctgtcggtcaacatccgcggcatacaagactacggccgggtgaacatgaacatcgacggcatgcggcagaattttcaaaagagcggccatggccagcgtaacggcaccatgtacatcgattccgaactgctgtccggcgtaaccatcgacaagggcaccaccggcggtatgggcagcgccggcacgctcggcggcatcgccaccttcaataccgtcagcgcgagcgatttcctggcgccgggcaaagagctgggcggcaagctgcacgccagcaccggcgataacggcacccacttcatcggcagcggcatactggcattgggcaacgaaaccggcgatatcctgctggccgccagcgaacgccacctcggcgactattggcccggcaacaagggcgacatcggcaacattcgcatcaataacgacaccggcaattacgatcgctacgccgagagcatcaagaacaacaaaatccccgacactaattaccgcatgcactcgcggctggccaaggtgggctggaatctgcccgccaaccaacgcctgcaattgagctatctgcagacccagaccgcgtcgccgatcgccggcaccttgaccaacctgggcacccgcccgccctatgagttgggctggaagcgcaccggttacagcgacgtgatggcgcgcaacgcggcgttcgactacagcctggcaccggaaggcgtcgactggctcgattttcaggccaagctgtattacgtcgatactcaggacgacagcgacacctacagcaccagctcgctgctggacaacggctacgcgacgcgcacccgcctgcgtacctatggcgcgcaggcgcaaaacacctcgcgcttcagcctggcgccggggcatgacttccgcgccaactacgggctggagttctattacgacaaagcgaccagcgactcttcccgtgagggtatggaaggggtgacgccggccggcaaccgttcggtcggcagcctgttcgccaacctgacctacgactacgacggctggctgacgctggagggcgggctgcgttacgaccgctatcgcctgcgcggccagaccggcctgagctatccggatttggccaaggatgggcaacgctacacgattgacaatccttgcaaagcgttgcgtctgaccggctgttcaaccacgacccgcgaagattgggacgtggatcgcgatcagggcaagctgtcgccgacgctggcggtggcggtgcgccccggcgtggagtggcttgagctgtataccacctacggcaaatcctggcggccgccggcgatcaccgaaacgctgaccaacggcagcgcgcacagcacctcgacgcaataccctaacccgttcctgcaggccgagcgctcgcgcgcctgggaagtcgggttcaacgtgcagcagccggatctgtggtttgagggcgatcggttggtggccaaggtggcctacttcgacaccaaagtggataactacatcaacctggcgatagaccgcaataaaccggggctggtgcagccgagcatcggcaatgccgcttacgtcaacaacctgtctaaaacccgcttccgcgggctggagtaccagctcaactatgacgccggggtgttctacgccgacctgacctacacccacatgatcggtaaaaacgagttctgctcgaacaaggcctggttgggagggcgtctgcgctacggcgacggatcgcgtcgcggcaacttctatgttgagccggatgccgcttccaatgacttcgtcacgtgtgacggggggacgcagttcggctccgccgcctacctgccgggcgatcgcggctcggtgacgctgggcggccgcgccttcgatcgcaagctggacgccggggtgaccgtgcgcttcgcgccgggctatcaggacagctcggtgccatccaactacccgtacctggccgactggccgaagtacaccctgttcgatctgtacgccagctacaagctgaccgacagcctgacgctgcgcggctcggtggagaacctgaccaaccgcgcctacgtcgtcagctatggggagacgctggccaataccctggggcgcggccgcaccgtgcagggcggggtggaataccgtttttaa

SEQ ID NO: 434928 - DNA, 339 bp, Serratia marcescens
gtgaagaaaatccccctgccgcgcacgccgccgcaggagaaaacgatctggcgcagccgcatcaacggccgccttaatcgctttaagcgttatcccaaagacgccttgcggctgaagcgccagggcgtcgggcaggtgcgtttcaccctggacaggcagggccatgtgttggcggtgacgctggtcagcagcgccgggttgccgtcgctggatcgcgaaatccaggcgctggtcaagcgcgcttcgccgttgcctacgccgccggcggacgcctacgtcaacggcacggtggaattgacgttgccgatcgatttcagtttgcgcggcgcaagtttttga

SEQ ID NO: 434929 - DNA, 357 bp, Serratia marcescens
  misc_feature (321)..(330): n is a, c, g, or t
atgtctgagatcgccccagcggccgcttttgccgatcaactgcagattttccgccagcgcgccgatcgcgcgctgctggacttcatcgccccgctgccgttcaacgacggcaacatggtggcggcgatgcgtcatggcgccttgctgggcggcaagcgcctgcgcccgttcctggtctacaccaccggccagatgttcggcgtgtcgctggccaacctggacgcgccggcggcggcagtggaatgcattcatgcctactcgttgatccacgacgatctgccggcgatggacgacgacgatctgcgccgcggccagccgacnnnnnnnnnnccatcgccagccgacctgccacattaa

SEQ ID NO: 434930 - DNA, 357 bp, Serratia marcescens
  misc_feature (296)..(305): n is a, c, g, or t
atgaaactgaccatcgagcgcctgaccgcgctgtccccgcaagaccttatcgacctcggcaaaatttggccgcaccagcagccggaacagtggcagagctggctgagcgacggcaaggcgctgttcgccgcccgcttcaacgagcggctgctgggggcggtgaaaatcgcgctgcagaacgaccgcgccgagctgcaggacctgctggtacgcgaagtgacgcgccgccgcggcgtcggtctttatctggtgcaggatgcgcagcgtcagctgccgcagatcgcccactggcagcnnnnnnnnnncttcatgcgcgcctgcggcttcgcaccgcagggcgaactctggcaaaaatga

SEQ ID NO: 434931 - DNA, 2073 bp, Serratia marcescens
ttgtcacaccttgatacgcgcgcggcacggaacacccgccgccttcttccgctggccatgctgatcggcgccgcgctgccgctgagcggctatgcctgcggcccggatttccctaaccggctgctgatcgaccgcaacggcaccctgctgtatatgccggagggcaatttcgccttcgaagccggccggctggtgccggcggataaacagctgccgcactggcaagcccccccgccgccgatgccgccgaaaccgatgccgcagtcgccggaaacggtggcgatcggcaaaatgcgcgccgccaaaacggtggaagaggctgacgccgtcaatactcagggattgtccaacgccgcacgcctttatcaactgggcgccgtcgctttcgccagccacgatccgcgcgccacagactatttccagcaggtgctgaagctcccggccgccgaacagggcgactgggggctgcgggcgcagtattcacttgggcgggtgttgatggctgaccacggtacgccggtgaatgaatcgggtgaagcggcccccgccgccgagcatccgcctaaagccgaacttgaacaggcgctggcggcgttccagcaggtgatcgatcgggtgaaaagcggcgccgccgatcccgaccagctggcgctaagcagcctcgggcagcaggcgcgcatccacctgtggctgggtgacgtcgcccccgctgcccacctgtacgcacagcaggcggcgcagggcgatccgagcggcgggcagtcgctgcagtacgtctccagctacctggtcaatcccgaccatctggaaacgctgaagcaggtgatcggcgatccgttgatccagcagctggtgaccattgagctgttcgcccgcagcggcaacctgcaaatggcggataccgacggcaacggccgctctgcccagatcatcagccagatcctgacgctgctggacggcacggtaaaaagcggcttcgccggcagcgatcggctggcggcattggcctaccgctccgggcagtacccgatggcggcgagcctgctgaaaaacgccggcgacagcggcctggcgtggtggctgcgcgccaaaatggcgctgcgcgacggcgacgtgaaagccgccaccgccgcctacgccaaggcggcaagcgcgttccccgccgacgaaagctggggcgaacagcgtaacgccgactttgtcgcggaaaccatcgtccccgagtgccgggtggccggcgaacaggcgatcctggcgctgaaccgcggcgactatctgcaggcgatggacctgctttatcgcggcaaagcgctctactgggccgacgtggccgatgtggcggagcgcgtgctgaccgtagatgagttgaaagactttgtcgataagcacgccccggcgccaacgacgccgctcaagccggttaacccggacgactacggtggcggccagcaaatcacgccggaagtgcagctgcgcgaactgctggcgcggcgcttgatgcgcgccgggcgggccgcggaagcgcaggcctatttcgatatccctaactaccggcaagcggcgcagcagtacgccgatgagctgaaggccgccaaggacaagtccgccgcgccgctggcacgcgcgcaagcttactatcgcgcggccaacctgctgcgcgcccaggggctggagtttaccggctatgagatgacgccggactacgccatctatggtgccggctattcctatctgggggatgcattcgatactcgcgagctgaagcataaaagctggatcgacagcgcagaagcggcgcgcgccaaggcggcgctgccggcacaggacaaccgtttcctgcactatcgctggcaggcggtggggctggcgcaacaggcggccgatctgctgccgccgaagagccaggcctatgccgccgtgctgtgtaacgccgccagctgggttatcaagcgcgacgccaagaccggccgggcgctttatcaacgctacatcaacaccggcactcgctacccgtgggcggcgaaattcggctacgactgcccggcgccggactttaccgccgtggcgccataa

SEQ ID NO: 434932 - DNA, 387 bp, Serratia marcescens
gtgtatgacaatgtggcgatgccgctgatcatcgccggcgccagtaccgaagacatccgccgccgcgtctccgccgcgctggacaaggtcggtttgctggataaagcgaagaacttcccgattcaactgtccggcggtgagcagcagcgcgtgggcatcgcccgtgcggtggtgaacaagccggcggtgttgctggcggatgaaccgaccggcaacctggacgacgcgctgtcggaaggcattctgcgcctgtttgaagaattcaaccgcgtcggcgtcactgtattaatggcgacgcacgacaccgggcttatcgcccgccgcaattaccgcatcctgacgctgagccagggccgcatgcaagggggcgctcaccatggccaataa

SEQ ID NO: 434933 - DNA, 252 bp, Serratia marcescens
gtggcattggaaaccgccgacgccgccctgacccacaaccggctgctgggcgtcgcggagatgatccgcatctcgcgcgccacccacgccaatatccggcaaaacatcaccatcgcgctgggattgaaaggggtcttcctgatcaccagcctgctggggctgaccggtttgtggctggcggtgctggccgactccggcgccaccgcgctggtcaccgccaacgcgctgcggttgttgaaaaagcgcagctaa

SEQ ID NO: 434934 - DNA, 330 bp, Serratia marcescens
atgccgatcaccgcgatgcgccgccacggcagttggccggtcagcggcagcgtcgggatcgcctgcgggctgagccaggtggcgcggcgcgtgccgagcggcgtaatgcgcagatggttgttggtgccctcgccctgcaggttcagcccgcagcgctccaacagccgctgcgcggcggcggacagcgtcgccacccggccgggcccgatcagggcatacggatgctgcggcgcctgctgcgccagctgcggtagcgccgccagcggcatttcgaccggcgtgccgtccggcaatctcgccagcaggtcgagcgagccggaggagaagtag

SEQ ID NO: 434935 - DNA, 1650 bp, Serratia marcescens
atgagcagctattttgacggcggcgaaacggatgtgatcatcatcggcggcggcgccaccggcgcaggcatcgcccgcgactgcgcgcggcgcggcttgcgctgcattttgctggaacgccacgacatcgccaccggcgccaccggccgcaaccacggtttattgcacagcggcgcgcgctatgcggtgaccgacggcgagtcggcgcgcgagtgcatcgaagaaaaccgcatcctgaaacgtatcgctcatcactgtatcgagcgcaccgatgggctgttcatcaccctgccgcaggactcgctggactatcagcaacagtttatcgccgcctgtcgccaggccgacatcggcgccgaagcgatcgacccgcagctggcgctgcggctggagccggcggctaacccggcgctgatcggcgcggtgcgcgtgccggacggcaccgtcgatcccttccggctgaccgccgccaacatgttggacgcgcgcgaacatggcgcgcagatcctgacctaccaccaggtggtgggattgttgcgcagcggcgatcgggtgacgggcgtgcgcgtttacgaccatcagaatcagcggcgctatgcgctgcatgcgccggtggtggtcaacgccgccggcatctggggccagcagatcgccgaatacgccgatttgcgcatccgcatgttcccggccaagggggcgctgctgatcctcggccaccgcatcaacaacatggtgatcaaccgctgccgcaaaccggcagacgccgacatcctggtgccgggcgacaccatctcgctgatcggtactacctcgacccatatcgactacgaccaaattgacaacatgctggtgaccccgcaggaagtggacattctgatccgcgagggggcgctgttggcgcccaccctggcgcagacccgcattctgcgcgcctacgccggggtacggccgctggtggccagcgacgacgaccccagcgggcgcaacgtcagccgcggcatcgtgctgctcgatcacgccgcccgcgacgggctggaagggtttatcaccatcaccggcggcaagctgatgacctaccgcctgatggcggagtgggccaccgacaaggtgtgcgaaaagcttggcgtaaaccgcccgtgcaccaccgcgcaggatgcgttgcccggctcccgccagtcggcggaggagacggtgcgcagcgtggtttctctgcccgccagcattcgcggctcggcaatttaccgccacggcgatcgcgccagccaggtgccggcggccgatcggctcgacaccagcctggtgtgcgaatgcgaggcggtgaccgccggggaagtgcgttatgcggtcaactcgctgaccgtcaataacctggtggatctgcgccgccgcacccgcgtcggcatgggcacctgccagggcgaactctgtgcctgccgcgccgccgggctgttgacgcgctttaacgtcagcacgccgcagcagtccatcgcgcagctgtcgcagttcctcaacgaacggtggaaaggcgtacggccgatcgcctggggcgacgcgctgcgcgagagtgaatttaccagctgggtttaccaggggctatgcgggcttgaggcccaggccgacaaggagcaggaggcggatgatgcgatttga

SEQ ID NO: 434936 - DNA, 297 bp, Serratia marcescens
atgcaaacggaaaatttacgggtatgcagtacggcacattttacatcggaagataacgagctgttagcgacaatggcagggcaggcgggtcttagttcctgggtggttaacatccagtacggttatattctggtgctgacggattatcgctggcggctgcgggtattaaagtcgcaaggggcatcaaaggcgctaaggcggtttttaattcaccagataaaatatcaccgtatagggtacatccattttgattgtgatgcgcccattctagccggccatgatgtttttgagtggtag

SEQ ID NO: 434937 - DNA, 465 bp, Serratia marcescens
atgaacacacaaaacgtcaacgtcaaaaccgccacgaaggaacgctctgaaagatatgggaaaagatccactgttaccggatcgtctgatgattgggatgtaaaagcctgcctgttcgttacgcaggcgatcggccgcttttccgtcaaattctcggcgccctgcatcgggggcacggtgaacctcaattgcagccacatcaccaacgcctgcaatccgtttgatgccgtggcgcgattcgtgcacgaaacccgcgcgcagggctgcacggtgtacgccgtggaacagctcgagcctgtgcgccctgtttgcctgagcacaaccgggtatcgctttatgcaaaaaggcttcatctggctgtgtcttgataccggcgttttcgtcgatgtgtcagacgatggccggatgcggcgcggggacgatggccgcacgttgccttgctacggcacgttgacccgcatttaa

SEQ ID NO: 434938 - DNA, 693 bp, Serratia marcescens
atgccagtcattgtgttcgtatccccaaaaggaggggcaggaaaaaccacgtccgccctggcgttagctctacaaatagcaaaaagagttccggtaacggtcatcgatgcagacccgaaccaccctattaaatcttggtctgaagggggggctacacctgagagcatgaccgtcatttcagatgtaagcgacaagacgataggggaaacaatcgcagatgctgcgaccaagaccccctttgtgatagttgatttagaaggcacagctgcaaccattgttgcctatgcaattgccgagtcagactttgtcgtcgtcccaacccaaggctcccagcttgatgcagaacaagccagcagagcttttggtttaatccgcgcccatgaacgaggcattcagaagcataagcctgattacaagctaccttatgctgttttgttcactcgcacctcagcagcgatacagagtcgtgataccaggcatattaggaagagcttcgaagcaggtggcattcctttttttgaaaccgaattaaacgaacgcgctgcattcaaagcaatgttctcgtaccggcaacctcttgaaatgctcccaacaaacgaggtttcaaatgttgaaaaagccatcgagaacgcagaagcctttacgcgcgaagttattggcagaataaccaccggcactccggttacaccatga

SEQ ID NO: 434939 - DNA, 1110 bp, Serratia marcescens
atgagcaacgtatcacgcactcgcacaccgcaggacacggccggcacgcaggaaagtcgcgccaaagcgctgcaaagtgccatcaccgccatcgagaaagcgttcggcaagggcgccatcatgcgcctgggcgacaaccatggcatggctgtcgagcgtatcccgaccggctcgctcggcctcgacatcgcactcggcggcggcctgccggtcggccgcatcaccgaaatctacggccccgagtcgtccggcaagaccaccgtcgccctgtcggtgattgcctgcgcccagcgcgccgggctgcagtgcgcctttatcgatgccgagcacgcgctcgatccgcgttacgcgcagcagctgggcgtcgatatcggtgaactcctcatctcccagcccgacaccggtgagcaggcgctggaaatctgtgacgccctggtacgctccggcgccgtcggcgtggtggtagtcgattccgtcgccgccctggtgccgaaaaacgaactggaaggggagatcggcgacgcccagatggggctgcaggcccgcatgatgagccaggcgatgcgcaagctgaagggcagcatcaacaccacccgcacggtagtgatcttcatcaaccagctgcgcatgaagatcggcgtgatgttcggcaaccccgaaaccaccgccggcggcaacgccctcaagttctatgcctcggtgcgtctcgacgtgcgcggcgccggcaacgtcaaggaaggggagaccatcatcgggcgggataccaaggtgaaagtggtcaagaacaaggtctcaccgccattccgccaggcgcagttccggctgctgttcggcgccggcatcttccgcgagggcgaagtgctggatctggccgtcgacgccaaatatatcctcaagaccggcgcctggtatgagtatcaaggggagaaaatcgggcaggggcgcgagaaggccgccggctggctgcgcgaccgtcccgacctggtggccacattgaccgcgcagctgcgcacgcactacctgcaggcggcgcagccggccgcggcttcagccgacgcggacacgcccccggatgacgatgcctggcagagcgcgccggaggccgtgtga

SEQ ID NO: 434940 - DNA, 381 bp, Serratia marcescens
atgccggtacgcctctatgacgccggcgtgccctgcgggtttccgtcgccggcgcaggactacctcgagcagcgcctgtcgctggacgacatctgcatccgtcacccggagagcacctacctggtgcgcgccgaggggcaatcgatgcaggacgccggtatcctcgacggcgacctgctggtcgtggagtgtttctaccgggcacagcacggcgacatcgtcatcgccaccgtcgacggcgagttcacctgcaagcgcctgcagctgctgccccggccgatgctgttgccggccaatccggcctttgcgcccatccccctcggtgacgacatcgagaccgtgatcttcggcgtggtgcgccacgccattcacacgctgtaa

SEQ ID NO: 434941 - DNA, 513 bp, Serratia marcescens
atgtttttcaaaaagaaattaacagataaatcagcaaccaagatcataaaagagttaattgtttataacccgagaatagaagaaatggcaaacctattttggttttccgaacatgtaaatttaaacggatttattgcattaaacatttctctaatgagaatgatttctggaattattcatggtgtagcgggtaatgacataatcacctcaggaataaaggaaaatttactaaaaggttcattttcagaagagcaaaaacgagagttagataagctactgggaaacatagataaaaacataaaagcattcgccccggtgagcatacttaacttgagcgaggtagattttgacactttaatccgtccaatggtatctggtttctatataagaacaacaccactcccctctcaagttccaataagtgacattaaattaactcaaatattatttgctgaaagagtaaatgatgccattgaatattatataaaaagactagccaaatacaaagtttag

SEQ ID NO: 434942 - DNA, 822 bp, Serratia marcescens
atgtttgatattatttgtacgtttggtggcagtgacaaaccttattctattctagattttcaaaaattacccgacaacacgatagaactgttacgttattcactggtgtgccctgattgccgtaagcaggcgtactacagaaagaaaagtgttgacggaaaaaaggcctgttttggttccagatactgtacttgccgggaaactacagcttcatctcaacgacaaagggaggccaggaatgcgactgaggtggagcagattttgaccgagacagacaagattgaaatcagcttcgttactgcctccccttcttccgtaagcagtgaaccgactggtatccgagtggcgtcggatataacaaggacgggtaataataaagtatacgccataaaatctgagcaaacacgagtacccaaagtcacacttgaaaaaatactgcacagtttaatcagagggacggggttagcgacgtcggatacaattatccccatcgatggctttaattataaagccaagaacttatttgttaaatttccagatgctgagccactgaccaaaaaggctcatagattttattggggaacgctctataactctaatagtgatattgaatggcttaatcccgctgaatgcaaggatgtaggcattccgctaggtaatctgcggaaaagcattattgacaagttcaatatctctgatgctgaatctctcgagggagctgcaattatattttctggacggtgtagatggaataaagataagaccaaaaagataataagcatatgtgacagtgagcgtatatttatttcgttggttgattaa

SEQ ID NO: 434943 - DNA, 906 bp, Serratia marcescens
atgctattgagcgactatattgatgtggtgtacggaacagcacgggggaaccgggcacgtttcctgaaggagaacccggatattttgccccaggagctgagccgctggctgaaagccggtctgaaaatcagaccggagacaggagaaatctacaagcctgtatcacgccgcgtcagagtgccgtcggccatcgctgccggtgctggcgtgtttctctctgacgatctgcgtgagcgcgtgacgttgttggccactacacaaaacgtgacgacagatgccatgcttaatgccctggtcgagcgcgaagagctgtgccataagttgtctcctgccgtggccattggtattgctgttccggaacagcagatcgccggcatcgtcaaccgccattttgcagcgctgtcggaacacagtgaaacgtttgcctggcacagggtgctggagggactggtccatgaacttacggagtctgacctgctgtcatttcatacaggcaacattgccgagagccgacggctgaatataccccgtaccgcgtattactggtacggtggtttcgtggcaaaacgagtggccatgatgctgggctgcttcgatgtctatctgtggaatgaaatgatgcggcccgacagcgacgtggtcttcgtcggcgatgcacgcaatgcggtggcctgttactttatttgccagcagatgtgccgtcagctaaaagctgtgcggttgaactggcgtaaacagcagggagcatggggaagccgggcggagattgatgaagcggcacatcagtacactcagcgggtagcggaggggatcatggaaaacggtatttttatcggcggtgacgagcaaaatttttaccggttgcatcgctatgcggaaacacattatgcctgggccatgcgctga

SEQ ID NO: 434944 - DNA, 528 bp, Serratia marcescens
atggatcataatacgtttaagaatgaagcagagaaattgaaagatattatctcaagcggtaatttacatatcccttccttttgggaatgtatatggcctggggtgttgatgatttcttggatcgtcatatgtcctgttattgcgtttcaaatgtatattgaaatgtatagcggagatccaatgataattgctagcggagtatttgttggcatactctttactgttgccatcttcaatattcgttcgtggtatcttgcaattccttatgagtttagagctaactccttattttttaaaaaactaaaatctaaactggtggcctattatttggtatacatgttagttgtacccatcgcctcttatttttctacttacacgacggtagaagcagctttttacgctggtcctctcttgatatcgctgctgttgataatgtttataggtttaatggatatcagtcgttaccgtgtgtcagctttttcttcggtgctggagcttatcaaatcccgcaaacagggaggtgagtaa

SEQ ID NO: 434945 - DNA, 597 bp, Serratia marcescens
atggacattaaagagcagaagtccacgttgaaggcgttattgcatctgtcagaagtttattcgcggtttggaaacattccacatttcagcgtcgtgggctggttggtgatgggggctgtcatcgcggtggtggagtggttttggttttcattgggcggtgggttgctctctgggatgctgatatttgctctgattttaattgtgcattgggagcttacccggctcacccgctcctctatcttgcaggaaatatcgcggttgttggcgcgttatccagcccggctgcaatacgaataccagtcgttactccgggatattggcgcagggacgccagtacttccagcggcgataagcggctttcacgacagagtccttatccaaatatggggctgtaagttaagagactgggcttgtgaggaatatgcccttctgggacatggatgcacgcagaactcacatgacgctgtggggcagtcaaatgaggctcatgccgatgccgaaaacccgcttcttgagaatacccaccacaaggtggtggcgttccgcaaacccggctccgttcaacaggaagatgaagataaggagacagaccgatga

SEQ ID NO: 434946 - DNA, 1467 bp, Serratia marcescens
atggaatcgttcaaactctacatcgatggccggtttgacgccggttcagccaccttcgactcgatcaacccggcgagcggcgaaccctgggcgcaggtggcggaagcccgcgcgcaggatgtggatcgcgccgttgcggcggcgcaccgggctttccagggggccgagtggcgcgatatgaccgccggcgcgcgcggcaagctgttgttgcggctggccgacttgctggagcagcacgcccccgagctggcgcggctggaaacgttggataccggcaagatcatccgggaaacccaggcgcagatcgcttatgtggcggaatactaccggtactacgccggcctggccgacaagatggaaggcagcgtgctggcgatcgacaaagccgacatggaaacctgggtacgtcgcgaaccgatcggggtagtggcggcgatcgtgccctggaacagccagctgtttcttgcggcggtgaaaatcggcccggcgatcgccgccggctgcactctggtggtcaaagcggcggaaaccgcgccggcgccactgctggcgttcgccagactgatagacgaggccggttttccacgcggcgtatgcaatgtgatcaccggttttgccgccgaatgcggtgcggtgctgacggcgcatccgcaggtagaccacatcgcctttaccggcggcgcggaaaccgcgaagcacatcgttcgcggcagtgcggaaaacctcgccagcacctcgctggagctgggcggaaaatcgccgtttatcgttttcgatgatgcggatctgaccagcgcggcgaatgcgcaggtggcggccattttcgccgcgtcgggccagagctgcgtagccggctcgcgcctgctggtggcggaaagcatcaaggacacgtttttggcccggctgacggagaaggtgcgcagcatccgcatcgggccgccggatcgcccggacacccagttcgggccgctttgcaccaggcagcagcaagagcggatcgccgccatcgtcagccgttcgctggagcagggggcaaaactggtgattggccacgcggcgatcgactcaccgggcttttactacccgccgacgattgtcgattgcagcgcgcaacccgacgccgagtgcgtgaagcaagagctgttcggcccggtgctgtcggtgttgaccttcagggacgaagcggaggccattcagcttgccaatgattctgcctatggcctggcggccggcattttcacgcagaacctgacgcgcgcgcatcgggtgacccgtcgcctgcgggtgggggtggtgtggctgaatacctatcgagcggtatcgccgctggcgccgtttggcggctacggccagtcggggtttggccgcgagggcgggattgacgccgcgctgcaatacaccaccagcaaaacggtgtggctgcgcaccagcgacgatccgatagacgatccctttgtcatgcgctga

SEQ ID NO: 434947 - DNA, 666 bp, Serratia marcescens
atggattaccgcaaccaatcccttggcgcgctcgccatcaccattccccgggcatcccggctgtttcgccagcatcagctggatttctgctgcggcggccggcagtcgctggcgcgcgccgccgagcgtaaagggctggacatcgaccagttggagaacgcgctggccgcactcgccgccacgccggaacaaagccgggactggcgcacagcgccgctcggtgaggtgatcgattacattctgccgcgctttcatcagcggcaccgcgagcaattggccgaactggtgctgatggcggaaaaagtcgaacgcgtgcacggcgacaaacccagctgcccgcgcgggttggcgaagcagctgaacctgatccgtctggatctggagaatcacatgatgaaagaggaacagatcctgttcccgctgatcaaacagggcatggggccgcaggccgccggaccgatttcggtgatggagcatgaacatgacgaggcgggtgagcagctggaagtggtgaagttcctcaccgataacgtgacgccgccggagggcgcctgcaccacctggcgagcgctgtacaccggcatcgatgaatttatcggcgatctgatggagcacatcagcctggaaaacaatctgctgttcccgcgcgcgctgcgcggcgcataa

SEQ ID NO: 434948 - DNA, 174 bp, Serratia marcescens
atggcgcaggtggaaggcggcgacaagccgctgagcaacatgaaagccggccaggaagtgcgcatcgaacgcggtgccaacggcatgattaacgcgctgtcggtaaccacggtggacaacagccaggcgctgttccgccgccaggccgacggcagctaccgccgggaacgttaa

SEQ ID NO: 434949 - DNA, 666 bp, Serratia marcescens
ttgcagggcaatctgcgcattcacgccccgaccgggttcgggcagttgcacgtcacaccgctggccatcgctttccagcagcgtcatccgaacctcgccatcgagctgctgctggacgatcgcctcgccgacgtgatcggcgaaggcatcgacgtggcgttgcgtttcggtgaactgcatgcgcccggcatggtggcgaaacgtttgggcgagctgcagcgcctgctggtggcgtcaccggcctatctggccaggcatggcacgccgcgttccccggcggagttggcgaaacatgcacacattcgttacagcggcctgaacgacggcgatacgctcaccctgttcggcccgcacggccccgagacggttgctctgcggcccacgttccgcgccaacaatacgctatccctgctggccgccattgaggctggggccggcatcggcggtgctcaacggcctttaatcgccgaacagctggcgacaggggcgctggtgcccgttttgccggaataccgctacccgcccatggcgctgcacgcggtttatcccgccttgcgttttattccggagaaagtgcgcgcctgggtggcgcatctgcagcaggcgttgacgacgatcgaggggatcagcggagtgaatgcccccggccagacgccgggagcctaa

SEQ ID NO: 434950 - DNA, 579 bp, Serratia marcescens
gtgaaacactatatgcagcgcacggcgatccagggcagcccggcgatgctggcggccatcggcggcgaatgggtgcgcggcgcgccggtcgccgagcatccggtgcatccgttccggaaatacttcgagcagctgcagctgggcgacagcctgttgaccgcgcgccgcaccgtgaccgaagcggatatcgtcaacttcgcctgcctgagcggcgaccatttctacgcgcacatggacaagatcggcgccgccgactcgctgttcggcgagcgggtggcgcacggttactttgtggtgtccgccgcggccgggctgtttgtcgacgccgccgtcgggccggtgatcgccaactacggcatggaaaatttgcgctttatcgagccggtgaagatcggcgataccattcaggtgcggttgacctgcaaaaagaaaatccgaaagccgcagaaaaccgccgaagatcgcccgcacggcgtggtggtgtgggatgtgcaggtgttgaatcagcaacagcagccggtggcgctgtacagcattctgacgctggtggcgcgccaacagggggacttcgaagcgtga

SEQ ID NO: 434951 - DNA, 426 bp, Serratia marcescens
atgaccgatgcgcaccgcgatatccaatccttcgtcgatcagatcgagattgcgatcgttcaacaccatttcgatctgcatctgcggatagtcatcgagaaacgccatcaccactggcgccacgtagcggcggccgaactgcaccggcgaggtgacgcgcagcaagccgctcagctgcgcttcggcggtatcctgcaccaccgcctgataatcctgcagcagctgttgcgcgcgctccagcagccgcacgcccgcctcggtaggcgccagccgccgggtggtgcgttccaccagtcgggtgccgaaccgctgttccagcgcggcgatcgcccgggtgatcgctggcgccgagcgccgcagtttgcgcccggccgccgccagactgccctgctgcaccaccgccacgaagatggccaactcgtctaa

SEQ ID NO: 434952 - DNA, 1476 bp, Serratia marcescens
atgagcaccagcattagcgctaccctcaaggatcccacgctgttccgcgaggccaattacatcgacgggcaatggttgccggcccaagcaggccgttcgatcgccattcataatcccgccaacggcgagctggtcggccacgtgccggccttcggcgccgaagaaaccgcgcgcgccatcgccgccgccaagaaggcgcagcccgcctggcgtgcgctgaccgccaaagaacgcgccggcaaactgcggcggctgtttgaactgatgatggaaaatcaggacgatctggcacgcatcatgacggcggaacagggtaaaccgctggctgaaagccgcggtgagatcgcctatgccgcctcctttatcgaatggttcgccgaggaaggcaagcgggtctacggcgacaccattccgcagccgcaggccggtcgccgcattatcgtgcagaaagagccgatcggcgtgttcgccgccatcaccccgtggaacttcccggcggcgatgatcacccgcaaagccggccccggctgggccgccggctgtaccggggtgatccgccccgccagccagacgccgttctcggcgctggcgatcgccgtgctggcggagcgcgccgggctgcccgccggggtgtgcaacgtgatcaccggccccagcaagggcatcggcggcgaactcaccgccaacccggatgtgcgtaaactctccttcaccggcagcaccgaagtcggcgcgcagctgctggcccagtgcgcgcccaccatcaagaaaaccagcatggagctgggcggcaacgcgccgtttatcgtgttcgacgacgccgatctggacgccgccgtggccggcgcggtcgcctcgaaataccgcaacgccggccagacctgcgtctgcaccaaccgttttctggtgcaggacggcgtatacgacgccttcgctgccaaactgaaagccgccgtcgccaagctgaaagtcggcaacgggctggatgagggcgtcaccatcggcccgctgattaacccggacgcagtggagaaagtgcgcgagcatatcgccgacgccgtcgaacacggcgcatcggtgctgctgggcggcaagcctgacgcgctgggcggcaatttcttcaccccgaccatcctgaccgacgtgccgcgcacggcgaaaatcttccgcgaggagacgttcggcccggtggcgcccctgatccgcttcaaccacgaggccgacgccgtcgaactggccaacgacacgccgttcggcctggccgcttacttctacagccgcgacatcggccgggtgatgcgcgtggccgaagcgctggagtacggcatcgtcggcatcaacgaagggctgatctccaccgaggtggcgccgttcggcggcatgaagcactcaggtttggggcgcgaaggctcaaaatacggcatcgaagactatctcgaaatcaaatacctgtgccttggcggtttgggcgcttga

SEQ ID NO: 434953 - DNA, 1329 bp, Serratia marcescens
gtgtaccgtctgatagaaccaggccagcttgccggtggaggcgttcagcgccaacaggccgctggcgtagcgctccatttccggggtgcgatcgccgccccagatgtccggcgtggaaacgcccatcggcagatagacgatatccagcttggcgtcataggcggccggcgcccaggagttcggcgagttcggcacgaagtgatgctcgtccgccgggatggcgttcggatctttcgcgcccggatcgaaggcccacagcagcttgccgctgttgacgtcgaagccgcgaatgacgccggaaggctcgcggttggagtagttgtcggtcacggcgccggcgatgacgatcactttatcggtgatcaccggcggcgaagtcggctcgtagtggcccggcgtcgcatacggcatgttgctctgcaggttcagctcgccgttgttggcgaagtccgggcagggtttgccggtgtcggcgtccagcgcgaacaggcggccgtcgttgaccggcagaatgatgcggcgcgagcacatcgccggtgcggcatcgccggcggcgcccgcggctgcagcggtttcgtggtaagacacgccgcggcaggtgatgtgctggaaggtcgggttgtacttcagctgcggatcaaatttccacttttctttaccggtggcggcatccagcgcgaacagcttctggtgcggcgtacacatgtaaagggtatcgcggatcttgatcggcgtgacttcgttggtgatctcacccggatcgttggcggtcttcagatcgccggtctggaaacgccaaacctcttgcagctggccaacgtttttgtcgttgatctggctcagcggcgagtaacgggtgccttcctgggtgcggccataggccggccagtcggcgccgttggcgtctttcggctgcacctgcgcggcgtcgagagtgccgttgatctcttgcggatcgttgaatacggcataggccagtgcgatgacggtgattgccagcgccgcgctcagcgcaccgtaggcgaacttgccgttggcgaccagcttacggtagataaacggcagcaccagccacaggccgaagaagaaggtgacgtccaggcgcggcgtcagcgcccagaagtccgggccgacttcccacagggcccaaatagtggtgcccagcaggaataccgcgtacagcagcagcgcggtggcgcggcggcggaacagcagccaggaggtcgccagcagcaccagcccggcgatgatgtaatacagcgaaccgcccaacttggccagccaaatgccgccgccgagcagataaagcccgctcagcgcggcaaatag

SEQ ID NO: 434954 - DNA, 804 bp, Serratia marcescens
atgaatgaaacgtactattatggccagggtaaggtttatttggcacgtcgtgatggaaatggtcgtcccggtgcattccgctggataggtgatgtatcagcattatcggtaacgctggcatttgaacaaaagacgtctaagtcatcgcgaggcggaaaactggttaatacacgacgttacatgacgtctcaatcaggtgttgtgacatcaacatggcataatttttcggctgaaaatttgtcactgctgttgaattcaaatgtaatccgtaattacccggaaattatagaaaaagaagtgctgccgcaaaatatatcggctggcgaccgtattgcattgtcccaccaaaatgtttggggagtagaaattaatggcatgattgaggggcgtgattacagtgttgatgcctcctggggaatgattgattttatatcaactcccgttcatcagcctgttagcgttgactatgcgcatgccaatagctcaagcatttcgatcttttcggataaccgggatgagtttgtgtttcgttatgaaagcatcaatctggcagagtcaaatcagcacatgcttgttgagctttttcggctttcatttgaaccactgacgaccctgcaacttattaacaatgactcatcgataggaggcgtcgatacggcggctgaaataatgtatgacatgtctcgtcatgacgacccgattttaggtcgatttgggcgagtaacaataatcgagacgttaagtggtattacgcataacggcgctattaatcataacggtgtttatacccacggggggcaataa

SEQ ID NO: 434955 - DNA, 1908 bp, Serratia marcescens
atgaccacgcctgtgctcggtggggataacggcccggacaactggcaggctcagcagttggccagccgcacgttatacctgaagcaatatgttgacagctatcaggcgggcgagtctccactgcgttcgctggattatgctcagcaattaattaatgaagggcgcattcccgaaggcgcgaaattttccgttcgcagcagcgatccactaatttggagtatcgagggtcagaacgtatcgggcaccgcagtattattaccgaaagacctgcccagcggcgcatatgtaaaaacagtctcagaccggatacaagaagttgactccggtaacgagccgacattttcatcgattgattttgctggttttcctcatatcgcgtatatcgacggtgttttcgcgacaccggaatttgatgttttcacggtgccatatccggggcaatatagcgtggataaaaacttttttgctgtggcggctggtgcaggttcatcgtcatcctctcaacctgactggttgcaggaaactattgattccctggagcagctggctgaacaaagccgctggatgttggcatcggttggaaacactgttgtcagcctggtggctaattacattcatttcatttattacggccagtcactgcaaaacggcactgaagcctacccgcgcctgagccgcacgcagtttatcgacagcctgatgttcggtgactcagtgatgcccaaatcgccgacggcccccgaatttgtaccgcgtaacggggccgcgctgaaaccgctgattgccacctgctgtgatgcacagggtaacccgctgacggacgaacaagtcgccgcagctgcacctggcacgattatttacggcgagtcccccgcagagggctttacaaactcactgcgccgtaaatacctcgactatttcggtaaggcctcagacccggaacgtgtatttgtcgccagtgctgccggtgtcggtggccgaacagtggcacagctgagcaaaaatgcgaacccaaacctctatcagcgttttgtagatgcgatgcagggggtaaaagctattgctgatgccgaggggaaaagttatcaggtcggggcagtggtttatattcagggtgagaacgattatcccaataccagtaaagcggcatttaaagcagccactattcaattgttgaatgatatgcagacagaccgcattgcgtatttgccagataatcgcaaattcccaatattgaccgtgcaaacaggcgcgtcgtatacccgtgatgacaaggatatgtccgtaggtatggcgcagctggaaattgatgatgaactggattttgtttttatggtcgggccgtattacccctataccaataaacccagcgggcatttagatgcgaatggcacaaggaacctgggcgaaaaaattaccgaggtaggtttccgcgtttccgtactgaagcaaagctggaaatgcgtcaaacttattaaagccgttcggcgcggtaaagatgttctgctcgcgaagcatgtccccgtgcctccgctgcagttcaaggcaccgcgcgtggggtatgttgaacagtcctatgctgacaagggatacagcgcgttagaccgcgttggtggaattgatacgcccatcgctattgtcagtgtcgaaattaaacgtacttctgtcattcacctggtactggaacgagagcctatcggcgaattgattattcgttatgccgataagacgaatcacgacggcaacgggatggtgtgcgattcaagccagggcctgagtctgactgaatacacgtttctggccaacagtggcatgtaccctgaagccaacattcccgagctggtcaacaggccttacggtctcgaaaactggtcaactgcatatcaaaccactccggaggttatttaa

SEQ ID NO: 434956 - DNA, 783 bp, Serratia marcescens
atgggcattgcaacacgcgataaatccagcgatttaagcaacgataaaaacgcgtttatcgttcccccggtattctcggggttgctggcctgggcatacctgggtgggtcaattgagaaatcaatccgcaacttagcatttggacaacctggttttaccgcagtgggtaatccggaagtccaccccaacttcctgcggttcaagggaggaagtgattttctgcgcaccagcgttttccagcgccgcaatcacaccattttctgcgtggtacgctcaaacgatacattcgccgaccctgcacacacaccgatgtttatcggcaccttcagtgggcagaacgtcgagctaccggccaaggtttcgcacggcttctcgctgtttatcgtcaagaacgaccccggcgcaccgatgggcaaaatgaccgctcaggctggggtatttaacccaaatgcgccagacacaacgctgccgctgtccgtgaacatcgtcaaagatgtttcggtgttctcattgatttcactcacctgctcagatacgcatgtctcggtgcgagactggacgactggacagaccgcgatcaacccgttccccaccggctttatcccaggcctgtcaaatcgtgcctttgctgtcggcggcccggcgctagagactcaaaatctgcaaggcacgaatgacgtggcagcgtttacgatttatgagggggtgatgacggaaggtcaacaagcgctgactgctgctcgatttagggcgtactgtgatggggtaggtattctgctgtaa

SEQ ID NO: 434957 - DNA, 636 bp, Serratia marcescens
atgccagctggcgtattgcaccaggaagccacccagcgccggccccatcagcgggccgatttgccccggcagcgtcacgaaggtcatcgccgccatgtactgctcgcgcggcacgatcttcatcaccgtcaggcgcccgaccggcaccatcatcgcgcccccgacgccctgaagtacgcgcgaggcgatcagctcgttcagggtttccgaacgggcgcagaggagggagccgagggtgaacagcaggatggcgctgaaaaacacccgctgtacgccgatcttgtccgccagccagccgctggccggcagcgtcaccgccaccgtcagcacataggagacgatcaccgactgcatgcgcagcgggttctcccccaggctggcggccatcgagggcagggcggtgttgacgatagtggtatccagcgtctgcataaagaagccgaatgccactatccagagttgccagcgtaccgtggcggcgtgttttatcagcatctgtcggccattaatgcggcagcggggccagttgcttgttgcggcggaacttcgcctgcagccggtcgaagtaaaggtagaccaccggggtggtgtacagcgtcagcagctggctcatcaccaggccgccggcgatggtga

SEQ ID NO: 434958 - DNA, 864 bp, Serratia marcescens
atgacgattagcaggctcatttttagtgacattaagcgtgtttacggtcatttttcagcaatataccgacgccatattgtctgtttgcagtgtaaaaaacctgggcaaagcagggtaactttgtcatgcaaacgtcataaaactgacataagatgcccggttatcttacggcgcaagcccgattacatcagcgacagcgagacacatgacacagacgacggccaatcaacatccccgagatcgcatgcgcgggcgcatcgaccgcggcgtgcaggcggcagtgaccgccagcgggctgatggtgctgatgacgttgatgctgatcttcgtttatctgctgtttgcggtgctgccgctgttcaaaccggcctcgcttgggcaggcgcagccgctgccgatcgcggcgtcggccccggcgctggcgctgggcatggacgtgcagcagcgcgtcggttaccgcatcgacgcgcagggcgcggggcaattttatcgcctgacgccgaccccgaacggccagccccaggcgccgctggcgcagcagacgctgttggccaagccggcgctgctcgcgcaggccgccggagagcgcgatctgtttgcgctggcgcaggccgacggccggttggtggtggcgcgcgcggatttcgcgacggcggagaccggccggccgcagtggctgttcccgctcgggcagcagccgttggcgctggatccacagcgcaagccgctgaaactgatgacgctggcggatgcgcatcgcgggcagtatctgctggccggggtgaccgacgatcggcgcctggtgttcggccgtttcagccccgaccggccgccgcagttcagcgagcgcccgctggaacatga

SEQ ID NO: 434959 - DNA, 1536 bp, Serratia marcescens
atgtctgtaacaccgttaaactggcgcgctgccggcgccgttgccgaacaattgctggccggctggcaacggcgtggcgaacccggcggcgccatcaccctgtttgacgccgaacaactccgcgccactgcctgcgccggcctggccgatctggcgcagaatacccccttcaccgccgacagcgtggtgcgctacgcctccgtgaccaagcacatcttcgccgcgctggcgctgaacgccaccgatcgcgccattcggctggagcaacgcctgggtgacctgttgcccgccctgcagcctgcgctggcggacgtcaccgtcggccaggcgctggacatgaccggcggcctgcccgacgtgcgcgagacgctcggcctgctcggcatctcgctgcacgccgtcagcgaggcgcagccggtgatgcagtttgtcgaggggttggaaagattgaactacgaagccggcagcgaggtcgcctacagcaataccggctatcggctgctggaggccgcgctgcgcagcaaggggtatgatttcgacccactggtgcaacagcacatcgcccggccgctgcaggtgcagatgcgggcgccggaaagctggttcgacgtggtgccggggttggtgccgggttactggcgagcgccgcagggctggcaacacgccagcgccggcctgcacctttccgcctccggcagcctgaccggcagcctcaacgccctcacccgctggctgcagacgctgctggccgacgaaggccccggccagagcgtgctggcgcaactcggcgcaccgcgccgcctcaatcagggccaactcagcgcctatggcctggggctggcgcaaaccccgctgggccgccggcgcttgctcggccacggcggctcccacgccggttacaaaacctatttcctgctggcgcccgatcgccaggccggcgtagcgctggtggccaaccgcgaagactgcgacagtttcggtatggctttgcaggtgatggcggcgctgctgggtgaaccactgccgcagcgcagcatggcgatccccgacggcctttacgccacgccggcggaaccgcactggctggaggtcaaagacggcaacctggcctatctgggcagcgatgaaccgctgtatcagggcgaggacgggtacgcggtgtcgctgtccgcccatatgccaatcaaattgaagtggaccggcgaagcggtcgagggcgaagtcgggcatgtggcgcgccgttttctgccggtcacggccaacggcgactgcctgaagcatgtgcagggactgtggtatcacccgcactatcgcaccgcctttgaaattcgcggcgatcgggtgcatatcggcgtcggcccggcggcgcagaccgggacgctcagcccgctcggccagggccgcatgctggtggagtgccaggacggcccgtggttaaaacgcttttgcctctatttccgcggttacaacgtggatctcatcgccaaccgcagccggatgctgaccttccgccgcagcaccgtcggccgcgactga

SEQ ID NO: 434960 - DNA, 1017 bp, Serratia marcescens
gtgattagcgttaaacttcagtttaaaaaatccaaccatataaaccagtttatttatggtttctccatgctagaaaaagcagggatactcaaaatcacggatatttcagtccatgaagagatgagaaagaatctgctgcgcgcggaagtggatggaatgaagttcgtttacgacgccgaagacggcgatcatattgagcgcggttttttctcgcaggacgattatcactggtgcgatcattactttaaacgcagcctttctcagtcgctggcaaaccgctatccgaaatgcgcgccactcggccttaattactgcctgaggccgactcgtgggtggctggatgaaatgtcctgcaaattaagaaggctattaggtaaagaagacgttcttcactccgactttgacattgagccggttgccgctcgcgatcctaaaattctttttattaccgggctttgggatcctaaagagtttaatgatgctgacgtgcgcgaagaggttgagaaaattaacctcacacgcctttcggtattaaaactgttaaaacatgagttctcgcaccgcgccacctttggcgtaaacggcgacagagaattcacccgaaaaatagcaagcgaatttatcctgcccaatgcgaaaactaaccggctgaaattcatagaaaccatgaaggaacacgacatttgcctcacttctaccggtttacacgattctaccggctggcggtttggggaatatgttgccaccgccagggctgtcatctccgagcccctgcgctaccaactgcccggcggtttcaccaaggggaatcattatctggaatttaccgacgatgactcgctctttaacgccatcaatctgatgctgcaaaatgattcggccaggcagcaaatgatgtcggccaatcgcgactattaccaatgttggttgcgcccggacaaactgatcttcaataccctgcttgccgccagcctggctgcaaagaacacgacggagacggccatcatcgccgtttag

SEQ ID NO: 434961 - DNA, 1635 bp, Serratia marcescens
atgagagctaacgttgcgctgttgttgttggcgctggtcgcccccgcgctgcaggcggcggtcagccagaccaactggccggatgcggcggtaatgaaatttgtcttcgtggagaacaacgccgacgacaactttttcgttacgccggccggcgggctggatccgcgcatgaccggcgccaacaagtggaccgggctgaaatacggcggttccggcactatctatcagcagagcctggggtacgtggacaatggttacaacacggggctgaatgccaactggcgctatgacatgtggctggaaaatgcgccgataaagaatccgttcctcggcttgcgttgcatcaactggtatgccggttgcaatatggataccagcttgattctgccgcagaccaccgacgaaaagggattttatggcgccgtggtcacgccaggcggcgcaaaatggatgcacggcatgatgtcgccgagcttctatcagtatctgaagcagatggcggcgggtgacgctttcagcatgcagatcaacggttgccaaacgtcggtggcttacgacgccgcggccggcggccgttgccaggatcaggccagcggcagctggtacaagcgcaccgtcacgcacagcaaggcggcgcacctgcgctttatcaataccaacgctgtatcggaggtgttcgtcaacagcgatggggtgccgatcatcggcgagggcaatgccgattgcaagaaccagactatcggcgcccgctcgggcatcatgtgcaagatggtcagctatgatttgcagaccgacggcagcgtcagtaatacctcgattcatgttttcccggcgattaaccatgcggcgctgtcatcagcggtgaacgccgccgacctgcagttcagtctgaacggcaacacctggaaaaacacgtcgggcaccggcagctactatacctttaacgaactgaagagcagcaatgccgtctatgtgttcttctccagtaacttcttcaaacagatggttgcgctggggatttccgacagcggcactcgcgatctgatcaatttccgttttcagaacaccacctcgccggagtcgggatggtatgagttttccacctcaaaccagctgattatcaagccgcgcgatttcagcatcagcattatttccgatgattacgacaacagcccacatcgtgaaggctatgtcggcccggcggagccggcgctggagttcggctacctggtgactaccagcggcaaaaccgccgccgatcaggtgagggtgatggcgaccgggccgactcgggcgatcaacggggtgaactattgcctcttttcttccgcggataacagtacccaggtgccgtttcccgccaccctcggcatcaccaccagcaccaacggccagcagagcttcgccgccggctgcgatggccagtggcacgacatgaccaatgcgctctggagcagcaccccgtggaatgatatttccggcgaagtgggggtgctgaacaagacccgcgtgacctttagtattccgatgaataatccgatctcgctgagaaccgtcgacggcaacggttggtacggcgacgtcagcgccgccggtgaaattcatgtcgaagccacctggcgcaacatcaattga

SEQ ID NO: 434962 - DNA, 897 bp, Serratia marcescens
atggacgtgctactgacgatgcgcgcctttcgtcgcgtggttgagcgcaacagtttttataaggcggcggaggatctggcgatcacgccggcggcgttgagcaagcagattaagcagttggaaaaccggttggggacgctgttgctggtgcgtactacccgtagcatgagcctgaccgaagccgggcagctctattaccaggaagcctgtcggttgctcggcgagttcgacgcgctggagcagacggttgccgccagcgcgcagcaggtctccggcacgctgcgggtcaatgcgccgctttcgttcggcctgacggtgttgtcgccactgctgccgccgtttatgcaacgttacccgcagctgcaggtggagctgacgctcgacgacagggtattggacgtggtggcggccggtttcgatatttccttgcgcattcgccgacggctgccggattcttccctcagcgcccgggcgctgggtgaagtgcaccagcgaatttgcgccgcgcccggctatttggcgcagcacggcgtgccgcaaacgccgaatgaattgcagcgacacagctgtctggcctattccctggcggaaaggccggggcagtggcagttcaccgccggtgaggagagcctgagcgtgacgttcactccccggttgatcgccaacaacagcctgatgctgcgggatatgctggtggcgggactgggtatcggttcgctgccgtcgttcgtggcggaccccgagatcgccgccggcaggctggtgcggctgttccctgaacagattgccgacgtgcatcaggttttcgcggtttacccgacgcgccggcatgtgcagcagaaagtgagtttattcaccgaatttgtgcgagaacagggattgatgacggcgaattga

SEQ ID NO: 434963 - DNA, 1113 bp, Serratia marcescens
atggatcattgccatacttccgatctcatctccctggagcaagcgctggaaaaaatgctcgggcagatcgccccgctgcagcagaccgaatccatcgccctgaccgccgccggtaaggccttcgccggcgcgccgttcgacggccaatggccggccaacagctgcgtgcgcatcatgaccggcgcgccgatcccggccggggcggacgcggtagtgatgcaggagcaggccgaggtgagcgaccagggcgtgtgttttaccgcgccggttgaagccggacagaatatccgtctggcgggtgaagacattcgccgcggcgcgagcgtgttgccggccggcgtgaagctgggcgccgcgcagctgccgctgctggcttcgcttggcgtcgccgaagtgcaggtgatgcgtaagctgaaggtggcggtgttctccaccggcgacgaactgcagccggtcggccagccgctgcaggcgggccaaatctacgacaccaaccgcttcgcggtgcgcctgatgctggagcagatgggctgcgaggtgctcgatctcggcattatccgcgacgatcgcgatgcgctgcgcgacgccttcacacaggcagacagccaggccgacgtggtcatcagcagcggcggcgtttcggtcggcgaagccgactacaccaaacaaatgctcgacgaactgggccaggtcagcttctggaagctggcgatcaaacccggcaaacccttcgccttcggcaaactgggccacgcctggttctgcggcctgccgggcaacccggtttccgccgccctgaccttctaccaactggtgcaaccgctgctggcgaagctggccggccacagcgactggcgcctgccgccgcgcctgcgcgcacgggcgctgaccccgctgaagaaatcgccgggccgcctcgattttcagcgtggcgtgttcagcagcaacgccgcgggcgaactggaggtcagcaccaccggccaccagggctcgcacgtcttcagctcctacagccagggcaactgcttcatcgtgctggagcgcgaacgcggttcggtggcggtaggcgaaacggtggagatagagccgttcaacgccctgctgaggagctga

SEQ ID NO: 434964 - DNA, 318 bp, Serratia marcescens
atgaaaccggccgccgacaagctggccgtggcgctgcaggacatcaccttcaacgcgccgcaggtgccggtggtgaacaacgtcgacgtgcgcaccgaaaacgatccggaagcgatccgcagcgcgctggtgcgtcagctgtacagcccggtgcgttggaccgagagcgtagaatttatcgcagcacagggagtgacgtcgctgctggaagtggggccgggcaaagtgctgaccggtctgactaaacgtattgttgacaccctgacggctgcggcggtgaacgacaccgccagcctgtcggcggcgcttgaacaataa

SEQ ID NO: 434965 - DNA, 210 bp, Serratia marcescens
gtgaaagccgtgcaggacgtactgtacaaacacatcgccactgcaccgatgaccaaagcgcctgcgccggcctacgtgccggaagaacgcaagcacagcgactggcagcgcccttccttcaactttgaaggcaaaggctcggcaggcggccattcggcggtgagccaggccaccgcgccggccaccaagccgcagccggttaacgaataa

SEQ ID NO: 434966 - DNA, 1047 bp, Serratia marcescens
atgaccgcacaacctcaagttctgaaaatccgccgcccagacgactggcatatccacctgcgtgacgacgagatgctgaaaacggtggtgccctataccagccaggtatttggccgggcgatcgtgatgccgaacctggttccgcccgtaacgaccgtggccgccgcgcgcgcctaccgcgatcgcattctggcggcggtcccgcagggtcacaacttcactccgctgatgacctgctatctgaccaactccctggcggccagtgaactggtcaacggctttgagcaaggggtgtttactgccgccaagctgtatccggccaacgccaccaccaactccagccacggcgtcagcgacgtgaccggcatttacccgctgttcgaacagatgcaaaaaatcggcatgcctttgctgatccacggcgaagtgaccgaccctgccgtcgatatcttcgaccgcgaggcgcgctttatcgagcaggtgatggaaccgatccgccagcagttcccggagctgaagatcgtcttcgagcacatcaccaccaaagaagcggcgcaatatgtgcaggcaggcaatcgtttcctcggcgccaccatcacgccacagcacctgatgttcaaccgcaaccacatgctggtcggcggcattcgcccacacctgttctgcctgccgatcctcaagcgcaatgtccatcaggaagcgctgcgtcaggcggtcgccagcggctcggatcgtttcttcctcggtaccgactccgcgccgcacctcaagcatcgcaaagagtccagctgcggctgcgccggctgtttcaacgcgccgaatgccatcccggcttacgccgcggtgttcgaacagctcggcgcgctggcgcactttgaggccttctgctcgctcaacggcccgcgtttctatggcctgccgctcaacgaagacttcatcgagctgcagcgcgtgtcgatcacccagccggaagagatcgccctgggcaatgaatccgtgatccccttcctggccggtgaaaccctgaactggtcgctgaaagactga

SEQ ID NO: 434967 - DNA, 318 bp, Serratia marcescens
gtgcgcgatacctcgcgggtcaacgcgccgcagagcctgaacctgctggaagaacaggatacgctgacggtcttcggcttcgacgccaagctgcaggcgcagttggccgggctgggctgcggctatctgccgcgttctctggcggaaccttacctgaacagcggcgaactggtggcgaaacgcgttgaatctgagcgctgcagcgacgttgcctatttcggctggcgggaaagcgccagcggtctggcggccaagtggtggcgcgagcggctgcagcgttacgcggatgacggcgaggcttacccggcggcgcagtga

SEQ ID NO: 434968 - DNA, 1155 bp, Serratia marcescens
atgactcagcaggaattcaacaaccgccgtcaggcgctgttggcgaaaatggcgccggccagcgcggcggttattttctctgcgccggaaacgacgcgcagtgcagattcagactatccctatcggcagaacagcgacttttggtacctgaccggcttcaatgagccggaagcggtgctggtgctgatcaaaagcgacgaaacgcacaaccacagcgtgctgttcaaccgggtgcgcgatctgacggcggaaatctggtttggccgccgcctggggcaagacgccgcgccggcgaagctgggcgtggatcgcgcgctgccgttcgatgaaatcaatgaccagctgcacctgctgctcaacggcctggacgtggtttaccacgcgcagggtgaatacgcctacgccgatcagatcctgttcggcgcgctggacaagctgcgcacgggcatgttcgaataccagctggaagcggaaattcaccatgaattcacccgcctcggtgcccgctacccgtcttacaacaccatcgtcggcagcggcgaaaacggctgtatcctgcattacaccgagaacgagagccagatgcgcgacggcgatctggtgctgatcgacgccggttgtgagtaccaggggtatgccggcgacatcacccgcaccttcccggtcaacggcaagttcagcaagccgcagcgcgcggtgtacgacatcgtgctggcgtcgctgcagcgcgctttggaactgtttaaacccggcaccagcatccgcgaagtcaacgacgaagtggtgcgcatcatggtggtcgggctggtggaactgggcgtattgaaaggtgaagtcgatcagttgatcgccgagcaggcgcaccggcagttcttcatgcacgggctgagccactggctgggcctcgacgtgcacgacgtcggccactacggcacgccgagccgcgatcggctgctggagccgggcatggtgctgaccgtggaaccggggctgtacattgcgccggatgcggacgtgccggcggaataccgcggcatcggcatccgcatcgaggacgacatcgtgatcaccgccgacggcaatgaaaacctgaccgctaccgtagtgaaagacgccgatgccatcgaagcgttgatggcggcggcaaggtcataa

SEQ ID NO: 434969 - DNA, 405 bp, Serratia marcescens
  misc_feature (389)..(398): n is a, c, g, or t
atgttcgatgctcgcaaggcggcgccgctgcccgcacgctggtgttgcgcgctgctggcgctgccgctgggctgcgccgccgccgacggctataccttcgatcccgcgctgctgcgcggcagcgtgctgagcaacagcgccctgagccagttcaaccaacaggacgccgtcgctcccggcagctatcagatcgatctgtacctcaatggccagtttctcgaacgcgatcaaattcgcttcgtacgcgcaggcaagcaggtgctaccctgtttcgatcgggcgcagctgacgcgcttcgggttgaaaaatccgccgacggccgccgaagcggaatgcctgctgcccggccgggatctgaaggacatcacggtgaacgccgatatctcgcnnnnnnnnnngatctga

SEQ ID NO: 434970 - DNA, 381 bp, Serratia marcescens
gtgaatcaggtacaggtcaacgtaatcgagttgaagtcgattcagagagcgttcgaactgtgctttagcgccttcgtagttagtatcctgcagccacagtttggttgtaacaaagagttcgttacgggcgataccgatctgtttcagcgcattcccgacctgggtttcattctggtaagacgcggcggtatcgatcagacggtatcccgtatcgatggcatcaataacggctctttcgcattcagcggcatcagacatctgaaacacaccaaagcccagcaggggcatttcaataccgttgttcagttttacagtttgcatgacgttatccttcatctgttgtgttggaaaagcataactcaaagtgatttattcgattag

SEQ ID NO: 434971 - DNA, 948 bp, Serratia marcescens
atggcactttctgcgcatatcaccgctttgcgggcgatcgattctcataccggcggagagccgacccgcctgatcgtggaaggttttcccgatctcggcgcgggcagcatggcggaacggcgggcgcgcttcgcgcaacattatgatgattggcgctgcgcggtgatgctcgaaccgcgcggcaatgacgtgctggtgggggcgttgctgtgccgaccctgctcgccacaggccaccgccggggtgatcttctttaacaacagcggctatctgggcatgtgcgggcacggcactatcgggctgatcgcttcgctggcgcacctggggcgcatccacgccgggcgtcacctgatagagaccccggtcggcccggtaaacgccacgctgcacgaggacggcagcgtcacggtagagaacgtggcggcttatcgttaccgccgccaggtgcggcttgaggtggcgggttacgggccggtgacgggtgacatcgcctggggcggcaactggttcttcctgatcggcgagtcgccgttgtccatcgataaacaaaatctggaggcgttgaccgcgttcacctgggcggtgcggcagacgttggaacaggcgggcattcacggtgaagacggcggagcgatagaccatatcgaactgttcggtgacgatccgcaggccgacagccgcagcttcgtgctgtgccccggtaaagcctatgatcgttccccgtgcggcaccggcaccagcgccaaactggcgtgtctggcggcggacggcaaactgccgccggacacgcagtggcggcaggccagcgtgatcggcagcgaattccaggcctattatcgttggaacggcgatcgcatcgccccctttattcgcgggcaggcctacgtgtgcgccgatagccagctgctgctcgacgaacgcgatcccttcgtctggggaatacgctga

SEQ ID NO: 434972 - DNA, 180 bp, Serratia marcescens
atgatgccgccggcggaaatggcggcctcaacgccggcggaaccgaagggggcaaagccctggctgtgcaggttttccggtttgaaaaagctgaacaacaccacgatcaccagcagcggcaccagaaacttcagcacgctaatcaggttattggatttggcgaaggttttgacgctgtaa

SEQ ID NO: 434973 - DNA, 552 bp, Serratia marcescens
atgaataccatactttacgcctggcaaaactgggcctatatcgccggattgacgctggaacatctgctgctggtcggcgtcgccgtcggcctggcgatcctgatcggcgtgccgctcggcgtgctgatcgtccgccacaaatggctggcgacgccggtgctgagcctggccacgctggtgctgaccgtgccctccatcgccctgttcgggctgatgatcccgctgttttccttaatcggccacggcatcggctacgtgccggcgatcaccgcggtgttcctctactcgctgctgccgatcgtgcgcaacacccacaccgcgctcgacaacctgcccggcgggctgcgcgaagccggccgcggcatcggcatgacgttctggcaacgcctgcgctgggtggagatcccggtggcgctgccggtgattttcggcggcatccgcaccgccgtggtgatgaatatcggcgtgatggcgatcgctgcggtgatcggcgccgattggttattgcaccgcttgcaaattgcgctaacgcccaaggggatccgctcatga

SEQ ID NO: 434974 - DNA, 135 bp, Serratia marcescens
atgactgaaaacattgcggtaccgctgtcggtactggatttatcgccaatcccgcaaggggccaaagcgcgcgacgctttccactgttcgctggatttggcacagcacgccgaacgctggggctaccggcgctaa

SEQ ID NO: 434975 - DNA, 228 bp, Serratia marcescens
atgactatgcaaatccgagttgaacatctcagtaaaacctttgtgctgcaccagcagtacggcacccgcctgccggtgctgcacgacgccaacctgacggtccacggcggtgaatgcgtggtgctgcacggccactccggcagcggcaaatccaccctgctgcgctcgctgtacgccaactacctgccggacagcggccatatctggatcaaccaccagggcgactag

SEQ ID NO: 434976 - DNA, 276 bp, Serratia marcescens
atgaacaccagcgtcgccgggttcagtaccgggttggcgagccagaaggccagcgcggcgccgctggataccgactggcggcgcatgccggcagcaaccggcgcggcacagcaggtgcacatcatgcccggcagcgcgatcagcgcccccagcacggtgccggaaaaacgccggtggccgagcgtgcgcgccagccagtcacgcgggatcagcacctgcaccagcgaacctaacagcaccccgagcagcgccgccttccataccgcggtgaagtag

SEQ ID NO: 434977 - DNA, 513 bp, Serratia marcescens
atgcgaagtctggaagatcaacttgccgcttatgccgcctaccaccgcgatgcgcgcaatatcgccacgcattttatcggcatcccgctgatcgtcgtcagcctgctggcgctgctctcccggccggcgtggggggcgggatggctgccgttttcgccggcctgcgcggtggttatcgtcgcggccctctattacctgcggctgagcctgcgccttggcgtcatgatgctggcgttgctgctgctgtgcctcgggatcggcgcctgggtggcgtcgctgtcgacggcggcgtggctgagcatcggcatcggcggtttcgtcatcggctggctgtttcagtttgtcgggcatttctgggaggggcgaaaaccggcgtttatggacgacgtgacgggccttatcatcggcccgctgttcgtgctggcggaagcctgcttcctggccggcgggctgcgcgaactggcgcggaacatcgaactgcgtgcgggcaaagtgcgcaatgcaaagcgctaa

SEQ ID NO: 434978 - DNA, 750 bp, Serratia marcescens
atggaaacgctcggccggcacgccgagccggcggcacagctgctccacgtggtccatgtagggcgcagggccgcaggtcatcaccgtgcgttcggcgatatccggcgccgcctgccgcagcgtctgttcatcgatgcggccgctgaggtaaccgggttgcagatcccgctcggccatcagcgtcaggcgcagctgcggatgggcggcgcacagcgcgcgccattgatcggcgaaaatcgtgtcggcgggggtgcgcacgttaaagatcacggcgatatcgcaggccggacggttggcggtcagccagcggcacatcgagacgatcggcgtcacgccgcagccggcggccagcatcagataacgctcggccgggtggcgctcgcagctgaactcgccctgcgcgtcggacaaccacagcgtgttgccgggcttgacctcttgcgtcagccagcgcgatccgatgccgtccggcaggcagcgcacgctgatgctgagaaagcggctctggccgggcgaggaggagagcgtataggcgcgcagcgtctcctcgctgttgcggatgctgaccagcgcaaactggcccgcctgataggggtagaaaacgtcgcagatcaggttcagcgtccagacgtcggcggtttcgcgctggatggaatgtacctgcatgcggttcgggcaaagcggagtgggttgagtcatcggggcacctcaaaaagcaaaggggccggcgcaggcggccccataacgtaa

SEQ ID NO: 434979 - DNA, 297 bp, Serratia marcescens
  misc_feature (129)..(138): n is a, c, g, or t
gtgaaactgacatggacggaacccgccatcgccgatcgtctggcgatttatgaatggttggaacttaaaaatccggccgccgccgcagaaaatgatgcaaaaatcgctgacgcggcggcacgcctcgtnnnnnnnnnnacgcctcgtgcatcatccgccagcgggaaaacggggcggatagccggtacgcgcgagctggtcatctccccgtcctatttgctggtctatgaatgggcggctcaacgcgtcatcgtattggccatcgtgcatactcgccgtcggtggccgccggcatag

SEQ ID NO: 434980 - DNA, 1167 bp, Serratia marcescens
ttgaaacgcggcatccgttccgaggccgcggatctgtaccggcagcaagacgtgaacgtcacgctcgatcacgattactggcgctcgagcggcaccggcggtatttccgacttcaatgcgcacgacaccatgctgcaggtggacatgccgctgtatgacgggcgcgcctttttgcgcaccgacaccgtgcagctggacgccggccgcttctcgaccgacggcagcggcaaatactacgagaccttcggcacctgcaatacgcaagggtgccgcggcgatgaacatcagaaatccaccggcaccagcgtggcggccggctggaaaaacgaccgctgggccgccgatatcggcacgacgccgatgggcttcgaggtggtcgactggaccggcggcctggcctacagcggcgactggaaccacatcggctggacgctggcggcctcgcggcggccgatctccagctcgctgctggcgttcggcggcgccaaggatccgaacaccggcaccacctggggcggcgtgcgcgctaccggcgtcagcctgagcgccagctacgatcgcggcgaggcgaacggcgtgtgggccgatctcagcgcgcaccagattaccggcaagaacgtggcggataaccagcggcagcggttgatggccggctactactacaagctgatcaacgaagacaatcgccgtctgagcgtcgggctcaataccatgctgtggcactaccagaaggatttgagcggctattcgctggggcagggcggctattacagcccgcagcaatatctgtcgctgtcgctgccggtcaactatcgccagcgcaccgagaactggtcgtgggagctgggcggttcggtttcgctgtcccattcgaaaaccgacagccagcgccgctatccgctgcaggggctgatcccggattcgctgcccgataagttcgccgtcgaggacggcagctcctcaagcggcgtcggttataccctgcgggcgatcgtcgaacgccgtctcagttcgcactggacgctcggcgccggtatcgacattcaacaggcgaaggactatacgccgagccacgcgttgatttatctgcgctattccctggccggctggcagggggatctcgatttgccgccgcagccgctgacgccttacgccgacttcaagtag

SEQ ID NO: 434981 - DNA, 354 bp, Serratia marcescens
  misc_feature (304)..(313): n is a, c, g, or t
atggttaaagcggattgcattgtcgcgttggacgaaggcaccagcaacgccaaggccgtggtagtggatgcgcagggggcgatcgtcgccagagccagcaggccgttgacgctgcagacgccgcagcccggttgggtggaacagcggggcgaggccttactggcagcctctctggcggtgctgcgggaagcgattgcgttggccggtgcatcccgtattgccggtatcgccatcagcaaccagcgtgaaaccgccatcggttggcggcgttccgacggccagccgatcgggccggccctaaccnnnnnnnnnngccctaacctggcaatgcgcgcgcgccgccgatttctgtga

SEQ ID NO: 434982 - DNA, 1623 bp, Serratia marcescens
atggagaaagccgtcctttttaaaagctctgctgcggaaaccatttttgatcaagccagggcagcagggtgtaagattatcgttataagcgatatgtatttaccatctaaagtgttgcgcgaactgctggaaaactctggttacaaagaccttgatgatgtggctattttctcatcaggcgaggagggcgtatctaaacactcggggaaattataccctagggttagagagaaacttgggctaacaggaaaacgttggttgcatattggtgataataagcattctgatattgaaatggcgaagtgtcattcgattgatggattacatgctgattggtcacaatatgatggaggtgtttcgcggcattggcagattaaggatgttatcggcgagtctattaatctctctgtaacgaatatccaagcaaagcaatttttcgctgatgacccgcttactgagattggtttcaaaatttttggcccattgatgctgggctatacatcttggatctacgctacggcaaaaaaactaaatgttgaaaaactcttgtttttagctcgtgatgcacatttaattcgcgatattttcctgaatttctacaataaagatcgtcaatttgactatcaatatgtttatctttcacgtgcatcgacttacaaaatgggaatgactgactggcccatgcatcgtatttggcatctttttggtggtaagaataggaaaagtataaaaagcattctttctgttattggattaaatgctgaaaaccatctttctgatattcacgatgttggtttcccagacgaaaattatgttccgagtcatcacgagcgcgatagagttcactggctgattaataagttgttcacgcatgcattattgcaaaacaagaagtgtcgagatgaattctcagattacttcagagaagcagtgggtgactataagtcagttgcgttagttgatattggttggatgggcaacattcaatctgtatttagtcgtgctctaggtgacatatgggctgataagaaaataagtgggctatatctagcgacttttgaaggggctaaggataacaaatcatattataatgatatgaaaggttggttgaccaattatggcgaaccgagaaatcatcatgacttgattctctctggtggggtagaactattggagtttgctatggcagataacactggttcgactaagggctatgagaaaattaatggtaaaacacagcctgtgaaagaaattgtcggtgacgaagagttggaatacctaaaaaaggcgcagcttttacaaaagggtattttgtccttctttgaatatgtctcttccattcttgcggtcgtaccggcagaggctatgagcagtcgtttgttgtctgaacctttctttacgcttgtttctgaaccaagcagtcaccagttggacgtcttagttggtatcactcactctgaggctgcaggggccaatagtgggcgtattgctttggcgaaaaagttaaatctgaaagatcgtttgcttcagggaaataaatattccgaaatgtttgaacagagctattggaaagaaggttatcggcgcataaacaggaagaaattctggaagaaatacatctaa

SEQ ID NO: 434983 - DNA, 351 bp, Serratia marcescens
gtggcgctggcggcgcggctgctgtggcaagggcagaccgatccgctgctttcttccttctcggtggacgcgctggcggcggcgcagcgcaccgtgccggatttgccgcgcggcctgctgctggaggactgggacgacaactggcgcgagctgaccgaacgcctggattgcgtctcgctgcatatcgatcacaaagcgctgaccgccgagcgggtaaaagcgttgaaagacgccgggctgcgcattctggtgtataccgtcaaccaaccggaacgcgcgcgcctgctgctcgactggggcgttgactgcatttgcaccgaccggatagatttaatcggcccggatttttaa

SEQ ID NO: 434984 - DNA, 783 bp, Serratia marcescens
atggacattatcgcgttggccggcagccgccatgcgacgcaagactgcagcggcctgagcccgatggggtggcagctcggcgcgcgggatttcgatcgcgtgcggcgtgcggtgccgtccgtagggcgctgcgccttctccgccgcaggcatcacgttggatgcgctcctggtgcggcccgccgcggcggcgcgggatctggcgctgacatcgcgcgcggccattgccgatcggccgctgacggcggtattgcagcgctgcacggcgcagtgcgggttacacggcgagctgggccgattggtgaagcggccgttaacgccggagccggccgcgctggcgcgggatttttcccgttggctgcggggcgacacggtcgactggcaccaggcgctgggcaaggggccggggctgacgccgagcaacgacgacaccttgctcggcctgctgctgagcgcctacctcgacagccgcatcccggttaccgggctggcgccgtttttcgcccagacgccaccgctggacgcgctgaccacgctggtgagtgcgcactacctgcgttacgccgaacagggcgtgttcgccacgccgctgcatgcgctggcgcgggggctgcgggcgcctgaagaggtatcggcggcggtggcggcggtgctgagcctggggcacttttcgggagcggacacgctgctgggcgtgtggctgggggtgacgacgattaacgcactgtgcggcgcgcggtgtgaacacgagggccggatcgcggatccggccggaacggtatga

SEQ ID NO: 434985 - DNA, 498 bp, Serratia marcescens
atgattgacccgaccgcccgcaatcaagaaatcgcccgcctggcgcagcagccgcagactggcgtgttgctgctggacgtggtgatcggcttcggcgctcaggacgatccggcggcgtcgctggcggctgaggtggccaacgtgcgcgcggcgcgcggcgcggcccacccgctggcggcaatcgccaccgtcaccggcaccgaacaggatccgcagcagcgctcgcggcaaatcgccaccctgcaggaagccggcatcgcagtgatgccgtcgctgccggcggcggtcgcgctggcgcaccagctgattacccccgtcttacccgcacctgaacgcgaacggccggccttgctggacggcgtcgcggtgatcaacgccgggctgcgcagcttcgccgatgacctgcaaaccagcgacatcccggtggtgcactaccagtgggcgccggtggccggtggcgatcaacgattagccaacatcttgaaaaaattaaagtaa

SEQ ID NO: 434986 - DNA, 621 bp, Serratia marcescens
atgtcgaacattgagttgcaaccgggcttcgattttcagcaggccggcaaagaagtgcttcagatagagcgtgaagggctggctcagctcgacagctacatcaacgcagacttcacccgcgcctgcgaaacgatcgccgcctgcggcggcaaagtggtggtgatgggcatgggcaaatccggccatatcggctgcaagatcgccgcgaccttcgccagcaccggcaccccctcattcttcgttcacccggcggaggccagccatggcgatttgggcatggtcaccccgcaggacatcgtgctcgccatctccaactccggcgagtccagcgagatcctggcgctgatcccggtattgaaacgccagcagatcaccctcatctgtatgaccaacaatccggaaagctcgatgggcaaggcggcggatatccacctgtgcatcaaggtgccgcaggaagcctgcccgctggggctggcgccgaccaccagcaccaccgcccacgctggtgatgggcgatgcgctggccgtcgcgctgctgaaggcgcgcggtttcacgcaggaagatttcgcgctgtcgcatccgggcggcgcactcggccgcaaactgctgctgcgggttag

SEQ ID NO: 434987 - DNA, 180 bp, Serratia marcescens
atgcaaacgaagaagagtgaaatctgggttggggcatttatgctgatcgcgctgtgcgccatcgtgtttatctgcctgcaggtggcgaaccttaaatcgatcggcagcgagccgacctaccgcatttacgcgacgttcgacaacatcggcggcctgaaaccgcgttcgccggtgtggtga

SEQ ID NO: 434988 - DNA, 699 bp, Serratia marcescens
  misc_feature (614)..(623): n is a, c, g, or t
atgaaagccaaactcttgccgctgttcctgctcaccgccctgcccgccgccgcgttagccgccacgccgccgaatacgctggtggtggtgcaatcgctggatgacatcgtcagcctcgatccggcggaagccaacgaactctccagcatccagacggtgcccagcctgtatcagcggctggtgcaggcggatcgcgacgatccggccaaggtggcgccggtgctggcggaaagctggcagagcgatgcggcggccaaaacgctgacggtgaaactgcggccgcaggcggcgttcgcctccggcaacccgctgaccgccgacgacgtgatcttttcctacagccgcgcgatcaaaatgaacaagtcgccggcgttcatcctcaacgtgctcggctggcagccggacaacatcgacgcgcagctgaagaagatcgacgaacataccgtgcagctgcgctggacggcggacgtcagcccggcggtggcgctgaatattctttcgacgccgatcgcctcgatcgtcgacagcaaggcggcgctcgccaacgtcaaagacggcgacttcggcaacgcctggctgaaaatgcactccgccggcagcggcccgttcaagannnnnnnnnnatgcgcgtctatcagccgcatcaggcgatcgtgctggacgccaaccccaccacgccgggcgacaagccgcagctga

SEQ ID NO: 434989 - DNA, 747 bp, Serratia marcescens
atgcgatctctgccgattaacctgcccgcccaccgtgccgaaccggcctgcgacttcgcccgcgccgctttccgcgcgctgctggtggaggtcaaccttacgcccaaaccggggctggtggatcgccataacaccggcgcccaccgcgatatggatctcgggcacttctaccgcagcgcccgcgccatcggcgtgtggctgccgcgctttatccaacgcgggcgcgaagacgccactttgccggcagagcagcagctggcgcggctgcggccgctcggcctggcctgcgaaaaccagatgtttcgcgccaccggcggcattaacacccacaagggcagcgtgttctcgctcgggttgctgtgcaccgccttcggccgcctgcagcagcagggtcgcgccatcggcgcagaggcgctgtgcgccgaggtggcggcgatgtgccgggggctggtggatcgcgagctgcggcgcaacaacgctgggcagaccgccggccagcggctgttcgccgcgcacgggctgagcggcgcgcgcggcgaggcggaggccggtttccggctggtcattgacggcgcgctgcccctgtatcggcaacggctggccgagggcggctcggcgggggaggcgggtctggcgcgcctgcggcgcttcgatgctgactgtatcgcccgcaacctcagccccggcggcagcgccgacctgttgatagtgacctggctgctggcgcagctgggtgcccaagaataa

SEQ ID NO: 434990 - DNA, 813 bp, Serratia marcescens
  misc_feature (797)..(806): n is a, c, g, or t
atgtcactgactgatattaaagtaaaaaatgcaaaaccccttgagaaggaatacaagcttactgatggctttggtatgttccttcgtgttacccctaaaggttcgaaatactggcaaatggcttaccgcttcgaagggaaacaaaaactcttctctattggtgtttaccctgctgtttctctttctgacgcaaggcaacgccgtgacgaggccagaaggcttctggctcagggtattgaccctaatgcaaagaaacaggcagaggttaaagagcttaaagccaaacgtgataatacacgctccttcagaacagtagccaaagcgtggttctctacgaaaacaaaatggtctgatgattatggtgatgccgtatggaagcgccttgaaacttatgtcttcccggtaatcggtgacaaagatgttgccgagcttgatacgggtgatctgctggttccggtgaaaaaagtggaggcacttggttatcttgaagttgccatgcgcattcaacaatacattacggcaatcctgcgtcatgccgtccagcaaaagctgatacgccataacccagcctatgatatggaaggtgcagttcagaaaccacaaactgaacaccgccctgcacttgagctggaagaaataccccagctactgaacaaaattgccgaatacaaaggccgcaggttaaccatactggcaatacagctcaatctgatgattttcattcgttccagtgagcttcgtttcgctcgctggtctgaaattgatttcaaaagtaagttatgggtgatacccgaacnnnnnnnnnnagcgtga

SEQ ID NO: 434991 - DNA, 1401 bp, Serratia marcescens
atgccacaacatgttttctgctcgcttcgctacagttttcttgttgatcaggtgtttaggtccgacgttttcagagatggagttaccaccccaggagccgcaacccagcgtcagcgaaggcgcgagtttgaagttatacaggtcgccgataccgccctgagaagccggggtgttgatcaggatgcgagccgttttcattttatcgccgaagtaggcgatgcgagccgtttggttatcctggtcggtgtacaggcaggaagtgtggccgataccgcccatggcgaccagtttttcggctttggcgacggcgtcttcgaagtctttggcccggtacatcgccagcgtcggcgacagtttttcatgggcgaaaggttcggactcgtcgaccagcttcacttcgccgatcagcactttggtgttggccggcactttgatgcctgccatctcggcgattttcggtgcggattgcccgacgatggccgcgttcagaccgccgtttttcaggatgatgtcctgcaccgctttcagttctttaccctgcagcagatagccgccgtgggaagcgaagcgttcgcgtaccgcatcataaatagagtcgacgacgatgaccgactgttcggaagcgcagataacgccgctgtcgaaggttttggacatcaggatagacgcgaccacgcgcttgatgtctgcggtttcgtctaccaccaccggcgtattaccggcgccgacgccgatggccggtttgccggagctgtaggcggctttcaccatgcccgggccaccggtggccaggatcaggttgatgtccgggtggtgcatcagctggttggacagctcgacggtcggttggtcgatccaaccgatgatgtctttcggcgcgccggcggcgatagcggcttgcagcacgatatcggcggctttgttggtggcatttttcgcacgcgggtgcggcgagaagatgatgccgttacgggttttcaggctgatcagcgctttgaagatcgcggtagaagttgggttggtggtagggacgataccgcaaatcaggccgataggctcggcgatggtgatggtaccgaaggtgtcatcttcagacaggatgccacaggttttttcatctttataggcgttgtagatgtactcggaagcgaagtggtttttgatcactttgtcttcgacgatacccattccggattcttccacggccattttggccaacgggatacgggcatcagcagcggcgagggcggcagcgcggaaaattttatccacttgctcttgagtgaagttggcatattcgcgctgggcttttttgacacgtgcgacaagctcgttcagttcagcgacattcgttacagccataatgctctcctgataatgttaaactctttcagtaaataa

SEQ ID NO: 434992 - DNA, 687 bp, Serratia marcescens
atgaccacatttcacagcgccaacatcgctctcgattatcaggatatcggctcagggccgctcacgctggtgctgctgcccggctggtgcgagccgaaaaccgtgttcgatcccttcatcgccctggcggcagaacgttatcgggtgatcagcatcgactggcgcggccacggcctgtcgtcaaaaacggcggagatgtcgctcgcggcggacgatttgctggaagatgtgcgtcagctactgacggcgctgcgtttggacaacgtggtgactctgtcggtggcgcacgccagctggttggcggtggcgttggccgaagcgttgccgcagcgggtgcggggcatggtgtttctcgattggatcatgacgcagccggaaccggcgttctttacggcggtgagccgcatgcagcagccgcagcagtggctggcggcgcgggccatcgaacaggcctaccggcaattcggctcgccgctgcaacgtctggcgggaatgagcgcgccgccgccgtgccgccacatctactcgctggatcgccgcgacgactatctgcggcgccagcaggcatttgccgccgagcagccgtttttctccgtggtgcgtttgggggaggctcgcactcacctcggcattctggaacggcccgacgcggtgctgtgggcggtggaggattttttggcgccgtaa

SEQ ID NO: 434993 - DNA, 339 bp, Serratia marcescens
atgatgcagaccgccgaaggccagattgaagaatcctattcaatttccgccgggctggacttcccgtccgtcgggccgcagcacgcctacctgaacagcaccggccgcgccgaatacgtgtcgatcaccgacgacgaagcgctggaagcgttcaaggcgctgtcgcgccatgaaggcatcatcccggcgctggaatcctcgcacgccctggctcacgcgctgaaaatgatccgtgaaacgccgcagaaagagcagatcctggtggtcaacctgtccggccgcggcgacaaagacatatttaccgttcacgacattttgaaagcacggggagaaatctga

SEQ ID NO: 434994 - DNA, 435 bp, Serratia marcescens
gtggtggtggtctccgggccggaaaactccaacgtggcgcgtgacagggtcactggcttgcaagcggcattacaaggcaaggtggcgtcgcttgaagtgctgtatgccgatttctttatggatgtcgcctggcaagaaacgagccgttggttggccaataaccgcgcaccggactttttcgtcggctgcaataaccagatctccctgggcattatcaaggcctgcattgaacaccggctgccgttgatgcaggacgtgtcgctgttcagcatcgatgaggtttcacatgctgagatctacggttttcatttcccctgcgtgtcgcatgatttgcaagagatcgcctggcaagcgttgaatctggcgatccggcgcattgccgaccccgatatcaagccgggcaaggtggtggtgcggggaaaactcatcgcgtag

SEQ ID NO: 434995 - DNA, 711 bp, Serratia marcescens
atgagcactttcctctacggcgcccacgttcacgccaacggcattcgccaacactacctgcgctacggcggccacggcccggcgctgatcctgatccccggtatcaccagcccggcgatcacctggggcttcgtcgccgagcggctgggggaaaaatacgacgtctacgtgctcgacgtgcgcggccgcggtctgtcgtccagcggcccggaactggcttatgacgcggagacctgcgcgcaggacgtcaacgccttcgccgccgcgctgagcctggccagttacgccctgctcggccattcgatgggcgcccgcttcgcctatcccggccaatggccgtggtacgccgactcgatccggcagtcgctgccgggcatgagcgccgagcagatgcgcgccttctgcccgacctggagcgaagagcagcgccggctgcgcgccgagtggctgcacacctgctacgagccggcgatccaacgcgcctacgacgattttcatcaggtggacagccaccgcgactacccgctgctgaccatgccgacgctgctgatggccgcaggcaaaggcggcgtcattcagcccgaagaccgggcggagatccgcgcgctgcagccggagatcgccatcgtcgaggtcgagaacgccgggcacatgatcccgtgggacgacttcgacggcttcttccgcgccctgggcgattttctggattaa

SEQ ID NO: 434996 - DNA, 1089 bp, Serratia marcescens
atggcggccgtcgcgggcgatgccctggcgcatcgcccgatcgaacgcggtaaacgaccagttgccgatgccggttgccacgtccggggtaatgttggtgctgtagagcgtgccgaacggcgtcgccatcgccagcccgccggcgttgatcgccccttccgacgcggtatggcaaaccgcgcagtctccggcggcggcgcgcttctttttcttgggcggcgcggcctgccgctcggcgtccggcccgttcagcgcctcgcgcagtttatccgaggtgatcggcagctcgcgaaaacgaatgccggtggcgtcgaataccgcgttggcgatggccgccgcgctgggcaccgacgccgattccccggcgcccagcggcggatcgtaagggcgcggcatcatcaccacgtccacttccggcacctccgggaaggtcaggatcgggtaagctccccattctttggcggagaccgtcgattcctcaaaggtcacgcgctctttcaatacccggctggtcgattgcaacacgttgccgtgaatttggtggcgcacgccgtccgggttgaccatcatgcccgcgtcgtggccgaccacgatacgcgtcaccgccacttcgccgctggctttgtcgatcgccacgtcggccacccaggcggcccaggccgccccaaagccgggaaacttgctgtggatgtaacgggcgtaggcaaagccgcgcccgcgcagcacgccgtcttccgccggggtctgcatcggttcggtatgcggcgtccagccggcgcgttctgccgtgctgcgcatcagttcactggcgcgttcatcatcgatatagcgcagccgatattccagcggatcgacgccggcggcgtgggccagctcatcgatataagattcgtgggcgaaggtgttcggcaaggcggaaacgccgcgcatccaggaggcgcgcacgatcggcgccatgtcctcgatgctgacgcgcagcgccggatattcgtaaggcggtaccgaggtgcggtcgcccatttcataggccaccggcagcggttcaacccggccggtcagcagcagcgccagcgtcggcgcgccgtttga

SEQ ID NO: 434997 - DNA, 228 bp, Serratia marcescens
atggtaaagcgcgtgcccagcagcccgacgcggcgaatgtttttttcccgcacctgcagcgccgtggcgtcggcgatgtggatcagcggcaggccgctggcctgctcgaccgcctccgccaccttgtgcatggtgttggtgcagatcacgatggcttcggcgccggcggcgcgcaacgccaccgcggcggcggccagcaatcggccggcgccatcccaatcgccctga

SEQ ID NO: 434998 - DNA, 1437 bp, Serratia marcescens
atgagcacaaataacattattaatgccgccgatgacgcagccattatgccgactatcgccaataaaaaaatcctgatggggttctggcacaactgggccgccggcgccagtgacggttatcaacaaggccagttcgccaatatgaacctgaccgacattcccgccgaatataacgtggtggccgtcgcctttatgaaaggccagggcatcccgaccttcaagccttacaacctgtccgacgccgagttccgccgccaggtgggcgtgctgaacagccagggccgcgcggtgctgatctccctcggcggcgcagacgcgcacatcgaactgaaaaccggcgacgaagaccggctgaaagacgagattattcgcctggtggaagtctacggcttcgacggcctggatatcgatctggaacaggcggcgatcggcgccgccaataataaaaccgtcttgcctgcggcgctgaaaaaagtaaaagaccattacgccgcgcaggggaaaaactttattatcagcatggcgccggaattcccatatttacgcaccaacggcacctacctggattatatcaacgccctcgaaggctattatgactttatcgcgccgcaatattataaccagggtggagacggtatttgggtggacgagctcaacgcctggatcacgcaaaataacgacgccatgaaagaggacttcctctactacctgacggaaagcctggtcaccggcacccgcggctatgcaaagatccctgcagcaaaattcgtcatcggtctgccgagcaacaacgatgccgccgccaccggctacgtgatcgacaaacaggcggtgtataacgccttctcgcgtctcgacgccaaaaacctgtcgatcaagggcctgatgacctggtcaatcaactgggacaacggcaagagcaaagccggcgtggcctacagctgggagttcaaaacccgctacgcgccgctgattcagggcggagtcaccccgccgccgggaaagcctaatgcgccgacggcgctgacggtctccgagttgggcgccacctcgctgaagctgagctgggccgccgccaccggctccttaccgatcgccagttacaccgtttaccgcaacggcaacccgatcggccagactgccggcctgtcgttggccgacaacggcctggctccggccacccagtacagctacttcgttaccgcaaccgacagccagggcaatacctcgctgccgagcagcgcgctggcggtcaaaaccgccaacgacggcacgccgcccgatccgagcgcgcccgagtggcagaacaaccacagctaccaagccggcgacgtggtgagttataaaggcaagaaatacacctgtattcaggcgcacacctccaacgccggctggacgccggacgccgccttcaccctgtggcagctcatcgcctaa

SEQ ID NO: 434999 - DNA, 1113 bp, Serratia marcescens
atgaacgcaaaatcccctgagcagaccaaccccgaagttctgcgcgccctggtgaccggtgtactggccgcctttgaacacccgacgttgaaaaacaacctgaccgcattgaaggccattcatcactgcgcgttgctggacgatgtgctgcatatcgaactgacgatgccgtttgcctggcagagcggttttgaggcgctgcaggcgagcgtcggccccgaattgctgcgcgtgaccggcgcttccgccatcgactggaagctgaaacacgacatcacgacgctgaaacgcgccaacggccaggccggcatcaaaggcgtgcgcaacatcgtcgccgtcagctccggcaaaggtggggtgggcaaatccagcaccgccgtcaacctggcgctggcgctggccgccgagggtgccaaggtcggcattctggacgccgacatttacggcccgtcgatccccaacatgctgggcaccgaacatgagcggccgacttcgccggacggtcagcacatggcgccaatcatggcgcacggcctggcgaccaactccatcggctatctggtgaccgacgacaacgccatggtgtggcgcggcccgatggccagcaaggcgctgatgcagctgctgcaggatacgctgtggccggatctggattatctggtgctggatatgccgccgggcaccggcgacatccagctgacgctgtcgcagaacattccggtaaccggcgcgctggtggtcactacgccgcaggatatcgccttgctggatgccgccaagggcatcgtgatgttcgagaaagtgcatgtgccggtgctgggcatcgtggagaacatgagcgtgcatatctgcagcaactgcggccaccatgagccgatcttcggcaccggcggcgccgagaagctggtgcagaaataccacagccgcctgctggggcagatgccgctgcatatttcgctgcgcgaagacctggatcgcggtacgccgacggtgatcagccgcccggacagcgaattcgccgagatgtatcgtcaactggccggccgcgtggccgcgcagatgtattggcagggcgaggcgatcccgacggagatcgcgttccgcgcgctgtaa

SEQ ID NO: 435000 - DNA, 132 bp, Serratia marcescens
atggtgcctaccgcggcacttagcgaaatgagttatcaatgctcacacgaagacatcctaaaacgcactttcattgagcaagtgttgaattcagatttgttagactgcaagcctaagagcattattgcatag

SEQ ID NO: 435001 - DNA, 327 bp, Serratia marcescens
atggcgtggctgggcggccagcttctccgcttcacccagtcgacgcgtctcataactcagcgcggcaccggcgcgcggcaggaaatcctgccgttgttcacgcaacagggctctggcttcgtctactcgggcgacggcgatgccgacatcatggttcgccgccaacgcgcgctgaaccaaatccgtgagagcaggatcgtcaaagaggcgccaccaggcgagttcgacatttccggcactcagccccgccggtggttggccgaagccggcagggtgacgggcgacgggcggcgagtaatcggggcccaccgccgcacatccggttag

SEQ ID NO: 435002 - DNA, 489 bp, Serratia marcescens
gtgcaggggctggaaggctcgctgaacgtgccggtcagcgagaccgtcacctggagcaacaacgccacctacatgatcgagaacaagaacaagaccaccggcgattacctgtcggtgatcccgaaattcaccgtcaactcgaccctcagttggcaggccacgcaggatctgtcgatgcagtccaccctgacctggtacggccgccagaagccgaagaagtataactataaaggagagagcgctgtcggctcagaagcccgcgaggtcagcccttacgccatcgtcggcgccagcgcgacctatgacttgaccaaaaacgtcagcctcaccgccggcatcgacaacctgttcgacaaacgccagttccgcgccggtaatgcacaaactgtcggtaacgcgaaaaccaactcctacatgtatggcgcaggcgcagccacctataacgaatcgggccgcacctactacatgagcatcaacacccatttctga

SEQ ID NO: 435003 - DNA, 5709 bp, Serratia marcescens
atggaattacttcatattggctatttcggcgacagtgcctgcggtaaattattaacagacgaaatccaggaatacggccatcaggttagttttatcagtctcgaacgccgtccaatcgaaaaattcgatcttattatcaccactgaaaataacgctgaaacaatacgacggctgcaacagcagggaaaaaatctgctgacgatcgtaaccaataaaaaaaatattagtgacattgataccctgcaaaaccaagaacacttttctctgtactttagctccgccggccaaaccgcttatctgtgcgacgcgctgtccgatatggtcgcaggcgcccaacttcccctgctgcaggaaaagcttgtcgacattgtggtcgagctttcgcgtggcggcttaccgcacgcacaagacactccctaccgtttggcgcgtaaatactatgccgaatcaccgacgcgcatgcgcgagttgaccgcattgctgatggaacgccttggcgatcagatgcaggggcgttgcggcagcgatctctgccatctcacctggcaacccggcgccgacttccatacgctgccggtggcggacatcacgtcccccgcacagctgcaacatttcttctttaatgaaaccggcgcgctcaaacaggggcgctatgcccagccacgagcgatggtcgacgtagcggcttgcggtgacggcactcagcttaccctgtatggcgacgacatgcgtttcaacgcgttcaccgactatcttgacgcgctattggcagatccggccgatcccgtcgccgcgcccattgttactcaacctcaagcgttacatcgcctgagccaattcaacgcaaccgacgatgccaagctgctggcgcacgacgtcatcgctttgttccgccacgccgccgccgttcatccgcaacaggccgcgctgcatgccgatggccagatatacagctatggcgagatcgatcgcgcctcggatcagtttgcctgttggctgcttgaacacagcggggccgccagctcggtcgtcgccgtctcgatggacaagtcagcgacgctgctgatcgtgctgttggggatactgaaaagcaataaaacctatgtactgctcgatccgcaggcgccagcggcgcgcaatcaaagcattcttgacgacgtgcaacctgcgctgattttggccgactcgccgttgcactccggcgacgcgccgtgcattgcgccatcaagcattgactaccgttcgctgaacatccatgcggagcaactccctcaatcgcgagacgcactggcctacgtctgctatacctccgggacgaccggcaagcccaaaggcgtcatgatagggcgtgagggcctgagcaacgtggcgcaaaaccaccgcgatttcattggcctggcgcaaggcagtcgcgtgctggccatcgcctcgttgggtttcgacgccttcggctgggacgtctatggcgcgttggtcagcggtgcgacgctttatctggcgccctcggagctgcataccgatgtcggcgcgctgcacgattatctgactcgacacgatatcggccatatcactattacaccggcaattctggaattgttgccccgcgaaatgtggccgggactgcggacaatgatcgtcatgggagacgcaccgccagcggacgtcgtcacctggtgggccgagcgcacccgattgtgcaacggttacgggccgaccgaggcttccattgccacttcgctgtgcgagtatcgtccaggcgttccctggaactgcattggcaaaccgctgaaaaactaccgttgtcacatccttgatccccaccacaatccactgccggtcggttttgagggcgaactgtgcatcgccggcagcggcctggcgcacggttacctgcatcaagaggcgctgagcgcagagaagttcattacctgtcggctaccgtatatggcggccgaagagcgcctttatcaaaccggtgacatcgccaaatgggacgaacagggcaacattattttcgtcggccgccgtgatcaccaggtgaagatacgcggtgtacgcatcgaaatgggtgaagtggaaagcgccgtccgcagtcaccccctggttgaaagcgcctgcgtggtggctcgcagccagccctcgggcaaaattctcgccgccttcgtacaacccgcttcgcctgagctgacgatcgacgcgctgcgtcacgcgttggtcacacagctccaccccgccgcgatccccagcgtctttattttcttgccggcgctgccgctgaccatcaatggcaagatcgcccgtcaacagttggaaaactggccgctggatgaacgaaatgagcgcctgacgccaccggaaacagaaactgaggccattctcgagcgcatcgtggccaacgccatcggctgtccgcaagccgacgtcacacaggagttcatcaacctgggcgcacactcgctgacaatgagcaaaatcgtcgcgctcgtcgcacgcgatctttgctgccacctgagcatcgccgatctgttccgccataatacggtacgcaaactggccgaatatatcgagaataaggccgttgccgcggagcgcgccatcgctatctgcgacgaacgccgcgcgccgctcagccctcagcagaacctgctctggtacctgagcgcattgaatcctgacgactgcagttacaacctgccgctggcgatagacatccagggctcgctcgatctggcgcgctttgaacaggcgatcaattttatctatgaaaaacatgaaagcctgcgcactcgcttcgccgaaaccgacggtgtcgcctatcagttggcagaaccgcataccccgattcgccttgccgaccactgggtggaaggccaaacgctgtcggcagaaaagtgggtgcgccaactgtgtgccacgcctttcgacatcaccgctcggccgccgctggtgcttcggctggtacagtatcatcagcagcaccatgttttgatttgggtaaaacacaacataattaccgacgcctggagcgaacagctgatccttaacgatctgtggcagcgctataacgagctcgacgatcacaatgggtttgacgcgccgcaaccgcagatccaaaccattgacatcgtcaacagcggcatcgcaccacctgcgccggcggatgtcgcttactggcaacagcaactgcaaggctgccgcgaactggacttcccgctggataaaccacgcccgctaatgccgacacatgccggagaacgcatccattatcagctgcagcccgacgtggccggtctgctggcgtcacggggcaaagcgctgggcgccacgcctttcgccttgctctgcgcggcattaagtttactgctcagccgttatacccagcagcaggatatcgtcatcggcaccgccattgcagcgcgggacaacctggatcaggcgcaggtcagcggcttccatgtcaataccgtaccgctgcgtatccaactgagcgaacaggacaccctggccgagctgatcggtaacatgatggaaacctgcatcggcgcctatcagcatcagcagctctcgttcgaccggatcttgcaccagatcgaatacgagcggatgtcgaacaaaaatccgttattccaaatcatggcgatcctgcagaacgccggcgacgtatgccaacaaaacctgcacgattgcacgctgcatcgcttgccgctttcgtccggcttctcgatgttcgatatgacctggaactttagtgtggaacaggacgccgtcgccatcgaactcgattacgccagcgaactgttttatcccgccagcatgcagatgctgttggacaactatcagcaaacgctgcggcaactgctcaccctgccggccaacacggcgcagcgagccctcaacccgctatgcgaacgggagcaacattggctgcaacagttggccgtcagctcggacgctggttcaggtgactcgctgctggtgcaaattgctcgcttggcacaaacccagcctgacagtctcgccgtcagctgcgaacggcaacagtacagctaccgtcagctgtgggcgcagtctgagcgcatcgcgcatgcattgcagcgcatcgacagcaagcctttttcggtcggcgtcatgatggagaaaagttgccacgtcgccgtactcctgctcggcgtgctgagagccggcaaacactacgtgccgattgacgtacactacccggccgaccgcgtgagctacatgatcgagaacgcgcaagcccggttgctggtgaccgatggtgagccagagcaacgttgggccagtcccgccgtcggtttcgactcgctggtttctcaacctgcagcggccgacacattgccgatcccagccgacgatacgctggcctacatcatgtacacctcaggctcaaccggtaaccccaaaggcgtgatgatcacccacggcaacctgaacaatttcacccacgacttcgtcgggcggctggcgctgagcgcgagcgataaggtgctcagcctgaccagcatcagcttcgatatttttgggttggaactgttctgctcgctggccggcggcgcgcacgtcacgctgtgtccacgagaaaccgccatggatccggtcaagttgtatcactttatcgagcgacagcagcccagcgtgattcaagcgacacctaccgtctggagcaccatcgtccaccatctgccggcggcgggccagcgccccctgaccgtgctgtgcggcggcgagaagatgccggcggccttgttgacgcaattgcgacgcatcgcgacacgggtgctacaggtgtatggcccgacggaaaccaccatctggtcgacctgcgccgatctgactcacgaaggcgcgagcgactgtatcggcacgccgatacagtcaactgacgttctggtcatggatcaggccggcaacccgatgccaagcggcgcatttggtgagctatggctgggcggcgcaggggtatcaccggggtattggcgcaacccgacgctgagcgataaggtctttctacggcgccaggcgttcggcaccgagcgctatatgtaccgcaccggcgacattgtgcggtttaatcgtcaggggcagctggaatacctcggacggaacgatcaccaggtcaaaattcgcggccaccgcatcgaattgagcgaaatcgatctcagtttatcctctctcgacaatatcgaacggtcgctcagcttaattgtcggtgaaggccagcaggcccgcatcgtcagctacctgcagttaacgccgggagaggagctgaatgaaaaagcggtgcgcacggcgctgaaagctcgcttgccgaatatcatgatcccgtccggttttgtggtgctgtcggccttcccgctcaccaacaacaataaaatcgacattcgtcggctaccggcgccggaaacccgctactcggcttccgaagcggactacacgcctgcggccaacgaggcggaaagcgccatgcagcatatctggcaacaagtcttgtcgcagacgcagatcagcgtctgcgacagcttcttcagcctgggtggaaattcactgcagatcccgcaactgctgcacgccattcgtcaacagatgggcgtctcgctgactatccgcgaattcatcatgcacagccagatccgcgaactcaccgcgctggccttgagcaaaactgccggggtcgccgatgaaacgcattga

SEQ ID NO: 435004 - DNA, 375 bp, Serratia marcescens
atgctcaatgcgcgtttgcggccgggcatcgagatcgtcaccgaaaccctgcgcctggatgaggcggtgcacgatgccgatctggtgatcaccggggaaggccggctggacagccagtcgatccacggcaaaacgccgatcggcgtggcgcgggtggccaagcgccacggcgtgccggtgatcgccatcgccggcagcctgacgtcggattaccaggtggtgcatcaacacggcatcgacgcggcgttttcggtgctcgatggcatcgtgacgctggaagaagcgctggcgggcgccgatcgcaatctgcaggtgacggcgcgcaacgtggcggcggtgtggcgactggcgcaagggggaggcccacaggcatag

SEQ ID NO: 435005 - DNA, 822 bp, Serratia marcescens
gtgcggcgcggtgtccaaccacagccgttgattgacctgacgcatcgcgcgccacgggccgttcagcgccgcaaaacgtgtcaacagctgcggcggcaggtagctgggattcagccgccagcgatcgtccgtcacgaacccgactttgcccggcagcagcatcaggcccaggccgggaatgtcggccacctcctcgcggccgatgcgttgcagcagcagcgtccccagggtttgatagcgccggcttttccacaggcggccggcttcgagcaggttgtaggcgatccacagatcggcgtccgacgccgagttggcgtccagcaccttccactgtttgtcatcgctctcgccccacagccaggcgggcaaacgggcgctgagatcgcccgccgccagattgttctccgtccaggccagcagcagatcgaaggtcggccggtcgttggccaccagggcgaagaacaggccgtagctctgcccctcggaggtggtgattttgttcgggctgctcggatcgatcacccgcccctgcgggctgatgtagaactgcttgtactgttgccagcccggccactcgcaggccgccgcggcgctgaaggcgcacagcagcagcatgccgagcgacaggcgttgcagcatggcgttcaccgccgtcaatcccgatcttccggcgccagacgacgccggctgaaggccttcaggccacgccacagcatcagccccaggatcaccaccagcaccaccgcgatcaccgccagcagcaccggatgggtggagagggcataccacagccgctcccaccacggcaggtggccgacatag

SEQ ID NO: 435006 - DNA, 444 bp, Serratia marcescens
gtggagattaagctgaccaccggcgatgccgagatcggcctcgttggattgcactttgtcgaccgcgtcggcggcgtcgccggtggtcagcttaatctccaccagcgggtgctgcgcgcggaagcgatcgaggatcggcggcaggtgactgtacgccgcggtcaccgagcagaacagccgcagttcgccgctgagcgaagggccgtgctggccgagcgagtgcttcagctgctgatattgcagcagcgtttgctgggcgaattctttcagctgttcgccggcgtcggtcagctgcacggtgcggttatcgcgcaggaacagcggctgcccgaggatctcttccagccgctggatctggcgggagagcgtcgacgggctgacgtgcatcgccttggcggtgcgcccgaagtgatggctttcggccagatgcaggaacagctttaa

SEQ ID NO: 435007 - DNA, 900 bp, Serratia marcescens
atgaaaccgtgcggcaattcgtgcttaaagttttgcgcggcgcggccgataagctgggtaaagaaacagcggcagcgctctcacttccccgccacggcgatagtaccgatgataaccaacctgatctcgggtctgctggcgccctgttttgccctctatgcctgcgccaaatcgcggcgctactggcggcaatgccggcgcttgtataccttccagccgatttatcgcaccagcggcgcgctgctggcggtggaactgctgacggcggtatatcacccgaatgagccggacaaacggcaatccccggaacagtattttgcctcgctcggcgtcgcccagcgtttgcgggtgatccaggaacagctggcgctgttgcagcgctggcaggcattgttcattcgccacgcggtgatggtgtcggtcaatatcgacggcatggcgctgcaagcgttacagcgccatagcgagctgcagcggcagatcgccgagatgccctatctgcgcttcgagctggtggagcacgccgaaacggcgtcaaaccgcccgttgcaccagatggtcggcggcgaacggctgtggctggacgatttcggcagcgggctggccaacttctccgccgtcggcgcctggcgctatcaatacatcaaggtagcgcgcgaattgttcaccttgcttaaacagtctgaagagggcgtgcagctgctcggcaccctgatcaagatgatgaaccagcacagcgacggggtgatcgtcgaaggcgtggaaaccgagcaggagtggcggctggtgcagcgttccggcgcgttggccgcgcagggttactatctttcccgcccggcatgctttgaaactttacacagcgtaccgacgctgttcgccgcgcccggcgcgccggcgtga

SEQ ID NO: 435008 - DNA, 411 bp, Serratia marcescens
  misc_feature (355)..(364): n is a, c, g, or t
gtgtccaccagcgtcaccattaccggcacgctgctggctatcgacgccccggtggtcgccagcgccgccaccagcccaaatcccctggtggccgataagcaaggcttctttacccagtggagcgaagtggccaaacagcgccacgtcgaacggctgtaccaggtggagcccaatgccgaagccgtcgccgccgccgcaccggatttgatcgtcgtcgccgccaccggcggtgattcggcgttgaagctgtatgaccagctgtccgccattgcgccgacgctggtgctcgactatggcgacaagagctggcagcagctggccagcgagctcggcgagatcaccggccatgaagccnnnnnnnnnncgccaaacaggcggaggatcgtttcgaacagcgcgtggagcaagtga

SEQ ID NO: 435009 - DNA, 1113 bp, Serratia marcescens
atgcacctgccagtcggtggcgaagaaggcctctatcgattcggcggtgaaaaagtccggcgcgccgtgcggcccgtacagcacgccgatgtgccactggtcgccgtagtgcgggatcaggctgtcgtccatcgcctgcggcgcggcgatcggcgccggcgtggtgctggcggccagcgccggttgagcgatcgccagcatgtccgccacgcgcaaggtgcgcccggcgtggccgccgaactggccgagcgcgaaggtggagcggctgccgagatacaccggcacgtcgaagccgttgcgtaccgccagataggtgcggcaaccgtgcgtggcgcgccccagcgtcagcacctgcccggcccgcaccgcgatcggccgccagtaggcgaccgcttcgccgtccagatcggccgggcagctggcacccgtcagcgcgatggtggcgtcgcagtgaaagcgcagcgtcggcccctgcagggtgaactccagcccggcggccgccgggtggttgccgacgatgcgattggccagccggaacgcgaagtcgtccatcgggccggacggcggcacgccgatgtcccaatagccgaggcggccgggatagtcctgcacgctgctgtaggtgccaggttgcagcacttcgaggcagtgcggctggtaatgcaaatcgtccagcaggcgcgtccaaacgtcgccgcgctgaaattgcggcgtggcgatcacctgccgcagataatcgaggttggtggcgatgccgtgcagacgggtcgccgccagcgccacgcgcagtttttccagcgcctgcgcgcggtcagcgccatgtacgatcagcttggcgatcatcgggtcgtaaaacgccgagacttcgctgccggtcgccacccaaccgtcgaggcgcacgtcggcggggaaatgcacctcggtcagcacgccggggctgggctggaagttcttcagcggatcttcggcatagaggcgcacttcgatcgccgcgccctgcggcgcgcgttgcaacgccgcccaatccagcgcatcgcccgccgccacctgcagcatgcatgcgatcagatccaggccggtgaccatctcggtgaccgggtgctcgacctgtaa

SEQ ID NO: 435010 - DNA, 681 bp, Serratia marcescens
atgcagcgcctggcgggtcgccgccggcaggtgtggcgccggggtttcctcgcgttcgataaaggcgccggcgtcgcggaagaactgctctcccagccgtttgacgctgtcgtaagcctcgcgcagcgccgcctcgtcgtcacagcgcgtcaggccgatgccgccgccgccggcggtgcttttcagcatcaccgggtagccgatgcgcgcggcggcggcaaccgcctgctccacgctctccagcaagccggtgcccggcgtcatcggcaccccggccaacgccgccagctcgcgcgcccggtgcttgagaccgaactcgcgcatctgcgccgccgtcgggccgataaaggcgatgcccgccgcctcgcaggcgtcggcaaactcggcgctctcggacaaaaagccgtagccggggtagatcgcctgcgcgccggtggctgccgccgccgcaaggatcttgtcgatgctcaggtagctgtcggcggccttgtcgccgccgagcgccaccaccctgtcggcttcggtgacgtgcggcgcattgcggtcggcgtcggaataaaccgccacgctggtgacgcccaggcgtttcagggtgcgaatggcgcggcaggcgatttcgccgcggttagcgatcagtacggtagtaaacatgttcatgcccccttaacgccggcgagataa

SEQ ID NO: 435011 - DNA, 2568 bp, Serratia marcescens
atgccaaccatcacgaaaacccaatcactttacacgttgacccggccggtctggctggatgcggcaggcatgagcaagggcatcgaccacgatcgtcagcacctgggcatcattctcgccgccgggcaggtgctgcgagtgcggcagaccaacgcggcgtttaccggcaagctcacgctgcgcttgctgaatgacgacagcaaaacggaggctgaattcagcgtcggcgcgagctgggtcgaggcccaggtcaatgccgtctcggtgccgtttatcgatacgccgtacgggcagggcgaaccggcgctggagttcgagtatccggacacggcgaaagcgctgccggtttatcgccgtggcgaaaacgaagccgcattcttcgcccgctgggacgatcgggacgccgagtttgcgctggtcgatgcggaatacgcggtattgctggtgccgaaaatcagtaaaccggcgctgaagtcgctgggcgaagcgaaaaacatcgacgggctgatcgcctactatgaccgcattttcaccttctacaatgcgctgaccggcgtctcgttcgaggccgaacacgaatccgatcgcaatattcgcaaccgctactttatgaaggccgataaacacggcgccggcgccgcgtattacggcgggcgctggacggcggaaaccagcaactcggtcagcagcttctggctgacgccgaaagacagcaactggggcagcctgcatgagattgcgcacggctatcaggggcactttatgggcgacaaatatttctccaccggtgagatgtggaacaatatttacgccgcttgctatcaggacgtgatgctgggagagcgcaaataccaggaagggtggctgtataactacggcaacgcggccggcgtcgagaagaaaatcgtcgatctgatcgctcagggcacgccgctcaaccagtgggatctgcgctccaagctgttcttcgcgatgctgatggtcgacaaggcaggcaagaacgccttcacgcactttaaccagcagtatcgccaaagctgcaatacgccgggcttcgtgccgtccgaacatgccttgctggatctgctgtcggcaagcttcgccgcggccggcgagcaaatcgacgtgacgccgttcgtcgagctgaccggcggcgtgatcacccaaacgcagcgcgatctcaacgcgttcagccacgccaaggcggtgtatccgctgtatcaactggtggatgcgcagagtttgccggcggtgcaggcacagctgaagctggattcctccctgcgcctggtcgattcctctcagctcaaggcgagcggcctgaaaggcgatgtcgccctgagtctggatatcgatgactttgcgcagatctacggtgaggatctggtgctgatggaaggggcgcgctatgcccacaaggtccgtatcgacgcgccgaccctggccctgaatgcgttgccgatcggcgtgtacaccctgcggttaccgaccggcaaggatcgcaaatatcggccaacggcgggttacctgacggtgaagcaggggaaaaacgcggtaacgcttcgcttcgaacgcaaagccgcttcgccgatcgtttcacaggagatcgctctgttgggcctgagcgatgcggtcttcgccaccgtggtcgtcgatcgcgccaagggcgcagtggtggttgacgtgaccagtaccacgccgcattcctacttccccggtgaaacctatgcccgagtgacgctgcgcgatcggcagggcgcggtgcgcttcactaaggagattcagggcactcaggctacgttaagtcatgacgagctgccgtttgccgagggcgatgacatcgagatttaccatgtggagccgagccgggtgcgcttgaatccggcggcggccggcgtcatcgacaacaaaaacaaaaccaacgtgctgcgtatcgaaaaaagcgggctgaaaaatccggcgttgcccggcgatcccgagcaagcgctgctggcgcgcctggaacaggcggcgcagcgtttgcgccgcctgctgccggcttactacgcgccgtcgtcgtcgttcaaggacgatatttatctggcgatcggaaccttcgccgagccgcagcgcgagtcgctgttggcgacctatcgggattgcctgccggccgacaatacgccgccggacgctaacgtcggcaatgcgtttaccgtggtttgcaaagggatcggcgatcgccagtttctgaccggcgccgtcgatctggtgaagaaaaccgtgaccgtgacgctggcggcggggattgcccaccactactttgccgacagctacgccttcctcagcgtgacggatgcggacggtaacaccttgctcagctacgacgtcatcggcagccaaaatcagccggctaaaacctgggtgctgccgctgtcaggctatggcggtgaggtgatccatctgcggcatgaagagccggacaaccgtctggcgatcgtcaacgagatgcagcacgtgcggttggcggagaagggcaagcaacagacctactgcattacctcgatcggtttgaaacgtatcaacgactga

SEQ ID NO: 435012 - DNA, 1248 bp, Serratia marcescens
gtgccagatctccatcacccgcgcgatcgggtagccggacagcgccgcgcccaggtaggcgaacaggccgacaaaaccggtcgccgcgcccgccgcatccttgtgcgagcactccgccgccgccatgccgatcagcatctgcgggccgaagatgaagaaaccgatggcgaagaagcagcaggcctgcagcaggtaggtcacgcccggcatcagccacagcgccgccaccgacaggaagataccgatggcgaagatcaggttcatcgggccacggttgccgcggaacaacttgtcggaaccccaaccggccaccagcgaaccgataaagccgcccacttcaaacagcgaaatggccgagttggcggtcatcagcgaatagcccttttcctgcgtcaggtagaggttgccccaatcgttgatcgcggtgcgcacgatgtacaccagcacgtaagagaccgccagcagccagatgtacttgttggtcagcacgtagcgtttgatgatctcgcggttgctcagcccctggccttccgattcctgcaccagctccatggcgtcgttgcgccatttgccgacgctcggcagccccagggtggatggcttgtcgcgcaggcgccagcacatcagcaggccaagcaccacgccgatgataccggggatgatcatgccgtaacgccagctgaaatgcagcgagataaagcccaccagcagcgggatcagcgcgccgccgacgttgtgcgaggtgttccagatagcccaccagccaccgcgctcggagcgcgaataccagctggtgaggattttggagcacggcggccagccccagccctggaagaaggcgttgaggatccacagcgtgcccagcatcagcagcgacgaactgaggccgaagaagatattcagcaccccggtcatgatcaggcccagccccataaagtaacgcgggttggatcgatcgctgatcatgccggaaatgaatttcgagcagccgtaggtaatgtagaacagcgtgccgaggatgccgacgtcggacatcgtcaggcccagatcgctcagcatcgccggcatgatgaagttgaaacttttgcgcgtgaagtaaaacgcggcgtagccgatgtacatggtgcacatcagctggatgcgccagtatttgtagctggcgtcgatctgccgttgatcggtgacctgcggcgcgtccgggcggcttttaaggaaagaccacatgtggaacctcagaggattgaataa

SEQ ID NO: 435013 - DNA, 2586 bp, Serratia marcescens
gtgtcacacacccctaactctctcagcggcccggcgcttgcgggcgaatggccgctggtcgcggcgcaacccggcatctgggtcgccgatcaaatctccccgcatcgcaatgcctacgcggtggctcacgccatcgaactcaacggccccattgccgtggagcctctgctgcaggccatcatccagggcctggacgaggtggacatgctgcgcctgcgttttgcggaacgcgacggcgtgccggtgcaatggctggatgacgcgctggcggtgcacgagccggaacttgtcgatctgacgacgtcgccggatcccgaagccgccgcgcgcgcgctgatggacatcgatctggcgagcgatctgcgcgccggcagcggcgcgccgctgtatcgccatgtggtgatgcgcctggcggatgaccgctggttctggtatcagcgctatcaccatctgctggtggacggtttcagcttcaccgccatcgctcgccgcgtggcggcgatttacacccatatttgccgcggcgacgcgctggaaccgacgcctttcacggcgttcagcgacgtggtggcggaataccaggcttaccgggaggcgccggcctggcagcgcgacgccgatttctggctcgaaaaagcgcggcagttgccgccgccggccacgctctgcccgcagccgctggccgggcaaacccccacgccgcgcatccatcgattggaacagcgctgcgatccgcaggccttcgccgaactggtgcagtgtggcgcgcagcagaagctgaacgccgccgatatggcggtggcgctggtggcgctgtgggtatcgcgcctgagcggccaaccgagtttcagcgccggttttatcttcatgcgccgtaccggatcggccgccctgtgcgccgccgggccggtgatcaacgtgctgccgatggagatgcatctcgagccgcaggccacgctgtatgaggccgccgcccgcatcagccgcgagctgaaaacggtgcgccgccatcagcgctacgacgccgagcaggtgcagcgcgatctggggcgcatcggcgacggcgaaccgctgtacggcacggtcttcaacttcaaaatgttcgattaccagctggatttcgccggtatcgaaggcatcactcacgatctggcctccgggccggtgcgcgatctggagattgcgctgtttatcgacgaacaccatcagttgaaggtggagctgctggccaacgccgagcgttacggtcgccaggaactgcaggcgcatctgcagcggttgccgctgctgctggcgcagttcgccgcgcaggcaacgttgccgatcggcgaagccgatatgctgaccgccgacgatcatgcgctgctggcgcgggtcaacgacacggcgcacccggtgccggcgaccacgctgagccagttgctggcgcagcaggcgcaaaccacgccggacgcgccggcgctggcggatgcgcatttcaatttcacctaccgcgaaacgcgcgagcaggtcatggcgctggcgcgcgagctggttgcgcagggtgtgcggccgggcgacatcgtggcggtggcgctgccgcgttcggtgttcctgtcgctggcgttgatggcgatcgtggaagcgggcgccgcctatctgccgttggacaccggttatccggacgagcggctggcgatgatgctggaagacgccgcgccccggctggtcatcaccaacccggcgcagcaggcgcggttcgccgacaagggcgaaattttgctgtatgacgcgccgctgccggccgatcacgccgccggggtggcgatcgcgggcccgacgccgaaccatgcggcctatatcatctttacttccggctccaccgggcgcccgaaaggtgtgctggtcggccatcaggcgatcgtcaaccgcttgctgtggatgcagcaccagtatccgctgggggcggacgacgcggtgctgcagaaaacgccgtgcagtttcgacgtctcggtatgggaattcttctggccgctgatggtcggcgcccggctggtgatggcgccgccggaggcgcaccgcgatccgcagcagctgcaacagctgatcgcgcagcaccgcattaccacgctgcacttcgtgccgtcgatgctggcggctttcgttgccgccctggacgacgacgcggcggtggcgagctgcgccgcgctgcgccaggtgttctgcagcggcgaagcgctgccggcggagctgtgccgcctgtggcaaagccgcacggcggtgccgctgcacaacctctacggcccgaccgaagcggcggtggacgtgacctggcatccggcccacggcgacgcgctggcgaaggtgaccggcgccaacgtgccgatcggcctgccggtatggaacaccgggctgcgcattcttgacgcgcgcctgcggccggtgccgccgggcgtggcgggcgatctgtatctgaccggcgtgcagctggcgcacggctaccttggccggccggatctgaccgccagccgctttgtcgccgatccgttcggcgagggcgggcgcatgtcgcggtggaatatttgggccgcagcgacgatcagctga

SEQ ID NO: 435014 - DNA, 1257 bp, Serratia marcescens
atgagtagcaaaccctccatcctgcttgattttagcctgctgaaaaccaaccgggctttccgcgcggtattctgcgcgcgctttatttccattgtggcgctggggctgatggcgatcgccatcccggtgcagatccaggcgctgaccggttccaccctgcaggtcggactggcggtgacgctggccggcggcggcatgttcgccgggctgctgatggggggcgtattggccgatcgctatgagcggcgccgactgatcctgttcgcgcgctccacctgcggcatcggcttcgtcggcctgtgcctcaacgccctgttgccgtcgccttcgctggcggccatttatctgctggcggtgtgggacggcttcttcggcgcggtgggggtgacggcgctgctggcggccacgccggcgctggtgggccgcgaaaacatcgtgcaggcgggcgccatcagcatgctgacggtgcgcttcggctcgatcctttctccggcgatcggcggcctggtgatcgcccatatgggcattgcctggaactacggcctggcggcgttcggcaccctgctgacgctgctgccgctgctgagcctaccgcagctgatgccgccgccgcagccgcgtgaacacccgctgcgcgcgctggcgggcggtttcgccttcctgttccagaacaaggtgatcggcatggtggcgctgatcggcgcgctgctgaccatggccagcgcggtgcgcgtgctgtacccggcgatggcggaaagctggcacatcgacgccgcccacctcggctatatgtacgccgccgtgccgctcggcgccgccatcggtgcgttcaccagcgggcgcgtggcgcacgtggcgcgccccggttgggtgatgttgctgacggcgatcgcggcgttcgctgccattggcctgttcggcctgatgccgtggtacagcctggcgttgctgtgcctggtggcgttcggctacctgagcgcgctgaactcgctgctgcaatacggcctgatccagagcctgacgccggacaacttcctcggccgcatcaacggcctgtggacggcgcaaaacgtggtgggcgatgcgctgggcgcactgctgctgggggcgatgggcgcctttatgctgccggcgatgagcgccagcggtttcggcttcggcgcggcgctgctcggcatcctgttgctgttcgccatgaccggtttgcgccaggtgacgctgcacaaaccggagccgcagcccgccacagaaaagtag

SEQ ID NO: 435015 - DNA, 1206 bp, Serratia marcescens
atggatactgccgtgaacgacatcaatcgaaaggaaatgcaggagcgcgaagaacaccggttcgccgctgatttttctccggcgtcgggcttcttctttacctcccctttccgcagcttgaccaccaccggatgtttcagccgcattcgcctgccggccgcggacggcgccgatctgaacggcgagttccagcgtagcgtgcggcaggcgtttgccgaggcccgtcaggccggtatcaaaaatccgctgctgtgcggcgctatcccgttcgatacccggcagccttcggcgctgtttattccgcagcagagccgctggttcgatcgcgccgcttttatggccggcgttcagccggcggcagaggggccggagctggctggcataacggagctgccgccgcagcagccgttcatgaacatggtcagcgatgccgttgacgcgatgaaggccggtgagctggataaagtggtcttgtcgcgcctgctggagatcgaaacgcgccggccggtggatcgccatgcgctgatggcgcgcgtgatcgcccaaaacccgcacggtttccacttccacgtgccgctggagcagggcgcgctgttgggcgccagcccggagctgctgctgcgccaggacggcggccgtttctactccaacccgctggccggttccgcccggcgcgaggccgacccgcagcgcgatcgcgaagtgggggagcggctgatggcctcggcgaaagatcgccacgagcatcgcatcgtcaccgaaagcatgcgtgacgtgctggccggccgctgccgctacttgaacgtgccgcacacccctgaactgttgaccaccaccacgctgtggcatctctccacgccgatcgacggcgaggcggcgtctccagacgaaaatgccctgtcgctggcctgtttgctgcacccgacgccggcgctgtgcggcatgccgacggcccaggcacacgccctgatcggcaagctggagccgttcgatcgcggcctgttcggcggcatcgtcggctggtgcgacgacgaaggcaacggcgagtgggtagtgactatccgctgcggcaccgttgacggcaaccgggtgcggctgttcgccggcgccggcattgtggaagactcttcacccgaatctgaatggcatgaaacaggcaccaaactcagcaccattctgcgtgcctttggtatgaatcaaggataa

SEQ ID NO: 435016 - DNA, 522 bp, Serratia marcescens
atgaaggtactcaaccagtctagaaatgccttctctcatagcgcggcacaatctgaagcacaggcgcgtagttggatcaacgatgcttatgtagatgtagtggaagttcttgctgatcttgacggcctcgaaggcctccaaattgttcgatatttaagtcaggttgatggaacaactctacgatgtgaaattttcaaaggacatagttcaacaagaacaatccagaacattcaaattagtcatcagcaaatgctggactcagcaaaatattttcggcaaggacagatgcttgtgattgctgacggacttattttcggccttcgcccgatgatttgttttcgcgaggacggtgtcggccatacgactcgtctttgtattttcagaaagacgcgaggtgaagctcccgatagacgtcttgaattcgaaattattggcgaagccatacgtcacgaagaagaccgaaataacttcgcaacagaattaaacgagctgcgtagtctgtttgggttaggagtggaatag

SEQ ID NO: 435017 - DNA, 3156 bp, Serratia marcescens
atggcgtttctatctgaggccgccgtggagcaagcgctactggatcagatgcgcacgctcaattacagtatcgaacgagaggatgatatcggccctgacggacgccggccggaacgcgagagtcacgatgaggtagtcctcaagaaacggtttgaggatgccgtaacacgcctgaaccctaacctaccatcggatgcatgccaagatgcagtgcgccgtgtgatgcagtccgaactaccctctctgcttgaggagaaccgccgaatccacaagttgatgacggaaggtgtggacgttgagtactacgcatacgacggcacactgatggtaggaaaggtcgcacttatcgacttcgaatacccggaacgaaacgattggttggcagtgagccagttcgtggtgatcaacggtcagaacaagcgacgacccgatgttgtggtattcgtgaacggcttaccgctgggtgtgatcgaattgaaagcaccgggttgcgccggagcgcatctattgggtgcgttcaaccaactgcagacctacaagcagaaaatcccaactctattccacaccaatgcactactggtaacgtcggacggaattacggcccgagtaggatctctatcggcggaccttgaacgcttcatgccttggcgtaccaccgacggcaaggatattgcgccgaagggctcgccggagctatcgacattgatcgagggggtgttcgaacatcgacgactgttggccttgctgcgcgatttcactgtctttggcgagacgggctcaggacttgccaagatcatcgcaggatatcaccagttccacgccgtacaacacgcggtcaacagcacggtgaatgcgtcctcgccagatggtaatcagcgagctggcgtaatctggcatacccaaggctccggcaaaagcctgctaatggcgttttatgccgggcagctcgtcagacacccggcaatggctaaccccacactggtggttttgaccgaccgcaacgatctcgatgaccagctcttctcgactttctctatgtgccgcgatcttatccggcagacgccggtgcaagccgagagccgcgaagacctgcagaaggtcttgagtcgggcatcgggtggcgtgatcttcacaaccttacaaaagttcggcgagatttcagaaccgttcactacacgccgaaacgtggtcgtcattgcggatgaagcacaccgtagccaatatggattcaaggccaaggtggacgcgaagaccggtgaaatatcttatggctttgccaagtacatgcgcgatgccctgccaaacgcatcattcattggttttactggaacacccatcgaagaagacgatgtcaacacaccgatggtattcggcaactacatagatatctacgacattagccgtgcggttgaggatggcgcgaccgtcccgatttactatgagtcacggttggcccgcatcgaacttaatgaggatgagaagccgaaaatcgacgccgaggtcaacgagttgaccgaggacgaatccgaggcagaccaggagcgcttaaagaaaaagtggtcaacggtcgaagccttggttggcagcgaaaaacgccttgctttggtagctaaagacatgatcgctcacttcgaagatcgtttggctgcactcgacggcaaggctatggtggtgtgcatgagccgtcgtatctgtgtcaagctctacgacgagatcgtcaaactgcgtccaaattggcacagcaccgatgacaacgcgggcgcggtcaagattgttatgacgggcgcagcgagcgatccgcaggaatggcaacagcacataggcaataaagcccgacgagatctgttagccaagcgtgcccgagatccaaaagaccaactcaagctagtgatcgtacgggatatgtggctaactggctttgacgcaccgagcatgcatacgatgtacgtggataagcaaatgcaaggccacggattgatgcaggcaattgcgcgcgtgaaccgtgtattccgcgacaagcctgcaggactgatcgtcgattacatcggcatcgcgcaaaacttgaagtcagccctgcaacaatattcccaaaacgatcaggaaaacaccggcattgacgaagcgcaggccatcgcagtgatgatggagaagtacgaggtcgtacgggacatgtactatggttacgactacgtctctgcaatggcaggcactccgcaagaacgccttgcaatgatggcaggagccatagaatggattctggacctgcaacaaaagttggcaacgaaagagaatagcaaagagggtaagaagaacgcgcaccgtcgataccaggacgccgtgctagccctgtcaaaagcgttcgctctggcatcagcatccgacgaggcccgcaagatccgggaggaagtaggcttcttccaggcaatacgtgctgcgctaaccaagagtagcaccggttccggtgtgacacagcaagagcgtgaattggcgatccagcagatcgtcagccgagctgtagtctcgacagagatcgtggacatcctagctgctgcgggtattaaaagtccggatatctccattctctccgacgagttcctcgccgaagtgctacaaatggagaaaaaaaacctcgcattagaagccctacgtaagctgctcaacgacggcattcgttcgcgtagcaaggccaatgtggtgcaaacaaaggtcttctcggagagacttgaagatgctgtagcacgttaccacgccaatgctatcaccactgcagaagtgctgcaggagctaatccgactggccaaagacatccgtgcgtcacgtcaacgtggtgaagaacaaggtttatctgaggatgagatcgccttctatgacgcgttgtccgaaaacgaggatgccattcaagttatgggtgacgataagctgaaacttattgctcatgaattgttaatgagcctacgtgaaaatgtttccgttgactgggcacatcgtgaatctgcacgagctcggatgcgggtgctggtgaagcgtattctgcgcaaatacggttatccaccggatctccaggacatcgcggtgcaaacagttttacagcaggccgaggctctgtcgtctagctggtctatgggggagtctgatagggccagaagcacaacttaa

SEQ ID NO: 435018 - DNA, 1530 bp, Serratia marcescens
atgaaagatttacttcttacccttgatatcggcaccggcagcacccgcgccgggctggtcaccaacaccggggaaatccttggcttcgcgcagcgcgagtacgagcagatcacgccgcaggccggttggtcggaacaaccgccttcactgtggtggcagagtgtctgccaatgtacgcaggagctgtacgcgcgctacgccgaatactggccgcgtatcgccgccgtcggcgcctgcgggcagatgcacggcacagttttgctcgatgccgacggcgaactggtcgtcgattgcgccatgctgtggaacgacaaacgcgcgcagccgcaggtggcgcgctttagccaccaacagccgccgcagccctggcttgaactgttgaacaatccccccacagccgcctggccggcgttcaagctggcctggctgcgcgagcatcatccatcgcagtgggagcgcatagccacggtgttgatgccaaaggattacgtcaatttccggctctgcggcgtacgcgccaccgactacagcgaagcctcctgctattacctgatggacagcgccacgctgcagtggtcgccagaggcgctgcggcagttcgggctgcacgccgatcaactgccctccatccatctctccagcgaggtgattggccacattacgcccgcagcggcaagcgttaccggtctgccgccgggcgtgccagtggtagcaggcacggcggatatggccgctaccctactcggctccggcgtctatcaggccggcatcgcctccgacagcaccggcacctccacgctgctcaccgtggtctcggaacacccgctgctctccgccagcgtcaacaacctgcacctggccaactcggcctggggcggttttaccctgctcgatgccggtggcgacgccatgcgctgggcgcgttcggcgctgagcgccggccaactcagccatcagcagatgctcgatatggcggccgaggtgccgccgggcgccgaggggctgctgttcctgccctacctgaccggcgagcggctggcggaacacaccaactcgcgcgcgcagttcttcgggctgcagcgcaagcataggcagcagcatctctaccgcgcggtgctggaaggcgtagcgctggcctccctgcgtaatctgcagcagctcaggcgccacgcacaggagccggaggcaatgatcgcctccggcggcggcgcacgcagcccgctgtggctgcagatcaaagcctcggtctataacctgccgctgctgcagacgcgcaaccaggagaacggcaccaccggctgcgcgatcgtcgccggggtcggcgtcgggctgttcagcagttttgcccatggggtgagccgcaccgtcagcatcgagcgcgaatttactcccgatccgcgccagcacgaacactacctgcgctgcttcgagctgttcgaacagctctaccgccaggcgcagcccctctacgaacagcttgacgttattagctcgttctctttttctccggatgaaggaacaccgcaatga

SEQ ID NO: 435019 - DNA, 225 bp, Serratia marcescens
  misc_feature (189)..(198): n is a, c, g, or t
ttgttcagggccgatgagtacttagtaataggcggcgattatcagtattaccttgatgtatactccattggatgtaccacacctggattctttcatgaagagggcgccagctatttagatcaggggatacatcaggaagatatcgtaaacaccttgcttgatcttggcatggaagatgagttaaccacnnnnnnnnnngcgtgttggacgtatcgcttaccgtga

SEQ ID NO: 435020 - DNA, 411 bp, Serratia marcescens
atgggcgtaaagataaaaggtatcaaagaggcccagcggcgccttgatgccgtggttgaggatgtcaggacgagaaaggcggtcagggctatcaaaacagcgctgtttatcatcggcaaagaggctgccctgatgaccccaataggcaaaacctcggtactgattaactcgcaataccaggacacccccgtagtgaatggaacacgcatcactgggcgtatcgggtattcggccaactatgcggtttatgttcataacgccagtggcatcttaaaagggctgccgcgtcctaagtcgcaaggtggcggtaattattgggatccatctggtgaacctaaattcctcaccaaggccgcagagaaaacccgccggcaagtggacgagataatcaggaaggagatgatgctgtga

SEQ ID NO: 435021 - DNA, 261 bp, Serratia marcescens
atgtcagagactgtagagattactcaggggcaacgaattcgcctcagcattttagaattggttgagtacgatacggctgcagcggctcaggctatcagttttgtggatgatgacccgtttaaagcggctttatttgaaaagcaatatctccggcatgctggggtggcattcgacattatcccgagaacactgaaggcaatccaggaaagcaaggaagcgctaccactgctgttgcctgctgaagttagccaaaatggctag

SEQ ID NO: 435022 - DNA, 2250 bp, Serratia marcescens
atgatagcgagcctgatcggcgcgggactggcgctgtacgggcaggctgcggccgcgcaggaacaggcggaaaataataaaggcagcgtggcgttcagcccgctgaacgtctcggccgccgacagcggcaaaagcagcgaaaaagacgcgctggcccggccgggcgcgttcagctcgcgcgacgaaaacaagaatctggagtcggtggacagcattctgcgcagcatgccgggcacctatacccagatcgatcccagtcagggggccgtcagcgtcaatatccgcggtctgagcggttttggccgggtcaataccatggtcgatggcattacccagaactattacggtacttccacgtctggtgtgatgtcacacggttcgaccaataaccaggcgggggtcttgatagatcccaattttatcgtcggagtggacgtggcgcgcggtgagaacagtggcggcagcggcgtaaatgcgttggcaggcagtgctaacttccgcacaatcggtgtcgatgatgtgatcttttctggcaatcctttcggggtgagaaccaaattctctgtcggcagcaacggcattggccgcagtggcatgatcgccgtcgccggtaaggggcaggcgtttaccgataccggcagcattggcgcgatggccgcgatcagtgggagctccatttactcgaacttcaacaatggcgacggtatcagcagcgaagattttgggtacgatgaatttatgaagcaaaatcccaagtcacagctgttcaaactggatatcaaaccgaacgagttcaatagcattgagttttccgccaggaactaccaaaaccgcttttctcggcgcgatatcgatagccatgacctctacctcaaatatcactatgcgccgttttcggagttggtggatttaaacctcaccgtcagcaccagtaaaggcaatcagaaatacgacggcggttcgctgttcaccttctttaacaccaacgcggaaaaccgctccgatgcgctggatatcaataacaccagccgattcagcctgctggataccgatgtagccttcagctatggcggcaaactgatgcgcaaccaataccgtaagcatgtagaatcggctatagagaattcgcagacggcgcaggaagcaatagaaaataataccttcgcgccatccggcgagcagcgaatcggcagtttatataccggcctgcagcttaaccgggatatctatcagctcgatctcaacctgaactacaccagcaacaagctgaccggttacaagcctgaatgcgattatcgcgtggagtgcttcccgcaaggggccgctagcatcaatttgaaagagcaagggttcaatccttcggtaatgctatcggcacaggtgacgccgtggttgcagccattcgtcagctacagcaagtcgatgcgtgcgccgaacattcaagaagtgttctattccaactcgggtggcgcatcgatgaacccgttcctcaaaggtgaacgagcggaaacctggcaggccggcttcaacgccaacgggcacgatttgctggtgaaggaagactctttacgcctcaaggtcgtgggctataccagtaaagtgcgcaattacatcttcagtgaatcttacatggtgtgccgcaatggacggaaatgcagctatcgcgaaaatctggaaaacgattgggccgatgcgagcgaagattactcggacaatatgtatatctacgtcaactctctgacgccggtgcgtatgcatggtgttgaggttgaagccaactatgatgccggacgagccttcgcgcgcgtctctttcagcaagcagcacaccgagcagccgacctccatcgccagcacttatttcggcgccggggatatcaatgaactgccggacatgtactttacgttggataccggggtgcgttttcttgatgaatcgctaaccgtcggcagcatcgtgaaatatacgggcaagacgcgtcgcctgtcgccggattacgagcagagtgaatcgaccggtgaaatcctcaagcaggaaatgccgaatattcctaccgttatcgacctgtacagcacttatcagatcaaccgcaacgtcatgctgaaattcagcgtgcaaaacgtgatgaacaagagctattccgaggcgttgaacaaactgaatatgttgccgatccagggggatgacgcgacggccgccaacaccgcccgtgggcgcacctatatcttcggcggggaggtgcgcttctaa

SEQ ID NO: 435023 - DNA, 1356 bp, Serratia marcescens
atgcccgtttttgaacagcgatgtgcggtacaccagcgagaccggcaccttcacgccgtcgcgcgccgttacccagatgcgctcgctgtgatacaggctcggatcgacgcctttcacctcctgctgcttcagcagggtgcgctcgcccttgttcagatcccactcataggtgcgggttggcgtggtcatcgccgaatagccgtagcgcaaccgatcgctgtccggctcggggttatagcccagccaggccatgtagctggcgtcgtcgaacgggatggcgcgctcggttttgccgtcccagctgatttgccgcagctgcaccagcccgttggcgcgctcctgcaccaccagccagtcgcggaacaggctgaagctctccacctcgtgctgcgcctgcggcgcgatcagcgtctgccagggtttgcccgccgccgccgtgcggtacaggccaaagttcggatcctgatggttggaacgcagatagaactcgccgcggtagtgatcgagataatactcgcggccgttctgccgggcggcgaacagctgcggctcgcgctgcggctggttggcgtcgatcaggcgcacctcggaggtggtgttaccgctgatggtcagaatcaggtaatcgcgcgaggacgagcggccgaggctgaggtagaacgccggatcgttttcctggtacaccagcttatcttccgccgtcggcgtaccgtactgatggcgatagacctggtatggcaacagcgtttgcgggtggttgcgcacgtagaacagggtttggttgtcgttggcccacaccatgttgccggaggtgttttccagcgtttccggcgaccagcgttcgctgcctatctcgcgcagggagatgcggtattggcggcggccctgcagatcttcggccaccgccaggcggcggttgtcctggctgacgtccatcgcccccaggcgatagtaggcgtggccggccgcgcgctgattggcgtccagcaaggtttgccacggcgcgtcggcggtcagcgcctggcgctgataccgcgcgaaatctttaccggcggcgtagctttcctgatagcgatagccgttgagctgatacggcaccgaacgatcgtcagggttcatgcggcccagcatctcctgatacagcgtggcgcgcagcttctggtacggcgccatcatctgctcggtgtagcggttctccgccttcagatagtccagcaccttctgctcttttcggctgtcgtcgcgcagccagtagtaatcgtcggtgcgcgtctcgccgtgggcggtcagcgctttcggcgcgcgttccgccaacggcggctgcggttgcgccagcgcggcgccggcgacgcctaa

SEQ ID NO: 435024 - DNA, 804 bp, Serratia marcescens
atgttaagtcagtcttactccctcccggcctttgaactgccgcagccgcgctgggcgcgcggcctgctgctcgctctggcggcgcacgcggcgttggtgctgttgttttactggccgcagacggcgctggagccggtggtgttgccaccgccggcggtgatgatgagctgggcggcgcagattgaagcgccggaaagcaagccgctgccgctgggcgtgcagcaggcggaatccgctgcggcgcagccggcggagcagcagcaacagccggatctgcccaagctggcgcgcgccgagaaagcgaaaatcgtgacggcgcagaagaagcgcgccgaacgccgccccccgcaaaaaacgcagccgcagcctaagccgcaggaacaggccaaagagacgcgcaacgccgccgcgtccagcgccgccgcgccgcaggcgcagacgctctctcaccagaccgccgcaccgatcaacagcgacgccaacagcaacgcgcaggccaaactgtcgtgggagagcctggtgaaaggcaaactgaaccgcatcaaggattaccctttggatgcccgcagccgccggcgcagcggcatgccgcaggtcagtttcagcgtcgacgcgcaggggcgggtctcgaacgttacgctgctggtgcgctccggcactgcgtcgctggatcgggaagcggtagcggtggtgtcgcgcgctcagccgttgccgcctccgccgccggagatgctgcagcagggggccgtcagggtgacgatgccgatcgatttcaatctggcggagctgaatgcccgccgttaa

SEQ ID NO: 435025 - DNA, 159 bp, Serratia marcescens
atgtacggcattctggagcgtcaattccgtaactattacaaagaagcaacccgcctgaagggcaacaccggtgaaaacctgttgcagctgctggaaggtcgtctggacaacgttgtttaccgtatgggcttcgcgtgcagagtcacgtcagctggttag

SEQ ID NO: 435026 - DNA, 375 bp, Serratia marcescens
atggggctgctcgatcaatgggcggaacgccatatccttgatgcccaggataaaggcgagttcgacaatctgcccggccagggccaaccgttggcgctggaagatgacagcgcggtgctagctgaactgcgcgccggttaccgtttgctgaaaaatgccggttacctgccgccggagctggaagatcgcaaagaggcgttgaccgttgctcgtttgctgcaagggattaacagtgagcatcaggactatgtcgaactcagcaaacgcatggcgctgctggagcatcggttgcgtcaggctgggatgagtacggctttcttacatggtgaatatcagcgtgcattggacggcaaattcacccgggaggagaagtaa

SEQ ID NO: 435027 - DNA, 348 bp, Serratia marcescens
atgatcccgctgccggtcggcacaaaaatctggttggtggccggtatcaccgacatgagaaacggcttcaatggtctggcagccaaagtgcaaaccgcgctgaaagacgatccgctgtccggccatctctttatcttccgggggcgcagtggcagccaggtcaaactcctctggtccaccggtgatgggctgtgcttgctgacaaagcggctggagcgaggtcggttcgcctggccctcagcccgtgatggaaaagtgttcctgacgccagcgcaactcgcgatgctgatggagggtatcgactggcggcatcctaaacgcctgcttaactcactgactatgttgtaa

SEQ ID NO: 435028 - DNA, 393 bp, Serratia marcescens
atgaaatcattaacttctgttcgcaaaaaacaccccaactatcccattgagtttaaaatcaaactcgttgaactctcgcatagatctggcatatcggtagcccagttagcgcgtgagcacgggattaatgacaacctattgttcaagtggcgccaatattggcgtgagggaaagcttcgctctcctcaacaacccgatatcagcatgtcagcgttgatcccaataacgctggatgctgaaaccgacctggccaatcaaccgacagcgccccttgataagcaggaagccttcaatctgtcctgcgaagtcacgttcaagcacggcactctccgcctgaatggcgccgtcagcgaagatctactgacgatgttgatacaggagctcaaacgatga

SEQ ID NO: 435029 - DNA, 1209 bp, Serratia marcescens
atggacgaaaaacagttgcaggctctggctaacgaactggccaaaaatctcaaaacccctgaggatctcaaccagttcgatcgcctgctgaaaaaaatcagcgttgaggcggcgctcaatgccgaaatgacccatcacctcggctacgataaaaatcagcccaaaccggcgaccaacgcccgcaatggctacacccaaaagaccgttatcactggcgatggtccgctggaattgcgtacgccgcgcgatcgtgatggctcctttgagcccctactggtgaagaagaaccagacccggatcaccggcatggataaccagattttatcgctgtacgccaaagggatgaccacccgcgagatcgccgccgcgtttaaagagctgtatgacaccgatgtctcgccagcgctggtttcaaaggtcaccgatgctgtcattgaacaggttgtcgaatggcaaaaccggccactggatgcagtctatcccattgtttatcttgactgtatcgtcctgaaagttcgacaagatagtcgcgtcatcaataaatctgtgttcctggcactgggtatcaatatcgaaggccagaaagaattgctaggcatgtggatagccgaaaatgaaggcgccaggttctggcttaacgtactgacagagctgaagaatcgcggactgaacgacattctcatcgcctgcgttgacggtctgaaaggcttcccggatgccatcaacgcggtgtatccgcaggcacgtatccagttgtgcatcgtgcatatggtgcgcaacagtctgcggttcgtctcctggaaggactacaaggctgtcacccgcgacctgaaggccatttatcaggcccctacggaagaggctggcttgcaggcgctggaagcattctccaatgccagggacagccgttatccgcagataagccgcagctggcaggcaaactgggcgaacctggccacgttcttcgcctacccaacagacatccgcaaggtgatctacacgactaacgccatcgagtcgctaaacagcgtgatcaggcacgccatcaaaaaacgcaaggtgttcccgacggatgactccgtgaaaaaggtggtgtggctggcgatccaagcggcctcgcaaaaatggacgatgccgctgagggactggcgtatggcaatgagccgctttattatcgagttcggtgaccgcttggacggtcacttctga

SEQ ID NO: 435030 - DNA, 654 bp, Serratia marcescens
atgagacacagcgaagtgcttggcgtgatgcacggttcactgatttatgatggtgatatcctgggacttcgttcggtgttgcataagttcgccccggaaggtggaagtcacgaagactgggttgtttgtcgctatgtggaaaagccttttcagcatttacgcagaattaatcaaatcatgacaggcctggacgggaagacgctggacaatgttccattgtctttaaatatcaggtcgtggttctcggagcaaaaactctcttttatggggacgcagcgccagactgagtgggcaaagaaatttgtgaaaagacaccatctgttcatccgacgtgaccatattgatgagttcaggcttttaaatccaaacatacgtgatgatgaacgcgttgcgatggagattcgggagggggctttctggccattgcgaacccatcagtttcgccgttcacttgctgtacacctcaggcgtcttgatctgatttctactaatgatcttatccggcagtttaagcacttaatcagaggcatgacggagtggtatatgtccggtgcactcaacgcttcgcattttagccgggcgatccctcaggcattcgctgccgagattgaaagggttgataccgaactctcagcttccagggctgtttcttaa

SEQ ID NO: 435031 - DNA, 1539 bp, Serratia marcescens
atgaacagcttacttcctgacgatatcgatgaactgaaacgtctccttgccgaacaggaggcgctgaaccgtgcccttctggaaaagctgaacgagcgtgaacgcgaaatagatcacctgcaggcgcaactggataagctgcgccggatgaacttcggcagccgctccgaaaaagtctcccgccgtatcgcgcagatggaagccgaccttaagcagttgcagaaagaaagcgatacccttaccggccgggtggatgacccggccgtgcagcgcccgctgcggcagacccgtacccgcaaaccgttccctgaatcacttccccgtgacgaaaaacggctgctgccggcagcgtcatgctgcccggaatgtggtggtgcgctgagttacctgggtgaagatgccgccgaacagctggagctgatgcgcagcgccttccgggttatccggaccgtgcgggaaaaacatgcctgtactcagtgcgatgccatcgtgcaggcccccgcgccttcacgtcccatcgagcggggtatcgccggaccggggctgctggcccgcgtgctgagttcaaagtatgcagaacacaccccgctgtaccggcagtcagaaatatacagccgccagagtgtggagctgagccgctcactgctgtcgggctgggtggatgcatgctgccggctgctgtcaccgctggaagaggcgcttcagggctatgtcctgaccgacggtaaactccatgccgatgacaccccggtccaggtgctgctgccaggtaataagaaaacgaagaccgggcggttatggacctacgttcgtgacgaccgtaacgccgggtcagagctggcgccggcagtgtggttcgcttacagcccggacagaaaaggtatccacccgcagagccatctcgctggcttcagcggtgttctgcaggcggatgcgtacgccgggttcaacgaactgtaccgcaatggacagataacggaagctgcctgctgggctcacgcccgccgcaagatccacgatgtgcacgttcgcaccccgtcagcgctgacggaggaagccctgaaacggatcggtgagttatatgccatcgaggcggaaataagggggatgccggcgaagcgacgccttgcagaacgtcagcaaaaagctaaaccgcggctgaaatccctggaaagctggctgcgtgaaaaggtgaaaacgctgtcgcgacactcagaactggcgaaagcgttcacgtacgtactgaaccagtggccggcgctggcttactatactgacgacggctgggccgaggcagataacaacatagctgagaatgcgctacggatggtcagcctgggccgcaaaaactacctgttcttcggttcggatcatggaggagagcggggagcgctgctgtacagcctgatcgggacgtgcaaactgaatggcgtggatccagaaagctacctccgtcacgtccttaacgtcatagcggactggccagtcaaccgggtcagcgaactgctcccctggcgcgtagcactgccaattgaataa

SEQ ID NO: 435032 - DNA, 348 bp, Serratia marcescens; identical to SEQ ID NO: 16878

SEQ ID NO: 435033 - DNA, 267 bp, Serratia marcescens; identical to SEQ ID NO: 126402

SEQ ID NO: 435034 - DNA, 141 bp, Serratia marcescens; identical to SEQ ID NO: 36145

SEQ ID NO: 435035 - DNA, 951 bp, Serratia marcescens
atgagacttaagaaatacaataaaagtattgggatgctgtcattaatcgcagccactgtattgctcagtggttgcgatatggttttgatgaatcccaaaggagcaattggtgttgagcaacggacactgattatcactgcaatcgcgttgatgttgatcgtggtggtgccagttatcttcatggcgttcgcctttgcctggaagtatcgcgcttccaacaaagacgccaagtacagtccgaactgggcccactccaacaagatcgaagcggtcgtctggaccattcctatcattatcatcgccatccttggcaccattacctggaagaccacccacgaactcgacccgttcaagccgattgtcaccgacaagaagccgatgacgatcgaagtggtgtcgcttgactggaaatggctgttcatctacccggaacaaggcattgcgaccgttaatgagctggctttcccgaaagatgttccagtcgaattcaagatcacctctaactcggtaatgaactcgttctttatcccgcagttgggtggacagatttatgcgatggccggcatgcagaccaaactgcacctgatcggcaacgaagccggtgcctacaaaggcatctccagcagctacagcggcgcaggcttctccggcatgaaattcaccgcgatcgttaccccgaccgaaggcgacttcgatcagtgggtggccaaggtgaaggcatcgtctaaaaacctgaacaccaccgacgactttaacaaactggcagagccgagtgaaaacaacccggttgagtactttgccgctgtcaaaccgaatttgttcaaagaaacaattgccaaattcatgggcgacatggatatgcacaagggcgctggcgcgcacgaaggcatggacatgagccaaggtatggacatgggtgaacatgctgctcacgccggagccgaggaataa

SEQ ID NO: 435036 - DNA, 2553 bp, Serratia marcescens
atgaaagtcgtaaaatctctgcgcctcagcgcgcttcatcgccccttctcttggcaagggcaaaaccatctgggcgtttccgttttggccttggccgatatgggggcttccccgcgcctgcgccccgaaccggaactgtggcagttggccgccgaagaactcacgctgagcggcggcgtgctcgatttggctatccccaaagcctgcgcggagtttctcgccaccggtaacgcctacacccaccatcaacaagacaaaaccgcttgcgccgtaaagatccagctggattcgctggaaaaaacgctggtggttttcggcgatcgccattggatcaacgatcgtccctccactcccctcccttttgcagaaatgcgtctggactggcgccgggcttacggcggcacccagttcgccgataatccgcacggcatcggcgccactccagaaacatttccgcagggccgcatccatcgcctacccaatattgaaccgctgcaggggcgcctcgcgtctcctcggcaaagcgcgcaaccggcaagctttgacgcgttggatatcacctggccgcgccgcttctcccgcatcggtaaaaactacgacgccgactggttgaaaaacggctttcccggcttcgccaacgatatcgactggcgcctgttcaacatggcggaaagcgatcagcagtttcctcaacgcgacagcttgccgccccgcgccgcctatcgaatttggaacatgcacccttcagaaccggtgcagcaaggtcatttgccgccgtggcgcacacgctgtttcatcaaccggctgcgcggcgacgaaacgcatttcgaagaaatcgcgatgcgccacaccaccgtctggttcttcccccatcgggaacagatgctgctgatttatcagggcagcacacgcatcaatgaagacgatgccgccgacgtaatgcagctgatgccggctttggaaatcgaaggcgagccccgctccaccgcgcattatcggcaggtgttgacccagcggctggataaggaacggggtgctctgcacgcgtttcgtgagcaagagttgttgccggaagcgtgcatcggcgcctggctggatacggaaacgccgacgcagcaaagcccgatggcggaaaatatcgccgcctacgagcaccggcagcgcgaagagcaccgccagcgcctgctgcgtgaaggccaggacatcgatgaactgttcccgctgccgtcgcaagacgcgccgccgaagctggaccaactcgccgaatttgtcgagcgtctggaaagccaggccgaggcgcagtatcaggacatgctcaagctggcgcaagccgagggtatcgatccgcgcaatcccggtggggatcacgtgccgccatccggtgcggaaagctaccagcagcagcgcgatctgctgttccaggaggcgcgccggcatcccgacgcgttcagcgaaaaacagctgggggaaagcgagcgcgcgctgcaccaaatgtatttaatgtcggcacaggcgcaaagccctgcgctgcgtttaagcggcgatctggcgcaaatcattcgccaacgcgtcaccgccgccatgctgcgcgataaggatctcagcggtcttgatctcaccggcgccgatctgtccggcatggatctctgccaggctaacttgcgcggcgctttgctggaaaacgccaatctgcgccaaacccaactggtgggttgcgaccttcgcgaggcgatgctggcgcgcgccgatctcagcggcgccgtcttgcagcaggccgatctgagccacgcctctttggccctggcgaaatgcgaagcgacggatttcggcggcgcacagctgcacgaaaccaacattcagcaaacgttgtttcaacgctgcgatttcacgatggcctcattacgcgatttgctgggatacgaaaccttgctcgggcagtgtgatttcagccgcgccacgctggccaacattacgctgatggagctgcaactggagcagctgacattcagccacgcccggctcgaaaaagtcagcttcgtcaaatgccgcttgcaggcggtgaacttcgatcgggcgcggctggaaagctgcgcctgggttgataccgagacgcaaagcctcagcttccgcgccgcacgcctcacggcctgcgccttcgcggcaaagacgctgctgccgcaggcggatttcagcgacgcgacgctaaaccagtgcaatttacgccagatgccgttgcagcgggccaatttcagccgtgcacgtctcaataattgcgacctgtcggaaagccggttgaacgacgccgatttccgtcaggccaacggcagcggcagcctgttcattcgcagcgatctgtctcgcgccaacctgcgcgacgccaatttcattgcggcgatcctgcaaaaatgcgtgctgtcgggcgccgacctgcagggcgccaatctgttccgggccgacctgtcgcagtcgcaagtggatcaggcgacccggctcgagggcgcctataccgccagggtgaaaacattgcctcgccacaacgggaaggaagtatga

SEQ ID NO: 435037 - DNA, 1038 bp, Serratia marcescens
atgagtctgccccacacgttgcatatcggccgcccggacggcgtcatcaactggcgcatgccgctgcgcctgctgctggtcaacctttcgctgctggcgttgtgcctggcgatggccgttgccgcgctgtgctacggcacgctgcagctctcgctggagcaggtctttgccgcgctcagcggcgaggcgccgaaaaatctggtcaccgtggttacccaatggcgcttgccacgtatcgccatggcgctgctgttaggcgccgcgctcggcatgagcggcgccattttccagtcgattatccgcaacccgctcggcagcccggacgtgattggctttaacatgggggcttacaccggcgcgctgatcgccatcaccctgttcaacggcggctattactacatcgccggcggcgcgctggccggcggcattctcgccgcgctggccatctacctgctggcctggcggcaaggcatcgccggcttccggctgatcatcgtcggcatcgccatcagcgcggtattggtctccaccaatacctggctgatcatcaccgcctcgctggagcgcgccatggacgccgccatgtggcaggccggttcgctcaacggcatgacctggcagaaagcccaacccgccacggcgttcatcgtgctggcggccgcggccgcgctgctgatgggcaaacggctgcagctgctggaaatgggcgacgacacggcgcgcgcgctgggcgttaacgccgaaggcagccggctgtggctgatgctgttcggcgtcaccctcaccgccgccgtcaccgccaccgccgggccgatttcctttatcgcgctggcggcgccgcagatcgcccgccgcctggccggccaatcctcggtcaccctgacgtcctcggcgctgatgggtgcggcgctgctgctcggcgccgacgtagtgtcccaacatcttttcgcaccgatccaactgccggtcggggtcgtgaccgtctgcatcggcggcctgtacctgatttggctgctcatccgtgaggcccgcagataa

SEQ ID NO: 435038 - DNA, 825 bp, Serratia marcescens
atgaagaatgacaatgccatgagccaccgcctgcacgcctcgcatctgaagctgggctacgacaataaaatcatcgctgacgatctgagcgtggcgatccccgacggcgccttcacggtgatcgtcgggccgaacgcctgcggcaaatcgacgctgttgcgcgccctgtgccgcctgctgaaacccagcgccggcgaggtgatgctggacggcaagaacatcagcagcttcgccaccaaggcgctggcgcgcgagcttgggctgctgccgcaaacctcgatcgcaccggacagcattaccgtggcggatctggtgtcgcgcggccgctacccgcaccagagcctgctgaaacagtggacgcaagccgacaaacaggcggtggaagccgccatggcggccaccaacgtcggccagctggcggaccgcagcgtcgacgagctgtccggcgggcagcgccagcgcgtctgggtggcgatggcgttggcgcagcaaacgccgctgctgctgctggatgaaccgaccacctatctggacatcgcgcatcagatcgagctgctggatctgttccgccagctcaaccgcgagcacggccaaaccctcatcgcggtgctgcacgatctcaaccacgcctgccgctatgccgatcacatcatcgctatgcgcgacggcaagatcgtggcggaggggaaaccggcggagatcatcaccgccgagctggtggaacgggtattcggcatgccgtgcatgatcatcgacgatccgctgtcccacacgccgctggtgatcccgcgcggccgctaccactgcgacacgccgcaggcatga

SEQ ID NO: 435039 - DNA, 1284 bp, Serratia marcescens
atgcattcgcttcatgccgatggcctggtgctcaacctgctgcaaaggcccgatctcggcggagaagattggtggcgtcaggtcgcggagttgggaacgccgctcgtcgaatcgctgcccgcagcgcaggtgcgcgttacctttttctggcgcgacccgtggggcgatgaacggcgctcgccgattaaaaaggtgtatgtcgatatcaactgcgtgaccgaccatcacagcccttcgccacagagtctggaacgccggccgggtagcgatatttggtggtggcagttcactgttcgcgaagattggcgaggcagttacagttttatacccattgagacggcgcaactgccgcccgcttttaccggcgatgcggctcagcgtcggcagcagcagcgtcagtggtggtgttcgttgtttccgttgatgcgccatgatccgctcaatccggtggcgccgcactgcagcagccgcggcttcccgttgtctgcgatacatttgccggcggcgccggatcaatcagcgtggcgggcgttggacgccgggcaagcattgcccgccgcgtctgggcgtttgcagcacttcttttggcacagcgaacgattggctaaccgacgcaacatctggctgtacgccaccggcgcaggggaagaccgcccgttagtcgtactgctggacgggcaattttggctgcatggcataccgattttttccgcactggacgccgagacgcttaacggaaggctgccgtcggcgctttatctgtttatcgacgtgatagacatggcgcggcgtgcggaagaattggcctgcaatgcggctttctggcgggcggtgcaagaggagctgctgccgcaggtggcggagcgtgcgccttacagcgacgatccgcagcgcacggtggtggcggggcagagttacggcgggttggcggcgttgtatgccgggttgcattggccgcagcgtttcggctgcgtattgacccagtcgggttctttctggtggccgcatattgaagcgatgattaacccggctgaggagtatgacgccgacgtcggctggttgactgaacaggtgcggcggggcttgtgcgccgcgacgccgctgcgcgtctttcaggaagccggtgaaggggagagggatattcatcaggtcaatcgccaaatgcatcgggcgctggtggaggcggggcatcgggtcgattatcgcgtgttcgccggcgggcatgatgccgtctgctggcgcggcggtttgctcgacggattgcgggcgctgttggctccctag

SEQ ID NO: 435040 - DNA, 2163 bp, Serratia marcescens
atgtcagaacacccccaaaataccgccaatcaacctctgcgtcacccagccgccaagctcttgctgacctcagccatgctgctggcgccgggcgtacaggccggaaccgacaacgttgagagtgatatcaccgtcgtcgccggcgcacaggaaaacgtcaccgcgccgctgcagggcatcgtcgccaaagaaagcgcggcgggaaccaaaagcgccgcgccgttggtaaaaacgccgcaggccatcaccgtcgtcacgcgcgatcaaatggatcagcaggatgcggcttccgtcgctcaggcgctgcgatactccagcggcgtcgtggcggaataccgcggcacctctaaccgcagcgacgaagtgatcgtacgcggctttcgttacgccccaaaatatctggacggcctgagctatcaaagcggccagatcgacccctggctgcttgaacgcgttgaggtggtgcgcggcccggcttctgtgctgtacggccaggccaacccgggtgggctggtggcgatgaccagcaagcggcccgtcgcccaggctattcgcaaactgcaattgagcgcgggcaacctgcatcaaggagaggccgctttcgacttcggcggcgcattggacgaagatgccaaactgctgtatcgccttaacggcatcgccggcaccaaagagaccggtatcaaagatcacaaggaaaaacgcttcgccatcgcaccggcgctgacctatatcgccaatgaagacacgacgttcaccctgttgaccagctatcaaaaggaaccggagaacggctaccgcaacttcctgccgacctccggcgtggcgatcaaaagcagcgccggctatctgccgtatgatttcaacgtcagcgatcccggtttcaatcaggctcgccgcgaacaaacctcgttcggctatatcttcgagcactatattaacgacgttttctctttccagcagaacatgcgttacaccacggtggatgaacgttacaaatatctggtgttcatgtcgcaagccaaaaacagcacgctgctgcagcgccgtccgcaaaaagatatcgtcaaatcccatgagctggggttggataaccaactgaaagcgcaattcagcaccggcgacgtcgagcacagcgtgttgaccggccttgactacaagtggagcaaggtcaatacccaaaactggcgcggcgacagcgcgggctatttcctcgactggactcggccggtttacggcatgccggtcaacgaaagcgcattgccgaaggtcaccgataaccgcaaggtgctggaccaactcggcgtttatctgcaggatcagatgagctacggcggttggaatttgttgttgtcgctgcgcaacgactggaccgagctgcgcactcaggacatgttgagatccagcgacagtcagcaaaacgacaccaagctgactggccgcagcggcctgctgtacgcctttgacaacggcattgccccgtacatcagctacagcacatcgtttgaacccaacctcgataccggcgcgccgggcaccgatccgttcaagcccaccaccggtgaacaaaccgaaatcggcgtgaaattccagccgaagaacagcaacacgctgctgacgctggcgttgttcgatctgacgcagaaaaacgtcagctccaccaacccggtaaccaaatacaaggagcagatcggcaaagtgcgctccaaggggctggaagccgaagtgcattcacagctcaccccggccatcgcgctcatggcggcctacacctataccgacatcgttaccaaagaaacctatgtcgacgatcagcgcggcaagacgctggtgatggtgccgacgcacgccgcctccgcctggggaacctacagcttcctgcaagggccgctgaaaggcttctccaccggcgctggggtacgctacaacggcgccagccaaggcgatgcgaccaacacctacaaagtgccggcctttacgctgtatgactggatggcgcgctacgaattggcggaagtggctccgagcctggcaggcgccgcgctgcaggttaacgtcaacaacctgaccgacaagcattacgtttcgtcctgcggcggcgtggacgcctgtttctacggcagcggccgcaccgtcaccgccacggtcagctacagctggtaa

SEQ ID NO: 435041 - DNA, 1587 bp, Serratia marcescens
atgaaaagaaaagcaataacgatcgggctgctggcgttggcgattgccggcggcgcgcgggccaatacgctggtctactgttccgaaggctcgccggaaggcttcaacccgcagctgttcacctccggtaccacggtggacgccagttcggcggcgatctacaaccggctggtggacttcaaacccggcaccgtcgagctgcaacccagcctggcggaaagctgggaggtgagcgaggacggcaagcgctataccttccacctgcgcaagggcgtggcattccagagcaataaatatttcacgcccacccgcgatttcaacgccgatgacgtcattttctcgtttatgcggcaaaaggacgccaacaacccgtatcacaaggtctccaacggcgcctacaccaacttcgagtcgatggagttcggcacgctgatcgaccggatcgtcaaggtggacgacaacaccgtgcgctttgagctctcccgcgccgaggcgccgttcgtcgccgatctgggcatgtacttcgccaccattttttcggcggaatatgccgacgcaatgctgaaggccggcacgcctcagcgggtggacaacgatccgatcggcaccgggccgttccaactggtgcagtatcagaaagacgcgaaaatcctctacaaggcgttcgatcgttactgggaaggcaaaccgaagatcgaccggctggtgttttcgatcacgccggatgcgacggtgcgttacgccaagctgcaaaagaacgagtgtcaggtgatgccgttccccaatccggcggatctggcgcgcatgcggcaggacggcaaccttcaggtgatggaaaaatccggcttgaatatcggcttcctggcgttcaacacccagaagaaaccgttggataacgtcaaggtgcgccaggcgttggcgctggcggtcaacaagccggcgatcatcgaggcggtgttccacggcgccggccagccggccaagaacctgctgccgccgacccagtggggcagcaacgcgcagcttgaagattacccgtattcgccggagcgggcgaagcagctgttgcaggaggctgggctggggcaggggttcgacatcgatctgtgggcgatgccggtgcagcggccctacaatcccaacgccaagcgcatggcggagatgatccaggccgactgggccaagatcggcgtgcgcgccaaaatcgtcaccttcgagtggggcgaatatttgcagcggattaaaaacggcgagcatcagaccgcgctgatgggctggaccaccgccaacggcgatccggacaacttcttcgggccgctgttcacctgcgcttcgctcggtggttcgaactcggcgaaatggtgctataaaccgttcgaccagctgatcctgcaggcgcgcgaggagaacgatcacgccaagcgggtggcgatgtaccagcaggcgcaggtgatgatgcacgatcagatgccggcgctgatgatcgcgcactcgaccatcttcgaaccggtgcgcaaggaagtgaaaggctacgagatagacccgttcggcaaacacatcttcaagcaggtgtcgctggagaaataa

SEQ ID NO: 435042 - DNA, 1686 bp, Serratia marcescens
atggcacaggaaaaaacaggcaatgactggcaatgcggcgccgatttggtggtgaaaaacctggaagcgcagggcgtcaaacacgttttcggcattccgggcgccaagatcgaccgggtgttcgactcgctggaggacgcgccatcgattgaaacggtggtggtgcggcatgaggccaacgcggcctttatggcggcggcggtcgggcgcctgaccggcaaggccggggtggcgctggtcacctccgggccgggcagctccaacctgatcaccgggctggccaccgccacttcggaaggggatgcggtggtggccttcggcggggcggtgaagcgcgccgacagcctgaaacagacgcaccagagcatggataccgtcagcatgttccggccggtgaccaagtattgcgccgaagtgcatgccggttcggcaatttccgaggtgatcgccaacgcctttcgccgcgccgagttcggccggccgggggcgtcgttcgtcagcctgccgatggatatcgtcaatgaaccggtcagcgcgccggtgctggccggctgccgcttgccgcgcatgggggccgccgcggcggacgacattcaggcggcggtgaaactgatccgccaggccaaatgcccggtattgctgctcggcctgcaagccagccggccggagaacagcgaagcggtgcgccatctgctgtaccgcacccatatgccggtggtcggcacctatcaggcggcgggggtgatcgacgtcaaccacttcgcccgtttcgccggccgcgtcggcctgttcaacaaccagccggccgatcagctgttgcagaaggccgatctggtggtcagcgtcggctatgatccgatcgaatacgatccctgcatgtggaacagccacgggcggctgaaactggtgcacatcgacgtgctgccggcggatatcgacacctgctatcggccggacgtcgagctggtgggcaacatcagcgccacgctgaacatgatgaccgaaacgttcactgaggcggtctgcgtgccgccggaggtggagctgatcctcaccgatctcggccgccaacgcacggaactggcggagcgcgccgcgcgccgcggcggcatgccgatccacccgctgcgcatcgtcaaggagctgcaggacatcgtcagcgacgacgtaaccctgtgcgtggacatgggcagcttccatatctggatcgcccgctacctgtacagcttccgcgcccgtcagctgttgatctccaacggccagcaaaccatgggggtggcgttgccgtgggccatcggcgcggcgctggtgcgccctggcgataaagtggtgtctatctccggcgacggcgggttcatgcagtcgagcatggagctggagaccgcggtgcggctgaaaaacaacatcgtgcacgtcatctgggtcgataacgcctacaacatggtggagatgcaggaagtgaacaaataccagcgcaaatccggcgtggagtttgggccgatcgacttcaaagcctacgcggaatcctgcggcgcggtcggtttcgccgtgcagtcggtggacgatctacggccgatgctgcgcaaggcgatggcgatccaggggccggtggtggtggccattccggtcgactacgccgacaactataagctgatggcgcagatgaacttcagccagatgatttaa

SEQ ID NO: 435043 - DNA, 372 bp, Serratia marcescens
gtgcgggtcgacggcgagttcagccacgtggaaacccgcaccgtgccgcgccaggagcggccttaccgcccgatgctggaggcgatagaagagcagccgaccttctcgttccatcagcggcgcggcacgctggttggtttccgctcgccggattacatgcagggcatcggcgtggccggctatcacgaacacttcgttaccgacgaccgcagcggcggcggccacgtgctggactatcagctcgatcatggccgtctgcagttcggcgtcatcacgcgtctcaatcttcagttaccgcatgatgcggatttcttgcgcgccaacctctgcccagaggatttggatcgcgcgattcgttccgccgagggctaa

SEQ ID NO: 435044 - DNA, 921 bp, Serratia marcescens
atggtcgtggaagtttttgcccaccggcagatccgcccgcacctcgatgcccagctgctgcaggtggtcgcgcgggccgatgccggacagcatcagcagcttcggcgaaccgacggcgccggcgctgacaatcacctctttggtggcgcgcgcggtcacttccgcgccgccgttctggctgtagaccacgccggtggcgacgttgccctcgaaggtcagccgatgcgccagggcgttcagtttcaccaccagccgccgttcgtcgcgcaccgccttcaggtaggtgcgggcggtgctggcgcgttcgccgttgtgggtggtggtttggtagaaaccgacgccgtgctggctgtcgccgttgaagtcgttgcggtagggcaggttcagctcctggccggcgcggataaacgccatgctgagcgggtggcggtagcggttttcgctgaccggcagcagcccgtcggcgccgtggtagtcgtccgacaggctttcgttggcctcggcgcgtttgaaatagggcagcacctcccggtagctccatccggtgcagccatagcgctcggcccagtcgtcgtagtcctgcggctggccgcgcaggtagatcatgccgttgaccgaactgctgccgcccagcaccttgccctgcgcgatctgcatgcggcggttgttggcgtgcggttccggctccgtctcgtagggccagctctttttggcgatgatcttggccacgccggccggcatcttgatgaacaggttattgtcgtcgccgccggcttccagcaacagcacccgcgcctgggtgcggcggatcagctgcgccgccagcacgcagccggcggaaccggcgccgacgatgatgtaatcaaaggtattttccgacatgacagctctccgtgcgcgattgggatactggcagagtaa

SEQ ID NO: 435045 - DNA, 1488 bp, Serratia marcescens
gtggatcagcgtttccagcaggcgctcgttgtcgcgctggtgcaggccgatcgacggctcatccagcacgtacatcacgcccaccaggccggcgccgatctggctggccagacggatgcgctgcgcttcgccgccggagagcgtctccgccgagcgggacagcgacaggtagttcaggccgacgttcaccaggaacttcaggcgatcgccgatctctttcagcactttttcggcgatcttggcgcgttggccgctgagcttcatgttctggaagaaggtcatcgcatggccgatgctcagatcggaaatctccggcagcgtggtgtcttcgacgaacacgttgcgcgcttcttcgcgcaggcgggtgccgtgacacgaggcgcaagggcgattgctgatgaacttcgccaattcttcgcgcaccgcgctggattcggtctctttatagcggcgctccatgttgtgcagcacgccttcgaacggatgacggcgcacggtggtatcaccgcgatcgttgatgtatttgaattcgatcgactctttgccggagccgctcagcaccgccttctgcacgtcggcgctcagggtgttgaacggcgcttcgacatcgaactcatagtgctccgccagcgagcgcagcatctggaagtaatagaagttgcggcgatcccagccgcggatcgcgccgccggccagcgacagctcggggttttgcaccacgcgatccggatcgaagaactgctgcacgcccaggccgtcgcaggtcgggcaggcgccagccgggttgttgaaggaaaacaggcgcggttccagctcgcgcatgctgtagccgcagatcgggcaggcgaagttggcggagaacagcagctcgtccgctttctcgtcgtccatatccgccaccaccgcggtgccgccggacagctccagcgcggtttcgaacgattcggccaggcgctgcgccatgtcctcgcgcaccttgaaccggtcgaccaccacttcgatggtgtgtttcttctgcagctccagcttcggcggatcggacagatcgcacacttcaccgtcgatgcgcgcgcggatatagccctgggcggccaggttttccagcgttttggtgtgctcgcccttgcggtctttcaccaccggcgccagcagcatcaggcgtttgccttccggctggctcagcacgttatcgaccatctggctgacggtttgcgccgccagcggcacatggtgatccgggcagcgcggctcgccgacgcgggcgaacagcaggcgcaggtagtcgtggatttcggtgatggtgccgaccgtggatcgcgggttgtgcgaggtggatttctgctcgatggagatcgccggcgacaggccctcgatatgatcgacgtccggtttttccatcagcgacaggaactggcgcgcataggcggagagcgattcgacgtagcggcgttgcccttcggcatacagcgtatcgaaagccagcgatga

SEQ ID NO: 435046 - DNA, 1314 bp, Serratia marcescens
  misc_feature (1102)..(1111): n is a, c, g, or t
atgcagttcaaggcctggggcctgccggtcagcgatcgcgcccagcgccgcaccggcagcgaggaagtgctggcgttttatcgccaggtcgagcaggaccgcgcgcagctcggtttcgacatcgacggcgtggtgatcaagattgacgacatcgatctgcaggaaacgctgggcttcgtggcgcgtgcgccgcgctgggcgacggcgttcaaattcccggcgcaggagcagatcaccgtagtgcgcgaagtggagtttcaggttggccgcaccggcgcgattacgccggtggcgcgccttgagccggtgctggtggccggggtgaccgtcagcaacgccaccttgcacaacgccgatgaaattgagcgtttggggctgcgcatcggcgatacggtgatcgtgcgccgcgccggcgacgtgatcccgcaggtggtgggggtgctggaagaccgccgaccacaggatgcgcgcgaagtggtgttcccgctgcactgcccggtgtgcggctccgacgttgagcgcgtggaaggcgaggcggtagcgcgctgcaccggtggtcttatctgcggcgcgcagcgcaaagaggcgttgaagcacttcgtttcccgccgcgcgctggacgttgaaggcatgggcgacaagatcatcgagcagctggtggacaaagagtacgtgaagaatccggccgatctgttccgcttgtccgccggcattctgactggcctggatcgcatggggccgaaatcggcgcagaatctggtcaatgcgctggagaaatccaagcagaccaccttcgcccgtttcctgtatgcgctgggcattcgcgaggttggcgaggcgaccgccgccaacctggcggcgcatttcggatcgctcgagaagctgttcgccgccgatatcgaggcgctgaaagaggtgccggacgtcggcgaagtggtggccaaacacacccgcaatttcctagatgaagcgctcaatcagcaggtgatcaacgagctggtgggcgccgagatcggcattcactggccggcgccggtggtggtggtcgccgaagagatagacagcccgttcgccggcgatcaccaaatcggttttcttcgannnnnnnnnngtgctgaccggctcgctgagccagctgtcgcgcgacgaggccaaagatcgcctgacggcgctgggcgccaaggtcagcggcagcgtgtcgaagaaaaccgatttggtgatcgccggcgaagcggccggctccaagctggtgaaggcgcaggagctggatatcgccgtgatcgacgaagcggagatgatccgcctgctgggtga

SEQ ID NO: 435047 - DNA, 1077 bp, Serratia marcescens
atgtgcgtcacagtgaaatttatcgccaccgcgctgctggcaatattcgccttgccgacggcgccttgcgccagcggtagtcagccggcggcggccgaacggccgcagagcgcagcggtgcaaaagttgcctggccactatcagcggatcgtcatcaccggcaactgccccttcggcgtgatcctggcgaacgaggcggcctaccggcacgtcgtcggcgtggggccctgggcgttcatgcatgccgatatgcatgtgttgaaggacatgaagcctgacatcggcaggatcacctccgccttcatcaataaggactaccgggtcaacatggagtcgttaatgaatctacggcccgacattatttattactacggcaaaagccaggacgatcggctggaaagggcgggcgtgatgaccgtcgatctggatgccggcgggaagacaaagtaccaaccgatggtcacccagatgtattgggaaaataccttcgccgacacgctcggcctgccgcgcacgcacaaattcaaagacgcctgggaaaagaccctgaagcagatccgcccctatgccgcagccatccgcgcgcagcacgtcagggcgttgtatctcgaagaaagcgacggcaggcagctgaaggtgagcggcccgcatacctacggcgacacctacctgaaaatggccggtatggacaacgtcgccggggatttgccggtgaaaggggatgccggcaggtacatcaacgtttcgatggagcagatcatggcctgggatccggatgtgattttcgtggttttcggcagcgccaaagcgctgctgcacggggggatccccggccaggcctgggagacgctcagggcggtaaaaaacggcaaggttttctcgacgccggtgggcattcataactgggggggcctgtcggcggaaacgtcactgctgccgctgtttatgatcaaccgctatgcccctgaagacattagcgacaagacgctgcgggaggagacgcgccgctattatcagacgatgttctcctatgcgatcccggaccgtttgttggatgaggtgctggcacagcgctag

SEQ ID NO: 435048 - DNA, 921 bp, Serratia marcescens
atgtacgacatgattgccctgatgaatagacttgcggtgcaagagggatacaacctcactgccctacctgatgtgcgaattttgcgatccgatcgcccgcttgccagaacgccggtgctttacgatccggggatcgtgattgtctgtcagggcagcaaacgcggctatttcggccagcagacctatttatatgatgagcagcactacctggcggtttcggtgccggtgccgtttgtgatggaaaccgatgcgtcggcagcacatccgctgctggcgatttatatgcatctggattttcagcttgccgctgaactgatgttgcagattgaacagcatggcgccccgcaccctcccgtcgcgccgcaaagcatgatgtcgagccccatggacgacagggtaaaaatggccgttcttcgcttacttgaagtcctggctgacccgctagaagcggcgatcctcggcccgacgcggctgcgtgagctttatttccgcgtgctgacaggcgcacagggcaacgccatgcgtgccgcgctggccttgcagggccagtttggcaaaatcggtaaagcgctgcagcacatccatgccgcttacgcggagccgctaacgctgacgcagctggcgatgaaggccggcatgagcgtgccgacctttcatagccatttcaaagcgataacgaagatgccgccgatgcagtatgtgaaatcggtacgcctgcaccaggcacggatgctgatggtgcgccaacaaatcaccgccgccgccgcgagttacgccgttggctatgaaagcccatcgcaatttaatcgcgaattcaaacgtctgtttggcctgccaccggcagaggagataaaacgcatgcagcgtcacttcgccattccgcccgcgcagcctgcctcggtatttgtttcgtcgcactaa

SEQ ID NO: 435049 - DNA, 837 bp, Serratia marcescens
atgcagttaaccgtgcgcgacatgacgctcaatctctcccatccgcaggtgatgggcatcctcaacgtgacgccggattcattttccgacggcggccgccacaacaccctgaaccaggcattactgcacgcgcatgcgctgatttcggccggcgccacgatgatcgatatcggcggcgagtcgacaaggccgggggcggcagaggtgagtgaagaggaagagttggaacgggtcgtgccggtggtggaagcgctggcgcagcgttttgaagtctttatctctgtcgatacctcgaaagcgggcgtgatccgcgaatcagcgcacgccggcgcacacctgatcaacgacattcgctcacttcaggagccgggtgccctggcggcggcggcggaaagcgggctgccggtctgtctgatgcatatgcaagggcagccgcgcaccatgcagcaggcgccgcactacgacgatctgatcgccgacgttcaggcgtttttcgagcaccatatccggcgctgtaacgaggcggggataacaaatcagaaattgctgctcgacccaggcttcggtttcggtaaaaatttggcgcacaactatcagcttctggcgcggttgtcggagtttcatcgtttcggtttgccgctattggtcggtatgtcgcgtaaatcgatgattgggcaactgctgaacgtgccgccggatcaacgggtgatcggcagcgtggcctgcgcggtgatcgcggcgatgcagggcgcgcagattgtcagagtgcatgacgttaaagaaaccgtcgaggcgatgcgtgtcgtcgaggcaacactttcagctaagggacagtag

SEQ ID NO: 435050 - DNA, 522 bp, Serratia marcescens
  misc_feature (468)..(477): n is a, c, g, or t
atgaaagcgctgactattcgcccaggcaaactgacgctggcccagctacgcgacgtctatcaacacccggtgacgctgacgctggacgacaacgcctacggccctatccaacagagcgtggcctgcgtggaacgcatcgttgaagaaaaccgcaccacttacggcatcaataccgggtttggcctgctggcttcgacgcgcatcgcccgcgacgatctggaaaacctgcagcgttcgatcgtgctgtcgcacgccgccggcgtgggcgagccgaccgacgacaacctggtgcgcctgatcatggtgctgaagatcaacagcctgtcgcgcggcttctccggcattcgtctggaagtcatccaggcgctgatcgcgctggtcaacgccgaagtttatccgcatattccgctgaaaggctccgtcggcgcctccggcgacctggcgccgctggcgcacatgagcctggtnnnnnnnnnnatgccgaagacctgttcgccgccgcgatcgtggcgggcagcctga

SEQ ID NO: 435051 - DNA, 1722 bp, Serratia marcescens
atgcgctcagattcagatactgctcgtgctttactttattctatccgctgcgggctgtcgggattattgatcggcgttgtacccctgttttccgcttcggcgtctaccagcgatggaatggcgtccattgatgcccgcgaacagcagcgccagcaggagcgcgagcgcgccctgcaacagcaaaatgccccacaggccgatgcgcgcctttcccgtcccgacgttgtgctgcccgattaccaaaccgatgaacgcccttgcttcatcatcaatcggctaacgttggtcggcgagtctgccgatcgctttcaatgggcgttgaacgccgcggcggatgccaggggccgctgtctgggcagccagggcattgtgcttgccatcaacaaggtacaaaacgcaatactggccaagggctatgtcaccacacgcgtgatggcgcaggagcaggacttgaccacgggcgtgttggcgctgacgctgcagccggggcgtatcggtgatatccgctttgaggagccggtctcctggcgtgggcggctgtggaacgctattccggcctcacgcggcgatattctcagcctgcgcgatatcgaacaggggctggagaacttcaggcgggtgcccagcgccaatgccgatattaaaatcgtacccggcgccgaggacggaaccagtgacctgcaggtcaactggcacgaagggcgcccggtgcggctcagcctggggctggacgacagcggctccaaaagtaccgggcgttatctcggttcggccactctggctatcgatgcgccgtttgcacagaatgacctgttttacgccaacatcggcaaggatgtgtttcagcacgggccgttcggcaaccgttcacatacgctgaactactttttcccggtgggatattgggctttctcggccaattacaacgactacacctatcaccagaacatccccaacgccaatgaggtgctgcgctacagcggcaagagcgacaacattcagttgaccgtctcccggttgctgtaccgcgaccagtcgcacaagttaacgctcaacctgcgcggctaccgcaagcactcgactaacgccgtggacaacgttgatattgtgtcgcaaaaacgtcggaccgccggctgggagctggggctgaatcagcgcagctacttcggtaccactacgctggacgccaatatcaactggcgccgcggcaccggcgcattcaatgccctgcctgccccggaagagtcgcgtcatgaaggcagcgcacgtaccggcattttgctcggcgacctgggcatcaatcagccgttctcctggggcgatcagccctggcgggtgtataccagcgtaagggggcagtggagcccgaacgcgctgacgccgcaggagcggatggccattgccgggcgttacacggtgcgtggctttgacggcgaacagatgctgtccggcgaaaagggcctgctatggcgcaatgaaatcgcctggaacgtgttttctcgcgggcatgaattgtatctggccgccgactacggccgggtggacggcccaaacacccgccacttggttggccatcaattggcgggcagcgcgctcggcgtgcgcggcgcgctgtgggggcgattcagctatgacctgtttgccggcgttccgctctacaagcctgcggggttccacacctccggcgcgaccgcgggttttagcgtaaatctggaaatctga

SEQ ID NO: 435052 - DNA, 333 bp, Serratia marcescens
atgtacgccgtttcatactccagcagcggctcgcagtggaactcctgcggcgccgacgacgccggcagcggcgtgatggcaaaatccatcgtgccctcgcgcagctgcgactgggcgttggccatcaggctttccgacagttccagccgcaccgccggcatcttgctgcgaaacgccatcaccgccgacggcagcaccgtcagcatcagccagggggtgaacgccgccttgaccagatccgccgtgcgcccgcgcagcgccgccatttcgccctgcgcctgctccagctggttcagcaccagccgggcgtgcgccagcaaggttttgccgtag

SEQ ID NO: 435053 - DNA, 156 bp, Serratia marcescens
atgccgatgctgacggtgatctgcccgggcggttccggccacagcctggccgacctgctcaaactggcggatctggcggtatacaaagcgaaaaacgccggccgtaaccgggtcgccacgccggaatcttgcccgccgaacgatcctgaccgctga

SEQ ID NO: 435054 - DNA, 990 bp, Serratia marcescens
atgatcggaattgaacaacccgccgtggcgcgccgcgccgccggccccagcctcggcaagcgctgggaaaaactgctgcatcacccggcggtcttgccgtttatcggcttcgtgatcttgttcatattgatgagcctgctgaacgacagcttcctcagcgtcaacaacctgaccaacgtggcgcgccaggtgtctatcaatgccatcatcgcggtgggcatgacctgcgccatcctgaccggcggcatcgatctctcggtggggccggtgatggcgctggccggttcggtcgccgccgggctgatgctggcggcggtgccgatcccgctggcgatggtggcggcgctggcggtcggcgcgctgttcggcctggccaacggcgcctgcatcgcctatctgcgcatgccgccgatcatcgtcaccctggcgtcgatgggcatcgcccgcggcctggcgctgctctataccggcggttacccgatctccggcctgcccgacgtcttctcgttctttggccgcggcacgctgctgggcatccaggtgccgatcctgatcatgatcggcgtgtacctgctggcctggctgatgctcaaccagctgccgttcggccgctacgtctacgcgatgggcggcaacgaagaggcggcgcgcctgagcggcatccgcgtgccgcgctacaagatgctggtgtacgtgatcagcggcctgaccgccgcgctggccgggctggtgctgacctcgcgcctgatgagcgggcagcccaacgccggcgaaggcttcgagctggacgctatcgccgccgtagtgctgggcggggcggcgatttccggcgggcgcggcgccatcgtcggcacgctggtgggggcgatgatgctcggggtgctcaacaacggcctcaatctgatgaacgtgtcgccgtatatccagaacgtggtgaagggcggcatcatcctggccgccatctacctcagctccgtgcggcgcaaatag

SEQ ID NO: 435055 - DNA, 1422 bp, Serratia marcescens
atgaacgccgtcgcgcgacgggctttggcgtcgctgcatcggggctgcggcgcgttgttcggctgcgcgctgttcgtggtcctgttcaccggctgctggagcctggccggcgacagcttcacgctgtggtggaacggcgtgacgatgagcggcgagcaacggccgttggcgcagctgctggacgacgcgaaagcctacggtgaagacggcgcggcgccttacgtcatgctgccgagcgcgcgttatccggtgattcgcttttgccgcgccccggacgactgcgccctcgcgctgagcgccgtcagcgggcggctggtcagcctgacggcacctaccacgctgttggtgacgctgcacaagaacctgtttctcggctttcccggtcgggtgtttctcagtttgttcggcatcgcgttcgctttgctgctgatcagcgggattgcgctgcatggtcgacggctgcgccagctgttgcagctgcggcggcgtcaggggctgcgggtgctgctgttcgatctgcacaatctgttggggctttggtgctatccgtggctggtgatgttcgctttgaccggcgcgttatccggcctcggcgcgctcggtactgtgctgctggccgaccgcgtcagccccggtgcgccgcagcgggtgatggcgcagctgatgggcggtgcgcaacctgcaccgcccttgcctgacgccgggcgtactcttgcgcagacgatggcggcgctgcggcgccaggcatcggaatttacgccgcaaaccctgcagcgcgcgccggatggtgcattgctggcggtgggcggcgtcactcgcggtattcccagcagcgcgctgttcgagcaatttcgtttcggcagcggcgagcagccggcgctgatgcggcgcagcgccgctcatcaggggccatggacgcgcgcgttcatcgccgttcagccgctgcactatggccaatacgcctggttgccgcgggcggcggcggcggtgagcgcgctgcattttttggccgggttcggcgcggcgacgctggcgctgagcgggctgggattgtggtgcctacggcagccgcagcgccgtgccgcgcgctttatcaccggcgtctgctgtggtctgacggtggcgggaagtctgctgttggccgcccggccgctggcggcattccctgccgcctggctgttttggggaatgtggggcgcggtggcgctgttggcgtggcgagtttggccggggtggttattgttcctcagcggaatggccagcggtacggcgctgctggtggcggcgctcggccatatactcagcgccggccccggcctgtactggctggacagcgctttactgttagtcagcgcggctctgttcgccgccggctccttgttatggcaatcgcgcggcgcctggccgcgccaattggagtaa

SEQ ID NO: 435056 - DNA, 699 bp, Serratia marcescens
atgacactaacgactgatcgtttcaacgaaatttacgagaacccggagcagtgtagttattccgagattcaggaaatggccgcgatgttggctaaccgggaggcgcagccggtgggtaaggccgaaatcacaaaaattgccgctgaacttgtccgtggggattaccttagcaaattatggacggaggcggaaaaatcacggcatgttgatactcacagattgcagaacctgctcgatgagttgcatgacatgatgaaggtgaaagcgatagctatcactcggatgctcaccgccccgccagcgccatcagtgccggatgactaccaacatctgaaaaacgttcgggagctgtatcacaaacaggaagaacgcttgttcgcgctcgcacagcgcatcaaaggagcatcgttcgacaaatactcccataccacggcgcaggccattgacgtgctggagcgtgaaattttcggcgaagatggtgacacctgccgcgccgcaatgctggctcaacctgtaagcagcagttacaggttgaactctccggtaattccggatggttggaagctggttcctatagatgcgacacgggctatgattgacgcggctcagagggtggaagaagacggctacgacgccatgcacaaagcaatgctggcagccgcgccggagagtgggaatgatcacgatacccgacgataa

SEQ ID NO: 435057 - DNA, 219 bp, Serratia marcescens
atgtactcgcaagagtacgtctcagacctgctggaagagctggaagcgaaggataagcgcatcgccgagcttgagcagcgactggctacgccggtgcggttgccgcgccctgcatgcacttatgcagaccacagttacccagcgtattcgcgtaagcaggttgaggagattatcacctctgccgggatgcgcttcaccgtagagggggatgaacagtga

SEQ ID NO: 435058 - DNA, 231 bp, Serratia marcescens
atgagcaagatgacctacatcgaagatttacatcagtcgtacctaaaggagctgcaagctaggcgctatcgctgcttctctccgtacaaattaaggggaaatgaccgttggcttgaagtatgcaatgcgcataaccgcaaggctactcgtaaggctcgccgctgcatcggaaaaagcaacaagattgggggggcgcaaaacaggcaaagggatgtgcggatttttgcttga

SEQ ID NO: 435059 - DNA, 534 bp, Serratia marcescens
atgaaagagcgcccagtgaagccagcaaatgaaatgaatccaggaacatctaaacgccttgaaatcttaaaggtgtccttggcaaagaaggaatctcaatttaatgagcgcctgcaagcacatttcgacactgtaaagctagcgaacggtcagccattaaacgacaagcgtaatggtcaggcaacgctgaaccggtgggataagcaaagcgacagcctgcgcagattagagggaagcattcaacgaaccaaagacgccatcgagcgggaggaaatgaaaatcgccaccgctagcatggtgagcatcccggagtttatgcagaaagcgattgatgacgggctgattacgcagtggcgaaagtttccgaggttcttctttgtaaacggcgtaaagcatgggcgaatagtgcttgatgagcagtctggagctatcggccatcggtatttaagcaaggtatcaaaagaagaatatccggtgttccgtgacgtattcaacaagctgaataagcagtgcagggattcccagcatggctaa

SEQ ID NO: 435060 - DNA, 477 bp, Serratia marcescens
atggttcagagatataaccctgattacgtcatgcacgcggcgcgctttgcgccgcttgccagagaagctgagcacggtgagttcgttaaattctccgactatgaatccttggtgtcagaactagccagcagccggcagatcaacgcccaaacgctgcaggtaaagctgacaatggctgaaaccatcaaagaactgactaatcgagttaatgcgctggctgtggagaatgaacaactggacgccgagcgtttggcatgggcagaactttacggagatgaaatgggcgatcccgatgtactcgtgaaagccaagcagttcgaaaccccagccactgacgcagctcttgcagctatcgaagcgcagggagttgagaaggccatcgagcgactgatgaatatgttcgcaagcaccgggcatattggcgtacctgtcatggctcttgaaggcctggctaaagagctgcgggaggccaaatga

SEQ ID NO: 435061 - DNA, 567 bp, Serratia marcescens
atgaactttgtagacggatgcaagagcattgaacaagtgaaagcggtagcggctgagttagccaaacaggggaagggcaatccgatattccgcgatgcgtggctattgggttttgagttgatgcttcgtgtgtcggatctgcgtgagctacgttatgacgctgtaacgggtgatcatgtatcgattatccaacagaagacggggaaggttgttcgtgttcgtctgactgataccgccaagcgcatcataacggcccgtgcagaggctaacccgtcacatgtgtatgttcttcagcttgactctaagcgctccacaggtaagcctgtaagccgttctaagctgcatgaggagattagccacgccgggcacaagttgggattgaacctatccactcacagcatgagaaagagcaagccaacaatcggttatgaggatggggcggatattgctgtaatctccaaagcgctggggcataagtcgttggcttcaactctgcactacatcggggccacgcagcaaaaaattgatcgctttacggagcggtattcattgaaagatctcatataa

SEQ ID NO: 435062 - DNA, 501 bp, Serratia marcescens
atgagcactaagccagtaatgaaaagcagcaccctcgacattctgaaagcccaaatgaaaaacagtctcaacgatcaggttgaaaagtccaaagaaaaagctgctgccgccaaaattgagaaggccaaggccgccggggaactgttggaagagctgatcgcacaacgcgccgcccagcacaccacacagaacaccacacaggccgccggtaaggctgaccgcaccattaaatcgcggggcattgccctaactcacatggaccaaggttacagcgccaacaatcgcccggttagtctgctgaccaaatcagccaagaccgccaacggtcgccgcagtgtatggatcaacaaggccgctaaccctgaagggatgaaagttaatctggtccgcaaggctaacggctcgatcgtagcccccaatggttacaagctggaagaagcgaccatcgactacatgaagcgcgtaggcatggtggtaaatatcgaaggcggcgcagaatga

SEQ ID NO: 435063 - DNA, 483 bp, Serratia marcescens
atgaatcaacacactaaccagcacgcacacatgatgggccacgaagttaatcaccacgcagacaaagagcagcacgcgcaagcctactactcgagcggtctggacctgctgcgcttcagtacagaagatgaaattatcgacgcgctggtatctggagagattaacaaggatcgcgtttacagattccgctgtgatgaggccacacaggaacgaattgagattaccggccgagcgctgaaagctgcaaaccgtttggcccgtcagatgcgtaaagcacgcgaagcccaaaacaatgacttggcggctgtactggcaaccattcacccgggcgaccctaacgacctgtcggattacgtgttggatgagctgcaaaatcaaatgacgtttgcgtcaatcgcctatggcattgatatgacgatgcaacaagcgatcagcctcgccgttttccacatggcgcagagccaacaagccgccaacgtctaa

SEQ ID NO: 435064 - DNA, 2559 bp, Serratia marcescens
gtgaagttcgtaaagtattttctaatccttgcagtatgttgcatcgtgctgggagcagcctcgatttttggcttgtacaaatatgtcgagccacagctgcccgacgtcgcaacgctgaaagatgtgcggctgcagataccgatgcaggtctacagcgccgatggcgaactgatcgcccaatacggcgagaagcgccgcattccgctgaaactggatcaaattccgccggtgatggtgcacgcattcatcgccaccgaagacagccgcttctatgatcaccacggcgtcgatccggtcggcatcttccgcgccgcctccatcgcgctggtctccggccacgcttcacagggggccagtaccattacccaacagctggcgcgtaacttcttcttaagcccggaacgcaccctgatgcgtaaaatcaaggaagctttcctggcggtgcgcatcgagcagatgctcaccaaggatgaaatccttgagctgtatctgaacaagatctatctgggttaccgcgcctacggcgtgggcgccgccgcgcaggtctatttcggcaaagacgtcagccagctgaccctgagcgaaatggcgaccatcgccggcctgccgaaagcgccgtccaccttcaacccgctctattcgcacgatcgcgccgttgcccgtcgcaacgtggtgctgtcgcgcatgctggacgaacactacatcacgcaggcgcagtacgatcaggcgcgttccgaagatctggtcgccaattaccatgcgccggaaatcagcttctccgcgccgtatctctccgagatggtgcgtcaggagatgatcaagcgctacggtgaaaacgcctataccgacggttacaaggtttacaccaccgtcaccaaacggctgcagctggcggcgcaggaatcggtgcgcaacaacgtgctggcctatgacatgcgccacggctatcgcggcccgtccaacgtgttgtggaaagtcggcgaagcggcctgggatcgcaaacagattgtcgattcgctgaaaaacctgccgaactacggcccgctggcgccggcggtgatcaccgccgccaacccgcaggaagcgacggcgatgctggccgacggcagcagcattgccctgccgatggcgaccatgcgctgggcgcggccatatcgctcagacactcagcaaggcccaacgccgaaacgcgtcaccgacgtggtgcaggccggccagcaggtatgggtgcgcaaagtgaacgacgcctggtggctgtcgcaggtgccggacgtcaactcggcgctggtctcgatcaacccgaacgacggcgcggtgaaagcgctggtcggcggtttcgatttcaaccagagcaaattcaaccgcgtcacgcaggcactgcgccaggtaggttcgaacatcaaaccgttcctgtacaccgccgcgatggataaaggcctgacgctggccaccatcctgaacgacttgccgatcacccgttgggatgccggcgccggcaccgactggcggcctaagaactcgccgccgacctacgacggcccgattcgtctgcggcaggggctggggcaatcgaagaacgtagtgatggtgcgcgcgatgcgcgcgatgggcgtcgactacgcggcggaatatctgcagcgcttcggcttcccggcgcagaatatcgtgcataccgaatcgctggcgctgggttccgcctccttcaccccgatgcagctggtgcgcggctacgcggtgctggcgaacggcggttacctggtcgatccgtacttcatcaccaaaattgaagacgacaacggcaatacggtgttcgaagccaaaccgaaagtggtgtgcagcagctgcaacctgccggtgatctacggtgacacccaccgctcggcggtgctgtccgacgacaacatcgaaaacgtcgccacctcgcaggaaggcaacaacagcacggtgccgatgccgcagctggagcaggtcaccccggctcaggtacagcaggacggcgaccaacagtatgcgccgcacgtcatcagcacacagctggccttcttgatccacgacgcgctgaacagcaacatcttcggcgaaccgggttggatgggtaccgcctggcgcgccgggcgcgatctgaagcgtcatgatatcggcggcaaaaccggtaccaccaacagttccaaggacgcctggttctccggctatggcccggataccgtgacctcggtgtggatcggtttcgacgatcaccgccgcgatctgggccggtcgacggtatccggcgccatcccggatcaaatttccggcggcgaaggcggtgccaagagcgcccagccggcgtgggacgacttcatgaagaccgcgctggaaggcatcccggagcagaaagtcacgccgccgccgggcatcatcagcgtcaccatcgataagagcagcggcaagctctctggcggtggcggcggcagccgttccgagtacttcatcgaaggaacgcagccgacggactacccatcgcgcgataccggcaccacgttgaccgatccgggcggtgaaagccacgagctgttctga

SEQ ID NO: 435065 - DNA, 393 bp, Serratia marcescens
  misc_feature (378)..(387): n is a, c, g, or t
atgccacatctcgcagagctggttgccaatgccaaggcagccgtagaagatgcccaggatgttgccgcgttagatttggtgcgcgtcgaatattttggcaagaaaggtcatttcaccttgcagatgcagtctctgcgcgacgtcccggcggaagatcgtccggcggccggcgcggtgatcaaccaggccaagcaagaggtgcaagacgccctgaacgcgcgtaagaacgcgctggaaagcgctgcgctgaacgcgcgcctggcggctgaaaccatcgacgtctccctgccgggccgtcgcatggaaaacggcggtctgcatccggtgacccgcaccatcgaccgtatcgaaaccttcttcggcgagctgggcttctcnnnnnnnnnngattga

SEQ ID NO: 435066 - DNA, 1059 bp, Serratia marcescens
atgagtaacaccgctgaaatcatccaattccgtgcgcctgtagagcgtgaggagcatcgcgtggccgataccgatgatgggtatgtgcgcctggcgaatgagctgtatgaggagctgattggcgccaatttaacgcgcaatcaggccaaggttgcgcacgctgtatgtcgcaaaacttatggctacaacaagaaggttgaccgcatcgctgatagccagctggcagagattacccgtttgccaaggcagaaagttaacaaggctaagaacgaactgatttctatgggagttttgctccgcgaagggatgatgatcgggccgaataagaacctttctgaatggaaaattccagagtgtcaccaagatagtgactttgtcaccaaaacagtgacaaaaagtgtcaccaaaacggtgacagggttgtcaccaaaacagggacacacaaaagacactattcaaaagacattaaaaacagatccccctaaagcccccaagggggaattttcggaggaagttctctcacaagcaaaacaagccctggagtattacaacgaactcacagggggttcctgccgttctgcagaaccattcgcagtgctgctgaccgaaaccaaaacccgcagcgcgtacaccctgcaagacctgcagttggtttgccgttgggtggtgcgcacctggaagcagcgaaataacaccgttgccaagccggcgaacatctgccgggtaaaccggttcgatggctacctgtccgacgccgaagcctggcagaaaacctgcgtagaaatcgactgccaagctgtggtggatatttacaacgaaattacagcgggtcgtatggcgcctgtagagctcgacagggagcgcgaaatttctatccgtgaactcactacccacctcgccacaaaatcaccggagggctttggcgcgtatttttctgcattccttgaggacgccagagagttttatttcggcggcccgaccggggaaggctggcatgctgatttcgaatacctgatgaaacctcaaacactgcgcaaagttcgggagggaaccctgtga

SEQ ID NO: 435067 - DNA, 375 bp, Serratia marcescens
atgagcaaggttatggggacggtcttacttgtgcttttgcttatcagcatagggctggctcagttggcgttctacttccacggcaacgcagtaaaggctggtgaacaggttaagcagcaggaaaagacgctggcgcaacaggcaggactgatcaccacactgcgcgcggatgacgcccgtaatcgcgcaatgatggccgaacagcaacggagagagcagcagctgcgccagcagggcgaaaactaccagaggaaatatcaggatgccattaaaaatgacgagtgcgcccgccgcactgctcctggtgctgttcttggcctcctgcgcggaacggacaccgccgccgccggcgccgctcgtgctgcttccccctga

SEQ ID NO: 435068 - DNA, 2541 bp, Serratia marcescens
atgatgtttttgtctgcaggaaagccgtttcgtttacccattctgagcgtctggatagcgctggcattgggcagcctggtgaccaatgctggagccgtggaggaaatccaattcaataccgacgtattggatataaacgatcgcaaaaacatcgatctgagccagtttacgcgcggcggttacattatgccggggacttacggcatgacggtgcatgtgaataaaagcgatcttcctgagcaacaggtgcctttttatgtccctgaggatgatcccaacggtagccgcgcctgtgtaaaccgggcgctggtggcacagctggggctgaaagaggcgatgcagaaggaactgacctggtggcaccagggagagtgtctgaatgaaaccagcctgaagggcatggaggtgcggggcgatctggcgtcgtcgtcgctgtatctcagcatcccacaggcttatctggactatatctcggaggattgggagccgccatctcgctgggacgaaggcataccgggagtgctgctcgattacaaccttaatgcgcaggcgcaacgtcagttaaagggcggtacgcggtcatacaatgccagcggcaacggcacggcgggcaccaacatgggggcctggcggctgcgggccgactggcaagcgagcatcagccagcaaagcggggccgggcagggcgcggaaaaacggttggaatggagccgttactacgcttatcgggctttgtcagcgctgcgttcgaaattgaccgccggtgaagattatctcgattccgggctgttcgacagtttccgcttcggcggcgtgagcctgcgttccgacgacagtatgttgccgcccaacctgcgcggctatgcgccggaggtggtgggcgtggcgaaaagcaacgccaaggtaatcatcagtcagcaaggacgggtactgtacgaaaccacggtcgcggcggggccgttccgcattcaggatattgatgatgcggtgtctggtgaattgaatgtgcgggtggaagaacaggatggcagcgtacaagagttcacgatgaacaccgccagcatcccgtatctgactcgtcccgggtcagtgcgctataagctggctttgggcaaaccctccgatatgaatcaccgttatcgagggccgttgttcggcaccggcgagttttcctggggggtgagcaacggttggtcgctgtacggcggtgcactgctgggcggggattacaatgctgcggcgctgggcatcggccgcgatctgatgctattgggcgcgatgtcattcgatatcacccagtcgcgcgccagattgccctacgaccgtgagacgctgagcggcggatcataccggctcagttactcgaagagtttcgacgagctggacagccaggtcactttcgccggctaccgtttctcggagcagagctttatgagcatgagtgagtttctggacgctcgtcagttcgggcgacggttcggcaacagcaaggagatgtacaccatcagctatagccagcaactgcgcgagctggggctgagcgcgtacttaaactataaccaccagacctattgggatcggccggctaacgatcgttacaacctgacgatgtcgcgttatttcgatattggccggttcagaagcctgagtctgtcgctaacggcttaccgcaaccgctacaacgagcgtaacgacgacggcgcctatttgtcgctgtcggtgccgtggggcaatggcgccagcgtcagctataacgccacgcttaaccgcggcgacaacacccatcgggtgagctattacgatcgcctcgacgagcgcagcaactaccagctcagcgccggcggctcgcgcagcggcgcgaatttgagcggctattacacccgcgatagcgatatggcgcgcgttagcgccaacgccagctatcagcaggacaggtacagcgcgatcggcctgtcggcacaggggggcatgacgctgaccgccgaaggcggtgcgttgcaccgtagcaacataccgggcagcacccggctgctgttggataccgaaggcgtgagcggggtgccggtgcgcggctatggcagcgccgcggcgaccaatcgctggggtaaggcggtagtgacggacgtcaacagttactaccgcaacaaggccagcatcgatctcgacaagctgggggataacgccgaggccaccaaatcggtggtgcaggcgacgctgacggaaggggctattggttaccgcaagttcgcggtgatcgccggggagaaggcgatggcggtgatcaggctggcggacggcagcgagccgccgttcggcgccacggtgctgaacgcccgcaagcaggagaccggtatcgtcaacgacggcggcagcgtttacctgagcggcatcaacgccggcgagcgcatgacggtgcgctggggcggggcggggcagtgcgaggtgcagatgccgacgccgctgccggcggagatgttgaccaccaatttactgctgccgtgtcgggcgctgagcgcgggcgacggcggcaacgaacactga

SEQ ID NO: 435069 - DNA, 1416 bp, Serratia marcescens
atgatcgaccgccgggatcggatcctgccaaatcagctcttcctgcggcacttccgggccgaggtagcgagggcgcggccccatatcgcggtgggtcagcttgaaccaggcgcgggcgaaggcgtcggccaactcttccggatgctcatagaagcggcgcgaaatcttctcgtaggccggatcgaagcgcagcgacaggtcggtggtcagcatggtcgggcggcgtttcttgttcggatcgaaggcgtcgggaatagtttcaccgatgtctttcgccacccactggtgcgcgccggccgggctttggctcagttcccattcgtattcgaacaggtggcggaagaaatcgtggttccactgggttggggtggtggtccaggtgacttccaggccgctggtgatggcgtctttgccgacgccggtgccgaaggtgctgtgccagccgaggccctgcgactccagcccggccgcttccggatcggcgccgacgttagacgccggaccggcgccgtgggtcttgccgaaggtgtggccgccggcgatcagcgccacggtttcttcgtcgttcatcgccatgcgggcgaaggtttcacggatgtcgcgcgcggcggccaccggatcggggttgccgtccgggccttccgggttgacgtagatcaggcccatctgcaccgccgccagcgggttctccaggtcgcggtcgcccgagtagcggctgtttggcccgccgctcagctccagccagatcttctccgagccccagtagacgtcgtccggctcccaggtgtcggcgcggccgccggcatagccgaaggttttgaagcccatcgattccagcgccacgttgccggtcaggataatcaggtcggcccaggagatgttgcggccgtatttctgtttgatcggccacagcaggcggcgcgctttgtcgaggctgacgttgtccggccagctgttgagcggggcgaagcgctgctggccttcgcccgcgccgccgcggccgtcaccgatgcggtaggtgccggcgctgtgccaggccatgcggatgaacaggccgccgtagtggccgaagtccgccggccaccattcctgcgagtcggtcatcagggcgtgcagatcctgtttgaccgccgccagatcgagactgttgaaggcgtcggcgtagttgaagtctttatccatcggatcggacaggggggagtgctgatgcagcggtttcaggctgagctgattgggccaccaatcctgattggtggggccgttctgcggtgcgggctgcttgccgcccgaaaacgggcatttgctttcagttgtcataatgcgctctctgcttccgtaagggtgctccagccgccgggcgtggagcggttaacaaggcatgcgggtaaggcttgcgtcgggtgttgcgctaaataa

SEQ ID NO: 435070 - DNA, 651 bp, Serratia marcescens
atgtcgagcaggttgacgaagaagtcgttggtcagcgcctgcggccgctgggtgaatacgccgtgcggcgtgccgccgacgttggcaccgagtacccgcagcccgccgaccagcaccgtcatttccggcgcggtcagggtcagcagctgcgccttgtcgaccagcagcgtctcggccggcacgcggtatttgcccttcaggaagttgcggaatccgtcggcgagcggctccatagcctcgaaggagtccacgtcggtctgctcctgcgaagcgtccatgcggcccggcgcgaacggcaccgtcagggccaaaccggcgttcttcgccgcctgttccacgcctgcggcgccggccagtacgatcagatccgccagcgagacgcgcttgccgccggcctgcgcatcattgaaggcgcgttggatgctttccagcttggccagcgtcgcggcgagctgcgcaggttggttgaccgcccagtctttttgcggtgccaggcgaatgcgcgcgccgttggcgccgccgcgtttgtcggaaccacggaagctcgaagcggaagcccaggcggtggagaccagcgccgataccggcaggccggaagccagcacggcgtttttcagcgcggcgatgtcctgctcgtcaatcagcggatga

SEQ ID NO: 435071 - DNA, 3153 bp, Serratia marcescens
atggcagaacaagacggcggcagcctcgtttatcaggtcgatatcgacactgcaaaaatgatcactggtagccgtaaggcatctaccgtactcggggaaatggagaagcagtcaggaaaagccgatgctagtttgtcaaaattggaacgccaggcagcttctacaggttctacttttggaactctttcgcgtgtggctgcggctgttacagctgctctatcatttcgtgaggtaatgtcatacgccgacgcatggacaacgctaaacaacaaactggctaacgcagtaaggactaatgaaactctggctgatgtgactgagcgagtctttcagataactcaggatacgcgctccagcctgaacggcactgcgacgctttatgctcggcttgaacgcgctactcgaagctataacacctctgctggagatctggcaaaactaacaacaatcattaaccaaggttttgtcgtatccggcgccacagctcaagaagcagagaatgctattatccagttatcacaaggccttgcgtcaggcgttcttcgtggtgaggagttcaactcagtaaatgaacaaggtaataggctaatcgtagcccttgctgactcgatgaaggtatcagttgggcaaatgagagcgatggcagcacaaggaaaattaactactgatgtagtggttaatggattgctttctcagggcgatgcgataggtaaggagtttgctaaaaccacgatgactattggtcaggcaagccaaattgccggcaacaacatcaccaaatttatcggtagttcaacaacggtaaaaactggtgtgatggtcttcaatgatgccattattaccctgagtgaaaacctcaccgccgtctcaaacgttattttggctatctctgcggtaattggttcgcggtatgtttctgcattaacggctgcaacagcagcaacgatagcgaatacagcagcagcggtaagggcagcgattgcgcagggctctctccgttcagcacttcttgccgctttaaccccgcttggcggcttggttggtgcggcaacgctcgcatctgcagcaatattctatttctatcaacgtgctcaacaggccaagcaagaagcgatagatttcgcagataaactcgatggcgtgatagcaaaaatgcgccaaatgaatgatgtacagctgaccggaactattgccgatctgaacacgtcactgagggctcaggttgagaaattaggcgaattacaaactgctcaccaagaaaatattaaccgtttatataatgctcaacaggcgctaaataatgctgcagagggctcttgggcatataactcagcgtcagcggcagtagctgaggctcaagatcaggttgctcagtcggctcgtgatgtagatacagcagaaacaaagcttagccgaactaaaagcacattaggcttagtccaggcgcagttaagcggaaagcttgaacagggcgttgatcttctgcgccgagatggcgaagaggctagcgtgactgctggcatgatgaaccacctgggcaacgctataaatttcgccagcagggccaaggacaaattcaactcgcaaagcctcatcgttgaacggcctaaaaacgttcaggactatctggataagctgaatgatcaggttgagattcagggcgagctaaacgataggaagcgtgcccagctcaaggctgagaaggatatcaggtctctcggcggtagtgagcaagatgtactgctggcacgcgagagggcaggcgctgagttcgatgcaacgaaggcaattcaggagcagaagaaggcaaccaaggaagggatagcggagggcacgaagtcagcgagccaggcggaaagcgttgcccagaagctggctaacctgaagcagcagtctgagcttgcggcggactcaacaagtgagcttagccgagagcaggcgatcctgactgcacaacaatcgctgggtaaaggagctacacaggcccagatcgctgaggctggtgcttacgccgctaagaagtgggacactgccaacgctatcaaggcgcaggctgcagcagagaagctcctgccagaagccaaagagaatgccagctacgctcaggacgtgaaggacttaaacacggcgttagcggccaagaaaatcagccaggagcagtacaacaccacggctgagcagctggagcaacagcatcaggttaacttggcaaaaatccgggctgaagccgtggtaagtcctcaacagcaagccgccggcatggttgacccagtgcagcagcttgccaatgagaatgcgcagaagctggcgttgattcagcagtttgaaacggataaagggaagattactcagcgcggaattgagctgatgaatgctgctaacaagcagtacgaacaacagcgaactgccgcgcagtgggaaatccttagccagcagagccttggttacgacatgctgactagcgctgttgatgccttctctggtaatgcctccaacgctattacagggctgctcaccggcaccatgtcggcacaagaggcgatgcgttcgcttggcaacaccattctgaacagtgtgataaacagcatcgttcaggtcggcgtggaggcgttgaaaaactacatcctcggccagacgcttggcgccgcctccgtggcgtcatctgtgggtatggctgcaacaacggcttcagcctgggcgccggcggccgcaatggcatcactggcaactcttggcgctaacgcagctccagcggctgcagggataacctcaaccgtgggattggctggtgggctggctttggctggagcgcgaaaaaatggcggaccagtgtcccctgggaaaatgtaccgagttggtgagggaggggtgccggaggtgcttcagtcgagcaatgggcgaaactacctcttgaacggtgacaacggcggaaaggttatcagtaacaaggaactcaccgccggtggcagtgctgcaccaaccatcatcatcgaaaactactcatctggtgctggggtaatggatacccatgccagcaaaggggctgatggtggcgatgtagtgcgcatcgtgctggcggatctgcagcagggcggccaaatcagtcagggcatctcccagtatcaccaggcgcctcgcaaagccactgaatag

SEQ ID NO: 435072 - DNA, 1506 bp, Serratia marcescens
  misc_feature (664)..(673): n is a, c, g, or t
  misc_feature (1429)..(1438): n is a, c, g, or t
atgtcaaacaaggtgtcacaaaaactgtcacacacaatccaacgtggccggatattctacacaaattttagacttaatggttccaaaaagtttgttcggttatcacttaatactgacagtttgaaacaggctcagctggtcatgtccaaaatggccccttacatccctttggttcagtctggagcaatgtccgtggacgagttcaaggcaaagctcaacggcctgaaggacctaaccaaacaagatttggatacattcctgttgcgccaccttgaagacaactatgaagaggtggaaaggctgccaaaactcgggacactaacgaaacaatatttcggcggcagcattgaccgtgaagcgacgaaaaatgacgccacaggctatgcaagagcaactatagataatattcattcaggctcagattttggactggccgcccttaagcattccctacggcataaggggattaatcctgaggggctaccggatgaaatgagcgacgtcgttagccagattgatatgtcgttggctatgaagcatcaagcctatgaggcgttttattcagatgacttcttgaagtatcgccaaattttgggttcgctcaaagagcaggtaaagagcctctcagatagagcgccgagtcaaaaccacgctccacaagttnnnnnnnnnnccgctgtaaagctgtctgaagcttggaaaatgtatgttgcagataaggggcagaaatggcggcgctctgtcgctagtgagaatcagcgattctacgatgttcttttcctcgtcgtgggagatattcccgttgatagcgtcaccaagcagcacataagggaagcactgaagattgccgagaatctccccacacgaacccgatccccctactccagcatgactctagccgaatgcgttgcttatgatgtcccggaggaggatttaatctcaagtgaacacgtccacaagcacttgaagatctggcgctcactgttcaaaacgtaccttgtcgatcaaaaagatattctgacaaaatcccctattgagggagttagttacgaggttaaatccaacaggagcgggaactatactctcagtgagcttagcaggatcaagaagtgtctttttgacctacccgacggtgattatcggaaatggtatttcctcacattgatttatacaggcgcccgtcgtggtgaaatagcacagatccgtaagcaccacctaaggaaagatgacgagaccggacgttggtatatctttattgacggaggaaaaaccgaacacgcaaggcgacaggttccaattcataaatctatagaggtgggacttttgacttatgtggaaagtttgaaggattccgcccctgtgtttagcaacctcccgaattatacaagcattacatatgattggatcagattactaagggttttagatnnnnnnnnnnacggccagatatacgcatgttccacctttaaaagatcttattgttgtagtagacgccaattaaaataa

SEQ ID NO: 435073 - DNA, 342 bp, Serratia marcescens
atgctgttcccggaagcgatcaccgagctgggcatgtaccgccgcttcgccgaagcgacgcaggtgccgatcctggccaacatcaccgaattcggcgcgacgccgctgtttaccaccgacgaactgcgcagcgcccaggtggatatggcgctgtatccgctgtcggccttccgggcgatgaaccgcgcggcggagcgggtgtaccgcgctttgcgcgaggagggcacgcagaaaagcgtcatcgacaccatgcagacccgcaacgagctgtacgaaagcatcaactactatttgttcgaagagaaactcgacgccctgttcgctcgccaacgcgacgaatag

SEQ ID NO: 435074 - DNA, 1341 bp, Serratia marcescens
atggcgagtgaatggcaagacacgacccttggtggactattcaaggtcatacacgggttcgctttcaaaggcgaatacttcaccgaagaaccgcagaagaccattctggttacacctggcaactttgcgattggtggaggttttcaagacgaaaagcgtaaatactataacggcccagtacctgagaattacgttctggaaccagggcaaatagtcgttacaatgacggacctcagcaaagaatctgacacacttggatacgctgcgagaattccgaatgactcaaatatctggctgcacaatcaacgtgttggtctcctcaaatttaaacccgagatacctacgtcgccacgattcattgagtatctattgcgcactcatgaatatcgctcatggattgtcggttccgccacgggaacaaccgtaaagcacacttctccggggaggatcgagaattttgctacccgcattccaccgatcgaagaacaacgttccatcgcccacatcctcggcacgttagacgacaagattgagctcaaccggcgctcgaacgaaacgctagaggggatggtcagcgccttgttcaaagcgtggtttgtggattttgaaccggtgcgtgccaaaatggaaggtcgctggcaacgcggcctatcgctacccaacctacctgcgtatctctacgatctctttcccgaccggctcgtggattctgagttggggcaaattccggagggctggacgatcgggagtttttctgatgttgttgaaattataggcggtggtacaccgaaaacttcggttagcgaatactgggacggtgacattccatggttttcagtcgtagatacgccagcatcaagcgatgtgtttgttgttaaaacaggaaagtcgattactcaaacaggtttgaatgaaagttcggcgcggctaattaacaaaggcacaaccattatttctgcgcgcggcactgttggcaatttggctatcgccgggtgtgatatgacattcaaccaatcgtgctacgcgttgcgtggcaagaatggttcaggcaattacttcgtatttttgtctacaaaacgcatggttgagcagctaaaagcaatgtcacacggctctgtgttctcgactatcactcggcaaacattcgacgcagtgctatcagttgttccacctgaatcgttgcttcaacaattcgagcgaaacgctgcaggtttgttcgatgcaattctaggcaacgtaagtgattcccgcactcttgcccaactccgcgacaccttgctgcccaaacttatctccggcgagttacgcgtatcggatactgagcacatcgtcggagcttga

SEQ ID NO: 435075 - DNA, 1557 bp, Serratia marcescens
atggtactgaatggttcaaagaataatactaaaggcggagaccttggcttcgaggctgaactcttcaagacagccgataaacttcgcggcaacatggagccatcggactacaaacacgtcgcacttggactcatcttcctgaaatacatttctgatgctttcgaggctaagcacaaggcgctgctggaagaagatgcacaggcagccgaggacaaagatgaataccttgctgacaatgtattctgggtaccgaaggaagcgcgctggtcccatttgcaagccaacgccaagttacccaccatcggtaccttaatcgacgacgcgatgcgtgcaatcgaaaaggacaacgagtctctcaaaggcgtattgtccaaggattatgcccgtccagcgcttaacaaagttatgttaggtgagctgatagatctgatctccgacattacactcaacgaggaaggcgaccgttccaaggacatcctcggacgcgtgtacgagtattttcttggtcaattcgctggagccgagggcaagcgtggtggcgagttctacaccccgcgttctgtcgtgcgcgtcctggtcgaaatgctcgaaccttactcaggccgcgtctacgacccatgctgcggctcgggcggtatgtttgtgcagtccgagaaattcgtacagaagcacggtggccgcatcggcgacattgcaatttatggccaggagtcgaactacacaacatggcgattggccaagatgaacctggctgtgcgcggcattgactcagatatccgctggaacaatgaaggcagcttccacaaggacgaactgcgcgacctaaaggccgatttcatcctcgccaacccgccattcaatatttccgattggggaggtgaccgtctgcgcgaggacgtgcgttggaagtacggtgcgccgcccgtgggcaatgccaacttcgcctggctccagcacatctaccaccaccttgcgccaaacggtacagctggcgtagtgctggctaacggttcaataagctccaaccagtctggcgagggcgacatccggaaagcaatgattgaggccgatacggtggattgcatggtgtcgctgccgggacagctcttttactccactcagattcccgcctgcctttggttcttggcccgcaacaagaaccccggcaagggcctacgtgacaggcgtggacaaatgttgttcatcgacgcccgcaagttgggtgtgctggtggatcgcacccggcgtgaactgaccgatgaagatattcaaaagatcgctggcacttatcacgcttggcgtggggaagaaggtgcgggcgagtacgcagacgtttccggcttttgcaagtcagccctgctggaagaaatccaaaagcacggccatgtactaacacctggacgctacgtgggcgcagtggaacaggaagacgacagcgagccctttgaggaaaaaatgcttaggctttccgtgcagtggcgcgaacagcgggctgcagcggacaaactggatgtagtaattgaggccaacctaaaggagcttgggtatggcgagtga

SEQ ID NO: 435076 - DNA, 741 bp, Serratia marcescens
atgtcatcgatttctgggattgatattgttacagggttgctcatccccgtagctctgtatttgataaaaaaacttattgactggacaggaaaaatcgttggtaacccacgacctaaacgaaaatatcagtttgatagaattcctgcggataagaaagtagagattttttcgaaaattgatgcattaaaggaaaaaacaacaacaccgcatgttcttattcagatgaaacttttatatgaacaactgggaatgtatttgcctgtatggcattgtcaccagctgatttcctgtatggcgactgaaaatgttagctcactggatgtacgtctacgaggttttctgaaaaacactattatcggtcactatcctgagaaaggattcagcgttaataccaaggttgtccgcagatcttacgtgatatctgccttgttcgggatatttgcagttgccacgtttatttatgcaggatgggataccgtctctactttctggaaaagcaaagaaacagggttgtttatcttatttttattgatttatgcatccgctattattactgttataggttatataatttcccagattgaagatatctacctggcatctaaatttggacatttatttgagacgtggctcaggaacaatccaccgtgtaacaatgtgactcctgatacttctgcagcaacgccaactgaggagcaagaaacatgcaaaggcccccaagaagagtctctcgcgagttaa

SEQ ID NO: 435077 - DNA, 1386 bp, Serratia marcescens
atgtatcaggcaacggtgggccaacgcggctatcgcttcggcgatctgcgtcagctgatggcgaaggcttcgccggcgcgttccggcgattatctggcggaggtggcggcgcacagcgccgaagagcgcatggcggcgcgcatcgcgctggcggacttgccgctcaagacgttcctgcagcaggcgctggtgccgtacgaacaggacgaggtgacgcgcctgattatcgacggccacgatggtgccgccttcgagcccatctcgcacctcacggtcggcgattttcgcgactggctgttgagcgagcaggcggacagcgccatgctggcgcaggtggcggccggcatcacgccggagatggcggcggcggtgagcaagatcatgcgcaatcaggatctgattttggtggccaagaagtgccgggtggtgacgcgctttcgcaatacgattggcctgccgggccacctcagcgtgcggctgcagcccaatcacccgaccgacagcctgcagggcatcgccgccagcatgctggacggcctgttgtacggcagcggcgacgcggtggttggcatcaatccggccagcgacagcctgccgctgctggaaaagctcaactacatgctggacgacgtgatccagcgctttgccattcccacccaatcctgcgtgctgacccacgtgaccaacacgctgcggctgatagagcgcggcgcgccggtggatctggtgtttcagtcgatcgccggtaccgaagcggccaatcgcggcttcggcattaatctggcgctgctggcggaagcgcagcaggcggcgctgagcctcaggcgcggcacgctgggcgacaacgtgatgtatttcgaaaccgggcagggcagttgcctgtcggccaatgcccatcacggcgtcgatcagcaaacctgcgaggcgcgcgcctatgcggtggcgcgccatttctcgccgctgctgatcaacaccgtggtagggtttatcggccccgaatacctgtatgacggcaagcaaattatccgcgccgggctggaggaccacttctgcggcaagctgctcgggctgccgctgggctgcgacgtctgctacaccaaccatgccgaagccgatcaggacgacatggacacgctgctgacgctgttggctgccgccgggttgacgttcctgatcggcgtgccgggcgcggacgacatcatgctcaactaccaaagcacgtcgttccatgacgcgctctatatccgcgagctgctggggctgaagcacgcaccggagttcgccgcctggctggcggcgatgaacattaccgacgaacgcgggcggctgcgcgatgccgccgccaatcatccgctgttgctggcgctgcagggagaacgcacatga

SEQ ID NO: 435078 - DNA, 357 bp, Serratia marcescens
atgaaaccggcgtacagctcggggctgacgtcgatcggcgcccaccaggcgaacagcatccccagcgccggaaaaatgatgaaggtgctgaacatcacccacagatgcagccgccagttattgctgccggccaggatggcctcgcgcgacagcttggcgccgtgcatgaagaacagcagggcgatggcggcgatggtcaggacgttgagccagccgacgaactcgccgcgcgccggcaggaaagaagccagcagcacggtggcgatcagcgtcagggtaaaacgatcgggcaggaatctcatggcgatgcgctcgggtagaaaatcgatggggctattctcccgcgtgggcatataa

SEQ ID NO: 435079 - DNA, 258 bp, Serratia marcescens
atgcaggaacttcaccacggcggtatcggccagcaggtcgacaaacggctgccattgcttgatcggcagaggatcgataagggagagttgttcaccgtcgtagagctggatcaggcccagctgcggatagtaggtgcgcgttctgacaaactcggtgtccagcgcaatctgggcatgctttctcgcctgctcgcagacctgctgcaatccggcatcggtagtgatcaactgataattcaaaacatcattctcttgtag

SEQ ID NO: 435080 - DNA, 159 bp, Serratia marcescens
atggccgccgccgccgcgcgcccgcagccgccggcggatttcgatttggaggcgcatattcgggtggtggacggtgagacggtattggcggacaacgccgacggcgacgaacggatgtgtcgcgatttcgccgcggcgatagaggcgcgtttggtttaa

SEQ ID NO: 435081 - DNA, 546 bp, Serratia marcescens
  misc_feature (528)..(537): n is a, c, g, or t
atgttctgcgacagcctgctggacgacgccgactggttgaaacgctatgcgaaaaacgccgccggcgaagcggtgcccgatgcgctgatcgaagccggtatcgcggcgcgccagccgatgcgcgcgttcaacgaacgccatatcctgctggtaccgtacttcgagtgggcgctgtatcagtgggatgacgagcagcgcacgccggaagccatcaccgcgctggcgcgcgaggtcgagcagaagatcctcggtatcagcggcagcccgcgcccgacgctggcgatcccgcacctgctgtcgctggagtccgcctgctcttatcagggttatctgctggcgatgatggcggtggaacaaacccgccagttcttcctgcagcgcgacggttacctgacggacaacccggccatcggcccggatctggcgcaacactattggttgccgggcaacagcgtcagccatgatgacacgctgcgcagcctgaccggcgaagggttcaacccggactatctggcgcaggcctgtaannnnnnnnnnggcctgtaa

SEQ ID NO: 435082 - DNA, 1173 bp, Serratia marcescens
  misc_feature (1072)..(1081): n is a, c, g, or t
atgcaacaggctctcgattacttcaatcaattgaaccaggattacctcgacgttcaccgcgccaaagaagagctgttctggcaaaactacatgggcactggcggtgaagaggtgtcggcgcgctttgccgccgcggaaagcgcctataagcgctttatcgcccaaccgcgccggctggcggagatccgcaatctgctggccggattggaaacgctgccgcaggcggcgcagcgcgaggcgctgatccacggcctgcaaggttggctgcgcttcttcgactgcaacgccattgaagatccgcaggcgcaggcgctgttggatcggatcatccacgccgagtccgatctctacgcgcgccgcaagggctatcaggttacgcatctgaacgccgaaggccggcgggtggcggcctcgctcggcgagctgttgaccaaccaggcgaccaacccgaacgaagactaccgccgcagctcgcagcaggcgctgcgcgatctggagcaatggctgctgcataacggcctgccggaactgattggcctgcgcaaccgctttgcgcgccagatgggctatcgcaactatttcgactacaaggtgaacaaaaccgagcgcatgacgccggagcagctgttcgccattctggatcgctttgagcgggaaacccgcgaggccaacgcccgcagcctgcagcaactggcggccgacaagggcagccaggcgctggagccgtggaacgtgcgcttcgccagcgccggcgacgtcacccgccaactggatccttacttcccgttttcgcgttcgctggaacgctgggtcgacagcttcaaacgcctgcacatcggctttggcggcgccgagatgaacctcgatctgctggtgcgcaaaggcaagtatgagaacggctttatgcacggcccggtgccgccgtttgtgcgccagggggaatgggtgccggcgcgcatcaacttcaccagcctggcgcagccggggcaggtgggcagcggggcttacgggctcaacaccctgttccacgagggcggccacgcggcgcatttcgccaacattcgccagaatnnnnnnnnnncttctcgcaggaattcccaccgacctcgatggcctatgccgaaacccagtcgatgttctgcgacagcctgctggacgacgccgactggttga

SEQ ID NO: 435083 - DNA, 699 bp, Serratia marcescens
atggtaggcaaaggacagagccgcctcgataccggcactttgggctggacggacatccacaaccaggcggactacagcgcgacgcacagcggcgggtcattcagcaccggcgggccggtgggcaaagacctgctgaccaatatggccggcggtatgctgtcgggcgccaaccacagcgggcacgccgagggcacgacaaaggccggggttagcgaaggtacgctgatagttcgcgacactggcaaacagcagcaggatgtggcgcagctgaaccgggataccgagcatgccaacgccggcagcatcagcccgatattcaacaaggagaaggagcaaaatcggctcaagcaggcgcagcttatcggcgagattggcggccaggcgatggacgtgattcgcacgcagggcgatatcgccgggctgaaggcgcataaagacccggcggcgctggcgcaggccagggagcagcttgagaagaacggcaaaccgttccgcgaggcggacgtgttgcagcgggcatacgacaacgcgatgcggcaatacggcactggcagcgatctgcagaaggcggcgcaggcggtgacgggggcgcttcgccatacctggcgacggaaatcaagaagcgggtcggtgaagacaatattcctaggggcgacatcttcagacaaactgtcgtccgttaacggcccaaccccttaa

SEQ ID NO: 435084 - DNA, 780 bp, Serratia marcescens
gtgggtgagaactccatcctgtcgcgcgccggcggcgccccgaccttcgccgtgggcatggcacacatcatcagcgaggtgttcaacagccgggcgatgatggccttctggtaccacttcgccattctgttcgaagcgctgttcattctgaccgccgtcgacgccggcacccgcgcctgccgctttatggtgcaggatctggtgggcgtggcggtgccgcagctggccaacaaccgttcgtggttcggcaacctggcgggcaccacggtggcggtggccggctggggcttcttcgtgtatcagggcgtggtcgatccgctcggcggcatcaataccctgtggccgctgttcggcatcggcaaccagatgctggcgtcaatggcgctgatcctcggcaccgtggtgctgttcaagatgaaaaaacagcgttacgcctgggtcaccattctgccgaccgcctggctgttcgtcacctccatgaccgccggctggcagaagatcttccatgagaaaccgagcatcggcttcctggcgcaggcgaagaaattttccaccggcatcgagcaaggcacgatcattgcgccggccaaatcgctgaaagacatggaaaccatcgtattcagcaaccaaatcaacgccgcgctgtgcgggttctttatgctggtggcggtgaccatgctgatcgccgccttcttcgcgatccgccgggcgttgcgctccgaacagccgacgacgcatgaggtgagcgccgcgctgcgggaggagaccggccgcggctga

SEQ ID NO: 435085 - DNA, 2799 bp, Serratia marcescens
gtggcggccaaggatctggctcttaccggcgacagcgtgactatcgatcccggcgttgatgcgcgcacgcgtaaagagacctacgagcagaagcagagcggcctaagcgtggcgctgtcgggcaccgtgggcggcgcgctcaacaccgccgtcagctcggcgcagcaggcgcgaaaagaaggcgatgggcgcttgaccgcgctgcaaaacaccaaggcggcgctgtccggcgtgcaggctgcacaggcctgggagcgggataatgcgctgaccgcctcggcggaggcgaaaaacgccgctgccggcttgcagccgggagacgaaggtgcggcgcagggcgccaccaatacggtgggtatcagcgcctcctacggcagccaatcgtcgaaaagcgaaacccgcaccgacagccgccagacgcagggcagcacgctcatcgccgggcaaaacctgtcgataacggcgagcggcaagaaccacaacgcgcaaagtggcgatatcgtcgtcaccggcagccagctgaaagcgggcaaagatctgtcgctcgatgcggcgcgggacattaccctgcagtcggcgcagaaccgcgaaagcaccgtcggcaaaaacagcagcaaaggcggcaacgtcggtgtcggcatcggcgcaggctcgggcggctatggcatcagtgtctcggccggcgtcaatgccggcaaggggtatgagaacggcaacggcctgacgcatgccgaaaccaccctggatgccggcagtaatctcaaggtgaccagcggccgcgacacccggcttaccggcgcgcaggccagcggagaaaaagtcaccgtcgacgtgggccgtgaccttcggcttgaaagcgaacaggacagcgaccgttatgatgccaaacagcaaaacgccagcgcgggcggcagcttcaccttcggctcgatgaccggctcagccaacgtgagcgccagcaaggacaaactgcacagcaacttcgactcggtaaaagagcagaccgggctgtttgccggccaaggcgggtatgacgtcaaggtcaaagaacatacccagctcgacggcgctgtgattgcaagccaagctgataaggagaaaaaccgcctcgataccggcacgctgggctggacggacatccacaaccaggcggactacagcgcaacgcacagcggcggcagcttcagcaccggcgggccggtgggcaaagacctgctgaccaacatggccggcggcatgctgtcgggcgccaaccacagcgggcatgccgagggcacgacaaaggccggggttagcgaaggtacgctgatagttcgcgacaaagacaaacagcagcaggatgtggcgcagctgaaccgggataccgagcatgccaacgacggcagcatcagcccgatattcaacaaggagaaggagcagaaccggctcaaacaggcgcagcttatcggcgagattggcggccaggcgatggacgtcatccgcacgcagggggatatcgccgggctgaaggcacagaaagacccggcggcgctggcgcaggccagggagcaactggagaagagcggtaaaccgacgaacgatgcggaggtgatgcagcgggcatacgacaacgcgatgcggcaatacggcaccggcagcgacctgcagaaggcggcgcaggcggtaacgggggcgctgacggcactggcgggcaataacctggcgggcgcactggcgagcggtgcctcgccgtatctggcgacggaaatcaagaaactgaccaccaatccgctgaccggtgaagtcgacgttgctgccaacacaatggcgcatgcagtgctgggcgcggtgacggcgcagttgaacaaccagtcggccgcggcagggggactgggcgcggggggcggtgaactggcggcgcgctacattgccgggcagctgttcccgggcaagacggcgcagcagctgagcgaaagcgagaaacagcaggtgagcgcgctgagccagctggccgcagggcttgcaggcgggctggcgacgggggatactgcgggagcggtgaccggcgggcaggcagggaagaatgcggtagagaataactcgttgtcaggagataaggcgcgggagtctgttaaacaggccgccgagtctctgaaaaatcaggttagggaaaagctgggtaaaggcaccacttctgctatcgcgaacgccattatcaatggccttgctgatacaggtgatgctgcactaggctcggcggactacgccgctgatgctgcaatggcactggcttcatgtgctgcgggcgacagctactgcagcaaggcgatgagcgacctggccgggaagaatcaggcagtggcggataccgttactgccctgatgcaaagtgaaacctggtcagcggtgaaagacacgttagttcaggcatctgaagggaatcaggcagcgctggaagcaacaggagggttgattgctggaatcatccttccaggtaagaaagttccatatgttcctaatgctggctctgtcggaaatatgggggagttctttaagcaggctggttttggtgtcttggcaaaagatagttcacagaaaactagcaaaatttatcaaggacaaacagtttataaagcttctagtaacatcagtgatgagatccgtaagggagatcaattttatctggatgctagccataaaaatcatcttgaagtttttgatagcaaaggtaactttagagttgttttaaatctggatggctcagttaatgtagataaaacaaaaagtgctgctactgaaggacggaaattacctaaatga

SEQ ID NO: 435086 - DNA, 1449 bp, Serratia marcescens
gtgcgccagcgcgaacacgaaaccgcgatcgagcaggctcaggcggctggcgctgaacgccggatccatgctgctgccgtaggagccgtagccgtacaccatcaacgggttggcgccgcgctggaagctgtcctggcgatacaccagcgataccggcacctcgacgccgtcgcgcgccttcacccacactcgctcgctgcggtagttttccggcgtgaagttcttcacttcctgctgtttgagcatcgtccgctcgccgctgtccatattcagctcgtacagcgtggtcggggtagtcatcgacgaatagccgtagcgcagcagcgaggtttccggatccgggttgtacgccagccaggtggtgtaagtcggatcgtcgaaggcgatgcgcttctcttcgccagtctgccagtggatctggcgcagcagcgtcaggccggcgctgcgctcctccaccaccagccagtcgcggaacaggctaaagccctccagcatcacgtcggcgcgcggggcgatcagcgtctgccactgcgcttcgtccgcctgttcgctctggtacaggccgaagttcttgccgtccttgttggagcggatgtagaaatgctggtgatagtgatcgatggcgtattcgtgatccttgcggcgcggcacgaacagctgcggcttggcgtccgcacggtcggcgtccagcagcaggatctccgaggtggtggtgctgctcaggtggatcaggataaagcgctcagaggtggtcttctccagcccgacgtagaaggtatcgtccagctcttcgtaaatcagctcgtcctgctgcggatcgctgcccaccacgtgacgataaacctgatacggcaacagcgtcttggcgtgcttgcgcacgtagtacaccgtcgaggagtcgttggcccactcgaagctgccggaagtgttctccagcacttcgtccgcccaactgccgtcggccaggttcttgaagcgaatgtcatactggcggcgcgacaggaaatcctctgccacccccagccgctggttgtcggggctgacgtccagcccgcccagggtgtaaaactcgtgattctcggcgcgctggttgccgtcgataagcacctcccagcgctcgctctcggcctgcggttggcgcacggaaatcgcgtattcattgcccggctcatagcgcgtctgatagcgatagccgtggcgcacgtaaggcaccgaatgttcctgctgcggaatgcgcgccaccatctcttcatacagggtttcgcgcagcgcctgttgcggtttcagcatcgcatcggtgtaggcgttctccgcctgcaggtagtccagcacctggcggtctgcgcgctcgtcgtcgcgcagccagtaatagtcatccacgcgcgtgtcgccgtggatggtgatgggataagggcgtttttccgctttcggtggggtcatcattgctaa

SEQ ID NO: 435087 - DNA, 330 bp, Serratia marcescens
gtgcacctggccgcgcgcgatgtggcgcgcctgcagctggcgcgcgaaatcctgttggcggagatggagcagccgccgagcctggatcaactggctcagcgcgccgggttgaacacccgcaaactcacgcaagggttccgccagctgtttggcgccagcgtattcggcctgctgcaggagcaccggctgcaaaccgcttggcgcttgctgagcgagcaggatctgcacgtttccaccgtcgcctggcaggtgggttatacgccggcgcacttctccgtcgccttccgcaagcgtttcggcgtcatgccctgcgacgtcaaaaagcgttag

SEQ ID NO: 435088 - DNA, 1398 bp, Serratia marcescens
atgctgagtgacctgcgggcgctgacgcgtcctttccgcatcatgctgtattccgcgctggcgctgcaggcgctggccggcgtcagttcgctgtttccctggctggcgatcgcccggctggtggacgccgatccggcggcctatcccttctggcttggcgtcgccgccggtggcctggcgctgtggctgttcgcccaaacgctggcgctgcacctcactcatctgctcgacgcgcgtttgtgtcatcggctgcgcagccaattggccgccaagctggcgcgtctgccgctgaactggtttgtgcggcagggcgagagcggcgccgcccgggcgctgtcgcaggacattcaggcgctgcatcagctggtggcccatgcgccggcggagttggtgcagctggccgtggtacccggctgcgcgctggcgctgctggcggcggtgcagtggccgctgctgctgttcgcgctgatacctttgctggcggccgcgctgctgtttcgcgtcatccgttcgccgcgcctgcggccggcgtttgaacaacgcgatcgggcgtttcggcagttgaacgacgattatcggcagctggcggcgcatccgctgttggcgcgccagtttcccggtgcgggcatcgaagcgcgtgcgcggcagagcctgcggggctttctcgccgcctttcaccgttggctgcggcgtatcggcgcgctcggcgccgtgacccaattactgctcagcgccgcgctgtcggccggttggctgttgctcggcgcccgctggctggcgcccaatctcacgctggcggagctggcgctgttcgtgttgctgttgcgcagcgtggcgcaaccggtgatggcgatggggcacggcggcgatgcattgcgcgcggcgacgctggccgccggccgcattcgggcgctgctggcgcatcccgaaatacgctggggagggcgctcgacgatcgcttcggcgccgcagggggcggcgctgcagctgagcgatctcggttgccggcaggacgaacgctggttgctgcagggcgtcaatctggccgtcgaaccgggggaatggctggcgattgtcggggcgtcgggcagcggtaaaagcacgctgctgcggttgatcgcccgttatagcgagccggatagcggaacggtatcgctcgacggcgtgctcgccgacgcgttctcggcgcaggcattcaatcagatggtggccgtggtgccgcaggagaatacgccgccggcgatgtcgctgcgcgacaacctgacgctgttcgtcgacggggccgacgatgcgcagctgcggcgcgtgctggccgcgctggggctggcggcgcgtttgcaggataggttggacgatacgccttcgctttccggcggggaggcgcagcgtcaagtttga

SEQ ID NO: 435089 - DNA, 756 bp, Serratia marcescens
ttgtctttcactcgcgatgaacggaagccaagcgcaacgacggtgttcaaccgcgccaacatgaaagcggaggattacagcctttcctacgacatgacgctacccggtggttttgatggggtagaggtcaagtatcgaaacccggtcacgaataaacaggcattcatccgctacaggatcgtcggcaactcgatagaggagggtgagccggtaaaggcgaagaagttcgacatgctgtttatccgcaattctttccaggcgcgggatcgggcattgaaagaagttcgccggctgctgtattcacgccaaaccatggcaattcgcgcgctggctgatggggaatgggtgaacgtcggccagatggttcaggtagccgatatctacgatgctaaccagcaggatggctatatcgtcgcgcgtaacggtaacaacttcgataccagcgaacggatcgagtggtctggggatatgtttgtggtcgttactgatgcaatcggtgcgcctacagcgcgcgtccaggcatttccacgcacagatagcatatttggcttcactgcagcagtaccagcaataaccctcaacctctatgacggctacaacacacagtcgccgtctcgttacgtcatcgccacgcaagtagagatggacgcaacgaaatggacgatcacggaaaagaaaccgaatggtgacggaactacctcgttaaccatgtctgaatataacgatgaaatgtataattacgaggtaactgcataa

SEQ ID NO: 435090 - DNA, 354 bp, Serratia marcescens
atgctggcggacgacgatgaatacaaggcggcgctgctcgaacgttttcagccgatggcgcagctcaccgccaaacagggcgtgccgccggagaaaaccgataccgccagcggcaaaaccaccggcggcggcccggtcggcttttccgcctcgatgttgccgatgttggcgacgcaggctgaggcgctggcgacacagcggcaacgcatcagcgaacatccgccgggggacgacgcctatttcagcgcctcgctgacgctgttcggccaggggtgggatcaacaacgttatcgctttaatcgtcagggtgaattgcaaccctcgtgggacggccaatgcacaacttcaaaataa

SEQ ID NO: 435091 - DNA, 1407 bp, Serratia marcescens
atgtccaagcaacaaatcggcgttgtcggcatggcggtaatgggccgcaacctcgcgctgaacatcgagagccgtggttacaccgtttccattttcaaccgttctggcgacaaaactgacgaagtgatcgctgagaacccgggcaagaatctggcgccgtattacaccgttgaagagtttgtcgaatcgctggaaaaaccgcgccgcatcctgctgatggtgaaagcgggcgaagcaacggataaaaccattgcctcgctgactccgcacctggacaagggcgatatcctgatcgacggcggcaacacctactatcaggacaccatccgtcgtaaccgcgaactgtccgaccagggcttcaacttcatcggtaccggcgtttccggcggtgaagagggcgcgctgaaagggccttccatcatgcctggcggccagaaagaagcttacgagctggtggcgccgatcctggagaaaatcgctgcggttgccgaaggcgagccttgcgtgacctacatcggtgcagacggcgccggccactatgtgaagatggtgcacaacggcatcgaatacggcgacatgcagctgattgccgaagcctattccctgctgaagcaggcgctgaacctgagcaacgagcagctggccgaaaccttcgccgagtggaacaagggcgaactgaacagctacctgatcgacatcaccaaagacatcttcaccaagaaagacgaagagggcaaatacctggtcgatgtgatcctggacgaagccgccaacaaaggcaccggcaagtggaccagccagagctcgctggatctgggcgaaccgctgtcgctgatcaccgagtcggtgtttgcgcgctacctgtcctcgctgaaagaccagcgcgttgccgcgtctaaagtgctgaccggcccgaaagtggcaccgttcaccggcgacaaagccgaattcatcgagaaagtgcgtcgcgcgctgtatctgggcaagatcgtatcctacgcgcagggcttctctcagctgaaagccgcgtctaaagaaaacaactgggatctgcactacggcgaaatcgccaagatcttccgcgccggctgcatcatccgcgcccagttcctgcagaagatcaccgacgcttacgcggcggatgccgatatcgccaacctgctgctggcgccatacttcaagcaaatcgccgacgagtaccagcaggcgctgcgtgacgtggtggcctatgccgtgcagaacggtattcctacgccgaccttctccgctgcgatcgcctactacgacagctaccgctccgcggtgctgccggcgaacctgatccaggcgcagcgcgactacttcggtgcgcacacctataaacgcatcgacaaggaaggcgtgttccataccgaatggatggaataa

SEQ ID NO: 435092 - DNA, 183 bp, Serratia marcescens
atgctcggtgagttatggaacgcccgcaggctgcgcggatggctgtccggcagaatgccgcgcccgtgggtgctggagatcaccgctacgccagcgtccgccagcttgcgcaccgcgtcgccgcaggccaaggcgccgccccccaaccacagcagcggacgcttggcctgtttcagccgctga

SEQ ID NO: 435093 - DNA, 453 bp, Serratia marcescens
gtggcggacggcctctcctccaaggcggtgcaccgccaggcgctgccgctgctgcaggcgctgcggccctatctcgatacgctggggctgaccgttgcgccggtggtgctggcgcatcaggcgcgggtggcgctgggggatgagatcggcgaatgcctgcaagcccgggcggtggcggtgctgatcggcgaacggccggggctgtcgtcgccggacagcctgggtgtctatatgacctgggggccgaacgcgcgcagaacggacgccgagcgcaattgcatctccaacgtgcgccccgaggggctggattacccgcaggcggcgttcaaattggcctggctgctggagcaggcgttccagcgccggctgaccggcgtcgaactgaaagacgagagtgacaacccggcgctgcgcggccgggtaacgccgctttacccccagttgggcggctga

SEQ ID NO: 435094 - DNA, 1362 bp, Serratia marcescens
gtggtggatccactgccagatagacgtacgggagatttccgccgtggccgcatcttccatcaaaccgtaaatcggcacgcagccgttgccggagatccaggcttcgatgtactgcaccgccacgcggatattggcgcgcatccccgcttcggtacgctcgccgtcgcacggttccagcagctgtgcggcgctgatcggcgcgtcttgctcacgcagcacctccagctggttttggcgatcgcccagcgctttgccgaacacttccatcaccgtgtccgccagccccgggtgcgccacccaggtgccgtcgtggccgttgctggcctccagctctttgtccgcccgcaccttgttcagcacccaggcgtttttctcggcgtctttgctcgggataaacgccgccatgccgcccatggcgaacgcgccgcgcttatgacaggttttgatcagcaggcgcgaataggcgctgaggaaaggtttctccatggtcaccgactgacgatccggcagcacgcgatcgccgtgattcttcagcgttttgatgtagctgaagatgtaatcccagcggccgcagttcagacccacgatgtgatcgcgcaggtggtagaggatttcgtccatctggaacaccgccggcagggtttcgatcagcacggtcgctttgatggtgccgcgcggcagatcgaaacgatcctcggtaaagctgaagacatcgctccaccaggccgcttcttcccaagactgggttttcggcaggtagaaatacgggccgctgcccttggccaacagttggcgatagttgtggtagaagtacagcgcgaaatcgaacaggccgccgggaatggcttcatcacgccacagtacgtgcttctccggcagatgcaggccgcgcacgcgagcgatcaataccgccgggttcggtttcagctggtagattttgccggcttcattggtgtaggaaatggtgccgttaaccgcatcgtgcaggttgatttggccgtcgatgactttgtcccagcttggcgccagcgagtcttcgaagtccgccataaacacttttacgttggcgttaagcgcattgatcaccatcttgcgctcgaccggcccggtgatctcgacccggcggtcacgcagatcttgcggaatgccgcggatctgccagtcaccttcacgaatggaagtggtttccgaaacaaaccccggcagttcgccgcgatcgatattttgctgccagcggacacgcgccgccagcagctcgttgcgccgcggcgtgaatttccccaccagttccgccaggaattcaaccgcttcatcggtcaacacctggcgctccgctgcggcgaaaccctgcgtaaaccttaa

SEQ ID NO: 435095 - DNA, 795 bp, Serratia marcescens
atggcgcacctgctcgatgacgcgcaggcggccaactcggccgagagccgcggcgtcggcgaatgcctgcagctgcgggccggccaaggcccggcgctgttctgcctgcacccggcttccggtttcgcctggcagtactcggggctgagccgttatctgccgggcagctaccccatcatcggcctgcagtcgccaagaccggacggcgccatcgccacctgtgaggatatcgagcagatggtcgatcgtcatctcgccaatctgcgccgcctgcagccgcaggggccttactacctgctgggctattcgctcggcggcacgctggcgcactcgatggccgcgcgcctgcagcagcagggcgaagaggtggcgttcctcggcatgctggatacctatccgccggaaggccaggattggaccggccccagcgaggaggacgcgcagaaagaggtggcgcaggagcaggccgagtttatggcggaagatcatggcgatccggcgctgatggcggagaaggcggcaatgttcgacagcatcgtcgccaactaccgcgacgcggtgcgcattctgtctcaggcgcgcagccggcgtttccacggcacggcgacgctgtttgtcgccgaccagacgctgccgccggggatggacatcgacgccgtgtgggcaccgtatctggatgggctgatctgccatcaccagcgctgcgaacacgcggacattctgtcgccggcttcgctggagacgctcgggccgctgttgcattcgttgctgacgcagcaatacgggttggtataa

SEQ ID NO: 435096 - DNA, 231 bp, Serratia marcescens
atgatgccttttaagttaactaatgaacaacgtatcaaagtcttaagagattacggtgaaacttgtgatcgattagtacgagaaaaagagcggcaatatattacctctatttctcgttcaacagcgtggaaactggaacagtctggtaagtttccactgcgtaagtccattggtctgaaatcctgtggatggttgctaagtgacctgctctattggatcaatgagcgttag

SEQ ID NO: 435097 - DNA, 963 bp, Serratia marcescens
  misc_feature (899)..(908): n is a, c, g, or t
gtggagcgggtcggccgccacgataacttcttcgagctggggggccactcgctgctggcggtgaagttgatggctcagctgcggcgcgccggttggggagcgaacgtgcagacgctgttctcaacgccgacgctgtcggcgctggcgcaggcgatgagcgcgcaaggtgaggtcgacataccggaaaaccggattttaccgggcggggcctccattacgccggagatgttgccgctggcgacgctgagccagccggagatcgacgcggtggtggcgcaggtgccgggcggcgtggccaacgtacaggacatctacgccttgtcgccgctgcaggaggggattttgttccaccatctgctggcggaacggggcgacccgtaccagctgtccgcggtgctgcgtttcgacagccgtgcgcgcttggacgcctggctggcggcgatgcagcaggtgatcgatcgccatgacattctgcgcaccgcgttcatcacgcagggcatgtcctcgccggtgcaggtggtgtggcgcaaggctgagctggcgctgagcgagcggcgtttcgatccggctgacggcccgatttggcgacagctggcggccagctttgatccgttgcagcagcggcaggatctgacccgcgcgccgctgctcaactttaccgtcacgcaggaggaggacggcagctggtgcgccttgcagcagtggcatcatctgattggcgatcactccacgctggccttcatggagcaagagatcggcgagatcctcgccggtcgtggggcacagttgggcgtcgcccagccgttccgcaatgcggtggcgcaggcgcgcctggctctcagcgaggcggagcacgaaagcttcttccgcgacatgctggcggatatcagcgagccggnnnnnnnnnngtgcgcgcctggacgcctggctggcggcgatgcagcaggtgatcgatcgtcatga

SEQ ID NO: 435098 - DNA, 333 bp, Serratia marcescens; identical to SEQ ID NO: 151088

SEQ ID NO: 435099 - DNA, 465 bp, Serratia marcescens
atgaataagctgattgctcacgttggcggcccggctagcgtcaccgcgttcgcccgacagctgggagacgaaacgttccgtctcgaccgtaccgagccgacgttaaacaccgccattccgggcgatccgcgtgataccacttcacctcgggcaatggcgcaaactctgcggaatctgacgctgggtaaagcattgggcgacagccaacgggcgcagctggtgacatggatgaaaggcaataccaccggtgcagcgagcattcaggcaggactgcctgcttcctgggttgtgggggataaaaccggcagcggtgactatggcaccaccaacgatatcgcggtgatttggccaaaagatcgtgcgccgctgattctggtcacttacttcacccagcctcaacctaaggcagaaagccgtcgcgatgtattagcgtcggcggctaaaatcgtcaccgacggtttgtaa

SEQ ID NO: 435100 - DNA, 201 bp, Serratia marcescens; identical to SEQ ID NO: 105665

SEQ ID NO: 435101 - DNA, 339 bp, Serratia marcescens
atggcacacgtagatatggcactgcagatcgaacgattccaaaaaatcgcacatgtcatcgtcgaaaacgtaaaaacgcgcgttaccagcggattagcggacgacgaaatcatgcatatcatctacgaagaaatcctgagttttttcgtgatgcaacaaagaattactgttgaatacatgaattttaacgaagaacagcgcgccaattttgccgcgcaaatgtattccctgcttgagccattagcttgtgaatttaaagggatagcaaaccccaaatatgcggactatgtggccgccacgggaaagactggagcacttaatttcatggtaaacgcataa

SEQ ID NO: 435102 - DNA, 453 bp, Serratia marcescens
atgaaatcactaagccatcacgccctgttgcccttgttgctgctcgttaacgcgcccgcctgggcggcgcaggaaccggtgaccccggcggagcgcaatcagctcccaccgccgccgctacccgatagcgccgcgaccgccctgcgtttttacggcgagctcggcatcggcggcagcgtctatttgaacggcgaacatcagcatcaatacagcgacggcacctatatcgaaggcggcctggagatcaaacggggccactggttcggcctgatttacggcgaaggctggaccgtgcaggcggacagccagggccacgcctggacgccgggccacggttggggcggcttcgagggcgggttgaaccgcttttacggcggttaccgcaccgacgacggcaccgagatgatgctcagcgctgatgaatcccctaatgatttttatcaaaatcattaa

SEQ ID NO: 435103 - DNA, 186 bp, Serratia marcescens
atggcagccatttttgctaataacatgcagtggagtagtgaaaatttgaattcgcataccatcgcgaacaacaaattcatgttcgtggaagttaatactcatgcgagaccaaaataccagcaagcacagatatgggcaccgatgctctcaactagtgacgtaatgcctcaggagcaagcggtatga

SEQ ID NO: 435104 - DNA, 624 bp, Serratia marcescens
gtgaactcaagaaatgaattaccactatatgattaccctttgaatcatccatctaaagctagcgtccttgaactacttgaacgcaatgaaatgttgcagatagatagagaaccaatagcaacagaaggtcgatgctactggaatgttatagaccatgttgcaatacatggaggtaagcttatccaaggctggatggtggagtggagtcctgaagtattgatctccatcatgcatcatggtgtctggcaaaaagaagatgggagcttacttgacataacaaaagcaactctcacccaaagtgccaataaaacaacatttgtaccatcaggagacattgtaaaccctaatggtattacttttataccgagacgatatctagcactcaaggatgactatttattaaataaattcataaaattatatcaaattaattttaacgcaatgagaaattttaaacttgaaatgcttcatgaaaaacgagcatctttcttcaatggtgagttcagatacctgcaagatgcgcctgctcatattgccgacaaatataaagccacaatagatttaacgcacaatgaatgcatattggttaagaaatcaataataaacaaatacttcaaacaatga

SEQ ID NO: 435105 - DNA, 585 bp, Serratia marcescens
gtgaaggcagaaaggggggctgacttatcggatggtaagacgctattttggctagataacctgtgcttaacttgcgtgcctagccaaagagggaactggcatgtgtgcagttttaagcgagaagaatcccggtgggacgatacaatcgccttgcttaaaggggatgaagttcaattctctgtaaagctaggaaatggcagttatggtaaggcgcactgcgtttctctaaatggcgccttcatcttcagtattcatggcgatccagacaatcgcatgaaaggacttatcgtcatgaatagttcacatcaagaactatttagggtcgagacatcttgtcacctgataagtgctgccatatctgagttcggacaatacatcgcgctttcgtttgccataggaaaagatacgactgacccgtactcgggacggttagaggtcattgatctaagtactggtgaggtaaaaatgtcgttggtgaaaagcgacaagatctaccatgccagtcttgacgttctcgagcctgatggggaggtttttgcgacatctaatggtaaatctgtgctggtatattctaataggatatga

SEQ ID NO: 435106 - DNA, 261 bp, Serratia marcescens
atgggcagcatcacactcgccggccggcagatcttcattctcaacgaaaacgacagatacccagaaccgcagcaaaatagccccccaatgttcgcgatccgcgaagacgaggagcagcagcactggctttatgtttggcataaagggcgctggccgctcgtctctgaaaccccatttagtacgcagggagaagccgtagacggcgccatatcattcgattatggcagtctctacaaaaataaatttagaggagataattaa

SEQ ID NO: 435107 - DNA, 870 bp, Serratia marcescens
atgactaccagtaaaactctcgaacgggcaattgccgacatcaccatctggcgaaaaggcgaacaacacgcgcctcataagccattgttgcttctgtacgttctggctagctatcagcaggggcatgcgcgactatttgattatggtatcgaagtccacgagcaactactgagcctgttagcacgctttggcccgcaaaggaaggtgcattacccgaatatgcctttctggcggcttaagggggatgggttttgggagcttcagaatactgagttctgttcgaccactggcagcaaacaaccatctgctaaagaacttgtggaacataacatcgcaggtgggtttgatgaagaacacttttcgctgttgagtaagaacagaaatctgatcgactcgctggcacaacagatccttgaagcgcattttcctgaaagcattcaggaggagatcgcgggtgagatgggttttgatattcagcagatacgtaaggttcgcgatccgctgttccgccagcaggtgctacgggcgtataactacgaatgtgcgatctgcgggttcaatatgcgacacgataacgcctctgttggactcgaagccgcgcatatcaaatggaagcagtttggtggaccgtgtgagatcccgaacgggctggcgctgtgtgcaattcatcataaagcgtttgataagggatcaattgggcttgatgagagtatgcgggtgttagtctcaggggctgttaatgggagtggaattgttgggcggttattctgggaatttgcaggaaagaagatctcattgccgacgctgaaagggaactatccaaaggagagatatgttgaatggcatagaaaagaagtttttcgctcttaa

SEQ ID NO: 435108 - DNA, 153 bp, Serratia marcescens
atgtgggtgttgcagtaccttcaaatcgcgaattattccttgataattcctttactgttcggcgtgatttatgatggctattataccgtgcaggatataaattcagcggtttggcgcgaggtaaatttggaaaatgtgagggggattcagtaa

SEQ ID NO: 435109 - DNA, 189 bp, Serratia marcescens
atgaaaaagacccgttataccgaagaacagatcgcttttgagctgaaacaggccgaaatcggcacccgggtggaagaagtgtgcagagagatggatatttctgaagccactttttacaactggaagaaaaaatttggcgggatgggcgtgacaggcttgcgtcgtcgacagctggaggatgaaaattag

SEQ ID NO: 435110 - DNA, 1119 bp, Serratia marcescens
atggggaatgaagtttacgagagccaaaagtgtactttgaaatactcaaagtcaaaaatagataaggcagctaaagcgataagggaaggttgcagccaagaagaaaaagatgaagccattgcaatgatacaaaactttcgtgaattgcatctttacccacttatgctaatgaagaatcatcttgcaagaactgcggcaaaagttgataaagaaaagaaaattttagttgcgagaagattaaaacgtctttatacaattatcgataaacttgagcgtcctagtctagatggtgggaaaacttctaactctattcaattaacaagaatgcaagatattggagggtgtcgagcaattgttaaaaacattgagcagctgaaacatttgaaagatcggttggtgaagagcaggtctgtacacaaaattatcaaggagtatgattacttaacaccgaaggacagtggatacggtgggattcaccttgcgtatagttgttttgaccatagtgacgaaaaatttccttggcgtaaaactaaaatagaaatacaactgagaactgaattgcagcacgcttgggcgactagtttagaaattatagatacattggaagatattaaactaaaaacgtcaagtgaaggacatgaagagtggcgcagatttttctatcttgctggatgcttagttgctcatgatgaaaaagcttgtctcctaaaggaggaagttgtcaccgcatatcagagagaactgaaagatcttgaaaaaagcttgaacgttaagcaaaagttgaatacatatacgtttgcgttgagtttgacatctaatgaaaatattaagaagcagttgcctaagaatcataaggggtattttctcgtgtcaatgagacatgtgaaaacagaggctggtgagcctattcccaaacgtttccttgtttctgtgaatgcatatcgaactagtgaggctgaagatgcgttggctacattgaataacgatgactctgatccagaggtcacgatttcagttttggtggccacagataacatcaagtctctcaaaaaagcgtatcctaactattttggctcaacaaaccaattttcgcgcttcctaaataggcatataaagtaa

SEQ ID NO: 435111 - DNA, 858 bp, Serratia marcescens
atgtccaaggcatttatctccgccgaaagtgttcatctactgggggggggatacatcaatgagctctggggcgccaactcgcggctaattgaagtggttgcctattttacccaaaaataccggctcgcttgttatgctacagggctgggattgcagccgctctcttctgaaaaggccgagcaactagcaccttatattcgccagtttgaccagtttgatgtccgggatcaggcgagttacgacgttttagcgccgtttgaactgccaccgctcggttttacaggagacgattattttgctttttcgtcttattctgtaggatacattgctgagaatgagcagttcactttacacctttgcattcataccgagttatcggaagatgatgttctcactgagagtttattggggttgttggggcaaacaacagcgctattcctggaaaagcatccgaacgcgataatcaagttttatgagtttcgccctggctcagatggtgttttcttccgtcaaatcctcgagtttttcccccaggctgagtttgtgtcatttgagcaggtttggcatgatggcttgaaatttgcaccacatgatttttgtatcagctcgcgtttccattttcaggttatcgcagccagccttggcattccaggggtcgcgctttcgtggtccgattactacgacaataagttctccagtctgcaacgcatgtcagactggccaatgattcgaccggatatcaaccaggaagagttacgggctatcttattgtcattttcgcgtggcgaccgccaacagggtctggaacaagtccaacaggctaagcagctgttattggcgcagctgtacaatttttaa

SEQ ID NO: 435112 - DNA, 846 bp, Serratia marcescens
atgaaaggctcagttgctattattttgagacaccacgagactaggaagcgcttgcttttacgagcccttgagtccgtgaagaatcaatcatataaaaaatatgaagtttttgtcatgatgagtaaatttaacatatcgtctgacattgaggacttggttttaatttctgggtgtgaaaatgttaatattgtagactcccaggatgaacttattaataaactacacagcacccaatttgagtatgtatgttttcttgacgatgatgatacttgggctcctgaatatttaacacgctgcctttctatttttgaaaaaagtaaagacaaatacccatccattggtgctgtggcatgccatgtaaatagagtttctgaaatagctgaaggcaatagaataaaaacagataaaacagaaccgtggaatcattatttttctgcggggccagtttgcatcgatgcattgtattataggaacagtattcctatatcatcatgcatttttgaatatagtgcatttatgcatgatgttaagtcttataatattctagagccagcatttttctgggtgttcttaatatcatttatgagcagaaatgatgtttggttcatccctgaatcgttatctttctatcactttcgtagggaagatgatttcaatctgggtaactatagtattattcatgccgaagactatgctttttcatctaaaattattctaaatagcatggctagaaatgcttccgatgactacacatgtcggtttatttctagtttcatctttaatgaagctatttttcatcgagtaacctcgattgataacaaagtttcacgcctcgtagatcaataa

SEQ ID NO: 435113 - DNA, 1848 bp, Serratia marcescens
atgaattttaataattacgattttgttagtttcgacatttttgatacgcttttaagtcgaaaagttgcacggcctaaggaagtcgataatttttctgttatccgagaaaaagcagaggaaaaagctagaaaaaataaggttgagctgtacggcggtgagcctgagattttgatttcggatatctatgatcaagtaagagagagggttccagcattacccagtcatataattgacatattgattgctttagaaatagagatggagaaagccgtcctttttaaaagctctgctgcggaaaccatttttgatcaagccagggcagcagggtgtaagattatcgttataagcgatatgtatttaccatctaaagtgttgcgcgaactgctggaaaactctggttacaaagaccttgatgatgtggctattttctcatcaggcgaggagggcgtatctaaacactcggggaaattataccctagggttagagagaaacttgggctaacaggaaaacgttggttgcatattggtgataataagcattctgatattgaaatggcgaagtgtcattcgattgatggattacatgctgattggtcacaatatgatggaggtgtttcgcggcattggcagattaaggatgttatcggcgagtctattaatctctctgtaacgaatatccaagcaaagcaatttttcgctgatgacccgcttactgagattggtttcaaaatttttggcccattgatgctgggctatacatcttggatctacgctacggcaaaaaaactaaatgttgaaaaactcttgtttttagctcgtgatgcacatttaattcgcgatattttcctgaatttctacaataaagatcgtcaatttgactatcaatatgtttatctttcacgtgcatcgacttacaaaatgggaatgactgactggcccatgcatcgtatttggcatctttttggtggtaagaataggaaaagtataaaaagcattctttctgttattcacgatgttggtttcccagacgaaaattatgttccgagtcatcacgagcgcgatagagttcactggctgattaataagttgttcacgcatgcattattgcaaaacaagaagtgtcgagatgaattctcagattacttcagagaagcagtgggtgactataagtcagttgcgttagttgatattggttggatgggcaacattcaatctgtatttagtcgtgctctaggtgacatatgggctgataagaaaataagtgggctatatctagcgacttttgaaggggctaaggataacaaatcatattataatgatatgaaaggttggttgaccaattatggcgaaccgagaaatcatcatgacttgattctctctggtggggtagaactattggagtttgctatggcagataacactggttcgactaagggctatgagaaaattaatggtaaaacacagcctgtgaaagaaattgtcggtgacgaagagttggaatacctaaaaaaggcgcagcttttacaaaagggtattttgtccttctttgaatatgtctcttccattcttgcggtcgtaccggcagaggctatgagcagtcgtttgttgtctgaacctttctttacgcttgtttctgaaccaagcagtcaccagttggacgtcttagttggtatcactcactctgaggctgcaggggccaatagtgggcgtattgctttggcgaaaaagttaaatctgaaagatcgtttgcttcagggaaataaatattccgaaatgtttgaacagagctattggaaagaaggttatcggcgcataaacaggaagaaattctggaagaaatacatctaa

SEQ ID NO: 435114 - DNA, 2436 bp, Serratia marcescens
  misc_feature (2318)..(2327): n is a, c, g, or t
atgagtacgaccgaaaaccaaattgagctggatcttattgcccggctagctgaactaaaatacacactgcgtcccgacattcgcgatcgggcatcactcgaaaaaaacttcagggagaaatttgaagttctcaataaggtgcatctgaccgatagcgagtttcagcgtctgctcgatactattattacacctgatgtgtacaatgcagctcagacgctacgcaatataaacagcttcgagcgtgatgatggaacaccactgaactacagcttggttaacattcgcgactggtgcaagaacgactttgaggtagtgaaccagttacgcatcaacaccgataacagccatcaccgctatgatgtgatgcttctcataaacggtgtaccggttgtgcagatcgagcttaaaacactgtccgttagcccacgccgtgccatgcagcaaatcgtggattacaaaaccgagcctggcaatggctacggtaagacactgctgtgtttcatccagctcttcatcgtcagcaatcgtactgatacctggtacttcgctaacaataatgcgcgacatttcagttttaatgccgatgagcgcttcctgccagtctaccagttcgccagtgaagataacaaaaagattacccagctagagatcttcgccgacaagttcttagccaagtgtaccttagggcaaatgatcagccgttacatggttctggttgccagcgaacagaagctattgatgatgcgcccgtaccaaatttatgcggtcaaggctatcgtcgagtgcattcatcagaattgcggaaacggctacatctggcataccactggttcgggcaagacgctgacttcgttcaaagcgtccactttgcttaaggataatcctgacatcgaaaaatgcctttttgtggtggatcgtaaagatctggatcgccagacccgcgaagaatttaaccgttttcaggaaggctgtgtagaagagaacactaacactgaaacactggttcgccgacttttgtctgacgactatgccgataaggttattgtcacgactatccagaagctgggccttgccctagacggcacaaataaacgtaactacaaagaacgtctggagccgttacgagacgcccgtatcgtgttcatcttcgatgaatgccaccgctcgcaatttggtgagaaccataaggctataaaagaatttttccccaatgcccagctttttggcttcacggggacgcctatcttcgagcagaatgccagctaccagcaaatcgaaggtcagcaagccagcctgcgtaccaccgacgacttattcgaacggtgtttgcaccagtacaccatcactcatgctatcgaagatcgcaacgtcttacgctttcacatagactatttcaaacccgaaggaaagaacccacctaagcccggtgaaggcatcgctaaatccaaggttatcgaaaccattctttctaagcacgattctgcgaccaacggacgcaaatttaacgctgtcctggcgacagccagcattaacgatgccatcgaatattttgagttatttgccagtattcagacaaaaaatgcagaaaaagacgctgaattccggccattgaacgtagcatgtgttttttccccaccttctgaaggtaacaaagacgttcagcagatacaggaagatctgcctcaggagaaagaagataaccagcaagacccggaaggcaagaaagcggcactcacccgtatcattgctgattacaatgcccgtttcgggaccaatcaccgcataagcgaatttgactcttactatcaggacgtacaaaagcgcatcaaggatcagcagtaccccaatacagacttatctgccgcgcaaaaaattgacatcaccatcgtagtggacatgctgcttacgggatttgactccaagtacctcaatacgctgtacgtggacaaaaatctcaaacaccatggcttaattcaggcattttcacgtactaatcgcgttctcaacgatacgaagccctacggcaacattctcgattttcgtcagcagcaaaagtcggtagaaggagccatcgcgctcttttccggtgagaaaatcgataacccgcgtgaaatctggctggtagaccctgcacctaaagtcatagagaatctgcaaacagccacgcaaaaactggccgactttatgcaatcacaggggctgaataatgcaccggaagaagtcgctaaccttaaaggcgatgttgccagagcgcaattcgttaacctgttcaaagatgttcagagactcaaaactcagctcgatcgatataccgatcnnnnnnnnnncaatataccgatctgtctgaagcgcagaagcaacagatcgagaggatcgtgccgtcagatcaattgcagggatttaagggcgtatatctggaaacagccaaacgcctga

SEQ ID NO: 435115 - DNA, 141 bp, Serratia marcescens
atgcggtgtaatttcacctttatcaccttcttttttatcgacatcaaatttaattcgcagcttaaagtcgccatgaaattcgatctcaggattggaagcaagaacaatcaatgtttgagagaatacaacatccatccctga

SEQ ID NO: 435116 - DNA, 555 bp, Serratia marcescens
gtgctggctaataagttagggatcactgatgaagaggaaatggaggcgctggaatctggcctgctgctgatgctttatgaacagctatttatcgaaggccagccgccagcggcgctggcttttgagcatatcagtggctggcatcgtcaatggctggggaatgtatacgactgggcggggagattgcgtaatgctaacttaactaaggacggtttccagtttgccgctgccgacagaattccgcttcttcttgatggtttcgagaagcaatttctctccaggtctggtgagctgaaatctctggctcgtccagaactggttcgttatctggctgaatgtcatgtggaatttattttgatccatccattcagagaaggtaacgggcgtctgtcgcggcttctttgcgatgtgctggctgtgttggcggggaagggcttactggactatagcctgtgggatgagcacaaggcattttacttcaaggcgatacaggcaggcgtatcagggaactacagccccatgatgcaattggtggacgatatattgccagattaa

SEQ ID NO: 435117 - DNA, 1905 bp, Serratia marcescens
atgacccacctggtgaagtcactgcccggactgctggcaacacatgccctggtgctggggacgtttatcttcgccaccggcgattgccgggcggaaggtgatgacgtgttccagaccggcagcgagtttgccaaacagatcgccggtcagggtacaggtacgctgcagaacaccaacccggctaacgtgttgccgaactacaccgacaacccgaaagaaaaaggctattacggcggcgtgacggccggggatgccaacaatctcaagacagacggcggcaccgcatggggccagaccgaggtcgggcaggcggtgaccgattcggtgctcaagaaccccaaggagccgatttctcacgatgcgccctttatccaggccggcaaggaaattgaaggcaaggccgagagcatcgtcggcaagaccggccctgactgcaaggccgagcaggtgacccgcagtgagttcacccgccatgtgtgcgagcgtgatacggcggtgatgcgtacctgcgagcgtgccaccgacatcggtggccacaatgaaacccgttacgaagaccgcagcgcacacatcgataaatcaatgatccgttggtggaaagagggcaaccgtatccacggcacctttaccgcgccgtttaccggcaggctcaatacggggtcgatatatatcgagatccaacacgaaatgcacagctatggcgtgccgctggccttttcactgctggggaatgaggtgcgctatggccgtcaggactggggcagccggccgctgaacgtcggtaacgtcacgctcacgcaggggcagcaggtcgatattttcctcaccatggaccccggtggccatctggatacctttctggatgcgatggtcaggcagctgagcggcggcgggggcggctcgccgatggtgttctacgtgaagttcgacggcagttcatcggtgcaggtctgggtgccgaccacatcgacgccggccgactgtccactggcgcaggaggccggggcggtgaaggtcaataccgtctgcagtgagccgggcggcgagcgaaccgttacggtcaacggccagacctacccggtgtgggccagctgctggcgctttaccgatacctatcggttgcaggaagccggccagggcagctgcgacgcctatgccaacaatccggcctgcactattgccacgcacggctgtgccttctccgatgagtatggccagtgcctgcacgagaacgtgacctactcctgcgaaacccgcaccacagggaacgtgatgctgtgcggcggccagatgtactgcctggacggggagtgtgacaaggcgcagaagggcactcagggtaacgactttgcgcacgccgtttccgagctggccgcggtggcggccgctggcaaggacgtggcggcgctgaacggtatcgatgtgcgcgccttcaccggtaagggacagtcctgccgcaaggcgtttgccggtttcagcgactgttgcaaggactccgggtggggtaacagcgttgggcttgcgcactgcgacagcgaagagaaggcgctgggcaaggcgaaagagaacaaattgaccgtcagcgtcggcgaatactgcagccaaaaagtgctgggtgtctgcctgcagaagaagcgcagctactgccagttcgacagcaagctggcgcagattgttcagcagcaggggcgggcatggcagctgggtatcggctttggcgccgcaaaatcaccggactgccggggcatttccgtagacgagctgcagcgcatcaacttcgaccagctggactttgccaatttctatgaagacctgatgaagaaccagaaggtgcccgaagacgcggcactgctggagaaggttaagcagcaaattgcggagcgcatgcaggaggcagccaagtga

SEQ ID NO: 435118 - DNA, 1077 bp, Serratia marcescens
ttgtctgtgtttgagcttgtaacggccagttatgctgctgatggctataaccttagggatgactggtacggtagtgatatccgcaaagtagatcctcgcaagcagcgtctttcaatagagccaatccttaaaggggttgaaaatacagacttccttcaagctgtaacgatgctccatacgctggaaaaacgtaaagccgatcttgcggcgggtaagactggaaagcaggtttcaccagttagtgccaaaagggcttcagttcttgagctgcctttaactgcttaccagaactgggccgaagcagttgagaaagggtttaaatgtgctgcaaaattcttgcgtcaggaatgctttagctcccagcgtgatttaccataccgcacccaaattgcacctcttgctgcagtaatgaccattatttgtagcaaagatgatgaacgctggagagaaccacagattcatcagaaactcgctcgctggttctggtgtggagtgttaggtgaactctatggcggagccgttgaaacccgtattgctaacgatgtcgaggaactcctttcatggattgaagctggtggagacctgcccagaacaatcaatgatgctaatttccagattgatcgtttagggtctctcacttctcgtttgagtgcggcgtataaaggtattaatgtgcttgttctgagagacggcgctcatgatttgttctggaaatcccagattcgtaatcttgaagcagatgaagttgctttggatatccaccatatatttccgaaagactggtgcgaaaaacaaggtatccctcgtcgtcagtacgattcgatcatcaataaaacaccaatttcttataaggccaacagaatgattggtggctcagcgccatctgcatatttggcagcgctccagtcacattcccaggttcagctgaatgatgatgcaatggatacgctgttacgtagccatcacatgccagcgagcgctctacgtcacgataactttgaagagttctatgagcagcgacaaaaggaattactgagtttaattgaaagagcgatggggaaatcactcaattcttaa

SEQ ID NO: 435119 - DNA, 1557 bp, Serratia marcescens; identical to SEQ ID NO: 435075

SEQ ID NO: 435120 - DNA, 126 bp, Serratia marcescens
atgaatctcatttgctacgagtgctgttacgacgaaaatgatagccagtctattcaaattggatggaccctcaacaattgtagagggttccagtcctcactgcgagacctgctaaaaggcctctag

SEQ ID NO: 435121 - DNA, 855 bp, Serratia marcescens
atgagtacaaatctcttaagtgtcatgaaaaaagaaatatcttcaaaaaaccctctaaagcaggagatattactaaaaacatcaaagtttagtaagatttttattttcgaaggtgttgatgattatcctgtatacgatgagtggatgaaacgcaactcagtgtatgtcaatgcaggtcatttggttgccaaaggaaaaaaacaaataatagagctttatgaacatgctataaaatatgatgaccaagaaatattgaaaaattgttatttctttgtagaccatgattttgatacctttgagcataactcggatagcatagtaacactttcttgctattctattgaaaactatattattaactctcattcagcaaaaagctacttaaaggatgagttcaaaatggatattacacgatccgagttactagatagtattaaaattgattttgaatcagacttcctgcaatttaaaaaattagcgaaagaattatgcaaaccactttttataaatcacaatgtaaatggcaaggcaaaattttatgataaaatatcttcagtgataaaccttgattacaaagatattcggataaaagaaaacgctaagctgatcgggtatgaagttaacgaagatgcagaggacgttaaagctttgatagttatttttgataatttaacgcatgagcgctctattaaaggcaagtatgtttttgagttcatgaaaatttggttgtcatcattaaaatcacatttatcaactaataaagatttgagaattacaaaagatccattaatgttagaaaggcgaagattagcttgtgcaactccaatacctaaagagctcatgaaattctcttaa

SEQ ID NO: 435122 - DNA, 141 bp, Serratia marcescens; identical to SEQ ID NO: 36145

SEQ ID NO: 435123 - DNA, 1413 bp, Serratia marcescens
atgctgtgtggtcgtcctttccctgtacatgtgttcccgcagatcatcagaaatgcggtttatgaagtggaacagcatacgcaggctccccaggctttgattgctgcatcggtattgggggttatttcactagcctgccagaaccggattgatgtgtgccgactgaataatctgcgcagcccggtatcactttttttactgacactggcggaatctggagaacgcaaaagcacggtggacaaactgctaatgaaaccattatatcaactggaagaagaatggtttgaaaaatatacccaggatctgattatctggcggaatgaggaaatggcttttaatgttgaaaagaaagccctgatgtcgaaactgaaatcagatattcgtcgtaataaagatcactctgcaacgagcgaacgtctgaaagcgctactggcggcgtccccgaaagcaccggccaggttcaggcagatatgcaacgatgccacacctgcggcgatgaaagactctctctgtggacgctggcgatccatcgggcttatgtctgatgaagctggcaccatttttaacggctacgcactaaatgaactgcctttcatcaataaaatgtgggatggtgcaatgtttcccgtggaaagaaaaagcgagccagataaattaatcaaagatgccagaatgacgctggggctgatgattcagcctgatgtgtttaaaaaagggtatttggaacgaaaaggcgatgccgcgaaagggatcggattcttcgcccgatgtctgatatgtcaacctagttcaacacagggctacaggcaaattaccagcccggttgtctcaagtgagcatctgccggtatttcatcaacgactgatagacattgttaacgagagcattgccagaaatgagggaaatgagcgtcagtgtctgcgtttctctcccgaagcagaaaaacgctggctcgaattttataacaaagtcgagtcagaaatggggttgattggcctcctgtctgattttaaggattatgcttctaaaatggcggagaatatggcgaggatcgctgcactgctgcattactttaacggcgatgaaggagatatatcccttactgccgtggaagccgcagtagatataatcgcctggtatgtggatgagtatgtgagaattttctctaaaccccagacgttactgctggtaagttcagaagcagacgaactttactcgtggataaaagattattgctacaggtgtgtggtgccgtatatcaggaagacaactattatgcaatatggtccgaaccggttcaggaaccggagtaaagtgaatgaactgctcagtacactttattcacaaaacaaaatacgggcagagaaaagagggaaaaccattttcatacaacctgtcgatggttttatataa

SEQ ID NO: 435124 - DNA, 219 bp, Serratia marcescens; identical to SEQ ID NO: 105673

SEQ ID NO: 435125 - DNA, 864 bp, Serratia marcescens
atgactacacaaaaggaaatggaagaaatcaggactgcattatcttggtttgatgtacgccgatacgatggcctgaaagacctgaccctagaacaaatctatgcagagcttgaaagacggatgttggcttacaaaacaaggcaacaatgggaaacagcaggcaaagataatcaaatgcaagctatataccatgatgccaaaatccgatgtggtgatgtgatacttcaatcggactggatttcaggcaatcacagactgtcacatagctatgctgtaagaccaatgagcagagttcaattgttcaactatgggcgggctatgtatcggctggagaattctgagcaaacagaccctgttgctgtgagttctgactacatctctgagtatctgaaacaaggtggcatgaatcctgccaacaaaatactggttgaaattgacttggaagaagccagcagcgacgatctcgcagaacacctgaaagtactgattgctctatggcaaaagcacctaaaaacgcctaagccacctaaacgaatgtttcggtttggtcataagacctttgaaagaatacttgattacaaagtcatccctttgatggatttgatctcatgggaacagctctacaacgaaggtaagaacatacctttcaacatcttagctgacattctacatggtactggtgggattcggagccgtgataacatcaaagatactgattatgactacgcgaaaagttatctcgaaaaggatgagtacttcaaggttttaaatgatttctatattaaaaacaatatgttaaaggactggaagatcactgacgtgataacatttaacgataaagccacggataaaaacaaaaagtaa

SEQ ID NO: 435126 - DNA, 525 bp, Serratia marcescens
ttggcaatacgggtggacctgcatgacccggttattctggataatggtgataccatttcctgtattgcgaatactgattcaggatctatatcaagatttactaattcactgaaagccaagctggcagcagatgaacagcgcaagcgtaaagaaggtaaacgggtacacccgaatacgctccgctatgcgtgggtgagggaatttacccagaatggtaagcgtcattttcacgtatttctgtttctgaacaaggatgcttactaccacttaggggatttcaatctggatgaagatacgctaagaaccatgattacatcagcatggtgtagcgcattaaatctgactcccgaagaggggcagcacttggtgcagtaccctgctaatggtaaatataccctgaaccgtgatgatattctcaataatatttatcctggcgatttactgaaccggattgattatctaaccaaagtgaaaagcaagatctttgatgacgggaacagatcgtttgggtgtagtaacaattaa

SEQ ID NO: 435127 - DNA, 192 bp, Serratia marcescens
gtggatgaaattctgcgtcgccgtatcttcgacggcgaacgcctttccgaattaatggctccgctgaatctgggctggaaagcacgcacgcagaaagagctggcgcttatggatgagctgacaccgttgttacacaaactggcacaagggcgtgagatcacgggactatcagcctatgaggaagggaaataa

SEQ ID NO: 435128 - DNA, 192 bp, Serratia marcescens
atggcgttgttggagaagtatgtcgatttggctgaaaaagagcatgacattactttcatcggccgcttaggaacgtatcgctacctggatatggatgtgaccatcgccgaagcgctgaaaacggctgaaacctacctggcaagcctggagcaagaaaacgccatgccggtatttacggtcagcatcagatga

SEQ ID NO: 435129 - DNA, 141 bp, Serratia marcescens
atggtggatatccaaagcaacttcatctgcttcaagattacgaatctgggatttccagaacaaatcatgagcgccgtctctcagaacaagcacattaatacctttatacgccgcactcaaacgagaagtgagagaccctaa

SEQ ID NO: 435130 - DNA, 345 bp, Serratia marcescens
  misc_feature (235)..(244): n is a, c, g, or t
atgaacgcgctaaataaaaaaaccttatttacctatttcaaggaaggcggcatttacgtggtgttgctggtgctgttggccatcatcatcattcaggatcctaccttcctcagcctgatgaacctgagcaacatcctgacgcagtcttcggtgcgcatcatcatcgcgctgggcgtggcggggctgatcgtgacccagggcaccgacctatccgccgggcggcaggtggggctgnnnnnnnnnngctgctgcagtcgatggataacgtcaacaaggtgttcccgcacatggaaacctggtcgattcccctggttatcctgctggtgtgtgcggtcggcgcggtga

SEQ ID NO: 435131 - DNA, 714 bp, Serratia marcescens
atggaaacctggtcgattcccctggttatcctgctggtgtgtgcggtcggcgcggtgatcggcctggttaacggcctgattatcgcctatctcaacgtgacgccgttcatcaccaccctgggcaccatgatcatcgtctacggcatcaactcgctgtattacgactcggtcggcgcttcgccggtggcgggcttcgatccgaagttctccacctttgcccagggcttcttgcgcttcggcgactttaagctgtcgtacattaccttctatgcgctgatcgccatcatattcgtctggatcctgtggaccaagacccgcttcggcaagaacatcttcgccatcggcggcaacccggaagcggccaaggtgtccggggtcaacgtgccgttgaacctgatcatgatctatgcgctgtccggcgtgttctacgccttcggcggcctgctggaagcggggcgcatcggcagcgccaccaataacctcggctttatgtacgagctggacgccatcgccgcctgcgtggtggggggcgtctccttcgccggcggggtgggtacggtgtggggcgtggtgaccggggtgattatctttaccgtcatcaactacggcctgacctatatcggcatcaacccgtactggcagtacatcatcaagggcagcatcatcatcttcgccgtggcgctggactcgttgaaatacgccaagaagaagtag

SEQ ID NO: 435132 - DNA, 981 bp, Serratia marcescens
atgaagtccaaagaacaaaatagttttaaaatgcaattttcaaaagacaacaccttcagattaattgccgaggcactaagaaacatagatgttgtttttctaccaacttaccgcagagttgaaaaaaatttcgagacagcctcacgagatgaaagagaaactaatagtcaacgtatgtttggcagaaagcgaggtatgaaattacaacgcgatggaatttcatatggacttaaagacgttgaggtcgccttaaaaggtttgactttggatatcgaaagaacatcgaatcttggctacagatcactaagtgcaaaaatgcttgaggacttgattaaatatgggaataacgaccgaatagctaaagaacaaaacgcactcccatccattgaagatttagaacgattccttaatcgtgttgaggacacaggcactagccctcgcgaaagaagagcatcagagacaaaaaagaaatctttaattgactctttaaaaagtctatataatagagatgcaataaaggatatcacatacttaaattatttcttaactcaattaaactcagtaatccaagaaactaaagagcaagaatctaaaattgagaaatttgtagctgtctgcgataaatatctttcttcagcaggcgactcaaaatctcttaagtttgatcctcagagtttagaagtcattgttaaagacagttatactggagaacgtatctcattaaatgatttatcttctggagagaaacaagttatctcgctaatggccacaatttatcttaatgataacactcctaaaataatattaattgacgaaccagagctttcattatccatagattggcaacgaatgattttacccgatttgaacgccggtgaaaatgtcaaacaagtaattgccataacacactcaccgttcatttttgataatgaattggatccttatgctactgctatgaaagtacacaaaggtagtctataa

SEQ ID NO: 435133 - DNA, 546 bp, Serratia marcescens
  misc_feature (462)..(471): n is a, c, g, or t
atgttagaaaaaaataagggggcggtatccccaaacgtagcgaagaacgaagatatagatttaggtcgcttgatcgggacgctaattgaccatcgctggttgattacaggtataacaactatatttgctgtcgtcgggttgatctatgttgtattcgccactccgatatatcaggccgatgccctggttcaagttgagcaaaatatgggtagctcaatattgaatgatatctccaaagtccttcctgatagccaaccagtctctgcgacagaaattgaattaataaagtcaaggatggtaatcggtaaaactctggatgaaatgaatttagataccgaagttgaaccaaactatttccctgtatttgggaaaggtttttcacgtttaactaaaagtagttccgaaaggcctcaagtcgcgttaagcagtttacacgttccagattatttgctggacgagaannnnnnnnnncttatgaactatcatactcgggcgataagatactcgaaggcgttgtgggaaaattggctacagggcatggcgtga

SEQ ID NO: 435134 - DNA, 192 bp, Serratia marcescens
atggttgcccgctttgatgtcaacaccgtcaaagaagttgaagtgagtattcgtcgttttgagcaaaatggagttgaaatcaaaggcgtcattcttaacgcgatggtcagaaagttgggctcttactattcaaattatggttattaccaatatgaatataaaagtgacagcaaaggtaaggataagcactaa

SEQ ID NO: 435135 - DNA, 570 bp, Serratia marcescens
atgagcaagaaaaaaatcctgatgctggtcggcgactacgccgaagattacgaaaccatggtgccgtttcaggcattgcagatgatcggccattgggtggacgccgtgtgccccggtaaagccgtcggcgactacatccagaccgcgatccacgactttgacggcgcgcagacctacagcgagaaacccggtcatcgtttcaccctgaacgccgactttgccgccgccaaagaagaacactatgacgcgctgttgatccccggcggtcgggcgcccgaatacctgcgcctgaatcccgacgtgatcgcgctggtgcaggcgttcgacgccgccaaaaaaccgatcgccgccgtttgccacggcccgcagctgctggcggcggccggggtgttgaagggccgcacctgcagcgcctacccggcctgcgcgccggaggtacggctcggcggcggccattatgcggagatcggcatcgatcaggcgcacgtcgacggcaatctggtcaccgccccggcctggccggcgcatccgcagtggctggcgaaattcgccgaggtattggagcagtaa

SEQ ID NO: 435136 - DNA, 588 bp, Serratia marcescens
  misc_feature (475)..(484): n is a, c, g, or t
atgctctccggattacggagcagaaagtatacgaagacgaagatatcccgagcagatcactctgctgcggatgtctcagggaacgaagcggctatgaactacgaaaaaatcaagaacatcttggcgaaactcggtgaagagagcatatcgacggtcgatgtgttgctcgccatcaacaccatcgtcaatagaagcaattcagagtgggagggccgtgatttggtgatccgagcactcgacaaatttaagctttttgactctgtcgaacagtcgctcctgctaaacatggtacgagctgttggactattcccctatatcactcctcacctcagcagcatggcgatttctgaccgcttggcttacgaagcgcacagggtcgagggagtagaacagggcatggtgtttcatcatctgcaggcccatgttttcagcttgatcatgcaaggccgaaacgtagtactcagtgcttctacannnnnnnnnnccagcgtcctgatcttgctgatgtggagttcttcgtcttggacgagttctacaaaatcgacctggggaacgccacagacgaaagcacacgcgctgttgacctga

SEQ ID NO: 435137 - DNA, 597 bp, Serratia marcescens; identical to SEQ ID NO: 434569

SEQ ID NO: 435138 - DNA, 945 bp, Serratia marcescens; identical to SEQ ID NO: 434570

SEQ ID NO: 435139 - DNA, 618 bp, Serratia marcescens
atgcgtattgttattgacctgcaaggagcacaaacggaaagccgttttcggggtattggccgttatactctttcgattgcaaaggcaatcatccgtaataacagtcaacacgaaatttttattgctttgtctgcgctgtttcccgaaaccatcgctgaacttaaagcgcaatttgctcgcttagtgccggccgaaaatatcgttatctggtatgcgcctggccctgtcagagcgatggatagaaacaatgcttggcgcagtgagtgtgcagaatatgtgcgtgaagccttcttacataatcttaaacctgatgtcgtttttataaccagtttgttcgaagggcatgtagataatgcggtgacgtcgatcgctaaattaacgccaaaaactaaagtggcggtgttgcatcacgatctaatccctttggtacaagcggatgtttacctgcaagatgacgtttataaagattattatttaaagaaaatcaattggttgaagaacgcggatctgcttctgaccaactcggactatacttcttcggaggtgattgagtggttggatattcccgaaagcaaagtgtgcacgatttcggctgcgaccgaagaacattacccgtga

SEQ ID NO: 435140 - DNA, 1377 bp, Serratia marcescens
ttgattcaatcaaaacgacaggctgccggtctggttatcggcacccttttgtttgcgatatctgcgccggtttattcgatagggattttagacgcatattcgctggcattagaaaaggacccgaccttccgggcggctataaaagagaaagaagcgggagatgagaacgaaaacatcggcagggcggggctgctgccgaaagtgtcgttgaactatcagaattcgccgcgcaattggcagacgcaaaaatacccgcagagcgactttttcggcaatgtttcggaggtcacccggcggcaacaatatcgtagttattccagttcgatcacgctgacgcagccgctgttcgattatgaagcgtacgcgcgttacaaagccggcgtagcgcagacgatgatgtcggacgagcgctatcgcagtaagttgctggatcttgcggttagggtgattaacgcctatgtcgaagtggcctattccaaggatcaaatcgcgttggccgaagcgcaaaaggcggcttacaaggaacagttgaccttgaacgatcgcctgatgagcgccggtgaaggcaccattaccgacgtatcagaaacccaggcgcgctacagcctggccgaagcgcaggtaatcgaagcgcgcgatgcgctggacgccgcgcagcgcgaattggaagtgattatcggcataccgctgaaccaactggatgaattgcaggttttgcggccgggcaagtttaaggtggcgccgctgatcccgtccaaatttgaagagtggcaaaagatcgcgctggagaacaacccggtgctagccgcctcgcgtcatggcgtggatgccgctaagtatgacgtcgaaaggaatcgggcgggctttatgccgcaggttcagctgtatgcttcgcattcggaaaacgattccagcagcgataacacggttaaccagaaataccgtaccgacagtatcggcgtgcaggtcagtatgcctatttattccggcggcggcgtttcggcgtcgacccggcaggcggcggcgcgctatggccaggcgatgtatgaaatggatgcgcagacgggcaccacgctcaacgatctgcgcaagcagtacaatctgtgcatcagcagccgcgccaaggtggcggcctatgagctggcggtacagtctgccaccacacaggtgacggcgacccggcaaagcgtgctggccgggcaacgtgtcaacgttgacgtgctcaacgccgaacagcagctctatagcgctcagcgcgatctggcctccgccaagtacgcctacatcaagtcctggattaccttgctgagcgactccgggacgttggacgaaaaagatgttatgcgggtagcgcagtattttgcccgcagtcgttag

SEQ ID NO: 435141 - DNA, 3249 bp, Serratia marcescens
atgagtatggacaccaccaaagagctgattttccaaaatgaaatgattgctcagatggtcaaaacgggttggattgttggcaaaggcgacggctacgatcgcgaacgtgcgctatattcgcaggatgcgctgacctttgtgcaaaccacgcagccgcaggagtgggaaaagttttcaaagatttatcctaccgataccgaacgccacttccttgatgcgctggtcgctcagctgagaaaagcagatatcaacgctaccgatatgctgtcgcgtacctacggcaccctcggcgtgttgcggcacgggatcaaaagccatagcgcccgtttttccctgtgtcagtttaagccggagcacagcctcaatccggaaacgcttgcgcgttatcagcagaatatctgtcgtattgtgccggaactggtgtatagcccacacgcttcgaaagcggcatttgaagagactggtacaaaagcgaaaaagtggcgtatcgatctggtgctgttcgtcaacggtttgccggtggcaacgttggagctgaagtctgagtttaagcaggcagtgcaaaacgccattacacaatataagaaaacgcgtttgccaaaggatcccgttaccaacaagccggagccactgcttacttttaaacgcggggcactggtgcactttgccgtcagtcagtacgaagtgtttatggcgaccaaactcgacggtgataaaaccttcttcctgccatttaacaaaggtactcacgacggtggtgcggggaacgacatcccggaagatgcgaacgattacgctactcgctacctgtggaatgaggtgctgctcccggacaatttgctgaaaattcttgctagctttgtgcatctacaaatcgaagagaaagaagagtggaacggcctaaagggcaagaaagagagtctgatcttcccgcgttatcatcagtgggatgtcgtgaacaaactgattatcgctgcggcggaagagggcactggcaataagtacctgattcagcacagcgcgggctccggtaaatctaactccattgcctggaccgcccaccaactttctcggctgcatgatgagcaaggtgagaagcagttccactcggtgattgtggtgacggaccgtaccgtgctggacgatcagctccaggacaccatctaccagtttgagcatcaggatggcgtggtcggccgtatcaataacaaagaaggcgacggctcaaagtcagagaagctggctagcgcgctggaaaactcgcagccaattattatcgttaccattcaaaccttcccgcatgtgctgaaggcaattgaaaacagcgtcagccttaagcagcgtaagtatgcggtgattgctgatgaggcgcactcttctcagagcggttctacggcgcgtcagttgaaagaagtactgatgacggaggagacggatgacgatgcggtgatgacctcggaagatattctcgatgccaccgtcgccgcacgtaaaggcagcaacaatctcaactactatgcttttaccgccacgccaaaagccaaaacgttagagctgtttggccgtcgtcctaacccatttgagcctgcctcaaaaaccaataagccggaagcatttcacgtctactccatgcgccaggcgattgaagagggtttcattctcgatgtcctgaagaattacaccaactataaggtggcctataagcttctgcagaagctggacgatcccgatcgggaagtcgacagcaataaagcgaaggtgaaactgaatcagtgggttgcgttgcatgagcataatgtttcgcagaaggtaaaggtgattgttgagcactaccgtaaacatgtgatgcatctgctgggggggcaggctaaggcgatggtagtcaccagctctcgtaaagccgcggtgcgttacaaactggcctttgataaatacatcgctgaaaacaactatccgaagatcaatgccatggtggcattttccggtgaagtggaattctatgaaagtgaccacaatagccttgcgttactgaaccagaagtttactgaaatcaacatgaaccctgggttgaaaggcagggacatgcgcaaagcgtttgagactgatgattaccaggtgatgttggtcgcgaataagttccagaccggttttgaccaacccaagctatgcgccatgtatgtggataaagcgctgggcggcgtggaatgcgtccagacactttcacggctcaaccgcacttacccagggaaaaaagagtcgggaacctttgtactcgatttctataatgagccggatgacattctggcggcatttcagccttactaccaaacggctgaattgaccgatgtcagcgatccgcagttagtctttgagctgttcgaaaaacttcgcaccagcggcattttcctgtggaacgaagtggagcaattctgcgaggcgttcttcaccaagaacaaatccaatgctgcgataagcaatatctgcaagccggcggttgaacgctggaagcaccgttatacctcagcgattgatgcctatgtgttggctaaagaaatgtttgaacgcaccaagaagaccggcgatgtggtgctgataactaatgcagaaaacagctttaagacgtgcaaacaggaaaaagacaagctggatatcttcaaaaaagatctcggtagctttgttcgtttttatgagtttatgtcgcagatcgtagattacgatgacaaaggccttgagaagctgagcctgttcgcaaggcatcttcgcccgttgctgcatgaacagcgtattgaagacgatgagattgatttaagtaatgtggatatgagccattaccgcttatcgaagcttcatgaacaacatctgaaactgcaggaagatgcagaagaatacaaaatcacaccgggtaacgatatgggtaccgcgaagccaaaggacaagaaagaagagtttctgtccaatattctggcgcgcctaaatgatctgtttgttacggataatcttagcgataaagacatgatcaactacgcctttaccgtgcgtgacaaactgtcggaaaaccaggcggtgatgacgcagatcgctaacaatacgcgtgaacaggcgatgctgggtgatttcccgaaagcgatcgatgatgccgtgatggacagtaatgaagcccagcatgagatgatggtgcagtatctgtccaaccctgaactcgccaggggatttgcctgcgtggtgtttgatatgctcaaaggtgcttaa

SEQ ID NO: 435142 - DNA, 162 bp, Serratia marcescens
atggcgacattgggcgccgacgccgccttccggccgctgcatcaggccctgtgggacaaagcgctgaccgccaatttcagcgcgcagcctttcgccggcatcgcggcccacagcctgcgcgccacactggccgacggccgcacgttcgacgttgcgccttag

SEQ ID NO: 435143 - DNA, 390 bp, Serratia marcescens
atgagaaaacacaataactttctggtgtttctactgctcgcaagtcagatggcctttgctgaaacctctgttgactctctaccgcaagaaacattgtataaaaattggttaatcagtcgttgtttgggaaagtttacagattcagaaaacactaggaaagacgcgtttagaagcgccagcgcttatctggaatttagcaagctgcccctttccgcgtttgaagagggtgagaagctggtggagagttatttaacacaagagcgtcaagcggctaccactgatagttatcatacgcttgaatgcctcgctttatcccaatcaaaagacgctcataaaatcttcatcaagaataaagcaattcacgcagcgaaagaaaacaataaaccttag

SEQ ID NO: 435144 - DNA, 2019 bp, Serratia marcescens
atgaataatttaagtgccactgccaccgtaattaatgatactgatgtaacttcgcaattaggcagcattaataatggctataccaatgtgcatgcgcaacttggcgtgacgctatcgcgattcggagccgatcctacgggcaataccgattgtcgtgaaatatttcagcaggcattggattatgcggcgacaacgcagcataaaaccgtctggatcgatggaacctttcttattaccggcgatgtttcgttaaaagtacctgttggggtcaccgtcagaggttatcgaactgggcgaaatcaaagcataatgacagctggttttaatcctaaagctgaaccttcggtgttgttagtgcgtacaaaaccagcaacacagggggaaccaggaactaatctattcgaatgtacaatcagtccttcatttgatggcttcgtgatctattacgatgaacagccaaagaatatcaccgatccggcaatgtttattcagtatggttatacttttcacaccgtagggcgttcatgttcagttaccaacatcctatatgctggtgcctggaattttttctcgcagcaaggtgaggcgccgttctgccaaaacatttatggttttgcttatggcatcgattttcatgtggagaagtgcgccgatgtaggggtttttgataatatacattgcaatccgaatgttgttcggcctaattttagtactatcaccgcagcggctaagctggaaacaagcattatgtttgatttttcagagcatgacggcatgatgctgagcaatattcatggttttggtaaaggagttgtgttcaataatgatcaaaaagggaccacgcggctaatgaccctgtcaggtagcaattttctttttgataaatgtggcactctcgtgaattcgaatgcttctggtgcaagaattgtggacttctttggcggaacattcattcatgactatgcacgcttaaagggcatgatgacgctaagtaactcgacccaaacacagatagcgcaatattatctcaatggatggaaattccaactgggttctcccttactgggggatagcactgacaccttcttttactttgctgaccctgcgggttgcagtttgattctgaactcagcgattttgccatcaaagggaacattagaattaaataacccattaaaaagcaatatgatgaatggtgacattaccatcggaagtcggcggattaatcttgaaagaacctatggtagttatattcccaattcccgtttgctgactgttgaccagaataacgggatgcctatgggttttaatatttccggtaacggtgttaaggttgttgcgcaagaggtgaccagcagtaatactgcgacgtcctattattccggattattaaataggacctttgatgtcaaccagaccggtacgatgaccgttatggcttatgcaactgctatcggcgattctccgggtatccgggtgacggcaaccgatgataactatactgaggcgacaaaaatagagaagaaaattccgtggacgattgaaggtggctattatgtggcgcgtattaccattgaaagcacccctctttattctatttgggatatctgctgtgcagcgccatcgatatcgggcggcgcattgcggatgcatagtgtgtcgttgataccttcaccggtatttaactactcgtctgaattgagagagccgcctttattaaagtcacaggtgggtagtatggcaacaacgatgttgcttcaagcgaacacgcctacgatgcttcaacgttcagtgtgggggaaaacaagtggagtagccagagtttatttaaaaactgacaccacggttgcgatatttacattatataaattgaaagatagtgaacctgtcactgtcgttaaagatgtttactatcaagatggtgatgatgttttaaatcttacgtggcccactggcggccgcttaacactttcaagcagcgccggtgggaatatacaaatacgcattgatggcgcttag

SEQ ID NO: 435145 - DNA, 858 bp, Serratia marcescens
ttgaatatcaccatcgatccaaccttccaaaatctaatggtcgtggctacatcactcataccgttgattttgtttatcattattatctaccgcacgcgatctggttatattctgctcaaattcttgtgggataaagttctgcgcggtaagggcagccagtatgagagcatcaaaacattcgacagtgaacagtatgaggtgcatcgctttatttaccattacggcatcaaggtaagaaacctcacggaaattgaggcaacgctgcgttggatggagaacaaagacgtcgcaatgcatgagttgcggcgcataaaggacagatttacccctaaagatcagaaaattaggctggcaagcgcgatggagtttgccatccttgctgtatctatcgtgcttttgtacttcattaccattgccgcaacgaaactcacaatcaccaatgaagcctggtatgagttcaaacagaccacgcacagttttctgttgggcaaagactatgcgaaaaactcagatctgtttattccgtttatatcagacaaaaaatgggaactgacacgagagcaatgcggcgcccgtgatgcttttcaacgcgccgccgaggtcggtctattggaaagtgaggtacaatcaatctgttataaactcaccaacggtgatgacagtgaacggcgcgccgatgtaaaaatacaaaagagaataggatggacgcttttggcatcaagcctttatctcctttacctggctgttataacgatcgtcgccgccaaacgggccaaaacgttggataagcgtatcaatcaagacgctaacgctttacctcagtctcaacccccgacgaataaccaagatgcgccgtaa

SEQ ID NO: 435146 - DNA, 699 bp, Serratia marcescens
atgttaccaatcagcaccgcagatatcttgaaagtcgtcttaccgaccgtcattacgctgtttatcgccgtggtcaaaacgccttttcgcattcggcgggaaaaccacgataagctgttaaacctgctcgaatccgtcgagaagccccaaagcgcccccatacgtctgttgcggtttcgcgactatatcggcaaccgcagcgccggccttgctgcgctgcagctgctgctggcattgccggatagcgtagcggcgctggaacgttatcgcttcaccggtggccgccagcaaatcctgcgcgccacgtccgcaggcttcgttttgcggccaaacgccgatagcaagttcaaacgttttttgctttccggccgttatttcttgctgtacctgctgttcgtcatgctgctggtgctattgctggcactggcgcaatgggggctgcgtggggtagaaataaccaccacgtcgatcacctatctgcccggcgcgcacatcggcgacggctggcaactgctgttcctcggcttattgtttactatcattatgcttagcctggtattcatgattttcagacagttgatgctggcgggcaatctcagctcggaaagcgccttttatcgttactatcaacaggcgcgtgaggaacaacgatgtcgggaagtcctgagacaactgcgcgctgcgctgcgccgaacctga

SEQ ID NO: 435147 - DNA, 486 bp, Serratia marcescens
atggctgaaaaactgctgcacgcattacccttgtttgccgcttgggaagcactgatcgccaagggcaacacggcattcaatcagcggcgcgatcgcctggcgatgatgcactatcagcaggcgctgggcgtcgctcaggcgatcatcgccgagaaaccctggctgaatgtggaatatgccgccagagttaacgcactgaatattttcgagtctgccctggccgcgttgatcgtcacattcaacaacattactcatctgcgcctgcggcaaacgcccctccgcggcgttgagccgcatgtgcatcaggctcggctcgccatcgaacaggtgatggaagatacctcgctgtgcgaacaaatgcagcaggccgccgagcggcacctgctgcgctttcgaatagaaacgctgcaggtgctgcgcgaacatcggctgccggaaaccggcagctgcgcgcctgctggcaaccattccgccacagtgcattaa

SEQ ID NO: 435148 - DNA, 783 bp, Serratia marcescens
atgccccattcgtttatcccgccgctattgtccgccgatgaaccgcccgcagctgccgttgaaatcccgcgcggcaaagcgccctttttgctgctgtgcgatcacgccggcaaggcgataccgcagtcccttggcgatctcggtttgccgccgggggagattgaacgccacatcggctgggatatcggcgcgctgagcgtgtcgcgccatctgagccgccaactggacgccaccctgatccaccagcgttactcacggctggtgatcgactgcaaccgggcgcccggcatcgccagctcgatcccgcatttgtccgaactgacgccgatacccggcaatatcggcatcgacgccgagcacgcgctggcgcgcgagcgtgaggtgtttttgccgtatcaccacgccatcgacgatcatttggggcaacgtcagctgcgcgaactgccgacggcggtgatcgccatgcacagcttcacgccggtgttcaaaggggaatcgcgcccctggcaggtggggctgctgtttaatcgctacccggaatttgcgctgctgctggccgaactgctgcgcgaagagggggatttgcaggtggggatcaacgagccctatgcaatgaccgacgccaccgactacacgttgccggtgcatgcggaacggcgcggtttgccttatgtcggcatcgaaatccgccaggatctgatcgccgatgaacgcgggcagcaggcgtgggcgaaacgtttcgcacgcctgctgccgcaggcctggcagcgttggcaaatttga

SEQ ID NO: 435149 - DNA, 714 bp, Serratia marcescens
gtggagcacagcgataacggactgtttatcaaacgggagcgttttgaagttctggcgattctgcgtgaaatttgcaaacaacgcacgccgctgcgcgtagaaaatcagcagcaccggtttcaaagtctgttattgagcgtcgggccggacaatatcgtgtttagcggtgaggaagcggaaaacgccatcgacggcgcctgcaccatcgtgattgaaagccacgacgccaaaatcgagttttccgtcggccaggcggaattgaccgaacatcagggcgtccaggcctgctcgacccgactgccgcaggagttggtttacatccagcgccgccgtcagttccgcatcaccacgccgcactggcgccaattcttctgtaccggcgaatacccggacggcacgccgtacgagctgcggatccacgatctgtccgccggcggcgtcggtttgcgcttcgacggcccgctgccagatttcttccagccgggcctgcagttcaagaaagcggagttggatctgggcagctacggcagcttcaaggtcaatatggagctggtggtggtcaacgacgatcaggaaaccgacgataacgatcaggtggtgcacttctcgcgcctgtcgtgccgtttcctcaagctggggctggcgatggaacgcaaaattcagagcgcggtgttcgccttcgagctggatttcaacaaaaagaaaaaacgctga

SEQ ID NO: 435150 - DNA, 915 bp, Serratia marcescens
atgaccatgcatgaattcaaccgcgatgacggtttcaaccagcgcctgctgcaagaattttacgacagctacgatgaagagctggaaatggagctggacgacctgcgcttcgacgcggcagaagtcgacagcgacgcgaagaaagcctggcgcaaacaatacttccgcgaactgctgcgcctgcagggtgaactggtgaagctgcaggattgggtgatgcgcaccggccaccggctggtgatcctcttcgaaggccgcgacgccgccggcaagggcggcgtgatcaaacgcatcatccagcgtctcaacccgcgcacctgccgcgtggcggcgctgccggcgccgaacgaccgcgaacgcacccagtggtattttcagcgctatatcgcgcatctgcccgccgccggcgaaatggtgctgttcgaccgcagctggtataaccgcgccggcgtggaacgcgtgatgggcttttgcaacgacgaagagtacgaggagtttttccgcagcgtgccggaattcgaaaaaatgctgacgcgcagcggcatccaaatcgtcaaatactggttttcgatcaccgatgaggagcaggagctgcgtttcctcagccgcattcacgatccgctcaagcagtggaagctcagcccgatggatttggaaagccgccgccgctgggaagactacaccgaggccaaagaaatcatgttagcgcgcactaacattgccgaggcgccctggtgggtggttcagggcgtcgacaagaaaaaggcccgcttgaactgcatcacccacctgctgcagcaggtgccttatgaagaagccgaaagcaacgtcatcacgctgccgcagcgcaaacgcagcccggagtaccaccgtaacccggtgccggacaacatggtggtgccggaaatctactga

SEQ ID NO: 435151 - DNA, 378 bp, Serratia marcescens
atgagccatcgggataaacagtattttgattttatgcttggtgataatcgattattacgcgcatctttaatacctcgccatgacgggagctatagtccgcacctctcggaaattgtcgatatcccccatccggcagacgatattccgctgaccccggtcccctgtgaacaaggcagcggccagtacgaggccttcatgcaactgttaggggtggttctgtggaaaatttcaaagacagcaacacgactagagtctgtcatcatcagagcgggtgtagatgacgatggcgagaagacgctgctgaagatcacccatcattttgcccccggggtgatggtaagccgggggcgcgtcgctgacgtagtaagcccgtattga

SEQ ID NO: 435152 - DNA, 915 bp, Serratia marcescens
atgagaattttaattgcaggcgcaacgggggcaatcgggctgccaatgacaagggtgctctgcgcccttggacatcaagtcgcaggcttgacgcgtcaaggaaaaggtatcgcccaactccatgaactcggcgccgaagcgctgtgtgtggatgcgatggattcacatgcggtgcgcgaagctgtcgaaaagtttcagcctgatacgattatcgatcaactgacattgctgccggctaatcctgccgacattatccgctcgatccccgcggatacggctttacacaaagtggccggacatcatttacttgaagcggcgaaagcctgcggcatcagccgttatattcttcagtcccgtggcttttatcttgatgcggcggccggaaaactggccagtgaaagtgccgctctgcggatccaggcgccgggggtgatcggggaaagctgtaacgtattgtctgactatgaaaacgccgtcaggatgcttcccgggatcgcaggggtggtgctgcgttacggattcttctatggccctggcacctggtatcgaccagaaggcgccatcgccgaacaggctcgcaatggcgaaagcgtcatttttggcgaaggtaatgcagtctggtctttcgtgcatattgacgatgccattgccgccaccattgcggcgctgggatccgaacctggtacctataatattgtcgatgataatccgcttccggtgaatcagtggcttcctgagtttaaccgttgggtcggcgcgcctgaacctacgcggttgagtgccgcagacgcgctatcgctcgcgggtgaagaaggactctactatcacaccgccctgaccggagcgtccaacctggccgcgaaagaaaaactcggtttttcacctcgccctctgatctggcaccgccagtcctga

SEQ ID NO: 435153 - DNA, 1410 bp, Serratia marcescens
atgaacagacccactctggcgctgacgattgaccgtaacgcacggatatccatcgccgagcagatccgccaggggatcaccgaagccattgagagcggtgttcttgcgccaggcacaaggctcccttcatggattgaccttgccatacaattgggtatctctcgcggcacggttaagaccgcctatgaacggttatccgatgagcaacttgtcgtgatgtcccgctctcgtggaacctgcgtcgtggataatctaccgccgggcaggacggcgaaaaaggtgcctgaatccgtacccacttcagaattgtttcaggattttctctttcctacaggcgattttcagatggggatccctgccggcgatgtctttcccgtccccctcttctcacgcctttttgcggcgtcagcccgtcacgccgtgcagtccagacaatgctatggcgaccccagaggggaaagcgaattgcgccgcgaaatcgccggtcagctcaccctttccagaggaatcaaatgccatccttctcaagttttcgtgactgccggattcaccggaggacttggcctcatactgcacgcgctgtctttacgcgggcacaaagcctgggtggaaaatcctggctttccgccggcaagaaaagccttgagccttgcgggcctggccacggtacctgtgcgggtcgattccgaagggatggatatagaatatggcatccatcacgcgcctgacgcggcaatcgcgctggtcacccccgggcagcaagcgcccctggggatggcattatcattggaacggcgccaccgtttaattgagtgggcccaccaaaatggccgctggatcatcgaggatgactatctgggggagttgcagcttaatcgccgcgcggcgccagcgctggcgtcacaggatatgtatggtcgggttatccatattggatcattcagtaaaaccattagcccggctctacgcctggggtttgtcgtggcgccgccatcgcttgtcgagacggttgctgatgtcgccgcctcgctttcccccgctccgactcccgcgatccagatggcggtgcatgcctttttgagtgaggggcattttcttcggcatctgcgaaaaatgaaaagagtttaccatgccagaagtactgaactttcccgcataatgaaggcgttaggctacaccgttcaggtccatggtttatccgttttaatcaacctgccagacggctctcaggatcgcaccattgcgcattacgcctataactttggcctggcgccatccccgctttcagcctggtatcagtcagggggagcggaaaagtccggtctgttgcttggcgtatcaggcaaggaaggcgaatcactcctccatgcctgcgagcggctggatcgattgatccgtaaactcgcttaa

SEQ ID NO: 435154 - DNA, 456 bp, Serratia marcescens
atgagtcaacgcattgattatactaaaacttctccggcaggggttaaagcgctcggtggtgtttatgcctacgtcgcgcaatgtggcctggagaatacgctcgtggaactggttaatttgcgcgtcagccaaattaacggctgcgcttattgcctggatatgcacacacgcgatctcctgaagaaaggtctcagccccgtcaaacttgctttggtgcaagtttgggaggaagccggagaggtctttaccgcgcgtgaaaaggcggcgctgtcctgggccgagaccgtcacccgggtttctgaaacgcatgttccggatgaagcctttgcggcggcatctgccgttttcgaagataaggaactggcggatttgacgatggcgataggcttaatcaacgcctataaccgtctggctatcagtttccgcaatgtaccgcaggaagcgcaaaaaccctga

SEQ ID NO: 435155 - DNA, 546 bp, Serratia marcescens
atggcgttgaaccacaggggcaaggcgagacggttaaaccgaatttttcgcatgcgatccccaacattccgggtaaatcgcttactgccgtcgaagtcctttatcctgcgggcgctgcatcggcatctcatacgcatgctccttcttcatttatctacgcctatgtcgtggaaggcgagattatcagtcaggtcgaaggtcaacctgaacggacttatcgggcaggcgaaagctggtatgaagatcctggcgcgcaccatgttgtcagccgtaacgccagcaaaaccaaaccggcgaaactactggcggtatttgtcgtggacaccaaagatactcagctcaccacgccagacagtaagccgtaataaatgggcgtccgaattgattacacccggacgtcttccgctggcgtccaggcattcagcgctattgaccattacctctgtcattgcggtttggacgagcgactgcgcgatctcattaatttacgcgtcagccagattaacggctgcgcgtattgcactgatttgcatacgcgtatgttga

SEQ ID NO: 435156 - DNA, 285 bp, Serratia marcescens
atgaaagagggcgtcggcgctgagaaactggcggcgctccagggatgggtctgtaccgaaggcattttttctttaaaggagcgcgcggcgttagcctgggctgaatatatgacgctcattgccccttcatcaaaccggcgtgaacacgtgccagatttgcggcgctatttcagcgacgaagaggtatgtgaccttacgctggctatcagtctcatcaacgcctacaaccgcctggcgataagctttcgtaatatccctcaggcggttttggaacatcagacgtaa

SEQ ID NO: 435157 - DNA, 798 bp, Serratia marcescens
atgagcacatcatcaaatggcaccgccctggtgaccggcgcttcaagcggcatcggcgcactctatgccgacagactcgctaaacgcggctacgatctgatccttgtggcgcgcaatactgaccgtctggaacaggttgcccaacggatccgcgatactcatcatcgacaggtccgtattatcggcgcggacctcggtaacccgcaggaactacgccatgtggaagagctactgcgtaatgaaacgtcactgactatgctggtgaataatgccggttttggcgccgtaacgccgcttctggattcgaatgttgatgaaatggaagcgatgattaacctcaacgtcaccgcgctgatgcgtttaacttatgcggctgcaccggcaatgctcactcgcggaacgggaacaatcatcaatatcgcgtctatcgtcgcgattagcccggaaaccctgaatgggatttatggcgcaagcaaagcctttgtgctggcgttcagccactctctgcagcacgagctcggggataaagggattcgcgttcaggccgttttacccggcgcgacggcgaccgcgttctggaatgtgccaggcgtaggcggccatgaaaatctgccgcaatcctgggtcatgaaaagcgaggagatggtcgatgccgcgctggcaggtttagatgccggtgaaacggtgaccatcccgccattgcaggacggtgaagaatggaatgcctgggaggccgctcggcgtaccatgagccagcatctcagcactgcgcagccggccccgcgttatcgccgttaa

SEQ ID NO: 435158 - DNA, 936 bp, Serratia marcescens
atgcgcagagtcggttttatcctcacacccggttattcgccgatgggctttgcggttattaccgcgtttgaagtcgccaatatggtgttgccggaaccggtctatgacattcatttgctttcggaaaatggcggcgcgttacgcacatccgcgggcttcgatgtggtgacggaagcctttactgaaacgcattacgatgttttgctgtttggcgccagtatggaaaaggcgacacccgataccatcgcgttcgtgcgccgcgccgcgccattcgcccgtcgggtcgcagcagcgtgtattgggacatttttgcttgcggaagccggaatgctggacggacatcgcgccaccacgcactggatgtatgcccgggaactcaagcagcgctacccgaagatacaggttgaagaagaccggatatttgtctgcgatggtccgtactggacatcagcagggatgacagcggctatcgacctcgctctggcgttaatcgaaagtgatttgggccccgatatcacccggtctatagcgcgaaaactggtgctttaccatcgccgcacgggtgggcaatcgcagtactcgtcactactggagctggaaccgaaaaccgatcgcattcagaaggtgctgacctatgcgcgccgcaatctggaccgtcgtctaaatattgaagaactggccgacgtggcgaatctgtcgcctcgtcaattcagccgtatctttcaggcggaaaccggacagtcgccagcaagggccgttgagtatctgcggctggaatcggcgcgggcgatgttagaggagagcaacagttcgctggatgagatcgccaggcaaacaggatttatcgacagagaacgtatgcgacgcgcttttattcgtacgattgggcagccgccgcaagttattcgtcgtcaggtacgccatactgaaggctga

SEQ ID NO: 435159 - DNA, 378 bp, Serratia marcescens
atgtttgatcatgtgaaatttggcgtcagcgactttgccctcagcaaagcgtttttcctcaatgcgctggcgccactgggcgtaaaaatcgttgccgaaggcgaccccggctatggcattgagttgtgtcccgaacggggtaatgtgtcattatgcctgtttcagaccgatgaaaagccggcgcatctgcacctggcatttgccgcaagcagccgtgagcaggtcgatgcgttctaccacgccgcgctaaacgccggcggcaaagacaatggcgcgcccggtttgcggcccaattaccatgcccattactatgcggcatttgtgatcgccccggatggccacaatatcgaggcggtttgccacaacccgatggactaa

SEQ ID NO: 435160 - DNA, 1536 bp, Serratia marcescens
gtgataaaaattgtcgtgtatctgattatcgccgtgacgatcgccattattgcggcaagagtcatctttcgtttgccggatatttcgcagcgttcgccgcaggcggcgttgccggcggatcctaccgcgctattgccggcgcgggccgccgaacagatggcggcacatcccggcctgagcggcgtggtgccgctggtcagcggccacgatgcattcgccagccgcctggcgctggcgcggatggcggaaaggtctatcgatgcccagtactatatctggcataacgacacctccgggcagatcctgctgaaaaccttgtatgacgccgccaagcgcggcgtgcgcgtgcggctgctcttggatgataacggcgtcgccatggacgagaccctggcggcgctgaacgcccaggaaaacgtcgagatccgtctgttcaacccctcaaccgtgcgcacgccgaagttggccggctacgcctttgactttatgcgcatgaaccggcgcatgcataacaagtcttatatcgtcgacggcgctgtggcgatcatcggcggccgcaacatcggcgacgagtatttccaggtcggcgacgaaaactatttcctcgatctcgacgtgttgagcgtcggcaacgtggtggcggaaaccgccgaggtcttcgatcgctactggaacagcgcttcggtgtttggcgttgagcaaattatccgaggcaaaggcaatctttctgctttcctgacgcaggccaccgcgaccgaaagcagcgaccgggcccgcaaactggcggtgcagctggaaaccagtgcggtgcgttttcgcgatggcgccgtgcagccggaattcactcaggtcgagctggtggccgacgatccggcgaaagggttgggtagggcttcgcgcgatcgtttgatggtgacgcagctcagcaagatcatcggcggcgtcaaccagcaattggatctggtctccgcctatttcgtgccgggccgggaaggggcaagattttttgaatcgcttgccaaacaggggaagtccatccgcgtgctgaccaacgcgatgaacaccaccgacgtgctggtggtgcatgcgggctatgccaaataccgacgtgagctgctgcaggcgggcgtggagctgttcgagttgaaattgcgcgccggccaaccgacggggcgcaaggagcttaaaccgctagggttgtccggcgcggcgctgcacgcgaaaaccttcgccatcgacgataagcgggtgtttatcggttcgttcaatttcgatccgcgctcggcgcacctgaactgcgaaatgggattcttgatcgacagcccgacgttggcggccgacacccgtcaactgtttgatggcccgctcgagtatgccgcctatcggccgacattgacgcccaagggcaaaatggtgtggaacgaagccttcgaagacggccacaccgaggtgcatcaacaagagcccggcgccggctgggtaaaacgcatcgttctcaccgtggccggctggctgccgatcgagtggatgttgtaa

SEQ ID NO: 435161 - DNA, 129 bp, Serratia marcescens
atgcgcgaggtccgcttggaaaacgaaaaaatatcttacggtactatcaaaatcatgccagttgcgccgtattgcacaactggcacatctatcggcttgaatttattcccgcttaggcatgcttcttaa

SEQ ID NO: 435162 - DNA, 129 bp, Serratia marcescens
atgacgaacatccatttctgtcagcgcaacgccattcaacggcgaagcgccattgatatccctgacggtaccaaatacctgacaacctctggctttaaaagccaaggcggcagccccgccaatgcctga

SEQ ID NO: 435163 - DNA, 477 bp, Serratia marcescens
ttgagcggtttctctctggatccgctcagcgcaggattgatcgtcgcggcggtgatccacctggccggcatgatcgccacgctgattgtcggcaccgtttccgactatttcaatcgtgcatcggtgttgatgtttatgggcgccgcgggcgcgttgggatcgctgctgatggggtggtcggcgaactgggggccaggctggacgctgctgttcgtcagcatcggcagtttctttattctcggcgactccggcgtgctgtcggcggcgatggcggacaacgtgccgccgcaacagctcggtagcgtgatgggctggcgatcgttgctggggttcggcatcggttcgttcgccccgttatcctttggcgtcgtgatggataccacccagagctggggctcgtcttatgccgtgttggcctgcggcggcggggtagcctgcctggcggcagggttgctttggcgacaacacgtgaaatga

SEQ ID NO: 435164 - DNA, 2316 bp, Serratia marcescens
atggcgcccgccgccgcttcgtggcagctcgataacggtttggccgtcaaagcgataagcgatcctgccgccgacgccgccgccgcgctggtgcgcatcgaagcgggcagctttcaggcgcctgccgcctggcccggcctggcgcatctgctggagcatatgctgtttcgcggcagcgcgaacttcagcgcgcaagatgggctgatgggctggacccagacggccggtggccggttaaacgccaccacccaggccacgcaaaccgcgtttttctttgaggtgggcgccgcccatctggcggatgggttggcgcggctgagcgatatgctcgccgctccgcagctggcgactgaggcgattgcccaggagatcgaggtcatcgacgccgaataccgcctgctgcgcgccgatgttgaaacccgctgcgaagcggcgcagcggcagatgttcagcggatttgacgcgctgcatcgctttcatatcggcagccgcgccgctttcggcagcgatatttccgcgttgcagcaggcgttgcggcagtttcaccaccattattaccgcgcaccgaacatgacgctgtggctgcaaggcccacaatcgcttgagcagctgcatgcgctggcacagcgctacggtggcggcttgccgtcgggcagcgccgcgccgcccgagacattgccgccgctggccgccgggcaagattacacgctgtctcttcccggcgcgccgcagctgcggctggtgtttgccctgccgcactgccgttcacgcggctggctgcggcggcttgagcgtttattgctggacgacgcccctggcgggctgctggcacggctgcgcgcgcacgcgtggggcgacgccgttcggctggattatgcccgctgcggcgaaaacagcgccctgttgagttttattttcaccgtcaatcacggctcggcgtctgaggccgcccatatcgaaagcgccttgctggcatggctgcaggcgttgaacgcgctgacaccaggccagctcgagcatttcgggcaactggcgaaccgcgattttcaccgtctggcgccgctcgatcagctgcgggccagagcgtttgggctgccgccgacggaacagcatgacgactggacgcggcaactcgctatgctgatggcggcgccgcgccgccgcctggccgtgcagcccgaggggggcggtgaaacgcgcgaaatccaagggctgccgctgccccttggccccttcgccggcgccgcgctggcgcctacagcggaacctttccgctttttctccgcttcggcggcgctgccgatcccgcccttgccgcccggccaggcgccgctgcagcatctgcgttccggcgaggcgcagccggtgctgttgctgcgcccatcgtcacatggcgcactcagcgaagaacaggcctgtggcttgcaggcggcgctgcgtcctggcgcggcggagctggcgcatcgggagggacatttaagcgtcgaacgccaccagggcgtgtggctgctgcagctggcgggcagccacgggctgatctgccacggcctgaacgtcgtgaaccgggctctggctgcgcagccgccggccgtcatcaacgaggcggcgagaaacctgcgccacgcacagttaaaacaacaaaacgatatcgccattcgccgcctgttggcccaattaccggcggcgctgaacgtctctacggcaacggcgccacactggcatgccaccctggtcggcggcgatggcgagttaaaacggcggctgtcacatttgctgtatgacttcccctacgccataacggctgagccgcaaacgccgccgcgtttacatccccctgtcacgctgacggaaagcggcgccgaacacgccttgctgcagttttacccgctgcaaaacgatgaagccgaaggccgctgggcgctgcgcgtgctggcccggctttacgcgccgcgctattttcagcggctgcgcgtggaacgcaacgtgggctacgtggtgcaatgtgccttccaccgctgcacccatgccgaaggcctgctgttcgcgctgcaatccccgacgttcaccgctgaacagctgcggcagttaaacgacgaattcttgctgcagatgcatcatgagctgacgcacgttagcgttggtgagctggagcaaacgcaacaggcgctgcaacaaaacttgcaaggcctcagcgccgagccgttgcaacgcgcgcgggagattgcgttggaaaatcgcgcggccattgccgccgctgcgccgatcacgctgacgcaattgcgctattggcagcagcgtttgttttcctctgattga

SEQ ID NO: 435165 - DNA, 690 bp, Serratia marcescens
atgagaacaaagctgattactgatgcaaaagctagtttaaaaaaaattggtgtctcagtaaaagacacggatctttctctaattaatgtgttctcaagcgacgaatatgagctatacataaaaaagttatgggcaacaataaatagctttaaggttaaaaggattgtattccttgatgatgactattatgtggataacgtaagtgacaaaataaaaagtataaaaagagctgtgggtaaaaacggtttaatggaactgaagaaaaatgtaactgaaaaagaagatgttattgttaataatagaaactattttattgatatggttgaggttagtgatgatgtgagccttctaactgtggagggaatttataaagcaatatatagtggcggtggggtttatttattcttgcaggagagtttaatttgtgagagtgattcactgttagggttgataaaatcgtataatgatgagtgtgatatttcttgtaaattacactttggcgaaactctgacatcagagaggtatttcattcttacaggggtgaatgaacataataattctcacttattgagtggagttacaaggttgataggggaagaggttgataaattcattgaaaaaacttcccatcattacccaatggtatttgaaaagcagatattaaagtttgaaactcgctcgcagagatag

SEQ ID NO: 435166 - DNA, 393 bp, Serratia marcescens
atggcaaaagaactggatattggcgaggtggcgcttttgagcggtattgcgccctcggcgctgcggcattacgagaaaaaagggctgatcgcgtcgataggccgcaatggtttacgtcgccaatacgctgctggggtgctggatcaactgaagctgatcgccctcgggcggctggcgggatttacgctggacgagatcgcctcactgtttgacgagcggggacgcattgccctcgatcgccggctgctggcggcgcggattgaagaactggatcgcaccctgcggcgtctggggcaggtgcgcgccggtttgcagcacatggtcgattgccctgaaccggaacacctgcagtgcccgcagttcaggaagctgctgcagcagggagagttttaa

SEQ ID NO: 435167 - DNA, 2355 bp, Serratia marcescens
atgagcttactgaaacttcaatggggaaagaaggccgatgccaacaccttgacttatttagctaaacagcttgataaaagcgctgatagccaaagtgagtcaggtgccttcgccgacgcggccgctctcgatacctttggccgttcgctcgccagcgggacaccttccgtcgagcagtttaagctgctggccagcgcccgccacttcctgcgggctgacaacaacgaaaaaatctacgcttcgctgtatcacgaaaatctgagccaggacgtctccctggccgtgctacagaacgctggccacgatcgataccaaaccagcatcgcgtcattctacaaggggatgctcccactcgacggcgctcgtgagcctcattcgacgggtgtcgccgcctatcaactcaagatcgctcaaccgctgaattacacgcctatcgccgaattgtcgctctccgccgacggcatattgagcggctcagtgaacaccggcagtcagcatccgttgagtcctgaggaattggccgctctgacgcatgtctttcttaatgtgaatgcctcggccgccgttgatttcagccattcgccccagttgaaagaggtgaccttgcaagggagtgcgccaaccgataccaccgccctgaactcgctaaaaaataagggattcgctttgcggcttaatctggatgataacccttacttcaaaacggtagacaagattacatttggtaccgaacgggatgtcgtggtgatttccgataagttcgatctcgccaatgccaaaatggaaattctttttggcatcggtggtgccagtctgttttggagtggcaatggcgtgaatcatagcgccaatattgtcagcacgacgttcaccgcacagaactattttgatgcggatggcgttatttccgccaacctgatcttaaaggatatctatctgaccacaacggcaagcggcagtattgaaggaataatcaaaaccaatgttaaccagttccaattctttcctcagatcgatttggcaggttatcgcggtaccggaaacatttatctggatggcaaattgatcgcgacagaaggcgccaacgtattcgattatggcgtaatcaatcaaacggccagtatttataacgaccattatacagacgtcacccacttacagcaggcgccccatgctgtaaaaagtggtgacggttattactggacgggaagtcaagggcttacgctttccggtttcgccgataatgtacatatcatcaatcttcccgtcttcgacacgctgccttttctcaccatcaacggcgatgccggtgcgcagagcaagcttcacctggaactggcgccggttacgcctccctcgacgttatttggcccttggggggtaagcatcggaaatagcgccatcgaacgcctggacgcaggaacgctcagtttcgccagccatttcattggcgcacggccgcaagaagagctgcggctgtatgccaatggttcgaaactcgcctcggtggcgctggaaggcgccggcaacaatatttccaagatcaacatcagcggcataggaaagctggaagtgacggtaaaagctgactttagcgacagcttgaaacatattgttattgaacccattttcgatcccatgaatgaagggatcccgcgcgttgaaaccgatctgaagctggataaggccgggagcggcggcggcgagttttataaactgctatccgcgctgaacaacccgagcgcctatggcggtattatcggcgcactgaccggcgaacagatcaacatccagtacaccaatactcagaccctgactatcaaaggtaataccacgctgaataacctggcgatggccaatcaatacgcgcaccacaacaaaatcaactttgaacaaagcacgatcgacagcatggtcacgattaacactctcacgccgaccgacacgcttaccgttggtgttcagggtcaacagtggctgttcgacagcgaaaaatccggcaatatcgtgccttatggcagcctgacgcaaatggccgacatcaataccctgtttgattcattaaccgtcgcagacgacagcacggcgcaagatatatttgctcaggcgctatcaaaaataacccatggcggcagtgaaaataatctgcaaagcgtaggcgtgttcaagttggcaaccaatgcatacattatcattgataataatcacaataagcaatttgacgctgaggacattgtattctccttgggagataaagatatttatgagattgcagcaaaccttcattatcgggcgccgactattgatcttgccggcactcccaccccatccgtcacagagctaagtttggtctaa

SEQ ID NO: 435168 - DNA, 3105 bp, Serratia marcescens
atgagtttattatcgtcacaacaggatgtagccatccttttttatgccacactcggtaaaaaagccgatagcgccgcattaaacttctttgcccgccagttggaatcggggcagtacagcagagatcagctggccgaaaaattcatccagtctcaggatgggcatcatcgctatgacggcctgaccacgtcgcaaaaaattcaatacatctataaaaatacgacaggcgccgatccagcacccgatttgctggccacgctggtcgcgcaagccaatgcaggaaaaacgctggggctgattaccaaggatcttatcgccggcgtgaagagctatatgggtgatgctgcggcaccggtcgcacagcaacagcatttgtttgatattattgatacaaccttacaccccgctttgtccccctatcccgcgaatgctgaagcggcagccgatattcaagccctgttttacatcgtaggcagcctcgcggtggcggaaggcgtcaattattggagccaggtgctggcgacaggaaaagctgacgccagctatatcgccggccgtttcgtcgatacgcgtagcgcgttgaccacgttaagtaatgaagacttcgtcaaaaccgtctataaaaatactttcggcgttgatgctggcgcaagcgagctcgccaattatgtcaccgggttgaataatcacaccgaaacgcgaggcgacgtcatcatgcgtctgatcgccgatattcgcaacgacacagcacatgccgccgccaaacaggcttttcttaatgctacccatgtctacgctgcgggtgagatggctgcggccaactatcaggaaagcgtggcgctgctctttctgcaactggggaaaaaagccacgctggaatcaaccggactggacagttacagcaaattcctcgccgcggggaactccgagctcgatctgctgaccattctggctaaatcctcccccttcaaagatgctgcagacttcgccaggatttatcacgaactgtattacggcccggcgctgagcgaactgcaaaaacaggcaattttgctcaaagccggcaataatccgctgcaggcgacgctgaatattttgcatgcgttccgcaacggggaagcgccgctggagggcggagtcagcccaagtcacgagcaactcgtcaatctcgaatacaaaattggcagcgagctgggataccagatccgcggcaacgtcacgatgtcgaatgccgacggcgccctcaacggcagcctgaataccggtaagcaacacgcgttaagccatgcggaaatcagccagctgcgcgagatcacccttaacgccgagatcggctccgcggtcgatctcagctttgccaaatcgttgcaaaaagtcacgctacagggcgacttcgccaccagtgaagcaatgcttcaatcgctgagaaacctgaatgtcaccctttttcttagcgagggcaacctgctgaacgcccccgaagggattaacttttccaacgtgaagaacagcaccgtcgtcgccgaccggctcgatatgacgacggcagccgcgcaaatcaatctggccgccgggaagcatcagcttgtctggcaaggcaatgccaccgccgacagcggcaatagggtcagccgtgatttcaaagcgacggcgcttaatagcgatcccgagacatcttactatagtgtctcagccaattttttcaccaaggtcgtccacctgacggccagcgtcggcggcggctatgacgctgaaattacaaataacgttaatcagttcctatatttcaactatgtagatttgacccactatcgcggtaccggagagatttatcttaacgggcagcgggtcgctaccgaaggcaacaaggtatttgactttgggttgttcacgcaagaagccaccgtctcccacccgatttacggtaacatcaactcgctaaaacaaggcgaaatggcgcaacccaatgcttcgcaaaacgctacggggtcggctggaggggtaattacggcctactccggagatttaacgctgctcaacgtcagcagcggacagtttaccctcggcggcgacttgaccgcgaaaagccgtatccacatcagcgatacggcgcatagcgacgacagttttaaattgttctttaccgatacggctagccatacggtaaccaacctcaatatgggtactttcagctttacatcgaaccataaagaaacgctcgaaatccgtatgggcagcaatctcgacattgtgcaaaatcgcacgttgaccctgagcggcggggacaactcgattagcacgttgatgctgagcggctatatgtacacaggcgataagccgctggtgcttaatctgaccgttgccgcagattttagtgataacctgaaaaccatcataggcagcgaatttaccgatgaacgccgttattactccgacatgaagctgttcctcgtcgcagaaaaaggcggcaccggcggcggcgctttctacaacacgctaaacacgctggccaataaagacgatttcgcccatgtcattgccgaacttgccggcgaccagttaacggtcgaccgcaccggattgaccgtctataaagccgacgttaagggcaacacgacgttggatagcgccggtacgttacattttaccgatagcaaaatagacaatatggtcacgctcaataccggctatgccaacagcgtcatctccgtgggagaaaccgacaacccgtgggttttctccaagacaggagacaagaccgcaaccttgtacggcagcgccaccacccaagctgagttacaaaatgcgttcagtggcctgaatgcgacggacaatgcccaagcgctgttctcacaggtactggcgaaaataacgaacggcgccagcaccaataacctggcggaagtcggattgctaaagttggacaaatcgctctatgtcatcgtggatagcaatcataatcacagctttgacgccgatgatgtggtgttctcgatcggcaatcaggatccctatctggctgccgtctctctgcactaccactcgcccgccgtcaccgtgaacggtgttgcggccgaaaactcgctgccggaggcgtttgcctaa

SEQ ID NO: 435169 - DNA, 198 bp, Serratia marcescens
atgcagaacatgaaccggttacttgcggtcctcgtcgtggcatgcgcggtattggcgatgctgcatgggctgatgcattttggcgtgcgttcggcgccgcgggcgattgcggtcaacgaagcgccgttgggatgtgaggatgaacctgagctcgccggcgagtgcaacggcaatgatgaaacgccggccgacggttaa

SEQ ID NO: 435170 - DNA, 783 bp, Serratia marcescens
atgccacccgtttcaaaactaaaaatgctgcgaacacggccctatccaaggctccgccgactcatattcgtttctcttattctcagcgtgtctttgatcctctgcgcttgcgcaaccgcacctgcatcagaccgtttgtcaggaacccagcatgttccaacaaaatggcgggcctccctgcctgactcggcacacgtgcctgtgtggaatgcatggccctccgcccgaaatgaatcaggcgcccggcgcttgcgcgctccggctggcaagcccagtcacgaggagaatgagcgcggagcaaaaacgccggttgcgcgtgcaaatttggagtgcgttcaggcgttatggaatgacgctcgcaaactggttgcggcagaggctgcggccctctattacgcatcacgcacctgccggcgacaacacgcgttctctctccaaagcgcgccattgcctgaatcccccgaacgggcgagacaaacgcccccgcgtcgaacgtcctcccctctgcgtggggacgtcgccgagcgcggcaagaccgctgccgatggaaacgggagcaaccgccacaccaccaggaattccgtttccttgatgttggatttatcgcgcgtggataccgaacccggcgaaagcgcagcggattggcgggctgaaccgcatgagcatcataaccgcgtgcgatcgaccgtgcggaagtggatacggcgtttgttcacttcgtcagagcgaacagtgctccaacgccaggctgaaccgcagcagaacagcaccggattcgtttga

SEQ ID NO: 435171 - DNA, 567 bp, Serratia marcescens
atgggaaataaacgaaaggatacggccattgggggcgtaattattttattagcaataataggcttcctgtttcactcatcggaaagaaaacaatctgccgtaacagccccctattcaaccgccacttctgatacaagtcgccaaacgcagtcggtagccgctgtttatccggcacaggttaacgaagactcatccatcaagaaatttgtcaacaccgataaacttaacgtacgcgcatcgcccaatggaaaagtcataggttcagtcaaccgtggcgaacgaataaccgtctatcaggaaaaggctaattggatcaggatatcgcagaaaaaagaaaaaccacggtgggtatcagcaaaatccctttgcgattatgctgagtgttatataaaacctacaataaaaagttcggttaaggcaccaaccaaaccgactcccccagtaagaaaagcgcctcaaagttcatccattggctcttgcccctgctcttctgggaacatttgtattggtcccagaggcggcagatactgtatcacttccggcggtaataaaaggtatggcgtttag

SEQ ID NO: 435172 - DNA, 222 bp, Serratia marcescens
atgtacgttaagcgcaacattttagcgtcaacgttcatcccacaccggctgttaagtcagcgggagtttagccgctatgcgctggattatctggtgttcggtaacgcctatttagaagagcgccaaaatcggctcggggcgccgctgcaaccgaaatcctccccggccaagtacacacaacgcggtgtggatcgaggcgcttactggtttgtgcaggactag

SEQ ID NO: 435173 - DNA, 2124 bp, Serratia marcescens
atgggtaaatatcacaatgatcaaccgatacacggtgggtcagatgatcctgatttattaaatagactgggctttgcaaatcatctagcaaatatactattactaaattgcgatgatgattgtcttactgtatctctggaaggggagtggggatatggaaaaacatcagtaataaatcttgttaaaggtgctttaaatgaaaaggaatacttgccaatcattattgagtacaatccttggttagctggtaatcccgagtcattaatacaagatttcttaatgcaattctcttcacaacttaatattaaagacaaatctgatgcggcacttgagacttctagggaaatgattgcatactctagtctctttagtgtagcaaagcttgttccaggtgcggaaccgtgggcatcaataatagaaaaaacgttgtctagatttgggcgtgctactaaaaatattgctgaactaaaaaagcttgaccttttgggtaggaaggaaagggttgagattgcaataaggaagataaaaaacccgattgtaataattattgatgatattgataggttgactccatccgaaacatttcagattttgcgccttgtaaaagccgtcgctgattttcctggtacttcgtttcttttagcctttgactctaattatcttgtctctgtattagataaaaatggcattgttaatacttccgagtacttaaataagatagttcaactacgggtgcccttgcctataatttctgaaagagggatgagagatcttgcaaatgctgaactagagaatctgagcgataagttattaacggaaaggtttgaaagtgatcaagaaaggttaagctggatttatcacaactatttcaaacatcttatcagaaaccctagggagttaaaaagattttttaaccacctaaggtttgtgttggaacaagtggaagggcaagtatgtttcgcagatctttttgctttgtcgttaatctccactaagtcgaatgtggtatatgaacatataaaaaatacgccagaagcgtacatcggtaagaggatttcaaatgacggacttatgacagagaaacctgattcgatagtgaaatcatttagtgatgagcgatccaaaaagttagatgattttagcgaaaaagagcgtaagttaataaatggtcttcttggggagattttcccacttctggcaaccggaggctattcgcattatggtgtttccgatgccgattctgctggtcgagtgtcagcaccacaaaggttacatgttgcatttcattataaaacccctgcagggtatttttctgatcaggagattattgattttataaatggagatgttgacagggatgattttcttattagagtagcttccgaagatgctgatgaaagattcttcgaaatgatgacgaattatgcaggcatgtgcaaagataaaagctttgatgtgttaacctgtatttatgatgcattccttttttctgataagttaatattatctttgcggggtaattttggatttttatccaaagatctatatagaaaaatgaactggctcacaaataaaataatatcagaaagtaataataagtatgagttaattagagggataattggtcgtgaagaaaatgcgcctttggctgccgatgttttatataaagttcggagtcaactgaaaggggatgattatgataagccatgggtttcagaggagcagttgactggacttgaaattctctatcaagagatggctgtcaaagcaattagcggcaagatgtatattaaaaactatcttgagtcacatatatttttcgagttaaagagatcttccaaagagaggacggctgagtttatggactcagtgttgcgtggtaaggatggcatggttagagttgccgagataattagtgagtctggtagcgattctagcaatggtccatttgttcaaattgaccacgatacttttggtgatgtaattgacttgggtagtcttagacaaatggtaaagagtgtggatatttcaacttatcctattcatattcaagctgtgtttaaaagcatctgcgatggaaagaaatattatttgagagatggtacacctggcgagcgatggtag

SEQ ID NO: 435174 - DNA, 1116 bp, Serratia marcescens
atgagtaaaattagtagaaatgcagaatgttggtgcggttccagaaagaaatataaacgatgccactataatcgcgataaacaaactcctttttcgcgcggtgatgcccaaagtctacttaccttattttcaaatgtgagcagatgtagcgtacccgatagaatcaaacatgaatgtcagacaagaatagttaaagctcatactttatcgaagggcaatagtttaaacgccatagctcatgcggggcatgttctaggcataaagcatggtttaagcagtttagagagaaacaatggacggataactttagagaagataggtgtcaatcaggcatctactttcactggtttttgttcttatcatgataaggaacttttttcttgtgtagaagatgaaccatttaaagtcactaagaagcaatgcactatgcttgcatatagaccacttatgagagaagtttacgttaaagaagccaactataaagcaatggaactgacaagagagtttgatagaggcatgtcatttcctgaacagttagcatgggctaaaatggctaatattaatatcaatggcgcaaaactgagcttatctgatttaaatcacataagaaatcgagtggaaaaatctattgaagactattctttcgatgttctcaatcattttattttatatttagaacaggtaccaaacattatggcatgcggaattcacgcacctatagccgatatatttggcaatgaattacaacaaattacaccttcagaagacaaaagacctgcgtatatggctgtcaatattttggcactagacaaaaatggttatatgatattctcatggctacctgaggatagtgaaattataaataaatttataagcaccatcaaaatgtgtagctttgatttgctcggcgacaagctaacaaattacacattcacatttttcgaaaatgttttcgtttctgagccatggtgggaatcattaggcgaaacaaaagagcacataaataaactcataatgcaaggtgttattatgcatgtttatgacctttccatgattgaaaatgacaaccatcaatacaatgctattaatgtcaaccattttgtcgagctgaattaa

SEQ ID NO: 435175 - DNA, 330 bp, Serratia marcescens
atggaagcgttatctccaaaacaaaaggaaatacggcaattgcagcacgatctgctgcaaacactattcgcgcagtcgccccgtcaatgtcccgacaccgggctgccacctcagcatctgtggttgtctacccggcaactggccaacgccgtcaacgtcggtgtttaccgcgcccggctactgctgttggaactcgtcgccaaacaagaagtgctcgtaacggacggctccatcaacaactcgttgaggtggtaccccaccgccctactgccagctggcaacaaggaaataccaggaatagatgcgccttattctcgtttaacggaataa

SEQ ID NO: 435176 - DNA, 846 bp, Serratia marcescens
atgacgccggtcgacgtcagggtaaagataggccctgaattgtccatcgggaaaaatgaaatcgtcaacgtcagccaggtgacctgtaaaaacgacgtcgccagctggaaagatattttactcaccggcagcccggcgttgacgatgaacaccgccattttcggtacgcttgccaacggcatgacaatcaacggcaccgactacttatccccgatccaatcaggtatccaggtgatgacgattaccggcctaaacagtgccagcatttccatcagggtttacatcgtgctcaaccgttcgccgacgcaggatatcaaggtgaacaagggcgacgtcatcggccaaatcaactttgaacaaaaaaatgaccagtcaggttgcccaaagtgtgggccttaccggtggcgcctgatcgccgacaacgacgcctacttcgtcaccaccagttgcactatcaacaacggccagcagattaacgtcgactttgggcagatccgccaggacttcctcacgcagagcgccagcgacgcccaactcaaacaggacaaggcgctcagctaccggtgtgacgatcagagcgcgacacaagacattttggttcgcatggtcagcgatgccagcggcttctccagcgatttcatcaagacctccaatcctaatgtcggcgtagccatggtgcacaatggcgcggtggtgaaacccaacaatacgttcagaacgcgcatcgtcaacgggctgggcaacgacaccgtcacctttgtgccagtgaagaacaatgtgccttacaccagtatcgccaccggtccgatgtcaggctcggccacgctgatcttcagcgcaccttga

SEQ ID NO: 435177 - DNA, 432 bp, Serratia marcescens
atgctgcagccgtccatctggatagacgattttaggaatggccaatccaaggttctccaattgactgaatcggaagagtttatctacctctcccttctcaaaggcgatatctggattgcaaatcaaaaaataatcagcgagattcttaaatttttcaaaaacagcattatggccagcaccaaaccccgcattatctttcattcgaatgatctcgagctttggctcattaaaatttataagccaatcacaataactgccattgtcaacgatgaccagtttagaaatactttcctctgccagaagagaatccaatgtcttctgaacagatttatattcatgtcggtacaatacaagagatgcaattattttcacttaacataccaaggtttaaaatacagccagggggaaaataaacttcctgaagagttctag

SEQ ID NO: 435178 - DNA, 1206 bp, Serratia marcescens
ttgaggtcaacattcatcccttatttcccaaaagaaatatgggttatctttatcgggacgtttttgacgcgcgcctgctttttcatgatttggccattcattaccattctcatgagaaataactacgcgatgactccggtggaaatcggcgtcatgatgagcgtatcacttatcgtgtctatttctttcggctatctcttcggtggcgcttcagacaaatatggccgtcgcacgttgattattctcggtgcaattgccgctatcatttcatttagcgtacttgcgttggccaactcaccggcgtggtattttgtcggcattttactcaatggcatttcgcgctcattgatcgaacccgccagcaaagcggtgatcggcgatattctccatgacaggcaagagcgagaacgcgcgttgaacatccgctacttcctgatgaacgtgggcgcagccgtaggcccattagtgggtgtcgctctcgggctgacggcgcagaaggccaccttcttcgtcaccgcattgtcgttcctttgctatttgctgctggtgctcgcggtattcaaagcggggcacggtaaagaaacgcgcaacgccaccttctcgttcattggctctttgcggattatctggaacgatcaggcgttcaaggttttggttgtcgccaacattttggtgatgctggtctacgggcagatcgacgtgacgctgccgcaatacctcatgatcagccaggtgcacaaccccgaatacctgctcagcgtgctgatattcatcaatgcagccacggtgataacgctgcagtatttcaccgagcgctttacccgtcgcatgtcattggcactgaaaaccagcctgggcgtgttctttctcgcgctttcacaaattgtcttcctgctggtttccagtgaaagctgggggctgtggttggtcgccatgttcctgctcagcctcggcgaagtcatcctgttccctacgctcaatatacaaattgatcgtatggcgccggctaacctaaaaggggcttacttcggtgccgccacgttttacgaatttggcctggcgctcgccccttttgtcggcggtttgctgttaaaacaaggtggcggtggcgccctgtatgccgtgatgttctttttatgcatcggcgtcatcgttctttatactatttcagaaagaatatctgagaaaagaacgataactgtgtga

SEQ ID NO: 435179 - DNA, 2232 bp, Serratia marcescens
atgacgaccgatcaaaccagacagactttccgcgatctctacatgccgttacgccctgagtatcgttttctttcgccactgtacggggtgctctggtgcaacaacgaactcgcggaaaagtattaccgttttcttggcgccgatcacccgatcggccaggtagcgcgcgcgttgttctaccgtactgacctggtcgagtttgacgtaagcaaagaggtgaagaacccgttcacctggttttccccctctacccttgcacggctggtggctttcatgagcagccagcgtttcaccgacaatgatatcgcctcgttatatcagcatgtacgagatgaaacggactttcacgctgccattgagcagcaacatcggctttctgtgcaaatacgccggctttgcgacagcgtgctgcaacagttcgaggatacaaaagcgcagatcgcggccgcagaacgcgaagcgctctccctcggcgcccatgtgaaagcgcaagaaaaagcgctgaaccagatcctgcaacaggcggaaaatgccgccaaagcgcagccgtcacggatcccgccactgcgaaccgcgatcgccgcgctaaaagccggtaaaaaagcgctgggcaagagcgctgcggaaaataaagaggcgcaactgttggcgctcaatgccgaaatcgccgaactggaagcacgcgtgaatgcggcgcagcaagaagccgtgcatcaagccggcctgctccccgactggcaaaacgcgcaggccgccgtcgaacatgcccgccggcaaaaagatgaagccaccttgcgcgccagcatgctggcggaaagttttaccgaaagcaccgtcgcacggctgcaaactgagggattcagcgccgacttcattgcattgcatctgcctttcaacaagtatcaccgctatctgccgcgacgtgtgcaggattacgtcggtatccactgtgcagatcgcgacagcttgctggccgagttgaacaatttatgtcgtttactgatcgcggccagccgcaccgccgggcacgacagagaggtgtttcatttgctcaacgcggcgctgtggctgaaatgcaagggtaacttcggcaagttgaccgcctacatgcagcaactgcgggagctgagcggggagctgttcggcgaaacggcgacgggcgagacgcacttccccgatcgctgccatgactactacgatcgcgaagtgtacggccgctattttccgccgctgtgcatcaccaaaacctgccgccccgcgccggattctgacgtctcgttctcagattgcggggagagttcgctgcgcaacttcatcaatgtcctggtgaaaaaccaagcaagcgcgcagcttgacgccggaatactcaaacgcagcggcctggctgtcgatccgcgcgtcatcgcgttctatgaaaaaaaccctcgtttggaaacgatcagaagccaggaagtacataaccagtgggctgaaattgcctcatcgctcaatgcgcgcgacagccgaatcaaatacctgacgccaggcaaagacgcctattgcgagttggccgccggcggcaacaacatgcagcatatgctgcaagcgctattgggcgaagctgatatcgccaccatttgccgccgaatcgcctcctcttccggcatcgatattcgttgcgatctcagcgacttccacccggaacgacatgatctggaagacttcaccaacgttgttcgccttgaattcgacggcaaatatgtctttcactggtatttcctcaaacagcatttccgctgcgcttcggcagatctgttcaacgaagaggaaaattatgtacgccaggcactcgccatgctgaatgacgagatgaaacagggccgtctgaatcgcgaccagttccgcgcactgctcagtttccatctgaaagagaaacccgtggcgcaagtcaaaatgatattcgacagccttggcgctaccctcgtcggagatgaaatgacgttcttgatgttgggtaaattgaactccgtcgattccatgtttgaatactgcatgaacgttctggcgattccaacgctggcgcatagcgcgccagtctcggcgactgtcgccgcgattattcaaggcatcagcccgcatccggttatcttcgatcagcggaaaaatctcatcgcgaggattagagaggccggagtgacgccgttactcactctggctaaccgatgggaaaaggaaagtttggaaaaggtgtaa

SEQ ID NO: 435180 - DNA, 954 bp, Serratia marcescens
atgaaaattgttttattgggattcggcggcattgggcaagagacgctaaacgcgctgttaagtacgactgagcgacgtggcagcgtcaaagaagtcgtgatcatctgccgaaataccgaaaagtattcagccgtttgcgaagatattcttgatggcctgctggcggaagcgctcttctcacgccataaccgaacgtctttacccaagattgttgtgacggatgactaccgccacatcgagggggctggcgtgatcctctgttgctatggcgtgccttcaacctttccgatgcatgaccgccaggcgttgctggacgatcacgtacggctcagcgaggccatttttagccgagccaaacccttcattgctcccggctgtcacatcatcaatgcggtcaatccggtggatagcatcagctattacatcgataaaatcctgctcgactctcgctgccgggtgataggtatcggcgccgcgcacaataccgccaggctgctgaaaagcatctgccgcatttccgggatcgacatgcagcgcatcgacgcgcgtagcctgacagtctgcggcgagcacggcgccgggttggtgcccttgctcagccagataacaaccgacgagggaccgttgaaccaggtactttcggcacaggcgctggcgcaaatcgtcaccgatacccgcaatcaagggttggacatatttcacaaaatgcggcgccctcctaaatatggcccgtccgcctccattcttatcttgcttgagcgcatcatccaacgggacgaaaccccctgctgcggttcggtctggctgccggaactgggcgtgttcatgtcctggccgctggctctgcgcgacgacgtctttacgccgctgttgctgatgcccaatcaggatgaacaacaacaaatccaccaggcggcgctcaagttaaaaaacatcatccaaggttttagctga

SEQ ID NO: 435181 - DNA, 1068 bp, Serratia marcescens
atgagccatgtaactgaatacgaccgtaagcccgtgttttcccagtaccaccgtgctgacatggaaaccataaaaagcattaaggaaaacgggattgagaagcttttgggcgaagtgaagaatttccgcgccaatgaggaaatgaaccgctttattcccgaacaggcacgcctggcagtaagctgggtgcgtctggcgaaaaacgaaaagctggatgtgcatgttcatccaatatcttcgctgtatatcatttgtgaaggggaagcgatcctgctgggagacggcgttgaccgccgggccgttccaggcgatgtcatctgcattccgccaggcgcggatcacggcttcatcggcgcgggcgacaacggctactgggggctgtcaatccagtttgaggagcgcgggctctatgaagatccaagcaagccgctggtgactttcgatcaagatccctacgcttactaccatcagcttaaagcgcataacgcccgctacatcgagcgctaccaggacaacaagatctttaccgcattcgccaaggataagacgttctccgaggcgaaaaaatccttgttcctggactacctgcagatcctgtccgatcagttccaaaaaatggtgctgctgcgtagcgcactgtgtgaagacgttcgcttctcacgtttcttcagtgagcatctgaaagaagaattcggccatgacgaggtgctgcgcaacagccgcgataacctccaagttcgcgaagacgcgatctttgaagcactgtgcatctggttcaaccaccagatgatcacgctggataatctggaacaggctatcctggtgcactttgtcatcgaaggttcggctttcgttttctataacaacatcaaacacgtgttcgatccgagcaaacagaaccatttcgaggatcactccgaattcgatggcgatcatcaggaagtggataaagcgttcttcaaggggatgaccgaagaacaattccagcgtgtcaaagccgtactcgataaagggtggagtatggttgagaagcagtatgcaagactggccgaactgatcgaagcataa

SEQ ID NO: 435182 - DNA, 234 bp, Serratia marcescens
atgctgacgctgtgcctgcgcaatatggaacgagatgggttagtcaagcggacagttattgccgtcatgccgccgcacgtcgaatatgaattgacgccgctcggttgctcattgaccgtacccgtcatcgcgctgggaacttgggcgaatgaacatattgccgatattgatgcggcgagaaccgcattcgacgcgcaaaatagcgaggccggtgaggatgttaattcacgctag

SEQ ID NO: 435183 - DNA, 369 bp, Serratia marcescens
atgaaaaagacactaagcctgttcgcgttgttgctgctgagcggctgcggcgccggggccggccatcagaccggcaccccgttgccgcaggccccggcactggccgcaacgcagctcagttacccggagcgggtgcataacgcggtgagccgcgagctgcgctcgccggagcgcgcgcgcggccaacgctgcaccatcagcatacggctgcggccggacggcaagctggcgagcagcaagatcgtgaggggcgatgcgcccctgtgcgcggcggccagcgctgcggtgcagcgcgcgcagtttccgccgatgaccaacgccaccgagtacgcgctgttcaacgccgtggtgctcgatttcgttccctaa

SEQ ID NO: 435184 - DNA, 288 bp, Serratia marcescens
atgccttcgcagctaatctaccaagacaggatacctctggcacctgcagcatttgcgcagctcgtcatttggcgggtggtgccgcccgtcagggccagcggccactgttataaataccgatttgcttatgtaaaagacggcatttgtcgactgcgctatgacaatgaagcgggtaaaggcgatcacaaacatatcgatggaaaagaagagccgcttaatttcacgaccattgatgccttgctcgacagtttctggcgcgaggttatgcagcttacagaggagtcatga

SEQ ID NO: 435185 - DNA, 348 bp, Serratia marcescens
atgaacacagtcactattcgggtcgcttcagtcgaagaaatgaaacttgcactgaaggaagccacaacaggtcatcaaagcgctcaagggcaatacatcacattcctggattgggagagtctgtggaaaaccttatcacccaagaaaatgcatatcttgcataccatgaccggcgccggcgaactttccattcgggaaatcgcgcgccgagtgaagcgtgatgtgaaagcggtgcataccgatctgcagtcgctgttaggctgtggcatcgtcgatagaggtgaacaaggcgtgattttcccctatgacgaaatccattttgacttcgtcgtaggcaaagccgcctaa

SEQ ID NO: 435186 - DNA, 756 bp, Serratia marcescens
gtggcgtggattcccacggtgacggcatgtccgctgcagcaggcttttatcccgttgctggaggcgctgacggaggggctgccgcgccaattcccggcgctcatccacagcatttacctctacggcagcgtcgcgcgcggcgaagcccttcccggcgtgtccgatctggacatcacgctgttgctcatcaagccggccgatagcggggcgttgcagcgccttgaggcgtggcggcaagcctttcagctggagcagcggatcgtgagcaaggtcgacgttgacatcggcaacgttgatgaagcgttggcaccggagcatcatgattcctggggattttggctgaagcatcactgccgatgcctgtggggcgaagacctgtccgccgcttttccgctgtttcggcccgatcggcgcatcgcgctggcggtcaatgccgatttacggcccgtgttggcgcgttatcgggagcaactgctgcaggcaaggacggtatcggatgaaaggcgcttaaagcgcgaagcggccagaaagctgatccgcgccaccaatatgttgcgcgccgagggaagcccgttctggccgataacgctaaccgactatgccgaacagctgttggcgctttatgcagagcagcgcgatgaaatgaactattggttagcgcacgcggcaggggaggcgaatgacgcggattttagcgacagaatgatgcgatttcttgactggatcgaagctcagaaaaaaataacgccggcttga

SEQ ID NO: 435187 - DNA, 717 bp, Serratia marcescens
atggacattcagaatcaacccgtgcagatcatgattgttgaagatgagcccaagctgggccagctgctggtggattatctccaggcggcgggctacgccacccgctggctgaccaacggcaatgaggtggtgccgaccgtgcaccagcatccgccggcgctgatcttgctcgacctgatgttgccgggggccgacggcctgacggtgtgccgcgagctgcgccgcttcagcgacgtgcccatcgtgatggtgacggcgaaaatcgaagagattgaccgcctgttgggattggagatcggcgccgacgattacatctgcaaaccctacagcccgcgcgaagtggtggcgcgggtgaaaaccatcctgcgccgcagctatcggccgcaggagaacgcgcgggaagatgacctgctgcacatcgatgaaccgcgcttccaggccagctatcaggggcagttattggatctgacgccggcggagttccgcctgctgaaaacgctggccagccagccgggcaacgtgttttcacgcgagcagctgctgaacaacctgtacgacgactaccgggtggtcaccgaccgcaccatcgacagccacatcaaaaacctgcgccgaaaactggaactgatcgacggggaaaaatccttcatccgctcggtatatggcgtgggctaccgctgggaagccgagccctgccggctgatgaatggggtttag

SEQ ID NO: 435188 - DNA, 162 bp, Serratia marcescens
atggaaataggcgtgatggaaaaaaataggcgcacccataaagaaaaagccagcccaagggagattgggccggctaaggaggtggttcctagtattgctatgcaaatattttcgttgttcgttttaagcagcgtgatagtaaccaagctgcgcgcacattga

SEQ ID NO: 435189 - DNA, 207 bp, Serratia marcescens
atgaccaaaaatgaaacaaaagagagatgcagagagctctatctagcttgggaaggtcgtcaagaaaaagggcctgcaaagggattactgttccaagcgcatatacgtaaacagaatgatttttcctcttatacttatggtgttgccagcatgcatcaggtcgtgcaaggttgggtagaggaatgggaacaattatacggtcagtag

SEQ ID NO: 435190 - DNA, 330 bp, Serratia marcescens
atgtcagaagaacagcaagaaaacgaggttgatgtttatcagagccgccgctttgagaaagctcttgataaactgcctgaagcgttgcaagaaatcgttgaagatgaaatcgatgcgataattgcaaatcctgagattggtgaattaaagaagggagatttatcattccttcgtgtccacaaatttcagcttaacaatcgcttaacccttctgggttacagttgggtggaagataaattggagctctacctacttagtgtggggtctcatgaaaacttctaccaagaccaaaagacccaccgaaaagctgatttgaagctaatcgggtga

SEQ ID NO: 435191 - DNA, 237 bp, Serratia marcescens
atggcaaccagcatccgcttagacgatgactttgtaagcgatgttaaggtttacgctgacgcctccagcaggagcataccgaagcagattgagcactgggctagaatcggccgtatagccgaagataaccctgatttgccattcagtttcatcagcgaagccttgcttgcacaaagtgaaatcaagaacaacaaggtaactcgctatgtcagaagaacagcaagaaaacgaggttga

SEQ ID NO: 435192 - DNA, 270 bp, Serratia marcescens
atgccgcgcactgtaacacagatgcagtatatccccaaaaatgatgagctcttggctggagagatgctgattactactggtgatgccgaggaggagtgcgaattctggttatttttgctgcataggattgctttttgcgacaaagtgtcgcattatcttcagcgggcctcaggacgaaaacccgaaaacccgaaaacccgaaaacccgaaaacccgaaaacccgaaaacctgaacccgaggatataaaatggcaaccagcatccgcttag

SEQ ID NO: 435193 - DNA, 615 bp, Serratia marcescens
gtgccgccgtcggcatcgtgctcggcgtgctgctggcccggcgttaacacccctgcagtcataaagataaaacagatgtgcgtctggcccgcggaaatcgcgggccgtttaatttgcgcgaaacagctgcgccagcccctgtaccgcccgctccgcctcctctcgccggctgaaattggcgccccccgacagtcacccccgccccgccggatggtcgatgcgctaatcagagagcgcctgcgtcaaccactcgcaccgctggcgatacagcggccgcatgcgtttcaggtggcgatagaaatgcccttgccggataaaatccgccacgcttgcctgcagcaacggcagcaatggccgcccgtgatagcgaaactcgctgtcgtagtcatcctcgaggatccaggctccgcgctggaatgggccgagtcggtgacgctgatcgccgctctgactttcgaacgccttcaatcgtctggccgtcagcatgcgtcagaatgcgctcgactccccctcttcactgagagaggagaatttctcacccgaaaaaatttttccctcgccttttccagccccgacgcggtctacgtacctaaccccacaaaacaccatatatag

SEQ ID NO: 435194 - DNA, 930 bp, Serratia marcescens
atgttccccagtaaaaaacattcgcagcgggcaaccccgctgaccagctatcaattttcccggctgcatactttcgaatgcgtcgcccgtcatttatcttttgcgctggcggcgcaagaattgtcgatcacccccagcgccgtgagccaccgcattaatttgctcgaaaaggaattgggttttctgctattccaacgctttcatcgacgaattacgctgacgccggagggcgagcgcatgcaatgggcgctggacagttccttcaacaccttgaatcaggaaatcctggacattaaaaatcgcgagttgacggggaccttgaccctctactcgcacccgtccctggtgcaatgtctgctgctgccgcgcatcggcgactttatcgcccaacaccctaccattcacctcaatattctgaccgggcaggaaatcatcaacctggccaaccgcggcgtggatctggcgatgtacttcggcaaactgccctcggggcggcatctggacgaagcttttatgcaggaatcaatggtgccgatctgcacgccgcagtacgccgccgcatataacctgtatgatgcgccggaaaacctggcccattgcacgctgctgcacgatcgctacaactccggcgaagatgagtggcaaacctggtcgcaacactttgcgctggggctggataccgacagtaaaagcatggagttcgaccgttccgatcttgcagtgctggccgccacgcggcaccttggcgtcgccatggggcggctcaatctggtgcaggactggatcaaaagcggcgagctgatcattccgttcaccgacatgaccgtgccctgcgagcactgctattttatctcgaccatttccgaacggcagtggcccaagatcctcgcgtttaagcagtggatcatgaaaatctcccctctggtctga

SEQ ID NO: 435195 - DNA, 801 bp, Serratia marcescens
atggattacagaaaagatattcttttgcaggtattggaatatatggaaaagaatattgtcgaggggctgtcagttgaaaaggtttccattatctcaggttactctaaatggcatttacaacggctgtttaagcattattttggtataacgctagggacttatataaggaatagaaaactgagtcgctctgctattctgctcaaacagcaccaagggaacatattggatgtcgccctggcatccgggtttgcctctcagcaatgttacacgcgggcattcaaacgtttctttggcgaaacgcccaacagctttagaaacagccgggggtgggatttttccacgcagatccccccgtatggcaacgataagaaaccctatttctaccacacggtcatgccggatgacattgagatgttaaagcattacaaatcgctgatttttcattctataagaaaattcagagatgccggcgacattgcccagaccaatgagaaatggttaagcaagcagccgggggcatgtaatgtggaaaagaaaaggagtaataaatggcattccaacagtaaggggcaagaggtttttcattccatttttaacttctatatccctatgggtaaatatattgtcattccctttacgggggagttgtcagaatatgttgactttttcgatgtaatgtatgacgcttatctgcctgctatcaatgtcaaaatgcgagagagcttttttatagagttatacaggcaagaggatttaaatgggaaggttgtcaatgtcgatatacttattcctgtgacatag

SEQ ID NO: 435196 - DNA, 129 bp, Serratia marcescens
atgcatcaccgtgaagcggttttgcacctttatttttgtctggtaatgcttattcttatcggcgcttatgctgcgacccgacgcatattttacaccaaggctaccctaatgcataagcaatacgaataa

SEQ ID NO: 435197 - DNA, 1830 bp, Serratia marcescens
atggagtctcacgcagagatgctgtgcccccccgttgcgctggcgacggaggacggagtcagagttaccgtggcgccaggcgccgagaagatggaacgcaacaacgccgatatcattattcaaggccttgcagcgcgcggcattcaacatatctttttggtccccggcaaactggtttacccgttaatcacttctattgaccgttccgagattgtcggcatcgtcggtgcccatgaaaccgcatgcggatttatggccgatggctatgcccgcgccagccgaaagtttggcgtctgcttgggcatttcaggccccggcaccatgaatttcctgccggcgatggccgctgcgcaagccgataagatccccgtgctgtacctggccggcagcatcgccacctatcacgaggcgcagggcgcttttcaggacggcagcaacagcggcatcgatgagctgaccatcgtcaaaccgttgctttgcgccgcgatagaaacgaaaaacaacctgaccttgcagcatgagctgcgccgcagcctctccagtctgaacccacagcggaaagggcgcgcctatctgagcgtgccggtcgacatgcagaagaaaaccgcgttcggcgatcgtcgcgaccagcctgagcgagtgccgcagcaccgtgaagcggccgtggatgtgcaagcggtggaacaactgctgcatgattatctgctgcgcggcctgaacgtcgcctgcctggtgggcaaccggatgaacaatccgcaggatgccgcgctgttgttgcgggtagcggaaaaataccgcttgcctgtcgccacgacgttgtccggcaagggcgcgtttcccgaagggcacgccctggcattaggggtctacggttttgccgggcatgcccgcgcggtagaaaccctcaacggtgaaggcgtcgacgtgctgctggtgctgggctgcgatctcagccagcgcgacagtctgaactggaacccgagactgcacggcaataaaacgctggtggcgatcgacgaagacttcgacaaagtgagctcgcattaccagccggatctgcagatattttccagcctgagcggtacgttgcactgtttgttggccgcggttggcgatgaggacgcgcggcttggcgacgcggctcacttgcgtgacgcctggttggaaggggttcgcgcactgccgctggaacagccgcagccgacgttgcaggcgcgcatcgcccaaggcgaaagccggctgtatcccggcgatgcgattaaacacattcgcagccgcatgaatccggataccaacgtcgtggtcgattcgggcgcacaccgcattttcatggcgcatcactggctggcggccgggcggggggattatcacacctccagctccctggcgccgatggggtgggccatttgcgcgggcatcggcatcaagctggcggcaccgcagcgggattgcgtcgtggtgacaggcgacggttgcatgctgatgcacggcatcgaaattcagaccgccgcgcgttatggcgtgaaggtggtgttcgtggtgatgaacaacagcgcgcacggcgccatgcacatcgacacgctgcaaaatcgcggcatttccgccgactataccgccttgcccaaccatgactggaaagcgtttgccaacagcctgggggtcgcctccgcgaaggcggagacgctggaggatctggacgaagccctcgacgccgcggcgaaacatccggggccgtacctcatcgaagtgatggtgggcaactttgcggcgcctaaccgctactacgccgagagcatcgcggaatacgagcagcgcatcaaaggactgtag

SEQ ID NO: 435198 - DNA, 426 bp, Serratia marcescens
atggttaagtggagcattttggcattgttggcagtatttcaggggccggttcaggctgccgaggggcatggcgaaggcatcgtcaaaacgacgttgctcaagaccgacagcgcgtgggagggcacggcatatcgtcagtatcccgccggcgcaccgcagatcaccatgctgaaggtgacggtagagccgaacaaggtactggcctggcatacgcatccttgcatcagcgcagtgtacatgagcggcggcagcgtttcgctcaccgtcaggaaaaccggtgaacgccgcacgttccggcagggggattcgtttaccgataccgtggatatcgtgcaccagggcgtttccggcgagcaaggcgccgaaatgctggtgttcttcgcttgcgcggacgataaaccgttgacggtgaaagccgccgggtag

SEQ ID NO: 435199 - DNA, 864 bp, Serratia marcescens
atggtagctttgtggatggtcgtcgccagcgggttctttgcgctgatgggtgcttgcatcaagttggcgtcgacgacggtcggatttttcgacatcattttttatcgttctctcatcaatgtgctgatcgtcgcggcgctgatcaagatccagcgcctcggttttcgcacccgtcatctcggattgcatatgaagcgggcggcgataggcaatgcggcgatgtactgcggtttttattcgctgatacatctgccgatcgccaccgccaccacgttgggttataccaatcccctctttcagtcggcgatcgcgttcatcacgacccgagggcaactgaccggtcggctgttgttttccgtgctgttgggctttgccggcattttggtattgctgcgccccgacgcccccaacggggagtacgttgccacgctggtcgggctggcggccggtctgttgaccgcgctggcttactttaacgtcggcaagctggtgcggcgtggagagccggaactgcgcgtggtgttctatttctcgctggtgggaacgctggttggcggcctgatgactgcgttactgggcttttccttgctggacggcgcaatgctgctgtgcgtctgcgccatcggcgtcttcggcagcctggggcagatcgccatgactcgcgcctacgggggcggcaatgcggtgattgtcagcattctctcttacagcaccattattttctctacgctgcttggctatctgatatttggcgaacagcagtcttatatcgccgccgccggtatggcgctgatcgtgttgtccggcgcgttggcggtgcgcaagcgtgcttcggccaagtccgagcaggcggcggtggcataa

SEQ ID NO: 435200 - DNA, 537 bp, Serratia marcescens
atgaacatgcgtccggttggcggcatggcgatggcggtcttgtttggcatggtggcgacgttgatgatggatggggtgaacagtgtcgcctccagcgtcggtctcatcggcaagctcaacctggccttcatcggcaaactgatgaatcaatggctgcaggggcaattttggtttttgcggcctggcgacattcccgatgtgccagaggctctgatgatgggctacggcgcgcactattttgccggcattagcctggcgatcccgttctattgcctgatctgcccgcgcattaagtccgggggcggcctgttcgtcggggcgctgacgtatggcctggcctgctcgctgatctcgctgtgcttcatttatccctcggtggggttggggctttggggaatggccggcaaaaatccggctttgctgatcgccagcctggccaaccatgcagtgtatggcgtggcattgggcggttgcgccatcgcctggcggcgtcgcatgctgcagaaatgcatgcctgacgctgcgatgctgcattaa

SEQ ID NO: 435201 - DNA, 1245 bp, Serratia marcescens
atgtcagaaagtatcgccgttgaagaaacggctaaagcgaaggcgggtacatcgcatttcgctatcttgctgtttctggcgttggcattgatgtcagcgctgttgaacagcagcgcgccgacgccgctttatccgctttatcaacatgagctggcgttgagctcggtcagcctgacgatcatctacggcgcttatgccgccggcgtgctgatttcgctgttcggcgtaggcaacatggcggggaaagtaaaagacctgcgcagcatgatcgtgccggcgctgttggtggtgttgcttggcgcgctgctgttttcggtggcgtcatcgttcttcatgatgtttatggcgcggctgctggccggcgtcggcaccggcgccctgaccggtgcggcgaatatcgcgttggtgcgtttcgggccgcaggacggcggaaaaaatgcggcgttgatcgcgacgctgtcctttaccaccggattggccctgggcccgatctttagcggcgtcgccctgcaaaccggttttcataccacgtcattgccgttcatcatcatcatggccatcgccgccgtcgccgcactgggcgtgatgctgcgttggccgcgagaggcggtggcggcgcagaccgatagcgcagcggcggataacgcgccggtggcgaagagctctctggcggatggcctgcgcgcgaccggcggcaaattcttcctgtgcgccggggcgttgttcatttgttgggcggttgccgccagcattctggcgatagggccgagcgtcgccgaaaagctgttggatatgcagagccgtggcgtctttggctatgtggtcgccgtctatctggtgattgccggcatcagccagattttgagtcgtcgcatcaacgcccgccattcgctgatgttcggctgcctggctcaggctttgtcggtcggggtgttcgccgtggcgattcagatccattcgctggcgctggccgccgcaggcatggtgatcgccggttacgcctatggcgcgatcttcgtcggcagcgccacgctggtgaatctgatttcaccgaaagccagccatgcgcgtttgatctccctgttctacgtgatcgcgtatatcgctaactgggtgccgatcctgttgggcgttgtgatcgaccacgccgatttgcatttggcgacccacttgttattcctgagcagcgccgtgatttgtttgatgttgagcgtcatggtaacgcgtgcggccttcccacgctga

SEQ ID NO: 435202 - DNA, 462 bp, Serratia marcescens
atgtatgacgcttatgactatggtttatcccctataggggggcttaccatttggtttttcattatcgttgttagttgtatggttttatttgtaactatacgcaaggcggtaaaagtgaatgagttgcttgctgtacaaaacagaatacttagacagttggaactccaatccgaaatattatccggcgactataccagacccgtaagttcaatataccttgatgagataagacagtggagcattgatgatgttattgccaaaggtggtatcatcgtttctcacccaaaggtagaggcggtagccaagctgtataataactttatggatgatgtcggaagaaatggcggctctatcttatctgctaaaaaattatttaaagtggagttggatagaataatttctaagatggatgcgtcacaaaaagaggtattcttaaaaatttatagcgagcaaattggataa

SEQ ID NO: 435203 - DNA, 519 bp, Serratia marcescens
atgaaaaacaatgaaaaactcattgtgaaagcagaagagactcaactgccaaaagatgtggtttatgcattcttgatgaacacggcaaaggaagacgtcaccaatgccgccatgcgtcttatcgatgaaaacgcggtttatacttccctgaactttgaaaacaaagagctcaaacagatcgagccctgggcgggcacttctcaagggcgacaggtttacatcgataccttttcaaatgtcggcacttactgggagataaacgacttcacgatcggtgacattcttgccgacggaggcaccgtggccgtatttggtcaattcacctatacctcagtagcgttaggccatcagttcacctctcctttcgcaataaaagcgcaggtcaaagacggaaaaatcgtttatttccagtttatggaagacacctatgcttccgcggcttcattccgcgtcagtggcgagtggacaattcagcatcataaaggggaagaaaacaaatttaccgtgggtgtaaaataa

SEQ ID NO: 435204 - DNA, 783 bp, Serratia marcescens
atgcaactgacctttctcggcaccggcggcgcgcagcaggtgccggtgttcggctgcgactgcccggtctgccaacgggcgcggcgcgagccggcatttcggcggcgagcgtgcagcgccatgcttaactatcagggggaaacgaccttattggatgcgggattgccggctttggagcggcgattttcggcggggcaaattcaacgttttttactgacacattaccacatggatcacgttcaggggttatttcctttgcgttgggggtgcggaaattccattccggtgtatggtccgccggatgaacagggctgcgacgacctgttcaaacaccccggcattctggcgtttcagccgccgttggcccccttcgccaccgtcgagctgggcggcatgcgcatcaccccgctgccgctgcaacactccaaactgacccacggctacctgatccaggcggcgggcgcttcactggcctacctgaccgacaccgtcggcctgccgccggccaccgccgactatctgcagaaggtggcgctggatctgctggtgctcgactgcagcctgccgcctcagccgcaggcgccgcgcaaccacaacgacctgacccgcgcgcaggagacgcagcggttgctgcagcccaagcgcacgctgctgacgcacatcagccatcatctcgatcggtggctgctggacaacgagctgcccgcaggcctggagctggcgttcgatcacctcagcgtcagtctcggtagcaatgcagccgatccgattccagcaccctga

SEQ ID NO: 435205 - DNA, 3777 bp, Serratia marcescens
atggacacttcacattcagaaaattgggcgtttcttctcaagttacttaatgatgattcaggacaagtttcgcacgataatggcaatcttttcgagcaccagcaggcctatgcgcttgcccagtttttggttgactcaacgcttgcgacacccgagttaaaccgggacaacgtggccgcgttgattgcgggagaattatcttggccacgttctgaaagttcagatctttactctggcacccaatattcgctggcattttttgaggctgggggattcatttcatttcccggtgggtgggctgaggtgcactgtaggcaacctcagcaagtaaagcaactggatcagagcattgaagatattcttcgggtaacaaaccttttgcagaatattcgctttggttgggagggttacgttcagcctcatttcgtgatggaggaggcccagctaattgctctcataagtaaagaaatggggaatattcatcttgagcgtcttttccccagcgcagttcagcagggcggaaaggttgccatttatcctgaaaagcatcggtttacccgattggagagcacctacctctggcagtgtcttctgatacgtcattctcctgaacatgcttttcggcaatggatgctttgcgtgcgcgtattaagtcattcaattgttccggtgcagttcagcttgcttgatgaaaatgagacggatcaattcttgcatcaggttgaattgctggtgaagacggcacctgagttcagttatccactcagaacaatctacaagcaggccgtaaattcatatgactttgcgcgtctgatccagcctgtcacgttggaaattaacctacacattggcagcgaaagtaccatgccggataaaacggatgagccagttgaacctgctccactgacgatgaggactgcagagactctggatgatgcctaccatattcctgacattgacgatcctgccgaaataattgctctaggacaattgcaacattggcgaagcggcagtggtccaatgggagccttgtcctggctcattcaggcgtgctttaaccatgtaatacgcatcgatcatcactcactcactacaaaaccgtttgcgctcaatctgctttcactggtcgagtcacgtcaagcgctaaagtatttgctcttcattgctctccctctccgcttcaactgcaaatacattctctttttactatcgaggcctgaaacctgtgagattgcaatttatcatctcaccaatagggagtatccactgcttgtgacccgtcgacatgatatgtccgatgagctgagccagttgtttctcgatgtgctggtgagagagtatgcccgtaccataaataatcgatcagataacggtctgaagttactcaacgtatctctttatcttgccgacaacagtggactgtatacgttgcttaatacagacggtttccagtacagggcgctaaactgttttatgcaaaagcttgaagatagacacgtagttgcagttgcctctgcctttcttgaaaccatccccgtgcaatatgaatggcgcatttcacatattagggaaagaagtgtataccaccttgggctctggcttattcagcgactcgcatctacagatgttgcgtatcgtgacttgctgccccaactgggggaatgcctgattcgcttttatagcaatgcattcacagaatgcattgctacccgtagacgagatctgaaatctgacaatttctttgcacttctaccttggcaaaacctgataaaaattattggagttaatgaaatcctgcggatttctagtcgatatgatagctggactaccgtgctgacctacaagcatgaccgatgctttgatgctgtatcagctatctgccagtatttgcaactcctgatgctaatctctaaaggtccgctggaagaagaagagcgctcgcgcgcgtggcagcgcatcataaacatcgtgtgcgcgcttggattcggtcatgatgaggagagatgctatctcttcagcactgttcttaatgatgaggcagcagacctgtggaaaatgtttagcctttttgtgaataaccttcccccatcaaagtatgatgagtttacggaacgttgtatcgacatgattccgcttgattcactgtatatcctgcttgaacgttgtaatatccatgaaagaaggcaggttcttcatgatgcaattcttgaccgacaggatctcagcgacgaaaagcttggcctaaaatcattggaaacggcatttattcatgcctgtgaaaatagtcatatggaacttgccgaaagagttctatctgctgcaaaacccttgcttgaacgttttagaggtcactcccacatacagttaaaagaaactatctaccgatgggaaacctatcactataaatacacccttttgtcagcctacctttccggtcatgaagatccttatgccttcgaagaagtagtgttacgtatctctttacctgatgccctgactagcttaccggggcatgaaatagtccgtcgccaactcagggaatgtgaacaattccgtcgttatatcatcgcagtagcattctgtcagattgagcccagtaaaacggtacgatatatggaagctctttgcgcagaggtcaacgcgccacacttcgcatttatgctgttcagagggcatatagccgagctgtcagatagccagaataaagccgcgcgtaatcacgctctgaataagtttctggcgcaaacgagcagcattacaccggatcagatggctgcaagctgggtagccatggtgcttgacgccatgatacaggccggcgatcagcagcgggcggatgaatactggagaaaactcacgggggagcagcaccgaacacgggaaatcctcctgccatattgcaaaggtcttatccaacggggtaaaccccttgtcgcgtctcaaatcattaatgagtttcgagagtgtaatctcattctcagcgaacatgatgtggggctggccgaactgattacccagctcagccaagctcttcctaatcagaactctgtactcgacatcgtccatgcaatggcagaatccagtcagcgcagtattgatcaactcagacagcactacatacgtatcaccggtggcagtttcgaggattatgtacagattactggaggtagctgttcgaaagagatgtttttgaaaaaagtaattactgaggttgctggtgagttgcttttgaggaaaaagaacctgcaaagccagcagagcactgatggacagctcaataaaattattcatgaagatctcatcaacgactggtttgcttctcttgtcgatatgcgaatggctgaggcgagaattggttttcgcgatcagaaacgtaccggcagctctgagtcaggaaaaagccccggtgagagtgatggtttgattaccgacagcaaaaacagacgtattgcaattttcgaggcatttcgcctcttttctcttaacaagacagttatattcgaacatctcaacaaagtatctggttacgatgctgaagccctaagccctgtattcatggttgcctattgtgatgttaaagatttcagtaatcttacgatgggatatcacagttttatttcgaaaacagactatgtcggttacaaaaaagacgaccaggctgtaaaaattgatgaagaatccgttacggataatctttgggtttgtactgaaaccaggtcaagagggggacgtgaagttatgttctgtcacttattacttaatatgcactgtaattaa

SEQ ID NO: 435206 - DNA, 1023 bp, Serratia marcescens
atgttaacttattctatatggaataacaaaggtggtacaggtaaaacgagtttagtattccaatgcgtaggccgatttgctcagttaaaccaagataaaaaaatattagttattgatatgtgtcctcaagcaaatctttctgaactattcttgggcgggcaacaaaacagtggtagtgtaaatcttttagccgaacaaaataaaaagccaaggtgtactattggtggatactttgatagcaggcttccatctcccttcactcaatatagtggtttcaatccaagtgatttcataatcaatccttctaaccaaaataggtacataccaaataatattgatcttgtttgtggagatcctctattagaacttcaagctattgcaatgaacaccttagcaaacgctaacttacctggtgtaaatgcatggctggcagttattgattggcttaaagacttcctcgatgtaattagaaatgactatgatttcgttttcatagatactaacccaagtttttctatgtatacgcagattgccttagcagcttcggatagagtattacttcctgtaatggcagatgactcttcaagaagggcaatacagaatgctttttcattgatctatggattacagctaccatcctcagtatacgctcaatatacttttgcaactaaaatgaatcaagcaggaagaagtctccccaaaatacactgcataataaagaatagattaacacaatatatgggtgcagcatcagcatatgcagcggttctttatgggatagaccaagatttacaaacattaatttctaatcactcacaatatttcactttcaacaaagttgcagacggagtagtagacgtaagagattttcaaacctctggtgttgtcgcttttgctaatggaagtttgttctccaatatgcgagttggtagacaaaccatcggaggtaggcgagtgcaagtaaaacccatatacagaacaaactctcttaactctatagatttagtagtgagtaaaatataa

SEQ ID NO: 435207 - DNA, 1080 bp, Serratia marcescens
atggcttataaagttatcgatctattctgtggggctggaggcctaagtgcaggcttcatgttcggcgaaaatcatcctgattttgaaggagttttggctattgataacaaccaacatgcatgtgatacctacaacgcgaattttccaggcaaccattgcattgcggtaaacattgaggaatggctgtctcagcaagactcgatacctcaggctgatatcgttatcggcgggcctccttgccaaggattcagcctgttgaataaaaaacgagaaggtgaccatcgccgtgcattatgggaaccctatatggacatcgttgcatcctccggcgccaagatgtttatcatggaaaatgtgcccggattgctgaagagtgatgaatttttggacattcaggcccgtgccaaagaaatggattttcacttagtttacgacgtcttgaacacagcagactatggcgtccctcagacaagacgtagagctatagtcattgggtacaacttacagcatttttccatagattcgcttcctgaatttccaccggccaaaacgcatgtaagccctcagcaagctgcccaaaatgcagacttacctacttggcaagatgtcaaatctgttatcgccgatcttgatgatcctgaaggcgttgaaattagaaatatttcagctccttatgatctacactttggccgaactccaacagaagttagtttacgtagatacaagtcagtaccaccaggtggtaaccgatttgatctcatgaaaaatgcaccagaaattacaccacaatgttggataaacaagccaagtggtggtacagatttatttgggcgtttatggtgggatcgcccatcagtaacaatacgaactgagttttttaaaccggaaaaaggacgttatctgcatccagaaaaacatcgtcctattacccatcgggaagcagcaaggattatgacattcccagataccttcaagttttgtggcacaaaaattgaggttgcaaaacaaatcggcaacgctgtgcctgtgaagtttgcacgaaaaattgctgaatacgtctatactactttaaaaaaataa

SEQ ID NO: 435208 - DNA, 909 bp, Serratia marcescens
atgaataattcatctctagaatatatttctgatctagatataaataaagttatatcttattttaaaaatgtaactggcggttgtgagaagtttatagaagtaataagaaagtcttttgatgaagttattgatggaccaagaactgcccgctatgcttataatcaattagaaaagactgagaaaacctatttgggtactaaagttgagatattgttacgctctgcattttctcttgagcatggaaatataatggattataaaatcgatggcattgaggtcgattgtaaatacacagggaatggatgggggtggaacatacctaaagaggctattaatcatatttgtattttgattaaggcagatgacgagaaaggcactgctagtttgggggttgtacgtgcaagtagtgacattttgaatcaaggtgcgaatcaggatggaaagaaaaccattagtgcttcttcacgaggaaaaatagtatgggtatttgataatgtcaaaatacctattaatcaattgtttttgatggatcccgtaactcgagaaagaatcatgggggcgtcatccggccagcaaagacttaacgagttatttaggatctacaccggtaaagttatagagcgggaaactatagctacagttgcttctgcgaaagatgatccaatgaaaagagtgcgtgcaaatggaggtgctagatcttatcttgctgaagaagggattattattttaggacatcaaaatgaacatccaagaatttgtagagagttaggattaccaaaaattgaaaagggccaggtaatatcagtgagaatagttaaagattctaatgggatatgtaaaatagataatgatttttggcgtgtagcaaatgaaaatgatgatgtatgtcaagggcctaaatcttactga

SEQ ID NO: 435209 - DNA, 693 bp, Serratia marcescens
atgatggctagcgagaaatacacctggagtgaagaagatttagaagcatcagtgctagcatatatagaaatgaagcgaaaatccgaatctaatgaaaaattttccaagttatcatattataaaaaactcggtgagaaatttggccgctcgccaaaatctttcgagtacagaatgcagaatatttcctatgcatatcacactcttggtagggagtggttaaagggattaaagcctgcatctcatgttggcactaacaaattacaacaacttattgaattaatttttatccacgataaagaaacttttgaagaagaaaataaagaatttgaaattcaagtagaaaaaattctagaaaaaggtatatccactcaacccgatggaacaaaaaaaccaattaaaaccataagacaaattattaccatcgctcgagacccaaaaataaaagcctatatacttcaagaagctaaaggtatttgcgaagtttgcgaaaaatccggaccttttccagatagcaaagataaaccatatttggaagttcaccacctaaaacctttagctaatggagggtcagatacagtaggtaatacagttgcagtatgtcctaactgtcatcgagagctacattattccagggataaaatgaccgtacttgaagagatatacaaaaaaataaatagactgataaaagaataa

SEQ ID NO: 435210 - DNA, 285 bp, Serratia marcescens
atgctcactgccatgattgccgcgtgcgggctgtggggcgtcagttggtgcctcggggatcgcctggccagcgcctggggcgttttgctgccttgtgctttgatgccgctgctggccctgatcaacctggatatgctgcagttgcgcaccctgatcgtgatagcgatgttggccacgctggtgatgctgttcaacagccggctgcgccactatctgctgttgccttcctgcatggcgctggcgggcggcttggcggcagtcagcctcaacttcagctttgggtga

SEQ ID NO: 435211 - DNA, 1326 bp, Serratia marcescens
atgagcgacaacgcgaataatcaacggcaattacggctgggcgccattctgcacggcgcatcgggaaatatgtccgcctggcgccacccggatgccaccgctgacgccagcatcaacctcgaatttaatatcgcctcggcgaaaaaagccgaacaggggaaattcgatttcgtgtttgtcgccgatgggttatatatcaacgaaaagtccattccccattttcttaatcgtttcgaaccgctcaccctgctggccgcgctgtccgccgccaccgataaaatcggcctggtgggcaccctttccacctcttacagcgatccgttcaccgtcgcccgtcagttcgccagcctcgaccacctgagcaacggtcgagccggctggaacgtggtgacgtcgccgctggaaggctcggccaaaaacttctcgcgcaaagaacacccagaacacagcctgcgttaccgcattgccggtgagtttctcgacgtcgccaaagggctgtgggactcctgggaagacgatgccttcgtgcgcaataaagccagcggcgaatttttcagggccgggaagctgcacaccctcaatcaccagggggagttcttctcggtgcaggggccgttgaacatcggccgcacgccgcagggccgcccgatcctgttccaggccggcgcctctgaagacggaaaacggctggcggcccaacacgccgatgcgatcttcacccatcacgacacgctggagcaggcgcaggatttttatcaggacgtgaagcggcaactggtggaacaggggcgcgagccggacgacctgcgcatcttccagggcgtcagcgtgatcgtcggcgacgacgacgcggacgtcgagcgccaataccaggagaccgcccgcctggtcagcatcgagaacgccctcaactatcttggccgctacttcgaacattacgacttttcccgccacccattggacgcccccttcccggacatcggcgatctggggcaaaacagcttccgcagcaccaccgacgccatcaagcgcaatgcccgcgagcggaacctcacgctgcgccaggtggcgctggaagccgcttcgccgcgcccggtgttcagcggcacgccggaagcggtggcggacggcctgcaacgctggttcgacggcgcagccgccgacggcttcatcatcagcggcggcacgcccaacgccttcggccacttcgtcgatcgggtggtgcccatcctgcaacaacgtggcctgttccgccgggcgtaccatggcgacacgctgcgcgagcacctgggcctgacgcgcccgttgaacagattcactcaataa

SEQ ID NO: 435212 - DNA, 312 bp, Serratia marcescens
atggctgtaaaatttccttatgccggtcaatcttttaccatcaagatggacaatggtctcgaagttaaaaacgcctaccatgccagtgaaaacaccattaccgttgagtttctaaacggagaacttcgcggaaccattatgaatgtgcctttccagtggcgttcattggctgacggctatttcatgatttcctggcaagagtccgataaaaataccgttgttcactgcgataatttcgaaaaaaacatttcttatgcttactacacaacgatgagtggagatttttacgtgatggaagggaaaattctttaa

SEQ ID NO: 435213 - DNA, 210 bp, Serratia marcescens
atgagagcgataacccggctttatccgttgcatcaccagcctggcgagcaacccgcgcagcccaaacatgtgggggagacggtgttcgattcttcgctgcacccggcggacggcgcgcagctgacggcgttgcatcagctcggccggcgcgaagcggcgccgtcgtggcgggtacgcctgagcgcgctgtggcggaagctgtgcccatga

SEQ ID NO: 435214 - DNA, 300 bp, Serratia marcescens
atgaaaatctactggtcacttaaaagtatcccggaattaaaaaatttgcctttgcgcgaacgtctcggacgttggcagcgtggccttgcttcagcgggattttttaacggaacgggcatattgctggttgcattgttgccgtggttttcgattcttatcgctaacgatctgacccttaattaccctttcttgcgcaatcatatcgtcacagcgcttggatatggcatcagcggttttttgggtgtgaatctgatgataagaagtatgctaaggaaaaataagaatattttttctgattaa

SEQ ID NO: 435215 - DNA, 1059 bp, Serratia marcescens
atgacccaagaccttttcgccgcggcgctgcaacaggccgtggacatcgcgcggcaggcgccctcttcacacaactgtcaaccctggtctctccactatgacgccgacgcccgatgtggccggttggctatcgaccgccgtcgcgccttgcagagcctgccttcgctggaacgcgagatgctgatgagctgcgggattttcttcgagtacctcagcgcgctgctcaactgtgcaggctcgcctctcgcctggcgttgggagaatggccccacgcatttactgagctttgcccccgccgcgcctgccgcgcccgatcgcgccgcccatcgccaattggcgcagctgatcggcgagcggcataccgcacgggcggcctatcagcctacgccaatcaatgaagcgcagcggatgcagctgcagaccttgttcgacggaacggcgagttcactcagtatcgcaggtgacgaactcgctcgccgtcgggtcgcgcagctcaccgctcgtcacgccgcgctcgatttctcggatcgccaagcctggcgggaaacctatcaatacatccgcttcaacgaacggcagcctaccgacgacggttttcacctgcaccacctgtttggcccggtatccccagcattcaagcgcttctttcaagtggcgtttcatcctcgcttaagccggctggcgaccgggctgcgcctgccggcttatatggcgcaagggctggcgcaacgcgtcgcggaaggccctcaatacctggcgctgtgtctgaacgacgaaagtgccgagcacctgttcgccaccggcatgcggcttgggcgtctgtggctcacgctgcaacactggggttggggattgcatccgatcagcgttctggtgcaacacgccgaggcgcgtcgcgagctcgcagcaaccctggcgctcagcgctcccccggtgttttttgcccgcttcggccacctgcaacaatggggcagcgcagcgcccagacgcagttggcaaagcattttgaccgcgccgccatccggcgaatgcgcgcactcggggaacgattccccctaa

SEQ ID NO: 435216 - DNA, 2190 bp, Serratia marcescens
atgaaagcgactaccaccgtccaatcagccccaaataacgcgctcagcgccggcattctgcaggcgatcgactgggtggacgccgcgcgccggcagtccgcccgtttggaacaggaggcggatcgcctgacgctgcgcctacgccgttgccataatcgcgccgtccagttggaaaacacccagcctgcgcaggtcgccatcggtttgtatggccacaacgccgccgccaaggcccacctgctggcggcgctggcccctggcgcaaagcgcttcagcgcggacctttcgctcgcggtgcgctactgcacggcggccgaggcggggcccgccgagtatccgatcgccctcgccctgctcaatgaagcgcagtggctggccatcacgctcgatgccgccgcgatgggcggcttccggctggactgggacgcccgcgcgatcgccggccatctgcaaacgttggcacgccaccgccaagccgtcgcccccgacggcctcagcgacagcgatgtgctggcgctgtgggatagccaacgccgccacggcgacaaggggcaacagacgctggacaggcatttctggccgcaggccgtggcgctggcgccgcagctgagcatcgacgatcgcgcgcgcctgtttgcgccgctgtggggagaggaaacgacgctgacgacgcattatcgccagctggcacatacgctgcatgccctcggtgacagccggcgggttcatgccccacgccgcgccttgacgctgctgaccgcgagcgccgcaccggaaaacacggcaatcgtcgtgatggccgaacacggcggtgaacgggagatcgcgctgagcgatctggcctggctgaccgccgaagtgaccaccggtctgccgcagacggcgcaggcgggcctgcccgccgacgtggcgctgatcgacctgcccggcagccgcgcccgcccgcaggcggagccggcgcagcggctgcaacaggcgaaacgcgcccatttgctgacccgctgcgcggacggcctgcacgccaacctgctgctggtgaccgatgccgccaccgcgccgcaggacgccgcgcgcatcggccaggcgctcgccggttgggtcgaccacactcagggggaaaccccggcgctgcgccaacgccgcaaacccggtttaatctgggcaatcacgccgttcgacccacgccaggaaggcaaaccgcgccctgacgacgccgttcagcgtcaggtcggcgaacccggtgacagctgggccacgctgctggcgctggatgagcaggattgccgccgcatggtgaactacctggccgcacaggcgcgcccggcccacaagcaagcgcgcctgctcgagctgcgcgaagagttgcagcgcgagctgacggacagcctgctcggcaactggctcaccgccgccgatccgtacgcaacccagcaacgcgcccaacagctgctgcgcgcgctgcaggcgcaggccggccgccacggcgaactgctggaacgactgttgccccagcgcgatacgctgcgccagctttaccagcaacagcagcacgccgcgccgaccacggcgacgcctgcgccgttcgggctcgacatcgatctgttcggcgcaccggaaacgccggcctccggcgagccccccgcgtcaccctttgccgcgcgggtattcgcggattggatcaaccatctgcgcagcctgccggacaaccgccggttgctggatctgctcggtgtcgacaaaccgcatctcgaactgctggtcgatgcgttgatcggcgccgcctgccgccagcggctcgacgacgaactggagcgcgcactgtgcgccggcggcctgccggagcagggagaagatcggcagatcagccaggcgctggcgctactgggcgacttcgtcgcctggctcggcttccagcggcgcgatgcggcaacgcgccccgagagccgcgtcaatcccggccagccgatctttaccccgccgccgcagccggcggtggactggagcggccagcagcggctcacccggctggcgccgacgccaaccaaaaataccgcgttttatatctatgactggctgatcggcctgcaaaccctgctggcggaaaatgccgcgcaggcgcagcccgcgctggcagacgagcagcgcggcgcactgacggcgatcgtcgccgccctacgcgctgtgccgtag

SEQ ID NO: 435217 - DNA, 1110 bp, Serratia marcescens
atggctcttttgctgttggcggcgagcggggccgcttgcgccgccgatgacggcattcccgcgctgttgaagtttgccgaacagcggcaggcgccaccggccgcgcccagggaggacaccgtgcgtcaatcggcgtcagcaccggccgccaaaccggccgctatcgtcggggcagacagcgctcgtttaacgtcgttgaagcagtctttgcaacagcagacggagaaaatccgtcagttggagcggcagttggcggcggctcaggccgcggcggcgccgaaacgggaaccggccgtcgtcgatattcggccgctggccgatgccctgaagggattgcggcacgccgttgcgccggtgcctgaagtgagcgtgctggccgcttcgttaacgcgggccgaacagcgcagcgcaagtttggcggcgcagctggcgcagcagcgccggcgggtagagaccttgctggccgaacggcagcaggcggccgagccgcccgcgctggccagcgaggcggacaagcaggcgtatgccgccggcgtgtcgctcggacgcgacattctgcatctgcagcaggagaaccggcgcgcggggttggaagcggatacccagctgttgctggcgggcatcgccgataccctggccgggcggttgcggctcgatgaaaccgccatcgacggcgcgctgcacacggcgcagcagcggttgcagcaggcgcaacagacgcaggcgccacctcgggatgacaacgcctacctggccaatttcgtccgtcaggaggggggcaagcaggatgcgctcggtttctattaccgggtggactatgccggcagcggggcgatcggcgccgatgatcgggtggatatcgtggtgcgcgaaagcctgaccgacggccgggtggtcaaagacatggagctggcggggacggtgatctcgcagccgttgacgcgctacccgccgctgtttcgcgcggctatcgagaagctgcagcgccacggcgcgatcacgctggtggtgccgccggcgctggcgtacggcaaacagggcaacccgccggcgatccccccgaatgccaccatgatttacaccctgcgcatcgctgacgtgcagccgtga

SEQ ID NO: 435218 - DNA, 180 bp, Serratia marcescens
atgcgttcggcgaagccgcccaccaccaacgccacggtgatacaggcgaaggaggcctggaaagcgacgtggatcatctggctgatgctgccggtgacgctgtcgatgccgatgcctttcagcatcgccgtctcgaatccgccgaacaccgcattgccttcgctgaacgccaggctgtag

SEQ ID NO: 435219 - DNA, 570 bp, Serratia marcescens
atgagactacaatttgatattgacatagcagatgaagccgaattagccaatataattgggtgtgaaggccatgaacttaacgataaactaaacagttttgggaaagcaagcatactagaatacttggcaatgattcaaggcataaaggtattcaaacgcggcagtgatatccttgaatatagattatttcttctagtcgataatgtttttgagggtaaaattcctgacgagcaaatcataagtaaattgtttcaaactactgcttctgaaagtaagagttatttgagatctattatatcaaaatatcaatatcagctaaagcatgctattgatgaaacactcaaagttattcttttaaatgcagaaattcaagaggctattggtccttacagcatcacattgaatagtgtaaatgttatagaagaattaaataaaaaattagcggcaattgatggcacacttgcatccgttagcaagaagcgtggtagcgtttcaacttatgaggtaactaagtcttcatacgaagcattatgccattctttacaaattcaaccggtgcagcatcaataa

SEQ ID NO: 435220 - DNA, 792 bp, Serratia marcescens
atggacggagtaatgaaaatgaactcgagaatatcccatcaagtaacagaatcttcctccttaaacatgacggaaccttccgaacgctatacggcaattgtacaactggggaaaaagttggttgaagaactagcgttaaacaattctgttgatacgttaggccgttggatggctcatcatattgcagaactgatttacgacgctgaaaataccacggatgacactgtgcgcattgcgaaacacatggagattagggactctgtgtgggccttttggactaaccgctacaaattaccatttggcaataagccatttaaagaactagaacccatcctaagggctttagaaagtcttgatcctgaaaacctgctaccaaggtatttctttccctacccaaggctaactgatagagaaaaggaaacttcggagactcaaaaatggttaaaagttgccgaaagtatcgattcggcctcaaaaatcctgattgactattgcctctctttagccgcagaaaattctattgataaatctcaagaatgggtggaactggcacaaaaagctggattagacgacgacattgatctagttgaacttcgtattttccaattacgtggggacccatccaacacaactaatcccagtagtgcacaacggcgagttctggaaaaacgacaaaaaaatcttgccgtttttctttcattagccgttcagttagacgagcaactaaaatcacagcttcaaaccctaccagcagttgaagataagccagaaaaagacgatgacaatgtttga

SEQ ID NO: 435221 - DNA, 705 bp, Serratia marcescens
atggaagtggtagataaatcaacaatagagtttattagaaaaatcatccatgagttagaaataagaggtaattgggatagaagattccattggaaattctcgagagaagtccctgacgaaaagaatatagaatcttatcttgaaataatatttgaacttgaatcaatcgtcgagtttcatttggaaacactcttacaccgacaagaaaagaaaatattaacaaatgaaaacgatacaaaaataaagtttataactccgttaccattttatcatgatgttattgacatcattcctatttataaagatgctatcttacttgaagaccataaactccttgtgcctcaaaaatcgatacccaatatatgttatctccttaaaatccctggtacaaaagaaggcgttgaggttgaaaaccataattttggatatcacttccactattgtaaggtaaaaaaaaggacaatagaaagaaccaatcttttattgacttttgatccaacctttaaaaaaacaaataaaaaaataaagcctgatctgttcggtgaataccatgcagaagggaaaaacaaaaaaatagatatggaaacaattggggataataaacgatatcctatatatttagtttgtcatgacgcagggcaaaagaaaggattgaataattttaaagcacctagcaacaagtcaaaattatttattacaggttaa

SEQ ID NO: 435222 - DNA, 945 bp, Serratia marcescens
atggctttggtatgttccttcgtgttaccccgaagggttccaaatgctggtaaatggcttaccgctataaaaaaacggggattaaaagtggagatgttaggaaattttcttttgcaaacgattacgtccaccgctttcagcctagtatttctggctggcattggatggttttttagaacctggattggaaaccgaattcatttaagtataaaaaatgaatatgataataaattagagaggcttaaggctgaacttaaaactgaaggcgatgctcatcttacagatatgaaggcagaattagatcgacaatcaaacatattaaaaattgctgcctcgtctttctctgaggtacaaaaagcaacaatttcaagaaaaattgatgcagtcgatgttctttggaagggaataatcgattttcgcaaaaaatttcctggagttgcctcttttacggacgtactcactgatgaagaaatgaaaaatttctatactgaccgacgattacataaatattcacatgaattagagcaatttgatatgacatgtttaatcaatgccagctctgaagaagttaagttggtaaggccacatattggtgaatttgtgtgggcgctttactctacttactgcactattctgatgcgctccgtttatttattgaaggcaggaaaggatgagccattcaaagtggcatggcattgtgatgctaatattgaaaaattaattttagttgcatttggtgaagagtgttcttctgagtttaaaaaactccgctggggaagatatcaatggcttcataaccagtttgattcgtcattatttaaagcgattgatactcttctaactggtaaaagtttcagtaatgcagctttacatgaagcacaattgatggagcgtcaaattagtgccagtagatcaaatgagctcaagatttcacatcctctttaa

SEQ ID NO: 435223 - DNA, 888 bp, Serratia marcescens
atgtttataactaaagtcattgaggagctgctcgcctgggtggaagaaagtgggttcaatgagaagctcaccgttgagatgctgtcagaaaaaagcggatattcacgcgggcatatccaaaaagcgtttaaagatgaaacagggatgactttcggaagctatgtgaggggcagaaaactcattcgcgccgcatttatgttgaaagcgactaacctctctatttccgatatcgttaaagcgctgaactttcagtcctatcaatcctttgaacgggcctttcgcaagcaattcagaacctcgccgatgcagtatcgcaaaagtaaatcgtgggacgtgtcctccgccatcccattgctgtttctcgacggcattcccgagcatcgctatgtgcacctgccaaaatttttcgacgattcaggggatggcgttgatgcagagatacatcacttccatcctgcggtttccgcgctgcgattggcggcaattgataacatgaaaaaaacggatagcggcgtgattaactttttcaattttggcgcgagcatcaggaaagagaattacgtcagcatctatttgaagaccctctatatttctgaggaagactgtcttggcaacgtgcttgcctctctggccgacgcccagggaaaaaaagacatgcaactttttgcagagttcagttttgatggcgcaagcgatgaggcgcaaaaattcacgcaaagcatctacaccaaatcattcccgataaataaagttggcatgatcgatcgctttctcattgaaattatcaaccccaaaggcggcgatagaatagagatgaagacctatatccccattgtcttcccgatcaaacacagagagaaagaggtagcgccagggccagagcggtaa

SEQ ID NO: 435224 - DNA, 1413 bp, Serratia marcescens
atgccgagtagcgttcaaccgagaagcattgatgaagctttaaataattttatttacggatatgaaaatggtaatgtagactataaaagaaaccatagatggcaagatgaaaaatcagcaatacatttccttaatgattttgataaattaatggtatatttattttcagaagaaatggatgctaacgctaaatatacccaccaatctagagaaaacgttgaaaaaatagagccgcctctaacaagaatagcgattttaaaagaaatgtgggaatctttattacctcatagagagcttgttattggtggtgcgaaagttgaaactagagttaaagggggaggggtaggtttatacaactcctcacaaatgagtgatggtgaaagagttatattttatcttataggtgcatgtctatcagcaccagaaaatggtgttatcatagttgatgagccagaaatacacattcataaatcacttcaatattctttatggaaaaatctagaaacagtaaggcatgattgcttatttgtatatatcacacacgatgttgactttgcatcttcacaaacagatgccacaaaactttggttgaaaaattttgatggtcaatcttgggagtgggaagaaataagaaaagaagaagggttttctgaagatcttttactggagataatgggtagtagacgaaaagttatttttgttgaaggggagagtggcagccatgacctctctctctatcggatacttttccctaatcatttaattatacctagaggaggttgtacaaaagtaataagcgatattagaacacttagaaaactaccgaacctgcatcatttggatatcataggtataattgatagagataggcgagtagaagaggaaatcacttcattacaacgcgacggaatttatgtgttaccagttgctgaggtggaaaatttattttgcactgaagaagtaatttctttttgttgtgatttattagcacgcaactttattgatgatatcgaaataattaaacgagaagtatttaagtcatttaatgccgagatggaaaatcaattatcattaagggttatatctgaagttaagtttaaactgaatgctttagatgaaaaggggaaaggtagtgagcagattcaggagaaaatcaaggagttaattgataatattaatattaatgaaatctactcgtcattcgaggttgtttttaataaaatctatgaagaaagaaattacagtgagctattaaaatactacaaccgtaaaagccttaaagataaagtaggcaaggtccttggagttggtgacctgcctgcattgatcacaagaactgcatctgtaaatgataatcatttgaaaataaaggaagtattaaagacatattttaacgacatccctggatactag

SEQ ID NO: 435225 - DNA, 1431 bp, Serratia marcescens
atgagttcagaattgattgaaaaacctggaacagggctgctttccacagatacaacaaaatttgaagggtatttatcctatcttggtttgccgaccgaaaatataattgcctctctccctgaacgccaaattattgaaaaaaatctccccgtattcatagattctttacctgctgaggtaaaaagagatgcgcgatatttatcaaagttcgttgctggtgcggctataggactatttgatgcatcgttaaattatgtttggaatgaagttgtactgaatttaagggaaaaagtggtagtttatggcctcgatatgttctttgatgccgcagtcggcggaggacgtagagagttttattccaccgaagaagatctttctggtttaaaagacaacacccttattaatacatgccgcaaacttgaattaatatctgacattgtttacaccaagctcaatcatatattgactatgaggaatgacattggtgcgtcgcacccaaattcatactccataaatgcttttgaacttcttggctggctccaaacatgcgttcaagatattttgaacgacaaaccgtctgcatctgccatacaaataaaatcattccttgagaatctaaaaagatccactgatgtccttgatgaagccacaattcaaagcatggaaagacctttgagtgatctgtcgcttcagaatactgacaatctactcaatagtattttcggcatatatacatctgattcaacaggaaatgttgtcagaaaaaatatcgctctttttgctccgcatatttggaataaaagcagtgagaacgtaaaatacaagctcggcgtgacgctagacggatacaagaacaaccttcataacgagaaacatgctttaggtattgagttttttacgttttgtgatggtaatcgttatcaatcattagactctagaattatatcactggacggccatgccgacgatcttttagaggctaggtatgcttgggataacttttataatgaaccccctcatatgcggaagattctttcgtatttaaagactgaaaatgatataccattagagagggttcataagcttataaaaacagttttgatttgccgtgttggtaaaggaataccatataatactggtgtttctccggcgggacgacctttgtatgatcagttttttggcatgcttggcgatcaaaacattatcaatacagttatagcaatgcactctaatgaagtgcgagtgaatttagacaataaatactgccagcaacatatggtaagtgttttgactttgttaagaaccaatgctcgtagcgaaagaattcaagaaattatagattttttgatcgccaaccaaacgatcctccataaagtacacaacgataagagatatagagatctaactaagaatcacatcagtttcagctaa

SEQ ID NO: 435226 - DNA, 285 bp, Serratia marcescens
atgggaagaatgattgtttcactgattggtgcctgcgttttggtggcctcctatgcgcaggccggttttaatggcaatcaacatgtgcaagggaatcagggcagcaccaatggcgcaggcaatagcaatatcggccagtgtatagcgggcaacggccagaacgccggacagtgcatcggggaaaataacggcgcggcaaaccctaaagagaaagaaaagaacgacaggattatatccctttgcagctcaccgtttatgaagaagtatgccgccatttgtcaataa

SEQ ID NO: 435227 - DNA, 546 bp, Serratia marcescens
gtgaagtcaattagttttcttattgatgacgaaaaccgttattttgccgccggcctgcggtacagcattatgcaatatgcgcaagccaaccatcaggcagtacgctttttagcgcccggcggtgcggtgcagccggatgtggtgatcgcttccgcgagccggcgcgctcagcgctggcgcagaaccggctatagcgaagcggcggcgcctgtcgtcaccatcaaagagcgatattttgccgcgtcgaaagcgaatcgagtgctgtatcgcaccgacgatcgccagcgtctgttcgaattgctgagcgagatgctggagggcgcgcattctgcaggccagcttgggcgctgtaagcttacctgccgcgaacgccaggtggtgaattatctgagaagcggccttgatcaatcacaggctgccagaataatgggcgtgagcgtcaaaacggtgcacagccataagcgttccataatgagtaagctgatgctaaatcggagccatgactttatttattggctgttatcctatgagggagaatattcctaa

SEQ ID NO: 435228 - DNA, 807 bp, Serratia marcescens
atgaaaaaggtcgtaagatgcattattatgctaagtacgctcttgctaataactaatcaagtaagagctgcctgggaaatggatataaaactttatccacaacaaaaaatatttaaggtgaaagtcatccgctgggatgaggatgacccagctaagaatatacttttcggatgtaggacttccggtatggggtgtatgctgggaatttatgggattcgtgatggcgcctatttttacgacgacaattttcccatgccggatagggtttctgatatgcggactatgggggagctggctagagtatttagggaacagggatatttgaataaagaaattcggcgtagcgcttggtatccatacattgattattgtttttatattggatattacgttatcactggaccaagcacggcatcgatggttccagtgcccggtggcgtatcggagtgtcctaaaactgaaatattgccaactttttgcagtattactgagccttatattgagcttaatcatggttccttaagtggcgactcggttaacggtaataccgtcagtaaaccaattcatgtgacctgcaacaatgactttaatttagcgattaagtcaaaaaattcccaggggcaattatctcttggtggtgggttaaaaagtcagttaaaagtgaatggtaccgatctgggtcagggatatagtgacgtggttggtccgtctggaaaaacgtttacgctctcttccaccttaagtggatataccggcgcgacaggcgattttcaggggtcaagcgttattatcttgggtctgccgtaa

SEQ ID NO: 435229 - DNA, 489 bp, Serratia marcescens
atgaataagaacgtgacagcggtttatttatttttgttggtagcgccatatgtctcccttgaggctgctgaaggggtaaacatgacgtttcgcggcgggcttattgctccgccgccctgcacgattaacggcggaaaaaaaattgatgtcgatttcggtgaccgggtgggggtgaataaggttgatgggaagaattatcgccagactattgattatagcatcacctgtgaacgcggcgctttgccctggcaaatgacgttgacgttaaagggtggcgtcagctttgagcgcgccgcgctacagaccaataaactcgatctcggtatccgaatttaccaaaataatacgccatttattatcaatacgccgttaaacattgtacccggtgatttaccgctgctggaggcggtaccgatagccaagccgggctcgacgttgatcgagggcgcgttttccgccacggcgaccttacaggctgattatcagtaa

SEQ ID NO: 435230 - DNA, 504 bp, Serratia marcescens
gtgaagacgcgtttaagtagaagagagctttcttgcctgctgatgttcacgggcatgctatgggggggcaatggcaatgcagaaacaccgataacggttaaagtgacgattatggcgccattgccctgcatattgaacgagaagcagcagatatacgtgaattttggcgacgagatcatgaccacccgtattgatggggatgcatatcgcaagaaaatagattatagcctgaaatgtgatgagcaggctaagaacgccatgaagctgcaaattaaaggggatggcgcggtctatgacggcacggtattaagaaccagcagggatgggttagggatcgcctttgaacagcagcagccgggaaagaagttgccgatcaacagctgggtgaattttaactatcccaatcttatcgatctctatgcggtgccggtaaaaaagagtggagccgatttaaaaacgggagaatttaccgcttccgccatgctgtatgtcgattatcaatag

SEQ ID NO: 435231 - DNA, 657 bp, Serratia marcescens
atggcaggtaaaggattgataacggacgacaggcggcagctgtgtgccgagctgcgctactacgcggtgctcggcgggttagcgctgatggcgccgctgagcctgaccgcgctgctgtggttgttgccggcggcgcaggcggtggacaactgggaggtcgagggggctaacggtgtgctctacgtgcatggttcgttggcggtaaatgcctgtcgtctggagatggacagcgcgcggcaggacattgctctgggcgaagtgactacagggcggttggcccagttgggcgatcgcggcacatcggtgcagtttgagctgcggctgcgcgactgtctgaactctcgggctgccagccgggatgaacgaaccggagcgctgagttgggcggcggatcagcctgcggtgcgggtgagctttaaggcgccggccgataaagatgattcgcacctggtgagagtggcgggggccacggggtttggccttcgactgttggatcaatacggccgggatgcccgtttaggcagcagaggggcgccgctatgggtaaagccgggtaccgacgttttaacctacacgattattcctgaacgtacgctgtcgccgctaagagctggagtttatcaggcaagaatagattttaaccttagttatgactaa

SEQ ID NO: 435232 - DNA, 531 bp, Serratia marcescens
atgaagagcaagcgactgggatgtgtgctggcgctggtggcagggatggcagccggatcggtgatggcggcggacaatatgttgtttcacggtgcgctggtggcggagccttgcacgcttaaaccgggagatgaggacatccgtttggattttggcacggtcatcgacaagtacctttatgccaatggccgtacgccgaccaagccgtttactctgacgttgcaagattgcgatcttagtctcggtcaaacggtaaagataaccttcagcggcaataagagtcttgaattgcctgacctgctggcgctggatggcggcagccaggccagcggtatcgcattggggttggaaacggcggaaggtaagccggtggcgctcaataagcccagtcaggagatgacgctggccagcggcagcactagcctggccctgcaggtttatgtgcagggtgagccgacggcgctcgcacaaaagagcatcggtctcggcgcattttccgccgtcgccacctttggcctggaatatgaataa

SEQ ID NO: 435233 - DNA, 2541 bp, Serratia marcescens
atgatgtttttgcctgcagggaagccgtttcgttttcatcttctgagcaccggtgtggcgctggcgctggggagcgtctgggcgcctgtcgctaacgcggaggagattcagttcaataccgatgtgctggacgtcaacgatcgtaaaaatatcgatctgagccagttttcgcgtggcggcttcattatgcccggcagctacagcatggtggtgcacgtcaacaagaacgatctgccggagcaatcggtggcgttctatgctccggacgacgatgccaacggcagccgcgcctgccttacgccagcgctggtcgagcagttgggcattaaggacgacatgctcaaaaagctgacctggtggcgtgagggggcctgtctggacgaggccagcctgccggggatggaaatgcgtggcgatctggccacctcggcactgtacctgaacatcccccaggcctacctggattatgtctcggaggattgggatccgccggcgcgctgggacgaaggcattcccggcatgctgctcgactacaacctgaacgcgcagacacagcgccagctgaaatatggcacgcaggattacagcctgagtggcaacggtacggcgggggctaacctgggtgcctggcggctgcgtgccgactggcaggcgaacctgcgccaccagaccggttccggtcagccgacggacaagcggctggactggagccgttattacgcctatcgggccgtgccggcgctgcgttccaagctgactctgggtgaagactatctggactccggggtgttcgacagcttccgctttggtggggtgagcctgcgttccgacgacagcatgctgccgcccaacctgcgcggttacgcgccggaggtaaccggggtggcgaagagcaacgccaaggtgaccatcagtcagcagggcagggtactgtatgaaaccaccgtagccgccgggccatttcgcattcaggacctcaacgatgcggtctccggtgaactggacgtgcgggtggaggagcaggacggcagcgtgcaggaattcaaaatgagcaccgccagcatcccgtacctgacgcggcccggttcgctacgttacaagctggtggcgggtaagccgtcggacatggatcaccgttaccaggggccgatgttcggcaccggcgaattctcttggggggtgagcaacggttggtcgttgtatggcggtacgttactcggtggcgactataacgcactggcgctgggtatcgggcgtgatctgttgctgctgggcgcgctgtcattcgacgttacccagtcgcgcgccaaactgccgtacaacgacgagacgctgagcggcggttcgtaccgcctcagctactcgaaaagcttcgacgagctggacagccaggtgaccttcgccggctaccgcttctcggaacagaactttatgagcatgggcgagtacctgaacgcccgtagatacgggcagcggtacggcagcagcaaggagatgtacaccatcacctacaatcagcagctgcgcgatctgggattgagtgcctacctcaactacagccaccagacctattgggaccggccggccaacgatcgttacaacctgacgctgtcgcgttacttcgatgtgggaaacatcaagagcttgagcctgtcgctgtcggcctaccgcaaccgctacaacgcgcgcaatgacgacggcatgtatttggggctctcggtgccgtggggtaatggcaccacgctgagctataacgccacgctgaaccgtgacgacaatacccaccgtgtggggtattacgatcgcatcgacgatcgcagcaactaccagatcagcgccggcggttcgcgcagcggcgccaatctgagcggctactacaaccgcgacggtgatttggcacggatgagcgccaacgccagctaccagcaggaccgctacagcgcattcggcctgtcggcacagggcggcatgacgctgactgcggaaggcggggcgctgcaccgcaccagcagggcgggcgatactcgattgttgctggataccgaaggcgtggccggggtgccggtacgcggctacggcagcgcggtggcgagcaaccgctggggcaaggcggtggtgacggatatcaacagctactaccgtaacaacgccagcatcgatctggacaagctgggcgacaacgccgaagcgattaaatcggtagtgcaggcgacgctgaccgaaggcgccatcggttaccgcaagtttgcggtgatcgccggggagaaggcgatggccgtgatcaagctggcggacggcagtgaaccgccgttcggcgcgacagtgctgaatgcccgtaaacaggagaccggtatcgtcaacgacggcggcagcgtctacctgagcggcatcaacgccggcgagcgcatgacggtgcgctgggacggcgccgtgcagtgtgaggtgcaaatgccgacgccgctgccggctgagatgttggcgacgaatttactgctgccgtgccgggcattaagcgccggtgcgaacggcgaagaacactga

SEQ ID NO: 435234 - DNA, 537 bp, Serratia marcescens
atgatgagacaaggaacggtggcaccttgcctattgtgcgcgttgttaggttttagctcacaggctatttctgcctcgcagggctgggggcgcgtcaatatgcaaggagctattctcgatactgcctgcgccattgccacggagagtcgcgaacaaacaatcaatatggaaatggttcctttcgccgatattattcgcgacgggcaggggcaggcggtgccgttcagtattgaattagtgaattgcgtactggagcgagcagataaaacgctgccggactggaaacaatttcaagtcacctttgacggttttgccgacggtgaattattcggtgtaaaaggcgaggcttcaggaatagcactgagaatcactgatgccgccggaaatatagccaggccgggtgcgcctatgccgccaatgaatattattccgggaagttatcgcctgaattacgccatgacgttaatcggcaataaccagccactaaaagcgggtgactatttctccgcggtgcgtttcaaaatggattactactga

SEQ ID NO: 435235 - DNA, 540 bp, Serratia marcescens
atgaaactgaataaaatcatgctggccgccgttatggcttttggtgtttcttctctggctaacgcggcagaccagggccacggtaaagtgaccttctcgggttctattatcgacgcgccttgctctatctctcctgagtcaatggatcagaccgttgaattgggtgcgatctctaacgtggcgttgaaaaacggcggtaaatctaccccgcgcaactttgatatcaaactggaaaactgcgagctgacaactgctgttcctggcaagaacaacaccgtttctctgaccttcaccggcgccgtttccgccattgacagcaagctgctgggcattaccggtaccgctaagggtgcgggcatcgctatcaccgacggctccggcaacgacatcgtgctgggtacgaaaaccaatgcgcaaacgctgcaaaacggcgccaacaccctgagcttcgccgcctacctgcagggcgttaatgcttctaccggggttgttcctggcgaattccagtctgttgcagacttcaccctggcttaccagtaa

SEQ ID NO: 435236 - DNA, 792 bp, Serratia marcescens
atgagatacattattaataataagattaaatatcatgaagatagatcagaactggtggatctcgacgctgagctgccgcctcaaccgctcaccgccacgttgaaccgcctgctgtccgcgttggtcagaaacaataaccttgtgatctctcgcgataccttgctgacgcaggtatgggaagcgcacggccaggtggcctccggcaataacctcaataacaccatttccattctgcgcaagatgttcgccgccctgggcgaggacgacattatcgtcacgttgccgcgccagggattcatgtttaccgccgcttcgttgaagacgacggacagccaggcggaaggcttgccgcaggcggagacgccagccacggtggctgagggcgtatcttcgggtgcttcgagacgcctcgctcgcctcaagcgttttgggttggccgctttgctgctgctggcaacggggagcggggtatgggcctggcaggatgccggctatgcgccgctgagttcggtaagcgtcgggaaaatcggcaaatgtgacgtcaggtttgtgacttcctatcataagcctgtttctgggcaggtggatttgacgcatttgcaaaatatgctggcgcaaagaaaatcagatcgatgcacggaaccggcgacgttgctttattacgatagcaaatcggtgttgtctgatgccattgggcgagtcagaacgtcttactactattattgcccacagaacgcgatagctacgggccaaatgcaatgcgagaactactatgaagaccgcgctcagtaa

SEQ ID NO: 435237 - DNA, 762 bp, Serratia marcescens
atggatcaggacttcaaatctgagttcactgatgaggatttgcacgctatttttaacagcccttggtttaaacgtggaactgtggatagaaatagcgagggacgcttccatcattaccgtgcatttcattactggttgccactcatcggattctttaccggagcaaggattaatgagttatgccaactttatctagatgatattaaacaggatgctaccgggttttatttctttgaaatcagcaacgaacgggccgatcagtcactgaaaacgattaattcacgaagaaaaataccgttgcatccgacattgctcaaacttggattaatccgctattgtgaagcattgaagaaagcaggtcatgagcgtctatttccagagcttccttatcactctgtaaaaggatacggagataaggcttctgactggtttaaccgttcgttgctcaaagaacggttaggttttgaaaaagacagcaaaaaatctttccattcattccgtcacacgttttctaccaggctcaaacaagctggaatcgacagcgagacgcgtgcgcagtttgttggacatatccgtggttctggcgagacagagaaccggtatagcaaagatcatccaccagcagccctttatgctgtgcttgagaatgttacgttagggctaccggaagttgctccatttgtttgcgaagatggtgtagctgcggtagctgatgcactacaaattaaaagaaataatagagagcgtaaacttaaaaaataa

SEQ ID NO: 435238 - DNA, 1110 bp, Serratia marcescens
atggctcaacgtgataatctgtatcgccgtagcagcggtatttatgttgtccgtattgcagttcccgcccgataccgtctctacacgggacagcgtgagattcacgcttcaacagaaacaaacgacatcagaaaagcgcgagcgattgccgcagtcctattggctgtctggcagcgatgtttgggtgagtatcaaaaattggatagagaaaagttggtgagcagtgcgcctgctttggcgggcgaaggaatgatcagccttgctgaattttgcggtttaacgagtgcttccctgcaacaagttgctcagcgcctgcttgatacgaatatcccgctgttttggcttgctgatgggcgtcctgcttactatgttgaagacctttcactcgttgataaagacgatcctgaggtttctggatttatcatcgatagtgccattaacatcggtatcagaggttctctgagcggttatgttcagcccttggtttcatcacgtatattacgtcagatgatcgctggcgagccgctggatgcagaaaccgcatttaaatccttagaggcttcatccaaagccgcttggttcgttgactttcccggtgtcgaaatctcgcctaattcattgatgattcatcgtgttcaagccgagcgcttacgattattttggctgtcacatagcccctcactagctccagcaactcctgagaagccaaaagcaatatccactgcaatattgtccccatcattgccggagaatgagtatgtaaatcgtaaatactactcggtgaaaatgagcgagctatgtgaaaaatatattcgctacaagcgcggggggaaattcaccgaaaaggcagagaatcgagttcgggaaggttttagcctattggttgaagtcatgggtgatccaaagcttataaaagtagatcgtgactatctccgtgagtatgagagcttactaaggtcgatacctgcacggcgtgatttagctaaaatccgatacaaaatcaatgacattcatgagctggtggttaaagcaaaagagaacggcgactctctaatgagcgataacaccgttcgtaaatatatgcgggttatcttcgaagctttccggtag

SEQ ID NO: 435239 - DNA, 1053 bp, Serratia marcescens
atgtactggatagtcgggcagattaagaaacgtaatatgccgatggaactggtactgctacccatagtggagagcgcttttgacccacacgccacgtcaagtgccaacgccgcagggctatggcaaatcgtgccgcaaacgggtcgcaattatggtttgaaaaacaatcagtggtatgacggtcgacgcgatgtcgtcgcctcaacaaccgctgcgcttaacatgatgcagcgcttgaaccgcatgtttaacggcgactggttactgaccgtagccgcctataacagtggtgaaggccgcgtgatgcaagcggtgaaggcaaacaaacgccagggtaagccaaccaatttctgggcattgtcgcttccgcgtgaaacgtcaatctatgtcccgaaaatgctggcgctgagcgacatcatcaagaacagcaagaagtacggcgtgaaactcccgaaaacggatgaaacccgtgcgctggcgcgtattgatgtcggacagcagatccagctgactcaggcggctgagatggcagggctttcagtcaccaagatgaaagcgtataacccaggctacaaaaaaggcgttacggcacccaacgggccccattacatcatggttcccaaaggacatgccgagcaactgaaagactcgctggccgatggccagatcgccgtgactcagccaacgacgcagttggcgaagaacagcggtttgaccggtggcagttcgtataaagtgcgctccggcgacaccttatcgggcattgccaagcggctgaacgttaagaccagcgatttgcagagttggaacaacttacgcgccaagagcgccataaaagttgggcaaaccctgcaagtggccagcaatactggcagtaacagcagtatcacctaccaggttcgtaaaggtgattcgctcgccagtatcgcacgtcgtcacggcgtcgatattaacgacgtgatgcgttggaattcaacgctcgccaaaggcaacctgcagccaggtctgaagctgaccctgtttgtcggcaacaagctaacgccggatacctaa

SEQ ID NO: 435240 - DNA, 1902 bp, Serratia marcescens
atgcttttagataaaaatatttatgctttccgtgaaaacacgggcatttgggcaaagccagattatgcaggtatcccctacagtgatggagatactcaggaaaatttgttattgagcattatacaaaatacgcaagatcgaagtgtatcttctgcggaactcaaagctcaatgcacagattgggtaacgacttaccatttctctagtttgcgttcgaatctgttacggccgctaaaatccatccttcaaccaggtgctaaggttttggaagtcggtgcaggttgcggggctatcacgcggtttttaggcgaaatggggtgcgaggtggtcgcattagagggaagcttgcgacgcgccgcgattgccagaaccaggacggctggcttggacaatgttaccgtagtcagcgaacgatttgatgatttcgagagtaatgtgctctttgatgtgatcactttgattggcgtgctcgagtattccaacctgttcagtcaaggtgaagacagcgcagtaagcatgcttgaaaaaatcaaaaagcgccttaaacccggcggaaagttgatcattgcgatagaaaaccagcttggcttgaaatatttctccggagcacgagaagatcacctgggccaggtgatgtatggtattgaagggcgttatacgaaagaacaggcagaaactttcgggcaccacatcctgaagcagaaactcgtaagcgttggtttgcagacggtcgaaacattgttgccgttccctgattataaactccccgtttccgttgtgacatctaacggcgctagcgacccaaactttgatgcttctgtttttgctgcgcaatctgtgcgtgctgatatgcaattgccggagaagttaaattttgtactcgagttggcttggccaattatttttaaaaacaatttagcttgcgaactcagcaactctttcttgatggtggcaagtgacgagtcgagtgagtttattgataaggacttacttgctatccattatggtagcgagcgttactcgccgttctataaggaaacggtattcaacaaagacgagaatggggaaattaaggtcaaacgtcatttgctgagtcctggtggagcgattgagaatgattttgttgattttaaattagatggttttgaaaaatatataaaaggcgttcctctacccatagagttcatcaaaatcgtgacgacacctgggtgggatattgagcaagttgctggttattttcgttattacatcgagtgcctggagatctgcttaaaaggagaaggaatacactatgatgaatttacccaacacactatgctcccgtccacctatttagatgcaattccttcaaatatattgatagatgccgataggcagccgcgctattttgaacgcgagtggttggcgaaaaaagggattacgctgggtaacttgacattcagagcggcgttgtcattgcttgggaaaatatcctctttcgcaccgcctgccaatggacgttcattaactcgaggagagtttattaagcaactcttcgaagctttggcattctctgcagatagttcgctctttgagcaatacctggttcttgaatcagaattgcaggttttctcatcaggatccgataagaataaacttgatacctggtatcctgagcatgtgttgcctggcttacatgcattggatgaagttgagagcagggaagctgagcgtcttgaaacagagtcggcattaaaagataaaaaacatgcttataatgaactgttgaagtctaaagactatgctgagaaattagcatttgaacgaatggatgagattgataaactcaagctggagttaagcaatattaagtctagtaccctttggcggatatccagactattcagaggcaaaaggaattga

SEQ ID NO: 435241 - DNA, 753 bp, Serratia marcescens
atgcagcccggtgatgttactgacacattccgcattcgctttcatgacgagctggcgaacaactatcagcagctccgtgctgcgctccatgagttagccagacggttcacgtttacaaccgaaccgactattgccgggatagagatcagttgtgacttctggcacaaacaacagtcagttgaagcaactcgcgccctcacatatcggatgcaaacaagcctgttcgctccgggcaccaatcatcgccaatacaacggcgaaaacaacagtaaccaatttcttgataagcccggcaatcgtataaacccggcttataacctacggattggcaacgaagatgacgccatttcatggcagtgctatcacaagtgcaccgacaagaagcaggcgctgccgcttcgtctgcaacgtgctcgtatagaggcgacattacagggtgacgcgctacagcaacacggcttcggtcttctctccgggctgcaacacttcccgtttgaaacgctcgccagtcttttcacgttccgcagtccgatagctgcggcacagatggcaaaaggggatatgttccgactcatttcaatcaactggatacgcacatacagagatgcaacgacggaacgcggcattcactcgttcagcactgtaggacaacgcgacaagaaaggccgaactcggacagagagcagtcacctgacagcagacaaagaactgagtaaccgggttagagcagcattgcggaacctacacccgtga

SEQ ID NO: 435242 - DNA, 1017 bp, Serratia marcescens
atgagtaagtacattgcgtatatcgagtcaccgcttcaggcttttaatctcattgaatatcttgatgcgaatgacatcatgctcgatctgctgattgtcaataagcgctcggccaattccgcgttgaatcatggtcagatcgtgtatctgctgaagatgattaagcatcgctccttgaaaaccattgatgctgaggggaatttgggcaatgcttttgacattaagcggcaattgaagagcgcgacttcagtagtgagtgcgaaggaaactgtcactttgatcgccggtgagtaccgcgccagagttttttggattttggcgcataagtacccaaaaagggatgtagttctactggatgacggtacggcaacgctcagaattaaacgttacaataatgtcactactcggagcatcgtaaagtcggttttccttaagtcacttggcatgaccaataatgagcgcgaaaaaataacctttttctctgtgtatgacattgaaggcaatgtttcaaaacgcgatgtggtcattaaacacagttaccaaaactttaaggctaaactggccagccttcctgatggcaagaacagagtcttcattataggcacgccgctttttgaggcgggggtaacgtctgttgatgatattgatttgacgcttaaaatgataagcgatttaaagtcaagccagactgatgccgaactggtttatattcctcatcgccgcgaacgtgaagagaaaatagaggaaatcagaaagcatgtagaggttcgtcgcttggactttccctttgaggtttatccgattgtggctggggagaacgtcaggtctatagccggtttttattcatcattgtatgataatcttgtgaagatatacgatgaaaaaataaaaataaccgcttatgttctcgatgagaaagttttgtcgccagaatgggtcggattcgtcggcgcaatttataaaaactatgagagttatgaaaacgcggacattacgctgattaaaaacaaactttaa

SEQ ID NO: 435243 - DNA, 666 bp, Serratia marcescens
atggcaaacggcaagttcatcccttactaccgcgtttccactgcgaagcagggtaagagcggtttaggattggcagctcaaagggaagctgtctctgcttacatcagaagcactactggggaagttgtcgacaagtttgaagaaattgagacaggtaaaggttcaaatgctctcgaaagacgtccgcaactgcgagcagcgctggccgcgtgtaaaaaacaaggtgctactttgttaatcgctaagcttgaccgcctggcccgcaacgtccacttcgttaccgggttaattgaaaccgggattaactttgtggcagcggatatgccgcatgctgacaaggtgatgatccagatgcacgcggtaatgtctgagcatgagcgcgaccagatcagcgcccggacaaaagcagctctggcagcggctaaagcacgtggcaaggttctggggggggcaggtagagctaatctcaaaagtaatattgaagcccgccaacaagcggcagagagcttcgcagagaatatgcgaccgctaatcgaaagtatgagagtgcgcggactatcgcagcgcaaaatggttgaaacgctaaatgcttcacggacaccagcaccgaaaggtggtgagtggggattgtcgcagctccaaagggtaatttcacggctcggctga

SEQ ID NO: 435244 - DNA, 189 bp, Serratia marcescens
atgcttatcgaccagctcgcttttgacaatcaatttgtaagacaaggttctgatattgaaagcaagaaccaatgcagaaaacccatcgctgatcttgtcttgtatcagtcgatttctataatgattagcacctccgcccagatcatgatccaggaaaaagataactttctcacgctctttctgacttaa

SEQ ID NO: 435245 - DNA, 135 bp, Serratia marcescens
atggtgtgggtcatgatcgaaactaggtgtcaatggctgctttgtggcaagaacagacactgcaaaaattacactgaattaatctatagcaacttgccacaggaaattgcttacatagcgctactatcaatttaa

SEQ ID NO: 435246 - DNA, 2520 bp, Serratia marcescens
atggtcaattttaaaaaacatctcgctggtagggtggcgcaaaaaccaaccgatccggtagctctttacgatacgcttgatcgtcagcatgataaggggcctctgcgtccagcccaagaggcgatacttaaagcttggcatcaggatcaggcgaaattacgtgacgttatcgtcaaactccacacagggcaaggtaagacgttaattgggttactcatgctacaatctcgtctaaacgcaggaaattcaccggttgtctacctctgtccagaccattttttgatcaatcaaacttgtgaacaagctaaacaatttggaatcagaacttgtactagcgaaggcgaacttcccgaagaattcatcaatggagatcgaattctggttacttccgcaagcaagctttttaatgggatgacaaaattcggactgcataaccaatctatcttgcttgatactgttctgatggacgatgcacatgcatgctctgaccgcatccgtgaacaatgccgaattcgcattccaagagaagaaccagcttacagtaggcttttatcattatttcgagccgaacttgagcaacaaggaatcggtacttttgctgagattgaaaatgagaaaagggaagcttttcttcctgtcccttattggagttggcttagccatgaaagtgaagtagcttcaattcttgcacaagatgctgatcgtaaatctataaaattcgcgtggcctttactgaaagacatgctcaagcattgccaatgtattgtctccggtttggcaatcgagatcgaaccctatgttgcaccactagacactttcggctcttattttaaggcaaaacaccgaatttttatgtctgcaacggtgacagatgatgcttttcttgtcaaaggtctacagctttcagccaaaacaatttcacaaccgttgacctacgctaaagaaacgtggtcaggtgaaaagatgatcctcttaccctccattatccatgaaaatctcaatcgcgagcaaatggttaaatggctagcaactccaagtgataatcgaaaattcggtcgagtaggcctgactccaagcgcggcacgttcaaaagattggaaatcttatggagcagtcatcactgacaaggacaatgttgacgatgccattgctaaacttcttctaggtggatacaaagagaccatcgtattagttaaccgatatgacggtattgacctgcccgactcagcctgcagaatcttgatgtttgattccaaacctttctctgaaagcttaatagatctttatgccgagcgggtaagacctaattctaaagcaacacttactaagacaatgcgtacaattgaacagggtatgggacgaagtgttcgtggcgagaaagactattccgttatcgttgtcgtagggtctgaacttgtgcgtacccttcgagatgcgacctcccgtcagtatctttcgccccagtttgccaaacagattgagataggaattgaacttggaaaaatggctaagcaggaaatagctgatggcgagaacccaaccaatgcattcaatggactaatcaaacagtgcctgacccgtgatgatgactggaaagcttattacgccgagcaaatgagtgatgtcacaccagttggtgctaataaagatatcctcaatatctatgaagctgaacttcaggctgagaaagcttatatggcaggggattatgttggcgctgcaaaaatcctgcaaaatcttcttgacagtggtagcgtggatgccaatgacaaagcttggtatctccaggagcgggctcgctacttatacaactcagcaagagcggattctcaaactcagcaaaaaaatgctcataaaaataacatgttactccttaagcctgcaactggagtaacggtcaccaaactaacattacgtagtcaggggcgagttgaaagaattcagaagtggatcaaaaacttcgataattatagcgagctagatgtcgcagtttcggatattttggagcgactggtattcggtgttaaagctgacaaatttgagcaagctctgaatgaattaagctttgcactcggatttattggtgagcgtcccgatatggaatggaaggaaggtcctgacaacctatgggctcttgacgataagaactatcttctcatcgaatgtaagagtgaggtcgatgttacccgctcagaggtgaacaaacgagaagctgagcaaatgaatcgctcatgcgcttggtttgacaagcattatcctggactagatgctaaacggataattatccatccgtctggtaagatccagagtgctgccgcatttacccatgaggtcgagggtatgcgtgaaattaatctcaaaaacttcgttcaatcgtgccgtatgttcttcaaagcttttgaagggttgaattttaaggacctttcagacgaacatacacaaaaacttattgatctgtacaatctgtctgtacctaaaattttatccagctactccaagaaacttaaagacattaaatag

SEQ ID NO: 435247 - DNA, 1668 bp, Serratia marcescens
atgatgtcattaaaaaccattagagagcaggttctgaattttttatcacaatccagtccctcagtgatggcaattaaaggtgaatggggtgtaggtaaaacttatggttgggaggctttactacttgaggcccaaaaaagaactatgctgtcagctaagagatactcatatgtttctttatttggcatttcctctctggataagttgaagtacacgatttttgaaaactcaatcccaaaagattcaattggtactgagcctaatttagaaagtttaagaacaaataccttgggcatgttagaagtgctaggtcgaggatcttggagtaagcttaaagaaatgccttttataaagtcagcggccccagcggtggaagcattttcttttatgtctatatctgaagcgctgatttgcattgatgatttagaaagaaaaggagcagaccttgatttaaaagatgttctcgggttagtatcgctattaaaagaaaaaaagaaatgcaaagtgattttattattgaatgcgggaactgaggcgacggatgattacgaaacctataaagaaaaagttgtagatattgaattggacttttctcctacgcctgaggagagtgctgcgattgcatatgacaacagaaagacctatcacaaagagttatcagcattcacagtctctttaggtatcaaaaacattagagttctaacaaaaattggtaagtacattgatttagctattggatgctttgaggataccgaacctgagcttaagacacaattattacagactactgctttgtttagctgggcatattactgttcgacacatgatgaggatatcccgagcttagattttatagaatcaatggaaagtatctattatgttgattccaaaaaactaagtgataaagaaaaactttggaaaaatattctattggggtattcatttacgagggttgatgcgttggaccgagagatagctaagctggtgagacaaggatatttagatcgtgagaagttcacactttctatgactgacgtaaatcagcaagttatcaataataagaaaaataatagctataggcgtgcatgggacagttttcacaatagtttctcagacaatcagcaattagtgattcagcaactttttgatagtttcattttaaatatccatcaagtcaaccctggagatttagatagtttggtaaatgtttttagaacgcttggtgaaaacaacagggcttcgagaattattgacgagtttatatcgaagagaaaagatgatgttgaattgtttaatcctgataatttcgattttaatcgtaaattagaggatgaggaaatagttgataagttcagggtgatatatttacaggataagccaagaacaactattaagatagttcttgagcggatttctggtcagaatggttggaatgaagaagatattgagacactttctaatgcgactgaagatgagttttatacatactttaaagaacttaatggccccaatttaacatcacatgtttcaacatgtttgaaatttggtggtttcagcaatggtagcgaaaaaatggagtcaatagctttaaaagcaaaagccgccctacgtaaaatcgcatctgaaagcaagattaatgagatgcgaatgcgtaagtttgggttgtaa

SEQ ID NO: 435248 - DNA, 603 bp, Serratia marcescens
atgaacacatcaccgtggaacaaagaccgcatcatcggccaaaaaagaccacttcagatatctcatatctgggggatccgaatcaggcttgaactggaaggtaaaacgcgcgatttggctctgttcaatatggccctagatagtaagcttcgaggctgtgatctggtaaaactcaaagtatctgatgttgcatatggtagctctgtttcaagcagagctacggtgctacaacagaaaaccggcagccctgtccaatttgagataaccaaagggacaagagaggctgtttctgcattgataaagcttggcaatttacacagtaaagactacctgttccgatctcgggtcggtactaaccaacacatatcaccccggcaatacaaccgaatttttcatgggtgggtagcaaaaattggtctcgaagattcgctttacagtacacattccatgagaagaacaaaaccttacctgatctacaagaaaactaagaatcttcgtgtgattcaactcctgttaggtcataagaaactggaaagcacggtccgttatctgggcattgaagtcgatgatgcgttagagatttctgaatcgattgaagtctaa

SEQ ID NO: 435249 - DNA, 1524 bp, Serratia marcescens
atgtttagaataaattcaatcatgaacgacagtcgagacaaggtaagagtccatgactttagtgaagactcacataacaattattacacaattctcactggtgataatgcaagcggcaaatctagtttattaagtaaggctataaatttctttctgtttagcaatgtaaataacaacgatcgcaaccccgctgttgaacttgaatgtttatcagagaggaatcctagcaaaatcattgccatatgcaactcaaagtttgatagattcacatccaataaaatcctcaatgataaattaaataataaagaagcaactcgaattacaatgagttacattcacccagaggtaaatgacaataccaggagagggatatcgggtattgttgaccaatgcattaaaaattcattgcgtcataaaaacataagaggtttgcaagacgctaatagagtgaaagaagcatttatgatgtttgggttgcaatctgatttgcaccttaagtgtactttgaatacacaaaacataaagtatgtcttgtctatattaagcagtctggttaatggtggggtgatactgtctgacgaaggtattacgcataccaagaaaattgattattcaaaaaacgaagagttgaaaaataaaaacttcaagttggacaagtctattgaaattattttaagagaaagtgaatataaaaaccatttggatggattatacgacacgttgctaatgttagatgcagggaagtttacacagggaaattttagtagtatatatttttctgttgcagaaggaacaattagcacggaatctaaatatctatttgatgatctaaatgaagctgaaataattaatattttatttgtattggatgtgattaatgtttctgatattcaggttatgcatcttaactcaaaaaaagaagtcaacatagtttcactgagttctgggcagagaacattattcggcaatgcaattgtattaagtggatatgtagaaaaaaactgcatgatatgtattgacgaaccagagaatagtttacatcctgaatggcaacttaattttatgcgtttcatctctcttttatgccccgacactcttgaagctcatatacttattgcgacgcattcacctcaaattatttctggtatgcagtttgataatggttgtgtgctgtccctagaaaatagagataattttgattcaataataagaaaagaaaacaaatatgaagaaggtgggttttatgaactacagcctttgaaagcctatagagagcagtctgctggaaaacaacttacaggtgtttttaaaagccctgggtataaaaatgactttatcataaaaaaattactcttaatactgtctaagatatcaaaaaaaatcgctcttacaaaagatgataatgaatttatggacgaaatcagcatactcattgataaaaaaagaataccggaaggagaccctgtacaactgatattcaagcagatccttagctttgagtatgcaaggaactctgatgattaa

SEQ ID NO: 435250 - DNA, 675 bp, Serratia marcescens; identical to SEQ ID NO: 95689

SEQ ID NO: 435251 - DNA, 738 bp, Serratia marcescens
atgtcacattcccaaaaaaaacttaaaaaatcattagttactgtttttttgagtggtatccttgctgttcttggatattttggagcattgaacggggtgttcgatttatatcaaaatatcgcagataaatttttgcaaaaaaaagcagaggataatcttcatgtgatttataccggagcgtcaataaagtacatcgagtcaatttttggccctcccgtgaaggaggaacattctgaggatgggagggttcatgagtatatttactctttcaaaaagttctatctgcaagttgtttatgataataataatacagtgatactctattccgtaaccagcaaggatgagaattttcatcctgaagtaccatatctgagaaaaacccttggacataagttcaaagattttggaagtgatattgattatttacagtcgagctattcttcgaagttctatcaatatgaggaagggcgttatttaggaaatcctggtaactatagaaatttttaccttgcctataatcctgctggagttgattattctgagttgcatccacttcctgatctctctaatgacgacaaatctcctccaaataaaaaagatcttgagagattcagaaataataatgctccaaatacatttggggtaggcgatatcctcggaggtcctgatgggcttgagttaagctttggacttgggattggttattacgatgcgagagatattccagataaagattag

SEQ ID NO: 435252 - DNA, 402 bp, Serratia marcescens
atgcgattttccattgtaaaaaataaaagcggccaggttccgccgcagagcagttgcgattttctgccgccgggcggcaccatcggccgcagcgtggacaacaacctggtgctgccggacgaagagcgcgccatttcccgtctgcaggcgatcgtgcatatttccgctgacggcgaatgccgcatcactaaccgcggcaacgttacccgcgtgctgctgaacgacattccgctggaacgtggccgccaggttgaactgcaggacggcgacgtgctcggcatcgacgattaccagattgaagtcagcgcgctgcaacagcacgccgcgccacaggctcaaccggtggccaaggccgccgccgttgccgctgctgcggcccctgcagccgccgccaaagaataa

SEQ ID NO: 435253 - DNA, 708 bp, Serratia marcescens
atgtgtggtcgatttgctcaggtacagacccgcgcggattatctagatgttctagcatccgatcttgaatttgccggcgcactggataacgtgccaattgcgcgttacaacgtggcaccaggaacccgtgtgctggtacttaatcaacgcgacgacaagctacaccttgatcctgttgagtggggttatggccctgattggtggcgtgaaatgaagcgtcagccggttatcaatgcgcgcgttgaaacagccgccaccagcagaatgttcaagccgctatggaatcacggtcgcgcgctggtgatggcagatggctggtacgagtggaagaaagacaagcacgacggcaaagtaaagcaaccctatttcatctatcacgaatcgaaagcacctatatttttcgccgcgataagccgccatcatcccgatgctatagagcctcctgatgatgacggttttgtcatcgtgaccagcgccagcgattcgggcctgctcgatattcatgaccgtcggcctgtcgttttgccaccagcagctgcacgcgagtggttgaggccagacatcacatcagcgagagcagaagaactcgcgaacgaagcatccacacctcccgacgatttcgcctggcatcctgtaggaaaatcagtcggcaatatccgcaatgatggcgctgagctgattaagcctatcgccaacccactggtttaa

SEQ ID NO: 435254 - DNA, 909 bp, Serratia marcescens
atggtagcagtaaaccaaactgggaaagcctattacggctttcgctcagcgttagatctatcagcgtctattctcgacccgcaggctctttttgctgcatataaggcgcgtgtggttgcagatggtggcactatcccagatgaagctggttgcctagcacggttttcatttctgctgaataacggcatgtatgagaaaaccacattctgtgcagcgcctgcatttggattgaaagttgatggcgctggaaatgtccaaacagtttataacttgtttggcgccgctggcgatttgatcgcgggttcgcaagggactcctccgctggcaatgacctatgatgccgccgcgcgtgcagtgattattcagatcacatcgagtggaggttggtatcttaaaagccgcgcgagccttgtcattcataaaagttcgacttatctgctcgctggccgcatgagcgatctaaatcgcgctgacaacaacggcattactgcaggatacaatctgacaggtttgccgatggcatatcttcggacaatgataacgaatggacaaaaagagacggaagcctggcgctatggaacacgcgatagcgcctggcctgctggtagcggtggtgctctcaatgctgcaacgaatatctatgctgactacgtgccatctgcgggcctgttcaaagtggctgaaggggttattgaggggtacgagaaagggaagttgcttgtgacctccgcacctgcggcgactggcaaactggccgacttgagcagttacacttcaccgatgttgatcggtggtacgcagttagcgaataacatcgtcagtgcgtgctatggggcatttcaggacatgctctgcctacacactgctgacgaatcagacgcgattcttgcttcacgcctggggatgtga

SEQ ID NO: 435255 - DNA, 3348 bp, Serratia marcescens
atggtagcaattgaaggtcgaaagggcggtagtagtaccccaagcgcgccatatgagtcacctgattccctacaatcgacgtcatttgccaaaatattactggctcttggtgaaggtgaatttggaggaaatattgacggtactcgcatatttctcgatggtacgccgattatttctgcggatggtactgaaaactttcccggagtgcgctgggatttcaggcctggaactccgcatcaggagtatattcctgggatgccggatgtagagaatgaaattgcagttagcacggaattaaccagcgatcgagactgggtgcgagctgtctcaaatactcaactctcagcagtcagattgcgtttttcgtggtcgcagcttcagcagcagcaggataacggtgatgtggtcggctatcgtattgagtatgcgatcgacattgccaccgatggtggtgcctatcaagaggtgttgcgcacggctgtagatggcaaaacgacgaccaaatatgagcgcagccaccgtattgatctgccggcggcattaacaggctggcaggttcgcgtccgtcgccttaccccgaacagcacaagcaaccgagtagcagacaagatggtcattgaagccatcacagaaacgatcgacgccaagctaacttaccccgaaactgcgcttctctttgtccagttcgatgctaaacagttccagaatatcccacaggtgtcatgcgaacctgacgggagagtgatccgtatcccatcgaattacaaccctgtgacacgtgaatataccggtgtttgggatgggacatttaaagttgcatcgacaaacaaccctgcatgggttacctacgatttgatgctgaatgatcgattctcgatcggtacgcgcgttaaagctgagaatcttgccttaacaaaatgggatctctatgccatcgggcaatattgcgatcagccggtaccagacgggcgaggtggggatggtaaagagccgcgatttacctgcgacgtttatattcagtcacaagaggaagcgtggagcgttctacgggatatttcctctatctaccgcggcatgtctttttggtcaaacaatcagatgtatgccctggcagatatgccacgtgatgttgattacgtttacacccgcgccaatgtacaggatggcaaattcacctacgcaagcgccagtgagaaaacgcactacagcacagctatggtgagctggagcgatcctgcgaatgggtatcaggacgcaatagaaccagtatcgatcaaacggctggtgaaacgctggggcattaaacaagcagacgttacggcgataggttgcgtcagaaaatctgaggcagtaaggcgtggtaaatggctactgctcacgaatgaaaaggatcgtggtatatcgtttactgtcgggttggaaggaaaaatccccctgcctggctggatcattgcggtggctgatgaaatgttggccgggcggccgcttggcgggcggatcagttcggtatctgggcggaatattacccttgaccgagtgtcatctgcagccgtgggagaacgcctggtattgaacttgccaagcggcaaggccgaagggcgcactattgcagctgtggcaggtaacacggttacggtcaccaccgcttattccgaaactccggtggcggaatcagtatgggcaatcgacgccgcagacctggctctgcagcagttccgggttacggggatcactgaaggggaagatggggtttcattcgagatcacggcagtggaacacgatccgaataaatatgcacgcatagacactggcgctcgtatagaagacccgccgatcagcgttataccacctggtgcgcaggttccacctgcgaacgtgcagatcggtgaatcgtcggcggtatttcagggcatggcagtggccactcttcgcgtcacgtgggacagggcagaaaatgcgatcgcgtacgaggctgaatggcgccgtgacaacggcaactggatccccgtgccgcgaacttcaacacttgggtttgaggttcccggtatctatgccggtcgctatcaggctcgtgtacgtgcgataaacccttctgagatttccagtgtgtgggccaatgcgccagaaatggtgctgaccggtaagcagggcgagccgccggcgctggccagcttcacgacgataggtcaggtgttcggcattgtgttgaactgggagtttcctctcggggcagaggacacgcagcggactgaaatctggtacagccagaacgccgacggcagcaacaaaatgcacctgggcgactatgcctatccacagcgcagtcacacgatgacggggctggcggcaggcgtgaatttctggttccaggcgcgcctggtggataagctcggcaataccggcccgtggacgaactgggtgcagggaacatcgagcgaagacgccagcgaggttctcgactacctgaaagggaaaatcaccgagactgagctggggcaggatctgctggggccggtggaggatgccggcaagctgaaagatatgtggtcagtgaaggtcgggaagaccgttgatgggaagctttacacagccgggatcggcgtcggcgtcgagaacactccggaggggatgcaaagccaggtgctgattttggctgaccgtttcgcagtgctgaacacggctgatggtcaaggatcagcggtatctgtgccatttgctatcgaaaataatcaagtgtttattaacgatgcatttatcaaggacgcttcgataacaaatgcaaaaataggggaatacataagctcaaataattacattccgggtatgacggggtggattataagaaaggatggtagtgcagactttcaaaatgtaacggtgcgtggtgatatttatgccaattatggtgttttgaataatgtcactattaacgaaaactgcactgtgaaaggtactgtctatgcagagaatattgtcggtgatgtggtttctgttggtgcctgggggcgaatattaaatagcggggttaacgactctaaacaccgatattttactggtggtttgccatacgcctcagttttgatagtttctaatccgggtttatacaccgggaataaacccggtagcggtggctcggtttatatcaaagtgaatggtgttgatatattcagggcgagtgggagttctgggactcgttatgatagcgctatagttgtagatgttcctgcaaatggaacagtagacatggagtttggaataacaggagctgaatcaggacaattctgggggaatgatgggcctatggcggtaatggttttccgcaaaggtaataatagattccatgattaa

SEQ ID NO: 435256 - DNA, 702 bp, Serratia marcescens
atgcgccaaaagataatcagcgccatactggcgcacgccgaagctgagtatccgcgggagtgttgtggggtagtagttcagagtggccgccgacaacgctacgtgcgctgcctcaatctggcgccggaaccaacggagcaattcagcctggcgccggccgattacgctgcagcagaggatagtggcacgatcgtcgccattgttcatagccacccggatgccacgacacaacccagccagctggatctggcgcaatgtgatttgtcgcagcttccgtggatcatcgccagttggccggaaggtgacattcgcgaggtgatcccgcgtgagggagtcaaaccactgcttgagcggccattcgttcacggtatatgggactgttacgccatcgtgcgagactggtatcaactcgaacgagggatagcgttgcctgactttacccggacagacggctggtggaatcgtggtgaaaacctctatatggcgcactatgctgaggcggggttcgtgccggcatcaggagaattacgggttggcgatgtgatcgttatgcaggtgcaggctcctgagccgaaccatgccgctgtttacctgggggacgggattatgatccatcatatgtatggtcagctcagtaaccgtgtctcatacggcgggtattggcaagaacggacgatcacggttttgcgttttaacgggtga

SEQ ID NO: 435257 - DNA, 750 bp, Serratia marcescens
atgtcaattaatgcggatcttcagcttctgcggccggggagcaaggtgtatttgtttcatgttgacggcacccagttcgatggcccggaactctttttccacaactatccgatcccctataccgaagacgaattgaaagccagcggcggtgatccggcgctgctaccggccaaatccatctggtggcaggggcgggagtttaagccgtggcccattcaggctcaggggttcgaagtcaccagtgatggcaatgcgcccacgccaacactcagtgttgccaatctggatgggacgatctctgccttatgtctggtttacgacaacatggcgcaggccaaggtgatccgtcacttcacttttgctcaatatcttgatgcgcggaactacccggagggtaatccggaggctgacccgacgaaagaaaagctggacgtgttctatatcgatagtaaatccagcgaagaaaacgaggttatcgaattccagctctcttcccctgcagacctccagggtattcagatcccgactcggcagatccacagcctctgcacctggtgcatccgtgggcaatatcgtggcgcatcttgcggatacaccgggacgaattatttcgatgaagacggtaacccggttgatgatccggctaaagacgaatgtggtgggcaacttagcgattgtaaaaagcgctggggagcgactgcaccgctgccgtttggcggctttccgggctcagcattactgaagaggtaa

SEQ ID NO: 435258 - DNA, 354 bp, Serratia marcescens
atggcacaactaaaaacgttcaattaccgctcacgctacggtgctgaaggggaatttgagccagtcatcagagaggttcgatttggtgacgggtacaggcaggtaagcggcgatggcatcaacagcgagaacgaaagctggccattaacgttttctgggccgtggcacttcatcaaccagatcgtcaattttttacaagagcatggcgggtatcgtgcatttcaatggcggaacccgctttttaaattggggctctacactgccgggcgttatacggtaacgcccacattttctaacgcacagggcagaaactataccctcactgttacattcacgcgcgcataccacccgtag

SEQ ID NO: 435259 - DNA, 3126 bp, Serratia marcescens
atggctgagcagattgctgatctcgtcgtcaatctggatgcaaatacagtttcgtttcaggagcagatggggcgtgttgagcgtcaactgcttgagtctagccgaaaggccgatgtgtccactgaacgaatgcggcgcctggctgagcggcaggcatcggcgatcggtggcatagcagaaaacagcgcgggcgctacaacaaagatgctggccagccagtccattgccgttgatggaatgaagggaaagtgggctgaggcttcacgcgccgttgatgaaacgcaccagcgtatcgcggaacttagcgcccggttgagagaagagcagcagcaaacccaggttactggtgatgctcaggatcgtctgactgcatcatttttccgccagatcgacgcgattaagggcgaggagaatagcctgagagatctgcgcgttattcaggagcagatcagggccgcgagggctgcgggcaatataacgcaaggcgactatctttctctggttacggaaaccgctaccaaagagcgggcattagctcaggcagagcgtgccgccgaacaggccaaagaaagctatctgcaaaaattgcgtgagcaggttgccctgcagggaaaaacggcagctcagattcaggagtacaaggctgcgcaattaggtgtgtcgcagcaggcggcgccgctgattgccaaaatccgtgaacaggaggacgcctggaaacgtggtgcgatctccgcaggtcaatatcgcatggccatgcgccagctgccgatgcagattactgatatcaccacatcactcgctgcgggcgcgccggtgtggttagtggccatccagcaaggtggccagatcaaagatagttttggcggtatgggtaacgcgctgcgtgccatgttagggctacttaccccggcacggttgctgtttggcggatccgcagtggcattggggttacttgcctatggtgcatatgacagcagcgcgcgaattgccgatctcaacagagaactagccagaaccaatggcgtgtctgggctgacaaaactggggttgcaggggctggttgagcaggggatggctgcaggccaatcgtttaccgcggccaccgactctctgaaagccttattagcagctggcgcgccggccggaacaaatttttctcaggtaagccaggcgatcgctgcattctcgagagaaagtggtgaaggcttggacgtcttggccggaaaattcactgctattgccaaggatccaagccaggggattctggcgctgaatgacagtttgcatttcctgaccgctgaacagtacgccaacattcgatcccttgaagaacaagggcggcacatggacgcggtgaagctggcatctgatttggcggcacaagccatgcatggcgccgccgaaaaaatgaaaaccgagctttcttctgttgagtcttacatgcgcacgctgaaagatatggccggcggtatgtgggatgccatcacgggtgtttttcgtgacaaaaccgccggcgatgctgtagctgaattggcgtctcgtgctaccagtcggcaggcgcagatcgaaaattcggaacggacaggttacaaccagaagaacggaaaacttcaggcgtggcgtgaagagcttgcttctctcaactcccagcttgacgccctgaatctgcagcgcggtgttcaacaaggcctcgcaaatattgcacagcagcaaaaagcggaagagcaggatcggttgcgcctggcacagcagcaggatgcgctggcaaccacgctgcaaaccaaggaagaaaagcgtgcgaagttgatccggcaaacgaacgaagcttttgaaaaagggctgatcaagtcagaagctgagcgtgacaagcagatccagcgcattaacgagcaattcaaggatccgaaaaaaccaaaggggccacaataccgcacgccggcaggtgaaaaggcatcggatagcacagagtcggaactgttggcgcttcaggcacaattgcaggtgctgcgtcagcacacgggcctgaatgacacgatcagccagcagcgcaaagatctgtggaagacgcaggcgcaattcacagtgcttgaagaggcttccggcaagcgtcaactctctgttcaggaaaaatcactgctatccagcaaggacaaggtgctggctctggcagagcaaaaagccgaactcggtgatcaaattgctcaccaggaacggctgaacaaattgcaggatgcctcgacaaagtatgtcacccaaatggcagaaaagcagcaggcgctgcagcgcagcgccggattgggagatcgagctgcgcagcgggagagcacttacgctcagcttcgacagggctggcaaaatcagggaggagatctgaacgatgcgggttatcagcggcagctgcaagcagctcaggactactatgccgctgaggacaaattgcgcagtgattggatggccggtgcttccagtgcctggagcaactatcaggatcaggcatcggatgccgccggcatgacaaagtccctgttcacttctgcattctcaggcatggaagacgcattggcgtcatttgtaacgacagggaaagccgggtttagagagttcactacggcgatcctctctgatcttgcaaaaatagcgttgcgaatggcaatgagccaggggttgcagagcctgttcggcgccatgggtggtggaggcaataaccccggacaggttccgatgtttgcgaacgccaaagggggcgtttattcgtcaccatcattgagcgcatatagcgggcaggtcgtgaatcagcctacgttcttcgctttcgccaaaggggccggcgtgatgggtgaggctggcgcagagggcatattgccattgaagcgtggcccagatggccgtttgggcgttagtgcgtataacactgcctcggcgggtgcgaccggcacggcgccacaggtgaatatctacctggatggtaacgggcaggcatcacagcagcaaacggcgccgggcctggaatcgtttggggctgatataggcaattatgtttcgcaaaaatatcgtgagctgagggataaggatcttcggcagaacggggtattaacaagggctattcgcggagggaggggcggataa

SEQ ID NO: 435260 - DNA, 258 bp, Serratia marcescens
atgctttcagagatcagtgcatctgagctgggtgagtgggctgatttttatcgggaaaatcatttttctgatggcttgcttgatacccaattttcgtcactcaaggccatgctggtggcgctgaacactaccggcgatgatcctatttatcccagtgactacagcttactgaccccgccagagccggaaatagagcagacggacgatgatcttatgttgatcggagaggggattttcggaggggttcgctatggctga

SEQ ID NO: 435261 - DNA, 423 bp, Serratia marcescens
atgggcggatttatgctgaaaaaagacactttcgaatatgccgatcagaagatcgacatcagcgagctttcaggtttgcaacgcattgattatttggcttttatcaaaaaagaggccgatcagtttgatgcgatgcctgatgacaccagtgattctgacaagaatatcgcatttaccactatgcgcctgcgaattaacgcctggttgattgctcgctctatgtggaatatcgacaaaaaacaagaagttgaaaatcttcatcagaatattttggttgactggtctggcgctgcgatcgccggctgcagccacaaaattttgacgttgagcgatatgatcccgacggaaattgaacctgcagcggatgctatcgtgggcgatgaacctaagtgcgctccggaaatcaccccggaaaagccctag

SEQ ID NO: 435262 - DNA, 738 bp, Serratia marcescens
atggcaactccaaatcctttggcgccggtaaaaggcgccgggacaacgttttgggtatacacgggtagtggtgaaccctacgacaacccgttaagcgatgatggctggacgcgtctggccaaaattaaagaactgcagcccggtgaaattaccgctgactcgaacgacgacaactacctcgatgacgaagattcggactggaattctacgtcgcaaggggcgaagtcggccggtgaagcaaacctcacgctggcatggaaaccgggtgaaactggtcagcagggtttggctgaatggtttaattcgggtgaggtacgtggctataaaatcaagtaccccaacggtgttgtggacgttttcaagggctgggtaagcagcctcggtaaaactgtgactgccaaagaagtcatcacacgaaccatcaaggtgactaacagcggccgcccgctgctcgcagaagatgaagttactccatctgtacctgtaaccggcgtgacggtcgcgcccgcaactgccaatgtggcggtcggggctaccgtcgatctgaccttcagtgttttacctgcgaacgccacggatgcaacgctgcgggtttcttcctccgcgccagcaaccgccacggtgacgcttaacggcaacgtggcgaaagttaaaggggtaaaagcgggcagcgttgacattgttggtatgacgaatgacgggctgtttgtggcgctggccaaaatcaccgtcgcttaa

SEQ ID NO: 435263 - DNA, 402 bp, Serratia marcescens
atgattaagcacacagcgatccgcaacgcagtgctcgaacgctgtcgctcaacgatcaccgatgatgtgacgtattttgacggccgcccggctttcatcgatgagaacgatctgccggcggtcgccgttttccttgatgacgcgcgttatacggggggggaactggatacggacagctggcgagcgatgctgcacatcgtggtgtatctcaaagccactcaacccgacgcagcgctcgatcagtgggtagaagagaagatctatcccgttctgaacgatatccctgaactggcccccttggttgaagccatgagccccgttggctacgactaccagcgagacgatgaaatggccacctggggcgccgccgacctttcctatcaactgacatataccatgtaa

SEQ ID NO: 435264 - DNA, 564 bp, Serratia marcescens
atgaaaggtatcgagcaggccattcgtaatctgaacaccctcagtaaatccatggtgccgcgcgccactgcccaatcgttaaaccgcgtggcaggccgagctattagccgcagtaccaagctggtggctgaggatgtgagggtacaacagaagctgatccggcaacgcgccaggttgcgaagagcgagtgctgagcaaaatccaccacgggcgacgctttcaatcaaccgcggtaatctgccggcgataaaacttggggcggccagggtacagctttctcgccgggtaggttttgttggcaaacagggaagcgtactgaagatcgggcgttttacctttcgtcatgcgtttattcagcagttggctaatggccgctggcatgtcatgcggcgtgtcggtcggtcacgttatccgatcgaagtcgtcaaaatacctttggtgacacccctgaccaaagcctaccaggaagagacgcggcgtttgctggaaaccgatatgggtaaggaaatgggctatgccctgaaaaaccagctgcggctttatcttgtgaggaaaattggatga

SEQ ID NO: 435265 - DNA, 243 bp, Serratia marcescens
atggatcgcgtcacgcaatctcggttcggcaaacctgtcatgttgaatggggcgcctcatattgtcgtggaggcgcattttttacccgagctgcaagcggttagcggggatggcatctcgttggtggtatttaccgcgggataccgcccccggcgtaatgatccggtggagttcgacggtaaaccctacatcgtgacgcggtatcagcagtttaacggtaagcctcacatctggatcgaatag

SEQ ID NO: 435266 - DNA, 324 bp, Serratia marcescens
atggctaagaattttgtgcagaacggtaacaccatcgctattaccgcggccgccgcggatattgccagtggcgatcctgttgtcgtgggtgatctggtcgccgtagcgattacggacatcgcaaccggccgcaccggtgatggtttcgtttccggggtattccaactgcctaaattggcggcggatgtcattccggccggcaaaaaggtattcatcaaggacggcgtcgtgcagttggccgcgacagacgctgtggctgccggctttgcctgggaggcggcggcgaaagacgtcacggtggttgcggtaaaactcaatggctaa

SEQ ID NO: 435267 - DNA, 1953 bp, Serratia marcescens
atgcaggccaaggccaacagctctgctgatatctacatctatgacgagatcggctactgggggatcacggccaagcagtttgttaatgatttgcaggcactgggtgacattacccagattaacctgcatatcaactctccgggtggcgatgtttttgacggcatcgccatttttaatgccctgcgcaatcatggcgctgcgatcacagtacatattgacggcctggcggcttccatggcgtcagtgatcgcgatggttggcaatcccgtcatcatgcctgaaaacaccatgatgatgatccataagccatggggcttcgccggcggcgacgccaacgacatgcgggactacgcagacttgttggataaggtcgagaacgtgttgatcccggcctatgtcgccaaaacaggaaagtcggcggatgaaatcgccgccatgcttgacgatgaaacctggatggatggcaaagaatgcctcgctttaggtttcgctgatcaggtcaccccctctctgcaggccatggcctgtattcattccaaacgcattgaggattttgaaaaaatgccaaatgatatccgtaacctgatcaccccaccgcgtaacagcacgactcctgcgccgcagcctaagccacaaccagccccgacggtacccgaaaataccgtggatgttgctacgatccgcgcgcaggtggtggcagagcaaaaggcccgtgtgaccgacatcaataacctgtttgccatgttcggcggcaagcatcaggaacttcaggccagctgcattgctgatctggattgcaccgtctctgcggcaaaagacaagctgctggaaatgctgggtaaagatacgaccccgtcagacaaaaccacggtcggcgcaaaagcacatatcggtaacggtaacattgttggcgatagtgtccgtcagatgttgatggcgcgcgccggctatgaagagcgcgacaacagcaacgcgtataacggtatgacgatgcgtgagttggcgcgtatgtcgctgaccgaacgtggcatcagcgtttcgacgttaaacccggttcaaatggttggtttggcgctgacccacagcacgtctgacttcggaaacattctgctggatgtggctaacaagtcgattctgcagggctgggaagaagccgacgaaacgtttgaacagtggacgaagaaaggccagctttccgactttaaaaccgcaacccgcgtggggctgggcggtttcccatcgttgcgccaggtgcgtgaaggtgccgaatataagtacgtcaccaccggtgatcgtggcgaaaaaattgcgctggcgacctacggtgagatcttctctatcacccgccaggccatcattaacgacgatctcaatcagctgaccgatgtaccgatgaagatgggccgggcggcgaaagcaacgatcggcgatctggtctatgccgtgctggtggacaacaaagtcatgtccgacggtaaaaagctgttcagtgccgaccataaaaacatgacaaccggcgccattgatgtggcaaacctggataaagcccgtcagctgatgcgtacgcaaaaagaaccgactaccggccgtccgctgaatattcgtcctgcgttcctgctggtgccgacggcgctggagacagttgccaaccagactatcaagtcggctagtgtgaaaggggccgatattaacgccggcattatcaacccaatccaaaactttgcctctgtgattggcgaggcgcgccttgacgacgcggatccggccgcatggtatctggcatcggccaagggcagcgacaccatcgaggttgcgtatctcaatggcgttgacgtgccatatatcgatcagcaagagggtttcaacactgacggtattgcgaccaaggtacgtattgacgccggtgttgctccgatcgatcaccgcggcctgacgtattcgtccggcaaataa

SEQ ID NO: 435268 - DNA, 1512 bp, Serratia marcescens
atgagttttatcgatgatgtgatcggcattctctcgccggcatggaaagctggtcggctgcaggcccgctataagattgctgcctatgaggcggtaatgccgactcgaacccataaggcacgcagagaaaaccgtaacgctaaccagttgacgcagtttggtggacgctccttgcgagagcaggcgcgctggctggataacaaccacgatctggtgatcggcttactggacaagatggaggaacgcattgtcggtgcgcgcgggatcatcgttgagcctcagccactgctgctaactggggaggtggcggatgatctggccaaggagattcgagccgcatgggcggagtggtctgtggcgccggaagtcactgggcaatatacccgcccggtaatggagcggttgttggcacgcacctggctgcgtgacggcgaggtgttctgtcagatggttcagggaaaagtggccgggttgaccccgcaggccggcgtgccgttttggctggaagccctggagcctgattttgtgccgctggacagcaatgacagtggtgcagggctctgtcaggggattttccttaatgactggggccggccccaaaaatatcaggtttacaaatcactgatcacgtcgggcattgccctgggaaatgtcaaagagatcgcagcagagaacatgctgcacctgaaatttgtgcgtcgcttgcaccaggtcaggggtaacagcttgctttccgggatccttatccgactcagtgcgctgaaggattacgaggatgctgaattgaccgcagcccgtattgccgctgcgcttggcatgtacgtaaaaaaaggcgatgggcagtcatacgatggggataactcgcctgatgatgctcgtgaaatggatatcgtccctggcatgctctttgatgggcttcagccgggtgaagaaatcggcatgatcaagtcggatcgccctaatcccaaccttgaaaacttccgtaatgggcagttacgggcagtatctgccggtagccgtggcagctactccagcatcgcacgtgactataacggcacctattcctcccaacggcaagagctggtggagtcattcgagggttataacatcctgcaagattcgtttgtggccgcgatatctcgtccgaattaccgaaactggctgcagatggcgatcacatctggcgtgataaaaaccccggctgatctcgatcagaaatcgctgtttaacgctgtgtatagcggcccggtgatgccgtggattgacccgctgaaagaggccaatggctggaaagttcaggtgagaggcggcgctgccactgaaagtgattggatccgttctcgcggcgccaatccggcggaggtgaagcgccggcgcaaagctgaaattgacgaaaacaacaagctggggctggtgtttgataccgatcccgccaacgacaaaggaggcaccagtgccgaagcaacgaaacagggcgagtcgtcgtcccaaagcgaacgccggaagaaataa

SEQ ID NO: 435269 - DNA, 216 bp, Serratia marcescens
atgaatcaggccgatatcgaaaacatgatccagggctacgtggctgcggaaaaggcggttctggaggggaaatcgatcacttttaacggccaatcaatgacgatggaaagcctgtcagaaatccgcaaagggcgggcttattgggagcgaaggctaagcgatctgatcgcatcgcgtcgcgggcggccgatgtacaacgtggcgaggttcccatga

SEQ ID NO: 435270 - DNA, 2112 bp, Serratia marcescens
atgatagctaactgttacgcatcggccagcgccctgcgtcgtgaagtggccacattactaaaaccgccgcggcgcatgccggtggcgcaggctgttgctaaatatatgaatgttccaatgggcgcagggagttcacttccatgggatgcgacactcaccccgtatattattgagccgatgaactgcctggcatcgcgcgactatgatgctgtggtctttgtcggcccagcgcgaacagggaaaacgttaggtcttattgacggttggatcgtctataccatcgtctgcgatccggctgattttctgctcattcagatgaccgaagaaaaagcccgcgagcactccaaaaagcgcctcgacaggacgtttcgtgttagcaaggaagtggccaagcgtcttagtccccgaaccaacgacaacaacgtccacgataaaacattccgtgcaggcaactatctgaagatagggtggccatctgtaaacatcatgtcatcttcggattatcggttcgtagccctgacggactatgaccgctggccggatgatattgatggagaaggggatggcttctcactggcatcgaagcgaactaccacgtttatgtcatcaggcatgacactggtggaaagctcaccagggcgagagatctccaatgggaaatggcggccgagttcgctgcatgaagcgccgccgacaaccggtatcttgtcgctgtttaatcgtggcgatcgccgccgctggtattggccatgcccacattgtggtgaattcttccagcctgttaaagcgaacatgacggggttccgcgaacataccgatccggtcgtggccagcgaggcagcttatatggaatgccctcactgtgccgggcggataaccgcaaatcaaaagcgtgaactgaacggccgcggtgtgtggctgaaagatggggagaaaatcagggcaaacggtgaacgttatggcgagccgcggcgatcgcgcatcgcctcattctggatggaagggccggcggcggcgtatcaaacctgggcacagctggtttataagctgctgacggctgaacaagactttgaagccaatggcagcgaggaaacgctgaaagcgatcatcaatacagactggggcttaccttatctgccgcagtcagcaaccgaacagcgaaaatcggatgcattgatggcacgggcggagcctgtcacgaagcgcgcggttcccgaaggggtacgcttccttgtggcaacggtggatgttcagggcgggaaaaatcgtcgttttgtcgtgcaggtcatgggatatggtgctcatggcgagcgttggctggtggatcgttacaacatcaggcagtcgatgcgttttgataagaacggcgaaagcctgccggttgatccggccgcctatcttgaagactgggacttattgcgtacggatgtactcgataaatgctggccgttagataaagaccccagtgtaaaaatgccagtgctggccatggccgttgactccggcggtgaggacggtgtaacgggtaatgcgtacgaattctggcgcaaatgccgccgggatggggtgcagaagagagtttatctcttcaagggtgacagccaggcacgtagcaagctgatcagtaaaacattccccgataatacagaacggtcaaaccggcgcgcgcaagcacgtggggatgtgccgctttatcttctgcaaaccaacgcgttgaaagaccggattaataacgcgctgctgcgcggtacgccgggggctaattttgtgcatttccccgactggatcggcgaatggttttatgacgagctgacgtacgaagagcgcagtccagatggaaagtggaagaagccgggccgcggcgccaacgaagcattcgacttgatggtttacgcacaggcgctggtgatcttgcgaggttacgagaagatcaaatgggagacgccgccacagtgggcagaaccctttgaatattcaacctccccgttaccagcaacaaaaccagtatcccgcccaaaagcagtacgtgaaaccgaacaaaaagatcccgccggcgctgaaagtaaaacttcggcgtgggcgcctattaactcttcaggagggtggctatga

SEQ ID NO: 435271 - DNA, 510 bp, Serratia marcescens
atgtccaacatcagcaatctgggggacgcctacaactggagcgtagcgaagattgctgaagcttttgggctgaaccgcggcacggtgcgaaagcggctgcttgaggctaatacgccgatcgccggcacggtgaaaggcaaccctgtttatgcccttaaagacgtggggccagtgttgtttggcgcgcccgagcccgccgatattgaagatcttcagaatccgaacaagatggggccgaaagaccgcaaggactggtaccagtcggaaaatgaacgaatcaagcttgaggagtcgcttaaacagctgctcccggcatcagaggcacaccgggaaatggcgttattggttaaggcaatttcacaggtgctggatacctggccagataagctggagcgcgaccggggctggcgcccggatcaaatagctgaagctcaggccgccatagacgaaatgcgggaaatgttggctgcggaagtcgtgacagtggaggagggaaacgatgatagctaa

SEQ ID NO: 435272 - DNA, 255 bp, Serratia marcescens
atgtcatacaatctcggcaatttgccaaaagaagaaatggacaaggtgaacgtagatcttgctgcgtcgggtgtggcgtacaaagagcgcatgaacatgccgatcgtaccggctcaggtggaggcggagcagcctgaacacctacgcgagcttttccgcgagcgcctgcagcattaccgcagccagagccacaaattcccagggccaaacgacccgcgataccagcagatggctgaggccaacggcaagaaatga

SEQ ID NO: 435273 - DNA, 426 bp, Serratia marcescens
atggcgattgccgcggtactgatcccctcacttgagggagtcgaatacaagccgtaccgcgatgttgttggcgtgctgacggtctgttatggccacaccgggccagacattattcccgataagacgtacaccgaagcggaatgcaaagcgatactggataaagatctggtgcctttcgcccgttctgtagatcgctcggtgaaggtacccgcaagcgaataccagaaggcggcgctgatcagcttcagctacaacgttggcgttaaggctttcgagtcatccacgctgctgaaaaagcttaatgctggcgacagtcgtggcgcctgtgacgaaatgaggcgttggaataaagccggtggcaaggtctggaaggggttgattaaccggcgtgaggttgagcgcgagatctgcaactggggccaataa

SEQ ID NO: 435274 - DNA, 237 bp, Serratia marcescens
atgccggagaaaatcaccacgttcatttcttactgcacctctgcgacgttggtgtgtggaggtagcattttgcaatggcttcatgacctcgactggaatcaggttgcggtagttggcggcttcgtgatcggtgcaatcaccgccgtgatgaacttctacttcaaacaccgccaaacaaaagcctatgagaaagccctcaaggccggttatgtcacaccaccgccggcggaggactaa

SEQ ID NO: 435275 - DNA, 1023 bp, Serratia marcescens
atgatctccagtacctgtcttgtcaacgctgacacactcgaatacatcaaaaccctgcctgatgactgcatcgacctgatagcaacggatcctccctattttcgggtgaagtcctgcgattgggataatcagtggaaaagcgaggccgattatctggcctggctggattcgctgctggtggagttttggcgcgtgctgaagccgaatggcagtctttacatgttttgcggtagtcggctggcatcggataccgagctgctggtgcgccagcggttcgacgtattgagccatatcgtgtgggcgaaaccatccggcgcgtggaaacggcagcacaaagaagggctgcgcgcgtttttcccgtcaacggagcggatcattttcgctggccactatgcaggcccactgcagccaaaggtcgatggctacgcaataaaatgcgtagagctgaaacagaacgtcttcaagcccctgatcgactatttcaagtcggctcggcaatcactgggtgtatcggcgaaagagataaacgaggcgacgggccggcagatggcaagccactggtttagcgaaagccaatggcagttaccgagcgaagcgcagtacctcaaacttcagaagcttttcgatcgtatcgctaaagagaagcaacaggccggcggattgcaacgaccgcatcacgatctcgttcgtgaataccggacgcttaaccgcgaatacctggaattgtgccatgagtataaatcgctgcggcgcactttcacggtaacggcagcggttccctataccgatgtttggcattatccgccggtggcgttctatcccggcaaacacccatgtgaaaaaccggcagagatgatggaacacatcatcaacgccagcagccggcgaggcgatgtggtggccgacttctttatgggctccggctcaacgataaaggccgctatcaaacttggccgaatcggtttgggggtagagcttgagaaggagcggtttgagcaaacacaaagagagatcttcccgtaa

SEQ ID NO: 435276 - DNA, 228 bp, Serratia marcescens
atgtttaatgctgaagaaaagattgcaatcagaaaggcggtactagaggagttagttgtctttctgggcgacgaggaagctgattgtatgactgtcaaattcgaagatgatattgatagtaaaggatatgttgattacataagttcgattggtaattatgcagccagaaagtactttaccttcgggaaagagaaagacggatataatgtaatgtttttaaataagtaa

SEQ ID NO: 435277 - DNA, 675 bp, Serratia marcescens
atgaatcagcaatatattgagtatgtccgcggcgaactgtctgtggcactggcggatattcagcggtctggtaaagggcagctggcggcattcgaagagaattcattgggagacacgacccgccacaagcgcaagcgcctacgcagcgttgaactggatggccgtaaagtctgccgagctgtggatcctatgcactgcacggaaactcgagtgaacaaaaagccaatgccgccgctggatgatctgacctacatcaccgcgtcatggcgccgcgccgttggaatgctggaaaatcacgagcgggcatggatccgatattgctacgccaatgatctcgattttaacggccaggtggtgatatgccgccatatttgggagctgatgcaggagtcgcttgctggaaaaagaatcacgaagaaggtttgcaaacgtctggaaagcctggtgtggttggcggttcagcaggcagcacataaccgcggcgccgtaatcgggcgtgaatacagtcacacgcagctggctgaattgtcgggtgtaagcaaagccacatggtcagaaacctacagcggccactggcagacgctgatatcgctggtggaaaaccttgatgcaggatccttgcagtgtacagctaaaaaaaggatcgcgacacgttcaaaacttttagcatcatga

SEQ ID NO: 435278 - DNA, 1038 bp, Serratia marcescens
gtgagaatgctgcttactccttacctgcagcgtgatctgggcgtggtgatactgcgccccggtcgtgatctgctgcatcatttcagcgttcttgggcgaattctggttgccaatgagccagacgagttgaagaagctgccatccggtttattgccggcggcagagcagggtttagccaatgatccgcggctgacctccttcttccaacatgaaagagtgattggcgccgctggtggtgttgctgcgctacgcgagtggctgagccgtggtaccgagtgccagtggccacatggcgatggttatcaccatcacaacatggatattctggattatgacggcttgccggtacgtctgtgctggcatcacgaaaacatcttacgggagcaaacacacgccacgctggatctgctcgcggcacaaaacgttgcggattggctggtgtaccgggctcgggttcactttcattttcgggaagaccaccagctgagcctgccggaattatgctggtgggccgtgctgaaaggggtttccgatctgctgcctgattcagtggcgcgctcagcactgcgccttccaccagcgccagtcgaaacaggtacgcgtaaagaggcggatatcgtctgggataaggaaccgaaggagatcatcaacgagagcgtggagaaagttaagccggcgttgctcgttgatgttgacgaggcaccaccagagggattcatgctgcggccaaagctgacccgctgggtatgcgaaaaatatactcaatgggtgaaatcgcagccgtgctgctgcggttgcggactaccggcagacgacccgcatcacatcatcgatcatggcctgggcggtactggcaccaagcctcacgacattttcaccattcctcttacccgtaaatgccatgaagagctgcataaggatgtagcggcatgggaggccaagcatggcagccagctgttccacctggtgcgcacgctgaataaggcatttgggattggagctatcagcacggcaaacaaacgcggagcaaaaagatga

SEQ ID NO: 435279 - DNA, 1854 bp, Serratia marcescens
atgatcaatgaactgattgtcgataatttcgctggtggtggtggcgctagcactggtattgagatggccaccggccgcagcgtgaacattgcgatcaatcacgatgaaaacgccatcgcgatgcacgaaaccaatcaccccgaaacgctgcactactgtgaatcagtctttgatatcgatcctgtagcggcaacctgtgggcatcctgttgctctggcgtggttcagcccggattgccgccatttcagtaaggccaagggtgccgctccggttaaaaaagagattcgcggcttggcgtggatcgttgttcgctgggcattgaagaaacagccgcgcctgatcccactggagaacgttgaggagttcaaaacgtgggggccgctggtcactgatgctactggcaatgactacccatgccctgagcgtgcaggtgaaacgttcgcggcattcgtgggcataatgtccactggcgtcagtgctgatcatccagccctggccgaatgctgtgaagtcctcggcatcgatgtcggtagcgaagaccaccagaagctgatcaccggcctgggttacgacgtggaataccgtgaattgcgggcatgcgactacggcgcgccaacgatccgcaaacgcttcttcatgctgatgcgctgtgacggtaagccgatcgtctggccggagcctacccacggcgatccgaaatcactcgaggtgcaaagcggtaagttgaagccctggcgcacggcagcggagtgcatcgactggtctatcccgtgcccgagcatctttgaacgtaagcgcccgctggccgaaaataccctgcgccgcatcgcgcgtggtatccaacggtttgtgatcgacagccccaatccattcatcgtgaaatgcaaccataccagcacaaagagcagctacgactgcttctgtggtcaagcgctggacgagccactgcagaccatcacaaaaacccatggctatgcgttggtcacgccgatgatcgcgggcgctggcggatctgaatatcaggcaaaaccgcgtggcgtcgatcagccgatgcataccgttctgaaagagtcgagagccgcgttggtagctccggttatcgcaagaatcggtcagacgggctttggaaaggatcgcatggcgtatgaagcgggcaaaccgctaacgaccgtcaccaccaaagcagaacacctgctggtggcgccaataattgcgcgtcaatttgggaaaagcgttgggcatggtgctgatgaaccaaacgggacgatcactgcaggtggcggtggcaagagccagttggtggccgctttcttggcgaaacactttggcggcaactactccggccccggcgcaaatctctcggaaccagcgcacacagtcaccactgtcgatcaccatgctctggtcacctcaaaccttatcaaattccgcggtacctgcaaggatggccaatcactgaatgagccgatgccgacgatcaccgccggcggtctgcatatcggggaagtccgggcgttcctgctgaagtattacggcaacgagaaagagggggtaagccttgaagatcccctgcacacagtaacgacgaacgaccggtttggcctggtcacagtagagggcatcgactaccagatcgttgatattggcatgcgaatgctacagccgcatgagctctacgccgcgcagggtttcccggagtggtacatcatcgatcaggactacaagggcaagaaatacgcaaaagataagcaggtcgcgcgctgcggaaacgctgttcctccgccatttgctgaagctttggtgcgcgccaatttgcctgagctctgtgtcgatcgcaaggaggttgctgcgtga

SEQ ID NO: 435280 - DNA, 855 bp, Serratia marcescens
atgagccaatattgcgaaaagctagcagcgctgcgggctcggcctgcacataagttgaaagagattggcgatcagtggcgcaccaccgacgcgctgttttggggcatcaatgccatgttcggcccgctggtgctggatctttttaccgatggcgaaaacagcaaatgcgcctcgttctatacggctgaggataacgcattaactcaggactggtcggcgaagttgcaggaactgaacggcgtcgccttcgcaaacccaccgtactcccgcgcgcaacagcatgaagggcagtacatcaccggcatggttcacatcatggccaaggcgatggaaatgcgtgagaagggcgggcgctacgtcttcttgatcaaggctgccacatctgaaacctggtggccggaacaggccgaccacatagcatttattcgtggccgtctgggcttcgatctgcccctttggtttgtcccggcggacgaaaagcaggtgccgacaggggcattctttgcgggggcggttgccgtcttcgacaaaaactggcgaggcccggcatcggcttatatcagccgcaaccagctggaggctcaaggcgcggcatttctggcgcaaattcgccgtgaggcattgcgcctggcaccggctgaaattgctgtgcggcaggttgaaaccgccaacacggtatggccgaaagaggtgctattcctgctgcagcagattgatggggtggatcagctgcatgagagtctacgccagaagctttgccagcatatcaaccgcctgaaactcgagggcatgcaggagcccgagatcgtcaacaccattaaaaacttgtccatcgctatgggagcagcagcatga

SEQ ID NO: 435281 - DNA, 354 bp, Serratia marcescens
atgaaaaaattatcgatcccggtagacgtttttgagagcgagcgcattaacagcggcattcgcaagttggtgctggctggcgtgttgaaagacacacctgaaaaccagattgggcgtgttattcaggccgcagccggagctcaatggatgacgctgcgcgaactggagagaacggtttacatgatgttttttgttgccgacacgcaggcggcgatcagcgccagattgcgtgaggtggatccaaaaattcacggtctagtcaaagaaaaacggactttgaaggatcccgaaacgggcaagcttatctatttctaccggctggtggcggcctctgaagaggaggttaaagcatga

SEQ ID NO: 435282 - DNA, 894 bp, Serratia marcescens
atgagtacgaaactgaccgcatacgtgtgggatggttgcgcggcggcaggcatgaaactgtccatggtagccataatggcgcgcttggctgacttttcttcggatgaaggcttgtgctggccatcagtgaagacgatcgcccgtcagattggcgcaagtgaaagcacagtgagcgcatcgctggccaaacttgaaaaagacggatggatcacccgacagcagcgcaggaaaggcaaccgtaatacctcaagcatgacccagctcaacgttgaaatgcttcaggctgctgcgagttctcaccctccaaaatctgagacctcaaaatccgaggtatcaaaatttgatgactcaaaatttgacccatcagaatccagccaaaacgggcgttttgaccctccagaatctggagacgatccgtcagtaaattcaaaaccagatccatcaggtaaaaaacctacttgtcagcctgctgcgcagaccgaccctgaagtgttgatcactgaccaagcgaaggaggttttaaaacacctgaaccttgtgactggttcccgctaccagatctcgaaaagttcgctggataacatccgagcgcgccttcgtgatgggttcactgtcaagcaactggtgcaaaccgttgattacatgaatgcgaaatggggaaacgacttggccatgtcggattacctgcgccctacaacgctgtttgctcccacgaagtttcccggctatcagcaatcaagcacggcatgggacaagaaggggcgtccagcctgtatcaacggcaaatggcaatccagcacgaatcaccgcgtaacaccagctacaggcgcaatcccgccgggcttcagcaatggcttaccaacagggggtgaacatgatggcatcgtcaactga

SEQ ID NO: 435283 - DNA, 291 bp, Serratia marcescens
atgggcaatttaaccagaaaacctatggggccgcaaatacgctgccgggcaatgccgggcggtaaatcagctgcgccgttccggtatgaggtaaatgtactgggccaatgggaacccagcaactaccagttcgcgcgctgggtggtagatggcggggctcaatcctgtgggcaagaccagcccgcctcagaaatcacaatggccagccttgagctggtggactacatcaacgccgaacgtgcggaaatttccaagacggccgcggcaaagtttcccagggtaaacgcatga

SEQ ID NO: 435284 - DNA, 474 bp, Serratia marcescens
atggtagaggcaaatctgaaagaagtggttaagggcatgtgcaaggcgtttgcaggtggccgttcggcgatggccggcgccctgggcatgaccgaaacggcgttcaacaacaacctctacgagaagaacgggtgccgcttcttcgagataggggagctggaagcgatggaggacatatccggtaccaatctgctgaccgagtattttgcccggcggcgcgggttactggtggtggagctgcctgcactggaagaactggatcaggtggagttgttcagcaagagcatccgcacggcggcgcatcgcggccatgtggatcagatcattcaggaatcgttggcagatggagtcattgacgacaaagaagccgccgagatcatgcgtcatcaccgcaggcatttgcaggcgcgagacgcagaggttagggcggtgctggcgctatttggcaagaaggccaaataccagaaaggttga

SEQ ID NO: 435285 - DNA, 264 bp, Serratia marcescens
atggccattccaaatatcaccgagcaagccgttaaggctgcagggccgtctctttcagaggtcgcccgaaaattcggcttcaagtcaccacagtccgtggcgaactggatcatcaatcagcaagtcccttcggagcgagttattcacctgtgctctttgggtcattggcttatcactccgcatcagctgaggccggatatctatccaaacccgaatgatggcttgccatcccaagatggtagtgaaactaccactcgtaagtaa

SEQ ID NO: 435286 - DNA, 261 bp, Serratia marcescens
atgcctactctatgccctaaagatcttctcttcattgacacaaaaatcgatcacttcaacggcgacggggtttacgttttcaactttgaggactctactttcgtcaagcgtctgcaaaaagttaagggccgtaaactggctgtcctgtctgataacgacaagtacccacctttttatatagaacctcatgaaatgaatgagctatctatatttggcaaattaatcaagcatttgcctctgaaattcaacgatttcgcttaa

SEQ ID NO: 435287 - DNA, 450 bp, Serratia marcescens
gtggaacatctgcaaattctcggttcgttcatggacacaaccggccaacgctgggccttcgacaaagaagccatccatgccatcgacagcgccgacggcgaagaaatgcacctctaccgcgagcacagcttcgaagcgcctaccgctgaactttgtgcgcaactgatccgcgtcgaaattgaacccgccacagctgagatcttcgtggacggttcaacgatgttcaacatgcggtcgcaagaagttaacggtaagccaaacggcagaatcattgccgacttccagtgccgggatcagtgcgattgcgagatcgaatttggcaaagacagcgaaaccttcctgctcacctttttcagcgaggacggcagcatctatttagagcgcgatgctgcgatcgcttacgccaacaagattctggcaatggcaggggcagaccacaacgcgcaataa

SEQ ID NO: 435288 - DNA, 534 bp, Serratia marcescens
atgtcttggattttaacctttactggcaagcgttttgattacgcctcgccaaacgtagacgatatttgcattgaagatatcgctcaagcgttatcacatgagtgccgtttcaatggccatcttcctgagttttacagcgtggcacagcattgctttattgcaagccagatcgtgccgccaagctttgctcttgaagctttattgcatgatgctcatgaagcttattgcaaagatattccatcaccactcaaaaaattaatacctgactatcgcggcatcgaaaataacattgattttgttatccgatataaatttggccttccagccacaaccagcccgatcgttaaaaatgctgatctggtgatgttagccaccgaacgccgcgacctcgatattgacgacggcacgccgtggccgatgctcgaagggatcagcccatccgaagattttctcgtatcgccggtaaatccagtgcaagcacgcacgatgttcctgcaacgattccaccagctgaccgctgagagggccgtgtaa

SEQ ID NO: 435289 - DNA, 183 bp, Serratia marcescens
atgttcggcctgttcctgctcgtctgctacacgtaccagccatgcgaattcgtgccgcagggctgggtgtacccagacaaaagcaactgtctggcagatatccaccagcaacagcttccaccgcaatatgaatgcctgccagtggatggagtgatcccggcacggcgccagggggaacaatga

SEQ ID NO: 435290 - DNA, 858 bp, Serratia marcescens
gtgggtaagttcatgcagtccttcatcccgcgtcgccagtttaagcacaaccccgaacgcttcaatgtgctttcgagcggtggcggaacccagagcaacgcaatgatctgcctgattcatgctggcgtcttgccaaaacccgacgtgatcgttatgtcggataccgagcgcgaagcaagcaacgtttttacataccaagccaagcatatcaaggcgctttgcgatgaaatcggcatcgaatatcacatcgttccgaaaagcctttacgccacctacgacatcgtcgggccagatgaagatgagccgttgccagggtatttctccacacgtaacggccgcgatgcgaatgggtggtgcaccggcaaaaagccaacattctgcagtgtcaaatggaagcaggaggtagtgcagagatttcttaacgataagtacggcgaaaaatttctgacggcacgcggtgtagatatgtggatggggatcagcatcgaagaagcagcgcgccgcatgaaggtcacagatgggaaatggcgccgccgttatccactcatcgacatgatgatgacaaagcaaatgtgcatccagtgcgtcgaagattacggactcccaacaccaccagcgtcactttgctggatgtgcccaaaccgcgatgacgatctttggctgtttatgaaggagaacgtgccggaagacttccagcgcgcctgcgagcacgagaaggagatccagaaaacttggccgtggttgtggttgacaaaatacggcgtccctctaggtgaggcaccgcttaaaccaagcggtggtaagggaacgcagatggatttagtgcaattttgcgaaacaggcatgtgtttcacgtag

SEQ ID NO: 435291 - DNA, 177 bp, Serratia marcescens
atggccgcgcacgtcagcacccaaatcgtcagcagcgtctttgtaaagaaagacgtcgtcatgtggttcgtgccgcggcgattcgaaaaccaggtagagcccggaatgaacgtcgtgttctggaactcaggcgaatattacggccggatccgccggctgcaggagacaacatcatga

SEQ ID NO: 435292 - DNA, 519 bp, Serratia marcescens
atgagtaaattaatcaccgcagttgaaccaaagcgcgatcagcaaggctactggacgcacccggattactttgtgcctgccaatggcgcggaatatggcacgcctggtgaatttgaggcctggaaagaagcaaaccgcgtcactggcgcgctgcagtggatggaaaatcatgccactgccgaacagatcgatgcctatgaatccggggatggcgatattagcggttgggagcccactccgccggcgggcgatggatggtttattgcgtcgatccacgatacagaggacggcccggtttgctactggctgcggcctgttgaaaaggatcctgatgccttacggaatctgattgaaaagcatcataccgaagctttgaagcgggaatttatcgacgctcaccaagcatgtgaaaaagcagcctatgcctatttctgtgcttgtgagctgggagaagagcgcagcaacgctggtgaaatttaccagcgcattcggctggctactcgccgcggggggtactga

SEQ ID NO: 435293 - DNA, 276 bp, Serratia marcescens
atgagcaagcttacaaagattttcgttaccaaatacgcgctgagcgcggggccattttctgtgatggcagaaacccaaaacgaaggcagcatggcttcgtggaaaggcccaggctactggaattacgcacacgggaaagaattctggctcaccgaagaagaggcgctggccgactgccagcggcgccgtgaagctaagctggcatctatcgacaagcaagccaaaaaactgcaggcgatgacgttcacgatcaaggagcttgcagatggacaataa

SEQ ID NO: 435294 - DNA, 1128 bp, Serratia marcescens
atggctgccagaccaaggaaaaataaagtaaatattcccaacctctacccattgtttagccgggccgccaataaagtgtattggcgctaccggcaccctattaccggcaaattccatgcgctgggagacaatgaacaagaggcgaaagagatcgctatagaagcaaatagtcggttagctgaacagagaagccgccagatgctggctttaagcgatcggatcgcacagattcgcgggaaggaaattaccgtcaatacgtggcttgatcgatactggaaaattcaagaggaacgccttgaagccggagatataaagccaaatacattcaggcaaaaacgtaagcccattgacctactgcgtcagaactatgcgatgaaaccattgcctgcagttgatgcccgcgatattgcatcactgctggatgaatatacagccgcaggccagccgcgcatggcgcaggttattcgctccgtcctaatcgacgtattcaaggaggctcagcatgttggtgaagttcctccaggttataacccagccctggccaccaaacagccacgccgaagagttaccaggcaacgcctaagtctgcaggaatggcagctgatttttgatattgcagataaaaaccatcggtatcttggaaacgcaatgctcttagccttagtcaccggccaacgcctcggcgatatttccgccatgcggtttaatgatatctgggatgactgtttgcacgttgttcaagagaaaaccggggctaagcttgccatcccgctgtcgcttcgttgcaacgcaataaatatgtctctgcgcgaggtcgtagccagatgccgcgattacgctgtcagtccgtttctggtgcattacttcagaactacatcgatggcacagcgtggagcccaggttacaggtaacaccctcacaacaaatttcagtaaagcgcgggataaagcaaacatagattggggaatggggacaccggcaacgtttcacgagcagcggtcacttgcagaaaggctctatagcgaacaaggactcaatacccagctactgctgggccataaatcccagaaacagaccgatcgttatcacgatgatcgaggcaaagactggatcaccatagccgtctaa

SEQ ID NO: 435295 - DNA, 171 bp, Serratia marcescens
atgctcccgttgttttattattcattttgcagtttttatcaaaacattatcaaaacgttttatcaaaaccccctccaaatcctcaatttagacggctatggtgatccagtctttgcctcgatcatcgtgataacgatcggtctgtttctgggatttatggcccagcagtag

SEQ ID NO: 435296 - DNA, 4581 bp, Serratia marcescens
ttgagtaaagctggtattcagtctaataggggggatggatatcaaacgttggtagcgtttgactgggctttgaccgtgttatccgatcctgattatcaatggttagagacagattcagtgaaatggctggtcgatgacgttgtgatagggcggactgacggtacaagaatttgttgtcagtgcaaaaaaaatcaaacaggatttcgagcgtggtcattcaccgatcttaatgatgagctagaaaaggccattaaaacgcttatacaagatcctactacgacagtcagattttactctcgtactccttttggtgagctggctgctttgcaagaatttagtactaatttcccagatgaaagtgcttatcatgctgctttaaaagagacaaaggtacatgaggcgataaatagaaaactcattgaattaattgcaacaatatcttctaattttaatggttatgagtttttatccagaacaaaatttgttactagcgatattcatgaacgaatgagagaaactctggaagagcgattgcaatatttggtgagtaattctgttgcagcttttaattcgctttggacttgccttgattaccaagggatgcgagtcgctgacacgcaagataataaactatcatcttgctcgcgtttaaccaaagccgaccttataaatcttctttctcaatcaggttgtgttatttctcctccggcagatattcaatctatttttaattcattcagaaaaacatcatccattggtcgttcatggcaacgagatattagtggtcatcgtattgatacacttctggtaagtgaattaattgaagctatcaaaagcaagagccattccatattagtgactggagggccgggttcaggaaaaacgtgtgttctacttgaattgcaagagaaactagagcagttggcgcaatctggtagtattatgttacctctattcattcaatcgcgagagtttgctgatttagaaactgcacaggaacggcaatctctagggttagacgagcaatggattgaaaagattgcgcgtgtagctgacagctatcatgtaatagtcataattgattcacttgatgtgcttgctatagctcgagaacatatggtgctaacgtattttttagctcaaatagatcagatgtcattaattccaaatgttaccgttattacggcttgcagagagtttgatagacattacgatagacgtatatctcagcgctcatgggataaagagtttaagtgccaggcattagattgggaaggtgaaatcaagccgttgcttgaaaaattctcaattgactcatcaaccattgataacacaacgcgacatttaattagcaatccacgtgagttagctctatttataaatcttgctcaaagaggtggcagctttaacatagtgactagccaagcgctagctcaacggtatattgattccattgttttgactaatcccttgctaggtgatagagggaaaatagcgcttgaaaatatggctacggaaatgttaaagcttcgtaccctgtcgataccaacccaacgatttactgcttcagttgatattcgtagaatgttacttagccataatgtgttgcatgaaactgatgataataaattaacatttgggcatcaaacgttacttgatgtattagttattagtagagcgattcgtcatggattgactttaagtgattttataaaggatctcccaccagtaccttttgttcgcccatctattcgtagctttattgcacagcttgtcaatgaaggaagacaagagtttagaaaacagttacgaacggtacttactggaacttatgcttttcatatacgtcgcctagttgctgagtgttttgctgagcaattacctcaagatgatgattggccaatgttacgtgatttacgtaatacgcatcgagacgtttttcaggttatttatagcaaagcctcacaagttgaatggcattatttttggttaagtaatcttgttccggttttaaaagctatgcgtgatattgatggtatagaaattcatacttaccgtattgcacattggttaaatctagatccatcaggtgttattgatttttggatggaaatattgggatctgattggatagataagtcaaaattgataaataagattgctgtttctatatcgaatataaagaaagatcatgcatatttgatgtctccgctattactggagctatttaaatttccacaggaagaatatagctttttaggcagagcccttgctcgctgtgttgctgcaggggggatcgatgatgcggtgctttgggattacatcattgctgatgttaaagatgaagacatactgacctatcgttttggaaataagcttaagtgccgaccgcacgaatttggtgataaggataatgaattcctttcaaatagaatgattaattctattactttgttagagcaggctatatcgacaattgaacagtggagccaagtacggagttatagatatgaagaaaaaaataattatcgaagtggttttctaaatggaacttctcattatgatgatcgcagaatgagtgattttgagcataaagatagtcaacgtgtcctgatggatgctttagaagttgctattattcatcatgctaatatcaattctgagtggtggcaaaacaatcgtgaacgtttatgctttaatctggaaggatcgcttcgttactttgcattgttagcgtgcattaattctccgctaactaatcttgacatatcctctcgtttgctgtcgaaatcggatttattagagtctgagctttcacatgaactgggcactttagtgcagaaagtttttatccatttgagctcagaatcccaagacgcaatacaggttataatacttgctctttctcagagatatgctgatttccctgagtataggcaatatatgcttaaagatcaggtcaagtttattatttgtataccgtgctatttacgttcgccgtcatgtgtaagtatttttgatgaatatagtcgttcaaactggccacttgaacataaaccagatgttaatggatggtgcgggatagtaagagctccgttctcatttgaagtttttaataagattagcaatgaaggcgttctcagtcttcttgagcactataatgggtataggcgagactcatttagcgatatgttaattggtggagaggagcaagtcgctcagcaactgagtgaggcatcttcaagggatccattacgatttttgagtttgttatcttcttactggcaagatataaatgaaaatttccgaaataatattatgaatggtattgcgcgttatttgaattatcgttatggcaaccttcggcaaaataatgactggaaaccgattaatgaacctaatattgatattttagttagcaatactttagatgaactggaacgacattctgtctattggcggcaaaaccgctctgcttccgaagtgctacaagggtgctcacatgtagtaaaagatatcaataatgcggaaagaataacctttttatctattccctatttagccgtggaggaaagagatcctatctcaggagatggtgtcacttttattggtataggtattaatatgattcgagggcatatcgctgatgcccttatggttatggcaataaagttacatgaagaacatatttcttggcctgaattattgttaccgacactacaccaatttgctactaacgagcatcctgcagtgcgagctgtagtattacgccgtttacctcatttacagcatattttacctgaggttggttgggtggtatttgaattaataatgcgaaaaggtagcgaacgactttgggatatggcagaacgttgtctctattatacctatcatcatgagctcgacagagtttccccatggttaaataagattgtatctgaaggtattaaaggcggattgcaagcgtggggaagaatatctgcattggctgtattgtcagaaaaaatagaaagtcgtgattttatcaaacaattaaaagaattaagcgatagtgatgcatgggaaggtgctgtcgatgtttggacacatcgtgagaattttcaacggcatcaggatttatgtcttgctggtttggatgctgcgttaagtgatgataatcaatattcctcagaattaatagcgtcaatgggtggtatttttagagggaaagagccggttattattttacccatgcaagtgttagagcgttatttttcattagtatttacgagttcagagtcatcgaaaattgatttgttcgattttggctcgtggttaaatattgtttcatgcatagaaccattgtatgcattgagggctacggagatttatcttgaatatgctcgtacaacaaaagtctatttacatgattacaataataatttaatgcagctattgactcgtttatttgcacaagcagaagagcaggaagaatcggatggcggagaaatgctatatcgagtggttgttttgcaagacactatgttggccttgggtgttgatggggtgagtacatggttagaggccgctgagagagcataa

SEQ ID NO: 435297 - DNA, 1029 bp, Serratia marcescens
atgcctaatctgttagaaacaaaaagtgctcgtgattgggtaaacagcgccattgagcgcaactcaaaaggtatttatggaaaacttgtaccggcagttctttggacagacgctagaggtaatgatggtgaactcatcgtgccagcagaccctactgagcttgtagcaaaaatcaatcgaaatcccttcatcctcttgcataaccatgatccgggaagaccaaaagggcaaactattgaaagtgcaaacttcgtacatgaagatggctcaaaattcgttgttgctattttagggttttatgctggtggagatattttagaattcaatcaattaggtatcgacactcgtaaattagagccattccccgaggaacttccagaaataccagataacgcttggattgaatttgcaactgatccgagagaagttgattcgaagtggttagaacaggttaccgacagtgccccaatacaaataaaatacacagagctttcacataacacagcggaagtcacacaggaactgatcagaatcggcattggttttctggcgatagtatggaatccattcacaacatcaattgcttctgaagctggcaaacgtacctatatagcacttcatgaatgggttcgtaagttactcacaaagttagctgatagaaagaatccattgctcgacatcagctcatatcaagacggctgtcaggtttctttcctgtttaggggaaaaaatgtgaagcttctctatgcagctcatgacgccctcccagaagccgctgcacaagcaaaacagctaattggaacgttgagagctagaggtaatccaccacgacagctaacatatgaatgggatcaagagtctcttcgatggtatcccacttatacagttttggatgacaaaaggatcattgtagacagtgggacattgatttctctcgagaaactcccatcaggattaagtcttggcatacgtaaagggaaaacaacaacgcctgtattaaagtctgctcctgatgaggaagaaaagtaa

SEQ ID NO: 435298 - DNA, 825 bp, Serratia marcescens
atgaaagtacctttgactgaaatgaccatagccgccattaccaaaatgatagacgatgcacaggcagataatcgaagggagccaagccattcggatttagaattcgcaatagctcgagcagggcttgcaatagctgatcctaagtctcaagggcaaacagtcgggaaagcgaagcgagttcgggctgtactctattgggctttagagcacgatcttatggccggtgagaagcttttcgaaaccatcttcaccaaagtcaaagttttgggtggctttcgtgaacattcacccaattatgttggacaagatgctatcaaaggcgctatcgaagctttcaaagtagaaggtttaatcttagcaatagatgggagcatacaaacccagagcttggattcgttacacgggcgagcgttaacggatgctcttcgcacctattcgaacagagcaagaaagggggctgaagatgccgcattactatcagggactagcaaagacctcctagaagcaaccgcagcccatgttttaactcaaaagtacggctcttacccacaacaatcaaactttcaagcgcttatgggacaagcattcattgcactcggtctagcaaccccagaagaagagtataaatcttctgaggctcctcaaagaagcatggagcggggattgtatcactcagcgatagggataaatcggttaaggaataaacaaggcactggacatggaagaccatggattccatcaataaccgagacagaagcaaaagctgcaattgaaatggcaggtatcatcgctgggtatatgctggataaacttgaaaacaaatag

SEQ ID NO: 435299 - DNA, 987 bp, Serratia marcescens
atgggacaactcgtcgatggcgtttggcaagacatctggtatgacacgaaatctaccggcggccgtttcaaacgttcaaccgctcagtttcgcaattgggtgaccgccgacggtcagccgggcgaacacggcgcgggcggcttccaggccgaagcgggccgttatcacctgtacgtttccctcgcctgcccctgggcgcaccgcacgctgctgatgcgcaaactgaaagggctggagcagatcattccggtctcggtggtgcacccgctgatgctggaaaacggctggaccttcggccaggattttcctgaaaccaccggcgatccgctgtatcacgccgatttcctgtaccaaatctacctgcgggccgatccgcactacagcgggcgcgtaaccgtgccggtgctgtgggataaacagcagcaaaccatcgtcagcaacgaatccgccgatatcatccgcatgttcaacagcgcgtttgacggcgtgggcgcccgcgcgggcgattactacccggccgatctgcgcggcaaaatcgatgagctgaacggttggatttacgatcaagtgaacaacggcgtgtacaaggccggtttcgccaccagccaggaagcgtatgacgacgcggtcagcggggtcttcagcgcgctcgaacgcctggagcagatcctggggcagcaccgctacctgaccggcgatcggctgaccgaagccgacctgcgcctgtggaccacgctggtgcgcttcgatccggtgtacgtcacccacttcaagtgcgacaaacaccgcatcagcgactacctgaacctgtacggtttcctgcgcgacatctaccagatgccgggcatcgccgagacggtcagcctgccgcacattcgcaaccactactaccgcagccacgccaccatcaacccgcacggcatcatttccatcgggccggcgcaggatctggacgagccgcacggccgcgaccagcgcttcggctaa

SEQ ID NO: 435300 - DNA, 1473 bp, Serratia marcescens
atgagatctaatgagatatttaataactttccaagtgattggtattcaatcccacttggtcagctagtaaaagaaagtaatggtattatccaaacaggtccttttggcagtcagttacatgctgaagactatgtacttataggcactccatcaataatgcctaaaaatatatcagtcaatggggtaattgataccgatattgctcgtataaaagcctccgatttggaacgactctcccgctaccaagtcaaaaaaggtgatatcatttatagccgtcgcggcgatgtagaaaagtgtgctttgataagtgaacgagagaatgggtggttatgtggtactggatgcatccttattcgccttgggaatagcgatatatcacctgagtttttacatgcttatctgagtcaccctttagttagagcctggattgtacgtcatgctattggcgccaccatgcccaatttaaatactacaatcctaagtgaattacctgttctcgttcccacaaaaaaaataagaaaatgcatcaaagaaaactggactagtttaacaaaaaaaatcctaattaactccgagatcaaccaaaccctcgaacaaatggcgcaagccctgttcaaaagctggtttgtcgattttgaacctgtaaaagcaaaaatcacagtgctggaagcgggtggttcgcaggaagatgcgacgctggcggccatgacggcgatttctgggaaagatgctgatgcgctggtggtttttgagcgtgaacatcctgaacaatatgccgagttaaaagtcacggcagagctgtttccgtctgcgatgcaggatagtgagttaggggagattccggaagggtgggaggtttcggatataaaatcttctgtgagtgaacttcgtagggggatttcaccaaaatacactgacgatgctgatggcataatggtaataaatcaaaagtgtatacgaaatcatacaattaacttttcccttgcccgtcgccatgatgggaaaataaggtcgacatctggtagggaattacaaataggagatatcctagttaattcaacaggggttggaaccttagggcgtttagctcccgttcgctataaatcggaaattctaattgccgacagtcatgttaccgtcgtgcgtgctgatacaaaaaaaataactaaatctttcttgtcagaattattaaaaaagcatgagaaacacattgaatccagtggttctgggagtactggacaaactgagttgcgaaaagagactttagaagaaataaaattcccatgccctccagttattttaggtcagctgtttgatgagattgttaataatttcaataagaaaatttctatcatggaagaacaaatgattgccctttcaaatctgcgtgacacccttctccccaaactcctctccggcgaaatcaccctgccggaagccgagcaggcggtaagcgaggcggaaaatgtataa

SEQ ID NO: 435301 - DNA, 3135 bp, Serratia marcescens
atgctgagtgaagacgatttagaacagcaaagcctgcagtggtttgctgaactgggttgggaggtgttacatggcccggatatcgcgcccgacggtgataatccgctgcgtgcttcgttccacgatgtgtttttgcgcccgttattgctggaacagctgcaaaaaattaatccgcatctcccggttgccgtgctggatgaggtgatattgcgtatcgcccatgcacaaagcccggacctaatcgtcagtaacaaagccttccatcacctgctgctcgacggcgtgccggtacagtacaagcaggacgataacgttattcacgataaagcactgttgatggatttttaccacccgaaccataaccgttttacggtggtcaatcaggtagccatccagggaacgaagcaggtgcgtcgcccggatgtcatctgctatatcaacgggttgccggtggcagtgattgaactgaaaagcccaatcgatgccaatgccgatatctgggctgcattcaatcagctacagacctataaaaacgaactcagcgatttgtttatctgcaacgaagcgctggtagtcagcgacggctataacgcccgcattggttcccttaccgcgaacgaagagcgttttcttccgtggaaaacgctgtctaacgaagacgacaagccgctgtttgagtggcaacttgaaacggtagttaaaggattctttaaccgtgaattgctgctcgactatattcgctacttcatcctgtttgaaaacgacggcaaacgactgattaaaaagattgccgcttatcatcaattccatgccgtgcgagaagcggtggcagcgacaattgtggcctctaccggtaaacatttgccgctacgcagcaacatcacgccaggcagtaaaaaagcgggcgtagtttggcatactcaaggttctgggaagagtatttcaatgtgctgctatgccgggaagctgctgcaacaggcagaaatgaacaacccgactatcgtggtagtgaccgaccgtaacgatctcgacggacaactttatgccacgttctgccaggcgcaagatttgcttaagcaggaaccgttgcaggcgaacgaccgcgaccaactccgcgagatgcttaatgcccgcgaatcaggcggaattatttttaccaccgtacaaaaatttgccccgctggacggcgaaaaaactcacccagcgctcaatctacgcagcaatatcgtcgtcatttccgatgaggcgcaccgcagtcaatatggccttaatgccacgttggatcgcgaaacaggcgcttataagtacggttacgccaaacatatgcgcgatgcattacccaatgcatcgtttatgggctttaccggaacacctgtatcttccgaagataaagatactcgcgcggtatttggtgattacgtctctatctacgatattcaggatgcggtggaagatggcgcaaccgtgcctatctactatgaatcacgtctggcaaaactcgaccttaaccacgaagagctggaaacgctctctgagcaagttgatgagctggtcgaagacgaagagaccgatcagaaagagaaaactaaaggcgactggagccgcctggaaaaacttgtaggttctgaaccgcgtatcaatcaggtggctgccgatctggttcagcattttgaggcccgtaacgccaccatgaatggcaaagcgatgattgttgccatgagccgtgaaatctgcgtgaaactgtataattcattggtcaccttacgtccggaatggcacagcgatgatgttgagaagggtgaaatcaaaatcatcatgaccggctcagcctccgataataaattcctgcagccgcacatctacaataagcagaccaaaaaacgccttgaagcgcgctttaaagatctcaacgatccgctaaaactggtgattgtgcgcgatatgtggcttaccgggtttgatgccccctgctgccataccatgtatatcgacaagccaatgcgcggacataacctaatgcaggccattgcacgcgttaaccgagtctttaaagacaaacctggcgggttggtggtcgattacatcgggattgctaacgagctgaagcaagctttgaaaacctataccgattcaaaaggtaaggggcagaccactatcgatgctcatgaagctttcgctatactgcttgaaaagctggatgtgattcacggcatgtttgccaaaacaccaaccgctgccgggtttgattacactggttttgaagaagtaccccaacggtttttactcaaagctgcagattacgtgctgggcctcgatgatggtaaaaaacgcttttttgatgtcgtactggcaatgaacaaagcctggtcactgtgcagtacgctggatgaagccaaaccattgcaaaaagagatagcgtttctgtcagcggtgaaagtggcgattatcaagctgacgacaaccgacaagaaattcagccagtcagagaaaaacacgctgctcggtaaaatccttgataacgctattattgcgaccggggtggatgatgtgtttgcactggcggggttgggaaaacccaatatcggcttactttcagaagagtttttagaagaagtgcgtgaaatgcctcagcgtaatctggccgttgaattgctagagaagttgttgaacgacggtattcatgctcgcacaaaaaataacgtagtacaggagaaaaagtattcagatcgccttagggccgtattgcttaagtacaataaccgcgcaatagaaactgcacaggtaattgaagagcttatacagatggctaaagagttccaagaagccatggcgcgcgacgatgctctaggtctcaatccggatgagatcgcgttctacgatgcattagcagaaaacgaaagtgctgtgcgtgaactaggtgacgaaacactcaaaaaactggcaattgaagttaccttgaaactgcggcagtccactacggtagactggcaagtacgagaaagtgtgcgtgccagactgcgtattttagtaagacagacactgcgtaaatataaatatcctccggataaaaccgcaggtaccgttgagcttattttgaaacaagccgaggttgtttcgaatagttggacgatttaa

SEQ ID NO: 435302 - DNA, 858 bp, Serratia marcescens
atgaatagagttgtatacccaaatattggatgtacggatgtttttggtacatgtttactgtctgtgagtgatagtaaacaagcttataaagatagattgcatagtatttcggggaaagtaattagggaatggggggattttgacactcgctgcgctcctaaaaatttccatttatttattccttgtgaacccagaaagcctgagcaactaattgaaagaaatgtgacaaaaaaagatttaaaggagctttatactgtatatatgctgaaggcagacagtgaagcgcgtaaagtttacgataaattgagagcctgttcaaaggggctttgcccactgtgcgggatatacggtgtagatacgttagatcattatttacccaaggctcgttatccacttttatctgttaatcccaaaaatcttataccagcctgcacacattgtaatggcgtcaagtctgctagtatatgttcaacagcatcagaacaaaccctttatccttataatgatgactcaaagttctatcaaacagattgggttacagctaccataacagcgccctatggtattctaacttttgactttcaagccaccccgcctcaagggtggttgagagttgaacgagaccgtgtaataaaccactttataacatttgggttgcgtgaaaaatatgcactcaatgctgcgcaatttgttactacaataaccgctgatattagaaggatgttattagacggtgatcatataactgtgcagaatcactacgcaggtttggctgtaaaacagaaggaaaattcaacattaagagttgtgtataatgccattgctaatgatttaaatatatgtagtggacgtttttaa

SEQ ID NO: 435303 - DNA, 1575 bp, Serratia marcescens
atgcttgaatttatcgtttttagtagaaagtcactaaatttaatgaacagaaaaaacactgtttatctaacattttcaacctggaatgattactcttatagaactctattcaacatgaattatgttgatttcaatggtggattgcatacggttggtcagataaaaataggattccagaaacaagatactgacgtaacaaccttggagaaaatacaaaaaaaattcgtaaaactagaccgggagttttttagtcttgcggaaagtcctgagttttacgagaaactttactctattgatagtgaattatgtaaatcagttttggaaaggttgaattgtgtcgtcttaagtcaagacgctatggggattgctaaagacgaagatgtatttaaaacatctttactaagagatgtgaatatcaacactattcgtggtcagttttcaagaattataaatggagatagtttacttactaagtttgactttcaatttgtaagaaaaaatcattcattctctgatttaaatattggttttactgtcgagccgtactccttgccaccgagtaatatacatgcaattattggtaggaatggtcttggtaagacaactctattaaatgagatggtcgattcgattatagccaatgaaaaaccagaaaatgcatatttcgaagaggcttgggcgggaaagataacagatgattattttagtactgtcatttctgtatctttcagtgcatttgatcctttcaccccgctaagtgagcaaagcaaccctcttctaggtacgtgttactactatattggcctcaaaaaaagagatggtagagaaagtagcatttccaagggtgaattaagcagtttggaagatattagcaatcttcgaaataaatgtgccaagtctatttacaactgctgctctgatgattccaaaaaagatgcatggctaaaagccatcagcaatttagagtctgatacaaattttcgagatttaaatttaaaagatatagtcaatttaccatcggataaattagtaacggaatgcataagccggatggagaaaatgagctcgggtcatgctattgtttttatgataataagtaatctcgtcgagaaagtacaagataagacactagttttgttcgatgagccggaaagtcatttacacccaccacttttgtctgcttttataagagcattgagtaatctactatctagaaggaatggaatagcaattatagcaacccattcacctgttgtggtccaggaagttcccaaaagctgctgctgggtattgacccgttttggtaacgaaatggtatactctaggccgtcgatagaaacatttgctgaaaacgttggtactttaactaaagaggtatttaagttagaaatggagcaatctggttttcacaggctcctcaaagaacaagttgatgatggattgtcttttgaggaagtaatgaggaaattcaaaagaaagattggctttgaaggtcaagcaatattgatgagcatgattatgctcagggacaaatccgtcgacatcaaaaatcatgatggaggcgaagatgaatag

SEQ ID NO: 435304 - DNA, 240 bp, Serratia marcescens
atgggtagcattaccctcgccgggcggcagattttcgttctcaatgagaatgacagataccctgaaccaacagtaaatagccctccatttttcgcaatccgtgaagatgaagagggccagcactggctttatgttttacataagggtggctggccgcttgtatcagatgtgccgtttcagactcaaggtaaagccgttgatgcggccatagcttttaattttgatgtgttttacaagtga

SEQ ID NO: 435305 - DNA, 1161 bp, Serratia marcescens
atggtattaatcagcggggtgttaaaggggccttacggcgattctcgttctggcgtaacgattaccatgcgttcaatgaaaacatcctccacggtgttgaacttggcgaagtctcaatctgtcaccgatgatacgggccggtactcattaaatgttgaaccaggctcctatgaagtcattgtgtcagtttatggcgcacagcctgaacgtgtaggcacaatagaggtttataccgactccctccccggtacactcaatgatttcctgcgccgccctggtgaaagtgacattacgccggagatagttcagacggtcgatcgcctgcgtgcagaggcggctttgtccgccgacaagtcagcagcatcagcaacagcggcaaaagtcagcgagcagaatgcagccgaaaatagcaaagtcgttaccgccgcaggttttgcttctagcccaattcatactgctgatattttttctacagataataagtcaagcattcgtcgctataccactgcgacagccaacaggcctggcggcgcggcaggaggtgtattggttttacccgttgatggtgggccatcgagtacttattttgctttgtcagtgaccaaccaagcgtgggtaggtaattctacaatagcggccccatcaaaagttgtttggtcatcactatggacgtcaagcaatacgaccgttgatgctaacgggttcatcaaaaaggcatccccgatcgcaaggctttgcggtgaacctgaaaagatggcggatgattatctggacggtttcatgtcgtccggccacgtagcggtgaatgacgaggctgttggggtatttgctgagcgtgtttcagttggagtttacaaagtcaccggcgcgttaggttttgcggaagagggctggaacatcgaagtaccccaggacgtgaacagcaaccgcctgtgctttgtctcagctaacacaggcaaggatggcacaatctatgtgaaggtcagcaaacgccgctttgacatcgacacagccgcgattgtggccggtgagccgatggatattccggcggggcgttggattgatctgcgcctggaaatgcctgtgcgcgaggttgaagaagcaccggaagcagtcgaggaaactgccgctcttgaaaatgtgaacgttgaccctatctaa

SEQ ID NO: 435306 - DNA, 177 bp, Serratia marcescens
atgaaattcttctatcagccatcgacgagagcgctattcattgacgaactcggtgatgttccaagtgatacataccaaataagcaaggaagactatttaaagataatcggcgcagcgattagcatttcaggtgatagcgagcctgagtggtatattcctaatcctatggagaaataa

SEQ ID NO: 435307 - DNA, 954 bp, Serratia marcescens
atgcccgcaggcactcttaccctaacgaacaactccgccgtagtgaaagggacggggacggtattcaataccgagctgaaagccggtgatttcatcgtgagcgttgtcggcggcgtcacctatacgctaccggtgaaaaccgttgatagcgccacacaggcgacgctgattaaagcctatgacggcccaacgcaagcgggcgcggcatggtatgccgtaccgcgcgacgcgatgaacaccatcaccgctcagctggccgcagagacggcgaaagcgctacgcggattgaaccttgataaagctaactggcaacaggtattcagcggcactggaaacattacggtgacgttacctgacggcagcacttacaccggaccggcatggaacagcttcacgaccgcgcttaatctcaaggccgacaaaacagaagtagagaaaaaagctgataaaaccgcgctggataataaggctgccaagggtgagaacagtgatattacatcaataaagggccttacaacggcattgagcgtggctcagggcggaacgggtggtaaaacccaacaggacgcctgtaataatctcggcgttaaaattacgagggttggggatgccatattaacgtcgattggcggaaatattgtaaagcaggaaggcattattggtgcgcaacaaccggttggagcatataactcgcagagcataggtggtgtcacctggtacacgcatttctattcgtttagcctgcccgcagcctttccaaatgccgttgtgtcatgtgttgcaactctggtctctccgcgcggcgaccaacaagcggcgggaacaccggcgtttattgcctgcactcgtgataagaacggtggaggcgcttcaagagatgcaataacagtttcaatcacaacacctgttacggggtggtatccctattttaatttttcagcggagggatattaa

SEQ ID NO: 435308 - DNA, 990 bp, Serratia marcescens
gtggcgtatggcctgtggatgaatggcaaagagttggcggcggttaatagtatttctctattagccaacgataaagaaccctgggcggatggaaataaacaaaaggtttacaccccacctgattacgtcgctgggaacccggtatttctggttggtcaaaccggatatatattcggcagtcagacaaaccccccgtcttacggcggggttactggatggcgaaccgatgggagtaggataattgttgattttaccaatgcaaatcagcaggcgttctttaccgagttcagcatataccaggttcaaccgccgcaatcagtttccggcacgtatggaataatgattcaaaactcagtggactggatgagcattaacagttcgtccaggttgggttttgttgcctggaaaggggaggtgacgattaacggcaaatggacattgccagtcgttcaaaatgataacaccaaggttgtttttgtacgatgcgatgaccccggcgtttctatttaccatgctgtgcaatataacgaattaacggtatcgcgtgataatggttccggtgaagcagtgttaaccacagccaatgtgaaagtggtcattatgaatagcggttattacccaccgacgccaagcggttacggaatggtgattaagaacactgacggtaataacacgttcaccagcgatacagagccgttagtctgggatggtcgttcggttaatgtcggcaggaacccagaggatttggttgatacaggcatagccaagccaatgatccccctggccgttaatgcatttatgcgtggcgattctcaaggtagcggcggagtttataactactacagttgcggctatcggtttaacggcagcgccgtccaattctggcgttctgaatcagggagaagaatacagacccagtggaatacctcaaaccgatggtactcgtcacagatgccgctcatggttataaacgcagcccattacttctaa

SEQ ID NO: 435309 - DNA, 3108 bp, Serratia marcescens
atgttatttgccctgggagagggagagtttgccggtgggctggatggcacaaacatttttgctgacggcacccccgctcttaatgccgatggctctgaaaatttccccggcttccgctgggagtttcgcccaggtacgcaggcacaggattatatccagggtattccagctgtcgaaaacgagatcaccgtcggcacagaactgaaaagcggcacgccgtgggtgcggtcagtatcgaacctgcagctttccgctgtgcgtctgcgctttggctggccgatgctgcaaaagcaagaggacaacggcgacgttaacggctaccgaatcgaatacgccatcgacgtggcaacagacggcggcagctatcaggaaatgttaacggcagcaatcgacgacaaaaccacctcgctgtatgagcgttctcaccgcatcaacttaccgaaggccaccacgggctggcaggtgcgcgttcgccggttgacgcctaacgccaacagcgcccggatcgccgatcgtatgaacatcgaggcgttgaccgaaattatcgatgccaaattgcgttatccgaacactgcgctgctgtacgttgagttcgactccaaacagtttccgaacatcccgaagatcagttgcgcgccgcgtgggcgagtgatccgcgtgcctgacaactatgacccggaaacgcgcagctataccggcgtctggacggggggctttaagtgggcctacagcgataatccggcctgggtattctacgacattctcttggctgagcgctttggtctgggtgatcgcatcgactcaacccaggtatccgagactgaactgtaccgcatcgcacagtattgcgatcagccggtgccagatggtcgcggcggtgatggcatggagccgcgctttacctgcaacgtttacattcaatcccgcgaggatgcctggacggtgctaagcgatctggctggtatcttccgtggcatgacctattggggacaaaaccaaatggtcgccctggcggatatgccgcgcgatatggacttcacctatacccgtgccaacgttatcgacggcaagtttacctactcgtcggccagcgaacgcacccgctacagcaccgcgatggtcagttggtctgatccggcgaaccactacgccgatgcgatagaggctgtatttgatagcgacctggtgcgccggtacgacgtgaaccaaaccgagcttacggcgatcggttgtacccgccagagcgaggcaaaccgccggggccgctgggcattgctgaccaacagcaaagaccgcacggttactttctctgttggcctcgatggcatgatcccgatgccgggacatatcgtcggcgtggccgatcagatggtcgccgggcgggtgatcggtggacgcatcagcgctgtagacggtcgcaaactgacactggacagaaaaccgggtgctaaagtcggcgaccgcctgatcattaacctgccttcaggcaaatcacaggctcgcaccgtgcaggcggtgaatgatcgcgtggtgaccgttaccactgcttatagcgagatacccgtgccggagtctgcctggtctatcgacgctgacgatctggcggtgcagctctaccgcgtggtgggtatcgctgacaatggcgataacacctttaccattaacgcaaccgagcatgacccgaacaaatatgctcgcatcgatactggcgcgcgtatcgacgatcgcccgatctccatcattccgcccggcgtgcaggcaccgccgaaaaacatcaccatcgacagctactcctcggtgagccagggtatcgccattaccaccatgcgcgccgcctggggggcagtggataacgcgatagcgtatgaggctgaatggcggaaagataatggtaactgggtatcaatgccgcgcacctcggcgctcggttttgaagtgccaggcatttacgccggtcgctacctggtgcgcgtgcgagccatcaacgccagtgacgtatcgtctgtctgggcgacgtcgatggaaacctacctgaaggggaaggaaggcaagccgccggtgccggttggcttcaaggcatcgcctttgttatggggtatccagctcgattggggattccctgacggggccgaagacacgctgaaaaccgaaattcagtatgcggacaacgccggcgggaataatgcgatgttgctggccgatatcccataccctctgcatacccacaccatgaccggcttgaaggcgggacaggagttctggttccgtgcccgcctgcaagaccgcaccggtaatcagggcgactggacaggctggattaagggacaatccaacgctaacgccggtgactacctggagagcatcggcgatggtttcctgacggataaggacggtgaccgcctcagtggcgacattgacacaaacattgaggccatcattcagaacgcgctggccaacaatgcgacggtggatcaccagtatgcgcagttaggcatggtgcgtgctgacatcctcatcgtgaaaaccacgatagcggaagtcgatcacgccctagcagaactgtccacgcaggtacaggcgcagattgacgacgtgacagcggtactggaggacaagctgacggcaacagttgatgccgacggcgcaacggcaatccacacgctgaaagccggtgtgagggttaacggcgtgttctacaacgcgggcatgtcgatcgccgtgctggcagaaaccggcaaacccgtcatcacccgtatcgggttcaacgccaatcagttcgtgttgatgagcggcagcggcgacacacaatactcgccgtttgctgtgattaacggccaagtgtttatcagcgatgcgttcattcagaacgcctctatcacgtcggcgaaaattgcggatgcggcaatcacaaacgccaaaatcagcggctttattcagtccgacaatttcagcgcaaccagcggctggcggatggataaaagcggcgcaggggctggtcaaatccagattaacggcggcgacggtaatgggcgcatggaaatacgcggcgaccagattaatgtttatgacgctggcggcaatctgcgggtgagaatggggaggttgtag

SEQ ID NO: 435310 - DNA, 126 bp, Serratia marcescens
atggcattacatcaaaaagctgagaagttgaaaaaagaaacctctgatgtcaaaaaggcggcccaggataaggccgctgggaatattacaatattctattcaactgaatttaaactgtttagttaa

SEQ ID NO: 435311 - DNA, 618 bp, Serratia marcescens
atgtcttttattgatataccattgcgaacagtacgatttcatggcccaatggtcggtatctttggaaaaaaatttgaatatcgtgctcacaatgtaccaaaggctatcgatgccatgaaaaatctcctgcccggctttgaacgctatatgcttgaagcacacaaacgtggcctgacattttctattttcgtcggtaaacgtaatgtagggcaggatgagctggcgttcaccaaagggtctgaagatattcaccttgttcccgtcgtgattggtagtaagcgcgctggcttattccaaactattttaggtgtcgcgttgattggggccgcgatgctaaccggccctgctggatgggcggcttttggctctactggtacgtttggtggagtgttggcaatgagtggcgctgcaatggctctcggcggcattgtccaaatgctctcccctcaaatgggcggattgcgcatgcgccaagaccaggacaacaaaccgagttatgcctttggcgggccggtcaataccacggcacagggcaatcctgtcggcgtgctgtatggcacgcgtgagataggcggagctattatctctgctggtatttacactgaagatcaacagtaa

SEQ ID NO: 435312 - DNA, 705 bp, Serratia marcescens
atgaaagagaaaaccatagcggccattatggcgcacgccgaggcagagtatccgcgcgagtgctgcggcatcgtggcgcagaaatcccgcgttgagcgttactttccctgccgtaatctggcggacaatcccaccgagcagtttcacctgtcaccagaggattatgtgaccgctgccgagtgggggacgatcacaatgattgtgcacagtcacccggatgccaccacgcagccgagcgagctggacaaagcccagtgcgacgcgatggagttgccctgggcgattgcaagctggccggagggtgacttgagaacgatcatgccgcgcggggaattaccgctgataggtcgccagttcgtgctggggcataccgactgctgggggctgattatgagctatttccggcaggagcacggcatagcgctccaggattaccgcgttgattatccgtggtgggagcggggcgaaaatctctacatggacaactggcacgactgcggttttcgggagttcgacggcctaccgatgccgggtgacatggtgattatgcaggtttccgcgccggtggcgaaccatgccggtattctgcttgaagacggtatgctgctgcaccacatgtacggcatgctcagccagcgggtgccttacggtggttattggaaagagcgaactgtgaaggtgctgcgccacaaagagctgatgtga

SEQ ID NO: 435313 - DNA, 750 bp, Serratia marcescens
atgctgaatacagacctgcagaagttggagccgggcaaccgcgttcgccttgttgaagtggacgggacaaagttcggcgctgatattctgcgctttcacagcgacacgcttccctatacgccggaagaactggccgctgctggcggggacgaaacgaaactaccagcaaaatcgatctggtggcagggcaaggagtacgggccgtggccgttttccgtcgaggggctggaaatatcctccgacagccaaagtacggagccgaaattgacggttgccaatatcaacggcctgatcactgcactttgccttcagtttgaagatatggcccaggccaaggtgctgatccacgatacgctggtgcattaccttgatgcccgaaattttccagaagggaacccaacggctgacccggtgcaggaaaagctacaggtgttctacatcgatcgcaaagcgacggaaagcgatgaggcggtggaattcgaactctccagcccggcagacctgcggggattgcgtatcccgacccgccaaatccacagcctgtgcacctggtgttcacgtggatggtatcgcaccggtaagggctgcgattacgcaggcactcgatactttgatgacaagggaaatccggtggatgacccaagtaaagatcggtgcggtgggctgctgagtgattgccaaaaacgttttggtgagactgagcctttaccgttcggcggtttccccggtgcagcgctgattaagcagtag

SEQ ID NO: 435314 - DNA, 339 bp, Serratia marcescens
atggccattaagaccttcaactatccggcgcgcgtcaatgccgccggtgatacccggtttcgtatcaggaaagcgcagttcggcgatggttatatgcaggtttccggtgatggtatcaacccgatcattcgctcatgggatttgacctttattggcaagtacagctacatcacgtctatcatcgcctttcttgaagatcatcaaggggtgaagtcattccaatggacaccaccgaccaacgttcccggcctctatcgctgcgaaggctataagcctgtcgcaatgggcggcgataactattcactgacggccacgtttaccgaggccttccacgtttaa

SEQ ID NO: 435315 - DNA, 3318 bp, Serratia marcescens
atggctgatgtggcatcgttggcggtcgggttgtacctgaatgacgccaattttagaaacaagctggtggctgcttaccgcaccgccggcgatcaatccggaaggtttaaccgtcaagcccagcaggatgcgaaaaagaccgatgaggcttatcagcgtgtcggccaaacggtcagtagccttaaagggacgctggctggtttggctggcgtagcagggttaggcttctcgctggggagcattatcacgacaacccggcagtatggccaggcgctgtctgacctttccgctatcaccggtgctacaggtgctcagctgaaacaattggacgatgcagcccagcaaatgggtcgtaccacggagtacagtgccagccaggcagcggaggcgctgaaacttatggccagcgccaagccggagttgctgaatacagccgacgggctgaccaccgctacccacagcgcgttgattttggcgcaggcggcagggacaacgttgccggatgcgacgaagacgctggccctctcgctgaaccaatttggcgccagtgctaaccaggcagaccgctacattaacgttatggccgccggtgccaagtacggctcatcagagatcgctgatacggccgcagcgataaagaatggcggtgtggcagcggcgcaggccggtatcggctttgagcaactgaacgcagcaatccaggtgttggcagagcgtgaaattaaagggggtgaggcaggaaccgggttgcgtaacgttatccttaaccttgaaaaaggcacggataaaacgctcaaaccatccgttgtggggctaagcaccgcgctggaaaacttgtcgaagaaaaacctctctacggcgcaggcggtcaagttgttcggcctcgagaacattaacgccgcctcaatccttgtgagtaaccgcagcaagctggatgacctgaccaaatcactgaccggcacacagactgcgcatgaacaggcggcgactcgcgtcaacaacctgaacggcgatctgatggggctgaccagtgcctttgaaggattgatcatcaaggttgggcaagcgagcggtgggccgctgcgcagtggtgttcagaatgtaacggaggcgatcaacgggctggcggataacttcaatatggtggccagcgtagcgatgtacacgctgatccccgtaatgaccaacaaattgaccgccggtatccgggaaagcatcggtgcatggcgagaacagcaggcagcggttaaatccgctaccttggcacaagcaagtatcgcgcagaaaactattgatgctgccaatgccacgttaaaacaaaatgatgctgagtttggtcgcgttcgtgcaatggaaaaagcggctaagcagtacggactgaacgtcagctataccgctgactacaaccgcttgatccgggaagagacggaagcaacgcgtgcggctactgtggctaaagcccaactggatgcggccaacaaacgcttgtctatttctgctcgagcggcttctgttgcgacaggtttagcaaaaggggcattggggttaataggcggcccagttggcgctgctaccttggccacgatggcgttatttgattttacccaacaagccaaaaatgcccgccaggcggctgtagacctaaagggagccgtggttgaaaccacttctgcgctgatgcagctgtctgacaagcagcttgcagtcaaagagctggaccttggcgatcagcttgaaagccagttggaagagcaaagtaagctgcaaaatcagcttaagtatatgaacaaacagattgagcaaactaatcagcaaggatgggttggtgatctgtttggcaataagaaagaaatgcaggctgcgagaacccgtgcagagaacgatctggactccgttaatcaaggcatccagaaaactcgcgataatcttgaaaatgtcggcaaggcccgtttcctcgttcagaccggcgtagccaacaccgctaatcagcttgccagcgatatcaataccattacctcacaaacggaaagcctgagtgataagccgcttagtccgtggggtggcgaagaccctggcaaggttgataaaaagggtcagcaggcgctgaaacaatatcagcagctgcgccgggaaattgaagtcgcgcatgcaaccagccttgcgaagatcgatctcgaagaacgaaattcgcaggcaaaattggtggctactgctaaggctgccggcgccagtcaagccgacgtgcaacgtgtcatggcattaaatgcggaaaattatcagcgtcagcggttggagctagcagaacagtacgctccaggacaggcggcagtacgcaaggagcaggaaactagtcgcgaactgaaggcattgtatgatgccaggctactaactgagcgcgattatcttgttgctcgcgacacgttgcagcaagaaatggctcgccaacgactgaaagcggaggctgacgccatttctgtaccacgacaagatatcgccggtgacgtagatccctctgtccagttgaacaaccaacttgtacagcagcaggcacaatatcaggcgtactaccagcaaggctatattgacaagcaacgttatgaacagctgatgcaggcggcaacgcaagagtcaaccgaagctcaatataagcaggcaatgagtctttatgcgggacaaagccagatcaataagttacagattggtttggtggacacaatgcgggaacgctcaaccaatatgctgactggattactcacgggtacgcagagctttaaagacagcatggtggggctgttctcatcgttgacgcaatcgatagtgcagaacctgatagaaatggccgcacaggctttgctgacaaaaaccattttgtcttcgttcatgagctttggcggtggcgctggtggtggtaataatccaggtgctgttccaatgttcgctaacgccaaaggcggcgtttattcgtcgccgtcactgagtgcatacagcggccagatcgtcagcaatcccactatgtttgcgttcgccaaaggcgctggcctgatgggcgaggctggcccagaggcgatcatgccgctcaagcgtggggcggacggttcgctgggtgtgcgggctattggtatgccacagcaggctgctgctgcgccgaacgtctatatcaccattgaaggcggcggcaatgtgaatactcaggccgatcagggctgggaagagttcggcaagcagatgggcaacatcgccgcgcaggaaagccagaaggtcatcaaccggaacctgaagcccggccagcctatctggaaagcaatcaaggggatgtaa

SEQ ID NO: 435316 - DNA, 366 bp, Serratia marcescens
atggctgagaaatacgatttgaaggcgttgaaggcagcattgctgaagtctgatgaccatatcattgaagtgccgatgtttgggacgaaaacgtttattcgccgcttgaaggcctcagagctgcaggataatgaggatggcatgaaagatgctatcgaagccggggatatgaataaggccgcacgccttaatgttgagttgttgttgtcatgttttatgacgcccgacggtaaacgtattcctgcgtctgcattgcctagcgtggatgatctgcttgctgcacatgataacccgacactggtcgaggcgatcagcaccgtcaagcgtcacgccgtaggcacgctggaagaagcggaaaaaaactga

SEQ ID NO: 435317 - DNA, 456 bp, Serratia marcescens
atggctgataaaacttcgccagaatatgccatgctgccggccggcaccatcgttaagtggggggctgttggcgccgcaccaacggccatgaaagcactgactaactgtaaggcggtgggcgagatggggcaaaccggcagctttgttgattgcacgacccttatcgacaccaccaagcaatttatctccgacctgccggaaggcgcggagaagtcgatcgggtttatcgacgatccttccaataccgattttgcggcgttcctgaccgcagcggacaaccgtgaaaccgttcagttctatgttgagttgccgaacggtcgcacctccacatcgatcctctcgctgtccggctggaagatgaacgaaatcactgctccggcgagtgaagttattcagatcacggtgcaaggtaagcagaacaacaacacttggggagctgtaaccccaaaggtgtga

SEQ ID NO: 435318 - DNA, 393 bp, Serratia marcescens
atgatcagcataggtgtaacgggtatggacgaattggcccgccagttggaagccctggggcgtgacgtgtctacaaaaattttgcgtgatgcaggtcgagctgctttggagcctgtattggaagatatgcagcagcatgcaggttatgacgacaccgccagcggcccacacatgcgcgacagcatatctattcgttcaactacacgcggacggtcgcaagtaactctacgtgtaggcccaagcaagttgcaccatatgaaggcgctggcgcaggaattcggcacggttaagcaggttgcctcaccattcattcgtccggcactggattacaacaaaacccgcgtattacgcatcctggcggctaacgtccgctatggcatcgaaaaccggtag

SEQ ID NO: 435319 - DNA, 390 bp, Serratia marcescens
atgatcgagtatgaaatcaaagcggcactggaggcactaacgagcctgccagcgtatccgctgctgttgcccgacccggaacaggaaggcgtaacgtatcagaaggtcagcaacccgaaagttgataccgggctagccagcacggcactgattcaggggcgctttcaggtcgcgctttatgtcatcaacgattacgtgcgcctcattgaactggataaggctatctgcgccgcctgggagagcattcaacacgggcatattgggcgctggcccgtgcaggcggtaacacgcggcacgatgcaacagggagcaaccaccctcaccaataatagcgttcagtaccggctggtgcgtgattacgtcatctgctacccggaggacgccatatga

SEQ ID NO: 435320 - DNA, 339 bp, Serratia marcescens
atgaaatcattacgcgcaggttcgctggagtttcgcatcaagcttcttcgccccgttacggttcgtgatgagcagaccggcgcaccggtcaaatcctttgaatttgtcgccgaggtctgggcggatgcggagccgatctccaaccgaaaaattcgcacgggtgaacaggggcaggtggtggagaccatgctgttcacgctgcggccacgggacgaaattaccgttgattggcaggtggtctttcaacagcgaacgtttaccgttcgtgcgcctgatcgttcacaacgagaccggctgttaattacggcggaggcagatattcgtcatgatcgagtatga

SEQ ID NO: 435321 - DNA, 327 bp, Serratia marcescens
atgctaaagctggaattggtgaaagagcattgccgcctggaacctgatttcagtgcggatgacaccctaatcggcgtctacatcggtgcggcgaaaaagcatgttgagatgtatacccgccgcaccctttacgccagcgaatccgaccccggatacgatgccgacgaagatcacctgctgctggatgatgatgtacgcacggctatgctgctttgtatcgggcattggtacgcgaaccgtgaggccgcgattgttggcgcgtcggcatcaaaattgccgctggctgttgagtctttacttcaaccctatcggatttacggcttatga

SEQ ID NO: 435322 - DNA, 258 bp, Serratia marcescens
atgaaagttaaagcacttgtaccgatcttgttcggtagccgggtggtgaatgacggcgatttgttcgaaacgcaggagcttcacgggcgcgagctgatcaaaaaaggctatgccgagcaggtgagtgatgacaatcctgcagagcagccagagcagccagagcagccagagcagccagagcagccagagcagccagagcagccagagcagccagagcagccagagcagccagagccagtcaagaaaagcaaaaagtaa

SEQ ID NO: 435323 - DNA, 1221 bp, Serratia marcescens
atgtctgaagttaatgagattctgaaaaaagtcaccgcatctatcgaagatgcaaccagcaaatttaacgccaaggccgaggacgccctgaaagaggcgaaaaaatcaggcgagttgtccgcagagactaaggacgccgtagataaaatggcgaccgaactgaacgccatgaaggcagcagagaaaacgctgaaggccgcgctgggggatctggagcagcacgtggcacaaatgccattgaaccgcgcggctgaagtggttcaatcggtcgggcagcaggtgatttcggcagaagcgctgaaagactttgcctccggtattcaggcctctcagcggctgagcattccggttaacgcgacgctgatctctaccgatgttcctgggcagatcgtggccccgcaacgcctgccgggtattgataccgcgccgaaacaacgcctgtttattcgtgacctgatcgcaccaggcaccaccggctccaacacgatttattgggtgcaacaaaccggcttcaccaacaaggctgctgccgtgcctgaaaacacgcctaagccgtacagcgatatccagtttgctgaaaaaatcacgccggttcgcacgttggcgcatctgttcaaagcctccaagcagattttggatgacttttcgcagctgcaatcgaccgttgatgcagaaatgcgttacggcctgaagtatgtcgaagagcaggaaattctgttcggtgacggcactggcgcacacctggaaggcatcatgccgcaggcgtcgaagtataaggcggcgtttgaagtcgctatgaaaaacggcattgacgatctgcgcttagcaatgttgcaggcacaactggcacgtttccctgccaccggccatgtgttgcacttcatcgactgggccaagattgagctgatcaaggactcgctgggccgctatatcctcgccaatccagccgcgctaaccggcccgactctctggggcttgcctgttgtcgcgacggagtcagcggcgttcctgggtaaattcctgaccggtgctttcagcgcgggtgcacagctctttgaccgtgaagaggcaaacgttgtgatcagtaccgagaacgccgacgacttcgagaagaacatgatctcgattcgttgcgaagagcgtgtggcgctggcggtcaaacggcctgaagcgtttgttaccggtgccttcaccgtgccaaccccaccaaccggcggttaa

SEQ ID NO: 435324 - DNA, 468 bp, Serratia marcescens
atggcaggacgacgcccgaaaccgtcccacctcaaggtggtcaccggcaatccgggcaaacgtaaacttaatgataaagagccgcaaccggcgagagaaattcccagcccaccttcgcacctgacggattgggggaaaacggcctgggggaaaatgactgtgctgctggacggcatgggcgttctgaccgttgctgatacttttgcgcttgagcggctctgcgatatttacgccgacatattgcaactgcgcaacacgatcgccgacgagggccgaacgtatacagtccaaacggaggggggctttttgattaaggctaaccctgcggttgccatgctggcagacgccgatcgccgcttcaaaagttatttggtggagtttggtctgacgcctgccgccaggtcaaaggtgaaagtaaatggtggagagaaagaagaagacccgctcgccgaattcttcggcacctga

SEQ ID NO: 435325 - DNA, 330 bp, Serratia marcescens
atgagcaacaagaaaccctatggcagcaaatggcaggccgaacgacttgtgttccttcgggagaatccactgtgtgccatgtgtcagcagatggggcgcatcgaaccagcaacggtggtggatcacatcgtgccgcatcgcatgaaagaagcgaagactcccgaggaaatgaagaaggcccagcatctgttctggagccgcaagaactggcagggcttatgtaagccacaccacgactctacaaagcaacgtatggagaagaccggcaaggtaatagggtgctcgcccgacggcctgccgcttgaccctgcgtcgcactggaaccgctga

SEQ ID NO: 435326 - DNA, 297 bp, Serratia marcescens
atggaacatctgatacatactttattagtaacaggaaaaggcggcttgcttgttaagtatgaaatatattgcacaagccgaacccttgattattacaacaaagtgccggaggggacttgcagggttattgcctataggttagatatcagcgattcatcattcagggtgatagattctgatttaaacattcaaagcctatttgatgctaataagcctaagccgaacgcatattattcagatggccctgacagagttaatcttgaaatggttattcagcatctgaaagatatgaattaa

SEQ ID NO: 435327 - DNA, 222 bp, Serratia marcescens
atgagaaaggttatcgttttcttcaatggtgatgccccatatttaattcaggttggagtgcatttgccttcactaagacttgaatatcccgatggccaacgtgcagatttgccgattcgcaaggctctaattaacggtgagcgtggcgagtacgcttatgcttcagatcgcgaagtagaatttgacgaaattagagacgcatttgagaaactggacaaatag

SEQ ID NO: 435328 - DNA, 285 bp, Serratia marcescens
atgagcgaagctaaaccgcaagatggcagcacagtgaagggataccgcacattgaccgccgacgatatcgcgcaaatgaacgagctgaaagacatcagtcgtaatttttgcgagcaactcgacctcgaacgcacacacctttcgctggagacggtagaggctggctccccggaagagagtaatcgcagtgaggcactgcgctgtctggctatcgcccgcaccaagatgcaggaagcctgcatgtgggcctgccgcgcggtggcccggccggacgcggattgctga

SEQ ID NO: 435329 - DNA, 270 bp, Serratia marcescens
atgagcaagcagttttacgagcgccgcaagcgctatttcgaagagaagcgccgccgcatggaagagatggaggtcagcaagattgtgctgactcaagagcaaatcaaagagctggcacggttcgcggctgaagacggtcagccgtcgtacaccatcacgcatggggccattgaagcattcgaagccgatgatggtcagcatgtgccggagtacagcggcctgatcgcctactcggagtcggaagagcacggcgtactacagttggcctaa

SEQ ID NO: 435330 - DNA, 441 bp, Serratia marcescens
atgaatataagtaaaaacggcattgagttgatcaaacggttcgagggcttggagctggaagcgtatcaagactcggtaggcgtctggactatcggctacggctggacgcaaacggtagacggtaaaaagattgcgcccggcatgaggatcgatcaggccactgccgaccggttgttgaaatgcggcgttgtgcagtatgagcagggtgttaatcagcttgtgaaagtgcgcatcactcaggggcagttcgacgcgctggtgagctttgcctacaacctcggcctgcgttcgctgagcacatccacgctgcttcggaagttgaacgacggggataagcagggggcagcggaagaattcggccggtgggttaatgctggtggcaagcggctggatggccttgtcacgcggcgagcggcagaacgtcggatgttcctatcatga

SEQ ID NO: 435331 - DNA, 312 bp, Serratia marcescens
atgccctggaagaatgaacccaacatcctatcaatgctgattgcgttcggcatgaccctgctgggtgccattgcgagctactcattcaaggtgctgaacggcgaggtgttcagctggcgaacgctattactgcagcttttcgtctccatcttcgcaggcttaacgatggttttgatcgctctgcattatgaatggccatctgaagttatgggcggtgtagcaggcatggcgggatggtcgggtgcatcgttgattaaggcgctggagcgtcgtttcctcaacaaagcaggcgatagcaatgaatataagtaa

SEQ ID NO: 435332 - DNA, 1029 bp, Serratia marcescens
atgatttcagaaacacgtcttatcaacgctgacacaacagcgtttatcaaaaccctgccggacaactccatagacctgatagcaaccgacccgccttacttccgggttaaatcttgcgattgggataaccagtggaagaacgaggccgattatctctcctggcttgatgcgttgctggtggaattctggcgggtgctgaaaccgaacggtagcctttacatgttctgcggtagccggttggcgtccgatactgagctgctggtgcgtcaacgtttcgacgtactgagccatatcgtgtgggctaaaccctcgggggcttggaagcgacagcacaaagaagggctacgggctttcttcccatcgactgagcggatcattttcgccggtcactatgccgggccgctgcaaccgaaggtagacggcttcgccgcgaagtgtggagagctgaagcaaaacgtctttaagccgctgattgattatttcagaacggcccggcaatccctcggcgtgtcagcgaaggaaatcaacgcggcaacaaaaacgcagatgtgcagccactggttctcagagagccaatggcagttgccaagcgaaaagcagtatcaggcgctccaggcgttatttgaccgcatcgcaaaagagcggcagcaggctggtggattgaatcggccccatcatgagctggtgcgggaataccggacgctgaaccgcgaatatttggaattgtgccaggaataccgatcgctccgccgcccattcacggtaacggcagcagttccctacactgacgtttggcactatccgccggttgccttctaccccggcaagcacccctgcgaaaagcccgccgaaatgatggaacacatcatcaacgccagtagccgccccggtgacgtggtggccgacttcttcatgggttctggctcaacgataaaggcagctatcaagctgggccgtatcggtctgggtgtagagctggaggccgaacggttcgaacaaacacaacgggagatattcccggacaactga

SEQ ID NO: 435333 - DNA, 1137 bp, Serratia marcescens
atgactattcaaatcaaacgtaccgacagcaacaccagcaagcataaaaccaccgatgacctgaagacccacctgcgtgatggacgtggtgagaagattccaaacagtgtcttcgggactgacattagccgcactgagattgtctctcaggaagacggcaccggccatactttacatgttggctacgtggaccgctcaggtcgccctcaggccttcggtaacgatgtgcacgactatgtgcagaccctagagaaaaccttgaatgacaccctgaacactggggcattctttgaggacctgcaggagcatgtattcccatgtgagcaacgcccattctccaccctacctactccaatccaacgtgagaccctgaccaatcgcaatgtgcgtttcctgaatggtggcatctatgatccgaaagccaaacctgaagttctggtacaaggcggccatgccctgatggtctccccggtgattgccgacaaggactccaaggagaccggtgtgctagcctcagcgatcacccatgtgtctgacttcgctatgatgggtggctggactgctcagagcgttacagctaccgcaagtgatctcgtagatcagtacctgcgcaacctgaccggctcagtggttgacgtattggtagacactccagacctgcagaccgtagacgctgaggcccttacaggcgcaccagcagtcatcgcggataccatcttggacaccttggcggttaaccttccgttccatttgggttcctctatggtggactatacgctgttggtccctgagaagtacgaggcagtgctcaaccgtgcagcccagaaggctggtcactctgagattgctgacctgattggttgccctgtggcaccatactccggtgatgaccgtggcttcttcctgatgcctcagaagtacgcaatgctgtctttccgttcgaccaaggacggcgacctaatcaaggttaaggtgacccgtgagccatcccgtgctggttacaatatggagctgattggtgctgttgacatcatggctacgggcaccgttaaggtccgtgacggtgtgtttgacaccgagaaggccgcagcgtatccgctggtccatcgtgtagtgttcggtactagcagcaagtaa

SEQ ID NO: 435334 - DNA, 411 bp, Serratia marcescens
atggctatttcatatcgcaaactggacatcaccttgagcgcagacggtgagaccgtgctggtcttcggtcaagagctggtcactaagtatttcaccgaggttgtcattacctcaatgctgaatggtctaccggcccttagtgcaggcgcacacgccatcctgaccgctgtacacgccgcaggcctcaacgctgacgattacgggtcctactcccaagcgtggcgtgagaacaacgcagaggcccgccgtgaggctgaggctcgtcgtattgctaatgagcgtgaccgccaacgtatcgctgacatgtatgcgtcacctgaggaaatcgctaaggcagccgcagagaagcgcaagcgtgccgacgacatggctcaacgctttggccgtaaaggcgtggactttggtctgtaa

SEQ ID NO: 435335 - DNA, 579 bp, Serratia marcescens
atgaatatcaacaaacacaagcacgccaatcacgtcatcaccattgaaggacacagctttaaggccaatgagtccggcatgtggaacctgacagaaatatggaaggtgctagggttacctaacaataaactgccctctcagtggcgcggtaaggtgaccaagagactcaccgacatgcaaaaaatgcacgtcgagaaggttggcattgaaagcataacttacgccgacaagcaggcgaccctaaagtatgccggctgggtatctgaagattttgaagatatggtctacgccgcctttgagtcaatccttgagatgccagaagtggccgagatagttgccaacaagatggttgagctgggctatcacgctgaggccgaactgttagagcgacacaaagacgactaccgggccgcaatgtccaccctaagcaccatttcaaagcgtgtcgatgggcggaggcccgaacgcatctacaaggctgtgctcagcggccacctaacagtggacaaagcgctctccctgataccttcgagtagcgtctggtacagtcgagtggaggccctatctcatgaagattga

SEQ ID NO: 435336 - DNA, 636 bp, Serratia marcescens
atggctgagtattttccggcggtgtttgaagcagaggcttttaactgtccctactgtggcgtatatgcgcgccagttttggcgtaggatgtatggaagcgcacgtgaattggctcaaagagcaactgaattcagaatgtcatcgtgctctcattgcggtgctgatgcttattggtatgaaggcaacatgataattccagcggccggtaatgttgaattgcctaacccagacatgccggaagactgtaagtccgactatatggaagccagaagcatcgtcaatctgtctcctaagggggccgctgcgcttctccgtctgtgccttcagaagctcatggtccatttaggagagccggggaaaaacattaacgccgacattaagtctctagttgagaaagggctgcctcttcgtatccaacaagctgcggacatttgccgtatcgttggaaatcaggctgtccaccccggagagattagccttgatgatgacccacagttaacacatggtctctttaagctgttgaatatcattgtcgatgaccggattacgagaccaaaagagatcgaagcgatgttccagagtatgcccgagggccctcgtcaagggatcgagaaaagggacggcaaggctagttaa

SEQ ID NO: 435337 - DNA, 1614 bp, Serratia marcescens
atgattcagccatctagcacctacctgtatcagcgcagtggcgtctactatttccgcttgcgtatcagacaatcaaacaatgatagaatgacctcagtttcactacggaccaaggaccgccgtaccgctatgtctcacttccggcacattaaggcagcactcaaagctattcatgcagacaggcccgacgccacctatgaggatatgagggggcacttgaaggacatcgccgagtgggaactttcagcaggacggcctgacctctttgagcctgacatgcgggatctttatcgtgaccaatatggggaagtgggagagaaccttgtagcagcactggctagtgaaccgcttaccatagaccagcatcgctacattaatgaggccctaggggtgcttaaagcgtgcatgaggcgcatcgaagcgggggacagtcagccactgatagattacgtcgatcgttttaatgatattgatcggcaggataaccaagcctctgtgtccctatctgttagtgctcccaaagagcaatcctctccggcagtaaaccccagagtttcacctgcagtagcgagtctctttgagcaatacgaagcggagaacgcgcagaactggaagcctgcaacactacgggaaaacaaagcgtctcacgcagcgttaatcgagatatttgaccatctgggtctcaatgctgacgcaaatgcgctaacacgtgctgatgtgctcaaggtgcgtgacgtgctccagcagctaccgaagaatcgtaaacagcgctttaaggataactcgctgggtgacctgttggcgcgggaagataagaccgattgtctggatgtggtcaccattaataacaagtatctgatcaagatggcggctgtcttcaagtgggctgtgcgtaatgacttgattaaaaagaatatgaccgaagggctggaactgaaagttactcggcgtaaagctgctgaggcccgcaatgctttctctgtggggcaagtggggcaactgttggtagccgctaaggcgtattaccagcgggcctctggcagaccttatcactattacgtcactgcattggctgccatcactggggctagggttaacgaggtggctcagctgcaagtaaaagacgtcaggaccactgaggccgggaccgtctatattcacatcaacgaagacgatagcagcctaccaggtaaaagcatcaagaacgcccacagtgaacgctgcgtgcctcttgtcgatggtgcctacggctttgtattggctgactttatggcgcttgtggaagcccgtagaggcgctgcaggcgatgacgcaatgctgttcgatggtctgcgtctcatgaagaatggatacggtgagcaggtaagtaaatggtttaacagaacgttgttacctaaggttctggctgaccgtgacggcttggcgtttcattcgtttagacatacagttgcgacacagttaaaacaacatggggtcgaattggcgtatgctcaggcgattatgggccacagttctgggtctattacctatgatcggtatgctaaagaagttgaagttgataggttggttaatgtagtggctgacgtttataaggatactggagtaaatggctga

SEQ ID NO: 435338 - DNA, 201 bp, Serratia marcescens
atgacgacaacagagcttgaagaattcttcggcacgccaaataaggctgcggaattctttggtttatccccagaggctttctaccagtggagaaagcgtcctggtggattgataccgaaaggcagggcagcagaagcggcattacgtaccaatggcgagcttgtttatcgtcctgaactttacaaaaagtctaccgcttaa

SEQ ID NO: 435339 - DNA, 621 bp, Serratia marcescens
atggcacttagaaaggagcgaaagctaacccaaaaacagctcgggaagcttgtaggggtttccgatgtaactgttgggtattgggagaaagatcaaaacagtcctgggggcttatcactgacaaagctcgcaagcttttttggtgtatcggaaaattacctcttaacgggcaaagaggaactatcaaacgttagtactggctctctgggggctatgcaagtaccgatcataagctgggttcaagctggacaatggacagcagagtgcgatgccagcaacctagatggaacaacggattacattttgacgacagatttacactctattggcacattcgcattaaacgttaagggaaagtcaatggagcctgaattcaaagagggggatacaattgttgttgatcctgatctctatccagtacctggggagtacgtcatagccgcgaacgggcgtggtgaggcgacattcaaaaaatacaggtcaagaggggtctccgaatcaggtgaggatgtgtttgaactgatacctctaaatgatgactatgcccccctgaactccgctttagaaccaatctcaatcattggtgttgtagttgaacaccgccgcaaaatgcgccgctaa

SEQ ID NO: 435340 - DNA, 915 bp, Serratia marcescens
atgctttacgtgaaagaaggcggtgttctgataaagcttgatgattgggagcaaatctactcaaggccaaactttattaaggatctcaaccttaaggataaaaaacttaaagctttgattgggtattataaaaatgagcctcctcgcaagtgtggaataagtaactgtcaccgcactcacaaaatgggagcaattgttatcacggaagataactgtgaagcctccattggtcatatgtgtggctcaaaaaactttgaagagaagtttgatattcttataaaacaactcgaaaaagaagttgatgctgaaatttataaagaggctgttgcatcacgtaagagccgaatttttgattactggaatcaagccgctgctctgacggtaggcgcaaacggaatcctaaagcttgccgagaaaatatcacaattaagagacccgctcgtagttggccgttttgcttcaatggagttgatgagcatggctgcaaaccagcgtacaaaagtaaccaagcctgagtgggttgaaaaatctaaaagcgaactcaccgaagaagaagtaaaaagcggtgagaaaaaatataagcttgaagatgtcgttatcggtcaaataaaaaacaccgaagtaatgctttcatcgaatgacatggctaagttatatcgtgaagaaatagagcaagttttaattgccttgcaacaccttgatttagataaggccactcccaagcaaataggtaacgttggtcgaagagtggcggttcttgataccagaatcgcgcgggccaatacgcttaagtctctttcgacagagttcttgacccataaaaatctttacccgctttatgaaaagatgcatccgatggatacggtgagcaggaaagacttagaactatacgaggcgttcattaacgctctgtga

SEQ ID NO: 435341 - DNA, 138 bp, Serratia marcescens
atggcaatcattctaaccacgcgcgaacgccgaagagcacggcgggaaatgcgctcaatacgtgctgccgctattcgcaagttcggcaatagcgacgtcaccagctacctaaaccgtctggtgcgctggtacttctga

SEQ ID NO: 435342 - DNA, 129 bp, Serratia marcescens
atgatcaaccacaatgctaacacaatcgttgtagacggtatgcgcgttgccccatccgtgcaggccgttcgcctcaccttctttgctcgtctgcgcaaaatcctctgccagaaaggtcacccgctctaa

SEQ ID NO: 435343 - DNA, 822 bp, Serratia marcescens
atgcaagaacttgcaagcctcgctaatggctcagtacgcgaaattcaggaattggcactgaccgcgttcacgccgaaaactgatatcccggtagcagtggttcctgacaaccatgaagtaaaaacgctcgagcattttcagcttcaaccttcgctgattcgtcaggcggtacgtcttctttcggcgtcctcgctgatcgcttacgttaaaaagttcgctgatccgcgcactgcaatcttcgccgacaaatctgaaacccgcattgaggcagtgctggattaccactctgcggcatactcaccagagtgggcaaagcatcgcgctgtctacgactgcccgtattccgatgaatggcaggaatggtcagcattcaataagcgtgtaatgaaccagaccgattttgccgagttccttgaaaaccacatccaaaatatcgcaccggtcagcgataactacaaaggcccgtctggttcagcactgatggagatggtgctggctttccaagaaacacgcaaagctgaatttaagtcttcacgccgtctgcaagacggtacgttccagttgtcctatagcgatgaaaaatcagggagcggtaatacctccctaccggaaaaaatcagcctggctatcgcaccattccataacggcgcgccttaccaggttgaagcccgtatccgctaccgcctgaaagacggcggcttagcactttggtacgagcttatcgaaccgaaaaaaatcgttgaacatgcattcactgagatcgtcgtagacctggaaaaccagctcgaaaacatcccggtttatgaaggctcaattaaataa

SEQ ID NO: 435344 - DNA, 834 bp, Serratia marcescens
atggcaactttaagtcagcgttatgcagcacgtaaaagtattggctctgatatgtctacccgtaagacgtttatgattcctctcaatgaaatttatgcagaggaaggctataacgttcgtgaattaaaccaagcgcacgttgaagaatttagggacgcgtttattgcaggagagtttattccgccgctggctgtcgaaataacagaacaaggtgtgaaagttatcgacggtcaccaccgcttccacggcgcgttgctggctactgctgccggtcatgaagtgaaacgccttgagtgtaaagatttcgaaggcaccgaggccgataaaattgcattcatggtcaccagctcacaagggctggcgcttacccctatagagcgcggcgcggcttacctacgcctggttaatcagggttggactaacgcggagatcgcaaagaaagttaagcgttctgagtccgatatcctccagcacctgcaattgcaggaatgcagcccctacatcaagagcctggtgcgcgctggttccattaactatgccctggctattcaaattaaccgcgagcatggtgtatatgccgaccgtgaagccgcgcgcttgatgaaaaaggccgaagagtccggcaagaaaaaaatcactaagagcgtcgcccagccacaattcaatgctacccgcgcccgcagactctgtgaactgctctatgatgctgcaccaatggttcgtgaagagggtgacgtcctgcttctccttcctggaacccgagaagaaatcaacaccattctcaacgaataccggcagcaacaccctcaggttacgagtggtgaagaacaatga

SEQ ID NO: 435345 - DNA, 219 bp, Serratia marcescens
atgagcatcaacctgaataatgcgcctttgtggattactgcgaaggcgctggagaaattaaaacagttccgtgccggtcgattattccccaaaagaacctatggcaaaaaatacctgacctttcgtgtaaataaacgctggcgcttactttcaaaagacgatggccataattggctgttgcttacccacaatgattacaactgcgtgatcgataaatag

SEQ ID NO: 435346 - DNA, 246 bp, Serratia marcescens
atggctaagcgtaagagcaacaacgcagagttaaccgcctgcccgcattgcggcggcgagaacggctaccacacgaaagagatcgtggacttcaagcagttctacgactggtcaggcgagtttcaggaaggtcaacacaccagcggcatcagaggcggtaaagcgttctactgctgcgactgtggccggaacatcacaaagcacgtcaaggtgcagcaggccgaggcccaggagaaagcattatga

SEQ ID NO: 435347 - DNA, 252 bp, Serratia marcescens
atgagcaagtacacgttcgttgttgagttcgaagacggcaaggaacccggtgtcggatttggcacaaaaatcctcggcggtaagttatgcatggtggcgttcgaagacattcgaaaataccagcttaaagaggaagatgcttacgccttgaaggagttcattggtgaacaccaggcagatttcacggcttgctgtgaagaaaatgaagtttccggtgaagccattcacgaaaaactacgtcgtcaatcatga

SEQ ID NO: 435348 - DNA, 420 bp, Serratia marcescens
atggacaataagctgagcgaactgagcaagccggtggcgactgttgacgtacagcgcggccgcatggatggaaatacgtttgctgttgcgtggagttcggcaggccatgcattgccggatggcccacacttcatttactcgcaagagtacgtctccgccctaacgcagcgcatcgccgagctggaagaggaattcgcattcatcatgggccagaacgacggaatggagaaggaactgcgcgacaaagatgcacgcattgaacacctggaagccaagctggctacgccggtgcggttgcctgacacgcgccaatcagtatccggcgacagataccaatggtctgacggcgttttcaactataagcaggacgcaatcgcattgctgcgcgaacagggtttcatcatagagggaggtgagtag

SEQ ID NO: 435349 - DNA, 207 bp, Serratia marcescens
atgaacaccgctgactatctgtatgacgtgcttgtccccgcagcgtcagaattcaataagacgctgacggcgagaaggcaaggctttgtggccattcgcaacgttaaatcatgccgggcaaaattcttctccaaggccgcagaaaaggattgggtcaagctctgtgctgagcgcgggcttaaaaacgatacgaaactggaatattga

SEQ ID NO: 435350 - DNA, 570 bp, Serratia marcescens
atgaaccatttgatgcttgaccttgaaacgctgggtaagaagcccagcgcccctatcttgactatcggcgctgtgctttttaatccgcacaccggcgaacttggcgagcagttctacaccgccgtagacctgcaaagcgttatggccggtaaggcaacaccagacgccgatacgattatttggtggatgaagcaaagcagcgaagcccgcgcggctatctgcgttgacggtgcgccgtcgttgctgtctgcgttatatgacctgaataagtatatccgggccaatgtcgccaatcctcgtagcctgcgcgtgtgggggaacggcgcggtattcgataacgtgatcctgcgtgagtcttaccagcgtgaatgcgttccattgccgtgggagtggtacaacgacagggatgtgcgcactatcgttgagcttggccgcgtagtcggctttgatcctaagcgtgatatgccgtttgacggcgagcgccacaacgccttagccgatgctatccaccaggcgaagtatgtttccgcaatttatcagcgcctgtttgcaggccaccagcaagattaa

SEQ ID NO: 435351 - DNA, 1398 bp, Serratia marcescens
atgccgcgcactgtaacacagatgcaggatatccccaaaaatgatgagttcttggccgcatctgcgcgttgggaagactgcaagccaccttatgcaagctcacacatgagaatctgtgttgctgccgccaaaatcattttggcgcacctcggccaagctcggcgatcgaagtacgaaaaagacaactatctgcgcatagattttagcaaagcaggaaaggttacgttctacgctgagtttccaaagaagatggggcttaagggtaaaaaactgggggagtggccagaaatggctattcagatcgccagggagaaagctcaggatatcgccgataatggcttgaaagctgagtcggtacaacaggcaatcagagagtatgaagaggacttatacgctaaggttcagcgtaaaaagctgggggaggatagctttaaaacctactgcacacggacgaaacaaatagccgcagcgttcggtgagcgtgaggttttcagcgatgtgacgtataatcgcctgcttgaagttttcgatctctggattgaaaccaaatccaataatcaggcgttggagctatcagcagaactgcgacggctatggaagtttggcgcgccacgttactgtaacgggcgcaacgttgccgccagcctgccgactgattacatatcatctagagtccagaagccaacgccgacacgcctgtttaccgatattgagtctatcgcggggttgtggcttaacatcgctgcggccaggtcagtgcatcagaaaaacgcgatgcggtacatgatcctaactggcgtcaggccgatcaacgtcagcaacttgcgatggagttttatcaatgagcaggcaggggaaatagtatacccggctggggtaattggcatgcgcggggctatgaaaacccagaaagaattccggctacctataacgccaggcatccgacagattcttgaagagcagaaggcatggagggattctgttgaagggtgcaacaaagattacgtgttcctccaaccgcgtgacccatcacagccattttccaagcgttccctggacaagcttataaaaatttatagcccagagaacgccgtgaaaggtattaggcatgatggtacggtaaaggggaaagaaggtgcatttaatacaatgtgccgaaaattcctgaaaagtaatgttatcgccgcgatgagagataaaggttattcacgaagcgattcgaaagaaataagtatattgtgtatgcatcactctgacaaagaatcagaccctatgggtgagttttatgacttctccgacgaaatattaaatgaagagatggcactgaagcggctggcctttgaggcacatgagaccagcatactcgctcaggtcgcattgttaagaaagaaacgttaa

SEQ ID NO: 435352 - DNA, 1203 bp, Serratia marcescens
atgcctacaattattacggatttcaatgaggagttagccgaagaaggtatatactcaggtgttgaagttgaagatgaagaagtgtcaacagaacctagcgaaaaggagccatttgacaccgagtctatttctattacatctaaaatagtcgcactcgacacagtattgagacgcatcaaaaataaaactataaaattagcaccagactttcagagagagtatgtttgggatattacgaggaaaagtcagcttattgagtcaatgatgcttaagattcccttgccgatgttttatgtatctgaagataaaaatggtatttgggaggttgttgatggtttacaaagactatcaacaatacaaaactttattcttggcgacgatcatgatgggaaaggctttaaattaaaaggattagaattttggtctgatatttatgacggaaaagattttttcaacttagaaaaagaaagcgaaaacattaaagtcattaataatatcctcgagaccgaattgtctttcattgtaataaatccagagactccggaaaaagtcaagagaaatatattcaagagaataaacactggtggcatgaggctctctaaccaagaaataaggcatgcactatatcagggtcgttctagtgaactccttaaaaccctcgtcgaggataatgtttacaatattgttataaacaatacagttaaagataatcgtatggctggacgagagttaatattacgatacttatctttttatttgttcaagtactccgcttacaaaggtgacatggatgactttctttcaaatactatgagagcaataaatggagaaactcaatcacataaaaacaaccatgccatccccaatgacgctgaaataataaacgccttcagaaaagggttgtctagagcttatagtatttttggtgagcatgcatttagaaagtcattgcccggcgactcacgaaaaacaccaataaataagtctctatttgagctttggttgtgtgttttttcaaaactgaaggatgatactttcgataaaataaattcacaaaaggaactttttattgagaagtattcagaattgttgaaaagcgaagattttataaactctataagtaggcatggctctagcgtgcagggagcaaaataccgtagagaacaattacttatactgataagagatgtgaaaaatgcttga

SEQ ID NO: 435353 - DNA, 1077 bp, Serratia marcescens
atgcttgagtcgattacaataaaatcgtttaaatcattcatagattcaacgataaaattaaataaccttacgatattgacgggcttgaataattctgggaagagttcaataattcaagcaatcaggatgtgcctactctgtaatgagaattcatctccctacatatctggatatggcgacttttctgatttaaagtctaagctatcagccataaatagtaatatagaaataaatctaacagtaaaagacagcaaagatagcctatcattaaagcttggtgaagatgaggttaagtgtttatcaaatatgcccccactttcatatgactatgtgagcgctgatagacatgggccgaatgttattctcccaaccatggacgcaaacattagcaatatttcagttggagccaaaggagaatattttattgattactatttgaagtttgaaaatgtaattatacctgaattaacaagacatgaacaatcagtagggaatttattaaaacatcagattgtttactggatgagggagatttcaccaggaatagagctagatttcgacattaacaaaaaacatgatatcactcatttagaggtaaatggattcagggcaaccaatacagggtttggcattagctatgttttacccatagtacttgcagctttaactatgtcctcactccctcccctggatgattttaaatataaaaatttgaaaaagtggcataactgtaaaaataaattactgatagttgagaatcctgaggcgcatttacaccctagagggcaaacagcattagggaaacttattgcactggctagcgcatgtggagtgcaaataatagttgagactcatagcgatcattttttggatggagttagattggcagttaagcaattcgatgagttattaccgaaaaactgctcaatactttacttctctagagaaaaaaacttagagtcaaccagtgaagaaattagtattagtaaagatggtaaacttagctcttggccggtgggtttttttgatcaaacatctataaatttatctaaactagctaaaagagatcttaaatga

SEQ ID NO: 435354 - DNA, 897 bp, Serratia marcescens
atgaatgttaactttattattgatgagcgctggttaattaatgccataaatactatcaaaaactcttctgtcgaaattgatgagctatccgaattaatagatgagataaacaaaaaaaagagctcctctatttcatatacggacggtatatatgaaaaagaatgcggtggagatatcttatgcaatttgttatttggagagctatcaagaaacccatcctttagagattccatcttacatattagtacgctattaaaccaggcaaattccgtatctgttgaattatcagatgacaacttcgattcagatgctcttaagatattaaactcattgggttatggtgcattgatttataaccaagatgtcactccaccatggtggaatcaaagctcaatgcatttagttaaccaaaagactgaaataataaaatattatagaattcagtcagttagtgagatgatctcgttttgcgaactggcggaacatttagatgaactttatccggccttatattttttagctgaggcaaaagatttttcaaagttgggggtatgccacacaacatattttccattaataataaagcacttatcttatcttaacgacaatgcacgagagcattatcttcaaaataaaaacaccttcagccaggtagcaagtacatttggagtgacattatcaggtgaaagtagcaatacgagaggaaatcaaaaagcggacagagaaagatataaaaaaattgaagatgtagatattaaatttgagttacacactaaagtgtgttgggataaagggagaattcatttccacatcggcaacaatttaccagcgaaagtatcagctataacccaagacaaattgatagtgggtattgtctgtgagcacctgcctacttag

SEQ ID NO: 435355 - DNA, 255 bp, Serratia marcescens
atgatgcgctgcccgctgtgcacccatgcgtcctatactcgcaccagtcgctatatcacggagcggacgaaagaggcgtattaccaatgtcagagcctgacctgttcttgcacattcaagacggtggaaagcgtcgataaaattctgtgtcagccgatacaagcgcaaccggtcgatgagaacaccttgccaccaccggagaaacggaccttgaaccgctatcgccgttacaacagcagtcctaccctgcactaa

SEQ ID NO: 435356 - DNA, 726 bp, Serratia marcescens
atgagcaccaccgccttaccgaaatacatcaccgataaactgcacgccctgcgtgacgctcgcgcggcccacgacaaaaactaccaggcattgaccgacgtcgtaaccggcattgcccgctgccaccaacagaagaaagacaccgaagtgcagagccaggaggcagaaagccagtggcgcaccctgtttcgcaaactgcgcggagaaatgacgccggaactgcaagcgcagcaccacagtcggatttccaaacgggagctggcgaaagagttcgacggcctgattgaggagatggagctggacaaaatgcagcttcacctcagctgcggcggcacggccccgaaggtggtgaacgcacacaaagacgccctcacgacctttgcggctcatgcgatgcatcaggccgtggatgcgctgagcaaggcgcttatcagccctgacgttatcaaggcttgcgcactggcttcacgggcttacggcgtctatgcggacaatccgatgaaaatgattgagctacaggtactgggcacgctacaaggccgcattcgcgctaccatggctacgcaaaatatcgaccacccggtgctgaatgagattggcctgacgataccgcaagaaaccggcgtattgccggaactgcaaagcagcccaattcgccggacgcaagtggcaagagaactggcggaaaaacgccgtctgctgcaagagaaaggggcccaatcatga

SEQ ID NO: 435357 - DNA, 744 bp, Serratia marcescens
atggttgatcaggtcgtgcgggttgccgtcttcggcaatccggcccttatcgataaagatcaggcgcgacgccactttttcggcaaagccgacttcgtgggtgacgatgaccatcgtcatgccttcctcggccagatcctgcatcaccttcagcacttcgtggcgcaattccggatcgagcgcggaggtcggctcgtcgaacagcatcattttcggcttcaccgccagcgcgcgcgcaatcgccacgcgctgctgctgcccgcccgacagttcggacgggtagtggtgggcacgctccgccagaccgaccttggccagcagctcgcgcgccagcttttccgcatcggacttcttcgcgccgcgcacgcggatcgggccgaaggcgacgttttccagcgccgtcaggtgcgggaacaggtagaactgctggaacaccatgccggcttcctggcggatcaaccgatcgtccactttcggatcgttggctttcaggccgtcgacgatcagatcgccgctggtgacctcttccagcttgttgatgcagcgcagcagggtggatttgccggagccggacggcccgatgatcaccaccacttcgcctttgtcgatcttcaaatcgatgttatgcagcacctgggtttggccaaaatgcttggagacgtttttaaattcaatcacaggattttcatccttctttccagacgacgcagcacgaagctcagcaccagggtaataatcagatag

SEQ ID NO: 435358 - DNA, 1473 bp, Serratia marcescens
atggataaactcacaccgctcaaaccgcttccttccctgtgcgcccttgccgccacgctgattatctggttcctcattcccgtgccggagggcgtcgcgcctaatgcctggcaactgctggcgctgtttatcggcaccatcatcgccatcatcggcaaggcgatgccgatcggcgcagtctcggtgatcgccatcgccctggtggcggtgaccggcgtcaccaatcccggcaagccgggcgccgcgctggacgacgcgctcagcggcttttccaaccagctgatctggctgatcggtttttcgatcatgatctccctcagcctgaataaaaccgggctgggcgcgcgcatcggctattactttatttcgctgttcggcaaaaaaacgctgggcatcgcctatgcgctgacgctggcggaaaccacgctggcgccggtgacgccgagcaacaccgcgcgcggcggcggcatcattcacccgatcatgaagtcgatcgccgacagcttcggctccaaacccgagctcaatacctccggcaaaatcggccgctacctgtcgctggtgaactacaacatcaacccggtcacctcggcgatgtttatcaccgctaccgcgcctaacccgctgattgtcagcctgatcgccaaaggcacacacggcagcttcgagctatcctggtcgatgtgggcagtcgccgcgctggtgccggggctgtgctcgctgatcgtgatgccgttggtcatctatctgctgtatccgccggaggtgaaaagtaccccggacgcgccgcgcttcgcgcgcgaaaaactgcaggcgctggggccggtaacgctgccggagaaaatcaccctcggggtgttcgcgctgttgctggtgctgtgggccggcattccggcgatgatcttcggcccggcgctggcggtcaatcccaccaccgcggcgctgatcggcctggcggtgctgctggccaccggggtgctgagctgggaggatgtgctcaagcataaaggcgcgtgggacaccgtggtgtggttctcggcgctggtgatgatggccagcttccttggcaaactggggctgatcggctggctgtcgcaaaccgtgggcaacggcatcgaccatatgggcatgagctgggtgggcggcacgatcttgctgaccctcatctatttgtattcgcactatttcttcgccagcaccaccgcgcacgtgacggcgatgttcgccgctttcttcgccgccggcatcgcgctcggcgcgccaccggcgctgctgggcctgatcctggcgttctcttcctcgctgatgatgtcgctgacgcattacggcaccggcaccgcgccgatcgtcttcggctccggctacgtgacgctgggggaatggtggaaagcgggatgggtgatgagcgtggttaacttgctgatctggatagtgatcggcggagcatggtggaagctgctgggctactggtga

SEQ ID NO: 435359 - DNA, 138 bp, Serratia marcescens
atgatttttaccaaaatcattaggggattcatcagcgaccagcgtccgctggtggtgatgaacgaagtgaaagaaggcggtttcttcagccgcatcgtggactacatcaaactgatgttccaccactggttcggttaa

SEQ ID NO: 435360 - DNA, 312 bp, Serratia marcescens
atgtacgcggttttccaaagtggtggtaaacaacaccgagtaagcgaaggtcagaccgttcgcttggaaaagctggacatcgcaactggtgaagcggttgagtttgaccagattctgatgatcgctaatggcgaagatatcaaaatcggcgttcctttcgtcgatggcggcaagatcaaagctgaagtcgttgctcacggtcgtggcgagaaaattaaaattgttaagtttcgtcgtcgtaaacaccaccgtaagcagcagggccaccgtcagtggttcactgacgttaaaatcaccggcatcagcgcttaa

SEQ ID NO: 435361 - DNA, 972 bp, Serratia marcescens
atgaacctagagcaaattaccgagttaaccgcgcaagatatggcggccgtgaacgcaacaattctcgaacagctgaattccgatgtcacgctcatcaatcagcttggctattacattatcagcggtggcggtaagcgcatccggccgatgatcgccgtcctggccgcgcgggcattgggctatgaaggcagcaagcacgtcaccgtggccgccctgatcgaattcatccataccgccacgctgctgcatgacgacgtcgttgacgaatcggacatgcgccgcggcaaagccaccgccaacgcggcgttcggcaacgccgccagcgtgctggtcggcgactttatctacacccgcgccttccagatgatgaccagcctggaatccctgcgcgtgctggcgctgatgtcggaagcggtcaacgtcatcgccgaaggtgaagtgctgcagttgatgaacgtgcacgatcccgacatcagcgaagaaagctatatgcgggtgatctacagcaaaaccgcccgtctgtttgaggcggcggcgcaatcgtcggcgatcctgtccggcgccagcgctgagcaagaacgggcgctgcaagactatggccgctacctcggcaccgctttccagctgatcgacgatctgctcgactacagcgccgacggcagcaccctgggcaaaaacaccggcgacgatctgaacgaagggaaaccgaccctgccgctgctgcacgcgatgcacaacggcgacgacgcccagcgtgacatgatccgcggcgcgattgagcaaggcaacggccgtcacctgttggagccggtgctgcaggcgatgcagcaatgcggttcactggaatacacccgcaaacgcgccgaggaagaggccgacaaggcgatcgccgcgctgcaggcattgccggcatcggagcaccgcacggcgctggagggcctggcccatctggcggtgcaacgcgacttttaa

SEQ ID NO: 435362 - DNA, 939 bp, Serratia marcescens
atgaaactacttgataaaaagtattataacctcgaacctaattctgagtaccttgaggactcatttattttaggattggcatggaaaaaaactgacagttttgtgagaactcacaattggtatgcagatctattagcgcttgacaagtgtgcatttgatattagtgatgaagtcactaaatggtcaaatgaagtcaaaaatgccacttttgccaaaagtgatattgaattaatactcgctcccaagggtgctaactggttctttaaaaaagggaggtggattacaaataaagaggatagaaaattaagaccattggctaatatatctatcaaggagcagtcttttgctacagccgtaatgatgtgtattgctgattcgctagaaacgagacagaaagattgttcactaagtagccttggctatgctgagcatgtgaaaaataaagttgttagttacggaaataggcttatttgtgattggaataatgataaggccagatttcgttggggtggaagcgaatattacaggaagttctctacagattatcgaaatttcctacaaagacctatctatgtaggaagagaaactgtaaacaaagtcagtggaattgatgatgtttatattgttagtttggatttgaaaaacttttttagctctataaaaatagatcttctgataaaaaaacttaaagaaatatcttctaaacattacgattgcaatttttcagataataataatttctggagtttggcaagtcaaattttgaattggacatggcctaaagactctttgtctttgcttggaagtttggatttaaaaaaaatcgttgggctacctcaaggcttagcatcggctggagctctggcgaatgcctgtctcttatacacatctccgagcccacgagacaagaggcaatctcgtatgccgtcttctgcttga

SEQ ID NO: 435363 - DNA, 588 bp, Serratia marcescens
gtgtttgcactggcggggttgggaaaacccaatatcggcttactttcagaagagtttttagaagaagtgcgtgaaatgcctcagcgtaatctggccgttgaattgctagagaagttgttgaacgacggtattcatgctcgcacaaaaaataacgtagtacaggagaaaaagtattcagatcgccttagggccgtattgcttaagtacaataaccgcgcaatagaaactgcacaggtaattgaagagcttatacagatggctaaagagttccaagaagccatggcgcgcgacgatgctctaggtctcaatccggatgagatcgcgttctacgatgcattagcagaaaacgaaagtgctgtgcgtgaactaggtgacgaaacgctcaaaaaactggcaattgaagttaccttgaaactgcggcagtccactacagtagactggcaagtacgagaaagtgtgcgtgccagactgcgtattttagtaagacagacactgcgtaaatataaatatcctccggataaaaccgcaggtaccgttgagcttattttgaaacaagccgaggttgtttcgaatagttggacgatttaa

SEQ ID NO: 435364 - DNA, 186 bp, Serratia marcescens
atgaacaaagcctggtcactgtgcagtacgctggatgaagccaaaccattgcaaaaagagatagcgtttctgtcagcggtgaaagtggcgattatcaagctgacgacaaccgataagaaattcagccagtcagagaaaaacacgctgctcggtaaaatccttgataatcgccactttcaccgctga

SEQ ID NO: 435365 - DNA, 1110 bp, Serratia marcescens
  misc_feature (1092)..(1101): n is a, c, g, or t
ttgagtaaagctggtattcagtctaataggggggatggatatcaaacgttggtagcgtttgactgggctttgaccgtgttatccgatcctgattatcaatggttagagacagattcagtgaaatggctggtcgatgacgttgtgatagggcggactgacggtacaagaatttgttgtcagtgcaaaaaaaatcaaacaggatttcgagcgtggtcattcaccgatcttaatgatgagctagaaaaggccattaaaacgcttatacaagatcctactacgacagtcagattttactctcgtactccttttggtgagctggctgctttgcaagaatttagtactaatttcccagatgaaagtgcttatcatgctgctttaaaagagacaaaggtacatgaggcgataaatagaaaactcattgaattaattgcaacaatatcttctaattttaatggttatgagtttttatccagaacaaaatttgttactagcgatattcatgaacgaatgagagaaactctggaagagcgattgcaatatttggtgagtaattctgttgcagcttttaattcgctttggacttgccttgattaccaagggatgcgagtcgctgacacgcaagataataaactatcatcttgctcgcgtttaaccaaagccgaccttataaatcttctttctcaatcaggttgtgttatttctcctccggcagatattcaatctatttttaattcattcagaaaaacatcatccattggtcgttcatggcaacgagatattagtggtcatcgtattgatacacttctggtaagtgaattaattgaagctatcaaaagcaagagccattccatattagtgactggagggccgggttcaggaaaaacgtgtgttctacttgaattgcaagagaaactagagcagttggcgcaatctggtagtattatgttacctctattcattcaatcgcgagagtttgctgatttagaaactgcacaggaacggcaatctctagggttagacgagcaatggattgaaaagattgcgcgtgtagctgacagctatcatgtaatagtcataattgattcacttgannnnnnnnnnatcatgtaa

SEQ ID NO: 435366 - DNA, 2409 bp, Serratia marcescens
atggtgctaacgtattttttagctcaaatagatcagatgtcattaattccaaatgttaccgttattacggcttgcagagagtttgatagacattacgatagacgtatatctcagcgctcatgggataaagagtttaagtgccaggcattagattgggaaggtgaaatcaagccgttgcttgaaaaattctcaattgactcatcaaccattgataacacaacgcgacatttaattagcaatccacgtgagttagctctatttataaatcttgctcaaagaggtggcagctttaacatagtgactagccaagcgctagctcaacggtatattgattccattgttttgactaatcccttgctaggtgatagagggaaaatagcgcttgaaaatatggctacggaaatgttaaagcttcgtaccctgtcgataccaacccaacgatttactgcttcagttgatattcgtagaatgttacttagccataatgtgttgcatgaaactgatgataataaattaacatttgggcatcaaacgttacttgatgtattagttattagtagagcgattcgtcatggattgactttaagtgattttataaaggatctcccaccagtaccttttgttcgcccatctattcgtagctttattgcacagcttgtcaatgaaggaagacaagagtttagaaaacagttacgaacggtacttactggaacttatgcttttcatatacgtcgcctagttgctgagtgttttgctgagcaattacctcaagatgatgattggccaatgttacgtgatttacgtaatacgcatcgagacgtttttcaggttatttatagcaaagcctcacaagttgaatggcattatttttggttaagtaatcttgttccggttttaaaagctatgcgtgatattgatggtatagaaattcatacttaccgtattgcacattggttaaatctagatccatcaggtgttattgatttttggatggaaatattgggatctgattggatagataagtcaaaattgataaataagattgctgtttctatatcgaatataaagaaagatcatgcatatttgatgtctccgctattactggagctatttaaatttccacaggaagaatatagctttttaggcagagcccttgctcgctgtgttgctgcaggggggatcgatgatgcggtgctttgggattacatcattgctgatgttaaagatgaagacatactgacctatcgttttggaaataagcttaagtgccgaccgcacgaatttggtgataaggataatgaattcctttcaaatagaatgattaattctattactttgttagagcaggctatatcgacaattgaacagtggagccaagtacggagttatagatatgaagaaaaaaataattatcgaagtggttttctaaatggaacttctcattatgatgatcgcagaatgagtgattttgagcataaagatagtcaacgtgtcctgatggatgctttagaagttgctattattcatcatgctaatatcaattctgagtggtggcaaaacaatcgtgaacgtttatgctttaatctggaaggatcgcttcgttactttgcattgttagcgtgcattaattctccgctaactaatcttgacatatcctctcgtttgctgtcgaaatcggatttattagagtctgagctttcacatgaactgggcactttagtgcagaaagtttttatccatttgagctcagaatcccaagacgcaatacaggttataatacttgctctttctcagagatatgctgatttccctgagtataggcaatatatgcttaaagatcaggtcaagtttattatttgtataccgtgctatttacgttcgccgtcatgtgtaagtatttttgatgaatatagtcgttcaaactggccacttgaacataaaccagatgttaatggatggtgcgggatagtaagagctccgttctcatttgaagtttttaataagattagcaatgaaggcgttctcagtcttcttgagcactataatgggtataggcgagactcatttagcgatatgttaattggtggagaggagcaagtcgctcagcaactgagtgaggcatcttcaagggatccattacgatttttgagtttgttatcttcttactggcaagatataaatgaaaatttccgaaataatattatgaatggtattgcgcgttatttgaattatcgttatggcaaccttcggcaaaataatgactggaaaccgattaatgaacctaatattgatattttagttagcaatactttagatgaactggaacgacattctgtctattggcggcaaaaccgctctgcttccgaagtgctacaaggggctttgttgaataaatcagatttcgggtaa

SEQ ID NO: 435367 - DNA, 132 bp, Serratia marcescens
atgtcctccttcaagaatagaacatatatgatgccttatcccatcttgaagtttaatatcgccatcttcaatagctccgacctcatagctaatgatactgccgtcataattcgcaacaatcacctgttctga

SEQ ID NO: 435368 - DNA, 2556 bp, Serratia marcescens
atgaatagcaccgataaactcgattcgcatacgccgatgatgcagcagtacctgcgcctcaaggcccagcatcctgaaatcctgctgttttaccgcatgggcgacttctacgagctgttttacgacgacgccaagcgcgcttcccagctgctggatatctcgctgaccaaacgcggcgcctcggcgggtgaaccgatcccgatggccggcgtgccgcaccacgcggtagagaactacctggccaagctggtgcagctcggcgagtccgtcgccatctgcgagcagatcggcgatccggccaccagtaaagggccggtcgagcgcaaagtggtgcgtatcgtcacgcccggcaccatcaccgacgaagcgctgctgcaagagcgccaggacaacctgctggcggcgatctggcaggacgcgcgcggcttcggctacgccacgctggacgtgagctccggccgctttcgcgtcgccgagccgcaggatctggaaaccatggccgccgagctgcagcgcaccaatccggccgagctgctctacccggaaaccttcgaacaaatggcgctgatcgaacagcgccacggcctgcgccgccgcccgctgtgggaattcgagcttgagaccgcgcgtcagcagctcaacctgcagttcggcacccgcgatttgaccggtttcggcgtcgaacaggcgcaccaggcgctgcgcgccgccggctgcctgctgcagtacgtcaaagatactcagcgcacttcgctgccgcacattcgcggcatcaccatggagcgccagcaggacggcatcatcatggacgccgccacccgccgcaacctggaactgacgcagagcctgtccggcggcagcgacaacacgctggcggcgatcctcgatcgcacggtcacgccgatgggcagccgcatgctgaaacgctggctgcacatgccgacccgcgatatcaaggttctcaccgcccgccaacaggcgatcggcgcattgcaggagctgttcaccgatctgcagccttcactgcgtcaggtgggcgatcaggagcgaattttggcgcgtctggcgctgcgcaccgcccggccgcgcgatctggcgcgcatgcgccatgctttccagcaactgcccgacattcgcgcgctgctgcaagatgtggataccccgcacgtgcagcagctgctgtctcaggtgggccagttcgacgagctgcgcgagctgctggagcgcgcggtcattgaatccccgccggtgctggtgcgcgacggcggcgtgatcgcccccggttacaacagcgagctggacgagtggcgcgcactggccgacggcgccagcgattacctcgatcggctggagatccgcgagcgtgaaaagctggggctggatacgctcaaggtcggcttcaacggcgtacacggctactacattcaggtcagccgcggccaaagccacctggtgccgatccactatgtgcgccgtcagacgctgaaaaacgccgagcgctacatcatcccggaattgaaagagtacgaagacaaagtgctcacctccaagggcaaggcgctggcgatcgagaaaagcctgtacgacgagctgttcgatctgctgctgccgcacctggcggagctgcagcaaagcgccgccgcactggccgagctggacgtgctggccaacctggccgagcgcgccgataccctgaactacgcttgcccgaccatgagcgagcagccggggatccgcattaccgaaggccgtcacccggtggtggagcaggtgctgagcgagccgtttatctccaacccgctcaccctgtcgccacagcgccgtatgctgatcattaccggcccgaacatgggcggtaaaagcacttatatgcggcaaacggcgctgatcgtgctgatggcgcacatcggcagttacgtgccggccaccaaggccaccatcggcccggtggatcgcatcttcacccgcgtcggcgcggcggacgatctggcttccggccgctccaccttcatggtggagatgaccgaaaccgccaacatcctgcacaacgccaccgagcatagcctggtgttgatggatgaaatcggccgcggcacctccacctacgacggcctgtcgctggcctgggcctgcgccgagaacctggccaaccgcatcaaggcgatgacgctgttcgccacccactacttcgagctgacgaccctgccggagaaaatggaaggcgtggtcaacgtgcatctggacgcgctcgaacatggcgataccatcgccttcatgcacagcgtgcaggacggtgccgccagcaaaagctatggcctggcggtcgccgcattggccggcgtaccgcgcgacgtcatcaagcgcgcccgccagaaactgcgcgagctggagtctatctccagccacaccgcctcgggcagcgtcgatgccacccagatgacgctgctgcaggaagaaacctcgccggcggttgaagccctggaggggcttgatccggattccctgtcgccgcgccaggcgctggaatggatctaccggctgaaaaatatggtgtag

SEQ ID NO: 435369 - DNA, 861 bp, Serratia marcescens
atgatttttaccaaaatcattaggggattcatcagtgcgacgcagctctatctgggtgagatcggttattcacctctgctgaccgcagaggaagaagtctattttgcgcggcgtgctctgcgcggtgacgtgccgtcccgccgccgcatgattgaaagcaacctgcggctggtggtgaaaatcgcccgccgctacagcaaccgcggtctggcactgctggatctgatcgaagagggtaacctcggtctgattcgcgcagtggaaaaattcgacccggaacgcggtttccgcttctccacttacgcaacctggtggatccgtcagacgattgaacgggcgatcatgaaccaaacccgtaccattcgtttgcctatccatatcgtcaaagaactgaatgtctatctgcgcaccgcgcgcgagctttcccacaagctggatcatgaaccgagcgctgaagagattgccgagcaactcgacaagccggtggatgacgtcagccgcatgctgcgtctgaatgagcgcatcacctcggtggatacgccgctgggcggggattcggagaaagcgctgctggacattctggccgacgagaaggacaacgggcccgaagacaccacgcaagacgacgatatgaagcaaagcatcgtcaaatggctgttcgaactgaacgccaaacagcgtgaagtgttggcgcgtcgtttcggcctgctgggctatgaagcggcgacgctggaagacgtaggccgggagattggcctgacgcgcgagcgcgtccgtcagattcaggttgaaggtctgcgccgtctgcgtgagattctgcagatgcagggcctgagcattgaggcgctgttccgcgaataa

SEQ ID NO: 435370 - DNA, 3075 bp, Serratia marcescens; identical to SEQ ID NO: 434245

SEQ ID NO: 435371 - DNA, 327 bp, Serratia marcescens
atgaggggatctctcagagcacagcatcgccccgccgcttatcgcgccattatcaaagaaaacctcaacctggcggacgacaagcagctcagcgcctggctgacggccaacggtatcgatgaggctgcctatcggcaggccagagagtcagagcgggtcaaggcgttgttggcgcatatgacggcggtaagccgctattaccagatcaacgcgacccccagttttatcgtcaatcgcaaatggctggcgctgcaagatcgcgagttttccgctttcagcgggcagctgctgtcgctgttgcagcacgataaaccgctggccccctga

SEQ ID NO: 435372 - DNA, 2124 bp, Serratia marcescens
atggaaaatacccttcctacgccggtcttgcagagcgaaatcaatgagtgcgggctggcctgcatcgccatgctggcggaaactcagggcattcgcgcaccgttgacggagctgcgggagcgttatcccgcttcgcagcacggcacttcgctggcgacgctgtgcgccattttgggagagctggcgctaccggcttatccggtggcgttcgagcaccgggatctggcggcgctgccgttaccggccattttgcattacggcgcgggccactatgtgttattggcgtatcgccagggggggtacgtgtgcgtaatgaacccggcgttggggcagcagttgctgccgtacgccgctctgaaagcagaaatcagcggttatgcgttggtgctggatcgcgatgatttgccagccaccgtcccggcccggcgcagccaccgccgcagcgctttcgccagcttaagcctgaaggataccgccggcatcgccggcatctatcgcctggcggcgatgacgttttttatctcactgacgctgttcatcatgccgatgatggtcgccagcgcgatcaatcaggtgttcgccatggccggcgaggtcgcgttcccctacgcctattatctgctggcgtttgtggcgtccacggcgttggcgctgattgcgcgcaccctcaccgaacgcttcatcaaaaatttcgtgttgttgcacggcgccgccggtttttctcgcctgctggaaaactcactcaatttcttcagcaagcgcgcccccggcgagatcttcagccgtttcaccagctggcagatggccgccggccagaaaatcgaactggacaacggcctgcgcaccgactggatcatcggcgccatcgcgttggcggtgatgtgctacctgagcccgatgctggcgctggtgccggttgtcggcgtgctgctgatgggggcggtcagcgtatgggccatctaccgcgatcggcattacacccagcagctgcaggtgcgaggcgcggtgcaaaatgacttcatcctggaaaccatccaggggttttcgaccatcaaatcagccggcttggctggccagcggcaggaagggttcgccgaacatgcccgctcgctgttcaattgcctgcaacagcaaaagatctatgaacagataaaaggcagcatttaccagctgatcggcagtctggagatggtgttgttcatgctgctggcgttgccgctgctcaaggagggcgaactcagtctgggggcattcttcgcctacagctttctgcgcgaaatctttacttcgtacagcagcaagatcttttttgccgttttgcagaaaaaccagctgcacgtcatcgatgaacgcgcgcgggatctgtttcctgcagtatccgctcgggcccagtctgcggacgaaagcgtgagccattttgacgcgcggttggcgtatcggagtgtggccttcgcttacgacgccggtcaaccggtgttgcgcgatttgtcgctgacgctggagcgtggcgagtgcatcgccatttgcggcggttccggcgcgggcaagagcacgttgctgaaggtgctcgcctgcctgctgacgccgcagcagggggagctgacgctggatgggcgcgtactggcaagtgccgccgcgcagcggctgttcttcctgcaaagccaggaggacattctgttcaacgcctcggtgttgcagaacatcacgctgttcgcgccgtctgcgccgggccagcaacggcaggtggaacaggcgttgcgcagtttggggctggcggacgcggtggcgcagctgccggggggcgtgaacgccctggtgcgggagagccatgccgggctgtcgctggggcagcggcagcgtctgttgctggcgcgcgccatgtacagccgttgcccggtgttggtgctggacgaaccgacggcgaatctggatgaaaagaccgcggcggcggtgatgtcggctctggtggcgcattgccgtgaaaaccgtaaaaccctggtgacggtcacccataatccgcggctgttgccgttattcgatcgggtcttgcgcatgtcgcaggggcggctggtggctgagcccaccgacgacgccaggatgaatgattgtgcagaggtggagtga

SEQ ID NO: 435373 - DNA, 726 bp, Serratia marcescens; identical to SEQ ID NO: 196075

SEQ ID NO: 435374 - DNA, 240 bp, Serratia marcescens; identical to SEQ ID NO: 196076

SEQ ID NO: 435375 - DNA, 279 bp, Serratia marcescens; identical to SEQ ID NO: 196077

SEQ ID NO: 435376 - DNA, 1497 bp, Serratia marcescens
atgtggctcaataattgggactttaagcagtgtctgagcgaggttggtgattatctgggagttgagaaagagcaaccccagtgtcaacaagccgctgcaccgacacgagctcctgcacaggccaaagcgcctgttcagcaagggcccatgaaggtgaataacaaggtcctcgattccaagaatcgcaaaaaatccattgccggtactctgattgcccacggtaaagctccctatgagcataacgaagacaatgagctcagctactttgccttcatccgtgacaggagcggtttggaacgcaccatttggggcgtggatcttgaaagagccatcggtgaaagcgaagccaagtatggtgatgaggtcgtcatgacaaacctcgggcgcgagcctgtaactgtcgtcgttgaagttaaggacgatcaggggaatgttgtgagagaacaacctatgcaaacgcatcgcaacacctggctggtggaacgtcgtggcgcttcggtgacgcagttccgcgcacgctcaaacggtggtgttgagtcggtgagtcaccatgttgagttgccccctgtggtcaaccgcacggtagaagctccggcaccgcaagcacaagcttcggccatacaactggaagggcaaagcagcgaaaacaagccgaaagttgttccaatgtttcgtgaacaacccaagccttggttgcttgagctccaagaggaaatggagaagagaatggagcgtgaacgcgcttacagcgctcgcctccgtgagaaaattgagaaggtatggaacgagtgtttgccgttctctagccgtgtgactgaaccaatgcgtctgtatttcaaaaaccgcgagctgctgttcaacgttgatgaagtagaaaaaacagactgtttgcggttcaatccggctatgccctactacgacgaagatggcaatgaagttgggaaattcccggctatcgtctgcgctatccgagatgtggaaggcaacctggtaacgctccaccgcacctatctcacccaaaacggtaaaaaagccaaggttggcaacgccaagaaaatgatgcccattcctgacggtttggatgttaatggcgcggccatccgcctcggtgaaccgagtgagggtatcctgggtgttgcagaagggctggaaacggctctgtccgcttatcgagtcactcaaattccggtttggtcaacggtcaatgcgaccctgatggagtccttcgaggttccagaaggtgttcacacagtattgatctgggctgacaaagataagtctgtgactggtgaaaagtcagctaacgtgctgaaagccaagctggagaagcgcggcattcgtgtttacgtcctgctgcctaaactcccaatcccacccagagcgaaagggattgactggaacgatgtcctgatgagtcagggaagcctcggtttcccaaatgctcgctacctgcgcgatttcattgcgagaaggagagctgagtatgcccgtcattga

SEQ ID NO: 435377 - DNA, 387 bp, Serratia marcescens; identical to SEQ ID NO: 196079

SEQ ID NO: 435378 - DNA, 861 bp, Serratia marcescens; identical to SEQ ID NO: 196080

SEQ ID NO: 435379 - DNA, 606 bp, Serratia marcescens; identical to SEQ ID NO: 196082

SEQ ID NO: 435380 - DNA, 204 bp, Serratia marcescens; identical to SEQ ID NO: 196083

SEQ ID NO: 435381 - DNA, 2454 bp, Serratia marcescens; identical to SEQ ID NO: 196084

SEQ ID NO: 435382 - DNA, 261 bp, Serratia marcescens; identical to SEQ ID NO: 196085

SEQ ID NO: 435383 - DNA, 246 bp, Serratia marcescens; identical to SEQ ID NO: 196088

SEQ ID NO: 435384 - DNA, 300 bp, Serratia marcescens; identical to SEQ ID NO: 196089

SEQ ID NO: 435385 - DNA, 1626 bp, Serratia marcescens; identical to SEQ ID NO: 196090

SEQ ID NO: 435386 - DNA, 303 bp, Serratia marcescens; identical to SEQ ID NO: 196091

SEQ ID NO: 435387 - DNA, 345 bp, Serratia marcescens; identical to SEQ ID NO: 196092

SEQ ID NO: 435388 - DNA, 192 bp, Serratia marcescens; identical to SEQ ID NO: 148290

SEQ ID NO: 435389 - DNA, 390 bp, Serratia marcescens; identical to SEQ ID NO: 196096

SEQ ID NO: 435390 - DNA, 225 bp, Serratia marcescens; identical to SEQ ID NO: 196097

SEQ ID NO: 435391 - DNA, 303 bp, Serratia marcescens; identical to SEQ ID NO: 101171

SEQ ID NO: 435392 - DNA, 1641 bp, Serratia marcescens; identical to SEQ ID NO: 101173

SEQ ID NO: 435393 - DNA, 939 bp, Serratia marcescens; identical to SEQ ID NO: 101174

SEQ ID NO: 435394 - DNA, 495 bp, Serratia marcescens; identical to SEQ ID NO: 101175

SEQ ID NO: 435395 - DNA, 1314 bp, Serratia marcescens; identical to SEQ ID NO: 101176

SEQ ID NO: 435396 - DNA, 252 bp, Serratia marcescens; identical to SEQ ID NO: 101177

SEQ ID NO: 435397 - DNA, 1005 bp, Serratia marcescens; identical to SEQ ID NO: 101178

SEQ ID NO: 435398 - DNA, 564 bp, Serratia marcescens; identical to SEQ ID NO: 101179

SEQ ID NO: 435399 - DNA, 282 bp, Serratia marcescens; identical to SEQ ID NO: 101180

SEQ ID NO: 435400 - DNA, 2886 bp, Serratia marcescens; identical to SEQ ID NO: 25667

SEQ ID NO: 435401 - DNA, 417 bp, Serratia marcescens; identical to SEQ ID NO: 52340

SEQ ID NO: 435402 - DNA, 291 bp, Serratia marcescens; identical to SEQ ID NO: 52341

SEQ ID NO: 435403 - DNA, 156 bp, Serratia marcescens
atggatccgcttaaaccaaaacaatctgaacctgagtgggcggaaatgttaaataaaaatatgggagataaacagcaacgcaaagaaactttctggcgcaatgctgttatcttttttgtgttgctggggattgttctgcatttttttgggaaatga

SEQ ID NO: 435404 - DNA, 618 bp, Serratia marcescens; identical to SEQ ID NO: 52345

SEQ ID NO: 435405 - DNA, 1434 bp, Serratia marcescens; identical to SEQ ID NO: 196050

SEQ ID NO: 435406 - DNA, 324 bp, Serratia marcescens; identical to SEQ ID NO: 196052

SEQ ID NO: 435407 - DNA, 507 bp, Serratia marcescens; identical to SEQ ID NO: 196053

SEQ ID NO: 435408 - DNA, 675 bp, Serratia marcescens; identical to SEQ ID NO: 52348

SEQ ID NO: 435409 - DNA, 144 bp, Serratia marcescens; identical to SEQ ID NO: 196055

SEQ ID NO: 435410 - DNA, 231 bp, Serratia marcescens; identical to SEQ ID NO: 196127

SEQ ID NO: 435411 - DNA, 546 bp, Serratia marcescens
atggggaatgttgaaggggcaaacacaatgacgacgaatactcaaaatgcgaacaccaaccgggatatgtctttacgcaacatgctcgtccccgctcttttgttctacgtgatgatgacggccatgtttctgggacttgacgcattcatggatcagaccaccagcatgaacctgccatttatgccgttccttgtttcgatggtgtgctttaccagtgatgcacgtcgagcgtgggactggcgaaacgggctcaaagttgtggtcgtattgactgtggtagccatgctgcttgcattcgcctatcagctcgcggtcggaaagatgagtctctttggggttggtatatacccggtcacagccttccttttgttggcaatcacctgggtgattcgcgctatcggaaagacggcaccattccagttccttgggaggcgcctggcgcggattggtgcatcgaagtgggtccaacgtaccgtcgcagtcatggtgctcgctggggggcttgccattaccgtttatgcgtactggcttaaccaaggtagctaa

SEQ ID NO: 435412 - DNA, 861 bp, Serratia marcescens
atgccagaacaaaataccaaatcgctacgcctcggggttattgccgccattattttgggactcgcaggaaccgggttcggcatttaccagttcgtgaaagagaaggagctggcgcaagagatcgctaacgtgaagtccacggtcaaccaggtgaagggcaccgaaggtgtcactttcaaaagcaaagcagagtttgaagctgcggtggccgaaagcatcaacaagtttgtcgcgcagaaacaacaagccgacatcgatcagaagtatgccaagtttgaggcagctcctgagaaggtcgatgacggtaaacacatctacggggcccctggtgctaggttcacactggtggagttctccgatatggaatgtccgttctgcaagcaattccacgacacacccaagcaaattgttgatgccagcaaagggaatgtgaattggcagtggaagcatatgcctctcgatttccataatccgacagctcacagagaagcattggccgctgagtgtattgctgagcagaaaggcaaccgaggcttctgggtcttcgtgaatgacattttccatcacagccaaggtaacggtgctggggttgctgacttggcctctgttgttactggggttggcgctgatctggatgagttccgggactgcctcggttctggcaagcatgaagacaaggttgaggctgacatccagaaggccaagagctatggcgttaacgggactccggccacctttgtagtggacaaccaaaccggcaagagtcagctcctcggcggcgctcaaccggcacaagccatcatggctgtgatgcgaaaaatgatgattgagtcgcagccagacgactcagcaagccaataa

SEQ ID NO: 435413 - DNA, 960 bp, Serratia marcescens; identical to SEQ ID NO: 196123

SEQ ID NO: 435414 - DNA, 855 bp, Serratia marcescens; identical to SEQ ID NO: 196122

SEQ ID NO: 435415 - DNA, 315 bp, Serratia marcescens
atgttgcatgaggacaatgtgatggaaaaagtcaaaaacgtagatgccgttgagttcacggcagcagataagaaggcgatgacccatgcggcttacgcccagtgcttctttgttctggcccaagcaatagcgtttccttccttggggatggctggcgctatggttgcagctatgtgcggcatgatgccgtggttgaccaagtttgccaaagaggccccctctaaagcctttggcatggtgatggcctcgctcggcttggcacctgtgtacggaaagctctgtgagctggtggtcagtgcgattcagggagcttga

SEQ ID NO: 435416 - DNA, 522 bp, Serratia marcescens; identical to SEQ ID NO: 196119

SEQ ID NO: 435417 - DNA, 522 bp, Serratia marcescens; identical to SEQ ID NO: 196118

SEQ ID NO: 435418 - DNA, 609 bp, Serratia marcescens; identical to SEQ ID NO: 196117

SEQ ID NO: 435419 - DNA, 186 bp, Serratia marcescens
atgggggtggctgtaagcattctccttgagcatttcgccctcaaaaccgccctcaagccacgagaagaacattggtatgcccagttcctgcccaagctgacggcagtagtcacgcatgaaggcccaatccatcaacgaactaccctcctgaccatcaacatcatgatgccagaactccacctttga

SEQ ID NO: 435420 - DNA, 435 bp, Serratia marcescens; identical to SEQ ID NO: 101133

SEQ ID NO: 435421 - DNA, 1065 bp, Serratia marcescens; identical to SEQ ID NO: 196114

SEQ ID NO: 435422 - DNA, 288 bp, Serratia marcescens; identical to SEQ ID NO: 101132

SEQ ID NO: 435423 - DNA, 540 bp, Serratia marcescens; identical to SEQ ID NO: 196112

SEQ ID NO: 435424 - DNA, 984 bp, Serratia marcescens; identical to SEQ ID NO: 196111

SEQ ID NO: 435425 - DNA, 480 bp, Serratia marcescens; identical to SEQ ID NO: 52355

SEQ ID NO: 435426 - DNA, 231 bp, Serratia marcescens; identical to SEQ ID NO: 52352

SEQ ID NO: 435427 - DNA, 168 bp, Serratia marcescens; identical to SEQ ID NO: 101156

SEQ ID NO: 435428 - DNA, 237 bp, Serratia marcescens; identical to SEQ ID NO: 52351

SEQ ID NO: 435429 - DNA, 369 bp, Serratia marcescens; identical to SEQ ID NO: 52350

SEQ ID NO: 435430 - DNA, 309 bp, Serratia marcescens; identical to SEQ ID NO: 196060

SEQ ID NO: 435431 - DNA, 786 bp, Serratia marcescens; identical to SEQ ID NO: 196059

SEQ ID NO: 435432 - DNA, 1143 bp, Serratia marcescens
  misc_feature (996)..(1005): n is a, c, g, or t
atggcattgaacaatttaaaaggcctgtccgaacttgctaaagccgccaaaggcaagaaaggcaaagaggttcttaccgtccctgttgacgacgttgtttccaaggtacaggtgcgtaagcgcttccgtaacattgaagatctggcagccaccttgctgaccgaagggcagcagtctccgatcatcgtgtttccgaagaacgaagaaggcaagttcgttatccagaaaggggagcggcgttggagggcttgtaaacacgctggtattgagactatcgacctggtggttaatgataaggtccagaacaacctggacgagactgctggtgagttgatcgaaaacatccagcgggatgatttgactccggtagagattgccgaggcgttaaacctgtttgttgaagaaggttggaaacaaaaggatattgctgatcgtcttggtaagaatatcactttcgtatctacgcatctgtcgttgctcaagctacctgactgtgtgcgcgagttgtacgataatgaagtatgttctgatacagaaaccttgaacaatctccgtcttctgtttgagcttaacgaagaaagatgtcgcgccgtctgcgctgtagctatgtctgacgggattacccgtaaacaaagccgtgagatgttgaatgatgccaaacgcatcaaagaagaaatggaaaaaggtcctctgacgggctccgaccagaatgataaacctggcgctggtaacaccgacgagcaagccattaactctgggagtggcacatcggtacatatcggaaatggcgaccagagccctgccaacatggaactggaagggggggcaaatctcggtggtcagggcgatgatgaccaagaccattttcttgacgaagagggtaagggcaaaactcctgtccggcagccagttaacaatggtaagagcaaagatgaagaaggtggcgatgctcttcctcctctgccgaaggataaggaatggaagaacgtcagggcnnnnnnnnnnaaacgtggagtcatcatgaccgaccgtgttgctctggttccggctacagtctgggttaaaacgctcgatggcgaaggcaaggaaaagcacgttcatgtgcctgtgtcagacattgaacttctgagtgttgaaggctaa

SEQ ID NO: 435433 - DNA, 192 bp, Serratia marcescens; identical to SEQ ID NO: 99236

SEQ ID NO: 435434 - DNA, 558 bp, Serratia marcescens; identical to SEQ ID NO: 101130

SEQ ID NO: 435435 - DNA, 876 bp, Serratia marcescens; identical to SEQ ID NO: 196224

SEQ ID NO: 435436 - DNA, 519 bp, Serratia marcescens
ttggaaggcaaactggaagcgaaagcagccgatctggcccgagcacaggatcgcttggagcaggctgaaagtgaaaatcgctctttgagccaaaaattggcaactacagagggtgagttggcattgcaaaaaggcaagagtatagagcagacagaaaagctccgggcagctcaggaacaaagtacatccctaaaagaacagctcgaaaatgcacaggccaaactggcccaatcacaggactcccttgccacggccaaagctcatggcgaatctgctgaacgagagtgccagcgcctatctggagaggtagaaaagctggaaaccaaactgtccagcgccgaagcagaagctcgctctcttgttcaagacaaaggcatgatcgctggtcagttgcaggaaaaagaccagcaggccaagagcctcgaacaaagactgactgatgcgctgaccaaaatttctgggttggagcaagagcgaattaaagctggtgggggagagaaaaagaaagaggaaaactga

SEQ ID NO: 435437 - DNA, 1470 bp, Serratia marcescens
  misc_feature (832)..(841): n is a, c, g, or t
  misc_feature (1407)..(1416): n is a, c, g, or t
atgaagcaacttcctcgtgacacaccagagcaatcgctgatcactcagtacaaaggatctcgccttgtcgttaaggcctatgctggcacgggcaaaaccaccacactggtgaaatacgctcataacaacctcgactctcgcatcctctatctggcatacaaccgggccatccgcgatgaggccagagaaaaatttcctgcaaacgttgactgcaaaacgtcccaccagcttgcctacgccactataggaaggggctaccatcacaaactcacaggcaacctaagactcaccgatattgctcaagcggttaataccaaaaactggacgtttgccaaagatattctcgacacactcaacgccttcatgtgcagtgcagatatgcggattctttatacgcattttgctcgtgccgatacaggcaaggtgcttacatccaaacaggagagataccaaatccaggtagtcgaaggtgcagaactgatatggaagcggatgaccaaccttcaagatccgttcccgaccgtacacgactgctacctcaaacagtatcagctcgggatgccgaatctgtctcgtcggtacaccaccattctttttgatgaggcccaagacgccaacccggtcacaagcagcatcgtcctacagcagaaatgcaaggtaatcctggttggagatcgccaccagcagatctataggttcagaggtgcaaacaacgctcttgatagcaaagagctcatgaacgccgaccaactctatctcacgcatagcttccgctttggccccaacgtgtcgctggtggcaaacgcccttcttgaactcaaaggcgaaacannnnnnnnnngccggggaccggcagatcaggtagtcatgttcttgcctggtgatgtcggtcatcgcgcaatacttcaccgaaccgtcatgggtgttatcgagacagcgctctctgcgactgaatccggatcacaagtgttttgggttggtggcatcgacgcttatcagatcaatgagctcctggatttgtactggttctcgatggccgagccagaccgtgtaaaaaacaagaagctgcttgatgaatatgaagactactttgagtatcaagaagtagcgaaggccaccaaagatcctgagatgatgagggccgtcaagatcatcaatagctatgatgaaatccctgagcgcctcaccactcttcgacgtaatacagtcaaagaagaatttggggccgacattacagtctcaacagctcatcggtgcaaggggttagagtgggactttgttcagctctatgacgattttccggatgtcctggacccggagctcgacccaatggcccgagacgatgaaataaacctgctctacgtcgcatccacaagagcgatgcgaatcctcgcgttaaatagcgcnnnnnnnnnnttgagatggttatccgctatatcacccaaaagcgcatggtcgagaaacagatga

SEQ ID NO: 435438 - DNA, 2370 bp, Serratia marcescens
atgtacgcgctttcctcaactggagatgtgctgcaacactggattgcaaccggcggcatgttggctgcggccactccggtaatttccctgtttatcgttacaggtagcacttatgccttcaccagcttggcatcgagaataagcggtgctgaccacgttgacgaaaagatgcaaacgccagatctactcaagcaaggtccggttatgcaaagtcagccagcatacaatcacaaccagtttagtggtgcgattgcgaacggcgcagaaagcatgatcagcaccttctcgcttggctccactctggcatcaggtgtgagctccgcacaggcattacaaagccagaaatcggaggcattccaaagcaccctcggtcgaggtttttctgatggagtaagtcaggatcaagcctactcaagactctccaatgttgggcgcaacgtttcgtctcaaagcacagctcagagccaattggtcaaccaacaagccaagaacttcatggataagttccaagtggatgatagccactctgatgcggtcaaaggtgcttttgccatgcaggctatgggcactctcgatgctgacgaagcggcttccatgcttatgcctatggttggtaaggtcagggcggcaatgaagggggccgctggtattaaatcaaacagtacagcacttgttcctactggtggtgatggcgaatcaggcgatgtgctggacatcaaagcgcaggcgaagggggcaacagagtcctcagctcaagactcctcaagctggtcagcaagcgatgtgtctcagttcatgaagggtgtgagttattcacaaaccgatagccaagcgttgactaatcaattggcacagggttttagtcgttccggtagcgagtcgtttaagcaaacctggggggatagcttatcccagaacctgtccaagtcggcctctgaactggtgtctgcatccgacaccttcacaacaatgagccaactccagaatcaaatgggctccatgactaacaccgactttaaaactctcggtggtgcagtggcacaaacccctgaggccatgaatcaactgaatgactatttccgaaatgccgcgccgcagtcggttaaagacgaggctgcttcactacagcaaagataccaagcctacggaatgtcgcctcaggtggctcaagcagcagctcgaatgacagcaatgaccaactccaaaaactatgatccgggtaaggagcttggcgggtatcaagctgcactacaggcaatcaatactgcgtccgggcgcaacggatcctttagtggtgacgcctacggaaatagcggcattgaaggcccgaatgttcaaggtctaccaggtcaggttcaaggtgctgtaggcagtggacctaatatcccaaccggattcagagataatgtggctgggatggctggaactaatccggcatccgaagcaggccagttaccaacgaacagcccccttgttcaaaatgaacatgcagcaggtacatcagctcttcacaacctggcgcagcaaacagagcgaaacgtaactgctcccgaactcaaaaaagcacaagataacctcattaactcgcttccggagatgtcttggagcgcttcggcatgggggacgtgggataacttcagtgacaagatgggccgcagagctgaacaagcaggcggggctctcattgctggtggtcaggctggcgctgatgcgttctcacaagcaatggatcaaatgagaacgatgacgcctgagcaacgcgaccaattcgtcgcggcaactcaacgcggcgatcaggcagtcaaagaagagtttggctgggccgggggcgcgatggttggaatggctaaacttggccgcaacgtcatgggtgctgctgcaagcggctatagtgcagccaaagaatggttaagtggtaaatcagacctatcagaagccgctaaagggatgagcatggaggaacgcggtgcgttctatgcagccgcgttatcctctgccgcagaagccggtggtggagcagcacaacagtttatgaaccagtatggcgatgagttcaaagagacaatgcagtcaattgctcaaaaccgctatggacttactcaagggcaagctgctgtttatgctgagtcttttgacacaaacgaaggccgcatgaaccaggcaattcagaatctgaaaatggaatatgcagaacgtaatccggatggttcaccgatgacgcaaggtggtcagcctgttctttctcagcaaaacgaagagttcgctgacaagctggtaaacgtattgcagaactcgacgggagctggagaccgttcggggagttatttgactgctgtcagagggtacaacatagcaaatcaaaggttctaa

SEQ ID NO: 435439 - DNA, 273 bp, Serratia marcescens; identical to SEQ ID NO: 196105

SEQ ID NO: 435440 - DNA, 534 bp, Serratia marcescens; identical to SEQ ID NO: 196106

SEQ ID NO: 435441 - DNA, 609 bp, Serratia marcescens; identical to SEQ ID NO: 196107

SEQ ID NO: 435442 - DNA, 537 bp, Serratia marcescens
atgaacggtttccgtcggggcgtgttgcatactaatgcgtctcttacttcaatgcttcagcgcttctctgatattttcgttatctttagcgggctgtacttgtcttgcctaatctccggtgccgcatttagcgtgcaacactggattatggtattaatatcgatcgttatcttccaaatgattggtgggattactgacttttatcgttcgtggcgtggtgtgcgtgcggggctggagatccagctcattttgcaaaactggtcgctgagcctgctgttgacctcaggaacggtggcgttgataaatgtcttcaataacgagtattccgtctatatccaatggtatctgctggtctgctgcggtttggtcattacgcgcagcgtgatccggctgctcttgggatacatgcgcaatattggcttcaatacccgtaatgtggccatcatgggtgcgatgcccgtcggtattcgtctggcagaatctttacgtgacgcgcactggatgggatttaaagtgttgggcggctttgttgaataa

SEQ ID NO: 435443 - DNA, 438 bp, Serratia marcescens; identical to SEQ ID NO: 196181

SEQ ID NO: 435444 - DNA, 546 bp, Serratia marcescens; identical to SEQ ID NO: 196180

SEQ ID NO: 435445 - DNA, 555 bp, Serratia marcescens; identical to SEQ ID NO: 101160

SEQ ID NO: 435446 - DNA, 429 bp, Serratia marcescens; identical to SEQ ID NO: 101161

SEQ ID NO: 435447 - DNA, 348 bp, Serratia marcescens; identical to SEQ ID NO: 101162

SEQ ID NO: 435448 - DNA, 1197 bp, Serratia marcescens
  misc_feature (1085)..(1094): n is a, c, g, or t
atggtgacaagaaggatagggcgtgccccccttcttatgctggttggtctcatggtcgcagctcctgcggcctttgccagtgactttgtgactggcgtagttgtggggcaaatgctctcagatgactcaggcagcaagaaggtagagaacactggccctgagagtaaaacggtcattgattaccatgatggtcagccggttgtaaccagagtggaggcctttaaaaataacaaatggcgcaagcaggatggtcctcagggaggctactttgtttgtccaggtgaatatcgtagttatgcgggaaggctgcgttgtcgcgtcaatgatgatggcttcaatggttttgtaggagggatgactgatgctcaggagctaccgctccaagaggctctgagcaagatggaaggtaaacccatctccctgcaaaccatcgagatccacgacaacaacttggcagtcaaataccaattagcgccaccagcacaaacgcacattaaaactcaggacctgggggtgattcagcaagaagatgaagtgcagaaggctgcctcccagcgaacagctccggccagcttgagcgtttcaaagactgagcctaagcaggggctcgcaaccaacaacacggacagcaagaccagtgcatatcaaaatccatttgagcgcgccagtgactccatgattagccttctggatagcactttgatgaaagtgttggctatagcaatgctcatgttcggtattttatcgggaattatgaggcagagcctgtcggccttagtggtggggataatgcctccaataatgatgatgactatcccatcatttattagccccttgcttagcaatgctggcacaaccagcaccaatccagttgaagagagcggaagttcgtttcccttcttcttggtgttagtggtgccgttggtgattttctttgtctatagggttgttacaaacaaccggagcgactccgaaattgaggcgttgttaagagaagcccgacgtgctgaaagggctgaacgacaaagtaatgagcctccatcagtagatgaactccgcgagcgtcagcaacaaaacacagagannnnnnnnnngagagaaccggtggtcgtcagctcgtcagctccagcaccgaaagcacaaaaagaagtgccaatcgaagttcaacagggcaagcgcaaaattattttggattag

SEQ ID NO: 435449 - DNA, 669 bp, Serratia marcescens
atgcgccgggaactgaggttacggtgctttccctggggagagccaccgctcattgttttaagcagtatccagacacaaaaaacttctattacgaggcctaggccaaagctctacctactggggggagcaagtaatttggatggagtgattatgaggttaggtatttttggggtggcagcctccctagcagcaatgctggtggttgcccctcaggtatgggcagaaaccttcaatgcgagggttgtgggcgtttctgacggtgatacagtcacggttttgactgaacgagactgtgactcaggggaagattgccagagtggcaaagtccagtaccgggtaaggctggcggaaatcgacacccctgagaagatgcaaccttacggctctaaggcgaaacaagtattgtccgatctggtgtttggtcgaatgctcaaggttgagaggatcgacaaagaccgttatggccgcttggtagccaacctttatgttgatggcaaatgggtcaatgccgaaatggtccgctctgggagtgcgtgggtataccggcagtacgccaaaacaccagagctgttccagctagaagccgaggctaaagccgataagcgaggcctttgggcattaccggaatcagagagaactcccccttgggagtggcgaagaaagcactaa

SEQ ID NO: 435450 - DNA, 273 bp, Serratia marcescens; identical to SEQ ID NO: 196165

SEQ ID NO: 435451 - DNA, 324 bp, Serratia marcescens; identical to SEQ ID NO: 101169

SEQ ID NO: 435452 - DNA, 342 bp, Serratia marcescens; identical to SEQ ID NO: 101166

SEQ ID NO: 435453 - DNA, 855 bp, Serratia marcescens
atggttcccataggacggccgattccccatgcgcgcgcctatgtgttggacaacgcgcttaaacctgttcagcccggaaactgcggtgagctttatttgggcggcgacattctggccaaggggtacctgcatgctgaaacgttgaccctcgagcgtttcgtcaaagatccttttatcccgggcgaaaatcataaaatgtaccgaaccggcgacttggtcaaatgccttgatgacaatgtcttggaatttatcggcagggttgatgatcaggtaaaagttcgtgggcatcggattgaactggctgaaatcgaaatgcatttgcaggctttgccccagatatcgcatgccgccgttattgtagagttcaaccaaaataataaaataccaacgctatctgcattttatgtttctcgtcatcaacagcctattaatgttcaggaggtaaagagcgctttggcgaagtctctgcccttctttatgctgccttccagatttatttcattggataagatgccgattcatccaaatggcaaagtcgataaatctaaccttagttcgcatgaaaataaaggagagagagagatggttgatataaaaagcaagatgagttctgatatagaagcgcaaatcatttctgtatggagaacgattttaaaaaacaaggagctgtcaacgaaagataatttctttgacgctggaggtaattcgttattgatgtctaaagtacacagggaaataaaagataagttttccacgcccattaccattatggatttattccaatacccaaccgtacagatgctaagtcaacgcattgcagagaaaaatgctgagctattaggaaaaaacaaataa

SEQ ID NO: 435454 - DNA, 138 bp, Serratia marcescens; identical to SEQ ID NO: 227476

SEQ ID NO: 435455 - DNA, 162 bp, Serratia marcescens
atgagcatggttgaatttagcgcggtcgctaaacatttcggcaccacccaggtgctgcacgatatcaatctgaaaattgatgccggtgaataccggctggctgccgacgatccggatgaggagaacaccctcgccacggcagtttcatttgatgctcgatga

SEQ ID NO: 435456 - DNA, 657 bp, Serratia marcescens; identical to SEQ ID NO: 147166

SEQ ID NO: 435457 - DNA, 753 bp, Serratia marcescens; identical to SEQ ID NO: 67165

SEQ ID NO: 435458 - DNA, 552 bp, Serratia marcescens; identical to SEQ ID NO: 164714

SEQ ID NO: 435459 - DNA, 249 bp, Serratia marcescens; identical to SEQ ID NO: 164713

SEQ ID NO: 435460 - DNA, 654 bp, Serratia marcescens
atgcaggacagtgagctgggggagattccggaagggtgggagtcgtcatcactatcaaaaaaaataaagctaactggcggaggaacaccaaagcgttcagaaccagaatattgggatggcgatatttgttggtattcagtgaaggatgctcctgctgaaagtgatattttcgttattgataccgcagagaagataactaaaaagggtctgaataaaagctcaacaaaattacttcctattggtacaacaataatttctgccagaggaaccgtaggcaaattagcgttaactgctactgaaatggcaatgaatcaatcttgctatggaatatctggtggtgagttctcaggtccattgctgacatacctgaaagtaaagcagtgtgtggatgtgttgaaacgaaatacccacggtgcggtgtttgatacaattacaacatcaacctttgaaacagtatctacacttacagcgtccaaaaatataaatatccaatttgagaaaatcgttgctccactattccgagtcattgaaaataatctaaggaccaacgtcaatttaacccaactccgtgacacccttctccccaaactcctctccggtgaaatcactctgccggaagccgagcaggctataggtgaggtagaaaatgtataa

SEQ ID NO: 435461 - DNA, 438 bp, Serratia marcescens; identical to SEQ ID NO: 434286

SEQ ID NO: 435462 - DNA, 810 bp, Serratia marcescens
atgctcggtatcccggttcagctgcgccacatcctgctgctgtttgtctttgtcgcgaactatcagcgtaccttcgctgaccccggccttcgtcgtgccctcggcatgcccgctgttgttggcgcccgacagcatgccgccggccatgttggtcagcaggtctttgcccaccggcccgccggtgctgaagctgccgccgctgtgcgtcgcgctgtagtccgcctggttgtgaatgtccttccagcccagcgtgccggtatcgaagcggttcttctctttgtccgcttggcttgcaataacggcgccgtcgagctgggtgtgttctttgaccttgacgtcatacccgcccttgccggcaaacagcccggtctgctctttcaccgagtcgaagttgctgtgcagtttgtccttactggcgctaaaattcgccgagccgctgccggcgccgatcggcacgctgatcccgccgctcatctgggtctgcctggcgtcatagcggtcgctgtcctgctggctttccagcgtcaggtcacggcccacgtcgacggtaaccttttctccgctggcctgcgcgccggtcagccgggtgtcgcggccgctggtcaccttgagattactgccggtatccagggtagtttcggtatgggtcaggccgttgccgttctcatgccagtgcaggtccgttctccagtatctgcgtcgccatcgcgtgacggaacaaatggcagctccctttgtcgatgcctgacgctcacggcaccaccgcattgggatgccgtgagccccgctaccttacttcaatgtctttaa

SEQ ID NO: 435463 - DNA, 1062 bp, Serratia marcescens
atgatcaaccgcgaaactctggcaaaaagtttgattatcaatcgcgatctgaaaaaaggtgaaatcatcactcgcgagatggttgaagtgaagagtccggggcagggtctgcagcctctttatctggagcaattggtcggtaagaaagccaatcgtgaccacgaaaaaggcggatatttctatgagtcggatctaaatgatgtggcgatagaagccaaggactatgatttcaatcgtccgttcggcattccagtgcgctaccacgattacggcaagttgaagaataaatccaatctggacttcgtcgagttccatctgagctatcaggatatggaactcgatttgacagaattcttctccggcgctgaaaatatcggttttgcggtacatagccccgagctgttcgccaacgatcatattttggatctggcgacggatgatcccgtttatcttgctcattcgatcaaacagctgcagcgtgtctgcgatgtgactcgcgcgttgaagcaatatttcccgaaaactgagcgtccggtcatcgtggtgaatgcaggcggtttcaataccaccggtttcttgccaaaagaatcacgccaggcgatgtacgaacgcattggcgccgctctgggtgaaatcaatcaagaaggtgttgaaatcatcatccagacgatgcctccgttcccatggcactttggtggtcaaagctaccataacctgtttgtcgatccggacgagattaaagcgttctgtgagaaatacggctaccgcatctgctatgacacgtcgcattccatgatggcttgtaattactaccaatgggatcttcatgagtttacccaaaaggtcggcccttacaccgcacatatgcatattgttgatgctttgggagtggatggtgaaggggtacagatcggtaaaggcgatgtgaactttgacgagctggctgatgatctgcggcgtcatgcgccgggagcgcagtttattcctgaagtgtggcagggacacaaaaaccaaggggaagggttctggcatgcgcttaacttcctggaaaagtatctgtaa

SEQ ID NO: 435464 - DNA, 957 bp, Serratia marcescens
atgattcgagggcatatcgctgatgcccttatggttatggcaataaagttacatgaagaacatatttcttggcctgaattattgttaccgacactacaccaatttgctactaacgagcatcctgcagtgcgagctgtagtattacgccgtttacctcatttacagcatattttacctgaggttggttgggtggtatttgaattaataatgcgaaaaggtagcgaacgactttgggatatggcagaacgttgtctctattatacctatcatcatgagctcgacagagtttccccatggttaaataagattgtatctgaaggtattaaaggcggattgcaagcgtggggaagaatatctgcattggctgtattgtcagaaaaaatagaaagtcgtgattttatcaaacaattaaaagaattaagcgatagtgatgcatgggaaggtgctgtcgatgtttggacacatcgtgagaattttcaacggcatcaggatttatgtcttgctggtttggatgctgcgttaagtgatgataatcaatattcctcagaattaatagcgtcaatgggtggtatttttagagggaaagagccggttattattttacccatgcaagtgttagagcgttatttttcattagtatttacgagttcagagtcatcgaaaattgatttgttcgattttggctcgtggttaaatattgtttcatgcatagaaccattgtatgcattgagggctacggagatttatcttgaatatgctcgtacaacaaaagtctatttacatgattacaataataatttaatgcagctattgactcgtttatttgcacaagcagaagagcaggaagaatcggatggcggagaaatgctatatcgagtggttgttttgcaagacactatgttggccttgggtgttgatggggtgagtacatggttagaggccgctgagagagcataa

SEQ ID NO: 435465 - DNA, 615 bp, Serratia marcescens; identical to SEQ ID NO: 100706

SEQ ID NO: 435466 - DNA, 687 bp, Serratia marcescens
atgttgcgtcacagtaaggcgttgattacagttagcgaattttctaaaaaagaaattagccaggcgtttgactacccattaaataatatttacgtaatctataatgcggtgtccgagcagtttaaacccatagcgtcggcatccaatacagagcgcccttatttattggccgtttcgtctccaaattatcataagaactttcatggtctgattgccgctttctctcaaatggcaaacggccaggaagtgacactgaaaatcattggggccgccaacaagaacttcgcggatgttgggttttcgacggaaggaactgcaacgaacgataacatacagtttttggggcgtgtgagcgatcaacagcttgtagaactctattctcatgctcgcgcctttgtgttcccctctttatatgaagggttcggcattcctccgttagaagcgcaggcttgtggttgtgcggtagtagcgtccaatcgggcttctttgcccgaggtattgtcgaagagtgcattgtactttgatccggaaaacatcctggaaatgaaacaggcactggagcggattatgcaggatgaagcgttgcgccaaattttaatcgctgagggatttacgaatgtcaaacgtttcgattggatgcgttcggcagcagcgttgagcgagataatgacgagatctatgcaatga

SEQ ID NO: 435467 - DNA, 612 bp, Serratia marcescens
gtgctcagtatcggtatcgtatctgaaaacatctttttcagagaggcgataaaaaggatattggcgccaagggtttttcataaggatcacgttattgcttactacaacgatctgcctttggtcatggggcgaaattgccaggatattctgatcgtcgatgatgcgatcaaaagcctgttgcgtttcagcatggcggcagcgttattgtctgctattcatggcgtgaaaatttttttgacgacagaagagaagcgtcgtctgttatttcgttctgtcacgcgtgatgtggtggtgctcgataaaagagtgcgagttcccgacatgaataaggaaatgtctttgctgctggctaatattgcgcagcattctgcattaaatggaaacgttgagggtggggtggcccgcaatacgaaaatttgcctgactgaaagtgaagtggaaacgcttcatttgctttctttcggctatacggtgacccaggtatcccgaatgcttgataaaagcgtaaaaacggtcagcacgcagaaatgcagtgcattacgcaaaatgggattgaagaatcgggtgcacaatttattgggaatttcatccggtttctcagcggttatctag

SEQ ID NO: 435468 - DNA, 267 bp, Serratia marcescens; identical to SEQ ID NO: 11114

SEQ ID NO: 435469 - DNA, 537 bp, Serratia marcescens
atggagaagttttttggtaatgccgatggcgaacacgaagtatccaaacgcctgttgggttcctttctctattggctccaggaacgcaagaagaagatcttcattgttgcgacggccaaccgggttcagtcgctacctcctgaattgatgcgagctggccgttgggaccgggcgtttttcattgacctgccaagtgtggctgagcgccagaagatttttgagatccacctcgctaagcaaaaggccgacatcgccgctttcgacatgcctacgctactgcgtacctcagaaggatacacaggggctgagattgagcaggcagtcattgacgcgatgtatctggcaaacgcccaagacaaagagctcgacaatcaagttcttgtagatgcggtcactcgcattaccccgaccagtgaaactcgccgggaagacatcaaccagatccgcagtttgcgagagcaaggcttctatcctgccaataacttcgatgttcaagagcagaatggctctggacgcaagctcgccataggtgactaa

SEQ ID NO: 435470 - DNA, 666 bp, Serratia marcescens
atgaaattaaatgtttttctgccaatcgctattttgggctctttttcaagtttagctatggctgacagttttaatttagaaaatccagatggtttgcgctatcagctaaagtatggagagactgttgtcaaagagggtaaagacacaagattctatgactcacgaaatcctgtagttccacagaagaatatttcaatctctgtcgaagatgaaaatggtactaacattgctgaaaagtcagtaccatcatccctcaatggaaatagtcgagggtgtaactattcaatgattgttacatcacatcatggctggagaatcactgggaattgtattgaaactgaaggtaactacaagccagatgcaccacatatctatactgtagaaaataattcaaagaaaaaagtttatccggctttttcagtggataaggccaataacttttcttcagattctgtcttgggatatctaaatccgcatgaaacaaggttgttctcagtaagtaccgattactggaaggcaacatcaattaaagagcattcaatgattcaagttggcttttataatccttttacaacaaaatacattccgtgcggtgataaaactgaagagattgataaggatagagttttcacactcaatgaagatttgacctgctctataaaataa

SEQ ID NO: 435471 - DNA, 447 bp, Serratia marcescens
gtgaattacgatccctggcatctgtccggccaggtgatccgctacggttacgacgccaaaggcccggccggggccaacaattcggtgatcctgatggggggcaacggcctgacgccggcctatctgatcccgtcgcaggccaccaccgccgccatcaacctggcgcgcgacgtcgacgtgccctgggggccggtgaaaaagctgcggttctacaacgattacagcgtgctctggaaggacaggcacggcggctccgactctaaaatgaacacgctgggggtacaagtattcgccatgccggtgatgctgtgggtggatctgacctgggcgcagaacgccaacccgtggggcggcgtagaaaacgccaccggctggaccggcacccagtcccccggcagcaataaatggtattttcgcaccaacgtgaacatcggttactacttctaa

SEQ ID NO: 435472 - DNA, 303 bp, Serratia marcescens; identical to SEQ ID NO: 433397

SEQ ID NO: 435473 - DNA, 1953 bp, Serratia marcescens
atgagcaagaaggagttgaaacctgaactgttaacagtaggcaagttattcgctgacaattatctgattcctatttatcaacggaactatgcttggcgggccgaacagattgagcaacttattagcgatattcaagactcggtggtagggggccaggacaactattttcttgggaaccttgttgtaatcaagcggggtagagaggatgagttcgaggtcatagatggacaacaacgacttacaaccctctatctgcttcttaccttcctggagcaagacggtgagggtgagaagccgtcggttggccatgcaggccacttgcaatatgagtcgcgcgcacgggcaactgaggccctgctgcgagtagcacaggaggcggctaaggagcacgttcgaccgcagggctccacgagtaatgcagatgctggcattcatgaaggctacagcatcatcaatcagttcttcaaacaaaatgaaaaccttaatcgctcacgcgaaaaattctccgatttcttgctaacgaaggtgactgtcgtccgtgcctcgctgccacccaataccgacctcaatcgctacttcgagatcatgaacactcgtgggcagcaactcaagcaggttgatattgttaaggctcgcctgatgagcaaactgcccaatcaatatgaacgcgaatgctttgcgtgggtttgggattcctgtgctgacatggattcttatgtccagatgtctctgacccgtggtgacacaagtttgcgaaacaaagtatttggtgatgaatggtcctggctggaggtgaccagcttctcttcgctaatggaaagtcgtccgcaatccggcatcaattcatcaaggcaatcctccgaaggggtatcgttgtccttggatgaggcgttgtcaaaatacgctaaagagctcgagtcaaattccactgaagacgagggcaaagagcggtttcgttcgactattgagtttccggcctttctgctacacgttctaagaattatgaaaggcgatgaggtcgaagacgaaggcctgcttgacgacaagcgcctcatcaagtcatttgacgacgccgtaaataatgtacccgatgctaaagccgattgggtgcgtagttttgcatttatgcttctcaagtgccgcaacctcttcgatggcttcatcttgaagcgtcaattcacggcaaacatcggtgacgatggcgattggtctctccagcgactgaaaaaaggaggcggggacaagaagccaaccccgacgtacatccatgttttctcggccagcaatggaagcttagaggaggacgggagtgctgacccacatacccgagatgtattgctgcttcagtccatgcttcggattacctacacttctccgcgaacgatgcactggattaccaaagttcttcgctggctctccgttaaagcccctcgagacgtgaaacatgcggatcttgccgatttgttgaagggatatgcccgcagcaaggttaaagagacattctcctttgagaaagatcagcaaccacaagggtttggtatcagccgtatcgtcttttcgtatctcgactatcttctgttgagtgactcctcaaaacgagatttcaaatttcagttcagaacttccattgagcacttctatccacagcatcctgacaaagaacagtcgggcgcggttgtttcaggttctagccttaacctgcttggcaacctcgcgctcgtaagcgtcagcgcgaactcaaaattcagcaatagcctccccagagcaaaggccgaaaacttcaaggatacaattgaacttcaaagtcccaagctcaagagaatggcggaaatcacccgaaatacaaactgggacgatcagcagataacagcacatcatgaagcgatggtgacattgcttcgtgatgatgtaagtctggtggaggcaagcggaagatccaacccagggcgttga

SEQ ID NO: 435474 - DNA, 1281 bp, Serratia marcescens
atggcgattaacggagagaacggtgttagtgcagtcaccgtggatgaactactcaagcaaggccttcggataccgaactatcaacgcccatacagttgggatgtatcgactgctctacaactggtggatgatatcagcgaagctcttcgagataccgaacgaaaagatattccctatgttttgggtgcaatcattcttcacgatgatggtgagtatctcaatgtagtcgacgggcagcagcgcctgctgactttgcgaatgattcttgcggtcttagatccgataaatcatcaaatttcgatgtctggtaacagcgaaactcctgtctccctagtttggatagagcttcaaaggcgcctatcgcagttggaagataaaaaagagtttttggattttatctgtcacaaatgtcagttggtgcgtattgtgacggacgatattgatgaggcatttcgtgtctttgattcccagaactatcgcggcaaaccgcttgcccctcacgacttgctcaaagcacaccacctgcgcgaaatgcacgatgagtccgctgctatgaaagtggctgtcgttgaggcttgggaagccgtaaacgatgaggatctggacaggcttttttctacttttttataccggatatccaagtggtcacgaggcgaaagctcgctcgaatttactattcgggacatcggcatgttcaagggcatttcatcacgatcccacaggtcattttcaccaaatctgcgatatcaccttgcagcacaagccgctatgccacttctaagtgcatggtcggtatcctctacacatgatgcacgaaatgccgggcgcagccgctttcagcttgatgccccgataatcgcaggacgctcatttttcgagatggtgacattcatgcttgacgaattgaagatactggaacaagaggttattgacagaggtttcaaaaactttggcccatctcaaagtcgctaccgctacgtgtacgaattgttcattgccgcgctgcttttctatacaaacaagtttggcgatgaagatgtagatgaagtgcgaaataggttattcgcatgggcatatgccttgcgggtcgagttacttcgtgtgcaatttgtatctgctgacaaccgagcgcgaggtaaaaacgatgcaaataaatcgccttttgttttgctacgtaatgcgatgactggaagtgttgtccgcaaacttccaataacaagtaagccatacagcgataaccacgaaaaggaactcgttgcttttatcaaggggctgcaatga

SEQ ID NO: 435475 - DNA, 189 bp, Serratia marcescens
atgaaagatagatcgcatgatacggcgatggccgagcaattcagagccgatccgacttatgctgcggagttgcttgccgaagtccgtcgcgacggaaacccggacgagctggctattctgttgcgacagatgagcgaggcgttcggggacaattgcatgcgttcgggatctgcgacgagacaactatga

SEQ ID NO: 435476 - DNA, 813 bp, Serratia marcescens
atgcagttcgcgcctgaagatggccgagaggctacgatcaggcagctaaacgaggttgaccaccgcgtggcgactggcggtgaggcagtgaacgaggcggtagacctaatagaaaaactctttgccgcaactcagcctgtgcccgtaagcgacagcattaagttgcgtgcagccgaccgagccatcgccaaggttgctcccttccaccgacagatgaatggcatgggagatgccatcattatcgagacctacgttgatgcattggctgcgcgtcaaggtgatgacgtgttcgcgttcgtgactcataacatccacgattttagccgtcagggagcagatacgcgtttgccacacccggacttagaagccctctttgatggtgtgagatcgcgatattcgaccaacctaagcacactactcaacgaattcgcgagtgagctaatcgaggagaccaggtttgagcgcgaatacagtcaaacccccagacagctatccgagttgctcgaagcagagcagaagctgacaacacaggtttggtacaacaggaagtggaacatcatcgctagcgtcgaggatgggaaagaaagggtggtgcccaaggaggagtgggatcaagctacgccagaagagaggcggaagctggtagtcgatacgatttgggagggaatgcttgccgcaatgaggagcaccgaagaggagctcggcgcggaggagctgggaccgtggactgacttcgagtgggggatgatcaacggcaagttgtctgcgatacgctggatgctcggtgaagagtgggatatgctcgatacgtaa

SEQ ID NO: 435477 - DNA, 726 bp, Serratia marcescens
atgaccatcgcttgcagcgttgccggtggtgaccttttagggctttccccggccagtactggccgcgtggtctattgcgctggagaagacccggtagtcgcactggtgcgccgtattcattccattggccagcacctgaaccagcagtcacgcgaagccatcgcgcagaacctcacccttgagccgatcatgggtaagcgcttgaacgtgatggatgaacggcaccttgcccgcgtcattgaattttgcgccggtgcccggttgatcgtactggataccctgagccgcattcatgacagagacgagaacagcaacggcgacatggcaagacttgttgccacgcttgagcatgttgcggccagcaccggagcctcagttctatacctgcatcatgtcagcaaaggtagcgcccgcgaaggtcagacggatcaacagcaggcagcacgaggcgcatccgctctaatcgacaatgcccgctggtgtggctatgtcgccagaatgaccgaggctgaggccgaacgcctcagtgatcgcatatatgaccgacggcctatcggaaatgaccggcgcaaacactttctgcggttcggggtgagcaagggcaactacgccgaagacgacgatgatcgctggtatcagcgtcatgacggcggtgtgttgctgccggtcgagttattggacgccaagcaggacagcggaaaggggcgtcaacgtgagcaagcatga

SEQ ID NO: 435478 - DNA, 327 bp, Serratia marcescens
atgctgttgccgctggtggatttccacgtttcggccagcgttgggcagtggggaatgctggcgacgctcggcgtgctgcacaccggcctgatgtatgtgttgatgtacggcgccctgcagaagctgccgaccaacctgatcggctcgctgttgttcatctacccggtcgccgccatgctggtggatcgcctggcgtttggccaccgcctgtcggcgtggcagctgctgggcgcggcgatcattctgctggcggcggcgggcatgaacctgctgggcgagcggcgagcgcggctgctgccggcctcggacggccggcgcgccggctga

SEQ ID NO: 435479 - DNA, 708 bp, Serratia marcescens
atgaatcactccgcaggcacctttccttcggtgattgccgtcctgcccgctgccggtatcggcagccgcatgcaggcggaatgcccgaagcaatatttaaccatcggccggcacagcatcgtcgagcacgccatccacgccctgttgcgtcatccgcgcattgagcgggtgatcgtggcgatcggccccgaagatcgccagttcgaacagttgccgatcgcccaggatccgcgggtgatcgtcactgagggcggcaaacagcgcgccgattcggtgatggccgggcttaaactggcgggcgatgcggactgggtactggtgcacgacgctgcacgcccctgcctgcacgccgacgatctcgagcgcctgctggcgatcaccgcacacagcaaggtcggcggcattctcgccgcaccggtgcgcgacaccatgaaacgcgccgaacccggcagcgaaaccatcgctcacaccgtcgaacgccaggatctgtggcacgcgctgacgccgcagctgtttccgctgccgctgctcaagcagtgcctgcagcgcgcgctggatgaaggtgcgaacgtcaccgacgaagcctcggcgctggagcattgcggttatcatccgcagctgatcgccggccgggcggacaacattaaagtaacgcggccggaggatttggcgctggcggcgttctatttgactcagttggacaattaa

SEQ ID NO: 435480 - DNA, 312 bp, Serratia marcescens
atggaggcctcgcgctcgctgggcatgagctacggcaagaccatgcgccaggtgatcctgccgcaggccttccgccgcatgctgccgccgctgggcaacaacgccatcgccatcgtcaaggattcgtcgctggcctccgccatcggcctggcggatctggcctatgccgcccgcaccgtctccggcgcctacgccacctattgggagccctacctgaccatttcgctggtctattgggtcatcaccttcctgctctcgctgttggtgcaacacatggaaaagaggttcggtaaaagtgattcgcgtacataa

SEQ ID NO: 435481 - DNA, 318 bp, Serratia marcescens
ttgaatgtggtctggctgatgaaaacagcgctgaaagaactgtggtacgccccgagtgaacaagaggcgcagagacgctgggtaagctggtacaggcagtctcaggaaagcggaatcaaggcgttgcaacacttcgccgagaaactgaaagggtatgccggtggcatcatcgcgagtgccagacacaggttgaataccagcgtgctggaagggatgaacaataagataaaagtgatgaagcggatggcctatggataccgggataacgcttacttcttcctgaaaatcaaagcagcgttccccggtaaagcgcgatga

SEQ ID NO: 435482 - DNA, 927 bp, Serratia marcescens
atgataaatcgcgtatgggtactgggtgacgccgtgatcgacctggtgccggaaaatgccaacggttatctcaaatgccccggcggcgcgccggctaacgtggcggtgggcatcgcccggctcggtggcgacagcgcctttatcgggcgggtggggcaagacggcttcggtgcctttttgcagcaggtgctgagcgatgaaggggtggatatcggccatatgcggccggaccccgaacaccacacctccacggtcgtggtggatctcgatctgcagggtgagcgctcattcacgtttatggtgcagcccagcgccgatctgtttttgcagcctgacgatctgccggatttccaacggggggaatggctgcacctctgctccatcgcgctctcgcaggagcccagccgcagcgcggcctttgccgcgatggagcgcatccgggcggccggtggccgggtcagtttcgatcccaacatccgcgaagaggtctggcgccagccggaagcgctacgcccctgcctgcaaaaggcgctgctgctggcggacgtggtaaaactgtcgcgcgaagagctggctttcatcagccatcttgacgatctggagaacgccattcgctggatgatgcaaacctatccgctgcgcctgctgctggtgacgctgggcggcgacggcgtctatgtgcatgacggccaacggctgcgtcatttccgcgcggcgcctgtcgttccggtcgataccaccggcgccggcgacgccttcgtcgccgggctgttagcggcgctagcacgccttcacgaattgccgcaggaagcgcagtggccggcggttatcgcccaggcgcaggcctgcggcgcgctggccaccaccgccaaaggggccatgaccgccctgccccacgccgacgagctggcggctttcctccgttga

SEQ ID NO: 435483 - DNA, 276 bp, Serratia marcescens
atggctaagattgatgttgtttgtccccgccgcactgaaactcatggcgttatccgcaacggccactccggttcaggcgcacaactctatcgctgcaagctctgtctgaagaccttccagctcagttattgctacaacggtgccaaaccaggcactcatcagaccattgttgatatggcgatgaatggctcgggatgccgggataccgcgcgggttctgggaataagcctcaacacggttctctgccatctaaaaaactctcgccacaacaggtag

SEQ ID NO: 435484 - DNA, 1419 bp, Serratia marcescens
  misc_feature (1368)..(1377): n is a, c, g, or t
atgtggttttatcgtttcagacaagcattcatcgcgttgttattaccctggctattagctgttcttacccagtctgcggggagggtttatctgctatccacctatgggacatcagatatactggttgatttttctcaggatgttagtcggatgttctgggttggcggtctattcgatattcgtatcgccagtttactatttgttccttgtctgttaatcgcggggatgcttgcaacgaacacccgcgggtttcgtatctggcaacgttcctggccttggcttgcgattgtattgagtttgatcgtcacagtatttacagtggggaatattttctattatgctacctatgagcgctttattgacatcttcattttcggcctggtggaagatgatactgctgctgtgcttaccaccgtatggcaagactatccggtcagtcgtgctttattcttccttacattgctcgctattatttctttcaaattttatcgtcattggcaacgcgtcataaatactaagccagagtgcgagattaatctatcaacatctattattggtacgttaatagttctacttatttgtttcttgggcatgcgtggttctttaggcacttttcctttacgtcagagtgatgctcaagtttcagaaataaaatttttgaatatgtttacacctaatggtttgatagctcttaactgggcttttaacgcccatgataaaaacagttatttttctgaggcaacggatgaaaaaggtgtcgaactattggaccgtttcctggaacaacctacgcaacccagcctacagccgtttatggtgaaaaccgatgtaaaccaggcggcgaaaaaaaatcccccaaatgtggtgctggcagtaatggaaagcatggggtatcatcttgcaagctttgaccgtcgcggtcgcgatttgcttggtactttacagcaacactggttggctgattggcgttttgaccgttttatttctgaaggtgatggtacgatagatactttgagccgatttttcgttcgtagccccatgagtagtatcgggcagtctagtgcgcagactgtcgattttgctagcaatatgtttaaacccttcctggctaacggttataaaattatatttgtcacctctggcaatggtgcatggcaaaatctcaatcaatttcttcctcgtttaggcgtcagtgaattcatagagcaaaacggtttgaaaaaacgctaccctgatgcacacataggaacttggggtgttcctgatgaatatatgttccgttacatgaaagaacgtctggaagaagcagaaaaaaaaggcgaacatgtctttataatgtctatgtccaccacacaccaccctccttannnnnnnnnnacaaagcccctagcaactacagtggcaataatattgatttga

SEQ ID NO: 435485 - DNA, 1284 bp, Serratia marcescens
atgactgcatatccaactggcgtagagaaccatggagggttcttacgcatttggttcatgtataaaggcgagcgagtaagggaggcgcttggcgttcctgacactgctaaaaacaggaagatagcaggtgaccttaggtcggcgattgtctacgacataaagacgggacgatttgactatgcagataggttccctaactcgcataaccttgctaagtttgggatggggaggaatgaaataaccttaaatcagcttgctgaaaagtggttatctattaaggagatggagttggctacaagcacaaaggctctgtatgaatcaaagatagcaaataccctgccattcataggagaaaataggcttgcatcatcagtcaggcaagaagacatcttggtcgccaggaaagagatgcttaccggatttcaagctattgggaatgggcataaaagcgccaagaaaggtcggtcagtatcgacagttaacggctatatcggctgccttgtctcaatgttccgctttgcggttgccaatggatatgtttcttccgatccaacctctaacatctccccgttaaccaaagcaaaaccgctacctgatccgctttcacgcgaagaattcctgcgtatgttagatgcgattaagatacgccagactcgcaatctttggtcagtagctgtatacaccgggctccgtcatggagaactctgcgcgcttagctgggaggatatagaccttcatacagggagtatcactgtgcgtagaaatctcacaaaaaattgtcagttcaagctacctaagacagcggcaggaactgatcgcgtggttcagcttgttcagccagcaatcgatgctttacgcgatcaggctgaactaactcggcttggcaagcaacatggcgtcattgtttcccttcgcgaatacggtaaaacagttagccacaaatgcacgtttgtttttaacccaagcatgacagcaaccaacggcaggagtggacatcattattctgaaggaacaatcggccaaagctgggattctgcattgcgtcgagctggtatcaggcatagaaaggcctaccaatcacggcacacttacgcttgctggtcactatctgctggagcaaacccaaacttcattgctcagcaaatggggcatgcatccgcgcagatggtttaccatgtttatggctcttggatgtcagaaaacaatcatgaccagatcaacctgttgaaccagaaattaactgaatttgccacactggtgccccactccgctattaacgagtga

SEQ ID NO: 435486 - DNA, 384 bp, Serratia marcescens
atgttctggtttaaaagcaaaggtttccatggcaagcagagggatgtggccaataaactaatcatcgaattccttcgtcaagaggagagagaaactaattcatatccatccgtggacgacgaagacggcatcatgcttggcggaacattcaaaccatataccgccacctccgatgaagacaaaaacactggatggttcacgtttgtgttcatgctaggccgtggtgaatcgctgacagagaacagggtaagcctattgttatcagaagacattaagtcaatatcttatgaagataagagcttcctatcagaccaaaatggcctgtcttcgttagtagccaaaatcatttcggatgcaaaaaagcaacttacttctttccgttag

SEQ ID NO: 435487 - DNA, 741 bp, Serratia marcescens
atgacaccaacgacagaacgccagcagtttgctgagcaaaacgaaatgagtatggatttcgtaaactggttcttcgacgagaagaaggacggctgtggcaatgcgtggttcatcatggccgctgcgatgtgggaagtctggaaagcgcgggctaaccgggaggcccagcctgctgggttctacaccaccgtatcaggccgcaaaggtgtggtttggcataaaggcgcgcctgaagatgacaccgcaatttacacagtcccgatcgcgggacgggaggcgcagccggtgcaggttaccgatgggatggcgcttgattttcaccgcgcgctgactgatagcgacattggtaaagatgacctggaagaaataaaggtcggcctgcgtgccgctctatgtaatgtcaccgccccgccagcgccggcagtaccggatgctctagcaaatgatattgacagtgatgatcatccattgctgtggagctacaacaatggctggaacgcctgccgcgccgcaatgctggctcaacctgtaagtagcggttacacgttgccggatgggtggatagcgtgtagcgaacggatgcctgatgccgacggggcgtattggtgttggttcgggaaagagaaatctagcgttattcagcagcgagtttgcatctggaacgatagaaaccatgaatggtgtgacagcgctgtaacccactggatgccattacctgcagcgccggagggtaggaattga

SEQ ID NO: 435488 - DNA, 300 bp, Serratia marcescens
atggtcggagctggtacccaggttcatggcggcaagctggtatccgtagccaggcgggatgcagtaaacgagcagcttaatttggctctggatattctacctccgctgaacaccactgcgctgttgtttgatgccaatggcgagggctggctactcggatggcgttcaccgtggcacctcatgggaggcaaggataccggagcgtggcagtggtcattcaaaatcgacggactgaaccatgaagacgtaaatattacccactggttagcgattccagacgagccgcgggaggaagcatga

SEQ ID NO: 435489 - DNA, 222 bp, Serratia marcescens
atgagcaagtatgtgaaacatccacttttaccaaagtcgaatttaataacaatcagaatttttagccataaatggcgttatcacactgtgcgcatggcaaatgcccgcgagttttttttactgcggaatatatccattgttgtacgacacccttggcttaaaggcccggccaagcagttacaccctgaattatttaataaaccggaggtgaagcgtggataa

SEQ ID NO: 435490 - DNA, 225 bp, Serratia marcescens
atgccagcaaatgaactgaagccgtgcccgttctgcggtgggaaggatgtagaggcattccagcagtacccggaagatgatggaggcatgggctcctacatcgtgcgctgtcatagctgcgacgcacaatcagcgcagttcatcggtaaaggcaagcgggatatggctattcgcgcatggaaccgccgggctggtgacagcgctagggaggtggagcgtgggtaa

SEQ ID NO: 435491 - DNA, 702 bp, Serratia marcescens
atgctgcataacgatcttgcttctgctcggcttgggtttgatgtttcggcaatatcgcagggaagcgatgaatggaagaagtgcaggctggcctgcataacagcttcacgcgtgggcgacatcctgaccgaaccgcgtaccaaggccgacaaagaggctggattgctttcaggcatggccgaatcatacatgatggatttgatcgctgaggtctgcaccggcgcaatacctgatgaaatacctgctcgccccctgctgtggggcaagaagcacgaagacgcagcacgcatgctgtttgaattcgaaaacgatttaaccatcgaactaccgcctatctactacaaagacgaaaccatgcgttgcgcttgctctccagatggcatgtgcagtgatgggagaggccttgaacttaaatcaccttacacctcttctcaatacgttcgctttcgccttggtgggctggatgcggtaaagaaagagtatatggctcaggttcagtattcgatgtgggtaacaggttgtgacgagtggtggtttagcaattacgaccctcgcatgaaaaaagaaaatatgcattcgatcatcatcccgaaggacaacgaattccaggacgcttttgagacaaaaatcccgccattcatcgcaaaaatggacgaggctctggctgtcatggggtttgaattcttcgaccagtggaggtaa

SEQ ID NO: 435492 - DNA, 933 bp, Serratia marcescens
atggatttggtgcagtttgttgaacagcaagaaagcctgttcctgccagcagtaagcgacccgggcatcaagtgggagagagaaaaacaatttgcaatccaggctctgcaaaagaacgaaagccttagcaagacggcaagagcaaatccaattagcacccagaatgcgatcatcaacgtggcggcaattggcatctcgctaaacccagcatcaaaactggcttatctagttcctcgagacggcgcagtgtgccttgatattagctatatgggcctgatgcatatagcacagcaatcaggggctgtgcagtggtgccaagcgctggtagtgcgtaagaatgacaagtttaaacggacagcaattgaccgcgccccactgcacgaattcagtgatttttcgaccgaagaagaacgcggtgatattgtgggtgcctattgcgtagccaagacagcggaaggcgattatctcactcatacgatgtcgattgctaaaatttttggtatccgtgaccgttcttctggctggaaagcttatgtagctaagcgcattaaatctactccgtgggctactgacgaagagcagatgatcctcaagaccgtggtaaagcaggccgttaaatactggccccgccgtgaccgcctggatgcagccatcgattatgtgaacacggaggctggcgagggaattaacttcaaccaggaacaatctcgccctgagaaggatgtcactggaattacccctgagcagtcagatcgaattaactcaatccttacctctgtagattcgactttcgatagcctaaagaaagcttgtctatcaatgaccgggcgccacgtcgaaagccaagcggatttgaccagctcagaggcggataagcttatttccagcctagagcggaaacttgccgctaaggaggcggcaaatgctgcataa

SEQ ID NO: 435493 - DNA, 243 bp, Serratia marcescens; identical to SEQ ID NO: 82553

SEQ ID NO: 435494 - DNA, 1275 bp, Serratia marcescens; identical to SEQ ID NO: 82554

SEQ ID NO: 435495 - DNA, 999 bp, Serratia marcescens; identical to SEQ ID NO: 82555

SEQ ID NO: 435496 - DNA, 705 bp, Serratia marcescens; identical to SEQ ID NO: 82556

SEQ ID NO: 435497 - DNA, 1371 bp, Serratia marcescens; identical to SEQ ID NO: 82557

SEQ ID NO: 435498 - DNA, 285 bp, Serratia marcescens; identical to SEQ ID NO: 82558

SEQ ID NO: 435499 - DNA, 726 bp, Serratia marcescens; identical to SEQ ID NO: 82559

SEQ ID NO: 435500 - DNA, 2454 bp, Serratia marcescens; identical to SEQ ID NO: 82560

SEQ ID NO: 435501 - DNA, 273 bp, Serratia marcescens; identical to SEQ ID NO: 82561

SEQ ID NO: 435502 - DNA, 384 bp, Serratia marcescens; identical to SEQ ID NO: 82562

SEQ ID NO: 435503 - DNA, 1053 bp, Serratia marcescens; identical to SEQ ID NO: 82563

SEQ ID NO: 435504 - DNA, 465 bp, Serratia marcescens; identical to SEQ ID NO: 82564

SEQ ID NO: 435505 - DNA, 2004 bp, Serratia marcescens; identical to SEQ ID NO: 82565

SEQ ID NO: 435506 - DNA, 279 bp, Serratia marcescens; identical to SEQ ID NO: 82566

SEQ ID NO: 435507 - DNA, 945 bp, Serratia marcescens; identical to SEQ ID NO: 82567

SEQ ID NO: 435508 - DNA, 357 bp, Serratia marcescens; identical to SEQ ID NO: 82574

SEQ ID NO: 435509 - DNA, 1098 bp, Serratia marcescens; identical to SEQ ID NO: 82577

SEQ ID NO: 435510 - DNA, 378 bp, Serratia marcescens; identical to SEQ ID NO: 82578

SEQ ID NO: 435511 - DNA, 393 bp, Serratia marcescens; identical to SEQ ID NO: 82582

SEQ ID NO: 435512 - DNA, 267 bp, Serratia marcescens; identical to SEQ ID NO: 82585

SEQ ID NO: 435513 - DNA, 588 bp, Serratia marcescens
atgaccgccgtttcgactgccagcaccgcgccgcgtcctcgctcgcgcttgcgcgctcgcctcgtgctggcgggcctgtccgcctgcggcctcgctgcgctggcctgggcgtccttcgtgcatccgctgccgcgcctgatctacaacccatccgacagcgtggcggtcggctggtatcgcgtcgatccgctgcaccacggcaccgcctcgctgccacgtcctttgtccgtgggcagcatcgtcctgaccacgctgccgccagacgccgccgtgctggccgcgcagcgcggctacctgccgacgcgcgtgccgctgctcaagcgcgtgggcgccgtcgcgccgcaggaggtgtgcatcactggccgcgttgtccgcattgacggcgtgctttcggccgccgtgctgcctgctgaccgctggggccggccgctgccatcctggcagcaatgccgtcgcctcgaacccggcgaactgttcctcttgagtgtgaccaaccaggcgtcgttcgacagccggtatttcgggccggtcagcacatccgccgtgatcggcgtcgcgcatccggtctggctggagtcacgcccatga

SEQ ID NO: 435514 - DNA, 534 bp, Serratia marcescens
atgaccgcatccgcttcgcctgcctctggcgcggccacggctgcgctcgcagcaccttccggccagcttgccagcgcgccgctgacgcgcgtggcgctggcctacatcgaaccgcgcttcaagctctacctgcgcttcggcgaacctgcgcgcacgcaccagctcgaccgctggcggcgctgcgccgtgttcctgccgggcgccatgttgtgccgcatccggtggcaggccaacgactacggcactgttcgctggcagctcatggtgatgcaggcttgcacgccactagatgcggcacagcgcatccccggcgtgcagccgggcgcgcgcctgctgctgcacgccgagggcgagaaccaagtgcgcgccgtgctggagcgcatcgacgccatcgaagcgctgggtatcgcacccgccgctgtctcgcccgcgtactggcgcacgctcgccaaccgtctcgctgcgcgcttaccgctgcccgaatacaccgccgagcggcacgccgcctggctcatcgggagggaactaccatga

SEQ ID NO: 435515 - DNA, 858 bp, Serratia marcescens
atgtccagcaccgcgctgcccatgcggcagcggccgttgcaggagcgcgaacagctcgacctgttccgcgccttgcccggcgacatggcaccgcgcgacagccaggatttgatggcctatccgttcttctcgctcgccaagtccaagcgggtcaagcccatcgacttccgcgcgggcaacgtgactatccgcgtggagggcacgcaggagcacggcatcgccacgatttgggatgcggacgtgctgatatgggcagcttcgcagatcgtggaggcgaaggacgcgggcctgcgcccgtcgcggctgatgcgcgccacgccctacgagatcctgcgcttcattggacgcggcaagtcgctgcgcgactaccagcgcctcaaggccgcgctcgaccggctgcaatcgaccacggtggccacgtccatccgagaaaccactggaaggcgcttgcatcgcttctcgtggatcaacgaatggaaggaactggccgatgccagcggcacgccgctgggcatcgagctgatcctgccggactggttctatgcgggcgtgctcgacgccgccctggtgctgaccatcgacccggcgtacttccggctcactggaggaatcgagcggtggctgtaccgcctggtgcgcaagcacggcggcaagcaggcatacggctggcagttcgactttcgctacctgcaccagaaatccggcagcaccgccaagccctacgacttcgcctgcgacctgcgcgcgctggtcgcgcggcaatcgctgcccggctacgtcctgggcatcgagcggatgccggacaacggcatggagctgctgaccttccggcccgtgccgcagacggcacggggataa

SEQ ID NO: 435516 - DNA, 282 bp, Serratia marcescens
atgcgtcccgctcccttgcggcctgccgccactgtctcgactgctgccgcgcagccgcagcgttatctcaccaacgacgaagccgccgagtacctgcgcctgtcgccgcgcacgctggaaaagcagcgtgtgatcggcggtggcccgcgctttcgcaagttcggccggcgtgtcatgtacgccgtggccgacctcgatgcctgggccgccgaccgcagcttcgagacgacttccgatcccgaatatgccgagcaccactcggccgacagccgtgcgcgctga

SEQ ID NO: 435517 - DNA, 762 bp, Serratia marcescens
atggtcaatcttcatcacttcgcgcattggtatccaactgcggcatacctctatgttttgtggctggatgcgctctcgctcgcttgggaatatctgcgcaggcatcccgactaccggctcgactggctgcgccgtcatcgccggcctgaagcagcgcatcgctggggcttgcgcctgctggaagacccggccttggatgcgcgtgacgcgcatcccgcttggctgcctggtcatgcggccgtggtgcagctctaccccgacgccgatccgccggaggacgccaccgccttcgcgttctggcgtatccctggccacaagcacctgctccacgacggcaaagggctggcgctgatcgcacgcagcccaggccattgcctgcgcttcgcgctcgcgcccggcctggaagacggcatggctgtcgcctatgcccaccgcggcagcgctgtcgcggctgcgcgcaaccagccgtccagcgtgggcctcgctgtcgtcaaaccccggcccacatccgccgcgctgctggagctgcacaccttgcaggcgctcgacgcgattcttgcgggcgcgtccttgcgcgatgtgggcgaagggttgttcggtgccgacgccgtggccgattggtacagcgacggcggcctgcgctccaaggtgcgccgcctggtacggcgcggcgacgcgctgatgcgcggcggctatcgccgcctagcacagcttccgccgcttgagaagggtcgttttgaggacgacgcaaaacggccctga

SEQ ID NO: 435518 - DNA, 351 bp, Serratia marcescens
atgcccctgccactcgccaccgccccggagcgcgcgcaactgctcgccaacggcgaggcccgtgccgctggccgagccatcgacccggtgcccgtggtgcggctgttcacgccggacgcgcacgtgacctggctgctggctgcgctcgacccagccgatggcgacaccgcctggggcctcatcgacttggggatcgggatgccggcccagggcaccgtcaagctgtccgatctggccggcatcgtcgggccgcaccagcagcccgtgatgcgcgacctctacttccgtcccacacgcacgttgtcggaatacacccggctggccgagcgcgacggagcgatcccggactga

SEQ ID NO: 435519 - DNA, 306 bp, Serratia marcescens
gtggcggctgggaactcattggcgaaggcgttgaagacagttagaaaggcccgtggcttgagccaggaagccttctctgacgtgtccagccgtacctatatgagtaccctcgaacgcgacctgaaaagcccgaccttgaacaagctggccgagctgtgcgaggtgatggagatccacccgctcacactgctgacgctggcctatgcgggcaatagcccgcacaaggccgacgaactgctggcgcaggtgcgccaggagctggaggcggtgttgaaggaacgcgacgcggcgaagccgcgcgcgtga

SEQ ID NO: 435520 - DNA, 315 bp, Serratia marcescens
atggccaacatcggcaccttcaccgcagacaaagacggcttcaccggcacgcttcgcaccctgacgctcaacgtcaaggtcaagctgcttcccaacgacaagggcagcagcgagaacgcccccgacttccgtctccaggccgcaggccacgacatcggcgcggcgtggaacaagaccagcgaggccgggcgggaatacaagtccgtgaccctcgacgatccttcgttcccggctccgatctatgcccgcctgatcgaaggcgaggacggcacgcacgacctgatctggtcgcgcagcaagccccaggcggcgtga

SEQ ID NO: 435521 - DNA, 519 bp, Serratia marcescens
atgaccctccagctccgacacgaaaccccggacgacattgccgccatcgaggccgtgaccatcgccgcgttcgctgatgcaccacacaccagccacaccgagcaattcatcgtgcgcgccttgcgtgccgccaacgaactgacgctttccatcgtggccgaagaacatgggcgcgtcgtcggtcacgtcgcgctgtcgccagtaacaatcacccatgagcacgggcgaaagaccgagggctggtataggttggggccgatctccgtcctgccgccaaggcaggggcaaggcatcggttcgcgcctgatggaacaggcgctgtctgaactgcgggctatgcaggccgcaggctgcgtgctgctgggcgatccaacgtactacacgcgctttggcttccaggcccatgcgggcttgcaactgccgggcgtgccgcccggctatttcatggcgctggccctgcatgggacagtgccggaaggcatcgcgcactacagcgatgccttcaacgccgccgcctga

SEQ ID NO: 435522 - DNA, 2052 bp, Serratia marcescens
atgaacgccgtactcaaaaccgaagccgtcgccatcgaagccgccgcaccgctggaagtggccgacccgaccaagaacctgatcttggttcccctctcgcagttgctgccgcgccgctccaagcgcaacgtccgcacgaccccgcgccagtccatccccgaactggccgcgagcattgcccgcatcggcctgctgcaaaacctgatcgtcatcctgtccgccgatggggagcaatacgaagtcgtcgcaggcgaccgccgcctgaccgccttgaagctgctggcgaagaagaagcgcatccccgccgactacgaagtgccgtgcctgctggtggccgatgcttcggcccgcaccgtcagcctcgcggagaacgtgcagcgcgagaacatgcaccccgccgaccagttcgcggccttcgccgcgctggtcaaggaaggacgccccatcgaggacattgccgccgacttcggcgtgtccccgctggtggtgcagcgccgcttgaagctggcgaacgtctcgccgcgcctcatggccgactatcgcgccggtggcgtgacgctggaacagttgatggccttgaccatcaccgacgaccatgccgcgcaggaggccgcgttctacggtgcgccggaatggcagcgcagcccgtccgcgctgcgcgagcgcctgaccgagcgtgaaatcgacgccacgcacgcgctggtgcgcttcgtcgggctggacacctatcggcaggcaggcggcggcatccgccgcgacctgttcgcagaaggcgatgccggaacctacctcaccgataccgcagtgctggaaacgctggtgcgcgacaagctggaaacgctggccgaggacgtgcgcgccgagggctgggcatgggtggaggccgtgccgcatctggcctacgaggaacggcaggctttccagaacgccccgcgccatcgccgcgagccgaccacccgcgaggcccgccgcatggcctcgctggaaacccgcctcgaaaagatcgacgccgaactggaggacgcttgcgacgccgaggacgaggccaaggccgagaaactggaacagcggcgcgatcaggtgatcggggaactgcaagacgcggaggacgccttacaaggctatgcccccgaggtgcgcgaggtggccggtgccatcgtcaccatcgaccgcaacggcgagcccgtcattcatcgcggcctgctgcgcgaagccgaggcgaaggcgctgcgcacgctggaaaagctgcggcgcggtttcggcagtaccgaaggcgaagccgctaacgacgagcacgaggacgccgacgacgcgcccaaggccgcgagcctgtccgaccggctggcgcagcggttgagcgcccaccgcacggcggcgctgcaaatcgaagtcgcccggcatccgcacgtcgcgctggccgcgctggtgcatggcatggtgcagaccgtcttgcaggaaaaccactacgggcacgatttgccgctgggcgtgagcctgaaactgcaagaccggctggaaggcatggccccggactggccagaatcgcccgccgccgtggcgctgcgcgaactgcaacaggtagccggggaagccttgccggaggacagcgccgaactgtttgccgcgctgctggcgaagtcgcaagacgaactggtgcggctgctggccgtgtgcgtggcttccacggtggacgtggtgacgccccgtgccacgccgcaccagcccggcaaggaactggcgcaggccgtgggcctcgacatggccgcatggtggaagccgaccgcagaaggctacttcaagcacgtttccaaggctgtgcttctggatgccgtgagcgcgtttgcaccggaatccatcacccggctggcgaagctcaagaaggccgacattgccagcgaggccgagcggctggccgatggcaccggctggatgcccgccatcttcaaggccgaaggcccgcaggagaccgcgcaggaagaaggcccggagcaggacgcctcggaggataccgaggcaatggcggatgaacccaccgaggcactggccgcttga

SEQ ID NO: 435523 - DNA, 825 bp, Serratia marcescens
atgcaactcgcatcccgtttcgcttcccgctccccggcactgcgcagcgattacccactgtccgatgaccaaatccgcagggtggccccgtccatcttcgccgacgccccgcacgaaagccgttccgagcgatacagctacatccccaccgcgaccgtcctgcaagaactgcgcggagaaggtttcgagcctttcatggtgacgcaaacccgcgtgcgccacgacgaccgccgcgactacaccaagcacatgatccggctgcgccacgccagccagatcaacggccgcgaggccaacgaaatcatcctgctgaactcccatgacggcaccagcagctatcagatgctggccgggatgttccgcttcgtttgcagcaatggccttgtctgcggcgacaccgtggccgacgtgcgcgtgccgcacaagggcgacgtagccgggcacgtcatcgaaggcgcttacgaagtcctgcacggcttcgaccgggtgcaggaatcgcgcgatgccatgcgcgccatcacgctcgacgccggggaatcggaagtgttcgcccgcgctgcgctggcgttgaagtacgacgaggacaagccagcgcccatcacggaatcgcaaatcctgatgccgcgccgccatgacgacgaccgccgcgacctgtggagcgtgttcaaccgcacgcaggagaacttgaccaaaggcggcctgtccgcccgcgccgcgaatggccgccgccagaccacccggcccgtgcagggcatcgaccaaagcgtgcgcctgaatcgcgccctgtggctgctggccgatggcctgcgccagttgaaagcctga

SEQ ID NO: 435524 - DNA, 393 bp, Serratia marcescens
atgcacgacaaatcacacgtttccctcgaacagcacgtttgcttggtctgcggcacagcgttcgataccggcgccatcctgttggacaagcgcctgcgcgcgagcatggagcgccatacggcaaccggctggggcctgtgccccgagcatcagaagctgtccgacgatggctttgtcgcactggtcgaatgcgatccgcagcgcagcggctcgcaggccggcgggcgcatgaagcccgagcaggcgtaccggacgggccggctggctcatctgcggcgcacgttgttcgctcaggtgttcaacgtgccgatcgcggccgagcaggcttgcgtgttcgttgagcccggcgtgatcgaccagttgcagtcgatgacggcgccggcggcgaactga

SEQ ID NO: 435525 - DNA, 507 bp, Serratia marcescens
atgtcgcaactttccctctctctcgatactccgctgatggtgcgcgatggccgtgggcgctatcggccggcggacgccgaccagattctggaggccgcgcgccaggtcatcgaacagaagatgcagcgcggcgaggcgttcacttcgccggaggcggtgaaggactacctgcgcgccaagctggccggcttcgagcacgaagtcttcgcggtgttgttcctcgacacgcgccatcggttgatcgactacgtggagatgttccacggcacgatcgacgccgccgaggtgcatccgcgcgaggtggtgaagcaggcgctgcggctcaatgcagcggcggtcatcgtttcgcacaaccatccgagcggaagccccgagccgagcgcggccgacaaggcgatgacctcgcagcttcggcaggcgctggcgctggtggacgttcgcacgctggatcacatcattatcgctggaagccgtaccacgtcattcgccgaacgcggcctgctttga

SEQ ID NO: 435526 - DNA, 1077 bp, Serratia marcescens
atgaacacgcgccggtcatccgcagcgtcgtccgcagcgtcgtccgcagcgccttcggcgctgctgggcgacattcgggcactgatcgaggcggcgcgcaagcgcgccgcctcgacggtgaatagcgagctgacgatgctctactggcgcatcggccagcgcatccgcacgcaggtcttggacgggcgccggggcgcttatggcaaggaagtcctgcctaccctggcggcgcagttggtgaaggagtacggcaacagctttgccgagcagaacctgcgccgcatggtgcagttcgcagccacctttcccgacgagcagattctcgtatcactgatacgagaattgagctggacgcacttcatcgccctgatcccgctgaaagacccgctccagcgggactattacgcgcagatggcgagcgccgaacgctggagcgtgcggacgctgcgtgagcgcatcgactcgatgctgtacgaacgcacggcgctgtcccaaaagccgggcgagacgatcgcacaggagttggcgaagatgcgcgatgcgcagcgcatgtcgcccgccctagtcatgcgcgacccgtacatcctcgacttcctggggctgcgggacacttggcaggaaggcgacttggaggcggcgatcatccgcgaaatggagtcgttcttgttggagctgggcgcgggtttcagcttcgtggcccggcagaagcgcatccaaattgacggcgaggattttcacctcgacctgctgttttacaaccgcaagctgcggcggctggtggcagtggagttgaaggtcgacgagttcaaggcggctttcaagggacagatggagctttaccttcgctggctggacaagcacgaacgggagccggaggaggcctcgccgctggggatcatcctttgcaccggcaaaaagcgcgagcagatcgaattgctggagctggacaagtcgggcatccacgtcgccgagtatctgactgccttgccgccgaggggtgtgctggtggagcggctgcaacaggcaacgcaacgggcgcagttgcagatcgagcagcgcaagaccgacaaccagtag

SEQ ID NO: 435527 - DNA, 1200 bp, Serratia marcescens
atggcaaagatcaagctcaccaagaccgccgtggaggcggcccagccccaggccaaggatgttgaactgcgggataccgtggtgcccggcttcctgtgcaagattaccccgacgggccgccgggtgttcatgctccagtaccgcacgaactccggccagccccgcaagccctcgctggggctatacggggaactgaccgtcgaacaggcacgagtcaaggcacaggactggctggccgaggttcgccggggcggcgaccccggcggcgccaaggccgaggcgcgcaaggcgcccacgatggccgagttgtgcaagaagttcatggaggactactccaagaagcgcaacaagcccagcacgcaggacggctatcagggcgtcatcgaccgcaacatcatcccgctgctgggccgcaagaaggtgcatgacgtgaagcggcccgacattgccgggctgatggagaagctggcctacaagccgaccgaggcgaacaagaccttcggcgtgctgcgcaagatgttcaacctggccgaagtgtggggctaccgcccggacggcacgaatccgtgccgccacgtcccgatgtacccgccgggcaaggaaacccggctcatcgtggacgaggaaatggtgcggatcttccgtcatctggagaagctggaggcggaagggctggagaactacgtcatcccgctggcgatccggctgcaattcgagtttgccgcccggcgctccgaaatctgcccgctcgaatggagctggctggacttcgagaaccggcgcgtggtgtggcccgacagcaaggtcggcggcatttccaagcccatgagcgaggaagcctatcggctgctttcgacggcgccgcgccgggagggctgcccctatgtcctgccatcgcccaacgactcgaccaagcacctgacctttggcgagcactatggcggctggtgccgggtgctcaaggccgccggcgtcccgcacgtcggcacgcacggcatccgccatcgctcgaccaccgacatagccaattccggcgtgccgaccaaagtgggcatgaagttaacgggccacaagactgtggcgatgttcatgcactacgtccacaccgaggacaagccggtgcgcgatgcggccgagctggtggccagccggcgccaggccatcacgggcgcgcgccagcttgcggaggcggcagcatga

SEQ ID NO: 435528 - DNA, 1242 bp, Serratia marcescens
atgttaaaacacagaacgccgcatcctgccttcagctatcttatctatctggggtgcgccatcgctttttgcaccatccctttcggttccgcgaccggacgcaatctgttttacgtttccagctacatcgcctttatcgccgtttgcctgtacccgcgctactacttcagcaacgcgggaaatctgctgctgcccgcgctgatgttcagcgtgggcatgggaaccatcctctggatgcatcacttcaaacagccgggtgagtatatcaatatttatcgctcttatatgtcgaccggcaaactgcagctcgcgaccgctttcattttgctgatcgcgctcaatgagcggttgtgcgtgcagcgcctgctgatcgtcgtggctctcgccaccggcctggcggtcaacggctattccctctatcagggattgcggttgaatatcccgcgcgtagagctcaacttcgatcgcgccacggtcgccgcctacctgatgaccgccatcgatctggtgatgatgcaagccatcctggtgctgcgcacccgttaccgcctggcgttgtacatcgccgcgttcctgctttccttctctgcgctggtgctcaccggcacgcgcgcagccatgttggtctacccggtggcggtctgcctgtcgctgctggcgaccaagcagctggtttccaggaaacacaagctcgcgttggtagcctcggtaccgctgctgctcgtagcctgcggcctggtgttcaagccgcagatagaagaacgcattcaggcctttgagaccgacatgcgcctgatggatcagccacagactgaaaactcgatcatttcccggctgtcgatgcaaacgctggcatggcacaccggttcacaagccccttggggccaatccgccgagcagcgcggcgaagagatccgtgcgatggtcgcacagcaacctcgcctgtctggcgtcatgccctacatcaacgtccacctgcacaacgagctgctggaaacctactcgctcaagggtatctggggcgtactgctgctgctggcgctctatgtcagcctgttcttctcttccttccggccgcagcgcaacgcgctgctgctaagcgtcagcgccagcctgttcgtttacggcctgagcgatgtcatcttcttcagcacggaaggcaccgtcatattctgcctggcgttgatcgccgccgttctttccgtcccgaaacagccccctgttcaggagcctaccccgtga

SEQ ID NO: 435529 - DNA, 1323 bp, Serratia marcescens
atgagcgagattgcaccaacgagcctgttacaccctctgaaagctaccgttctggattttcaggaggatgagcacgactatcagttcaaggttgaatacccggagccgacctgctgccacgcctgcggcgcagtgtccgacatcatccgctttaacaaaaagttggtgaagtaccgggatgttcccatgcacgggaagcgcgttacgctctgggttgtaactcgtcgttataagtgcaaatcatgcaatggcacattcaccccggacatccccgagatggccgaagcccaccgcatgacaaagcgctgctatcagtacatcattaaacgtgcgctgaccggcactaacgccagcgtcgcgcaggatgttggctttgatgagtccgtcacccgtggggtcatcaagtcctactgcgagcaaaaggcgaagacctataagcctgtgctgccgcgagtgctgggcattgatgagctgtacctgaacaaaaccttccgctgtgtcctgaccaacatcgagcagggaaccattattgacatactggaatcccggcaaagtaacgtcatctacaaccgtctggcgcatatggaaggccgtgagaacgtgcagatcgtctgtcaggatatgtggaagccataccgtgacgttgccagccagctattccctaaagccagcatcgtcgttgaccgcttccatatccagcgcatggctaacgaggcgatggaaacgctgcgtaagtcgctcaaaaaggatctgacagtacaccaccgacggcagcttaaaggcgaccgtaagatgatgttgatgcgtaagcgtgaccttaaccctatgcagcagatgattatcgaaacgtggctggatcactatcctgagttgggtctggcctatcagctcaaggaagagttctttgatatctggctggcacagactgaacctgaggccagaatgcgctatcagaactggctggcaaagatacccgatcatcataaaaagcactggaagccgctgataacatccatgacgaactgggagaaagagatattcgcctacttcggcccggcccagcggaagaccaacgcctttacggaatccatcaaccgcaagatgcgcgatctgaaccgtgattcgcgcggaatgtcctttgagatgttcagggctaaaacactgttcactctcaagcataagttcagcaagcctaaaccagtgaaagaatcaccgttcacggttggctatgtcaccgctggttcgtgggatctggatgatgaaatccgggacgattacggcgtatctatcgacgctattctggaatccaaaatcggcgaataa

SEQ ID NO: 435530 - DNA, 861 bp, Serratia marcescens
atgactaaccaaatcatcatctccgacatctctatccacaaagacgggcaaggtcgttattcattaaacgatctgcatacagcgtcagggaaagaagacaaacatcagcccgccttcttcatgagaagacacgaaacaattgaaatgattaacgaaatttctaattctgcaaaatcgcagagttggaagcccaccatttcaaagagtggccgctatggcggaacctacgtttgcaaggagctggtgtacgcctacgctatgtggatcagcgcagctttcgctctcaaggtgatccgggcatatgacgcgctggtatctggcaatgtggaagcgaagccaaaagttcgccagtgcacagcaacccaacttaccccgctgcgccaaacagcagaacggttaatcacaactggcctcggcaaaatctatcccgacatctggaagctggttcatcagcgcttcgatgtcgagcatatccatcagttgcagcctgagcaggtcggtgaagccatcgagtacctgaacgtgctggaaggtgagtacctggggcgcgagacacttccggcaaccccatcagtgcatttcaccaacgaggagctttgcgctctctgctgggtatggaatgccgccgaatacatgcgggagaagatagagctggcctatcccgcaatgaaaactctcaagtctgaatacgcaccgagcttctactcaatggcatttgagtatcagcgaacactggaagccggtagaaaggttctcgaacgggaaacaaaacacatcgttcctcatcctcacagcgtgtcagatgaaaactggcggcgagtcctgcctcgtctgcgccaaaatagcttacctcgcggataa

SEQ ID NO: 435531 - DNA, 318 bp, Serratia marcescens
ttgaatgtggtctggctgatgaaaacagcgctgaaagaactgtggtacgccccgagtgaacaagaggcgcagagacgctggacaagctggtacaggcagtctcaggaaagcggaatcaaggcgttgcaacacttcgccgagaaactgaaagggtatgccggtggcatcatcgcgagtgccagacacaggttgaataccagcgtgctggaagggatgaacaataagataaaagtgatgaagcggatggcctatggataccgggataacgcttacttcttcctgaaaatcaaagcagcgttccccggtaaagcgcgatga

SEQ ID NO: 435532 - DNA, 195 bp, Serratia marcescens
ttgcaacacttcgccgagaaactgaaagggtatgccggtggcatcatcgcgagtgccagacacaggttgaataccagcgtgctggaagggatgaacaataagataaaagtgatgaagcggatggcctatggataccgggataacgcttacttcttcctgaaaatcaaagcagcgttccccggtaaagcgcgatga

SEQ ID NO: 435533 - DNA, 1395 bp, Serratia marcescens
atgaatgcatcaaaagcagatgtgcaggattttcaatttataatttctgaggctatgaggatttatgatttattaaatggtgacaattataaggaatgtttagagaaagaatactaccgtgattttagttctataggaatggttataaatccaccgatggaattaaaaatcaatcacgatgatgatgattttaggcaaatacacctttcttatgactctcacgatactttttacaaaattgctaaaagacagattcgatgtaataaaatagaaatgcttgtgacagcaagtgagtttgtcagcgttttaaagtcggagttatataagcatatttttttaagaaatggggagttaaatcagcagggatgtactagtatattaaataaggtttacagttcattaaaggaaacaatgaaaaaagaggatttctattttcctctgttggccttcggcctacctaatgaagtgttttcattcaaaatcgctgagataataccaaagagagatatgtttgaatatgttggtgagtctctgagttcctctattttatccaaggcaaaagaattctgtgatgcaaatgaacacccatatgattattttcttaaagtatccatcccctgtggtacaaaggaaagccgaactagggttgcaaaaaagatagcagagttcattgtaggggttatacacttatttagtgagcagtatcagatacctcctgattttatatgtctatccactacccgttatccaaaatacgatgggttttggttctctaaaattgatgataaggattgggattttaaattatctataaattttattgcaggtaacgctcctgatttttggatgatttttaagaagtcgtttgatactgaacttggttctgttttatgtgaggtaatgcgcttagctgcggagcctaaggattaccgtataattgctgataaacttatagatgctatatttatttttagcagtgcgctacaagataaagatgaaagttctcgtgtagtgaaactggttactgcgttggaaagattggtgagtttaaaggaagaggcggggagtaatattacatcgaagcacttcagaaatagagtggcatctcttatttctatatttcatggtgaaaggaaacgatgggaggttatctcaggggaaatgtattcccttcgttctgagattgtgcacggttcatggtctttgtatcgtagtgttgaacctttatatcttaaaaaatacaatgagctaacaagtaaaactatattatcagcttgcatggttttctttgcattgggtcttgaaaaagaagattctgaagtggttttgaaagacttctatatacacttagaaaaactggtatctgaaacgcaaattccaagaaacgagagttaa

SEQ ID NO: 435534 - DNA, 255 bp, Serratia marcescens
atgatgcgctgcccgctgtgcacccatgcgtcctatactcgcaccagtcgctatatcacggagcggacgaaagaggcgtattaccaatgtcagagcctgacctgttcttgcacattcaagacggtggaaagcgtcgataaaatcctgtgccagccgatacaggcgcaaccggtcgatgagaacgccttgccaccgccggagaaacggacgttgaaccgctatcgccgttacagcagcaatcataccctgcactaa

SEQ ID NO: 435535 - DNA, 954 bp, Serratia marcescens
atgtcacagctcagctacccactcgcctccgcccagccccttaacggctggcaactgatgacggcgctgatcaatggcgaaaaggccccgagcaacgcctggaaaaaaacctcgtttcgcctgaagtttctcggccgttcgctgctcaactggcgtactaccagcggcctgctcagcaccctggccagcaacccgctgctggaggagatcctgagcgcacagccgaacctgccgtgcaaactgcatcgcccgtatctggcggccaacatgagcaagatcgaatgcctgttcgccctgcgcgatcattacgatctcatcgcgcagcgcatgccgctgaagatgcgcctcggccacctcggcccgcagtctttcgtgctggccagagcgatgggcaaaaacgaagcgccgatcgcgctggaactggcagcgatcgacaagctgaataaagaaggggaagccacgctgctgctgcgcaacgccaacggcgtgatgctggcggagatcacctttgcgctgatgcattatcagcagcagccgacgctgttcatcggcggcctgcagggcgcaaaccatgaggtgccgcacgccgagatccagcacaccaccaaagagtgtcacggcctgttccccaaacggctggtgctggaaggcatctgcacgctggcgcggcacctcggcatccgccagatcgtggcggtcggcaacgccacccatatctatcaaaactggcgttaccagagtaagaagaaggacaaactgcacgccgattacgatcagttctggctgtcgatgggcgccaaaccgctcgacagcggctatttcctgctgcccgaacgcatcgctcgcaagccgatcgaagagattgccagcaagaagcgcgccgagtatcgccgccgctatcagctgctggacgagctggaacaaggattggcggcgcatttctgcgcccgataa

SEQ ID NO: 435536 - DNA, 741 bp, Serratia marcescens
atgacctccccgcttctcccgcccggcatccaggtgcgggatctcagcctgcgtttcggtcagcaaatcgtcttcgaccggctgagcttcgacatcgccggcggcagcttcgtcgccctgctcggcgccagcggcgccggcaaaaccagcctgctgaagatcatcgccggcctggaacgggctacctcgggcacggtgaccggcagcgacggtttgccgatcgccgggcgcatcgcctacatggggcaaaaagacctgctctacccctggctgaccgtcgaggagaacgtcgccctcggctcgcggctgcgcggcgaaacgccggaccgggcgtgggtggcgcacctgctggagcgcgtgggcctggccgcgcatggccgcagcctgcccgccgcgctgtccggcggcatgcgccagcgcgccgccatcgcccgcacgctctacgaacgccagccgatcgtactgatggacgaacccttttccgcgctggacgccattacccgcgccgagatccagagcctggccgccgaactgctggcgcaaaacaccgtgctgctgatcacccacgatccgatggaggcctgccgactgagccaccggctgctggtgctgtcgccctggccgctgggcctcgacgatacccaccgcatcagcgggcaaccgccgcgcgcgccggatgacgccgacctgctgagaagccaggccgaactgctgcaacagctggtgagggccgcgcaatga

SEQ ID NO: 435537 - DNA, 426 bp, Serratia marcescens
atgtctatctggtcctttacctcatcactccctacatcacatgaaacggccggattcttcaataacattctggtggataagaaaatcagcggtcctttcgtggctacgcgctcggacagcgacatggccgtcggcaaactttatccctgggctgcaggggtggcaggccaggtcgcctatatgtttcccccgctctatgccgcaattggcgcgttgggcatttgtggcatacccaccgttcacaatattaccctattgtcaggtgccggcgcctatgccttcgttccagctcacatttataacgtgaacagcagcaattttatttgccatggcgacggcatctccggctcgcacagcgatattgccggccccgaagtggctcatctgctctggcaagcggcgctcaaaacggcggacgcatcatga

SEQ ID NO: 435538 - DNA, 621 bp, Serratia marcescens
atgcgcgacgtgtttaaaaccctgctgaaaaactggccggtggtgatcgccggtatgctgatggtcgccatgaccaccaccgcgttttacctgatcaccgtctatgcgccgaccttcggcaaaaaggtgctgctactcagcgcttccgacagcttgctggtcacccttctggtggcgatctccaacttcatctggctgcccatcggcggcgcgctgtcggaccgtttcggccgcaaaccggtgctggtcgccatgacgttgctgacgttggccaccgcctacccggcgctgagcctgctcgccgccgcccccagcttcagcatgatgctggccgtgctgctgtggctgtccttcatttacggcctgtacaacggcgcgatgatcccggccttgacggagatcatgccaactgaagtacgggtggccggattctcgctggcctacagcctggcgacggcggtgttcggcggctttacgccggtggtctccaccgcgttgatcgaatacaccggcgacaaggcttcaccgggctactggatgagcttcgccgcgctgtgcgccctgctggcgacgctgtatctgtatcgccgcatcgccatgccgctgcaaaccgcgcgctaa

SEQ ID NO: 435539 - DNA, 1746 bp, Serratia marcescens
atggctaaattagacgtcgagagtgaagggggtttaaaaagccagacaataaccatgaggttattaaaggaaggcatttcaattaacaacgccttgagtcttgaccatggctataccctgaaagaaactgaacgagggacgctttatattgatcaatctgaatcaacgcctcctgcttggagagggttcttaagtgagtttacacagagtgatgtctctgaattgtctaatcaacattgctcggcagtactgtttatcgatgttccatcagacattgttaaagaaaaaagcagaacaatagttttgacatttggttatggacatcatgctttagatgtctcatcctttgaaaggaattttggactcaaagttacattgagcgcagttacaagatcggaattaattagccttgatactgccactttagattctattgtctttcaaagaagaatacaggcaagtaaaaaagcaaatttctcaggttttggcatgaacattgagagagatttgctaaggttagctggtggagttccatcagatacatcttttgcatcaatgctagtaggtaaagatgcacttactataacatctagaacatcacctggtgattttttaactaagtgttcaaaagcattagagctgttttatagtgatggatataaaaaggagtttgggttcattgatcatataaccccagtatataattccgagcaaaaagattacctggattcaatggtttttaatgaaataataaatatggtggatggaaaggactcagacttgcatttaattgttccagaagtcatgaatccggagacttctcatgagataagttattacggagcaggatttaataaaggaacaaaaaattgtttctcaggggtcgatatttctgattatatctcagaattgagtggtggagacttcgagtcaataaatacttttgatgcgataaaaagtaatcaacacatttatgaagtttatggaggagagaggagtaagaaaggtaagagaaaagtttacgattgctttgtgtttgaagtggaaattaatatatcaagtgcccaaaataaccttacctctcctgtttccaactcatctgccgctgatatgcctataaacctccccgagggagtttatgtattgttttctggaagctggtatttggttgataaaagctttcatgctgaaatagaaggtttttatctaaaatatttatctaagtcgccatttttaaaaagtaccaatagtaaaaatgaaaaagaactgattgaatatttaaataaagagaatgatctgttaaacttggatcaagtcaagctaaatcctgctggggtgaccaacgcaaatattgaaccttgcgattttttatcaaaaaatctacaatttatacatttaaaagatggagagtcatcaggaccgataagtcatttatggaatcaaggggttgtttcagctgaggcgtatttaagtgattctaaatttagaagtgatctgaataggtcgataaaggcaaggcaaaaaatctttagaaagtatgggtttgataaattgctccaaagagctaactccaaaaatttagatactagtaaaattaccataatttttggtgttatgagagcgccatatgtaaaaaccaagcaggctggtttaccattttttagtaaagtaagttttaagccagtagctaaaaatattgagcagatgggctataaagttgaaattcatcttatagagaaaaattag

SEQ ID NO: 435540 - DNA, 831 bp, Serratia marcescens
atggcaaaagaggaaggtttaagcgctgtgctttcgccggttcaactggcggcagttatgtcagacagaagcgttacggaaggggaaaccttgagtaatcgcctgtttggcgggttggggcttgctggtggagttgttgaactcattggtgctggtgcgctgtgttatgcaccggacccaacatttttaaccaaggttggttgtgtcgttgtcggtacccatagtctcgatagtatcaaagccgcctccaatcaaattgttactggccaaccgacaaccactgatacttaccaatctgctgttgcactggctagaacgctgggcgcggaagatgatacggcttataacgtagggcttacggtcgatgttgcggtgccgttggtgtttgcggcagcgataggcgcggcgcgtgttgcttctgttcgtatggggagagtaaggctggttgagcatgagtctatgacgggcgcgaaacctggcggccatacgattgcgaagcatatagccaagacaccggatgaattggcgcaaagacttgctacaatccctaccatgcaggcagcaacaacattcactaacgtgcgtattgccgaagaggctatttccggcgcagtgaaacataatcaggaatggataaaaatttgggtaagaagctcaacgcgtcccttgtcgcctctcgtcgtgaactattctgccggacgtgtaattggctatggtttacggcgtggcgagcagaacattatcaaactgaccaatcttagggttgtcatacgctttgaggtctttcacggcaagccgtattacatccttactgcttaccccactttttga

SEQ ID NO: 435541 - DNA, 315 bp, Serratia marcescens
atgaaaataatgggtaacttttccgccctggaacatctgatacaaatttatttcgggcaggatagctacgaaatcacaggggcgacaactcttcccggcgttatgggcttctatcttcaagacaacccatcatcgaagatagacaccttgatcgcggatattgtcgaatttgaaacggcatactcgggctcgcttgatgatgaattcagtgctcgatgggggaacgatgtgttgccggagctatggggaacaacgacacaggatttcttgaaacaaattcggatactggcagcccaccatcagttggctcactaa

SEQ ID NO: 435542 - DNA, 282 bp, Serratia marcescens
atgcagaatcagtcgatcgtgatgttgttgccggcggacacgtcaacgggttggttttcattggcgctgcagtcagtcgatgaagtccgccctatcaccgatggccgcctggcgtttattaattccacgacgggaaagccggggaagaacggcaacactacaagtagcctgctattcatctggcgacaatttatcaagccgcggtgccagttctcaaccatatccagggacgagctcctgagcataggaaagagcataatcatggaggcaagcattgcatga

SEQ ID NO: 435543 - DNA, 201 bp, Serratia marcescens
atggctttgcgcggtgttggagttggtgccgagaaaaatcagcttcgcgccgttgttaccgagcacaatcgggtcgccggtcagttcaacgtcaacccgccgggcaaactgaatgatgtactcgcggaagacatacgcctgcgttttgctcgcggaaagaaaaatctggttgtggccggttttcagcgcgtgcagcagtga

SEQ ID NO: 435544 - DNA, 150 bp, Serratia marcescens
atgaaaaagataaccatccaaccaagagacaagtcggtttcatacccaccgcgcgggttcgctaaagcaagcgatgaccaggtcatgaaagcatttgtccatggccttgaacgttataaaaaagtcatgagcgagctggctaaggtatga

SEQ ID NO: 435545 - DNA, 180 bp, Serratia marcescens
atgaaaaataaccttaaacgagccgccagatctgtcggtagcttgctggacctgctgccatcaacggactacacaaaactgatcgacatgcggccggtagagaaagccatcgaggatgactggaaagctgtaggcgatgacatgtggtctgttattggaagaagggacggcaagaagtaa

SEQ ID NO: 435546 - DNA, 570 bp, Serratia marcescens
atgttcagcgaaaacaaaacagcccaaatggctggttacctgctgcttaaacgcggcgggcgcatggcatacatcaagctcatgaagttgctgtacctggcagatcgtgagtacatgatcagctatggtgactcaatgaccggcgaccgggctgtatcaatgaataacggccctgtgctctctcgtacttatgacttactgaagtctggcagccccgaggaagaatcaccttgggacgattggatctctggcgagtcaaactacgaagtttccatcaaaaagcatgttcatggtgttgacgaagaagaagcttttgatgaactgagccgcgccgacaagaggattttagatcgcgtttttgaacagttcgggcattacaagcgcttcgagctttgcgatctgacgcatcaaatctgccctgagtggcaagacccgcatggctcatctgttcctatcaatccaaaatccattttcatggctggaggaaagtcggaagaagaagccaacctcattcttgatagaatgagagagcgtgaactcctcaagcaattcagtagcgagcttgcatga

SEQ ID NO: 435547 - DNA, 630 bp, Serratia marcescens
atgcagtgctctttccgttgtgccgcaaccgttaacaacctgaagctgtgtgcaagatttagctcagcttgcgcgagcattttttatggtaagttatatggcccctacacacataaaggatgttttatgcgccctgacgaattttttttccctcatattttcacttatgaatcccagacgttttacggtaacaaggtaaatagtaaaaacgaaatattgatcactctaattgatgaaacctgcccttttgatatagggaaactcataactcttcagcaggggacaaaagagcggcactttgaaattctagattatgatgtaaatcaaagccttgatattggcggcggcggttatccctacttagctagcctaaaagtcagagcgttggatgtaaagcccacacctcaaccaaatgtaactagcattacattcaatggagcagtacatgcggggggcgattttcaagctggctctattaactcgataaccaaaaatataactattgagcagttagcaaaagctattgaagaaagtaatgaccctgaggtgaagagtctttggagtaaattgaccaataacgcttcatttgcagctattgctgcaggcgtggctcaatcattgcttggctga

SEQ ID NO: 435548 - DNA, 753 bp, Serratia marcescens
atgcataaccacgcttccagccagaaagatgcctttcccctaggcggcatccattactgttccgctggtggattggcacaaatgaagaagggctgcactgctaatgcaacccttcggggtcatgactcaaatttgagctatgaacaaaatcagtatgttaccaatctactgggtaaccaattttcattaggtcgaggtgctcaaccctttggttcaattccttctttacgcaatctatctcggcaagaatctttaacccatgagctgaaatttccctgcccagcaatggtgttaatttgttcaagtagtgagtcttcaaagcgtatgtgcttcatagtgctgcctttgcggtcaaacgcctttttttctttttcgtcttgcattggtagttaccggtattataatggtgatacaaatggtaactaccgctttgtggtaaatcaatatcattttgtaaatacagcgaagcccggtagtggtggaacactaaccgggcctcttaccaccaacgatagaatcagtatcgaggcagctatgtcagatcatatcacacccttaaccgggcggagttcgctcacccagaataagttcacctggcgctttctggcgttatcacgtatagaccgtaaggcaaatccttgccgtatgtctgtagaggcctacaccgaacaagaagcccgccaggtgttagcccctcatttcatcctgtcattcgctgggcgcctgccgattcaggaggtaagccatgcgtaa

SEQ ID NO: 435549 - DNA, 513 bp, Serratia marcescens
atgcgaaagctgctgagtggtttaggaatcaaaagcaaaaaaatacttaacttctttggttatttgatgaacagaaactatacggttaacactcgctttggaaagaagaaaacgctgaaacccgatagtaatgataaagtttttacatcgtttagcggcacaaatactttcagttataaaggtattgttgttgtaaagaaagggggatgctacacagttaaagaagcaaagctacaaggttacgcatcaagatttttatcaggagtgttcaccgatgcacgttctttagccctcgcttttgattcagccctctctgatgtggacaaagataagcactacgctctgcgtgctaagaaccagaacatacaatgcccacattgccggtcaatctatctgctctacaagtcaatgcagtctgagcagtatggggaagtttatattgaatgcccccattgtcaggaagtccatccttcggatagcgtgagcagagtgactgacgataaaatttactag

SEQ ID NO: 435550 - DNA, 744 bp, Serratia marcescens
atgataaaatggttaggtgatatagctgttgatacaacaacgggagagatcttagattataagctatcactttgtacaaatgaagatgttagcacaatagctaaaagtgttgtagatgagctgtttttgaatggtgtacatactacatccgaaataaatagagaaactaggggtaggaagcctaagcagattgataaccctctcatgggttacttttctggattacattggaatgaagatataggtaggtatgatatgccatatctattggatgacatcctctatggtgcctgcaataaccatgcagtgaatacaaggattcctgttaatcagctgattacagtgatggctcatctgtctctattatctactcaatctatacaagagatgttaagtaaacgcagggtgataaaagatcagagtgttctaggagagcgttattgtaggagtatcctcgctgcatgtgaatcattgattaagtcaatgcattattacatggaacaggggaagttagatctgtctggtaatgctacattctcctttgatattgacgctaaggattataataaatatcgatattctcccacatatagtatcgggttgcgcccttttactcgaggggagcgggaacatattagacacctatcttatatagggatgacgtcaaaaataaagatgtttattgaggtgttgagtcaacagactaagcaatggatagataggtctggtcatttgtttaaataa

SEQ ID NO: 435551 - DNA, 207 bp, Serratia marcescens
atgcgtgagattcgttgtgcgcgctgtagtaaactgttagccaaggccgcatttagtcatttgcaaatcaaatgtccacgctgcaaagcctttaatgatatgcaggccgagagcctctcacagagcaccgctgagtgccccacaggaaaaacgcaaagtggggaaaatcaatcgatccagaattcttacaccgccccaactcattga

SEQ ID NO: 435552 - DNA, 177 bp, Serratia marcescens
atgaacatggtattctgcaaagtgtgtggacgatggattgctgagacggccacctggatcaatgccgagcctgactactgcgaagactgcaaaccaccgccctttattaaaagaatgttcaataagttttggtgttttattcgttctatattcacgaagcatagcaaaacaatctaa

SEQ ID NO: 435553 - DNA, 1650 bp, Serratia marcescens
atgtattttttagataataacagtggcgttaatgccatgccgccaatcgcaccggttaatagcacggcggtacgctggttcaccgaaggctcaggcagcttgccgccaagctggccgggtatggattggtttaatatcattcaggctgaattaattggcgtcctaaccgctgccggcatgtcacccgataaagcccgcgtagaccaattagccgcagcgattaaatcgattatcggtagcgacgcgctgctgaaaaagaattacctgagcgaaattaaagaagccggtgcagcggcgcagaaatcggccagggataatttagggttgggaacggcagcgacaaagaacgtaggaacagccactggtaacgtgatggaagtgggcgcatttggccttggggggcagggtttagttctcagtgaagcaacagatgctgcattgatgaaagccgcaaaagcgaaaggttcctcatttgttcgaagtaacgcacgaggtccgtcagtacccgtctacggcgcaggcttttattcaacatcacaagatacaaacaccatgattaccgcggactacgccaccgcaaatgttgttgtgatgacaacccgtgatgctgatgcggatgcgccaaaggttaatgtactgtatggcacagccaataaaccaacggctgctgatacaaacgccgccgatatgcgtaacaacttcgccgcccgaatgggggtatcccgcgtattaagcggcggcaataaacccacatcccccggcgtatggagtgtggagaatagccagtgggcagctgttccgtggggctccattctgtgcaccaccaatagcagcgacctgtccagcaatgaagggcaagggaagttcttgcattatttgcaactgtcacacgaggcgggcggtaagcccggacttcgcgcggcggtaaacgtcaatgggacattcagcggctggcagcaggtgttaatgtcttacggtggcactatgagcggcccgttgaccacgccatatgtcgcaagcactcccaacgtaatgcctgagggcgctggtgcattctccgatcaactgaatagaaaagcaccgttctatcaacctaattggcaatggcccgtaacttctggcgatctttatgtgccaatagctaaaggcgtggcgacccgacaaggacaaggttatccatccgcagtgagttttggctatctgctcagcggtacgccgagttttgctcaagcctgcatccatgtgaagggagataatgccgattttaattggcgatttgacgcaaatagcgggaacttttattgtcccggcggggtttatgctgctggtgctatcttccatgtcgacgggaatattaccggaaatatttgggggggctatctcagtaactggttgaataatcaattcgtagcccgtgataacaatatcaatactcgtgccacctgggattacgtgaatcagaactttgtgcgtgatattcgcttagctagccgtggagaaattatcaccgatggtgccttaactgaggcaccatggggcgcagttattacaggaggcaacggcaacgaaggtaatcaggtagggattatgttattccgctatctgcaaaaaaacgtgaacggtaactggtatacggtggcatacgcatga

SEQ ID NO: 435554 - DNA, 447 bp, Serratia marcescens
atgtctacacaactacctgaaacacatcaccaacagtctgagccgttggatccagcacgttcggcaacagctttcagcgcggttatctggtgtccgcgcccggcctaccgccgagcgggcttcacctttacccgtggccgcaccacgttggatccggttacgcctgaacagcttgccatcctggagcaggatccgtgcctcgttgtggaatcatcttcgccggcagcgctgcaacctacgcaaccgggggccgtggacgattcgggcgtgggtggcgtaacgccggcacaaatccgcgcggctgtcgcatcactcgatagcgagaacaccgagcactttacccaggcgggtaaaccgcgtgtggctgccgttgtcgccgcgctcggcgcagaggtcaccggcaagcaaatcgaagccgccctggcggaaggcgaggacgacgcatga

SEQ ID NO: 435555 - DNA, 273 bp, Serratia marcescens
atgagtacacccatcatcactgacacatcgccgacgttgcctgccctggttgagcagatgcgcgcgctctacagcgagcactaccgccagtactgcgacttgcaagagctggggcgcacattaggcgtggtgccggttagcgaacctatcccggagcaactgccggcagaggccaccgcgttaatccccgcttttgttgaggtggcttctcgcctggacacattggccaggatgaaccgggatttgcagtcggcgatccaggcggtgttctga

SEQ ID NO: 435556 - DNA, 513 bp, Serratia marcescens
atggcaaccaaagcgcatctgattaagttgatccacgttgcccgccgcaaattgcaactggatgaagaaacctaccgcagtttgttggcctgcgccgttcctggcaagaacagttgtcgggatatgagcctccctgagttggagaaggtactgagtgactttaaatccaaaggctttaagccgacctctacgtcggctaaatcccaagctaaaggcgctccgggtgttaccgataaaatccgcgccatctggcacaccatgcatcgggaaggttttatccagcatgataccgccgaggcgatcaacggttatgtcaaacgtattacccataacagcaacggcggtgtggggatcgcaaggctggattggttgcggggcagcgatgcaacggtggtgctggagagtttaaaacggtggcatcggcgctgcatggtggaagcgatggcgttgagtgatcccccgcgtggctatgacgcagtgtgtcgacagtaccgccagcaacggcgacagtga

SEQ ID NO: 435557 - DNA, 354 bp, Serratia marcescens
atggataacgcaaaagacaacatcgtgacgctttacgtgcagttcgatgaaccgccagcgctccacagccatcaggatgtgctgggtggccacctgctaggcgtgtcgttctgtgacacccgcgaagcggaaacttggacgccggtgtcccagggttccccgcatatgcaccaatcgttgctgatgttcaccagcaacgaagaattgctgcccggtcatttcgacaatcaggggctgtatatcagtgaaatcagcggcaggcccgttgatgatgaaggtgccgaagtgacacactggatgtatgcgccggaaccgcccgacatggacgatgtggaggaattaccatgctgctga

SEQ ID NO: 435558 - DNA, 708 bp, Serratia marcescens
atgactaccaatgcaatcttgatgaaaatcgatgcgcttttgtcgcaccagtcgatgacgtgttcgcagctggcaaccgagctggacgtcacgccggcagaaatcatcacgcccttgcgcaaggccgtaaagtctgagcgttttgctgagcgcaatgggtattactccgttgtgttgcctgcgccatctgttcaggccgcagtccgaatcccccatgctgttgtgacgacagcacccgtcgatagctttaccggacagattatcgcggcgctaacgcaacgggatatgacctcgaaagaactggcggagtttacggggatcggtgcatcgcgcatttctgcgttattgcggtatcgggttgcgcagggttcagtatcaaaagccaccaaagacggccaaccctactaccacctggaacaacggcacgaatgcgtgagccgcaaagcctttccctgggttgagggggcagtggttccggtatgggtacgaagcctggccgccggtgttcagggatgcgagagcgtctatatcgttgccgaactggatgccgacaagcaatcccagggctggccacaatttataacggcttacattgacattcggttaggccgctgtatttgcggaagtacggcggaagacgtttccagccatgtgctgcggtatttgccatttgatcatagcgaggttcatgcccctcatgcggaataa

SEQ ID NO: 435559 - DNA, 432 bp, Serratia marcescens
atgatcgacaagcagcaatgcatggggcttgagaacgcgctgaaaaacggcatggcgatccatttcctacacgagggtaatgaactcactgtcaagcgttgcctgattaaggaaaccaagctggtttacgccgtttatattaatggaaagatgtaccttcctggctgggatccagactcgccaaactaccatccaatggcggaagtctatagccggaaaattgtctataacccgcaccaacgttttctaaaccaaatgaagaaagagcgcggatttaagcgttatttaaaacaaaaggaaaatgcgtatttattggagaaaaaagaacggttcgagccgttctttccctcggcaaaagctgtggtgagccatttcaagaagatcgacgggttgacggttaaacatcctgacttgatggagatcttgccatga

SEQ ID NO: 435560 - DNA, 267 bp, Serratia marcescens
atgaaaactcaagatgcgcaattagttgaaatgctgaacggtgttatcgaatggcaccagaaccgagtggagaactgccaaaccattattgatagcaccgtggacatcaacctaaaagcggaagatggccgcgataagattatcgcagcagattcctccgaggctcaatggttgaaagttggcgtaagcattgccttgtcgcaattcaaagcgtttccgttatcccttcgcgccactgacgacgaggacgattccgatgatgaataa

SEQ ID NO: 435561 - DNA, 270 bp, Serratia marcescens
atgcctaaaattactttcgaatttaatgaatcaccggccaccttcgttaaagaagctggcgttaccggcattcctgtgaatgtcaatgtcagcgttgatggactcaatcgcgataatcccggccatgccgagcaacttatcgccattctgcacaaagcggctccagacatcattaaagccgccagcgacctttacctggaaaaacgcagggctgccggagatgtagaggctaaaggcacgttttataaatcatcgtcaaccacacattaa

SEQ ID NO: 435562 - DNA, 267 bp, Serratia marcescens
atggggaaaatatttgcttatgcctgggcatcaggactcattgagttcggcacaacatatcctgatggcgcgctgccgatttattccggcgaggaggcaccactgcgagaagccgttatgattagcgcccggcattgcagaattaatgacgacatgctggttccgggtatccctgaggccgcaagccagcgagaagcgctggacgcgctcattaatttctctgaccacattaaagccacttacttgaggttaaataaccatgcctaa

SEQ ID NO: 435563 - DNA, 1626 bp, Serratia marcescens
atggctgaattagttgaaagcggcctaaaagttcgcgccgccgctgatgtggccgccggtaatctcggcatttctcccaacagtctgcgccgctggtacggcaaagcacaaaagcaccctcgttctgattgggggccggcgttgctcgacaatcgcctgatagagcgcacggccactgcatcaaaagccgattttgacgagcaggcctgggagttcttcaaagccgattacttgcgtttggagcaacccgcaatgacaaaatcctacgagcgccttgaactcgccgccagcaaacatagctggacaatcccctcgtttgatacggtgcgccgccgcgttgagaaagaaatcccggtcgaggtgcgtgtgcttatgcgcgaaggtgaacatgctttacatcgcctttatcccgcacaaaaacgctctgtggctaacctgcgggcgctggagtggatcaatggcgacggttatcaccataacgtgcgcgtgacctggttcaatggcgaagtgctgcggcctaaaacgtggttctggcagtgcgtttacagccgaaaaatcctgggctaccgcgttgacctgagcgaaaacaccgactctatccgcctttccctgctggatgtgatccgccagtacggtaaaccgaaagaggcgacgatcgacaatacccgtgcggcagcgaacaagaccatgaccggcggtttacccaaccgttaccgtttcaaagtaaaacctgatgatattgaaggcattttacccatgctcggcttcaatgtgcactggacgagcgtcgtcgcgggcaaaggttggggccaggctaaacctgtagagcgtgcttttggcgttggcggcctgggagagtacatcgataaaagcccgctctgcgctggcgcgtacaccggcccgaacccgatgcaaaaaccggactataagcccaagcctatcaacgttgatacgtttatgcaggcggtagctgaaggcgtggccatgtttaacgcagcggtcggacgtgacaccgaaatctgcgccggtaagttgtcgtttaatgaggcattcgacgccagttatcgccaacagatcatcgagtttttaccggatgaacagctgcgtatgctgatgctttcgaccgaggccgtgaccgttcagcgcgatggtagcttcgttcttaaagctggcggaaagattcagcagcaggaaaaccgttatatcagcgaagccctgcgcaatatgcgcacgcataaagtcgttgtgcgcttcgacccgcaggatctgcattcgaaggtgtattgctacaccctggacggtgaatttatctgcgaggccaagtgcgaggcaccggtagcctttggcgatacgcagcaggctcgcgaacattcacgcctgcgcactcagatggtgaaagccaccaagaaagccgccaaggcgcaagtggcaatggatatgttggaattgacggaattaatgggccgctctcccgaaccggaagcgccacaacgccaggtggttcgcatgttcaatcaaggaaataccgttaagaaagtgcagcccgtcgaggatgaagccgaattcagcgataacgagattgcctttcaacaatatatttcgaagctggccagtcagcagaaataa

SEQ ID NO: 435564 - DNA, 1689 bp, Serratia marcescens
atggcggcttcagcctttttactgatcgccagcttcctgctggtgcttctgctgctggcccggccgctgggcggctttatggcgcgcctgatcgagggtgagccgctgcctgcgctgcgcggggtggaagccggcgtctggcgcgcctgcggcatccgcgccaccgagatgaactggtggcagtacgcgctggcgatcctggcgttcaacctgctcggcctggcgctgctgttcgccctgctgatgacgcagggctcgctgccgctcaacccgcaaggcttcccgggcctctcttgggatctggcgctcaacaccgccgtcagcttcgtcaccaacaccaactggcaggcctacagcggcgaaagcgccctcagctatttcagccagatggccgggctggcggtgcagaacttcgtctccgcctccaccggcatcgccgtggcctttgcgctgatccgcgcctttacccgccgcgccggcaacaccgtcggcaacgcctgggccgatctgttccgcatcacgctgtatgtgctgctgccgatcgcgctgctgatcgccctgttcttcgtcagccagggcacgctgcaaaacttcctgccttacctgcacgtcaccacgctcgaaggcgcgcagcagacgctgccgatggggccggtcgcctcgcaggaagcgatcaagatgcttggcaccaacggcggcggcttcttcggcgccaactcggcgcacccgttcgagaacccaaccgtgctgaccaacttcgtgcagatgctggccatcttcctgatcccctgcgcgctgtgcttctccttcggccagttggccggtgaaaaccgccagggccatgcactgatctgggcaatggcgctgatcttcgtggtagcagtggtggtggtgatgtacgccgaactggcgggcaacccgcacctgagcgcgctgggcgccgacagcaacatcaatatggagggcaaagagtcgcgcttcggcattcttgccaccagcctgttctcggtggtgaccaccgccgcgtcctgcggggcggttaacgccatgcacgactctttcaccgcgctgggtggcatggtgccgatgtggctgatgcagatcggtgaggtggtgttcggcggcgtcggctccggcctgtacggcatgctgctgttcgtgctgctgacggtgtttatcgccggtctgatgatcggccgcaccccggaatatctgggcaagaaaatcgacgtttacgacatgaagatgaccgcgctggcgatcctggtcacgccgacgctggtgttgctgggcagcgcgctggccatcggcaccgacgcgggccgcgccggcatcctcaacccgggcgcccacggcttcagcgaagtgctgtatgccctgtcctccgccgccaacaacaacggcagcgccttcgccgggttgagcgtcaatacgccgttctacaacctgctgttggccttcgccatgtttgtcggccgcttcggggtgatcctgccggtgctggcgatcgccggttcgctgagcgccaaacaacgccaaccggcgggcaacggcaccctgccgacctatgggccgctgtttatcggcctgctgatcggcaccgtgttgctggtgggcgcgctgaccttcgtgccggcgctggcgctgggcccggtggccgagcatttgcagctttggttggcaaactaa

SEQ ID NO: 435565 - DNA, 318 bp, Serratia marcescens; identical to SEQ ID NO: 435481

SEQ ID NO: 435566 - DNA, 693 bp, Serratia marcescens
atggcgctcactgacgctaaaatccgtgcagcaaaaccggatgaaaaaccttataaacttgccgacagcggcaacatgtttttgctcgttcacccgaacggctcgcgctactggcggctccgctaccgatttctgggaaaagagaaaacgctcgctctgggtgtctatcctgaagtctcgttatcagaagcaagggaaaaacgcgatacggcgaggaagcagatagctgaaggaactgacccgtgcgaacagaaacgaatcaaaaaatctgtacctgaaacagctcagacatttgaaggcatcgccaaacagtggcataagagcaacaaaaaatggtcagtctcacatagcgagaagatcctaaaaagcctcgagactcatgtgtttccatttatcggctcgcgcgatatcactacgctgaaaacacccgatttgcttgttcctgtcaaagcagccgaagccaaagagatatacgagatagctgcccgccttcagcaacgtattacggcaatcatgcgctatgctgcccagtcaggcattatcagctacaaccctgccgttgatatggcaggtgctttaacgacagtgaaacgccggcatcgccctgccctcgccttgaatcgcatttctgaactacttgaacgactagatagctacagaggacatggtatagatatttccactgccctctga

SEQ ID NO: 435567 - DNA, 318 bp, Serratia marcescens; identical to SEQ ID NO: 435481

SEQ ID NO: 435568 - DNA, 339 bp, Serratia marcescens
ttgctggaggcgaatcagccgctgaatgtggtatggctgatgaaaacgacgctgaaagaactgtggtacgccccgagtgaacaagaggcgcagagacgctgggtaagctggtacaggcagtctcaggaaagcggaatcaaggcgttgcaacacttcgccgagaaactgaaagggtatgccggtggcatcatcgcgagtgccagacacaggttgaataccagcgtgctggaagggatgaacaataagataaaagtgatgaagcggatggcctatggataccgggataacgcttacttcttcctgaaaatcaaagcagcgttccccggtaaagcgcgatga

SEQ ID NO: 435569 - DNA, 168 bp, Serratia marcescens
atggtcgacagtctggttgagtggacggacgttaacccctatgcaagccgacctttcgatgaccgcccggtgtgggtcggctatgacccggcgcactccggcgacagcgccggttgtgtggtgctggccccaccgatgatcaccggcggcaaattccgcatactgtag

SEQ ID NO: 435570 - DNA, 255 bp, Serratia marcescens
atgggcgattatcatcacggtgtgcgcgtcgtcgaaattaatgacggcacgcgcgtcatctctaccgtttcgacagctgtcgtcggcatggtctgcaccggcaaagatgccgacccgaagcttttcccgctcaacacaccggtactgattaccgatgtgattgccgctgccggtaaggccgggaaatccggcacgctggcgaaagcgttgtcagccattggcgaccagtgcaagcctgtctcttatacacactga

SEQ ID NO: 435571 - DNA, 195 bp, Serratia marcescens; identical to SEQ ID NO: 435532

SEQ ID NO: 435572 - DNA, 687 bp, Serratia marcescens
atgcagcttcatattgttttagtggctccggcgcggccggaaaacgttggcgcggcggcgcgcgcgatgaaaaccatgggcttcacgtcgttgcgcatcgttgacagcgaggcgcacctgcagccggcggcgcgctgggtggcacacggggccggcgagatcctcgacggcgtgcaaacgttcgccacgctggaacaggcgctggcggacgtggatttcaccgtcgccactaccgcccgcagccgcgcgcgttttcactactactgcacgccgcctgagctgctggcacagttgagcgagcgtaagcagtgggtcggccaggccgcgctggtgttcggccgtgaagattccggcctgaccaacgaagagctggcgctggcggatttgctgaccggcgtgccgatgcaggcggactatccgtcgcttaatctggggcaagcggtgatggtgtactgctaccagctggcgagcttgatgggcgtcagcacgccgcaggaaacggcggcgtcggaagggcagctcaaggcgctgcgccgccgtgccgatgccctgttgaacgcattggaggtcggcgacgaccaaaaattgcgcgactggctgcaccagcggctcggcgcgctgcaacagcgagatacggcgatgttgcatacgttgctgcacgacatcgaaaaaaaactcgccaagtga

SEQ ID NO: 435573 - DNA, 684 bp, Serratia marcescens
atggacttgccgccagaaggttactttacaggtcaacagcttgtgttggctaaggctatccgcgatgggaatatcggcgacatcaaacggttggcgaaagagacggatctgaacagccccggtgaacacgatatgacattattgttttatgccctggcgacgtcgactcatgacaatgccacgccggaacggctgcagattgcgaccgagttggtaaaggccggagccgatccactgcaacctcgccccaatggcggtgccagtcctgctgaatggatggcaaaattagacaacggtatttggttaaaggcattgcttgatgggggattgtctccagatgctcggggcaaggtagacgagttacctatcatatttcaaacgtcaaaagccaggaactcagaaaccctgaaggttctggttgcacatggtgcgaacttagaagcaagagatattcttggccaaaccgtggtgatggatgcttttaggtattcatcatttgataatgttaagtatcttcttaataacggcgctaatcctaaccccataaataagaaaggcgtttccttagttgagatggtcagtaaagaaataaaaagcagcaaagaaggcggggagtataatgacgaatgtctgaccatcaaaaaaatgatgatcgaacgtggggtgaaatggccgaggtcataa

SEQ ID NO: 435574 - DNA, 1002 bp, Serratia marcescens
atggctaccatccgtaaactcccttctggtaagtggaacgctcaagtaagaatcaagggacaccctacacaaaccaaaacatttttcacgatagaagaggctgagcagtggtcatctgattgtgaaaagaagtttaagaagtcagaaagcactatcaaagcgctgtcccctgtctatcttgaggaggtgttaaccaagaatggaaagcaaagggggggctatgactccatccgaaaccggttgatgaatcttgataggttctttgactccactccccttgagaagattaccagtgagaatgtagctacgtacaaagtggaacgtttgaagaaagcagctaatggcactgtacggcttgagttacagcttctttcaagattcttgcgttgggctgcctcagagaagggagtagcctgcaatgatgttgtgaagcctgttcgactaccggaagcgggtaagccaagagataagatacttacgcctatgcaataccagatgatccttgagcgggtggatacttgtaggagtaggttgcagggaatgagtgaggctaaagctatcatcattcttgcgtgggagacggctatgcgtagaggagagatcttagcgttaacgcctgccatgattgactttaggcagagggtgatacatctggccgatcatcaaacaaagagcgcagaagcaagggatgtgcctctctcttctactgcgctggatttgctgaaatctctgtgtgaagggagggaagaagaaaggtatcgatataccaagttgtttagcttacgcccttactctgtaagccaagcattcaggagagcatgtaaggagtcaagaattgaaggtgtatgcttccactccctgcgccatacatgcatcactagatacgcagagaaagggcttaacacgatacagctacagtgtatttcagggcataaagacatcactatgttagccagatacagccacatcaaggcgagtagcgtggctgcgttgatggagtaa

SEQ ID NO: 435575 - DNA, 318 bp, Serratia marcescens; identical to SEQ ID NO: 435481

SEQ ID NO: 435576 - DNA, 2103 bp, Serratia marcescens
atgaaaatcttactgtttattgtgccggtgtttttattaacttttgtcatcgctatcttcagttctggtgtgcctgagaaaatacctgtcgcactggtagattatgatcattcatcattgagtcgggaaataatcaaaaatattgatgcatcgaagagtattgagttaatagaaacaacggacaatatttccctggctcaacgcctgatgaagagtatgaaaatttatgcttttatagagatcccccgaggtgcatctggatcaactatccgtcaggatgataataaggtcgtaattcgttataacgggcagttaagaacaactggtaatgctgcgtttatcggtttgcaggcagcggtgaatgatgcctttaactcaataaataacaggaagtcactgggtgttgagcataaaggtacgggcaactcaatgccaaatatacaagtaatcagtatcagcaatccacaaaatagctatgaaagattcttgaccccaattgcagtgccggtgttgctgagtatagttctaagcagcgctgtaatttgcgctatcggacgtttttttgaagaaggtaatctctgtgacgattggattaagaaaaaaacaatatatttatcagttcagattgcttcccgttgcctaccatatataaccatcatttttctttggggattaatattcaatgtctggcaagtagtggggcggggttggccaattttaggtaattcatggttgttaattctggcgatgtttatgttgtgtcttcttactgcatctatcgccattatgtttatttcaataacgcgaaatgtacttacagctttaagtatctcaacggtatatgctagtgctgcgttaacctactcagatggtacgctttctattttgaatgccaatggttgggctaaattctggagtaattttcagccattcacccactattaccgaatacagttagagcaggtcaatcttggcagttatatcacaacgagtttttcccaatttggtatcttgtcactctatattatcattcctttaactatttcttttattagtactgttaaatcaataagaaaatgtcaacctatattttcaacggcagttatgtcattgattctttatagtgttttttatccaagcgcctacaaggcacaaattaacctcaaacttcccgttgcggtagttgattttgatcaatcatcattgtcacgtaatctgatcgataatctgcaaaccacacgtgaaattgatgttacccaggttgatagttctctgtctgatgcattaattttattgcgaaacagaaaagtttccgcggtgatagctattgataatgattttaaaaagaatcttatcagaggagagaacgcagggatcgatgtgcacctatcaggcggttatatggctgttgctgccgatttgagaacggcagtgactaatgcaataaacgctacgacggatgttaatagattaacatctaaagctactaataacatcattcctcttcctctatataatccaacattgggatacgaatcttttattatgccgctggtttttattataatacttcagcaaacacttatctttaccagttctatgcttattgcattgcgtaatagtatcggtttaacaaaaattaattcatctcagtttatcgggacgttttttgggttgtttatggttggtttttttggagcggtttttgtgtttggttgggtttattatttgcaagggtatcccaatgaaggaagtatgtttttacaggttttgttgattgttcttttttctgcggcagtaagttcaatggggatgttgattggtagttttctggataacatcaaccgtccaatgcagatcctatcggctacctcgatggttattttttatgcgtcaggagcctcgtttcctacatttaatatgcctgaatgggttgtgaaaacgatggtgattttcccatcaagtacaatgataagtgggtttactatgctgaactctcagggggcaggtatctatgagttggcacccgtaataataaaaatatctttgctagcaattatattatttttacttgctatgtatcgtctagtttggcagaagtaa

SEQ ID NO: 435577 - DNA, 465 bp, Serratia marcescens
atggtcagcaggaaagaagctgcggcaggcggccgggtaaaccgtcagttcgtggcagagcgtcccaatcagctgtgggtagcagacttcacgtacgtgagtacttggcaggggttcgcgtatgtagcgttcatcatcgatgtgtttgccggcggcatcgtgggttggcgagtgtcgtcatcgatggaaaccacgttcgtgctggatgcgctggagcaggcgctgtgggcccgtcgcccttccggcaccatccatcactcggataagggctcgcagtacgtgtcgctggcgtacatgcaacgtctgcaggacgcgggcttactggcctcgacgggcagctcaggcgactcctacgacaatgcgatggcggaaagcatcaacggcctgtacaaagcggaggtgatacacagacagagctggaaaagccgagcagaggttggggtcgtctcagaaaacggaaaataa

SEQ ID NO: 435578 - DNA, 558 bp, Serratia marcescens; identical to SEQ ID NO: 86000

SEQ ID NO: 435579 - DNA, 372 bp, Serratia marcescens
atgagcacgtcaaccatcgaggcgctggccagcgcctgggcaaggattgtcgaggaagcggaattccccgctgactacgaggggactgccacaccacaagcgcatcgggctagcgaagctattcaggagcagattcgggagcgcatcgtcgccaccaacgacatgcggctgttcagcctgctgcacctgctgggtcaggcgtcgctgcgcatggagcaagcgctgtggccggaggattacgagcggatgacgcgcgaggttgaggaagccctgcggcaagccaccgacgccaacgccagatcgtacacccacgaagaagtgatgcaggcgatgcaggaacgcatcgaccgggcgcgagacaagccatgttga

SEQ ID NO: 435580 - DNA, 501 bp, Serratia marcescens; identical to SEQ ID NO: 85998

SEQ ID NO: 435581 - DNA, 402 bp, Serratia marcescens; identical to SEQ ID NO: 16839

SEQ ID NO: 435582 - DNA, 291 bp, Serratia marcescens; identical to SEQ ID NO: 16838

SEQ ID NO: 435583 - DNA, 435 bp, Serratia marcescens; identical to SEQ ID NO: 157055

SEQ ID NO: 435584 - DNA, 639 bp, Serratia marcescens; identical to SEQ ID NO: 25154

SEQ ID NO: 435585 - DNA, 237 bp, Serratia marcescens; identical to SEQ ID NO: 149133

SEQ ID NO: 435586 - DNA, 204 bp, Serratia marcescens; identical to SEQ ID NO: 149134

SEQ ID NO: 435587 - DNA, 699 bp, Serratia marcescens
atgcggtttgtaccagtgaaggatgagagccagcaggcgatgcaatgcctacaccgtatcagacagggttttatcgaagagaaaacagcaacatataaccgattgagaggtttgatatcggaattcggtgtcatcgccccacaaagtacagatgccctgcgtcacatggtttctgagcagaagagttctttgccacttcaggttcaacaatgtgttaatgacctgctggaacacattgatcgtattgaagataatattactgaatatgaccggattttgtcccgcatggcaaaaacagatcaccgcagccagcgattgatggaactgaaagggattggtcccacaacggcctgtgcgctggtcgccagtatcggtaatgcacacgattttaaaaatgggcgacaactggcagcctggctgggactaacgccatcgcagtacagcagtggtgggaaatcaaagcttggcaggataactaaagctggcgattcgtatctgcgaacgctactggttcagggggctcgttcggttctgattggtgccgagaaaaggactgatttattcagtcgttgggtctgttcactggtcgatcgcagaggatactggcgtgccgttgtagccatcgccgccaaaaacgcaaggctgtgctgggcatcattgcattacggtgatgatttcaggctgtactcagccagctaa

SEQ ID NO: 435588 - DNA, 1707 bp, Serratia marcescens
atgactaagattgttactatactggatttcaaaatgaatcagataatatgttcagactttctgtgttttgtccccccagatactgctagcagtactataaagatcttcggtttttctgagtttctagcatctcttgctctgcttgtggtgatttttactgtttctgatataagatacaagtttagaatttccgtggctccaattccattgtatgggataacattttttataatttctcttactgggataggtagtttaatttccgatgtttgggttagtcaaaagtggtgggttataaagtctgatataaactttagaatatggtttcaatctctcttagggtttctctttttatcctgctttatgctttgggtatattatgcatttatagcgccgcctaggttcggtaggagaaattatgagaggtatattaattcactttattctataattcttcgcggtaacaaaaatgaactggcggttatagctgatgagttaggactatctgctgagagaatcgtctctcttggtggggtaaataaaacagctgtagcttatgctgcaaatgacattatgcttttgatagctaatcggagattctgtaaggtaatatcaaatgagtcgccaataactgcttacaaattcttcgaagcgatgtcaagtaaaaataaatatgacgttcctttgaatcaattttcggcaatgatatcagaagaagtattgatgaataaagagtcggttatttatcatgaggataatggctataactctgggttaatggggtataatcaagaatggtctaggactatatatggcaactcttgtttaatagattgctttaatggtcaatttcgctctccacttgaaatggattataagatatattatctgttggattctgagcaatgggaggcttatggtcgattaatatgtatttatctagaggatttaggccgtaaaaaaacatttttaacgaaaagttacaccctagctagagtgttacaagagtttaaacagtgcactagtaaactttattgcttaaatgataatattgaagatggtttgaagagtgaaataacaaaaaaagcgatggtttctatccagtttattaattctatatttaccttggttaaagccaataaattcaataccagtagagtgacttatagatatgttaaaggtaagtggaaaaatgacatatctgatgatattgctgattttatgtttaatattgtaattcaagcatcacgagtgcgttctcttgattttattacctgggaaattcagaataatattgtttggagtggtttactagatgggatggactttttagacggagaggagaatagtgatttatacaagaagagttgtaaaaaattaataaggttgatttatgatgaaatcaaagagatcgggactagaccaaattacaaaaacatcaggcttgcaggaatgctccttaacatttttggtttaaaaatgaatgggcaatatattaataaaggaaagcagctgaggtttctgaagctagtaactattgatactgtaagaaaacactatttatacttagttgaagagttgccaagtattgcggagcatatgcttggtggtgggattagctttgatgcggatagtaagtcattaattaagacttatactagttttttgaggaaaaaacctgttcaagatatattaaggttagagtga

SEQ ID NO: 435589 - DNA, 192 bp, Serratia marcescens
atggctacgaccctcaccccgactcatcctacattctgctttctgtttgcggccgtgcgccgttctgcgctgactgccgccccgcgtatcgtgctcaccgtggcggattctgagcacaacgctcgccgcctgctggcccgtgattacgtgttgtcctttgccgggcgtctgccggttaaggcggcagcatga

SEQ ID NO: 435590 - DNA, 297 bp, Serratia marcescens
atgatagggatgataatagaactaattaaatctggcattggattatttcaaaagaaacaatctagtgatgccagtattgcagaaacaaagacagaacaagtaaatgaaacgaatcgggaagaaatacggaagggcggattaagctatcgtacagtactagggtatgtatgtgcttttgtcgtattgtattcttacgtcattgtgccagtactggactacttcgggatagtagtgtttcagatgccaatcggtgagatcttcaaggttatcgcgttactgctttctggtggtttctaa

SEQ ID NO: 435591 - DNA, 594 bp, Serratia marcescens
atgaccgtggtgtttatgctgtttgaagtgcagctgctgccttataagctgcagcaggcgctggataagccgaatgaaggcctcgccgcgatgcggcgggcgctggacggcgtgacgcgttatctggtgattaaaaccatcatcagcctggccaccggggtgatcgtctggatcttcctggcggcggtcggcgtacgcttcgcctttatctgggggctgctggcgtttctgctcaactatattcccaatatcggctcggtattggccgccattccgccgctgattcaggcgctgctgttcaacggattgggtgatgcgctggtggtggcgggaggttttatcgcaatcaacatggtgatcggcaatatcctcgaaccgcgggtgatggggcgcgggctggggttgtcgacgctggtggtgttcctgtcgctgattttttggggctggctgctcggcccggtcggcatgctgctgtcggtgccgctgacaattgtggcgcgcatcgcgctggagaccaccgagggcggctatcggctggcggttatcctgggcgacggccgccctccgcgccagcctccggcagagccggagtga

SEQ ID NO: 435592 - DNA, 318 bp, Serratia marcescens; identical to SEQ ID NO: 435481

SEQ ID NO: 435593 - DNA, 540 bp, Serratia marcescens
gtggaacaacggccggcattaccgggcctggggccggccggccggatcaatgacgctttcagcgtcagcatcaccgatggccgcacggcaaaccagctggccgagcagacggcggcggatgcctttgtagtcgatgtcgccctgaattacgccgacacggcgtatctggtggcagcgcacagccgccatgcctctgcagccaataaagcgctgttcttacgcctgctgcacacggcaatcccgcaggttgaatttatcaaggattccccggcgctgatcgtcgcccgcgtcctcagcagcctaatcaacgagtcggtgatcatggtggaaagcggcgtctgcagccgggaagacatcgatgtcgccgccgtcgccggcgttaactacgccgacggcattttcggctggctagatagcctgggggagaaaaacgtcaggacgacgctgagcaacctggcgcagctgctgcacgcagcacgctatgcgccgcattacacccttctgcacgccgcgcaacctgcgctgacgaccacgtcttaa

SEQ ID NO: 435594 - DNA, 1212 bp, Serratia marcescens
atgagcgtactgaacattcttgaagaaaagctggcggaaaccaaaaaacaggggcgttttcgcgagttcctcaaccttgaacgcggcgtacaggacaaaccctgggccaccagccacggacagcaaggtgagcgccgtctcaacgtctggtgctcgaacgactatctggcgatgagccaccaccccaaagtgctgctggccaccaccgaagcggttaaccgggtcgggttgggcacctgcggcgcccgcagcatttccggcacctctgtctaccacagcgaactggaaacgctgctggccagcgcttacggcaaagaatcggctctgctgttcactaccggtttcggcgccaacgacgccaccttgtccaccctgtgtgacgccattcccgatctgatcgtattctccgacgagctgaatcacgcctcgatgatttacggtatccgctacagcaaggcggagaaaaagatcttccgccacaacgatgtggcacacctcgccgagctgctgcaggccgccgatccggcgcggccaaagctgatcgccttcgagtcgctgtattccatggacggtgacttcgctcccttggcacagatcgtggcgctggcggaacagtatcaggcgctgacctatctcgacgagatccactccgccggcgtctatggcgaacgggggctgggctacgccgaacagctgggcctgctggataaaatcaccattattcagggcggtttcggcaagtcttacggtgcggcgggcggctatatcgccgcaccccgctcggtggtggaggcggtgcgcagctgggccccggcattcgtcttcagcacctcgtcaccggcgccggtggtggccgccgcgctggccagttttaaatacaacctcgagcatgacacccagcgcaagcacctgctggcgatcgtcgatcatctgaaaaccggcctgcgcgccgccggcattccgctggtgtcggccgacagccatatcctgccgctgcgggtcggcgatccgcaccgcaacaaacacatcagcaaagtactgctcgatgagcatgatatttacgtgcagccggtcaatgcgccgacggtgcccgcaggcagcgagcggctgcgggtaacgccaacctcggcgcactcccatgccgacgtggagacgttcctggcggcgctgggacgggtctgggcggtgaacgatctgcggagggcaggatga

SEQ ID NO: 435595 - DNA, 1173 bp, Serratia marcescens
atgaagttagcggattataacggccatctggtcacgctctgtctaatggcaaccggtacgttcgccatcggcaccgacgcctttatcgtggccggcgtgctcagtgacatttccgatacctttgccgtcagccccgcgcaagcggggcagttgatatcggtattcgcgctggcttatatgctgttcgcgccactgaccgcctggctgctcggcaacgtcaaccgcaagcatatcctgcagttggcgctggtactgttcatcgccggcaatctggcctgcgcctgggccaccagctacctgcagatctcgttcggcagagtgctggccgcattgggagcggcctgttacacgccgcaggccgccgccgccgccgtggggctggtggcggaaaaacgccgcggcctggccatttccatcgtctatgggggcatgacgttggctattgcgctcggtattccattcggtacctttctcgccaaactgatcggctggcgtgagatattcctgttcatcgccctgttgggggcaattgcgctgctgggcctttcgctggcgctgcgcgccattgcgccaccgggcaagcattcactgaaagagcggctcgccccgctgcggcaaaaggcggtgctgactacgctgctgatcaccttttttgccgtttgctcggaacacatcgtctatagctacgtcagcgtcttgctgaaaaacacccagttcggcccgcaggcgattctgcccctcgcgctgctggtgttcggtattggcgcggtgatcggcaattttgcctccggtgcgttaaccgatgccctcggcagcaagtttgtgctgctgttttccgtggcgctccagacgctgtccctgtttctgctggccttttatgtcacttccccctggtgggtactggccatcttcctggtctggggcattaccggctggatgtatttggtgccgatccaacatcacctgttgtcgctgtcgaaacgctttggcgcgctgaccgtgtcgctcaacagctcggtgctgtacgccggcatcgcggcgggcggcatgctgggcggcctgacgctctacgcgctgccggcccattacctgccgctgttttcgctgccgctcggcgccatcgccctgctgctgacgctgctgtttttccggggagagaccaacaatgaatga

SEQ ID NO: 435596 - DNA, 318 bp, Serratia marcescens; identical to SEQ ID NO: 435481

SEQ ID NO: 435597 - DNA, 576 bp, Serratia marcescens
atgtggctcatacgcttcgaccgagccaggggccgaaggcgcggcccctggcaacccgcgcctttgccctatcagacggttggctgcgccaacgactctcacttcatcgcgccgcatcacggccggctacgacaggcgtccctgcctgtctcgcctgaaaccgccgtccatggcggtttcgcctatgcatcgcgactgcgttcgacgccttcaagggcgctcaacaccgcgctcatctccaacgcctctaccaagggacaggttgcccggtaccttccagctcgggtgttgacctttagtgcgcatcaccggctgccgagcaagacggcgttgtcaggggcaaccggccagggaaggccggttgaggcgagactaacagggacgtttgtcgcagccgacccgcccgacaacgcagacgcggcgagggtatccgcgcagcggacaggcggtgttaagcaaaggcgcgggtggaggggccgcgccatcggcccctccaattgccgttcgctacggcatcagagaaatgcgaggggtttacggcaattcccctgcacagaacgcccagaggatggataa

SEQ ID NO: 435598 - DNA, 126 bp, Serratia marcescens; identical to SEQ ID NO: 152585

SEQ ID NO: 435599 - DNA, 996 bp, Serratia marcescens
atggcatactgcagatgttacccggccgcactcatgccgggtaacgaactgtgtattgtgatgattttttattacagggggatgatcgtgatcaataagatttgccaggtaattgacggggagtacgtctgcgacattgatatcagtgtggaagaatggaaagctctgttaatgaatgaaaaggtttttgactctaaaagtattgaggcgttaaaaaaatggtatattgaaccaaatcattcctgcacatgtttcgatataggcaaaaagtacgaacagcacagtatgagtgctaatggcgttattaacgggctcggtggtagagttcaaaaagagcttggcagatttgaagttaaagggatcggcaatatagcacctggcacaaaattcattacagtcatgaagagtaaagaaaccggtgaaaaaccaaaaagatacttatggactattcgtgatgaacttgttcaggcaattaaagaactggatttttttgggtcgaaagaaataaccaccaatgagtattactcagacgatgagttgatcaacgccatggaggcgaataatacatttgatgtcgcgcagacatttgaatatacaggggaagctaaaccaaagaaacatgcaacagaagtaaaaaatagcgtctcgtacccaagaagtaaaggggtttcaaaaaatgcactgaacaaagcaggttacagatgtgaagtcgatggcgaacacccaaccttcagaaggcgtaactctcccctgaattatactgaacctcatcacattgtacctatgtccaggcaggatgactttaacacttcgcttgacgtcgaagaaaatataatatcgctgtgttgcaattgccataagcaaattcacctcggacagggatatgaagaaatgcttgagaaaatatataatgagagaaaggagttgttaaaacaggtagctatcgatatatctctggaggatttgattcgctattataaaggacagaacaggtga

SEQ ID NO: 435600 - DNA, 1023 bp, Serratia marcescens; identical to SEQ ID NO: 30132

SEQ ID NO: 435601 - DNA, 1563 bp, Serratia marcescens
atgcctctgatcacgcggcttatgctgcaaaactttaaaaagtttccggaactggacctgcgcttcactcatgaccgtaacattctggtcggggacaatgagtccgggaaaagcacgattctgctggcccttgaccttgtgctgagtgacagccggcaccgggtcgaggcattgggtgtggaatcgctcctgtcccagtcagcagtaaggcagtttcaggaaggtgagcgccgcgccgatcagttacccgtgctgacagctgacgttttcctgagtaatgggggagatcctgacctgaacggcaggcaaaatctggcgggtatcaatgcggatggtctcagaatgcgtattgcaccaatgacggaggaatacggccaggatattcacaatgtactacagcaggatcccgataattttccctatgaatactattccgtgcggttcagcaccttctccggtggtcatttcgccagcttcagacgctatctgcgccatctgctcttagacagtgcacgcatcgataacgagcacgccgcacaggaatatacgcgcacagtttacagcgtcaatgtgccggtggccgatcggtaccggcttgaaaacagttaccggcaacagaaaatgcacttctgcacccggcatctgtcagccataaacgacacgctggaaacgtatcagtttggcgtgcgttccggtgctaaatcagggcttgaggcgaatctggacattaccgaggacggtatttccattcgtcaccgtggaaaaggaaggcagtgcttcatcaaaacggagtttgcgctgcagcggcatcagcagcagggagagctccacgtactgttgcttgaggagccggaaaatcatctcagccatgtcagtatgaagaggctggttaatcagcttgccactgaacggcagacgcaggtgtttattgccacacacagcagccatatctcctcccgcctcgatctgcgtaaggcaatcctcctcgggtctgcccggccggtactgatgaatgaactttccgctgagactgccgccttcttcatgaaagcaccggataataacgtactggaatttgcgctggccagacgtgtgctgctcgtggagggggatgctgagtttattctgatcgaggccttttatcgccgcctgtatggcagggcaccggaggaagacggagttcacatcatcgctatcggcggaacgagtttccgtcgttatcttgaactggcccgtcttctggaaaatcgcgtcgcggcccttcgtgataatgacggcaactatcagcaaaactgcgatgaacgctatgctgacgtgatttgttcccgctcccgggtatttgctgatcgcgataacacccgatccacatttgaaatcagcctgtatcaggataacgctgatctgtgtgatacgcttttcctcggaccccgccggacactcacggtgcaggaatacatgctggccaataaggcagaagcagcattccggctgttacagctgcacgccggagagctgaccgtacctgattatattcaggaggcactggcatggataagagagtga

SEQ ID NO: 435602 - DNA, 402 bp, Serratia marcescens; identical to SEQ ID NO: 214728

SEQ ID NO: 435603 - DNA, 219 bp, Serratia marcescens; identical to SEQ ID NO: 182264

SEQ ID NO: 435604 - DNA, 306 bp, Serratia marcescens; identical to SEQ ID NO: 182263

SEQ ID NO: 435605 - DNA, 312 bp, Serratia marcescens; identical to SEQ ID NO: 143783

SEQ ID NO: 435606 - DNA, 336 bp, Serratia marcescens; identical to SEQ ID NO: 182261

SEQ ID NO: 435607 - DNA, 1017 bp, Serratia marcescens
atgaccgacttcgtgacccggactgttatggacaaaacaatgtggctcgtgacattgccgaagatcattacaaataacagtacccgccaggaggaaaatctggtcgtcattctgagcagggagcaatcgtggggggcaacttctgaccattttcccgacggattgtaccgggtctcctgcataatgacactgtacctggccgataccgaacagacgaagactcagactttcactgcaatctactggcctcaacagaaggccctgcatctgtttacagatgagttcagactggaacgccgcctgcagggacacggcctgggtagctggatcacgcagcagtttgtgctctgggccagaggccttccgccagaaaccagggttttgccgattgaaatttcccaggttgatgaaaaaaacgaagaaaacaagatccggagggacagactgtggcacgcaatgggtttccggttcccggccggggaaaccagctcaatgccgctgcgggcagacgaactacagttgccgcggggcaggtattcaacgctccgggtggagcccctggtatccgcggtacgccggctggaagactgttatcgcgggctgcaggaaaaaatcgtgcagctcgaaggcaaaaaacggtcgcaaaaacagttaattacttcacttaagaatcgtccattttatcatctgttgcacaggaaagggggccagctcccggacgagaaatgtgacgccctgccactgcgggcagaaaaactgtctctgccgcagagcggggattcagacctggaggtggcgcaacgggcaaccggggtcatccggctggctaccctgtgtgctcagtcgcagaaaagaatcctggagctggaaagggagcttgcctcgcaaagtgaggagctcgttgacctgcaggcacatcccttttttaacctgcgggataaataccgcggccagatcctgttctggggatgggggatgggttttctgtgctttatctactggatgttagtgtcatga

SEQ ID NO: 435608 - DNA, 258 bp, Serratia marcescens
atgaaacttcaagatatacagataggtaataccgtaaggagtggccttaattctttcactggtggggtgattattcgtgatacaaaggtattgatcacgctcaatctcccggatggacagaaaaccactattgagggggaatggcggcatatgtcagacgccaacagattgtcagaacgtattacgatgcttcagcatgcgatctatgagcagtatgaggaatacagagcagatattcccgtcagctggtccagataa

SEQ ID NO: 435609 - DNA, 1026 bp, Serratia marcescens
atgaacgttaaaactattggaatcgatttggcaaaaaacgttttccagatccatggggttgacgagcacggaaaacggttgttcaacaaacaactcagacgggcacaaatggcctccttttttgccaacatcccaccctgtttgatcggcatggaggcctgtgcatctgctcatttctgggccaataaactgatatcgatgggccataatgtcaaactgatggcccctcagttcgtcaaaccctatgttaaaaccaataagcatgatgctgcagacactgaagctatttgtgaagccgtcactcgacctaacatgcggttcgtgccggtcaaaaccgctgagcagcaagccgtattggcacttcaccggagtcgtcagagcttcatcaaacagcgaaccgcacaagccaatcaaatcagggggttattggccgaatttggcattgtcgtcccccgaggtatccagcagctacagcgacgattacctgagctcgtggaagatgcggataacccgttacccgtcctgtttcgtacacagctgagtctactacagcaccacatggcgtacctgttcgatgtcatcgctacactcgacaagcagattgagcagtgctatcggcaaaatgctctctgccagcgtatcggcaagatccctggtattggccctgttaccgccagcgcgctgattgcgaccattggtaaagccaacaatttcgagaatggccgacaactggctgcctggctcggattggttccacgtcagcactccagtgggggtaaacaagtcctgctcgggataagcaagcgaggtgatacctatttgaggaccttgcttatccatggtgccagggcggtattgcagtcggcagaacataaacaggatgccgtatcgagctgggctaaccagctaatggcgcgccggaataacaacattgcctcggtagcattggctaacaagaatgcgcggactgtgtgggcgctcctggccaaagagcgggagtattgtgcaccaataataagcgcttaa

SEQ ID NO: 435610 - DNA, 555 bp, Serratia marcescens
atgaaaagagtagttaagtttggcatcatcggaatacctttaatagcctctctctgtgcaatatacgcttttatgttcccaagaacaccagatactcaaaagacagatgatatcattggcatatggacatcagattattcatatgatattggagggattatagttagagtaaatggcgagacatcatacttttctaatggaaaatacaatgttaatgctgatatgtcttttcaaccagatagcacaaccataataacctttgctactaatggtgctggagattggaatattcacggcaaagaattgataacaacacttaatactctaaagtctgctcccactaaaatggtttataaagggaaagtattggaatctcaagattttgatatgatggaacgaatttccaatcagaaaattaaaaccatagaagatttcacagcacctggagcaagtcagtcttatactataaaaaatgatgaccatgacataaagctattagaagccataaatcccttcggcaaaaacttcaacatagagatgtatagaaaaaaatag

SEQ ID NO: 435611 - DNA, 312 bp, Serratia marcescens
atgccactagaccatggaattcttaatttaccgctcagcaagcgcggcaatttccataaagaacttgatgaccacttgaaagaagaaaaacaacgcaaagcgcgagagattttcgatgccaaggcggaatttgaagaagcaaagcgagtggcaaaatcattgtttgaagttatggacgcagacttgattaagcaggaagcaaaacgccgagggataaaaacgtcagagctaaagcaagtattgcgtgacattagagatttcaagcctcgattagcaccaaaagctttcgagatatttatcaaagccgcctag

SEQ ID NO: 435612 - DNA, 207 bp, Serratia marcescens
atggataaggttgatgagtttttcgaacaggcgcacccgcacgtagttacggtgctgggaacggcgctcatgcagcttctggtggatgacgcggagttatcaagggagtcattgatagagatgatacaggtgctgtatcaagatgatgatgttgacttggctgtggggctagcgatggatgtgctggctttgccgcgagggaagtag

SEQ ID NO: 435613 - DNA, 468 bp, Serratia marcescens
atgtcacgctctgtatatgttaagaaagatagcctcgttgccaacgaagaatttaacgtgcataatttggacactggccatagtggcggcaatggcggaggtggcgacgtgacagagcgattagagcgtcttgaaaggaaagttgactcgatagagtctacattgtcgcgcctgaacgaaaacatgaatcgtttagaatcaaagattgaacttcaatctgttaaattcacaggctctctcgacctgcaatctcaaaagctatcatccgccttagaattacaagcccagaagctttcagcggcactggaactgcaatcccagaaattgaccgatgccattgataaacaggcaatcatttttgacggaaagttgaaggatcagaaattaagtataatcctttggattcttgggttgccaagcttagtgttcacggtttacaaaatttacgaggcactaaagccaagctag

SEQ ID NO: 435614 - DNA, 498 bp, Serratia marcescens
atgtctctagccgccgcccttgggtgctctccttcgcatattctctatggagatggtatcgatgggaatgttacctatgttgcgccatatgtggctggcagccgctacccagtgataagctctgttcaggcaggcgcatgggcggaagcctgtgagccttatacgctgaaagatattgacctgtggctagagtctgatgcgcacattcagggcgaggcattttggctggaggtggaaggtgactccatgaccgcccctattgggcttagtattccagaaggaactttcgttttgttcgatactggtcgtgatccagtcaatggcagccttgtgattgcaaaactgattgaggataacgaggctacgttcaagaagctggtgatcgacggcagcaagaagttcctgcgcgggctaaacccacactggcctatggttcccattaatggtaactgcaagatcataggtgtggcagtagagactaagatgcgcttggtgtag

SEQ ID NO: 435615 - DNA, 186 bp, Serratia marcescens
atgctgaaagaagcagcgactaaacacttcggatcccaacatgcgatagcaattgcactaggcgtaagcgattcagccgtatctcagtggaaagaaattattcctgagaaggccgcgtttaagcttcaggcgattacaaatggggaactgaagtacatggctgagctatacaagaaagccgcataa

SEQ ID NO: 435616 - DNA, 900 bp, Serratia marcescens
atgggcgtcgttagaaaattatccgactacaggcagcaggagcgccacgtagagacaccggaggcagccggtaaggggtttgccttgattcatcgtcaattcatggatagcaagctgtacaaggactctcaggcggtacacctgtggcttcacctgatactgaaagcaaactactctccagcggttgttaaaaccgacgtcggggaaatgatggtcggaagagggcagctgattactgggcgtccaaccctggtgtccgagacgttcattcctgacaacaaagttaagagcctgctccgtagtttcgagtcaaaagggatgttaaaaatcgaggctatgggcaggaaatttagcctgattaccatcctaaaatatgacgattttcaggctcaaaattgtccaacggatgtccaacgattgtccaacgctaacgccagtgaaaatgcggctctcagagatgattgtccaacggatgtccaacgattgtccataaacaacaatataaataataactcattaggtaaacctaatgagagtgcatcagccagcgaaaaatcagaaaagcaaaaatctgcaatctcatgtcaagacgtcatcgacgcctatcacgaaatcctgccagaagcgaaatcggtcagagcgctaaccgagaaacgtcgcagctcgattaaaaccttctggcgaaaagctggggtggttactcgtcagctggatggccatgggttcacgatggacgactggcggaaatacctgagctacgttcgcgacaactgtcgctggatgttcgaagagcgccagaaccagcagcgcgggactgtttggcacaagaagggatttgacttcctgctgaacgacaatgtttatctcaaggttcgtgagggcgatcatgacgaccgctga

SEQ ID NO: 435617 - DNA, 1413 bp, Serratia marcescens
atgacgaccgctgattaccggctgccaccgagcagcatcgagtcagagcaatcagtgcttggctcaatcctactagacgcgcagagcgaccgagttcagcgcgttttttctttcctggcacctgaaatgttctacagcccggctcactcagtgatttaccgcactgcacgcgagatgaactcgaagagcagcgttatcgacctgatcaccgttgctgagcgcatggagtctactggagagattgaccgagttggtggcttcgcctatctggctgagctttccaagaacacgccaagcgccgcgaatattctggcatacgctaatcgcgtgaaggattgcgctatggagcgtttcgctatcgagcaggccaacaagatgcttgaggtgttctatcagccatcagcgatgaccactgccgagaaactggagcacatgcaggcactggctatgcggattgacgacaaaacccggtcaggaagctatcgcggtttggttccattctccgaagtgttccaggagtggatgaacgtagtcgatggccgcttgagcaaagaccccgcaacgattggcttaacgtctggtatcaaggcgctggatgacatgctggagcctaagcggatcgtcaagggctcgctgtttgtcgttggcgctcgccccaaaatgggtaagaccacgctttacacgacaatggctatcaactgcgcactgaacgaaggcctgccagcgctggcgtttagcctggaaatgccgagggtgcagcttgctgagaacatgatcagccagaactcgcgggttaactcgaaagtgttttatctggaagattacgacgacaacaagttcgcaatggcctcagagaaaggtctagaactggcacagaatgggaatttgtacatcgatgacactccgggattacctctttctcacatcgttgctgagtctcgccgcattaagcgagagcgcggggctgtgggcatggttttggtggattacctcacactcatgaaggccgagaaggcggagcgtaacgacctagcctacggcatgattaccaagggactaaagaaccttgccaaagagcttaattgcgtcgttgttctgctgacacagcttaaccgtgaccttgagaaacgcaccaacaagcgcccgctccccagtgactcccgcgacaccggtcaaatcgagcaggattgcgattactggcttgggatttatcgaggtggagcatacgacgagaacgctaatcaggccgagacagagtacctgctgagactgaaccggcatggcgagtccggcgttatttatgcagatcagcgtcacggtgtgatttacgaagttgaccaggggcaggcaaaagctaaagcacttgcagccgaagctgaatcccgaccatcaaaacagaagggcggtttctga

SEQ ID NO: 435618 - DNA, 258 bp, Serratia marcescens
atgaaagacgcaaattttactgattggatggttatcggactgatggttattagctacctgttcattttggtgcaggcatggaagtgggtggtgctcaatattgccaaccggttcgatcggtttataaaccggaacaacccaaagcaattagccatcaacgcactgtgtgatgcctttgaattgcagaaactgaagcaaggcgaacgaatcaccgcaaaaacagttaacggtctgtgcatcaggatatctcgggagtag

SEQ ID NO: 435619 - DNA, 447 bp, Serratia marcescens
atggatgacttttgtctccataaaaccaccctaggccaattcaccaaacaactcttcgacctcatctccagcggcaaacgctaccgagtaaaaatatccgaatggcgtgacaagcgcagccttcctcagaactcactccaacacatgtggtatgcagagctaagcgcttatctcattaagcgtggtaagccatttgcgtctccagaatgggtgaaggatgcgatgaaacacacatacctcggatatgaagagcgcgaaatggtggatgtggttacgggtgagaaaaccattattcgatcgcttcggcacacagcagaccttgattcgggcgacatgcatttctacctgaaccaggttgaaggctgggcgttgaatatcggctgcaggttaacgattcctgctgatagcgagtacaaccaactcaaacagaaacaggtggcctggtga

SEQ ID NO: 435620 - DNA, 180 bp, Serratia marcescens
atgctaatcctcatctccatagcaatcttagccgcctgcgcttactgcttcatcgctggccgcagctttgagttcttctgcaaatacgagccaaccctatcaaccacaaagatgctgctactcagcctcgcatggacgggtaatgccgttctgtttctgctgatgaggtgtgtgcgatga

SEQ ID NO: 435621 - DNA, 585 bp, Serratia marcescens
atggctaaaggcattaagccgccgaagcccaaggcctgccgacaatgcaaagccaagttcactcctcgcaacacccttcaaatcgtctgtagtccatcctgtgcaatccaacacgcaaagcagcaatcagagcgcaagcaaaagcaatctgaggcatctgcacgccgtgagtggaacaagcgcaaggctgacgcgaagccgttgaagcactgggaggatttaacccagcgcgtggttaatgactacatcacgaagggaagggatgtaaacgagccgtgcatcagttgcggaacgtgggagacggtgcaatgggaggcggggcatttccggtcaagaggagcggcatcacaccttaggtacaacgaaaacaacatccacaaacaatgtcatcggtgcaatgccgaactatcaggaaactccgtccaataccgcattcgcttagtaatgaaaatcgggcttgagagtgttcgagcgctagaaaatgacaataaaccacaccgatatacccgcgaagagctcgaggcgattagagcgcgttacagagcgaaattgcgcgatctgaaaaaactacaggaggcggcatga

SEQ ID NO: 435622 - DNA, 144 bp, Serratia marcescens
atgaacaaatccttcgaagcaatgatgcgtcttaagtatgggaataaatatgaccttactcgcgattgggatgggtattacgcaagggaagtagtgcggcgaatgtttgaggtgtattgcgaatgcaaggggcaggcggcatga

SEQ ID NO: 435623 - DNA, 210 bp, Serratia marcescens
atgcaaggggcaggcggcatgaatcttcagacaatcccggaactgctggtctcctctcgaggaaacatgtccgccgttgcgcgcaagcttcaatgtcagcgacacacggttgctaactatgcaagagacttcaaggcggagcgccattgcgtcgtcaacggcgtcctgatgacaaagtcaaaacagaagggtaagcgtcatgaagactga

SEQ ID NO: 435624 - DNA, 603 bp, Serratia marcescens
atgaagactgatgtatggcatcaattagcctcggcaccaaggaaaagttatctcggcaagaccaaaaagctttcccctgtgcaggagcgctggatacgctcagtgcttcacatgtggggagaatatgccggaggaaataccgctccaacgactgcctgcggcgtaatcggcaggctgatgatatccactcattgggatgaaaacagcggctccaaaatcattcaaaccgtcgagcacttgtatgaaaacggctaccgcggcaccgagctgtttttgaaagccaaggagataatcaacccgagaaactcatttgccaacatcctgcgtctcgccaaagaaggggaagaaggaaaatttatcgacggtgtaatctgcgaagtgttcagtcaatccagtccaatccgcgcggtagcaattaagtattattgtgaccgagaagatatgcaaagtatcgcaaactatctgaaccgtgtttacgcgccggggttaacaaccaagcaatgcatagatcgcgttcggtggtgtagagagatatttcacgagacgatgtatgcaaagttggctgctaacgtgtcgctaaaaagtgagaagctggcagcataa

SEQ ID NO: 435625 - DNA, 504 bp, Serratia marcescens
atggcgggttatcgtgaaaatgggcgaccggtaacagcgtcaactgctcccggccattctgctcatgcttcgaatcacgaacaaaaccaaggcccatcaagtctgtacagactgattgagtgtaacgggatttgttcagatatcaacgtaactaatctgatagatccccgtaattgggggtggaatatgaaaatgcccgataaagaccctaatagcatcgcaggaatatcatggctaatcatgcttggcttctcatgctggggcgggttggttcggtacctgattgacgtaaaacaaaacaaagcttcatggagttggattaacgcaattgcacaaattgctgtgtctgggttcactggggtgcttggcggattaattagcgtagaaagcggattaagtttttacatgatattggcaacctctgggatcagtggggcgatgggttctatagcgcttagttatttctgggaaagaatcacgggggtgaaggatgcaagtaagtaa

SEQ ID NO: 435626 - DNA, 441 bp, Serratia marcescens
atgcaagtaagtaacaagggcatctccctgataaagcagttcgaaggctgcgaactaaatgcctaccaagacagtgttggcgtgtggacgattggctatggctggactcaacctgttgacggcagaaagattggctcgggaatgttgattgaccaggcgacagcggaacgcttgcttaagtgcggccttgttcaatatgagcagggagtaaaccaactggtgaaggtgatcatcacccagggccagttcgatgcattggtaagttttgcctacaacctcggcttgcgctccctgagcgcatccactcttctccgcaagctgaatgctggcgatcagcagggtgctgcagatgagtttggtaaatgggtgaatgcaggcggcgtccggttgaatggcttggttaagcgccgcgaagcagagcgcaagttgttcttgtcatga

SEQ ID NO: 435627 - DNA, 411 bp, Serratia marcescens
atgaatgccatcatgtttattcgtgcctactggaaacagcttgccctgactgtcttggtgttcacgcttctcgcagtatgttggattgccagccactaccatgccaaagcgctgcagctcacaaaggacgccaaagagttatcagcccaaatcaccagccagcaagccatcatcacaaaacagattcaacatgcgcagcagttcaactcgatcgccgcaggagtcgaaagtgaaaagcaacaaaccactgacaccggagataaagtccgggtggtgtacaagaccaagatggcaagctctccctgcgctgtcagccctgttaatagcgatgtctctgccagcctgtacaaccacgcaagtaaagtacgtagcggccccggtgacaccaatcccagaaagtctgaccgctaa

SEQ ID NO: 435628 - DNA, 798 bp, Serratia marcescens
atggtgcatatggttccagacgggttccaggtacgtggagtgtcgacgctttacgacaaagacggcatcaagtctgcacaatgggtgaaatcctcaatcgatgctcagcgtcaattagagctgatgcaggaagccgtaaaggctatggcagaggatttgcctcgcgtgaaatcgacgccgaggccaatctttgccaatgaaaatcttcttgatctctatgttatcaccgattaccacctaggcatgctggcttggaaccaagaggcgggcgatgactgggatgttggcattgcggaagatctgctgctgaaatggttccgagctgccatcgcatcggcaccaggtagcaaggttggcgttctggccaacctcggcgacttccttcactgggatgggctcgatgctgtaactccatcatctgggcacgttctcgatgcagacacgcggttccaaaagctggtgcgcgtagctatccgggtaatccgccaaattatcgacatgctgcttgctaagcatgagatccttcacgtcattatggcggaaggaaatcatgacatggcttccagtatctggctgcgagaatggctatcagcaatctacgagaaagagccgcggatcacagtagatcgtaacccagacccgtattactgctacgagtttggtaacacctcactgttcttccaccacggacacaaatcaaagcaagccagcctggatagcgtattggtggccaaataccgcgatgtgttcggaagaactaagcatagctatgcgcactgcggccatttgcatcactaa

SEQ ID NO: 435629 - DNA, 153 bp, Serratia marcescens
atggtggtagagcagcatcgcaccctggcggccaaagatgcctatgcaagccgaggcggctggatgagcggacgagatgcgaaggtcattacctatcacaaagaacatggaaaggtatctgagctgacgatcagcccatcaatggttgcatga

SEQ ID NO: 435630 - DNA, 225 bp, Serratia marcescens
atgggtgaatacgaagaagcatcggtaccaatagaaaaccatccactcatcggcaccaaattagggatccgcgtagacaagcttgacctagattgcaccctgcaggttgaaagcgtctggatagacgaagatggcgacatatcagtctatgagctcgtaagtcctctgattgacggactagatcacctcgaagctcctatcgaatacacaaacacaattcattga

SEQ ID NO: 435631 - DNA, 162 bp, Serratia marcescens
atgatcaccatgagggtggtcgcacaaaagcggtggtgggtaaatccattgctgtccgtgcttaaggctgtcgtctatgcacacatagtgaaagagaaacacttcaaatccctggcatgcttcatcgctcgatggggatttaagttcaaagcagagaaataa

SEQ ID NO: 435632 - DNA, 477 bp, Serratia marcescens
atggctaggccaaccaagtaccagaaggcgtacgccgagcaggctcgcaagctgtgcatgcttggctacaccgatgctcaattagcagacttcttcgaggtctctgaagcaactatcaatacgtggaagaaagaacacccagagtttctggagtccgtaaaaaagggcaaagacctagttgacgctgaagtggtcgatagcctcttccagcgtgcaatgggttatgtagccccggacacagatatccgcgtcattgataaccagatagtcaaaacgcaaatcaagaagcattaccctcctgatactgcagctgccatcttctggcttaagaacagacagaagaaagactggcgagacaaaattgaccacgctattgagggtgccaatggtggccctgtagaagttgttaattatacagcagcagattacgcagcagctcaggcagcaatggaggagaaactaaaaggcctggactga

SEQ ID NO: 435633 - DNA, 204 bp, Serratia marcescens
gtgcgccgcctcgatgcgctggcgcggcaacgcgggcagaagctgtcgcaaatggcgctggcctgggtgctgcgcggcgatcgcatcacctcggtgctgatcggcgccagcaagaatgcgcagatagaagacgcggtgggcatgctggccaatcgccacttcagtgaagaagagctcgtacagatcgaacaaatcctattgtaa

SEQ ID NO: 435634 - DNA, 318 bp, Serratia marcescens; identical to SEQ ID NO: 435531

SEQ ID NO: 435635 - DNA, 318 bp, Serratia marcescens
ttgaatgtggtctggctgatgaaaacgacgctgaaagaactgtggtacgccccgagtgaacaagaggcgcagagacgctggacaagctggtacaggcagtctcaggaaagcggaatcaaggcgttacaacacttcgccgagaaactgaaagggtatgccggtggcatcatcgcgagtgccagacacaggttgaataccagcgtgctggaagggatgaacaataagataaaagtgatgaagcggatggcctatggataccgggataacgcttacttcttcctgaaaatcaaagcagcgttccccggtaaagcgcgatga

SEQ ID NO: 435636 - DNA, 3147 bp, Serratia marcescens; identical to SEQ ID NO: 214330

SEQ ID NO: 435637 - DNA, 318 bp, Serratia marcescens; identical to SEQ ID NO: 435481

SEQ ID NO: 435638 - DNA, 312 bp, Serratia marcescens
atgcagacgatatcacttcaaccggttaagggtcagacactgcaggtgtcgcttggagggcagcgtgtaactctaaggattaaccagagaagcaccggcatgtttatcgatgtggcgttaagcggggtatggatagctcagggggtgctttgcctgaactgcaataaaatcatcagatacccttacctgaagtttaagggagagttgttctttgcagatactaaaggcgatttggatcctgtttatgacgagctaggttcacgcttcaaacttttctacgccacggaagaagagatgagcaatgtcctataa

SEQ ID NO: 435639 - DNA, 861 bp, Serratia marcescens
atgtcctataaaaagcgcaacattaaaatccagttcactcttactgaccaggtatttgatggttcacagggtccatcgcaggacaatgtactcaccatagaaaatgctaaagccatcgttgaatacaacgggtatggcggatctgcgcttaccacgctttcatgtcgggtttatggtcttagcctgagcaacatggcgaagcttagctatgctgggaaccttaggggaccaacgaagaataactacatgaaggtctgggcgcaggatgagcttatctttgtcggatcgataacgttcgccacaactgactttaatgaggcacctgatgctcctttggtcattgaggctcatgcgcttggtgcagaaaggtctctcccgtcacaaccattctctgtggaaggaagcgtcgatgttatcgatgcgatcaagtctattgccaaccctctaggaattatggtttctgtgctagaggatattaagtttcctctaagtaaccctcatgtagttggcgaccctgtaagccaaattattcagttggcaaaatccgcaaatctgaatattgactgcagtactgggattattcgcatctggtcaattaaaggagcgtgggatgacattgttccgcttgtctcaaaagagtatggattgattggctatcctacgtggacaagagatggcctctacctaacgaccatgttctcatcaaacctgatagcacccagaaagatgaagctcgaaacagatcttcccggagcttctggaatgtacaccataaatactgtaagacacatcatctcggcttgggtggaaggcggcccgtggttttcatttgttgtggcgaatcaagaggcagagctgtaa

SEQ ID NO: 435640 - DNA, 708 bp, Serratia marcescens
atgacaaagaaaggtgaattttcctttaagcctcaggatgtaaactgcgaggcaaacattaacgaatttattttcaacacgttaatgtcacgaaacgccttcatccagctcgttatcgtaaataaggtaaaggaaggcccgctactcgatgtcactccactggtaagtggatttgctgctgatggttcaaggaatagcaatactccggtattcaatgtgccagtatggcggcttcagcgcggtgctagcgcagtgattatggatccagtggaaggtgatataggactcctgctctgctgcgacagggacatcaccaacgtcaggggcgagaaaaaagaatccctcccggcatctctgcgagtacacaacaaatcagatggtatttatctcggtggggtgctgaacgccgaaccaagccagtatgtgaagttttccaatggtgggattgatattgtctctcctctggttgtgctggtgaatgggaaaacagttgttgttaatgctgatgataaaatatccctgaatgcccccatcattgaggcaaacggacagcttgctcagggctccggtagctttggtggcaacgcaacattcggaggagcgattactgccaccggagaggtcacaggaaacggcatccaccttagtacgcacaagcatggtggcgtggaaactggcgggggccagacaagcacaccgacaaactaa

SEQ ID NO: 435641 - DNA, 357 bp, Serratia marcescens
atgctcaccaaatcactgcttttgacagaccagtgggatatcacgctagacgacaccggaagcattgcaatcacagcaaacccgtacgcagtcgcgcaggacgtagcgtgcgcgtgctcaacattcatcggtgagccctggtatgacactacactgggaattccttactatgagcgcattctcggtcactggccgggaactcagctcattaatacaaagatggttactgaggccaaaaaactaccctatgtacagtctgcattctgcagcacaacagttggcaaagcagatcgcattgcttcaggtgtcatgacaataacagacacgaacaacgtacagaccaaaattcaattctga

SEQ ID NO: 435642 - DNA, 1236 bp, Serratia marcescens
atggctgaagtaatagttagcacagccgtcccctctgtcacgttttccgccaccggcattgccgttcctgatgagatagacattctcaacgggcgattaactgaccttgataccgccatgggcggagggatgagtaagagtcttacgactccgcaagggcagattgccatgagtgacacggcaattatcgcagacaagaacgacaacctagcgtggctggtaaatcaggttaatcctgacttttctgaaggccgaatgcaggatgcgatcgggcggatttacttcattgatcgtatcgcagcaattggcacgactgtgacggcgacctgcacaggacttgttggggctgttatcccggccaacagcattgcacaggacattagtggatatctgtactattcgctggcagacgctacaattccagcatcaggagcggtagatgtagtttttcagaaccaaacatcgggggcaatagcctgtccgatcggcgcacttaatactatttatagggctgtaactggttggtcaagtgtaagcaatttagcagctggcgtgcttggtaatgaagttgaggggcgggctaactttgaatatcgtcggaaacaatcagttgcaaagaacgctagaaacacattggcatctgtctatgcagcagtattggcagtggatggcgtttcagatgcttatattaccgacaataaaaccagctcaaacgtaaacaagggcgtaacgaactacagcgtattagctcattctatttacgtagcagtctatggtggctcagaaagcggagtaggaaacgcaatattaaattccgcccctccagccgtcaacatgaacggaacgactacattcgtcgttcaggatgacgaaaactatgtttacccatatcctgaatacactattaaatgggtaaccccagctgctgttagcgtgcatttcaaggttgaaatagaaagcaacgactctctcccatcaaatatcacgtcgcttgtgcaacaagcaatcatcaatgcatttagcggtgaagatggcgggactagggcgagaattggttcaaagatattctctgggcgatactattcaggggtgcaatctattgatcaatcaaatatcaatatccttgggatatcgctatctaaagatggaacaacattttcgtcgtctatagagtttggcattgatcaaataccaacgatagatgcatccaatatagtcgtaaacttggtggcgtga

SEQ ID NO: 435643 - DNA, 588 bp, Serratia marcescens
atggatactccagaagacacaattatttctcagtatgcaggaagtccaaagctaagaggcattattgagacgttcaatacaatcatggatacagtgaatttcatagataacttccatgatatgatttggaatatagaaaccgccgacacatacggacttgatgtatggggtaaaatagttgtagttagccggctgttaacagttacaccacgtgataagttttttggttttgtagaggccaacaacacaactccagtaatggatgatccacagccttttgatcagtatccgttctacacaggagatcaacaaaattccactgtgtctcttacaaatgacgcatatcgcaagttaatcatgttaaaagcgatggcgaacatcactgattgcacaataccaaacattaataaaatgctcatgtacatgtttggaagtagtgggaaggcctatgttaggaatgatggtggaatggtaatgacgtatgttttcgagtttcaactttccacagtagagcttgcaatagttcaaagctctggggcgttaccgtcaccagctggtgttacagtaaatattgaacagcgggtataa

SEQ ID NO: 435644 - DNA, 1350 bp, Serratia marcescens
atgaattcatcagacatcccatcacgcacactaaaagctttttccgtaaatggagagaaaaatagtatacctgttgattcatctagctcaacacttgcagatggtgacgcaacatttgatagcggcttcccgcccctgacaatgacacccattggcgctggcgggaagccgccaaaaggcaaagacatgaacggaattttatattccgtgactttaaaacagcgctggcaagatgcagggatggggtatccattcgattcagcattttctactgtggctggcggatatcctaagggggcaattttacccaatagttcattaagtggaacctggattaacacaacagaatcaaacaacaataatccagaagtgagcacggcaacatctactggctgggtgccactatctagctatggacaaacagtagtaacactttccaatgtgaactacacaatgtctacgttgcaggcgtccagagaaagaatcgttttaaacggaacgctaacggcaaacatttatctttatctgccaccatggattaaagagtggacagtagaaaacaatacctctggaaatttctacgtaacattaattaccactcagacaggtgcggctggatactcaagttatccaaacgaaatagttaaagtcagatgtgatggcgtaaatatcttcaggaactcaacagaaccaggccggttgatatcaataaagacttactcaactgcaggggcgtacacctacaccccatcaagagggacaaactcaatagaggttgaggtgattggaggcggaggcggaggcggaggtgctcgagccacatcctctggatatattgccggaggaggaggagggggaggcggagggtatgcgagaggaatgctgaccaccggctttaggtctggggtttcagtaactgtaggcgctggcggtaacggcggtgtgaataccggagcttcatcatctggcggcgcatctacatttggcggactcatcacagcatctggtgggagcggtggtagcggctctaatgaagaacagcatgccgccggtagtacagtccagtatgccggtggcgcaggtggcattggatctggtggcagctatgttaacgcagcaggaggcccaggcggcagcatgcttatcacagttatcagcaacaccatagcgggtagcggaggcagcagcttcatgtctgggggtgccacgccagcacaaggcaatagttctggtgttggtggcgcatatggtgcgggcggtgctggcgcgctatctcaatcaaaccctgggagcttcttcactggtggtcgaggtggtgacggagttgtcatcataaaagaatattcatag

SEQ ID NO: 435645 - DNA, 1992 bp, Serratia marcescens
atggcaatttccgatactaagtcagcgcaaaaatatgcatctattgccgaggttgccgccgctgaggcaaagtcctactctgaagatgccaggaagtccgaaagcttctcaaagcaagccaaggaaagcgcagatgccgcgggggtgtctgcggtaaattctgcggagtcggcagatgcatccaaagcatctgcgcaggaagcggcaaattcatccagtgaggcactagtaagcgcaaataattccgcaacatctgcgaaaaatgcatctatatcggctaatgtatataccagcaaggcactcgcgcaggctgcaattgatgcaggaacaataccattaaatgcattgttcgccgtatcaatctctggatctgaaaattatcaggagcaatatactaatacagccggagtggcgacaccgactggaaaggttcttaaagacggtgtatacattgaagcgctttcttatgaaattgataatgttaaatacatcttgccaggatatcatcaaccatcatctttagtcgccctttttgaggatgaaagcggcaatgtcccactctatcttgatgacggtgcagttgcatttcctgcaatagagaccggaacggctcaaaatgtaattaacaccagcgagtcattcccgcaaagggatatggattcacaactaattgcactttacgaagatgaaaacggaaatgttccattaagtttggttgatggaaagttttccgccgcaggcattgaaacggcaacagcagatttatcaatagactcttcaaattctttcccgccatatcgaatgagccctagcaaagttgcattgcacgttgatgaagcgggcaatgttccactatgccttgtagatggtaaattggaggccattccatcagaccaactggcatatgacatcggtgatattatcggaactggtaatagtgttgctgttaggaatacgtctggtagctccctttacttaatgagaattaagaaggcaaaactaaagactggtacaagtgggcgactagttggaatggcagtgggtgattcgtggtctgagttttataacatatcacaagccatggctaatcgcatgtttgctgattttggccccagagctggcgcaggatggttccagttaataattgacccatcttctgtttgggaaaatatgatagttacgaggacaggatggacggaatacgacgccagttactcaaatatgcaaccaccatacggctgtggtgtggatgggattgcttattacaccctatcaaataccgctacagtgtcagtaaccaatgttaaggataacaaaggaactgtattttattacgacggaacaggaacattcgtaattggtgttggaagcacaacaacaactattaccggtacaggcacaggtggttacaaaagtgctcccatacccggcctaactactggtcttgatacattaactataacaactgtgggaaataccggtgttgtatgccttcacggatttatgttcgaaactgatttaaatagtggatgcatgatgcataaatgcggtaacggaggaacatgggccgcacagcatactattttcattacaccaagagttcaatatttcgcacaaaagctcaatccagacttcatcatagtcaacttgggcacaaatgattacctacaaaacagaacgatagccacatatataacggcattgaatggaattatagatgcatggaggtctgcattgcctgatgttgggctaatcctaatatctcccccggtaccaaatgcatccggagccacccctatggtagatttcagagacgcgatgagaacagttgccagggataaatctgtagagtggtatgatctatatggtgatatgcctaaggtgtggtctatcggtaactcactgggatggtggaaggactcgtatcatccgaatgacgttggcgcagcgcaaattgtaaactcactgtttgaactcctaataaaaaaataa

SEQ ID NO: 435646 - DNA, 810 bp, Serratia marcescens
  misc_feature (315)..(324): n is a, c, g, or t
  misc_feature (717)..(726): n is a, c, g, or t
atgaataccaacgtacataagttacgtggcattgtgctaccagctggaccggcttatagaaatatttccgagttcattgtagagaatccttattatgatcttccggtattgagcgggctgattggtgcctattttttatctagccaaatggtaaatccgttaaataatcatgcaaatctttctaagcctttggttaggattggcagccctacggttggcgagaaattcacttcattcagtgacggaaatcaatacgatacacaaattcctgtcggcacggcggcggcggggaatgcatcaatgacaattatcacnnnnnnnnnnacaactgtagatgcatgggccattggaaactatacgggtaataacggcatcagcaatgataatgttttaatgaggaaagataccaaaatggaggtttacacctccaaaggcacagggctagtatctgttgtaacagatttgtccgctgcaggagcggcaggacaactactagtggtggctgggcagttcgggccgactagcattactggatcatgctatcgaccaggaactgataatctactgcagagtacggctgccttaactaggaaaaccagcacaacaactaactatcgaattggaggcaggccaggaatgacaggcaatggcacccctgatgtatctgccgttctgatctacgaaggacgattggcagattcagacctactgacagtnnnnnnnnnnccgcccattaattatgaatgtatttatttaccatccctttgccccatctacgccactcaacctctatccaagcagctatcataa

SEQ ID NO: 435647 - DNA, 318 bp, Serratia marcescens; identical to SEQ ID NO: 435481

SEQ ID NO: 435648 - DNA, 552 bp, Serratia marcescens
atgacagccacagtagacatcaccgagcttgacctccgtatcgcgctgcaagcgtttctgatggatatcaccggactcaccatcgacaacgtgctggtaggccagcagaacctcacacccatgccgcttcatgacttcatcatcatgacgccgctgaagcagataggcctgtctactaaccgggtcaaatacgacgacaacggcgtgtatggcgaaggtaagcagcttaaccagagaagcacgcagtggccctgccagattgactgttacggcgagaacgcagctgataacgctgcaatcatcgggacgctaatccgctcagactttgcctgtgaatggttcaggcaaaacggcaatgtcattacccctctttactgctcagaccctcatcagacaacgatgataaacggcgagcaacaatatgaaggcagatggacgatggaattcatcgggcagttcaatccgtccgttaccacgcgccaggacttcatggacagcattacagtcggcgttattgccgcagacctaaaataccctccggagaatgcataa

SEQ ID NO: 435649 - DNA, 369 bp, Serratia marcescens
atgaacctgagaggcatagccaatagcgccacgagagcaataaaccccaacgtaaatggtgtgttccggataaacaccggcttcacaacgttacctggcggaaagcgagagcagacgtacagcaatgttgatgttgaagtgcagatgcaggagctatcttccaccgacctgcgacaggttgatgccatcaacattcagggcatcctcaaaagtgcgtatctgaatgggaatttcaacggcgttaaccgaccagatcaaaagggtggtgacattcttatcgttaatggtcagcagtggttggtggttaaggttcctgagttatggcctgactggtgccgagtgattgttaatctgcagaggtcgccatga

SEQ ID NO: 435650 - DNA, 453 bp, Serratia marcescens
atgaccacgtttagtggtggcgcggctttagaggcgaaacttgctgaactggcggaaaagcttggcgatggtaaaacactgagggttggattccttgagggggctacatatcctgacgggaaatccgttccgatggttgctgcagcgaacgaatatggcgacccggcaatgaacaggccgccacgcccatccttccgaaacatgatcgccgaaaagtcacctgaatggccgcaggatattgcgaagatagccgaggctaccggttacgacgcagaaacgatgctggggctgatgggtgaccatattaaaggccagttgcagggctcaatcagagacctgatggagcctgctctatctccagttacgatcgccaaaaagggcttctcgaagccactcattgaaacatcccacatgctaaacagcgtcgattacgacattaaggatggcgtatga

SEQ ID NO: 435651 - DNA, 342 bp, Serratia marcescens
atggctgaagtagttactgttggttgcaaactgcctaacggccttctgattgatgttgatggagtggttgtccatatcaatggggcaagttcttcgtctgtagttggcggttacggcctgactgggggtgttgataaagactatttcgaaaaatggttaaagcaacacgcaaatcagcgctacgtgaaaggcgagctggtattcgcgcaggcaaaaaccaacagcgcacagtccaaggctgccgaaaacgccaaagtgaaaactggccttgaaggtctgccgcaggacaagcctatggaaggcgtggtgaaagacgaagaagcaatgaaggcgcgaggttaa

SEQ ID NO: 435652 - DNA, 1038 bp, Serratia marcescens
atgaacgaatttcagaaacactattccgctgctagcggcaaatacggcatcattctgccaggcgcgaaagactacctgaagcctgactttgcagaaaacttccagttggcaatggatgcccagccaaccatggttactgcgaataacgcaggtatcccggcatacttcaccaactacgttgaccctgagctgattcgcgttctggtaacgccaatgaaagccgctcaaatctacggcgaagtgaaaaagggcgactggacaaccctgaccgctcaattcccgatcgtggaaagtactggtgaagttagctcctatggcgacttcaacaacaacggcatggtgagcgctaacgtcaactgggttcctcgccagtcataccactaccagactcatacccgctggggtgagcgtgagctggatatgtacggtgcggcgcgtatcggttacgcagcagagctgaacgtagcttctgctctggttctgcaaaaattccagaataagtcctacttcttcggcattgatggcctcatgaactatggcgcactgaatgaccctagccttcagccatccgtaaccccagcgcctaccggtaccggtggtagcgttcgttgggatggcaaagatgggcaggcggtttatgacgacatcgccgggcgtctgtggaagcagctcgtagcgcagaccaaaggccttgtggagcgtaccgaccgtctcaaactcggtatgtctccagtgttagaggtcaacctgaccaaaactaacatgtacaacgtgaacgtcaccgacctgctgaagaaaaacttccctaacctgaccatcgaaactgctgttgagtattcaactgacgcaggcgaaatcgtgcagctgatcgcagaacgcctgggtgagcaggacaccacttatgcagcatttaccgagaagatgcgtgcgcatgctgtggtggtagaagaatcatcctggaagcagaaaaaatccggtggcacctggggcactatcatccgtcaacctctggcgattgccagtatgctgggagcataa

SEQ ID NO: 435653 - DNA, 618 bp, Serratia marcescens
atgagcaaacgtaaagccgcgattattcgcgcaacgctgaagccgttactggcagctgatgctgatttggaggatgaagtacggaaggctcttctggcgctggatgaagccgagaaagaagacgagaaagaaaagaaaccggctgaagacgaggatgacgacaaggaagacgacaagaagaaaaccgctgacgacgaagatgacgaagacagagatgacaaaaagaaaaagccagccgaagacgaagacgatgaagacgataaaaaagacgacaaagtctccaaaacggctatggatagtgcgatccgcttagcagcagacagcgcaaccaaacgcgcagcggagaacttccgcaaagtacgtgaagctgagcaagctgtgcgcccgctgatcggcgatgtcgttgcaatggactctgctgatgatgtctaccgtaccgctcttgagcaggctggcgtggatatcgaaggcgttcatccttcggccttccctaagatggtcaaaatggctatcgagcagcagaacaacaaacgccctgtcattgcgcaggattccgcatctcacagcgaatttgagaaagctttcccgtccgctggcaaactgaaacgaggtttctaa

SEQ ID NO: 435654 - DNA, 798 bp, Serratia marcescens
atgaccagcgggaagaagaggccgacgcggcaaacgctgagagcaattcatcctaatgccggtgttgaggcgtggtatcgcagacagttagataatcacatcagagagatgcagaaatccgttgtttactggttaatcgctaactacaaagctagcggtgcagcggtggcaatggacgcatcccctgctgtctttatgcgcgatgccatggggaagcttgccaaacgatggacgaaagcattcgacaacgtatctcagaagctggcaaagagatttgccggtgatgcgatgaagaataccgatgtatctctgcataacgcacttgaaactactggattcacggttgagttcaaaatgactgcgcctatgaataacgcgctgcaggcgacaattgcagagaatgttggccttatacgctcaataccggaaaagtatttcacagaggttgaggggctggtaatgcgctcggttgcacgaggacgtgacctgtcttacctcactgacgagcttcagaagcgctatggcattacgcgtaggcgtgcggctctcatagcacgcgatcagaacaacaaagcaacctcagtgatgcaagcggcaaggcagcagtcacttggtatcactcaaggcatctggaagcactcccatgccggcaaagagccacgaccatctcacgttaaggctgatggaaaggtatttgagctaagcaaaggaatgtacctggatggtaaatgggtgatgcctggagaagaaataaattgccgttgcacctggtcaccagtcatacccggccttagctag

SEQ ID NO: 435655 - DNA, 462 bp, Serratia marcescens
  misc_feature (115)..(124): n is a, c, g, or t
atggcggcagtatccagtattcccctggtcaagttgctaggcatttctcctgctggccttaacgcatcatctgatggcgagattagggtcttctacgactacatccacgctctgnnnnnnnnnntcttcaaagacaacctgaagcgcgttttggacatcatccagctctcagagtttggcgacatcgacccggatatctacttcgaatttgagcatctttacgagatgacggagaaagagaaagcagagattcgcaagattgatgctgatactgacgcggttaacgtaacaacaggtgcgctgactggtaacgagattcggcagaagatcgcaaatgaccctgacagcctataccactcactagacctaagcgatgacatcgaaatcgaagacgactacgaaggcgatgaccagcgggaagaagaggccgacgcggcaaacgctgagagcaattcatcctaa

SEQ ID NO: 435656 - DNA, 576 bp, Serratia marcescens; identical to SEQ ID NO: 124393

SEQ ID NO: 435657 - DNA, 501 bp, Serratia marcescens; identical to SEQ ID NO: 231956

SEQ ID NO: 435658 - DNA, 1065 bp, Serratia marcescens
atgaaagtaaattttgatagttattcatattatcctgcattaaggactcgtgcagctgaaattcttggcttgagtaaacttgctcatgaaaagaaagagaaaatacttccacttataaccttggggaaatggccccgttcagatgaaattcaaatctctcttgataagagtctagaagcaatgaataacttgccttttattcttgacgttactcaagagaacaaacatcattgcgcatcaagctttgaccttctatcttccgaaaataatttctcaaactggatagctttttgctctaagaatgaaaatgttatccctgtagttcaaatgcctgaatctgcaagattaagggatatagtacagcaagcaagaacacttgaggaaaataaaggttccattgcattccgaataaaaaaccttaacgctgacataaataaaacaatagcatcactcgtgtctctcgactcccctgaaaatgcggttatattcatagacttgggctacattcgcggacatgtctcagcaatgacgtctgctgccataagtgctataaaccaaataaggacagaaattcctgaagctataataagtgtactgtcgactagcttcccaagttcggtcgcaaactttgcaggagaaaatggtcaatctggttatattgatattatggaaagagaattccaccaaacaatcggagggcgaggtgtctctatatacggagatcatagttccattcactctgttgtatatgatgatgttggtggacgttatgtcccaagaattgatattgcattagatgatgcttggttttttgagagaagaccaggacttgatagtaaaggttatatcgaagcggcaagagcgattctcaaaagataccctaattatcttgaagaagaatcctggggtgcgctgatgattaaaaacgctgcatcaggcgatattgctggtatggggagtcctgctaaatggatttctgtgcgcgtgaaccttcacataacaaagcaaattgagttatcagaagcacttaaaacagattacgatcctgaagaggatttcttctaa

SEQ ID NO: 435659 - DNA, 297 bp, Serratia marcescens
atggcgttaagcaggttgccgggcacgatgttgaaacgctgcagcccttcaccggtcaggatggagacgattttctccatcagcgagcccggcgtggtgctgccgaacgagccgttgaacaacgcgacaatcatcaacagcaacagcgaacatttggccaatgcaatagtgatggtcgacatctgttccaaatggcgatccttgaagctgagcgttttcttcagcatcttgccgctgacggtctgcggcgaaaacagcgcggcgcacaaatcggtggtgaacagcaccataaagtag

SEQ ID NO: 435660 - DNA, 156 bp, Serratia marcescens
atgaaagaaaaagaatttgataaaaagcttgagctacgtgagtggcaaaagatgtttaacccctccaaaagcgagactagcgagtccattctgctcaaaaagagaacagaagagagccggtcgaaagagaaaaacgacagcgctttctgctggtga

SEQ ID NO: 435661 - DNA, 1305 bp, Serratia marcescens
atgacagctgaaatagccgtttttaataaatcagcagtagcgcttgcggccgattctgctgtgactatatctggtggggatggtgttagtaaaatatataatggtgctgataaactattttccttaagtaggcatcaccctattggtattatggtatttggtagcgctgatttatgcggcatcccttgggagatgataataaaacagttcaggaaatatctaggtagtgaatgttttgatacggttgaacagtactcggagagtttttgggagtttctgtgtgagagtgaaaatataatccccatggatataagggagaattatctgattgacacgtataagagtcgtttttttccttcattggtgaaatatatagaagaaaatagaataaaggaaattattgataagaatggtgttaggccatccatatcggagacttatagaataatagaggaggagtctaactcgcttctgcaagatttatcagagcaagttttttttgaaggctttaacgaagatgatattacagctgtctcagggttttctttggaggttgctcgctctgtgtgtgatgacaacctattccaggaggagggggaagccataccagaatcactctataaagtaattggcgatttgtttgctaccattacatgtaaaaaatcccagtttggtcgtaatacaggactggtatttgctggatatggtgagaaggaatttatgcctgcagtgttggcatttgatgttttaggtttttatcagaggaaattaagattttccccaaacctagataaaagctcatcgggcgggttatgtgcggttaaagcatatgcacaagaagaggaggtggaaacgttcttacatggaataagtaagaaccttaaaggttttatgatggcagggtttgcggtggaaaatggaaacttgctagaagacgttaaggaaaagataaagaccttgagtttaccggagcatgaaagggaagcattcattgaggactttgagcgtaagcttgaggaaagatactcagcatactcaagcgtaatagatagccaaattaatcataagtttacatctaaagtcactgaaatgattgagtttttaccaaagcaggatcttgcctatatggcagagtcacttgttaacctaacagcatttaaacgtaaagtgtcaaatgataacgaaacagttggcgggcccatagatgttgctataatctccaaaggagatggttttatttgggtaaagcgcaaacattacttcgacaaagacttaaaccaccactacttttctaagctatcctaa

SEQ ID NO: 435662 - DNA, 366 bp, Serratia marcescens; identical to SEQ ID NO: 218047

SEQ ID NO: 435663 - DNA, 723 bp, Serratia marcescens
atgtttaattttttcaggaagaaaccagaagaagcacccgcagcaaaacaaccggcaccaacataccaaactaaaccacatacgccaaagaaatcacaattagaacgtgatttgaatactatcactgttgcacggtcaagtactttatcattcggttattctggtaacggtcaaggtgcaaatatcaaccgccttattaatagtactctaccagcactacaaacaaaggcacgtgaactagcacaaaacaatccaatcgttcgaaagtacattctaatggacgccgatcagatctctggggcagatggtattagtattcgttcgaatgtacaactttttgacgatgaaacaaagaatcatgatacctcaatgagtatcgaacaattgttttatgaatgggcagaagatccagatgcatttagtactaatggcagacacgatatcagtactttccaaaatctagtatgtagaacaagagcacgtgacggagagtgttttattcgcttacatgaagttgaaggtggcttaagactagaaataatcgacagtctgcgtgtaccagtaatcaacaatcaaaagttcagtaacggtgactatatcagtaatggtattagatttaacaagttcaaacgtcctatttcatacaatatctgtaaagtagatccaacaatctattcatactatcagactgatattgaagtagtaccggcagagtactattaa

SEQ ID NO: 435664 - DNA, 753 bp, Serratia marcescens
atggaagatgccctgtacgaaatcgcctccatgcgcctgtttgcccgattatccctggatagcgccctgccggatcgcaccaccatcatgaatttccgccacctgctcgagcagcatcaactggcccgtcaattgttcaagaccatcaatcgctggctggccgaagcaggcgtcatgatgacccaaggcactttggtggatgccaccatcattgaggcacccagctctaccaagaacaaagagcagcaacgcgatccggagatgcatcagaccaagaaaggcaatcagtggcactttggcatgaaggcccacattggtgtcgatgccaagagtggcctgacccacagcctggtcaccaccgcggccaacgagcatgacctcaatcagctgggtaatctgcttcatggagaggagcaatttgtctcagccgatgccggctaccaaggagcgccacagcgcgaggagctggccgaggtggatgtggactggctgatcgccgggcgtcccggcaaggtaaaaaccttgaagcagcatccgcgcaagaacaaaacggccatcaacatcgaatacatgaaagccagcatccgtgccagggtggagcacccgtttcgcatcatcaagcggcagttcggcttcgtgaaagccagatacaaggggctgctgaaaaacgataaccaactggcgatgttattcaccctggccaacctgtttcgggtggaccaaatgatacgtcagtgggagagatctcagtaa

SEQ ID NO: 435665 - DNA, 264 bp, Serratia marcescens
atgttgaccgtttccacccccactccatctaccccgtcgccggtgctttctggcggttacaccccgcgcgagcgctttatccgcctgccggaagtgctctacaccaccggcctgtcccgctccaccgtgtacgagatgatgagccgccggcagtttccggtacaagtttccctcggcggtaaaaacgtcgcctggctggcctccgaggtcgagcagtggatggatgaacgtatcgccaaccgtcaccagggggccgccgtatga

SEQ ID NO: 435666 - DNA, 312 bp, Serratia marcescens; identical to SEQ ID NO: 435611

SEQ ID NO: 435667 - DNA, 312 bp, Serratia marcescens; identical to SEQ ID NO: 435611

SEQ ID NO: 435668 - DNA, 312 bp, Serratia marcescens; identical to SEQ ID NO: 435611

SEQ ID NO: 435669 - DNA, 426 bp, Serratia marcescens
atggatttcgccacgcaggccgaatccatccgcaggctgaccgaaaaatacaacgtggaatacatcggtatcgacgccaccggcatcgggcaaggcgttttccaactggtgcgcgcgttctacccggccgcccgcgaaatccgctacagcgccgaggtgaagaccgccatggtactgaaggcgaaagacaccatcggcagcggcaggctcgagtacgacaccgcgtataccgacatcaccaaatcgtttatggccatccgcaaaaccatgaccgccagcggcaggggcatgacctacgaagcgagccgcagcgaagaagccagtcacgccgatgtcgcgtgggccaccatgcacgccctgttaaatgaaccgctgaccgccgccaacggccaaccgtctaaatccattctggacttcaaccgatga

SEQ ID NO: 435670 - DNA, 225 bp, Serratia marcescens
atggcgaaagtcggcctcgagatggtggctaaaatccctccagaggatgcacggcctctcctggacgagctgatgaagtgtgttcaggccgtgccagacccaaccaatcagagcgttaagcgcaacctgattgacgatgacactgaagaagttatgactcgcctgaagcttcgcagtgaagtcttcaaactgcatgttgattttttcacagccaccgccagttag

SEQ ID NO: 435671 - DNA, 330 bp, Serratia marcescens
atgaaagataaatgtgattatactatttttgattttgctgtgttcttttatactgcgttcgatgtaaaagatactttcgaaggttgcataaccaaaatgcaaaaagagttagataagtatgataccgtgcagtatgtttgtttaaactgccacaatgagaaagaaatcaaagatattagtacttgtatgttagcatcattcatgtgctcgtatgataaggttgattttaaagagcagtacaaggtttctgagggtatgaatgaaatcggatttgatgtttataataataaattaggcttctgtgtaaacgaaatgtttttttgtcggtaa

SEQ ID NO: 435672 - DNA, 237 bp, Serratia marcescens
atgcctgacagtccatctcgtgatctgtttgaaacctggcaactgacgtctctgacctcgaaggcggtattccgctgtaatgcaacaatcatcctcccggcgattagtcgcaagttcacgctgaccaatggcatcctgcagcgcgttaaagccatccctgatgcgcagcgcgtactgcaggcaatgaccttccagattaactgggaatcagtcgtgggcgaagcgtacaacgcataa

SEQ ID NO: 435673 - DNA, 171 bp, Serratia marcescens
atggctacgcaaaatatcgaccacccggtgctgaatgagattggcctgacgataccgcaagaaaccggcgcattgccggaactgcaaagcagtcctgccaagcgtatgcaggttatcgcagaactgaagaaaaaacgtcaacacttgcagcagaagggggccaaatcatga

SEQ ID NO: 435674 - DNA, 330 bp, Serratia marcescens
atgtcagcacgcattatcacgatcgaagcttatgatccgcagtgggtggaacgttataaagatgaagcgctgaaactacgcgagatattggctggcgttttaacggccattcatcatatcggcagcacagcagtaccggaactggcagccaaaccaacgattgatatcttgctggaggttgaaagtctggcggcgttggatggcttgaatgacgggatgcgtaacatgggatatacgccgcgcggcgagaacggcatagccggcaggcgttactacatcaagggaaacggcaatcatgtatttactgcaggaagtgaacaggcaatctga

SEQ ID NO: 435675 - DNA, 1176 bp, Serratia marcescens
atgttaaatggtgaaagaagcatccctcgcccgctgcgttgggcgatgatcggcggcggccgcctcagccaggtgggctacaaacaccgttccggcgcactgcgcgacaacaccgcctatcggctggttgccggtgcctttgatatcgacgcggcgcgcggacgtgagtttggcgtcaatctcggcgtgcccgccgaacgctgctatgacaactatcaacagctgctggagcaagaagctaaccgcgaagatggcgttgaggtggtaaccatcgccactcccaacggcacccactatgaaatcacgcgcgccgcgctgaatgccggcctgcatgtcatctgcgaaaagccgctgttcttcaccacggcggaggcgagagaaatcaagtcgctggcggcggagaaaggccttatcgtcggcgtaacctacggcttctccggccatccgctgctgatgcagatgcgcgccatgatcgcgaacggcgacatcggcgaaatacgcatggtcgaattgcagtacacccacggcttcaatgccaacgaaagcgcggacacgttcgaggcacaaaagtggcgcgtcgatccgaaaatcgccggcccctcttttgtgctgggcgacatctccacccacaccttctacatctcgcagctggtgatgcccgacatgaaaattgcctccctgctgtgcgatcgccagagctttattccttcccgcgccccgctggaagacaacgccatggtgctcatgcactacgaaaacggcgccgtcggccgcatgtgggcttctgccatcaacgccggcgcgatggacagccaaagcatccgcgtggtgggctcacgcgccagcctgcaatggagcgattccacgcccggcgaattgcgctatgagatccaggggcggcccaaccaaacgctgcaccacggcatgccctatctggacgacagcgcgctggccgaagagcggctcggcgcgctgcataccgaagggctggccgaatcctgggccaatatctacctcaagttcgccatcgccatcagcgccagccagcgcggcgatcggcagacgctggccgcgctgatctatccggatatcgatgccggattggaaggcgtgcgctggattgaaaactgcgttcgctccgccgacaacggcgccacctgggtcaattaccaataa

SEQ ID NO: 435676 - DNA, 432 bp, Serratia marcescens
atgagtcgcggacgtttcaatctttccgcgctcgccgtacgcgagcgttccgttacgctgtttcttatcctgttgatcaccgttgccggtattctctcgttccttgggctggggcgcgcagaagacccgccttttacggtcaagcagatgaccatcatttccgcctggcctggagcaacggctaaggaaatgcaggatcaggtggccgaaccgctggagaagcgtctccaggagctcaagtggtatgaccgcacagagacctacacgcgtcccggtctggcttttaccatgctctcattgttggacagcactcccccctcagaggtccaggaagcgttctatcaggcacgcaaaaaactcagcgacgaggctaaaaacttgccggcaggggtgtctgggccgatggttaacgatgagttttcggatgaatag

SEQ ID NO: 435677 - DNA, 264 bp, Serratia marcescens
atggcttctgaaatcgcaatcttcaaagtaccctctccgatcgtaactaccgagcaatttgccgagttggaaggtgtctctcttcgaactgtctatcgttggacaactggagacaacccgcagttacccatcgaaccccgcactatccgtaaaggctgcacaaaagcaggtggcccgatccgtatctactacgcccgctggaaagaagagcagttacgtaaagcgctaggccattcacgttttcaactcgtcatcggtgcgtga

SEQ ID NO: 435678 - DNA, 1797 bp, Serratia marcescens
atgaatgcccaacaatttgatttcctcactgatagtgagttgacattattagagcggtatcaaacctgtaaggctatggcgcgtggttatgccgggagttataaatcggataaagaccgacttgctcacgctcgttcgtattgtgctcatgttataggtgcatattgggattcattggctaaagcgcaggaaagtacaataaaaattaaatcagtaccgcacacggtatttttggccgagatatcttgtgatgctctcgaattggctaaaatgactggtgatttaatagctacttttcctgttgaagatgccgggtatctgattggctctatttatacagtgatgctgccttcgtcttaccgttcagagattggagcatattataccccccctcccttagttgcacggttattagatttggcggagagtacaggggttgatttttctacaagcacagccattgacccagcatgtggaggaggtgcatttttagcgccagtagcattaagaatgctacagaaggaaaagggttcttctccagaatggatattaagacgtttagttaaaagattgaagggtattgaaatagatccttttgcggcatggatgaccctagcccttcttgaggcagcattaatgcctctatgtatcgcagctaaaagaagattgcctgacaatgttatcattgtcggggatgcattacagcaaagcgatgtggggcattttgaccttgttatcggtaatcctccctatggtagagttacccttaattctgagttgagggataaatattctcgctcactttacgggcatgctaatctttatggtctttttactgatttggctattcgattagcaaaaccggaaagtggtattgttgcgtatctgacaccaacatcatttcttggtggacagtattttatggcgctgcgaaaactattaacagaagaagctactccatttgcatttgattttatctctgatcgcgagggagtttttgatgatgtacttcaggaaaccctgctcacgacatttagattaggcaagcatgaggaaccgtctaaagtatcgtcattgatacctaaaggcctcaatgatgctaaagttgaaaagatcggccatgtaaaaatagaacatggcgggagtgcatggttacttcctagaaatgcagaagatgcggaatttttgaacgcaatcaagctcatgcctaatcggctatccgactttggttataatgtatccacagggcaattggtgtggaatagattcaagtcacaactgcgtactgttccaacgaagaaaagctatcctcttatttgggcagagtctattacaaattctggattcaattttagctctgatcgccggaatcacgttccttttattgatattcatccagagcaatctcatctgcttacatctactgagtgcgtccttgttcaaagaacaacgtcaaaagaacagagtcggcggcttctagctgcggtgttgcctcaagcatttcttgataaaaaccgggctgttgtagttgaaaatcatatcaacatgatttatccaaatgagctttttgctcaaataaaacctgaaacggttgctgcgatacttaactcaaaaatcgttgatcgagcctttcgctgtatcagtggaagtgtagctgtctcagcatatgaattaaattccataccactaccaagtgttgatgagcttttaaaacttgagaagctggttttgtctggttcttctagcgaaaaaattgaaaagacgttgtctaaattctatggagtgaatttgaaatga

SEQ ID NO: 435679 - DNA, 1083 bp, Serratia marcescens
atgagcttaccaaatgttccaaaattagaagttataatggagaggcttccgatcatttttcctgaaggcacagaaaataggaactatgtcatccgtgaaatagctgctaaaacgttatatgttatgttttatgctggtgctgttgcaggtagtgaccggtggataagacctagccaagttacggatatggggggcgaacaatctgaactcctcgatgatataagtcgtgaggagtgggtaataaaaacactttctagtaaaaaagaacgtccaatagacgcttggtatgcccctaattctcgagagccgatcagagatgaaacaatacgctctggttttataccatgtggtgctgttgttgaacgtagtggtcttccaacgacatcatctaagcctaaatattgtctcgaatcatcttttacaacattgtttgatgaagcgttagtcggcgctgaattagattctgctatcactaaatggcaagatacacatttaaataaagctgctttatccaggttgcgattgatgaagtcaggagtagcaattgcagaggatgctgtagttgtaacatttccgaatggtgaaaaaagaacattggctcctgggccttcaagtgtcattgcgaaagctgtaattgaagtctttgcaccaaaatttcttaaagctccagcaattctttggttatcagagtccggtaataaagtagttgcacgagatgaagacttagcacaggccttggggttaaaaattgacgcatcaaaggctttgcctgacattatcctaattgatttaggaaatgatagtagtggtgctgacatgctggttgtttttacagaagtcgtggcgacagatggcccaataaacagggaaaggaaagttacattaaccagattggctttggaggcgggttttagtgagagtcatttggcctttcttactgcgttcatggatcgtggtaaggctccattcaaaaaagcaatctctgaactagcttggggctcgtatgcatggtttgcttcagaacctgagcatttggtcgatcttagagatgggcagccagttaaattatcagacagaaattag

SEQ ID NO: 435680 - DNA, 219 bp, Serratia marcescens
atgagtatccattacctcactgagagcgatacacagcgtttagacgatatgagcaaggttttggggagatgtgtcattgccatccttgttcgaaagaaaatagtcaacaccgataatattctttctcaaatagtcgcagaaatggaaaaagcatctgataacgatgaattccagttatatcgcaacacattagagtttgtaggtactctttcaaaataa

SEQ ID NO: 435681 - DNA, 498 bp, Serratia marcescens
atgaaaaagtatctggtagcttccgcactggcctgtgcggcgatctcttcctcggcgtttgccgccgatggtgtgattaacttcaccggtaaaatcatcgataacgcctgcgtggttaacccgacgctgaacgtgcagatgggagatgtggcggcggcggcgtttaagaatgtgggagatgaatccggtgcccggaaatttgatctggagctgaaagattgcccggctaacctgagcagtgccaaagtgaccctggacggcgcggcggacgacaacaacaccgagctgttcaaactgaatgacggcggtgcaactggcctggcgctgcgtattaccgggctggatggaaaggatgtgatccctggcggctcgtcggcagaagcaaaactggcagagggcgataatgtgttgcctttcaccgcagcttataaatcaacggataaagtcaccgccggtgatgccaacgccacgattcaattcagcgttgcgtataattaa

SEQ ID NO: 435682 - DNA, 549 bp, Serratia marcescens
atgatgagaaaaatagcactgcccctgacgctgctcggcaccgccatgctggcaccgccgctgcaggcggcggatgggaatattaatgtgactggcagagtcaccgaaagcagctgcgtgctggatgccagttctaaaaaccagaaggtgaataagggggtgcagagcgctaccattgcgacttggttagggggcgctggctatatctatgtgcagttggcggactgcccggacagcattagccaggtacgcatcaggtttgaaggaacgctgacggatacccatagttactctgggaaggtttttgctaccgataatggcggccaacccgatgcggcaaagaatgttggttttctcattagcaatgcgcagggggaaggtaatggctatgtcaatcttctgagtgttaatgagttcagcccagctattgaattgaaaaaaggggcggtgaatgagcttaaattcagtacgggatataccaccgataacaaaatgcctactgcaggggttgctcgtgctcgggtgcagtttagcctgatttacccatga

SEQ ID NO: 435683 - DNA, 525 bp, Serratia marcescens
atgaaaaatatcatcaaggggctgctgctggtggggggcggattggcctttagcgcttatgctgcagacggcagcgtggatatggaattaacgcttgctcatggcacctgcaatttaaccgcaggcagcaaaaatatgcaggtagcgctggggaatatttcccgtgccgagctggcatcaaccggtgcgaccagcaagccggttgattttaccgttgaagcaaccgactgtgtaccaggcctgaccgtatggttccgttttgatggcgttgctgccgatcaaaataataaagcctttgcgttaggcagtggctccgttgccgagggggtcggggtacaggtggccgatgtttcctcttacgaggagtatgtcaaaattcctaattatacttatggatatggagaaatcccagggaagaatggaactttctctaagccatttaatgcacgatatatcgctttaaccgataaggtaacgcccggcgtggcaaatgccaccgcccaactcaatctggtgtatcactaa

SEQ ID NO: 435684 - DNA, 543 bp, Serratia marcescens
atgatagcaacagtgagaaaaagaatgccgctgctgacattattcagcgcagcaatattatccgcttcgttatacgcggcggatgggagtattaatgtgacaggacgggttactgagagtgcctgtaatataaccagttcgaaaaatatgacgattgaaatgggggaggttaatcggtcgatgttcagttctatcggtgatggaagccctgaaagaacattcgatctggaaattgaatgtgggtcttcttcgttagtaggcgtacggctcgaaggtaaagcttcggatgccaatcccgatgtgtttgcgttggatgaagtaagtggtgctaaagggataggactgaagttgataaccaggataaacggggatgagagagttgccaaacctaatggtagaccgatattttattacaaaataccttggacccagcaacataataaacaatgggctcgtttctatgctcaatatgtttcagttagcgataatatcagtgggggaagtggcaataccatgttgcaagtatcactggactatctttga

SEQ ID NO: 435685 - DNA, 1332 bp, Serratia marcescens
atgattgttagtctaaaaattgaaaattttctctctatcagagatgaagttgagttctcactcagagcttctaatgatggtaagcacttgccagcacatgtctacataccagaaggaggccagcagggtattcttaaaagcattggaatgtatggagctaatgcctccggtaaatctaatgtattgaaagcatttactgcgttgaaatatctagttcggcgttctggtgatctaaaaaatggtgacagaataccatgctatcagccatataaattgtcacaaaatacaaaagtggcgcctactaaatttactgtggaattcctttcagataaagatactaggtttatttatagtgtctcttataactcacatgaaatattaaccgagtctcttgactattatccttctcgttctaaggctaatttgttttatcgaagtgaaaatgatgattgggaaagtattaaattcggtggccactataaaggaggtagtcgaagaattgccttctttaaaaacaattcatacttatcgaaggctgggaataatgcatcatctccagagttaataaaggatgtttatgagtacttcggattgaagattgttaatatcggtattcattcaggcctcagtatatcagatgtagatgatcttgaagcgagagaaggaatgactaaaaacatttcaactttcctttctcttattgatactggagttaagagtattgagcttaaagatgtagatacatccgacatcaagatcccagaaggtattccagaagagatgcgccaagctattctcgatgagaatagattcaatatcgttttttcacatgaggccgatgatggacgtgatgagtacttccaagagcacgaagagtctgacggaactcagcgattactttctgtctcaccacttttaattgtggcattgaaatttaggacaatagttgtttttgatgagttggataacagtcttcatcctcatatcgctgatatgattattcggctgtttaatgatcctcgcgtaaacaagcatggttcacagttgattttctccactcataacatgcagctaatgactccagaaaaaatgcgtagggatcagatttggttttcagagaaaagaaatgggattactaatgtatactcgcttgatgattttgataaaaataaagtcaagtcaaacactccttatagcaagtggtatgatgatggacgatttggaggcgtgcctcacttaaattattcaaaagtagtggagtttttattaagtgatgtagaagaagatacaactgatgatgatgtctttggtagcattgatgatataatttaa

SEQ ID NO: 435686 - DNA, 639 bp, Serratia marcescens
atggctaagaaaactataaaaccgaaaaggcttatgcatataatctgtgaaggtgctaaaaccgagcccttttatttttcatcttatattgataattttgcaagcgaaaaagcaaaggtgatagaaatacctaattgtaagaaaaacacaccagtacaattagttgatgaggccgttagtaggaagaaaagcaaggaaacatcatcagatgatgagttctgggtagtttatgatagagaggcagtagcgaagtatagtaacaagcttcatgctcaggcttggagtaaggctctagctaacaatataaacatagctttttcaaatatatgttttgaattgtggattctacaacattttgaacttacaacatcacctttcacatgttgtgaagagttgttagcaacatctaatttacgagcccatcttaaacgtgttggaattcataattatgaaaaaggaaatgcgcaactttttagtaaaatatctggtgggctaggccatgcaagagtgcgagctgctagattgaatgaattagttattagagatgcaccagtagaacatacgaataaaccatatatgttaaattgctacactaatatatatgagttattagacgccatagataaatttcaaccatga

SEQ ID NO: 435687 - DNA, 561 bp, Serratia marcescens
atgtccgagtggttttattcaaacgcatccgcaatcattgccgcttcatccgctctgcttgcagccatcattgctgctttagctgcgtttggtggagcattaatcaataaccgaaatagtaaggcactacgagatagtcagaatgaaatcgaacgctggaaactaaatcgggaactttatttgaaaaaagcagaagaggtttttagtttgtttgactcatggaatgaagggatacataagatattgtcactgcaggcctttcatgcaattggagttaaaaaccagaatgaagttaatgaagagtggccatcagcgtatgataaatcacttcatccaagaattaaggctttaatttcactgtactttaatgagctatatggggattttgagttaattagtgatatttatgcgaagtcaaccgggagatatgcgctttttataactggggatctcgaaaagggggagtttgctataagtgtccataaatcgacatcggaaatagtatcaatagctgaacgattcagggcgaggttagctgaattaacgcagaaacatttctga

SEQ ID NO: 435688 - DNA, 711 bp, Serratia marcescens
atgagttggcaaggcgtacctttcaattttgttaatagtgagtcagcaggcagcatctttttaacgttgtcaaaactcccagtaatatctgtagatactggttttggttgggataatttcttctctgctttaatcggtggtttttttcctgcgttgattgcgttattaactatacgacataataatagagccagtgaccagcagcgaacacagcagactattgagttggcagagactaggaaaacacaattaaaaatatctgagcaatcttttaatgcccaggttttatctgcaaatagacaaaactggataattaatttaagagattcagctgctgatttcacaacacagtgtaactcacatatctactatagacggctttatgctgctgaaagtgaggtggcggtttgggatagtggtaaacaacagcaggtaaatatttatttagatagaatcctaactactggtgcgaatttagcagccgctcaaacaaaaattaggctaatgctaaaccctaatgagataacatcgggtgcaataattcatacaatgagagaaatgatggaggttgcacaatttacaagtactaaggatatgccaagccgcctttttgagaatccttctgaatatattgattttgaggaaaagtttctcgcttttgtacagcgctgtcttaaagctgagtggaaaagagttaagtccggagtgtaa

SEQ ID NO: 435689 - DNA, 315 bp, Serratia marcescens
atgccttggaaaaacgaacccaacatactctccatgctgatcgcggtcgggatgacattgctgggagccatcgctagctattcattcaaagtgcttagcggtgaagtgttcagttggcggacgttactactacagctattcgtgtccattttcgctggcttaacgatggtgatgattgcgctgcattacgaatggccgtctgaggtcatgggcggcgcttgtggcttggctggctggtctggtgcgtcgctgattaaggctttagagcgtcggttcctgattaaagcatcaggggaaagcaatgaatatcagtaa

SEQ ID NO: 435690 - DNA, 441 bp, Serratia marcescens
atgaatatcagtaagcgcggtattgagctgattaagcaattcgaagggttagagctgagagcctatcaggattctgttggagtctggactatcggctatggttggactcagccggtagacggtaagaaaattgtgcgcggcatggttattgaccaagtaacggctgatcggctgctgaaatgtggtgttgttcagtttgagcagagcgttaatcaactggtgaaggtgaaaatcactcagggccagtttgatgcgctggttagctttacttataaccttggattgcgttcattgagtacatcgacgctactgcaaaaactgaatgcaggcgataagcaaggcgctgctaacgagtttggtaggtgggtaaatgctggtggggttaagctgaaaggcttggtaacgcgtagggcggcggaacgtgagttgtttttgtcatga

SEQ ID NO: 435691 - DNA, 381 bp, Serratia marcescens
atgaacaccacatacagcattcgcactatagcaatcgtcctgttgctggtgtcgttgattattgctggcaggttggcgttctacttccacgataatgcggtagaggctggtgagaaggttaagcagcagaaagaggcgctggcgcagcagtcaggactgattgccatcatgcaggaacaggacgcccgtaaccgcaagctgatggccgaaaagcaacagagagaacagcaactgcgccagcaggaggaaacgtaccagaggaaattacgcgatgcacttaaaagcgacaaatgtggcaacagtcctgtgcctaccgctgttattgagctcctgcaccagaactccggtaccgccgcaacaggtcgtgttgttcccccctga

SEQ ID NO: 435692 - DNA, 408 bp, Serratia marcescens
atgagaactgatttggattacctaaaaggcatgctttctgtttttttagatgctgaaactactttcatatctacaatggaccttggcaaatctggctatgatattggttcagaaaaaggaatgttccactacatgcaattgattgaccaggggtttgtaagtaatgccgaaatggttactcatgatattaaaaagctcggatacatacagtatttaggtgagttagcaccctatgacgcagatattcggctaaccaggtcgggccttgattttgcaactgctttagaaagtgaatccgtatttgaaaaattaaaagaaattagtaacgagcctttaactgttatcaaagaagttggtgtcgaattattaaaatcttacgcaaagaaaaaattcggcttaacggactga

SEQ ID NO: 435693 - DNA, 393 bp, Serratia marcescens
atgaagcaatcactggtaaaaatccgcgtacatacgccattcactttcacgcacctgaattatgaggtggagaagttcgctgttggtgtgcactcggtggcgccggaggtagccgaaaactggttcatccaggaatatgcggaaattctccacgacggccaaccagacaacgccggcgcgccagcggaggcgctggcgcagatcgccgacctgcagaagcagctggcggaggaaaaaagcaaagtagccgacctgacgacggaacgtgacgaacgcgatcagatcatcgccgagcacgtcgccactatcggcaaatgcgatgacacgatcgccgacctgcagaagcagctggcggcggcgctgactgagggcgcgaaaggtggcaaaaaataa

SEQ ID NO: 435694 - DNA, 549 bp, Serratia marcescens
ttgagcaataacaccagcacgcaggcaggttacctgacgccgatttcacccggccctgattacgatgaggcgctcgaacgtgcgctaaatcgttgggtgctcggtataaccgggctgccgccgggcaacgtgcgaccacgctggacacccacgcagccacctttgatgccgcttgatgtggactggtgcgccgtggggatttctggccttaatggtgatgcaaaccccgcctttgccaatcagaccgatgaaagcgcggaactgtggcggcacgaaacaatcgagtgtttttcatccttctatggcccgcacagccagcgcattgtaacgatgttccgtgatggcctgactctgccgcaaaataacgatcagctgatcgccgtaggcctgtctctgggcagcattggcgacatcattcctttccctgaactcatcaacaaccagtgggtgcgccggtatgacatcgccgtgcgcctgcgtcgaaaagtgatccgcgagtacggcatcaagtcgctggtggaagcaccggttcaattcttcggagaataa

SEQ ID NO: 435695 - DNA, 399 bp, Serratia marcescens
atgggaatgatgccaaaatttgctagcccggcagcagactacgttgagcgccgcttgagccttgacgagatctgcatttcaaagccgagcgctacttatctgctccgtgccaccggccaggcgatggcggtcggtatccacgctgacgcgttgcttgttgtcgattcgtcggcgacgccggtgcacggcagcattatcgtagctgcggaggaaggtgcccacgtgctgcgccggcttcgcctttatccgaaccgagcgctcgaatttctggacggctcgggccgggaaactgagctcggtaatgaagattcggaagaggggatcgaggtgttcggcgtggtgatgtactgcgtgaacgacatgcggagttgtgaatgggatgacctgccggttatttga

SEQ ID NO: 435696 - DNA, 879 bp, Serratia marcescens
ttgtctcgtgggctcggagatgtgtataagagacagccccagacccgcgcccgctcggcgggcgatacggttcagttgccggctgtccagcgcccgatcgcaggcgatgatgataatgaccgaaccggcgtccacctgcggcggtgggtccgccagcagcttgcccagcgccgggccgacgcgcacgccgctcagcgtcaacgagtcgagggtaccgaagttggccagcaccagcacgccgagcgtggtgccaagccccgggcaataacgcgaggcggtgccgatgccgcccttcaggccgaagctgctcatgccgcgcccggcgccgacgctgccgcgcgcaaagcgggtggaatggttatccagcgcgctgaagacgtgctcctcacgcaccgccatcacctgaatatcgttgaggtagccgtcgttgcactccagcaccagcgggttgatggtggcgctgccgcggccgatctgcgggtagcgcaagcagctgcgccgcaccatggcgttgaacagcgtgccgacggcgaaggtgttgctcaggaggatcggcgtttgcaactcccccagctcattcaattgcaccaatcccagcggcttggcgaagccattgagcaccgcgctgccgcacggcaacggttggttgaacagatcgcccggcggcacgatggcggtgacgccggtctggcattcgccgtcggccaaggtgtgatgcccgacgctgacgcccggcacgtcacacaggctgtctgtcggcccggccggatagcgcgcgcccggcaggcggcgatggcgccgccaatagctcagcagattgtcgaggctttgttgttcaaacacctggctgtcaatcatggttccctcatccgccgttag

SEQ ID NO: 435697 - DNA, 1107 bp, Serratia marcescens
atgaacatagatataaatactattttgaatgacaccgtaaaagatatgcccgcagcaaacattattgtggttggtaaaacaggtgtcggcaaaagttctcttataaatggtgtatttagagggaattttgctaaaacaggtgttggtaaaccagtcacagaaaatattaaagtaattaaaaaagtcggcgttcctttgcagattattgacacccaaggaatcgaggtcgcagattatgaaaaaacaaaacttaatatagagtcatatattaatgaaaataacaatagtgagctatcggaaaactatgttcaccttgcatggctatgtataaatgacacagggaagagatacgaagacgctgagatagatatagcaaagtatcttgttagcaaaggtatacctgtaatagtcgtactgacaaaaaccaatgaatttaaaaataatgaattcgctgatgaagtcagaaaagcttttaaaaattacagtcatgcagtctgctctacgagagccatagcagaagttctctatgatgaagatgacgcggatgagatattaggtacaagaaagatcagaggcattgatgagttgattcaggtatcttacgaggttatccccgaagctcaaaaaaaggctttttccaatgctttatcaattaaaaataaaaaagcattggatataaaaaaagagcaggccagtaaagaagtattagcggctacagctttagccgcagccgcagccgcaacgcctgtgccattctcagatgcatttacgttagtgccgatacaagtcgggatgatagctaagattagttacacgtttggaatggatgtatcgaaagcagctcttactacaatggttacgtctctagttggtgctggcggtgcagcttttgttggacggactattgttacaggtttacttaaaatgattcccggtattggttctatcgtagggggtgcaatatctgcaacaactgcaagtgcaattaccaaagtattgggggatgcttatgtcttaattctttataaacttgcaaccgaatctgaaacaggagagataaactttgaattggcagccaaattactaaaatcgaaagtatcactctaa

SEQ ID NO: 435698 - DNA, 249 bp, Serratia marcescens
atgcctgataatattgaagtgcctaaagaaggcttgtatgtatccacaattcctggtggagaacgtttggttgttgttgatgtaaacgtggtacaggatgaggatgatgaagaaggggatgaaatctttttcttggtaacattcgttaatgaaggtgatgaaaacgatatgtcagcgccaagctgggaattcgactccactgaatggcgggaacatgttgcgagagagaaactagaattttttggctaa

SEQ ID NO: 435699 - DNA, 966 bp, Serratia marcescens
atgagaaagagattgcaagtgttcatctcgtcaactttcactgacttaatcgaggaacgacaagcggcagtttccgccatactgaaaaatggtgatatacctgcgggaatggagctgtttaccgctagcgataaaagtcaatgggatataataaaacgttggattgatgagtctgatgtttatattcttattctaggtgggaggtacggttcaatagaaccagagtccggccttagttacaccgaacttgaatacaattatgccctggaaactaataagccgcttttctcaatcgttattcacgatcatgcccttgaaaataaatttaaattatatggctcaagtgtaatggaaatggataataggactttatactcagagtttaagaaaaaagtcacttctcatatggtctgttttttcgaggatacgaaagatatcaagcttgccgttatggagagcctacccaaactagccagtgagaggacccttgtaggatggatttatggcgccgatgctcctgatacagctcagatcacaactgaacttactaagcttaatgaggaaaacaggaagcttcgaaaggaaaaagaaactttagcgtcgaaattgaagcgcttatctactcataatgatgatgatgaatttaatgatatagataaagagttttctaaaattaaattaatattaccagccgatgattttgaagttgacgaggatgttgaaaaggatttgctaactatggttgtggcatcgaaagagagattaatatctggtatcacgacaggaggcagtgagcatacaagtgtacgttatatcttggcacatgttgtcccgacgttggtaacgtatgggttggctacctatgaaaagttggcgggtacgacagtaagaagagtggtaatcacacccaaaggtttgaactatatgaggcatttaggaaagaaatatatagtttctaaatcatga

SEQ ID NO: 435700 - DNA, 975 bp, Serratia marcescens
ttgtgccaatgcttcccttacggtcgtgatgggaagcgcattagaaagcagttcgccaccaaaggggaggcgctttcctacgagcgccgccttttggcaaacaagatagctgttgaagttggtgatggtgcggtcaaattggccgatctgatccagcgctggtatgacatgcatggcaaaacgctgacgtccggtgagtctcggctttcgaaacttcaagctatctgcgaacgccttgacgatccgttggcgcatgaagtcgataagaatatgtttgctgtataccgtgaacgccggcttgctggtgagtggctggcaaaggggcgcaaagccattaaagaggcaacggtaaaccgagagcaatcatacctgcacgcagtgttttccgagttgaagcgattgggtgaatgggaaggcaataaccccctagatggcattcgccaatttaaggagggtgatcaggaattatctttcctttaccccgatgaaattaagcgcctgctggcggcctgtgacgagtcggataataaaagcctgggtatcattgttcgtctctgtttagcaaccggtgcgcgctggggtgaggctgaatcaatgcggcaatctcaggttctgcctggccgcgtgtctttcatcaacacgaaaagcaataaaaacagaacggttccaatatcaaaacggttgcaggatttgctgccgaaaactcgtggagcgcttttcaccacatcgtatgatgcgtttaagcatgcacttaaacgggctggtatcgagttgccaacgggacagcgtacacacgttttacggcacacgttcgcaagccacttcatgatgggcggcggcaatattctagtgttgcaacagatactcgggcatagcactattatgatgacaatgcgctatgcgcattttgctcccgatcatttagacgcggctttaaaattgaatccatttgataaattatcttcattaacataa

SEQ ID NO: 435701 - DNA, 354 bp, Serratia marcescens
atgagtcgcataaatgaaatcctgttctacgttgataaggactgtgtggttgattttaacacagtcctagcagatgagggagttgaggtcagtcagatgcttttattctcaccaacaggctttgaaaaatttgctattcatactgaaaacatcctgccaaaactcaaaatggtcgctgaggttctaaaaaagctggttatcctccataagaaaagcgtcagctttgaagcaaaaaatagtgatggttcaggtctgaaagcagatgtaacggcgggcaatgctgatgaagtaatgaaacttctcaaagcagtggaagacatttatatcacggtgaagaacagtgagcgtcagtaa

SEQ ID NO: 435702 - DNA, 645 bp, Serratia marcescens
atggggagtgatactaagggtaggcataacaggattgctggcaacgatttccacgaagagcgcataacggcagaaaattatatagccagggactttgtcaacattgccgttccagctattgaaaaggacacacgcccgttggtaccggctcaacgtaagcagctccaccaattgattcttaccgtggcggaagcagggaatgaagaaggctatgaagtatggcaccgagtccatgcgcaaattggcgtgagaagcgtcgaagaaatgacggtgagccaatatcaacctgcttatagttaccttcaggcacaattggacttatgccgagagaaatcccaaaagaatgaattgatatctgccttgcttaaaatcagtgctaataatgatcgttataatgatctgcttcagtattgccgaaaaagcttcggttctagccacctaaaaaaccttcaacgtaccgaacttcaacaagctctgttatggctagatgaagagcgttacgggagcaacgaagttgcaaaaaaagtacctgtgtccgtacagtggagacgcttggcctgggattaccctggtttcactacactggtttttctctttgggtttgctgttcccgtgattatagatttcatctttcttgggatttaa

SEQ ID NO: 435703 - DNA, 213 bp, Serratia marcescens
atgcaaccaattgaacacgctataaccaaaataagccgcaattcttcacgctatcgcggctttgttatcacttatcgtccgcgcactatcgttaacccaatagccagatatgaagtaagccaaggcgatcagtcttatggcttattcgatgcgcaagcacaggcgaccggctatatcgaccaactttactcacagcaccaggcggcagcatga

SEQ ID NO: 435704 - DNA, 198 bp, Serratia marcescens
atgaacgaagccgaattaatgaagttgcttgcggatgcccgctgtgtttcacggctgcaacttctggagttgttgagcacgaggattgaacgccttgaggccgacaacgccacccgcgatcaaatcctttccatgctgaaaagctggatttccgcccgccaaaaggtcggcactcaacaagaaggtgccgcgaaatga

SEQ ID NO: 435705 - DNA, 141 bp, Serratia marcescens
atgaacaccttcattgctgtaatcgcagtctggtttgtcctcgcctttgcggtcgtgggctggttcgcataccgccagtgcaaatgctgccgggagttcaatcaacagtgcatgccgcctgaattgcgcaattacgactaa

SEQ ID NO: 435706 - DNA, 276 bp, Serratia marcescens
atggaagaccaatatattgatggtaaaaggaaatctttgcgtgacgatgagatttccaaggtagcaaaaaaagccaaggccaaagagctgggcggcaagccaatggtgacagcgatccagaatgagagtggcgaggtttaccgcgtcattgttgttgatggacttggtgcttatatggcccttgcgatgggcattactgctttggggcttgtagatctgcatgctgataacctgagtccgggtaaatacgattctctattcgcgacaggtaagtga

SEQ ID NO: 435707 - DNA, 2466 bp, Serratia marcescens
atgacaaaacccattcgcggccgctatgaaccatcaccgccgttgccataccctggcagcggcgcggacgtttctgactatccccatgcatggaataagcccaaagcggctatccatgtggacaagactccttctgttgatctcgttgagctggctcaagagcaggagtttggcgcatgggtacagcgcaccctggcaccactgccgcgctttattcgtcggcgactgagtgatcgaattaaccactttcacagcactaaaggccggcacattgcccgcctgaaactgcgcgatattgctcgccgtgatctgccgattatcacccgcgtcaccgatgaatacgctattaagggcgacggcgaagatctcccgccatttgtgcaccttgacgcgctttaccataacttttcacacctgcgcgggctgattgagcgtttcaaccggcttcctgacttcaccgacgaagatattgagctgttggcgcaggatattgcgatctacatgacagcgatgttgagtgaagtaaatgaaacattggaagcattaggcgatcgggaactggctatgcggctctatcgggaggcctccgcacttactgcaatgttccaggctaacccgccactatcaactaaaaggtctatatgggtagatgaggcagtggtagccgtccaaaagatgcgagatgcacgctattggcagcgcaacctgcgtaaatatgccatccgctggcgcgaacatttacacattgcctttggtgacgttcgtcggggtatttccccctattgcagcaagcatcatgctgaagaatgggatcagcgccgtaagcgcagccgcgcgatcatgagcaagctagagctggaagatcaggacaccggcgaaagaatatcgctcatagaacaaatcgataaaagcatttcaaacccggaaaagcgccgcaacgaattgatgacccgtatcggtgggttcgaaaaagtcgcgactctcgaagggtttaccggcagcttttttaccctgacagccccatccagctatcacgcgtacagctacagcggacaccgcaacagcaaatggaacggcaaaaacccacgccagacgcagcgctatctgaatcgcgtatggcaacaaatcagggcggaactcaagcgaagggatatcccggcgtttggccttcgcgttgccgaatcacatcatgatggaacgccgcactggcacggcctgctgttcaccacagcagaaaacgttgagccgctgcgcgagatcatgcgggattacgcgacgcgcgaagacgccgaagaacttgccggcagccacggtaaacagccgagatttgaaatgaagccgatcgatgaaagcgtcggcagtgcaacgggttatatcgtcaagtacatatccaaaaacgtcgacggctatgcgctggacgggctgacagacgacgaaagcggacgcccattaaaggaaaccgccaagcatgccaccgcctgggcgtcatgctggggaatccgtcaattccagtttctcggcggtgcaccggtatctgtctggcgcgagttgcgccgcatgcacaatcaacaactggcagaccagatcaatccgctattcggtgagctgcatcgtgccgccgatggtgctgactggcgcgaatacaccttattgcagggcgggccgtttgttcttcgcaaagatctgcgcatccgcacctggtatcaaatcaaagacgaaccgaatgattatggcgaatacgtttctgtgatcaaagggttggtgatgccaaccgcagacattccgccggttgaaacccgccttcgaaaattccgcattgtcagaatgaagccgcagccaccggccgacgccgatcatggggttgaccttgaccttcagggcgcgtctgcgcccccttggactcgtgtcaataactgtactgaggtcaaaaaacaaccagattcgcatgatgatccgccgctggatatagggccggaacagcttgaaatcggccaaaaatcggccagcaagcgcaaacagcttgccgacagcctacgaaaccacaaaccggagcggaaaaagtcacctgccgaagagtttgaggcgctggcttatgccattacgacgggcgaatgcaccgaaccggatcgccagcgggccgaaagttacctgcgcgccgcagggtcactcaggcagatggaagaaaaggttacgccattggtcgcagacgtcgctgagcaggtgcagcgctgggcgaagatccgaaaaatcacagtgagcgagcatcaagctaatcaactggcattggggaaagaggtcactgtgctggataccatttatcgggcgaatccggtaaccggagaactgatcgttgttggtatggatccgcagtggcgtaagtcactagcaaaacataaggccacagacctggtatcccgctggcaagctttggcaagaggccgggtaaataccatcgctggggcataa

SEQ ID NO: 435708 - DNA, 345 bp, Serratia marcescens
atgactacatcagcagaacgtaaacgcagccagcgccagcgcgacaaggccaacggcatcaccacgataaccctgcgcgtcgatagccaagaaatggcgatgatcctggaaggttgccagcagcgccggatcgcgagggaaccttacgaggtgacggaatacctgatcggcctcatacgacaagacaataagctgttgcacaaacagctggccgagctgcgtaaaagtagctgtgggaaatgcggcgacacgttgccgggcgaaccgggcgggtgctgcatgcggggagactcccagtgctggcaaactatgggatataaaaaattgatgattaaaacgttatga

SEQ ID NO: 435709 - DNA, 675 bp, Serratia marcescens
gtgacaggattagaaggaatgacaatgcgcttgcaagatattggatatacagggaagttatataaattcttcaaggaagaaagccacgccatcgatttctgcaaaggaaatgtttacataaatacattatcagcatatcgtggatacgaaaatcccgaacaaggagacaaaaaagaaggagtatggagtcatgaaataacatcactaacaactgaactttcgaaaaaagacgaatacaaagcttacgagcaatttggcatatttttaggtggaagcggaacaacaataggctcaataaagataacacaatcgattcctgacgcctatgccatatgtacaaccaaagaatacaaacctaatatttttgagaaagatttcggctcgcactgtgtggaaatatcaaatgcaagaaagtttttcacacgagtatccagaagcattttattagagaaaaatggcaaaagcatgtcaggattctattcaaacgtagaatatagaaagagaaatggtataaatcttgacacgccaaaacacataggattcataaaagaaccaaatcatgagtggcaaagtgagtttagattcctatgggttccagatgatccatcagaaaaactatccgcatttaaaattgaatgtaaaaacattataaccctttgcaaaataatatattag

SEQ ID NO: 435710 - DNA, 213 bp, Serratia marcescens
atgctgaaggaagagtttgctcaggcactacgtcaaaaattatctcaaatccccttagaaacgcgtcgaacttgggatgaaaacaaccttttcgcttggtatatgaacgccatccgcgaagacagttatttgcgttgggaacgttgcccaggcgacccatggcaatgggttaaaggcttctgtgaaaatagttacggctcaaaagcctggtaa

SEQ ID NO: 435711 - DNA, 600 bp, Serratia marcescens
atgaatagcctgttgccgcctagttcatcgcagcttgagcggcgcgcggcggaggcttgcgcgagcatcagcgatctgaacgtcccgctgcgtgacctgtggaacccggcgcgctgcccggtaaagtttttgccctatctggcctgggcgttttcggtagaccgctgggacgagaaatggacggcggcagagaagcgcaaggccgtgacggatgccttttacatacatcgccgaaagggcacgattgccgccatccggcgtgtcattgaggcaatggggttttcaatgtcgatcgctgaatggtgggaggtcgccgacccgcgcggcacgttccgtctcaccatcgacgtgaacgacgtcgggatcactgacgaaatcgtcagagagctggagcgattaattggcgacgccaggccggtcagccgccacattgcccaattgaatattgcgaccaccgtcactggcgttatctattccgccgttacagtgcatgacggcgatatcgtcaccatttatccggccgactacgagccggacgacagcatcaaatataacggcgttgcgggtttcagcggcgattaccactattccggggagtga

SEQ ID NO: 435712 - DNA, 1902 bp, Serratia marcescens
atgacgaaaattaccgaaaacaaccattgggaagatgagatttatcaaatacagcgcggtgataaagtcaccggcggacgtgacggggttgccaatattcaggcgcagcaattggcaaaccgcacgcagcatttaaaggcagaagccgatcggctaaatgggctggcactgagttcgagtggatcatacgagaatcaagagcaggcgcaaaaagccattgatgccggcattgaaaaacatcgatttttcaccgtctggtcagactcttcaaagttttggtctgaaaaatatgaaaatgtgaatggtgtagcaacacctaccggcgtcacgctgtcaagcggcgaatatttgaatgaggtcggtgaaattgcaactgaagcggcagagcgttcacagaaaatcactaacgtttcagatttgcgggatgaatttcaaaacaaaatcattggtgcaattggatctgaggatttcaagataccattttatgtaactgaaaatggcgattcatttatcagtggcatgaggattatcaacgttcccggcaagggcgcagtatttactgatagattccttgttccctatttttgcacccctgattatgaaaataacgagggaatccccgttatcggaaactttgcagtgcctgagcatgtaatacgcaaaattgatataaatggtgttctgggcatcaataatgaagggcaatctctgtcggtaggcggcacagaccaggcgcatgtgaaaatagttaacgatactcaaccacacaaaaataaaacgttcagcggttcaatacgtagcaagaaccccgacgcagacacatcaatcccgctagttgagagtaattacattattccggggtttgagaaatacccgcaatcggaaacctatctcagtgcctttgttaatgagctgacgagaaaaatgatggcagagcgcggcgtaaacagcgccgacgatttaccatttcatttttttggcgctgtccacggcgtcgcggggctaaaactcagcgaattgatgaaatcgtcagagagctatgatatttacatcagccagctcaaaaatgccgtgcgtcttgctaacgaagagggaaaaacatatttcgagttatgcaggtttttcagtcaaggcgaatctgattatcgagacttaacaccgccggaactatgggaggagcaatttattaaaaatgcgcgtgataaaaatcacgacgtcaagacgataacagggcaggatttcgatagtattatcgttggggcacaattagcttcgcatcacggctataaccgagtttttcccggaattgcgctgtcgatgcggaaactggcgcatgaggggcatttattgcttggttatccggcttatatcggcgcatatgttgatagcgttcacatgtcaccagatgaatatatttattgcggaaaattggcgcagcgctcgctgcaccgcgcattaaaaaacaatcaggacggaaaaccgttcgggatcacgtggctggcaatcataaaagagcaggtgcagggaaatgttcacgtctatatctataacgtgccaacaccgccactgagaataaaaacagattgggtgtgggaaacgccaaactacggttttgaagtagttgaccgggtgacgttcgaatacatcgacattatcacctctgttgaagttacggggtgggatcgtataacggtcattacgtctcgtccgctggcagaaaacgaagtcatgacttacggctggggcgttactcaattaatggggaaatcgggccgtattaatgggcctcgcggcaatgtttgcgatagttccggcgatattcccggagaatcatacaccgattcggctggtacattccggccgatggacgactatgcagaaatttggaaatcggagcgttaa

SEQ ID NO: 435713 - DNA, 798 bp, Serratia marcescens
atgctgattgttgcactggactcacaaatcccaaacccaaattttaaaccggttcagacgcagttcaggacggttaagggatgcatcgccgcatggcgcggcgatttcagcgttgatctgacggggaacggccacacacttacccctgtcggccgcccaaatcagggcgttttctcggtattgtgcaacaaggacaacggctatctgacaaacgtcccggacggcataaaccgcacgctggtcgttgttcaccgcctgccggcaaccgtcgccgcaccagaccagacctactcaaacccgctgggcaatctgtcgcaaagcgacacaaatacgggcgtggggattgggattgttcaggcatccgccgcacacctggatttgcatcaaatgaatggttgcgtcggtgccgataagaaagacacgccgctattttcaaaagcaaaaccagccccggacaaacccgtttcgaatgcgatgcgttggcagtggtcggcgttcgccgttgacggggataataacttctgcgcgatgtacattccccgccagctcgatgatctcgtcatgggcgcaaatgcgccaggcgtacagctgaaaaaccgctgggtgacaaatctggacggaagcccggcatattacaggatcggggcatggcgtgatccgtcaacacctggcgtgaaatcgtcagcggtggaaattgcctatgtcgcaatctatgaccggccgttcatgctgtcggatatgcgtcagcaatatcagcatgaaaaatattacatggcccaatttgggaatgaaatttga

SEQ ID NO: 435714 - DNA, 1092 bp, Serratia marcescens
atggtgaacgctatgatagagaaaaagtacagcgcagtgatcaccgcagccggcgcagaaaagctggcaaatgccgctgttactggcacgccggtagccatcaaggaaatggccgtcggcgacggcggcggacttttaccccagccagcagcaaacgccgggctggtcggtgagcagtatcgcggtgatttgaataagctggtgatcgctgacagcgacgccagcgtcatagaagccgaaatgatcatgccgccgcagattggcggcttctggctgcgcgagctggcgctgtacgccgaggatggcgaatgcgtcgccgtcggcaacatgccggaaacctacaagccattgctggcagagggttcgggccgcttccagatcatcaggatgcagctgaaggtaagcagtacagccgccgtagagctgattgccgatccgtcagtgattttggcaaccgcagaggacgtcaagggcgcggaagatgcggccaaggactacacggacgaagcgatcgtcgagctgggcgaaagcgttaacaaagcgatcgacgccgcagtaaaagctgcaatccgctacgcatgggagcaggacaaccctgtcggctcgtcgcgcctgttcaatcagaacgtgaaccctaacaccaaatggccgtggtcaacatgggagtatgccggcgaacacctgacgatcaggacggccaaagccgacggctccgacgtcggcgccgagggtggcagcgacacggtgagcatcacgcgcgccaacctgccgcagtcggtactgaatgtatcgggaagcacaagcgagcaaggggcgcaaacgctgcaaacagcgccagcgggcagacacaagcatcagggagggatggatgctcccggtgagccttgggatttcgattatatcgttggctccgataacgacagccacagaaagcgcaattataccagcgagacagaagaccatctccacgaggtcactgtgccggcgcacgctcataccgtttgggcacaaaccgaagcgctcggccagggtcaggcggtcaacgttgtcgaacgccacaaactgcaaatgctttggcaccgcgtagcctaa

SEQ ID NO: 435715 - DNA, 2847 bp, Serratia marcescens
atgagtgacaaaaacctccgattgcaggttttactgagcgcggtcgataaagtcacccgcccgtttaaatccatgcaggccagcaataaagcgctggccgcttctgttaaagccaccaaagaccaattaaaacagctggataatcaggctgggaaaattgacggtttccgcaagacaaaagcccaggtagccgccgccgctcaggcgctaagcactgcccgcgataaagcgcgcaatctggctatcgccatgaaatcaacggaaaccacgacggccaggcaggcgcgccaatttcagaaggccagggaggaagcggcccgccttcagcaaaaatattccgatctccggctgtcactgcaaaaccagcgcaccgcactgcaaaacagcggcatggcgactaatcgcctgggtgaggcccagcgatcgctgcgcgccaatatcagcaagacaaccggcgcattagaagcacagcagagaaaattggagcagcaggcgcagcagcagaaacgactttcagatgctcgttcccgatatcaaaacgcgatgggagtgcgcaaccaattggccggcactggcgcaggtatgctgatcactggccggatggctattgctggcatcaagcccatgctgtcggaatctgccgtatataatcagcacgttgagcgatttagagcgcagggtgtaacggagaagcaaatacaggatgcgcagagcttcgttcaaaacaatccggtgatcggtaacagccaatctgagctgatgaagttatatggcgaggcttatgccatcacccgcgatgaacaccatacccacgatgccacagtgcaactggcacgcgctgaaacggcgattaacatgttgggggctaaggggctattaacccctgaacaaacccatgctttcagcgagctgtcatatgccatgctgaagaacgccgagctgcgcaacgaaattcaagatccaaagcagttcgccagctttatcaatgaatctgtaaaagcgtttgccgtatctcaggcaatagttacgcccaaagatacaaatgactttatgaaaaccggcggcctagctgcaaaagatatcagccgggacgaatatttttatgcattctctcacctaatccaagaaatgggcggtgaaagaaccggtaacgccctaaactcagcgcgccagaactggatcagcaaacgcattaaagagcgcagcaaagatgaaatggacaaaatcgggcttatcgataatgttacatattcaaaaactggtcatgtgaaagattttaatctggtaaaccaagataaattcaatgccacaccgtttaaatacttaatggaagaggttgtaccacgcattgaaaaaaggtatccgggtctatccgaggaaggaattcagttaaagataagcgacctattttcaaatagaaccgcgtcagacttatttgcaacgatgtataaccaaagggaaaacatcaaaaagcaaatgcttgccggcacaaaagtgcaggatatcgacacaattattaatcaagggaaaaatcaggctccagggcaggaattaatacttgaggcgaaaaagcgcgacctttataagcagcttgggcaaaatatattgcctttgtatgttaaagggctgtcactgattaataatgcgctgacaagcgtttcagccttcattgataaacacccgaaattggctaaatatttcattctgggtgcggcaggcatggcaatactagcgacagtgagcggtgctctcatgttggctattgcggcactgcttgggccttttgctatgttaagactcagcacgcaagtgctgggcattaggttgctaccagggcttgcgcaagggatgcaaaaaataggtcgcgtcttctcatgggtagcaacgtccccactgcgtttcctccgctttgcgctggctggcgtgtcggggctgtttggatcgctgctgattccgctgggtttagtcgccgcagctatcgctggcgcagggttgctgatttacaaatactggaagcctatcaaggcatttcttggcggtgtcgttgaagggtttaaaaatgcaacagccccaatcaaagaggcttttgcgccattagtgcccgtcttcacctggatcggcgacaaggttaaggcgctgtggggctggttcactgatttgctgacgccggtgaactcgacaaaagaaagtttggacaacgccgcgtcggctggcaagcaattcggcgagtttctggcggcaggcattgaattagcgatgaccccactgaggctgctcatagactcgataaagtgggtgctggataagctggatgaaatcaaggcgcggtcggcagaaacgcgcaaactggcacaggaaaaccctgccgttgccgatgcggcccgccgcgccggtgtcatgatgacgccagggccgacaggaaattcagctgatgcaatacgctatcgctacaccggagagcatgacaacggcggccgtattccgctgggtaaattcggcattgtcggagagtatggcccggaaatcgtcagcgggccggtaaacgtcaccagccgccgaaacaccgcagcaatggccgccgttgccgccctgttcatgaatggtgcaacagcagcagacgccccgctacatccacacagcttggccgggaaccaatatcgctcagccggcagcgcgtcatatcagcgtaccagtgcgccaattgtcgagatctacgcgccgataacgatcaatccgcagcctggacaaagcgcgttagatatcgcgcgggaagtcgctagacaacttgacgcgagagaacggcaggcgcgcgccaaggtgaacagcagttataacgatttcgagtga

SEQ ID NO: 435716 - DNA, 810 bp, Serratia marcescens
atggcaaaaattagcgaaagatggaagcataatggaattgttaaaggttactgcaacatttgtgggatatatggtgtgcttactaaagatcatgttccaccaaagtgcgctataacattagggcctgttcttcagaaaacagttagtgagttttttcacgtacaggaacctgtaaagccaataaatgctaaaaatggtgcctatttccgaacaatttgcagtcattgtaataacgatgtcttaggtggacttgataaatcgattgaacaagtcactatgtcttttaaagaccagttgagtaagtatatgactggtacagtggcatttcctttcatcagaattccatttgacagtgtatctttcaccagagcaatgattggtcacatactatcagctacttcagttgaggactgcaaaaaggaaccagtagatagtcccttctatacacctttgaaaaattatgtgttaggtaataaaccaagctttgaggatacgcatgatatctactactggttttatccgcacaggatgcacatatcggctcaaagtgttggtttcatgaatgacggacatgttgcatttatatgtgctcttcatttttttcctatcggatttatggttacagtaaaaaatcaagggacttttccagcccattcatcaaaactatgtcttacagacaagttcctaacatttaatatgacttcaaggaactatgaatttacaacttttccttttgtaagtcttagtggcaatcaaatgtatgctattagtaatggtcacacttgtgtaagttatccaattataaaatga

SEQ ID NO: 435717 - DNA, 648 bp, Serratia marcescens
atgaccgtgtattttaaatccgtatatgactcgttggttcaaagagtcgataggcttgactatgcctttgataggcattttctatctttagaaaataaaaggaatatagacaggtttgcatttcaggaaggattgatctctgcaatgtggcagtcttggggagcattttgtaagacgttgctttttggttcaattcgcgggggagagacaatacatggtcagcatataattatgccacgatattccaccctaaatgatggtgagttattgtatgtagtaaaaacattatcattaaaccaaacggttactcaaattaaatcattgaaacctcataatgaactgacatggggggatgttgataaattaggtttggtattcagcttgctgaatacgccaaacgcacaaaatgtgtctattgctgttgccagttctatattaattaaggatttgcaatctgttaggaatgcaaatgcacatataacacctcatactatctcaagtattaattcggccaaagtgcggtattcgaatacgaaatatagacatccttctgatgtcatgttttgggttgagcagaaaacccatgattttctttggaaatcgtgggttgatgaaatgaagttgctcgcaagtgttatgattgagtaa

SEQ ID NO: 435718 - DNA, 732 bp, Serratia marcescens
atgacttattccgtttctgcagatgtgataagggcagcgaaacgaccagaaatacttcaaatgttcaggagaatgaatgcttacactctccctttaaatgatgctgagaaaagacactcggcatttactggtgagtttaaattctttataaatgaactttcagaccatctaagtgaattctttatagagtttggtgttttcacagatcgtgagattttgagaatgaaagatgctgagttgttatctgaattggtactttctattgaaaatggaatgatgagcctcagtcctactcagctaaatggaatatataaaaagtatgattcttcattcgataatcgtcaattatatgctagcatgatcttagatgcttttgatttcataatctcagagctagagccgttgagaaaaagcttcatgatgaaaagttatgcattgcattcattagttactgcgctgatagcggctaaatatggaattggtaatcttaatgagcaattgaacgttacgccgataggtaactttacatcggatattaaccttgcaaaggaaagacttatcgctttagctcaagcgcatgaagcaaaagaaatcgaaggcccttatggcacatatgtgaaggctacaacttcaagtacaaccaaggcaccaaacagaactataagagttggtgttattcttgaggcgctgggtctacatgtgagttacgaaaatcatgaccgtgtattttaa

SEQ ID NO: 435719 - DNA, 1812 bp, Serratia marcescens
atggctaacgctttttcttcgaaaacagtaaatattcacggcaacgataagatcagaacacctcaaattgaggcttttcaatctcttgaatctcattatgaagaccagaacaggagtcagaaagaggtagggataattctcccagtaggatgtggtaaatcaggatgtataacaatcacaccttttgcgtttaaatccaaacgtacattagtaattgcacctggcttgcatatatcatcgcaactacttagagattttgatccaagtaatcagtcaatgttttatcgaaaatgcaaaataatatctgataataactttccagagccagtggaaattagaggggatgatgcaaatctctctgatttggaagaggcagaagttgttataacaaacatacagcaactacagggaggaagtgaaaatagatggttaaaagatctaccaaatgatttttttgacttaattttgtttgatgaaggccaccatagtgtagcaagtagcttcatgtcgttaaaacaacatttcccaaatgcctttatagttaattacagtgcaactcctctacgtgctgatgggcaattaatggcaggggaaataatttacacataccccatattcaaagcaattaaaaatggatatgtgaaaagactaaaagcagttcaattaaaccctaaaacattaaaattcgtaagagatgacagtggtatagaggtagaaataaccttagatgaagtaaaaagactaggagaggaagactcaaagttcagacgaggtatagtaacatcaaaagaaacattaacaactatcattgatgcctctatccatgaactaaatcgtctaagagaagaaacaaatgagagtaggctgaaaattattgcatcagcattgaattatgatcattgccatcaagttgttgaagcttatagagcaagaggtttgagagctgattacgttcactcccgagaggacagtataattaaccaaagagtaatgaatagactcaatcaacacgaattagatgtaattgttcaagttaggaaacttggagaaggatttgatcatccttatctttctgtcgctgctatatttagtatatttaataacttatcaccttttgttcaatttgttgggaggataatgcgagttattgaacagaataaccctcaaagcattctaaaccaaggagtagtagtttttcacgccggagccaacatagcgaagcaatggggggactttcagcaatttagtgaagcagacaaggaattttttgaccaattattacctcttgaagattttacacctgatgcaggtggagatacaaaaacaatagaacctacgcttcgagaagaaaccgacaagatcgaagttaaatcacagacagaagtaacgcttgaagaaataagtctttatgaagatacagaagcacttgaagccttacgtattttacaaagaaaaggatactctgaagaagaagtaagcgaagcatacaaatctctagaaccaatttatgtaacaaaacaaagagaaagacaggccaagcgaagcagtttagataaccttactatgaatgaagctcgaaaattactggccaaacacaatataaaccctggtgttaaaggactagaccccacatttcagaaaacaaacttgatttatataaaaagccaaatagataaaaaatgtaatacacttgtcaacatgccaactggaagtcgatcagagtttagccgtcagcaactggagttaattaattcaagcattgatgaaattattttagaggttgaaaaggtcattaaaaatgggaaaaattaa

SEQ ID NO: 435720 - DNA, 849 bp, Serratia marcescens
atgctggccagccgactgacgggcttactgccgccgctgacggagcctgaggcgctggaaagcctggcgatcgccagcttgcaacaccctgttctgagcgctctgccatggcgccagaggccgtttcgcgcgccgcatcacagcgcatcgatggcggcattggtcggcggcggctcactgccgcgtccgggcgagatctcgatggcgcataacggcgtgctgtttctggatgagctaccggaattcgagcgtaaggtcctggatgcgctgcgcgagccgttggaatccggcgagatcgtgatttcacgcgccaacgccaaggtctgtttccctgccagagtacagttgatcgcggcaatgaaccccagcccgacagggcattatcaggggttgcacaaccgcgcctcgccgcagcaggtgttgcgctatctggcccggctgtcagggccttttctcgaccgtttcgatctgtctatcgaagtgccgctgttaccgccgggtacgctcagccagcggaaaacgcatggggaaagcagtgagcaggtgcggaaacgggtgcagcaggcacgcgcccggcagctcgaacgcgccggtaaagtcaacgcgctgttgagcaaccgtgaagtggaacgtgattgtgttctgcaggcggcggacgccgagtttttggagacgacattaaacgcgctggggttatcggtacgcgcctggcagcgcatcctgaaagtggctcgcacgctggcggatttggcgggagatactgaactcgacaggcgccacctctgcgaagcgctgggctatcgcagtatggaccgtttactgttacagctgcatcgtagtctggaatga

SEQ ID NO: 435721 - DNA, 675 bp, Serratia marcescens
atggagcagaacacttttgttgaccgatttttccacagcagctgtgagctcacagatttcaggaaaactggtgagcgtgatattaatacattattcagctttctaaataatttacactccttacaggacagagtccgtgagcagtttggaaaaactatttcacagcacccagagtttaaattactgcgaataatcagaaactatcatcatcacgtcggcgacgttgatgaattcagagtttttaatactaggaatgaattttcatttagccattctgagatgattattatcccgttattcgtagttgctaaagcaattgttaacgcaaaaaaaagacctattggagaaaaggagatcaaagcaatatcagagttcatcgataactttgagcatatttcagagagggattcgtttttttctgaagagcgacatctcattaataaaggtaaaaaatactatccaggatttgacatttataaatgcgtttataacattacaaatattattgctgacatctgtcgtgacatacccgagctttcgatcaaagaatgtattactactttagatgaaacatataccagtgcaaataatatagataaactcaatctattctgtcatgccggagaggttccatttctcactactgaaggttatataataatttcacaaaactga

SEQ ID NO: 435722 - DNA, 720 bp, Serratia marcescens
atgcttaaaaatttagcgagaatgaaacatgcccttacggaatgggctatcaaagagagcatgcttgatgatgctactttttttactcagaaggaatggaacgaccgtggagaaaaactccataacgatgcactactggtcctagtgattgacggcagcgggttatttagtttattaaacaacggttgtgacacaaccgaatttgaggatctagttgagtcctttggcttctggtatgaacaggggtatagctggagcctgggcttttaccctactgacaattatgattacagcaggctaagtggtacctacacatccaaacttcgggatccgagatggttaaggaaagcagtcctagttaaggataaggctggacaccggtgcgaggattgtggagcgcgtgtatgtctcgaagctcatcactgctattacacgacgatgagtctgggttatgagccatgggagtatccacttagtgcatttcgggcgctgtgttctacctgccatattacacgtcctattcctgaaataagggcacgggctttcctcgcacgactgaaccagtcccagctttcaaggctgcttgatgggttggataatggtttcaaccgatttgaagccgattccttcattgagtttatgcggaaggctaactttcataagaagcatatggatgaagctcttttgcttctgaaaaaaaataccgatatatatgactga

SEQ ID NO: 435723 - DNA, 1359 bp, Serratia marcescens
atgggtagctatgcatatgattatcttaacaattcactgcttttagacaacgttttggtagcgcggttgtatcaaggaatttctgatttaaccttagagaaggagcttgtcagatatcgcgaatattgtctaaaagtacttccagaagtacggaaaaatgttaaaaccagcaatggtgcgcttagctgcatggcgactgatactatgtcacatatttcgcagcttaaacaagcggcattgtatttagaggaagcaatagtttcggatcctatttttaaactaactgatttcagaactgcttcgactgaagccatgacttcattcatgggtatggcgttaacctcaagaattgatcgccgagaattggctaaagccgctatcagacttattgagttgcgtccactggtcgcgggtggttacgttaagttgtatcccgtaagctttgaattagaacgtgataaagagattcacctactctattctgaaaaaggattcgaagatagcttgccgccgaatatattggaacaatataaattaagtgctgacgtgcgtagtgttcaaaacgataatgggcgtatgctagtgatgagggatctgtatctatgtcggaatattagcattcactttaaaggtatggaaggcggatatgcgatggggtatatgcttaaccctactgagtttaagtcgacaaataaaaaagatgtttacagatttatacaaagaaaaacatcggagccaccacttaaaaaagacttcattgcctgggtaaatcaatccgtaaatcaaacggccagaaatcattacattgaactgaataaaagaatcgctttatgtaattacttgggttgcatgtttggtactgagcatccgtttgaaagcaatttactaaacatagactttaactcacctaatatcaaagaaaatactttgaactgtactcttaagatggacgttccatttttggaaaaagtttcggcgactgatttaatggccatacggaatcatgatggcgaagcattccaatcgttccgttctgagctagagaaaggtctacgtgaggccagacatgaatcagatcctagccgtgttcgttctattattgaagacacgcaacatgaattatttgaagttcaaatgagccagattgcgccacaagttaagcacattaaaagaacacacttaactgaagcagtcatcgcgaccgcaggtttagggcttagtgtattgactggaggtactagtttactcgctacagcgatcgctgtggcacatggctataagtcacatagtgactacaaatcaaaagtcactgctaatccatgtcattttttgtggaacgtaaaacaaaaggcaaagtaa

SEQ ID NO: 435724 - DNA, 621 bp, Serratia marcescens
atgaagcgcaaatatctaacaggggaagaaataacaaggttacttaagactatttccatggatatggtttctgtgcgtgattattgtatggtgagtatggcctttttgcacggtctcagggtcagtgagctgacggcattgcgactcacggattacgaccccctatccaggaaaatttatatcgccagactcaagggcgggatgagtaccagtcatcccttgctgccggaagagaatacgacgttacaggtctggcttgccgaacggcaggtgtttgcgggacagcatcagccctggttatttttgtcacagcgcgggacgcgattatcacgacaacggttttaccagttactgcggcgttatggcgaacgagccggtttaccgctgccgttgcatcctcatatgttgcgccatgcctgtgggtataacctcgcagagcgtggtaatgatacacgcttgatacaggattatcttgggcatcgcaatattcggcataccgtgctttatacggcggcgaatgccacacgctttaataatgtctggctcaaagacgcaaatttgccgctgatgtcgccgttgcaggacgcgttgcctatcggcgtgctgtgcaaggatgtttga

SEQ ID NO: 435725 - DNA, 369 bp, Serratia marcescens
atgacgatggtcaatgttgcgttttggtcaaatgtggcccttaccctggcgctagtgctgctggtcatggtggggatttggaacacttgccgagcggcccgaaaaaatcgggtcattatgaagtatggcaaggaaacccgtgcacttattgtgaatgctacgccgcataagagacaggttgttgtggggaaggtgtcggtgaaattacaactgacttatacggtagatagggtggggtattatgttctgaaggatgtcattatatcaccctattatgtggatgcctttaaggcaggagaggaagtgcttattcgctaccgcgagggatgcccgggcgatattgttattgtaggtgaagtgggtaattag

SEQ ID NO: 435726 - DNA, 2277 bp, Serratia marcescens
atgaacagaatgataacgattcacacctcgttaaatgacacaccttttctttttaagacattaaccggcaaagaggctctgtcatcgttgtacaccttctcggtggatgtgctatccgaaacccagcctgtcgaccctaaaaaactgctggggcaaaccctgacggtggaatgtcgccaaacccctcagctcccaccacgctatttgtcgggtatcatgacgcgggttgaggtcaagggtcgggacagcaatgaccgttatgaccgttatacccttaccgttaaacccgccttgtggtctctggggcagggacgggattgccggatatggcaagagaaaagcgtgccggacatcatcaccaccctcttgcgtgagcaggatattgcgtttgaaaaccgcctgagctgggattaccggtgctgggaatactgcgtgcaatatcaggaaagcgacctcgattttatcagccgactgatggagcatgagggtatctattactatttcaagcacgataacgggaaacacaccctggtgctggctgatgcgcccgagcagcacgaggtgctcagtggttttgccaccttcccgtgtattgacgaaacggtggccgatgtctccggaccggggattgcacgctggcgggtgtccgagacgatgtccgcgtcgctgtatctgactgacgactatgattttcgccgtccacgcgccagcctgctgcaggcgagacaaaatcccgtctctggcggccagcaggataccgtcgtgtttgactggccggggcggtatacccggcatgacgacggggcattttacagccgaattcgccagcaggagcttgcgtgtgcacaggcacagatgtcgggggaaaccccgtcgctgggcatggcgccagggcatgcctttaccctgacgcgggcggcgcgcccggaggataaccggacctatatcgtcagcggcgcggagtactttttcagtgaggccggttattacagtcaggatgacgaagcggcgacaccggtgcatcgcacggcctttaccgctcacccggcggccctgaactggcgccctgcaaggcaaactgcctggccccggacatacggcccgcaaacggcggaggtggtggggccgcaggggcagaccatctggaccgatgaatacgggcgcgtcaaactcaggttccgctgggaccgccatcacgtccccggcaatgacgaggcagcctgctgggtgcgcgtgtccagtgcctgggccggatgggggtatggcagtctccaggtaccccgtgtcggcgaagaggttatcgtcgactttatcaacggtgacccggaccgtcccatcgtcaccggccgcgtgtataaccaggacagcatgccgccctgggacttgccggcggatgcgaccaaaatgggcttcatgacgcgctctgcgggcggaacacccgagaacggcagctttttggtgttcgatgatgcaccggggcgcgagacgttcgacatgcacgctgaacgtgacatgaacatgagtgccgagcgtgacctgacggtaaatatcgaaggggcacggaccacgcgggtgaagggcgaagacagttacacgttcgatgaacgccagtgcgtgcgtatcgccaaggggcggcaggttgatatcgcggcgggcggtgataaccgagaggtcacgggggacagcacgactaccttgcacggcaagcagacggttatcattgacggcgagctggttgaggaataccgggacgggcaaacaaccaccgttaccgccggtggccaaacgctgaagatacacgccggtggccaaacgataatcatcagcgagggtggccggtccattgacatcgtcggggatgcaaaaaaaaagataaccggcagcgagcgcgaggacacgacgggggaatggacgaagtcggtggcgggtaccattaacatcctgtccgatgcggatgtgaacattaaaagcgccacgaaaatcacgctggatgcgcccaatcaaaaggccactaccggcaaggggcacagcgaaagctttaccggtcactctttcagcatgacgggtgcatcggaaagctttaccggcagttcggtcagttttaccggctcgtctgtcagctttacagggatgagtgtctctgtgggggctttgggtatcagcaatacgccgttcaagtacaaaaaacacgataacaaggtccagtttgtcagtggcagtaccacgcttaacagcaatttcagcaccattatgagtgcactgacgaccttttcgtga

SEQ ID NO: 435727 - DNA, 507 bp, Serratia marcescens
gtggataagtttgtgggggtgttgttatttcttacgattgttgtgggtgtttacgctcagggtggaggagataatatgtttaataagttgaatcaacagcgtgagtctattggtaatgctgtgtttactgcaagtgattacaagcctgggttgcttaaacatattgttttatttaaattcaatcaggagatttcgcaagctcagaaagatgatgtggctaatcgtttcttatccctgaagcgtacaatacgttccggagatacttccccatatattctctcgattgttgatggtatgcaaaatagtggtgagggtgctagcgatggattcgaaatgggttttattgtgacattcaaatcagagggagatcggaactattatgttggccgcccactcgttgatgagtgcgattattatgacgaggcccatgacgaattcaaacgattcgtaaggccgcttcttgatgatgaaaacggtgttctggtattcgatttttcattgaggtaa

SEQ ID NO: 435728 - DNA, 810 bp, Serratia marcescens
atgataaagatgtataacggatggaaggcggcattatgtctggccatgacgctggggtatggctcctctggagtggcggctgtcgtcactagccagactgcctccgaaacggatgaagcgtcagcctggcggtttagcgtgtcgccatatctgtggatgcctgcgctgcagggtaatggggcgttggaaggggaaagcgggcggttcaaattgccgttccataagacgatgcgcaatctggacttcttcacgctgggtgacgtcagtgcgagctacggcacgtacagtgtgtttctggacgtgcagtacctagacgtttcaaaacacatgacgttcgcgatgccaggggtaagcgccgacgcgtcaatgcgcacgacccaggtgagtctgggggggagttatcaggcgtatgcgcgggcgctcgggggcgacaccgcttttggggcgccgcagcaattaacagttgcgccggtggccggggtgcactggacccgattgaacgcacgggcgtggggcgaagggcattccttgggtaaaagcactgactggactataccattcgtgggtgtcaaggtggattacgatttaaatgcggactggatgctgaccgccgaaggggatgtgggagcctgggggcgtgactggggactccagagccaaacctatttgggatatcgactcgggctttgggggcaggagagtctgttgcgtgtggggtaccgggttattcatcaggaccaccaaacggatgacctgcattggaatgtcactcagtatggcccaacggcggggctaacgatttggttctaa

SEQ ID NO: 435729 - DNA, 1122 bp, Serratia marcescens
atgctgaaaaaatgtaacacgttacggctggcaaggctatgtgccgccgtgttgaccgcgtcgctgctgacggcgtccctggcggaggcctgtacccgtattctctggaatgagaatgcgtcaggtgatgcggtggggccgctggttggacgcacgatggactggccgatatcgacagatccggtactgacggtctttccccgcggcacggcacggcagggggggcagttggggccactgactgtgattaaagagaaccctgcgagttgggtggccaaatacggcagcctggtcacgaccatttacggcgttggagctgttgacggcgtgaacgagaaagggctggcggcacatttgctatacctcaatgaaacccagcttcctccgcgcgatccgtcgaagcccggtttgcatatcgccttgtgggcgcagtatgtgctcgacaatgccgcaactgtgcaggaggcgcttgataccttggacgaggtccaaatagtgatggccagcctaaccggtaaagatggacatgtcacgcgtggtacggtgcatttgatgatggaggatgcgaacggtgattcggcgctaattgagtatatcgatggtaaaaaagtcgtacaccatagccgggacgtgcgtgtcgtgacgaacgacccgtcgtatgaccaacaaatggttgtgttggaaaacaccattcggctaattaccaaggaggggggcgacttgcaacacccgaacagcagcatacctctgcccggcaatgtgtcgccggaagaccggttggcgcgggcaagctattttttggcgctgatgccctggccgcaggatgagcgacaggggattgccggtatactggctattgcgcgtaacgtctcggtgccgttcggggcgccctataaacctaccgaagggatggcggtttacaacaccgaataccgaacggcgatcgacttacgcgagcggcagtatttctttgagctgacgacccgtcctgatgttgcctgggttgacttgatgaagttcgatctctcttctggcgcaccagtcatggcgtttaatccatatcagggtgagatgagtggggatattactacacggtttgcgcgggttaaggccccctattga

SEQ ID NO: 435730 - DNA, 141 bp, Serratia marcescens
atgcacaaacgtttacagcaaggagtctgtatccgcaggctgtggctgctgagtcgtcgcatggtgtggctgggtatggtgacggtaagcatggcgatatgggggttgttgctcgggcttatcgcatggctggagtggtga

SEQ ID NO: 435731 - DNA, 717 bp, Serratia marcescens
atggcagtgagtacaggcagtgagtgtttcagtgggcagattgcaaccgcttcccacggtcgtgtctcggcccctctgtcgatagcggtggttgatgcatgtcagttcgggcttattgggttgcacggcttgttgacccttcccgcgctttcaccgacagcgatagctgtcagtgctcatgagcaggtagaaagcgcgctggttgctgtacaccctggacaggcatgcatggggtatggcggtggggaacggtgtctggttttgcggctgtcggcgcacccggcgcaggccttgcaacagttgttgtatctggaacatgaactgatggtgcgagcgggttttcggcgcttggttgttctttcaccgttcggggtcaataacgccgtccggcaggtgctggtctgtggcggggtgcgactaccggtacgcattgtggatgcacgcagcccggtaatgtggttgcgtcgcgtggtgttgtcgcagggctccttgtcgcaggccggggaggatgaattgttgccccagatgccggcgttgatattgtccggccccgagcgtcgggttcttgccaggacattgatggaaatctcaattcaccagcaggcgcgattacagcaccgcaacaataagacgttgtacgcacagcggcacaatgcgttgcgaaaactccgcgcatccggggtggcagacctgttgcggcgatttgtttcgatgtga

SEQ ID NO: 435732 - DNA, 429 bp, Serratia marcescens
atggaaggcgcgacgatgggggcatgggtatggatgtgggtgctgtggctgagtcttagtgcgttgctgttgggggggatgctttcattgccacccaaagaggtcattgtgcctcgccctgtcaggcgtccaccttgtctgtggcgttttgtgcgcggtgatatggcggtgggcggtaccgtgcgtatcggtctgagtttggggggcgctggatggtggtgcggtgcggcgggcttgttggcatcggactggtctcggagcctgttggttgtcggggctggtgctctggtgctgatagcgctgtttaatgccgggcgtcggggggcgcagtccctcgttgggttggtcgtgctgtctggctttcagggggcgggatgggtcgtactcctgctgatcgtgcttcagctatacgggttgtcggtgcgatga

SEQ ID NO: 435733 - DNA, 474 bp, Serratia marcescens
atgtcacaggaagaagccaataaagtaatcatgcaatctcaattctctgctggagaaaaaaagcgcattgccccccgtcaatccaatcatgaggaatatacgttacccgactgtctggtaaattatcccccgatgccactgtatttggcggtggcacactttggactgttgacgcaacagatattatcgagagaggtgatttgtcaggcctttcatattgacacgcgtcgggcattggaagtgatgcgttatctcgtcaatggcgcaccgagtgtcacctgcgaatgcctatcgctggtgcagcggcggggatattgtctgcgcgtgctgagtattgcgtcaggtgagtcggcaacccaaagcgccacccctcccttctctcgcacgtctgcccgcaagcggggaagtacgcttgagcgggaacgtgcacagcatcaggtgcgtcagtggtttctgcgccggcccaatccctga

SEQ ID NO: 435734 - DNA, 1080 bp, Serratia marcescens
gtgtttgttctttctaaaggtctggctaggcctgcgattttaattgttgtttgttttgttggtgtttattcgcctttctcgttttcttactattttgttcaggagtcgagaaacaatctgcactattggagttttccatccaatcgtgtggagctcgcgccaggggaagggggtaaaaatctatcaattcaattggacattaggggggacttttatagctacaaagaatatgtcgcatgtgttgctgggtgtagtgatggtgtgcgttattcaacgccttatatcgaaaacgatccatggagaatgggggttgccatgattgcgccgtttaccattacagctagcggaggcgggcgttcagccactttcaacattaatggcgtatcatcgggggggcgtaattatattggtaatggcggcagtgctggtgacgtcaggggtatgtattttaccgatggcgttgcttatcactccagtccctggatcggctcatttcagacctcggtagatgcgacttacatatggcataacgaaacttacggtgggaatattaacttgagtgctcccgcaggaacgccagttggaacctatacttttaacggtacattggctcaatttaatcttcagtattgtggtacgtcgtgcaatccattatttagccagggcacatattggcaccctttcaatacaaccgtgtatatcacggtgctgggtaaatgtgcgttctccaatgcatcaatgatgcttgattactcaagcttaagccctaaggcagcgaatgggagtgtaaaaaaatcgacgactcaactgacgtgtaattccgacgtgagctccggtacgcttaaattggtctctacgtctggcagtaatcaaacctcaacgacgggtacttccgttaaagtgggggataatatggatgccattgttaccgttaatggaaaggacgcatcgagtggtattgcgcttcaggggccgttcaatatccctatcgaagtggcgtcgacactcaatacgtatggcaatatacctaagcccggagcgtttcagggtagtgcagttttgagttttgaacctgattaa

SEQ ID NO: 435735 - DNA, 966 bp, Serratia marcescens
atgatgaatgaattactttccctagtgttgtctaagttgtgtgtttttatatcacgacttgtcgttttggcttttttatttttgtgggcaagtgcagtaagtgctaatgggcaagattgtggatggtataagccaatcacgatgataggtacaatttcgggagctgctgaatccccatccatctcatggaataaccctgaggttgtttctgtgaactgtagggatgttaatggtaatgttattttgggtaggggctcaagtattatggataacgagtattatcagggggctcagatcttaaatcctagggttagtgggaatcgtatttattacactatccgagatggcatagagttttcacatactcccaaaagttggaatggttatgaccttcgtttgaatgaatggatttcccatggcccacagacttggacaaatgattggaactctaatgatttcaggcaaattgcaacaggttcagaagttaccgtggatcctaactctgtgttggccggtgatattgaaataccgctgactcacgttggttatctttatgtttgggactcgacgttaatacgtacaccattaatagatttgtatgtaactggtagtgttcatgttcaaggagggtgtgatgtatctccagcagcgcttgaaattgattttggtgatattaaaaatacagatgtcgccccaaaaaaacagccgtttacacttacttgtaaaaacgcctctgcaaatggttatgatgtttacattaacggtgagaaaagcgatggcgcagatgttaggactcatacatctctttcaggtgtcgatgttatactgagtactgaaaaaatcagcgagactgatggtggtaaaattattaatatgaatttaacagcgtcactggagaaaattacctcagaaaaaccatatggtgcgtttagtgctagtgcattcatggatgtcaggttgccatag

SEQ ID NO: 435736 - DNA, 444 bp, Serratia marcescens
atgaataacaacgtatggaagatggccgcactgatactggcaccctggctggccgggtgcagccaaacggcaagtgagatgccggcgtcgctggttacgccgatggcgagtgaacagaagcctgttgaaatcgctgacccccttccggtgccggtggctgaaatagccccgggcaggggagcggacgatgccgaagcgcgcatgcgtcactgcaatggcgagttgcaggcgctccgcaaggtggataacaagcgttatgcagaacggaaagtggaatttgaccgattgatgtcgggggcggcgatgtatgcgggtgtgcgtgggagtgtgcagtcccggacgcaagacgcggtggatgcgctgtatcgttatcggacggacaagttgtgcgcggatatcgggcaagatgtattgaatgcattggcaaatactgttcgtggttag

SEQ ID NO: 435737 - DNA, 528 bp, Serratia marcescens
atgagacgaccgatatttttgttgacagcgctgctgtggtgcggccaaaccctggcggatgtgcctatcacgataaaagggaccattctggagccggtgtgcacggtgacgggtgaggatgacggcagcacggtggatatcagttttggggatgtggggttggatgcggtggggagtgcggcggccgagcaacccatcaatctgaaagtgagttgtgacaacccggccccgacggggaaagcgttgaagatgtatgtgcacccgaccagcaatggcaagctgacggcggtgggggccaatgtcctggggacatctaaaaacaatctgggcattgccttgaccgccggcactgacggtacgacgccggtggatctggacacgtggatccccgtggtgggtgtcaatacggatgtggatgagccggtcggacaggtgacgttgaaagcgcgcctggtgacaccgtctgcgggttcattgcaggcggggacgtttactgcggcggcgaatctggtgatgagttaccagtaa

SEQ ID NO: 435738 - DNA, 1176 bp, Serratia marcescens
atgagagtcattgtgttggcgttctcgatggcgatgggtgccgtactgattggtttgttgttgatggcgacactgtttcttgcgggggcggcgcatgcgtcggagaacgtgccggcgctgttgcgctatgcccagcagtacgatgcaggcaatgagaccaaaagtgaaaggcgaacggaagtgcttacctcgccagccgctaggtcgcgccaggccgccgagacactgcgacacaggcaactggctgcccgcgtgaaagcgctgaccgcgcaactggccgagaaagacaagcagttggcggccttgcgcgacaaacagcaggcctcaggtgatgaggagagggcgcaggtgaaggcgttgacggcgaaactggcggaaaaagacgccttgttggccgcaatacaggagaagcaacggcttgccttgacgacggaggctgaccgggtgagggcgttgaccgcagaacttgccgagaaggataaacaactgggggacctggcgaagcaacttcctgccccggtgaagctggatacggcggcagcccgtcaggcctatgccacgggcgtgctgtttgggcgtgatgtgcaggcggcccggagcgccaatcagcaaatgggcctgaaactggatgatgccctgctgctggccgggctgacggatgcactgaccggccagccgaaaatggaggaaagggcgctggcgacggcgcaggaggacgcgcgcaaggcagcggagaaagcgctggtctcgaccgtggccacgcagaagaaggcggatggggcctgggtgggacgttttgcgaaacagaaaggggttgtgaaggcgcctgaaggctattggtatcgggtggattacgcgggagaaggtgcgccgctgaccgaggcgtccactgtcgacctggtggtgacggagacgctgacggacggcacggtggtgagtgacatggagggggcgggcagcagactgacggaaacggtgtcgtccctgccgccggcatttgcgggtgcgctgagcgtcctgaaaaatcacggttcactgaccctggtggtgccgcccgaactggcctacggtgacaaggggtacccgccgaaggtaccgccgggcgcgacgatggtttacaagctgcgggtggcggatgtgattgcggcacccgatgagaagaagaggaaaccgtga

SEQ ID NO: 435739 - DNA, 531 bp, Serratia marcescens
atgaataagcaggggctttggctggcactggcgttgctcggtgttgtggcggagattggcccggcgtcggcggttgacctgaacttctcgggaaccttgatagacaagcaatgcacgttcgcccagggggatgacccgctggaagtggacatgctgtcccgggctgtttcgttttttcatcggtatccgcgcacggaaaccgtgccgttcgacatcgtgctgaaaaattgcaccagcgccacgctggacaaaacggtgtcgatgaccttcagcggcacgcagaccgaggtggtcggcggggtgacgctgcttaaaacggacggtgggaccggcatccttattggtctggaaagcgacgcaggtcaggccatttcggtaggcagtccggtcaatgccggcaccattacgcaaacgggtgccgcgggtgagaaccgattccggtttggggcttacgcccggccggcggacctgtcgacactggcggaaggggcgttcacggcgaccaccacctttgaggtgacctatcagtga

SEQ ID NO: 435740 - DNA, 447 bp, Serratia marcescens
atgggcagaaaataccgaatgagtacgctgttgtgcctggtgttggcgggcggtgcctacgccgaagtgaatacgccgcgcgtgccggattacacgctgccgcatgtgcccacccccccgggtgaggcgctgtcgcgtgaaggcgtgttgtgggtcgagggggccatgctgtcgtcgccgtgtgcatcaggccgggtgatgacgggcaggctgcaagacggcgtggtgaaaacacaatcgccgtcggtggttctgctgctggaagggtgtggcgacggcacaaatggtggcggggcgcgattgccggtgactattgacgtgactccgggcctgccgttgcaggtgagtcagccccgctcttatcgactggcgcacgggaatagcatgctgcccgtgacggttcagccgggtacgcaggtgctgcgtgtggagatgaattatgaataa

SEQ ID NO: 435741 - DNA, 726 bp, Serratia marcescens
atgatgaaaatgaaaaaagtgacgtggatgttggtgggaatattggcggcggtcacgccggcgacacaggccgccgtggccctggaccggactcgcgcggtctttaacggggacagtaagtctatcagcctgaacatcagcaacgacaacaaacaactgccttatttggcgcaggcctggctggaagatgcaaagcagcagaaggtgacacaaggggcgttggtggtgacgccgccagtacagcggctggagcccggcgcgaagagcatgctgcgcgtgtcggccacgccggcggcggcgcaactgccgcaggaccgggagacgctgttttacttcaatctgcgggaaatcccgccgcgcagtgacaagcccaatgtgctgcagattgcgctgcagaccaaaatcaagctgttctatcggccgaaggccattgtcgcggcaccgggtgcggtgtggcaggaccaacttgtgctgcacgaagaggggaagggttaccgcatcgagaacccgacaccgtactacatcacggtcattgggcttgggaatacaccgaagcaatctgaaagcggggcgtttgaggtggtgatggtggcgccgaaaagcagtgcgcaggtgaaaagcgcgcgttacgccacgccttacctgacgtatatcaatgattacggcggccgtcctgttctgaagttcacctgtaccggtgggcgttgcagcgcgaagaaggcgtga

SEQ ID NO: 435742 - DNA, 2523 bp, Serratia marcescens
atgaatcagcgtgaattacgtttaaataaaataacgattttaatcagtcttgttatcctcttttctggtcgtgcgtctgccgtggaatttaatactgacgtactggacacggatgacaagaagaatatcgatttttcccggttttcccgggaagggtatatccttcccgggacgtatcagatgcaggtgaaactgaacggcgacagtctgggtaatgatattgccgtgccgttttatgtgcgtccagggcaaacgtcttcgacggataagtccgaagcgatgccggaagcctgtttatcgccaatctggctcgacaagctggggttgacggaagaggccctgaaaaaagtggggacctggcatcagggcggatgcgcggatttcacggcactgaaaggcactgagttaaaagccgatattggcagcaacatcctcaatatcaacatgccgcaggcatggttggagtattcggacgcgtcctggttgcctccgtcacgctgggataacggtattccgggcatattgctggattacaacgtcaacggcaacgtcacaaaaacgcataacagcggccagcaacaaaatgcagccatcagtggcacggtgggcggtaacgccggtgcatggcgtttgcgggcggactatcagggcagttatgccaacaccacgggccggaacagttcatcgcaacacaatttcgatttcacacgggtgtatctgtatcggccgctgccttctttgcaggcgaaattgacgctgggtgaagattacgtgagctccaatatcttcgactcctggcgctataccggtgccagcctggccagcgacgacaacatgttgccgccgaagcttcgcgggtatgcaccggaaatcatcggggtggcgaagaccaatgcccgggtgacggtcacgcagcaggggcgcgtggtgtacgacagcaccgtgcctgccggcccgttccgtattcagaacctggacagcgccgttcgcgggcaactggatgtcaaagtgaccgagcagaacggcgacgtgcagaccttcagcgtgtcaaccgcgtctgtaccgtacctgacgcgacccggccaggtgcgttatcaactggtcaccggccggccgagtacctgggggcatgatattgaagggcccgtgtttgccaatggtgaggcgtcatgggggatttccaacagctggtcgctgtatggcggcagtacgctgtcggatgattaccaggcgctggcgttgggggtggggcgcgacctgtttgcgttcggtacggtagccctggatgttacgcagtctctcgcgaaattccccgaccgggataaccgtcagggcaaatcctggcgcgtcagttactccaagcgttttgacgaggccaatgctgacgtgaccttcgcaggctaccgtttctccgagcgagactacctgagcatgcagcaatacctggatgctcgctatcacgacaacgacaccggacggcaaaaagagcggtaccaaatcagcctcaacaaacgctttgacgaactgtcgttgccgttgtctctggggctcaactaccagtaccagacttactgggaccagggaaacaccagtcagtacggcgtgaacctggggacctggtttgatatgccttccctgggggcgcgcaacgtgtcgctgacgttgacggcgaaccgcaatcagtatctgggtcgtgaagacaatgtctttaacctgatgttgtcggtgccgttcggcaccgggacggccagctacagcagtacgtacagtgatgaccggtttggtcagcgcgtggggtactacggccgtgtcaatcagctcgacagttacaacctgaatgccggcttggcacaggataacggccaatcgtcacgcagtgaatttaacggcatgtatacccataacggtccactggccgtggtcaacgccaatgtggccgtagcagagcgcagttactcctcgttcggcatgagtgccaacggcggtctgacgttgaccgggcggggtgctgcattgcacgccggtggctacaacggcggtacgcgtctgatggttgataccgacggcatcggtggcgtgccgattgatggcgggcgtgtggtgaccaatgactggggggtcggtgtgctgaccaatgtgaacagttactaccgtacgaccgcccgggttgatgtcaacaagatggcagacgatgtggaagcaacgcagggggtggttgagaccgcgttgacggaaggggccatcggctatcgtcgtttcgaagtgctgaagggtgagcgtctgtttgcggtgctgcggttggctgacggcacatacccgccgtttggtgccagtgtccgtgacgccaagggcagggagctggggcttgtggccgacagtggcctggcctggcttagtggtgtgacgcctaacgctgcgctcgatgtggcatgggacggccgcagtcgttgccagacgcaggtgccggcgcaattgaacagtcagcagcagttgctgctgccgtgcacggcgctaaaaccgtaa

SEQ ID NO: 435743 - DNA, 549 bp, Serratia marcescens
atgaaaagatggctgtatgtgtggatgtcgctgtttttctctctgccggtattggcagaaacctattcaagtttagatccgtttcgtggcaaggccacgatgagtggtgaggtactggcaacgggttgctccatcgctttgcctgatcgttatcagacggtctccctgggtgagcagccgatacgctctctggggcaggcaaagggggctcaggtcaaagcctttcatatccgtctggataattgtgcgccgtcaggctcggttgacaaacgcaaggacattgacccggccgtacgtatccgctttgacggcctgcgaggggaaaacgcggcctggtttcaaccggcaggctccagtcgcggtatggcgctggtgttgagggatgagcgtaatgaggtgctctatccaggggagtactcacaggccatttttgaccgcagccacaatcaacaactgctgaattttacgctggagtgggtgcctgatggtaatccacctcgtgcgggggattattacgctgcactgcgtttcaatgtggattatgaatga

SEQ ID NO: 435744 - DNA, 639 bp, Serratia marcescens
atggaatttgattggttgccgctttcttttatcccgtggggggtgttgagtgcggcggtcattcaggtgaagaagcagtttgtaaataaaaaatggtgttttttactcacgcaggaaatcaatgttatgaaaacttctatctctaaattggctgtggttgcggtattgggtctgacttctctgggggcgtcggcggcaggtaactccggtaaagtcaccttcagcggtgaagtggtggatgcgccgtgcaacttggcgccaggccaggatgggactgacatcaaggtgccatttggtcaactgtccatgtcgcaactgaatgccggccatgtggccgcgcagaagttcgatattcagctccaggactgtgacttggctggcaagacagcgcagatcaccttcaccggtacgacactgtcgggcagcaccaccttgctggaaactcagggcggcgcgacagggctgggtattggtctgtcaggtatcacctttggtactgccaagccgttgacgggtctgaaagataccggtaataacacgctgacctataccgcgacggcgcagcgtgctgacgcgggtactaacgtaactgccggtgattttgcggccatcaccaacttccagatttcctaccagtaa

SEQ ID NO: 435745 - DNA, 618 bp, Serratia marcescens
atgagccagcggaagtatttgacgcagtccgaagtggagcgtttgttgcaacaggctctggcagggggaaatgccgagcgcgattattgcttgatttacatgagttttatccacggttttcgcgtcagcgaagcgtgccgcttgcgggtatcggacttggatttgcgggggcgctgtctgtatatccggcgaataaaaaacgggttttccaccaaccatccattgctgaaggacgagttgcgggccatcaaggcctggctggcggtacggcggcgtttgccgggcgctgacagcgactggctgttcctgtcgcggcaggggagtgcgctgacgcgccagcgggtgtaccaaatcatcagtcagttgggcaaggctgccgatatttccgtggagtcacatccacacatgctgcgccatgcctgtggatttgcgctggctgaccggggtattgatacgcggttgatacaggactatctggggcacaagaacatccgccacaccgtgcgctacacggcgagtaatgcagaacggtttgaaggagtatggcatcgcccaaaaaacaggcgaaagagtagacagttaggaccaaactgtaaagtagtatatgtaaatcgttaa

SEQ ID NO: 435746 - DNA, 213 bp, Serratia marcescens
atgcagttaaccctcggtcgacactgttttaccctgagcggcaacgacgccttgtttgtggccgaagccatcttgttgcagcgcaagcacccggatatcgtcttgcctgaacatcgcagtgaaaaacacggtgtgatttgcctgacgaaccggcaggcagagttgcgtcgtatctgtgctgacgaagtggttgatcacaatgcgatcgattga

SEQ ID NO: 435747 - DNA, 558 bp, Serratia marcescens
atggcgacttttggttatgggcgagtttcaactgttcaacaagataccgaaaatcagagattagaactgctacaggccgggtgccatattgatttctggtttgcagacattgtgagtgggaaagttcatgcttcccagcgtaaagcgttcaatgaaatgctcacaaagatccgggatggggaaacgctagttgtcacgaaacttgatcggttgggaagagatgcagttgagattcttcaaacagtaaagaagttggctgcgcgtgatatccgggtgatagtccaccagcttggcacaacagacctcacgtcaactgccggaaagttgttactttcgatgttagcagcggtcgctgagatggaacgcgatttactgatagaaagaactcaggcagggctagcaagagcgaaagctgagggtaagaaattgggtagaccctctaaaacgacactagagcaacgagaagcgattttatcaaaaaaggctaacggtgatagcattagttctatatcacgttgctacggggtttctagggctactatagccggtattgtttag

SEQ ID NO: 435748 - DNA, 1392 bp, Serratia marcescens
atggctcagcgtgataatctttatcgacgttccagcgggatctatgttctgcgcatcaccgttccggttcgttatcgtgccctgatagggcagcgtgaaatacatgcatcaacccgcacaacccgtcatgcaaatgccagagctatcgccgcgcgtttgctagagaagtggtatacgtctttggaagagttcagacaaatggataaagagaagattcggggaaacgccccactgttggctggtgccggcaaaatcagtctgaagttattttgtgagtcatttggtgttgagcttgagacggtcgtgcagcatctactggcaaacaacgttccggtctattgctttgctgaagggcgaacagctttccaaatcgaagatttcactgaagtggaacgagaagataacggtggttttgtgctcaacaaccttgagcagaaaggtatcgagggcgtaatccggggctacgtcaaattacttcaaactagctatgcgctcaaacagcttctggagcaagggtataccgaggaggcggcgttcagaacaaacggcggcaaccgtctttctatctggctgatggatttccccggggttaggttggatgcgagttctttatttatcaataatgtgcaggctgagagtctgcgtagcgtttgggataaagcgtatgcgaaatcagagtcagggttgcccggtttctcaagtgttcctgcccttgtatcagcgtcgactaacccctactgcaatcctgcgtatataaacatgaccgtttctgagctactggaagcgttcatgacgtataaaaatacaggcgatataaaacttgcaagcgaagataaaattagatctcgtattgaacatttcatggagataatgggcgatcttaagctgggtaagctagaccgcgagttagtgaaagattatgttgccagaatgcagaaaatgcctggtaatctgtatttgatgcggcggaaatataaggtttcagagacgaacaagctgattgaaaaggcgttagctgacggtcaaccggtaatgagcagagatgcgattggcaggcatattgagtcactgggttcgatgttgagatgggctaagagcgaacgttatctacttgataaccctgcggagaatatgctcgctcagcgccgcgttatggtgcgggagcaagatcgccgcgatctgttcaccgaagaagagttaataaaaattttctccgctgattggtttaagaaaggcgagggaacacccaatcaatatgggcgttacacgagatttcgcccttatcattattggcgctgtatctgggcggacgcatcaatgaactttgccagctttatctggcggatattcgggttgataaaaatggagtgccgtttgttgatttcaacctag

SEQ ID NO: 435749 - DNA, 1092 bp, Serratia marcescens
atggatacctggatgtatttgacccaagggttcgaagtggcgctggtgccgcagaacctgattatcgccctgatcggctgcttcgtcggcaccatcgtcggcctgctgccgggcctcgggccgatcaacggcgtggcgatcctgctgccgctggcatttgccctcaagctgccggccgaatcggcgctaatcctgctggcgacggtgtatatcggctgcgagtacggcggacgcatctcgtcgattctgctcaacgtgccgggcgatgcggcggcgatcatgaccgcgctggacggctacccgatggcgcagcaggggcgcgccggcgtggcgctgtccatctcggcggtcagctcgttcgtcggatcgatgatcgccatcggcggcatcatcctgttcgcgccgctgctggcccgctggtcgctggccttcggcccggcggagtatttcgccctgatggtgttcgccatcgcctgcctcggcagcatgatgagccagaacccgctgaaatcgctgctggcggcgctgatcggcctggggctggcgacggtgggcgtcgacgccaacaccggcgtttaccgctttaccttcgacagtgtgcacctctccgacggcgtgcagtttatcgtggtggtgatcggcctgttctcggtcagcgaaatcctgctgatgctggaaagcaccagcgccgggcaaaagctggtgcgtaaaaccggccggttgctgttcaaccgcaaagaggcggcgcagtgcgcaggcccgaccctgcgctcgtcggtgatcggtttcttcgtcggcattctgccgggcgccggcgccaccatcgccagcgcgttgacctacatgaccgagaagaaacagcgacaccttcggcaagggcgacatccgcggcgtagcggcgccggaagcggccaacaacgcctcggcctgcggctcattcattccgatgctgacgctgggggtgccgggttccggcaccacggcggtgatgatgggggcgctgacgctgtacaacatcacccccggcccggcgatgttcaccgaacagccggatatcgtctgggggctgatcgccgcactgctgatcgctaa

SEQ ID NO: 435750 - DNA, 729 bp, Serratia marcescens
atgcgcgtccacgccagtattgaaccgctgaattgggagagcgacttcttccaattgaaaagcgccaagttacatttcgacgactctgcggccaccgtcagccacgctgatttggatgcttatgcgttggtgcaggctaaaatccccgcttaccgattggagtgggccgatgcgctgtcggcgctgggcttccggctggtcgaaggcgaagtggacctggcagtgaacattgcaactggacgcgagacggtcgataccgctgcggccggggtgcggatggccgtacccgaggacatcccgtcgttgcgggctgccgccggtgacgtgttcgccgccagccgatttcgcgcaccgtggtacgatcgcgccgatagcgggcgattctatgcggcctggatcgaaaaagcggtgctgggcacctttgatcatcaatgcttgctggtattggacaaccaggggcaacccgaaggatttgtcagcctgcgtgagattggcgaccaggaaatgcgtatcggcttgctggcggcctatcccggtgcatcaggccggggcattggctccagactgatggcggcggcgctggccgaatgccggcggcaggggatgcagcgcctgcgggtcgcgacccaggtaggcaatatcgccgcattacgactctatcaacgacagggtgccgtgattgaaagcaccgcgtattggttatatagaggtagacatgattccatttaa

SEQ ID NO: 435751 - DNA, 264 bp, Serratia marcescens
atgaacaccctggccgaccgttattaccgcgacacccattaccctatcccgcatgccgattttctgcgtctccagcatgcgcacgccaccggcgtgctgttcctcgacctgctggacaccctcgacctcggcgggcagcgccccgatgccgcgcaacaggcatcgtttgcctcggtcattgccttgctgaccgaccagctcggccacgtcgtcaacacctgtgaaacccaaattcttgcccgcatggaggccaccgccgcatga

SEQ ID NO: 435752 - DNA, 210 bp, Serratia marcescens
atgcagttaacgctgggccgacaccgttttaccctgagcgacaacgacgcgttatttgtggcggaagctattttgttgcagcgtaaagagcctggcgtcgtcttgccggagcaccgcagcgaaaaacacggcgttattcgtctggcgaaccggcaggctgagctgcgtcgtatccgtgccgacgaagatggctataatgcgatcgattga

SEQ ID NO: 435753 - DNA, 180 bp, Serratia marcescens
atgagaaggatgctatcaggagtaaaactgggcgaagttattttaaaaaaactcacccatcttaaagtaatcaagataggcgagttttttataaggccacactatataaatccagcctctttcaactccaacttcaccatcagtttcttattcacctctttcccatccaccccgctatga

SEQ ID NO: 435754 - DNA, 1383 bp, Serratia marcescens
atgagtgcggggaaattgccagaggagtggggtgaaacaaaaattggtgaaatcgctgacgttatctcaggcggtacaccaaaatcagggattgcagaaaatttcgcgccttctggtgatggtattgcctggctaacgccagcagacctgagtggatacaaagagaagagtatttctcatggagccagagacttatcgacacaaggttattcatcctgttcagcaaagttgatgccagcaggagcaatactgtttagcagcagagcccccataggctacgttgcagttgcatcaaatgagatttcaactaatcagggattcaaaagtttcgtttttacaaatgatatttaccccgattatgcttattactatctccgtaatatcaggcatcttgcggaagaaatgggaacgggtacaacatttaaagaaatctcgggtagtgctgctaaaacactttccttcgttatggctccgattgctgaacaaaaaatcatcgccgaaaaactcgatacgctgctggcgcaggtagacagcaccaaagcacgtcttgagcaaatcccacaaatcctgaaacgttttcgtcaggcggtgttggcggcggcagtgagtggaaaactgacaaatgcctctagaaatagccatagtcttattgactggtacagtacaaatctcggggcgttgatcgtcgattcctgtaatgggctggctaaaagacaaggattaaatggtaatgaaattactattttgagattggccgattttaaagatgctcaacgtataattggcaatgaaaggaaaataaagttagatgctaaggaagaaaataaatattccttagccgataatgatattttggttataagagtgaatggaagtgcggacttagctggtcgatttattgaatataagtcaactggtgatattgaagggttctgcgatcattttatacgtttacgcttagattcgaataaaatcatgtctagatttttaacttatattgcaaatgaaggcgagggtagattttatctgcgcaatagtttatcaacaagtgcaggacaaaatactattaaccagacatcaatcaaaggacttagttttttacttcccccattagaagaacaacacgaaatcgtccgccgcgtcgaacaactcttcgcctacgccgacaccatcgaaaagcaggtcaacagcgccttaacccgcgtcaacagccttacccagtcgatcctggcgaaggccttccgcggcgagcttaccgcccagtggcgtgctgaaaaccctgatctgatcagcggtgaaaacagcgccgccgctctgctggaaaagattaaggccgaacgcgccgccagcggtggtaaaaaaaccgcacgtaaaaaagcgtag

SEQ ID NO: 435755 - DNA, 1122 bp, Serratia marcescens
atgcactcactgagcaagctggtccaagcgcttatcgcgtttggcaacaaaacagcacaagcgcaaagcaaggaaatggatgacggtcgtaaagagatcacgtctattcggcttaaaccccagacacgggcgtatctccaggttcagagcgaaaacttaggtatctccgtctcacagctgatcaacatcatggtggatggtgtggtatcggttgaaaccacaccgcagaaaaatgtcatcgacacaatgtacgatcgattgatgatgttgtttgaaagtcacaacctcacaccattggagattagccggttgctgaagcaccggggggtaactctctctaagctcaagtcccgcgatgccttgctcgacctcattactccagaaatgctggccgagattagcgaatggtttggtgtgaggctcacctggctcaatggacggggagatgaaatttacgaaaataacagccttacctggtataaaaacaccgagcaaatggcggtgtcgcttattcagcgtcggattgaacacggcaaactggacatttacgtcataaagcgcgcaggtgtcagttttgcggcggcggaagaacacgacgatcataagcataacctacgaatgggattcttgctgaaataccgccacaaagtgggtgatgtggaattcgaaaaatatgagctgtgtgaattccagcgctggaattacaacagatgccgtgagcaacttaaactggtgttcaaatttatcaacgagctggctcaacgcaccaccggggtatatatgcatggcgttacggtcgatgataaccacatggagaaaatctcattgggtcgggtatttccttcccaggtaaaaaatgagttttccaaacagggggaatggtatcccgaagaacacaccgaagacaatttgtcgggatacagcaacaagaagttccgccagtacatcgatacttactgcggcaatccatcgaaatcatttataaaaaaacgcgacgcaaataataatcacatctgggaagtaaaggtgtggggagacaatcaggaaacacaagagtacttgtatctccgcaaggcgctggaagacacctacgagaaatatccccctcccgcaaagagataa

SEQ ID NO: 435756 - DNA, 225 bp, Serratia marcescens
atgtatacagtaattaagcatcggagggaaagggtgcaagcagtggatgaagtggttgttttagaaagaattgaactcatcgcccgtctgggggtttgttatgagagccaagcgaaagacaaagacattgcactgatatggatttcagaactggcgggggagatgaaaactagcattacccccgaaaaagtagaggtgatcaggcagcttgccgcgatctcttaa

SEQ ID NO: 435757 - DNA, 867 bp, Serratia marcescens
  misc_feature (102)..(111): n is a, c, g, or t
  misc_feature (838)..(847): n is a, c, g, or t
ttgcatacctctgaacaaatgacagaattcagagaaatcgccaaacgtcttgatctcaatcgaaatgcctttaagcaacatcacctgcattttgggagcatnnnnnnnnnnagcataaaccagactgactggactaatggatggcaatcgttgcttattgctgaagctctgaccattccggataacattaagcacctagaaaatgctgcaggagacctaattaaagcaacaggaatcattttagaatcaaatgaacctgataaacttgttcaactggcatctctttgcgattcattgtcaaaagcagcaggtactgatctgagctttatgttcgctccagatgttgttagtagaattgaagctacgaaaatggcaatcagccttctcaaagagatcgaattagccaaatcaaaattgtctgttacttatccaggaaataactggcaaagtttaaatgttctgcaggtcagaaactctcttgcagaggctgataagaaattttggttttttgcaactcatgcccgtaagaaagttattttcgaggtggtccggcaacatttacttaatgctactcccgatctatccgttgaccttcctattattgaaaagcttcaaattctatctcagagattgtcagagagcatacctttgacttcgactatgccgggatggcgtggtcttgacactgactattccgtcttacagaacaccctcgacttggccgacaccattcgcagtgcattaagtagatttgcttcatcacctcagcaacttgcagagcttcgctccacagttaaaacgttattgattgatgctaatgacttactgggttctcagnnnnnnnnnngccaaagcaagattctgtaa

SEQ ID NO: 435758 - DNA, 957 bp, Serratia marcescens
gtgcttaaacccggtggtttgctgattcttgagacgccaaaccccgaaaatgtaagcgttggaacctgttctttttatatggatccgacgcacaaccatccgctgcctccagcgttgctcgaattcattccgaactattacggttttctgagaactaaaatactgcgtttgcaggaaaaagcggcactgagagacgaagagacatcggtatatttggtcgatgtgttgaaaggtgtcagcccagactatagcatgattgcccaaaaagagggtgaggtatcgattgtcggtgagttggacgcctattttgataaagaatatggggttactctcgacggcttaagcgatcgctatgacctacgcttgaataacgagtttaagcgaatgaacacggcgttgcgtgcgcagacagtgaagttccacgaagtgagtaaccaattggagcgttttcagcaccaattggacaagtcacatcaagagctgatggctgtacatgctaataatcaaagcctacagcagcagctcattgacgtgcatgctaacaatcagagtctgcaacaacagctttttgatgcgcataccagcaattcctggcgtgtgacctccccattgcgttgggtttcatatcaatttaaagcggtgcgtgagcaaggcgttaaaactcgagctcgcaaagcagccaaaaaggttttgagaaagggaataaatacggctctggctttattccatgaacatcctaaattcaaagcattcattctttccagcgctagaaagctgggtgcttaccgatttctgcaatctgttttcagacgggttttaatttccgcgcctgactatcacgccgatcttatggcgaatgaacgtcatgttgtgtataaggaaaatatgacgagcagagctatcgatatatatgagcagctaaagagaataaataataagaaacacggggattcataa

SEQ ID NO: 435759 - DNA, 837 bp, Serratia marcescens
  misc_feature (734)..(768): n is a, c, g, or t
atggggctcaatgctctggtaatccttagcgaagggcatgctttcgctggtttcaggcttcaaccgcaagagtttgcacaactagttactgacgacgtatcttctgtccgtaaacgtgttgatttaaaagaaatggtagtgtttgaaactacgttggttactaaagcacagcctccttcctttactcaagctttcgaggaagctttaaagcatcttactgaagaggagtttcacgcagccattgatacccgtcgcgcacgtatgcaaaagattcgccctctggctctggggagcactcgcttagaaagtcggttagattcagaaccgaatgttcgacatggctttgaagatgcaccagtacttccttcttttgaacttgacatagagatggaaggtacgaaagatgccgctggccgtctcgtacagtggcaacgtaaactactcgatttgacgacccgtaaccgcttattgcatttaccagacagtgctaaaagtattcgactgatatgcgctaatcccggttacctagaagacaaactggcagagggaaaacgaatccgtattgtctcattacctgacctcgagttgggggggcgtgatgcggaattatatcgccagcaaacacatgcagacctccgggaggagtatgcccaacaggctttggagcgtggtgaagttgtatcacctctcgaaaaagaacgcctggaatcatcacttattgatctgtatcgaannnnnnnnnnnnnnnnnnnnnnnnnnnnnnnnnnncttggaagaaggaggagccaataccctgtttcttgcaattggtttcttgaaatggaaaaaatcagctga

SEQ ID NO: 435760 - DNA, 1503 bp, Serratia marcescens
atgttttcccgtttgaaactgctgtatatcgccgatgatattatttcacctgatgaattcccccgtatagtcagcccttccagcgcctgtcacggcctttcatacatgccggacaatgacattctgtcgcttttttctggttttcgcggtggcgaacggatccgccgtgaagtcggcgttacgcaaaacggaataagctctaacctgcgcgcaagagtgcaaagcgacctgatgagcggcgttgtcgtagcggtcgaaacccggcccggcgtgttggcgacgatggggccattttacgccgacatcgacggctacctgataccgcagggaagacaagagcccaactacccggtggacaagatagtgaagcggtacgaagaggccgtgaagtcttacggtggccgccgggcgcgcccgtccgtcttccccgcacaagtcacgcgggccaaaccggcctttggtccggatatcccggcgcaaggtggaagagcctcacagtcggtcgtgtctggccccttgaccaaagcgcaacgctggcaggagcgaaaatacctcattggccgcgggcaacggagtatctacccggacgcccgaatcgcctcggaacgcctggcggcaaacaatgtcgccgtcgagaaggcaaagctggcggagaatatctacaagaccacgaatccgctaaaggatacactcggcgttcccgagggctggaaagatatcagtaacgataatgcggccctgagtaaaattgggctaaacagaaatatgctcttcgacagagatgaatcgccggattttttggcaagggtatatcaacctgacaacagtatttttggtaaagagatgaatccgacagtcgtgttcagaggatcaagagcgccagaattcccggagggaatcggcagcgccgccaaaaaggcccttaggggcgatttgtcaggaattaaaaatgtgaatgactggataaataatggtgctcaggggatgggggcgaactccgagtattataaaaaggccatcaacattggcgaaagcatatcaaaaacccccggcattgatattactggtcattcattaggtggcggaatggcctccgcagcatcaatgaccagtggaaaacccgcatggacgtttaatgcagccgggctcaacagcggaacaattagaaaatacggaggggaggctcttggttcagccaagaacatacaggcctatcgagtggaaggagaactgttaaccacgttacaggaggttaataacgaaagtgattatgagcttataaaaaatgccctgcccgatgctttgcaaaaaccctggggcacagcattgcctttcaccttgaaagagtggtcatcactggcgatacctgatgccgccggcataccacacactcttgccggtgggacaggaaccttgctcgataaacacggtatagaccagacaataaagttgattgaagatcagaaagacgaggatgtcgccaccatcagggggagaatatga

SEQ ID NO: 435761 - DNA, 1218 bp, Serratia marcescens
  misc_feature (1163)..(1172): n is a, c, g, or t
atgttacgtgatttacgtaatacgcatcgagacgtttttcaggttatttatagcaaagcctcacaagttgaatggcattatttttggttaagtaatcttgttccggttttaaaagctatgcgtgatattgatggtatagaaattcatacttaccgtattgcacattggttaaatctagatccatcaggtgttattgatttttggatggaaatattgggatctgattggatagataagtcaaaattgataaataagattgctgtttctatatcgaatataaagaaagatcatgcatatttgatgtctccgctattactggagctatttaaatttccacaggaagaatatagctttttaggcagagcccttgctcgctgtgttgctgcaggggggatcgatgatgcggtgctttgggattacatcattgctgatgttaaagatgaagacatactgacctatcgttttggaaataagcttaagtgccgaccgcacgaatttggtgataaggataatgaattcctttcaaatagaatgattaattctattactttgttagagcaggctatatcgacaattgaacagtggagccaagtacggagttatagatatgaagaaaaaaataattatcgaagtggttttctaaatggaacttctcattatgatgatcgcagaatgagtgattttgagcataaagatagtcaacgtgtcctgatggatgctttagaagttgctattattcatcatgctaatatcaattctgagtggtggcaaaacaatcgtgaacgtttatgctttaatctggaaggatcgcttcgttactttgcattgttagcgtgcattaattctccgctaactaatcttgacatatcctctcgtttgctgtcgaaatcggatttattagagtctgagctttcacatgaactgggcactttagtgcagaaagtttttatccatttgagctcagaatcccaagacgcaatacaggttataatacttgctctttctcagagatatgctgatttccctgagtataggcaatatatgcttaaagatcaggtcaagtttattatttgtataccgtgctatttacgttcgccgtcatgtgtaagtatttttgatgaatatagtcgttcaaactggccacttgaacataaaccagatgnnnnnnnnnngagcactataatgggtataggcgagactcatttagcgatatgttaa

SEQ ID NO: 435762 - DNA, 573 bp, Serratia marcescens
atggaattcaatcaagacgcaaaagctgctatcgaaaggatggtaaaggcctatggagtcaaaacgaaactagctttatgtgaagccttaggtatcacagctagtgctcttgcgaacagacaaaaccgcaacgcttttcctgcggagtacgttttgaaatgcgccttagatacaggtgcatctgtacgttggttaacatatggtcatggtgacatgtttgaacagagcattgttacagcaccaaacacaatagctatccccagtaaagaactagtagatcgaaaactatatgacagagacacactattactcgataaaaacttagtgccttatgaaatagaaaaatcaacaattataattgaaggtaatgtaaagtacttagtaacaagtaaatatgctgacgtttatgacggaaaatggctcattgacatagatgagaacataagcattagaaatttaatacgagcaccaaataaaaaagtaatagtttccgatggagatagcacttttgaatgcccaatcgacgacttaaaaataatcgcaaaagtattaatgatattttctaccttgtag

SEQ ID NO: 435763 - DNA, 795 bp, Serratia marcescens
atgaatgataatcatataaggtgcgtgatatttatattggcagttttactttttgtttctggaggcgttttatctttctcagataaagttagtgctgctggcgttaattatggtgctggttttttatgtttggtttttgtgtatatctcgcaattcaagagttttaaaggttttggtattgaagcagaacttcaagaaaagatagatgaagcagaagggattcttaaaaggttgagagaggtgactttacctatcacgaatatgctttttatcctgctgtcaaagcaagggcggtggagcagacctatgccaagaagtaagcaactcgaaattatcaataaaatagatgctgagttgggcgggatcggtgctgagcactctaggttggaagaggccaaaaaggagtggcatagtgttaatatatatgatctttatgaggtggttcttcaaaagataaggcccatcttttctgaagagctgaaaaatagagagttaaaaataaaatcgttgggaagtgtgattacacctgagatttatgatgagcattcaaaagcaataaatcatagaaatgaagtgaataatgaacttgctaagtttaatgaatcattggaaaggcataatgaaactgacgtttgtaatcaatttttatctatggtgaaagagtcaaaagtcttgcaagaaaataggccgagtatacttgatgatataaaggatgagttcgatgatttggattattatattaagtataaaaagtttaggcggttggatgtttggttagctgaagacgaacattaa

SEQ ID NO: 435764 - DNA, 243 bp, Serratia marcescens
atgcacattttgtatgggtataagccggttgcatccgccgcggcgcaggttcacactacgcgccccttatcgcacgaaaaaacgaatgccatgaagctcaatgtgatttgttacgccctgctgggcctggcgctgatcgccagttttttctcgccgcatccggtgtggatggggttgctgctggcgaacctgctgacgtttctgatctacggcggcgataagctggcggcgcgcaagggatag

SEQ ID NO: 435765 - DNA, 492 bp, Serratia marcescens
atgcttaactcgtcgtggctcaatgagtcggccactctattccgtttcaagtattaccagaacggcagtcacgccggtttcatcatgtacatgagcgacgtggccgccagtcagactgatgtggataatatccgcaactctatgaaaggtgcgcgcgggcctggcaacttccgcaacctgttcatgtactcgccgaacggtaagaaggatggcattcagatcatcccgctgagcaaggtggcagcgaaggatgagttctggaatattaaaaacgttactcgtgatgaccaactgcacgcgcaccgcgtgccgccgcaactgatgtgcatcgtgccggagaacgccggcgggttcggcaacgtgaaagaggcgagcgaggtgttcgttcgcaatgagctgatatcgttgcagcgtcggatgcaggagttaaacgactggatgggggaagaggtgatcacctttgaaccttatgcattaggttctgaatcttaa

SEQ ID NO: 435766 - DNA, 546 bp, Serratia marcescens
atgtttgaaaaaatatcaaatattgcagatgtgttactaaagattcccggcgccgtgttagtgatgatcatcatagcgctatcgttaatattatttctacctgacagcgcggcccacacaatttacgttgatggctttagaaaatcgtttggcgtttatatcggcccaacttggctactgacgatcgctttttgtggtggacgcctataccaccacataatggaaggacggaggcaagcgcaaaggatggccaagttaaaggagtcacttgaagaactgacctcagaggaaaaagggtatctcctaccttacatcgccggtgataagaactcagtttatgtaggagttcaggatggagtgatggctggcctacaaagaaaaggcattacctatagagcttcaaatgtgggagatgttctgactggctatgcctttaatcttcaaccttgggcacggaaacatttaaaggaaaatttgcacctcctccttgatgccacaggtagacctaaaacaccaagggagaaatatcacgaagagcgttggtga

SEQ ID NO: 435767 - DNA, 858 bp, Serratia marcescens
atgcctatcacacactctccgttacgttatcctggcggcaagactgccatatttgacatcgtatcaggtattgtgaacgagaactccatgagtaacataacttacgcagagccctatgcaggtggcgcagggttagcactgtccatgctttactctggactagtggataaaatttacctgaatgatatagatagatcaatttggtcattctgggattcagttgttaataattcagatgagtttattgaaagagtaatatctacacctgtaactattgaagagtggcttgctcaaaaagaggttcaaaaaaacaagtcaaaagcctcaaccattgacttgggattttctacattctttctcaatagaacaaatagatctgggataatcaaagcaggcgttattggtggtatgtcacaaaatggtgactacaagcttggttgcagatatcacaaaaacaatttaatcgtaaaaataaaaaaaatatccgatatgaaagataaaatatctgtatttaatatggatgcaaatgaatttataaactcagttagtagtgataagaatgtttttttatgcattgatccaccctattttgtaaaaggcgcatcactgtacactaatttctataaaaaacatgatcatgaaatgttgcgtgacactatatgtaagataagtaacccttggattctaacttacgataatgccaaagagatacaagagctttatgctgaaaaggaaatgtttacatttaatttaagttacagtgccggagataaaaaaaggggagaggaaatattaataaaaagtgcagaccttaaaataccaagcgctatgcttgggcatagagttaatgctatttag

SEQ ID NO: 435768 - DNA, 1410 bp, Serratia marcescens
atggaaaggattgactacagttcatggcaaagaatcaatttatcggtagctaatttaaggctggatagagaaaacccaaggattccagaatacgcgcctaaaaaaaatacgaaagatatattagattatctttttgaacacgaaaaaatagaacgattagcaaaaaagatcgtggacaaaggatttattaatcatgatccaatctacgtaattaaagaaagcgataattatgttgtcgttgaagggaaccgccgggtttcagcacttaaatgtttactagaacctgatttagctccatcggcaagaagtcgtagatcaatggagaggttaaagaactcgttaggtgacgacttaatagaaaaaatagaggtctatgttgccccatctagaagagaggttcaaaatgtattgtttgaacttcacgctgaagggaaactacaatggagcaggcagcagaagaacaagtttatatctactgctggttacgatagtggcgaatcaatagaggatatggcagagagatttaatgtagccccaagtgagatccaagactccgtacaagaatattttttagaaaggtacttcactaaactagcattgccaactgacatagaagaaaaagcgcttaactcaagctttagtatttcaacaatatctcgattggtaaattcaaaatacttctcggataaaactgggttcagcattcataatgggaagttaacaaccatcatcgatacaagcacctttgatcatgtactgagagagatagttactgacattgtcaagaaaaatataaactcaagaagcctgaatgatggtgaacagataaacacttacttagaaggtaagttctcaacagcacctaatccttccaatattgaaggagtaagtttccaaccattaaatgattatgcaaccaacaacgcaggaaataagaataataaagcaagttctggtgacaagaaaagaagaaaagaaagattaatatcaattgataagcgatatgtcacagggctaagtaaactagattttctgattgaggaaggtcaaggattatggattgatacacataaaaccgcaggggctctattattgaggacaatattagaactatcagttgttcgagtgtttgaaatccataaatgtaaagaacagtgcctaaatccgaatggtagagttaaacagatttctgaaaacatgaaagcgttggttagaagggatgattggttcactaataaagcgtatttagatgaattaaaaagattcataaccaaagacaacacttattggaattccttagagtcattgaatcgctatgtacacggtgagtttcttcttcctgatagagatatgctacgacaagtttggatgataattgaaccgctagttgaaatgaaagcaaataaataa

SEQ ID NO: 435769 - DNA, 219 bp, Serratia marcescens
atggcttctgaaactgcgcgtactgtgccgctgacacctggccagcgggccgacggtttgcagcacatcgccgaattacgtcgggatgttttcaagtgcgacagcaccgcggaaataaaccgctttttggtagacgtgcgcaatggaagcgatccgcgacataaggacaacatcctggctctgagcgccattttctttttggctaacatcaagaaatag

SEQ ID NO: 435770 - DNA, 222 bp, Serratia marcescens
atgaccacacctactcttgccgaaaaaaaagatgaatacgacgctttgtacaggttattccgcatgaccgttgagatgcaacttggattgtgcatggacagtgtaagagcgaaggccctgtggcgcaaaattctcgccaatactgatacttctgcgttggctgatgtgctggctgagtgtctttatgaggcagatcacaaaataaccacgagtaaatcatga

SEQ ID NO: 435771 - DNA, 510 bp, Serratia marcescens
atgtttgattatcaagcctctaaacaggcgcactacgaaaaagcctgtcgacgcttcgcgacaaagcacaacatcaagcagttgagcgctgatgctggcatgtccgctcaagtgctgcgcaacaagttgaatccagaccagccgcaccgcctgacggttgaggaattgctgatgctgaccgacctcaccgaagacccgacgctgatcgatgggatgctggcgcagctgcactgccagccgtgcgtaccgatcaatgagctatccagcggcaaagtcgcggcgtatgtgctgaatgccacttccgaaataggcaaggttgctgccgaggcagttgcagatggcgccatgaccgccgcgcgccgcggtgcgatacgcgaaagcgttaatgccggcattcgttacatgacgctggcaggactcgcgattcagtcccacatccatgccaacccgacaatggcctccaccgttgatgccatcaccgccgttggcgcgtcgctgggcatgagctga

SEQ ID NO: 435772 - DNA, 393 bp, Serratia marcescens
atgtctcatgatattgcaaacccccaggtcgccctcgccgcgcctttttcacctgcgcagattacaaacatgctgctgcctggtctaagcggcgccattctggaagcagtgcaacacgcagttgctatgcacacttcccctaccatgtccaaagaggacttcattgccgttaacggcatcagcgcatccgtgctggagaagtggatcgctaacggcgttgtgctgctggcgctaacccctaccactaccgtgaaacaaaaccgaaagaaccggaaaaccggcgagatcgaagaggtcacgatgaccaagcacggtaacgccctgatcaatctcgaagcatggcgcgagaaaaaccgccaggttgcgatcaaatgccgctatatccgcggttaa

SEQ ID NO: 435773 - DNA, 846 bp, Serratia marcescens
atgcgtatagaaaacgcggtagcgtcagaagttttagaaaggatcctttcttcttatggatttaccatgcagaaggaacttgctgaaaagctggaaatttccagtagtaatgttggcgggtggcttttgcgtgggcaggttccaggtacggtaattgtgcgatgtgccttggatactggagctgacgttacctggttggtgactgggaagtttgcaaattcgaatattgatgttggcaaatccatacttcgtggcaaagctttatatgaaaaaatccaagcagcagggggaaaacctgtgctgcgaaggatgctagatgcgtacgggtttcgaactcaaaaagagctcggcgactttttgggcatttccaccgtaacaatcagcacttgggtcaggcgtgaatatttccccggtgatgcggttgtggcgtgtgcgttagacactggtgtatcgctactatggctgtccaccggacaaggcaatcctggtaaccccgatgcggtaacttacgaacctaactttgtaactttgccacgtatttctatttcgtctggcaaattagtcgagattggacgttggattgtagacccttcctttgttcctgaaagtgaaacatctctgaattttgttgagcggggaaatgatgcttggttgattgccttcgatagaaatactattggtaatggaaaatggctactcagtattgatggagttcacgatatctatactgtttcacgtgtgccaggaaacaaaataaaacttttaggtacctcatctgaatttgaatgtctagctaatgatgttatatgtattggtgaggttattaagtcaatttcaaatgtctag

SEQ ID NO: 435774 - DNA, 750 bp, Serratia marcescens
atgagccatgacaaaaaagatagaacgacgttttatttgggtggtattaatagagattatttgatgtctcagtacgagttttattttttacaggcaaagaaaagaatattttctcaattctctaatttagatgccgccgctaaagaacatgctgatgaatggcgtataaaagctgcagagaatttcaatccagatatacacgatgaaggagatatttctgagcaagcatatgatgaagaagtcgatttttacttaacgctggaggaaatgaaaaatacggtatatctttcgattatgtcgagtctttatcatcgttgggaaaaagatctgcgcgaatggatagaaaaagaaatgctccatatgtttcaaattaacgttattaaagataaaatttggactcaaaatatacctaatttaattgatttacttgaatcctttggtatttcgataacgtctaagccattttatccaaaactggaactatttggaaaggttgtcaatgtatataaacatggtgatggaaactcatttaagtcattaagagtaagtaaccccgagtatttccatgcagtgaatcatgtaaatgatgaggataagtataaatatataagttatgatgatttaatacttagcgaatctcaatttgatgatttttatgaagttattaatgacttctggatgaacattcctgaatatacaatgatgagtcaagcaaaaaaaatgcctacatggctagataaattactatag

SEQ ID NO: 435775 - DNA, 1287 bp, Serratia marcescens
atgccgacaggcgcaacaaaattaggcggatggctgttgatggccgccatgctgggcgtgggcggatgcgccaagccccccgaaccggagaagccctcgcggccgacaccgccggttacaccgatgcggggcatctggctgtccacggtcattggattggactggccgccggcggcctcgctgaaagcggaatccccgcaagagcgggcgcgcctgcagaagcaggggctgacggacgcgctggacgacatggtgaaaaccgggattaacacggtgtattttcaggttaaaccggacggaacggccctgtggcgttctgacatcttgccctggtcggaggtattgaccggcaccgtgggccaggatcccggttatgatccgctggcctttatgctgacagaagcgcaccggcgcggcatcaaggtccacgcctggctgaacccttatcgggtttccatgaatacccgacagcaaacgatagatgcacttaatcatacgctgcagtcgccgccggccagcgtctatgcgctgcatcccgactggatacgcaccgccagcgatcgcttcgtgctcgatcctggtctgcccgacgtgcgcaactggatcaccggcgtggtggctgaagttgtcaaaaactatgatgtcgacggcattcagtttgacgattatttctattacgaaacgccgcaatcgccgctggatgatgaaaggacgtatcgcgaatacggccaagggtttgcagacaaagccgcctggcgaagagacaatacgctgcaattgataaaacaggtttccgccaccgtcaaagcgttgaagcccgcagtcgcgtttggcgtcagcccggcgggcgtatggcgaaaccaagcggacgatcctgccggctcggcgacgcgggccggcgcgccgtcgtacgatacggcctatgccgatacgcgccagtgggtcaagctggggctgctcgactacatcgcaccgcagctgtattggccttttgatcgtgaaattgtccgctacgacgtgctggccaactggtgggccgaggtggtgaaaggcacgccggttcggctttatgccggggtggcgctgtataaagtgggcacgccatcggccagcgagccggcctggaccgtcgacggcggcgtccccgagctgaaaaggcagttggatctcaacgagagcctgccggggatggggggaaccatcctgttccggcaacgttatctgaccgagccgcaaacggataaggccgtgaagtacctgcgcacccgctggaaaaccggtcaataa

SEQ ID NO: 435776 - DNA, 495 bp, Serratia marcescens
atgacgacagaaattttactgatgattatgctggccggggtgggcgccacgctgtgcaccgatctgtgggccatcgtgcaaaagcgcgtgctgggcatcccgccccttaactacgcgctggttggccgctggtttatcggcctgttcgacggccggttttatcacgctccgatcatggcggcgccggtgcgacggggagaaaaagcgatgggatggctgctgcactacgcgatcggcgtcgccttcgcctttatcccgctcggcttggcgggcatcgcgtggtacgccgcgccgacgccgctggtcgcgctgctgagcggctggctgagcctggcggcgcccttcttcgtgatgcagccggcgttgggctttggcgtggcggcggcgaacacccccaatccgacgcgtagccgcatcatcagcctgctggtgcatacggtgtacggcctggggctgtttgtctccgcccgtttgttggcccctttgctggcctga

SEQ ID NO: 435777 - DNA, 2100 bp, Serratia marcescens
atgagtaggaccacattcaaacaacgggtcagccaactggatctgcggttgcgccaccgggtttcgatggtgcaccagaccgagtcgtcggaatgcgggctggcctgtctggcgatgatttgcggttattacggcaaaaacatcgacctgatcgcgctgcgccggcagttcaacctgtcatcccgcggtgcaacgctggttggactgaccggtatcgccgagcaattggggttgagcacccgtcccctgtctctggatctggacgaacccggcgcgctaaaactgccctgcattctgcactgggaattcaaccatttcgtggtgctggtcagcgtcaaaggccaccgcgcggtgctgcacgatccggcgcgcgggcgccgggccgtcagcctgacggaactgtcgcacagtttcaccggcgtagcgcttgaggcctggcccggcagcgaattcaccgccgacagtgtccgccatcgcattcatcttcgcacgctgatcggcagcgtgcatggcctcaagcgggcgctcggcaaaatcttttgcctgtctctggtgttcgaaaccatcaacctggtgatgcccatcggcacgcagctggtgatggatcacgctattcctgccggagatcgcgggttactgtcgctcatctgcgccggattgatgctctttatcttgttgcgggccgccatcggcatggtgcgggcatggtcaggattggtcatggcgacgcttatcaacgttcagtggcaggccgggttgttcacccatctgttgcgcctgccactcggttactttgaacgtcgtaaactgggtgacattcagtcacgcttcggttcactggatacgctgcgcagcactttcaccaccagtatcgtcggcgccatcatggacggcatcatggtgatcggtgtgttggtgatgatggtgctgtatggcggctggctgacctgggtagtgctcactttcaccgcgctttatgtgttgatgcgactgctgacctacggatattaccgtcagctgtccgaggaggcgctggtgagagaggctcgggccggctcgtattttatggaaacgctgtacggtatcgctaccgtcaagatgcagggcatggcagaacgccgcatcgctcactggctaaaccttgaaatcgacaccatcaacacgggtatccgcgtcaccaggatggacatgctgtttggcgggatcaacacctttatagcggcgtgtgaccagatcgtcattctgtggttgggaaccagcctggtgatcgataaccagatgaccctcggcatgttcgtggcgttcggcgcctttcgggggcagttctccgaccgcatcgggtcgctgacggaatttttgctgcagctgcgcatgatgagcctgcataacgagcgcatcgctgatatcgccctgcatccgcgggaggcgcgtaaacccgatcacccatacacggcgggcctgcaacctttgggattgacgacccatgccctgagctatcgttacgacagccagtcaccggctatttttgatggcctggacatcagcgttgcgccaggcgaaagtgtggccatcgtgggcccgtccggcgccggcaaaaccacgttgatgaaggtgttgtgcggactgtttaccccggattcggggcgggttgaggtgaacggcgtcgatatccggcagctcggcatcaacaactaccacaaaatgattgcctgcgtgatgcaggacgacaaactgttctccggctcgatccgggaaaatatctgcgggttcgcggacgagatggatgatgcctggatggaagcctgtgcccgtgccagctatctgcatgaggtgatcatgcgcatgccgatggggtatgaaaccccgatcggcgagttgggggagggattgtccggcgggcaaaaacaacggttattcatagcccgggcaatctacaaaaaaccggctattttgttcctggacgaggccaccagcgcgctggataaggagagcgaagctgccgtgaatcaggcaattaagagactcaacatcactaagctgatcattgcccatcgtgaaacgaccattgcgtcggcagatcgagttatacattttggataa

SEQ ID NO: 435778 - DNA, 951 bp, Serratia marcescens
gtgcaggcgcgcggccgcggcccgcagggcgagttcgaggcgcagtatcattacgacgcgctgggccgccgcagccgcaaggcggtgcgctacaagggcaaaaccgaacagacgacccgtttcctgtggcagggttaccggttgctgcaggagcagcgcgacgacggcagccgccgcagttggagctacgatccggccagcccgtggagcccgctggcggcgttggagcaggcgggcgatagccgctcggcggatatttactggtatcacaccgatctgaacagtgcgccgctggaggtgaccgacgcggcgggcaacctgtgctggtccgggcaatacgacaccttcggcaagctgcagggccagacggtggccggcgcggcgaagcggcagggcgcgcaatatcagcagccgctgcgttacgccgggcaatatcaggacgacgaaagcggcctgcactacaacctgttccgctactacgaacccgaggtggggcgttttaccacgcaggatccgatagggttgcgcggcgggttgaacctgtatcagtatgcgccgaacccgctgatgtgggtggatccgtttgggttgacatgtagccattctgctaagaatcctaagcaggctcacgctgctataaaggataaatggggacacgatatgactcctaaagaaatgaaggagttacataaaacggtagacaatatcaaattgaataggccagcttatgcaagggatggtattgaatttgaaaatagttatcgtatatcaccgaatagccaacgactagatacaggtagtgggccatatagagaatggacagttaagacccctggtgttggtaatcgaggtacaagacgtattgttgttgataaagcgacagggaaagcttactacagtcatgatcattacgattcctttatagaaatagatctttcagggtggaaatga

SEQ ID NO: 435779 - DNA, 354 bp, Serratia marcescens
atgaaaaaattatattttttaaaatatggcagtgttatatcaaaaaaagaagcgagcaaattactggacgataaatgggatataacttgctcggagtatgatagctcctattttggtgtttactttgcatatactggcctttatgcggacaagttaaccattactgataattatattcctcactctaatgagtggttagaggaagataacaaagagtttagcacgataattaaggtgtctttcactaatgggaagaatccagaaaaactcagcaggtacaaattcttgaagaatgcgtttaatcaacttgatggattatcgatcataagtgatgagtgcatcgaagaagagtga

SEQ ID NO: 435780 - DNA, 129 bp, Serratia marcescens
atgtggtttgaaaatgctataggaaaagaaaagatcaaattcatgtttaataatgagttaaacattaaaaatattgaagttgataatttatcattggagcatttttcagatttaaaaattgggttttag

SEQ ID NO: 435781 - DNA, 762 bp, Serratia marcescens
atgagcgcatccatccacatcaaccgggtgcggaaatccttttccggcaccgaagtgttgaaaaacatcagcctgaccattccggcgggttcagtgacggtgatcctcggcccttccggctccggcaaatccaccctgttgcgctgcatcaaccacctggaaaagctggacggcggcaccattcgcgttggcgaacagctaatcggctatcgtcaaaaaggccggcatctgtacgagctgaaagaagccgaggtggccgagcagcgtaaaagcatcggcatggtatttcagcagttcaacttgtttgcgcaccgcaccgtgttgcaaaacgtcagcgacgcgccgcagcgggtgaaaaaggaaaaaaaagccgaggcgcaggaacgggcgaagcagttgctggcccgcgtcgggttggaacatcgcatcaacgcctggccgcgtgaactgtccggcggccagcagcaacgcgtcgccatcgcccgcgcgctggcgatgaacccgcaggtgttgctgtttgatgaaccgacttccgccctcgatcctgaattggttggcgaagtgctgcaggtgatgaaagacttggcgcattcgggcatgacgatggtggtggtcacgcatgaaatcggcttcgcccgcgaagtggccgaccagattgtctttatggatcagggaaaggtggttgaaacgggcagcgtgcagcaggttctggatgcgccgggacatgagaggacgcgcaacttcctggcgacggtattgtaa

SEQ ID NO: 435782 - DNA, 711 bp, Serratia marcescens
atgcgaccctatacgatgttatggtttgtttgggcactttgggtgctttggatcgtcaaagccttataccctgatgaaattatcgtcacctgtatcacttttctgtgctcaggtagcgtgttagctttatttttacggcagctaagccgaagaggatatgaaagcatgaatttacttaaacgaaaaagcaaaactgaaaaaaagagcgaatcaaacgtgatgggaaatggtatgcaatacaccctatctgaaaataatgaacattccgcattctcacctgtagattaccctgagggaattaagttaatgactacgcataaagacacttttatttcatccgaagcgatattgacagggaacttaaatggacatggaaatattgtgattgaggggactctggagggtaatatcagcagtacgcatcaagtccgtatagagcaaacgggtcaagtcagtggcgatattcatgctcagcacatcatggtaaatggtcgtgtagtgggacgactttttgcggaggctatcacattgcagtcggaaggacgaattgaaggtgatttggagaccgatgcattgattattgagaaaggaggggtatttgttgggcaatcgcagttgaaaacggacgttcagcctgcagaagataaagggagcgtcacacagttgaaggcgctcaccgagtcgtcagcacaatcgacgaaggccaactga

SEQ ID NO: 435783 - DNA, 966 bp, Serratia marcescens
atgttaaagaaaatgaacctattcgtgtttttgctttttgttatgacgtcgtctggcttgcgtgcacagttacgcggtgccgatgtgctgacttcgccggatcgatatgccgtccggcgagatgtgtacggtcattttattgcagaaactgcataccggctttattccgcggacaccggtgattgtgccggtctggagtacctgtgtcggggcattatggtctcggcctttgaagctgatggtgattactggatgcgggcttaccctgaactcagcaaactgtccctgtcttactggacaaagcgaacaacggggcagacccgcgatgatgccgcctggctggggaccgggtttatgttatggcctgctgcgatagctgaaaagctctccggcgggcatctctttaaacctcaattcacctgcgtgtttgccacagaagggctgaccggcagtcgattacatgatggctgtgggggataccgggataacgcctggccgaaatgtcaggctatcggcgtgcataccgcgaaggagtatatcgggcgttttggcgacaaacagcttaatgcttgcggttttgcgctggggggaacttcggcaggggatgcacttgcttttgacagtgcgttgacgttacagctgagcgaagtcaaaaacgacggcggaacgttttataatgaagtgttgatgaagggatgggatgcccatcatccggctaaaatcccgttgatgggattcttttatatccggggtcaccgcgggctttccccttcgggctatcgtgaaatggcacaaaataatcaatgggatttttatcagaaggcccatctttttgtgcctgttatcagagtgacaggcagtgactgggcgcatgtcagatttgaatacagggctagagatcagtctgcgggcattccggtacatgttgttgtcaatgcatttatacctgacgatttcaaagaatga

SEQ ID NO: 435784 - DNA, 1365 bp, Serratia marcescens
atgttttcccgaaccctgcccgtgcatgcgggccaggacccccgcgcatggtctgaatacacgcagctgcgcgatgaactgagcaagctgactcatccggccagacccgatgtggactggcagaacgtggagcagctgtgtgtgacgctgtttcgccacaacggcaccgacctgcagacggccgcctggttctgctgcgcccgcctgcagcggggcggcctgtccggattgtcggaagggctggcgttgctggactcgctgatatcgcaccagtggagcgtgatgtggccgccacagctgcccgtgcgcaaagagatcctggtgtggctgagtacctggctgatgcagagcctgcgccggtttaccctcagccatcaggacctgacagcaatttatcgccttgaacaacagctgcgccacctgtgtgacctgctgcagcgccttgaactgcgtcaggtgagtaagctggatgcgctgctgcactggatgcatgcggcggtggtacggctggagagtgcgaaagaggctcatcattctgctccggctgcgtccttaattcaccacgccgccagcccggtgccggacggccccgggtcgtcatacggtcatactgagccggtggtgctggtggtcagggatgacggcacgcagcggataacgcagacctccatcctgaggcgttatcgtcgcggcgtgtggtcgggatttgccggtggtgttgccgccacgctgttgctcacggcgaccggtgcatggagctggcagcactggcagggtaaccagccggagacgctgatgaacgcgtcgctttcgccgctgccggtggcgctctcgccctccgcacaggatgcactgattgagggaaatgctgccgtactgcaggcgcaaggaaaaatgctcacccggcgcacgcgagaacagttggatgcactggcgcagctgtccccggtctgggcgcaggattacggttttgcgcttgtggcgcagacacagcgcctgtggccccatcagccggagacggcggtgcttgcccggcaatggcaacagcaggtggaggccaatgcgctgccggaagcgcgtttgcagggctggcatcaggcgatggtacaactgcagtcgctgaccaacaaactcaacagcaccgatatgcaacgggggaaatacctcacggtctcagagctgaaatcctcggtgtttgccatcatgcagacgctgagccagaacgtgccgttggaggaacagttgcgccagatggcgcagaaaaaaaacagcgataacaaccagaccgcagcgaagcagcaggcagcgcagcatcttcagcaactggtaaaccgttatgcgctgctcacgcatgctgaaaaatga

SEQ ID NO: 435785 - DNA, 435 bp, Serratia marcescens
atgcgccgaccgtcactgtacgaaagactcttcggtaactttgccggaggactgccccttgaacaggtcagcgaagaaaatcactatattctgtcggtgctggataacctgcagcgggtgctcagtacccgtgccggttcggtggcccatctgccggactatggcctgccggatatgacactgattttgcaggggatgcccggtaccgtccatgaactcaaaaccacactcgccgctacgctgctgaaatacgaaccgcgtattcaggacattaacgtggtgatactggagcagactcagcccggtgagctgcgctatgccattgaggccgaactgcacgatggcgagttagtgcgctttggcaccgaatttatgccggaaggcaaagtgctgctccgccacctgaaacaacaacgcatccttccccctgagtaa

SEQ ID NO: 435786 - DNA, 537 bp, Serratia marcescens
atggcgactaccgcgggtaaggtcattaccgtatgtgctgcgctggcggccaccgtatcactcagcggctgcggcctgacgcagaaagtgtcagagggcacgaaggccatgaccaccgccatattttacaaacaggtcagaacgctgcatctggatatccgggcccgcgcggcgctgaatgtcaatgacgacggcgtccccctgcccacggtgatacgcctctaccagttgaaagaccgtaaggcgtttgacggcgcggactataaggcgctttcaacgggtgacggtcaggtgattaaggctgacctgctggtcgaaaaagatattcgcctgaaaccgggcgaagcggtatcggtggatatgcccatggaggaaacggcgcagtatgtggcagtcgcggccctcttccttgccccggaccagccccgtaatacctggcggctggtcatcccccgtcaggaccttgaccccgacaacacgcggcgcattgaagccagtgataaccggctgacgctgctgcccatgaaggagaaataa

SEQ ID NO: 435787 - DNA, 1101 bp, Serratia marcescens
atgcatccggtggaaagagaatcacagtccgcgactgcccggctgataacgcagcttcaggatatgcttcccgtcaccaacttttaccggctgtgccagatagtggaaagacaccatccggatgcctcggtggtgggcagcagctggcaggtgcgtcaggagccggtgcgttttcgtccgcatccgggaatgggcttcccggtcggtgaaattaaaggcgctgaaatcccggagcagccacacctgccgcccacggtgcgggtcacctttatggggctgtacggcgtggaatcaccgctgcccaccatttacaccgacgatattacgcagcgtcaggaaggctatgaagtcgtctgtgattttctcgatatctttaaccaccgacttatcacccagtattaccgcatctggcgcaagtattcgtacccggccacctttgaacccggcgggcgggaccggacctcgcagtacctgctgggattggcaggactgggtataccgggctgtgcgcagaatatcgccaccccggtctcgcgttttctggcgctgctgccggtgatgctgctgccggggcgtaccgccgaagggctggcctcgctggtcacgctgctggcgccggagacgcgcgccactgtctggcaccacgaccgctgtcgtataccgctggcttccccggtgaccctgagtacccgcaccccggtcagtctgcgacagcgtccggtgatgggggaccacggcaccgatgtgaaccgacaggtgctgctgcaactcaccacccataacccggaggaggtgcagggctggttacccggtggtcagttgcataccgacctgctggccctgctgcatgtttacctcggcagtgcgctggatgtgcgcctgcagctgtgcgtccagcgcaccctgttgccggacgcgcagatgcgttgccatcctgaacacggtggcgtgcaactgggacgcaccgccgtgctgcgctcacagcgcccaccgtcatccggccataaccggatactcaccatccccctggggcgctggcagtgcatcagggaaaatgttcaccacaaggagaccgatgaagatggcgactaccgcgggtaa

SEQ ID NO: 435788 - DNA, 1740 bp, Serratia marcescens
atggaagacttaaccctacgctattttgatgccgaaatgcgctacctgcgtgaggccgccaaagagtttgctcagacccaccctgatcgggcgatgatgctggatctcgataaggccggtacgccggacccgtatgtcgagcgtctgtttgaaggctttgccttttccatgggacgcctgcggcaaaaaatcgatgacgacctgccggagctgacggaagggctggtcagcatgctctggccgcactacatgcgcaccattccctccctgtcggtggtgggcttcataccggcgttagaggagatgaagattgccgaagaggttcccgccggactggaggtctactcccgccccgttggcgcgaaaaacaccgtctgtcgctatcgtaccacccggcccatgatgcttaatccgctcacggtgcaaaacgtcaccctgaccgcggagccggacggacgctctgcgctcattacccgatttgcctgcgccccgcaggctgaccaggcgcagactgacctgaagcgcctgtgcctgtatctggccgacgatgcgccggtcagcagttcgctgcacctgtggctcaccaaacgcctcgaggcactgtatctgcgcctgcccggctccggggagcgtatccggctggacgcctggttttcgcccggtggttttaccgatgaggaccgcctgtggccgaagggggacagcgccttcagcggctatcagctgctgctggagtatttcaccttccgtgaaaagtttatgtttgtgcacctcaacggtctggaaaacatcacgctcccgccgggtatcacccatttcgatattgaggcagttttcagtcaggtatggccgtcagacctgccggtggccgccgatgccctgcggctgcactgcgtaccggtgataaaccttttcacaatggatgcggacccgctgagggtaagcggcctggaaagcgagtatctgctgcgcccgaaactgcttcaggacggtcataccgaaatctattcggtcaatgaggtgaccggtaccgggaccacctacgtgccgttcagcagctttcgccatcagggcggcatgctgcgccgtcaggccccggaacgctactttcatacccgggtgaagcgaagcgtcaccggcatgtatgacacctggattatcctgggcggcgaacagaacgtcccggtagaggatacgctctcgctcggtatcaccggcaccaacggccagctgccgcgccaggcgctgcggagcaccctgctggaacgctgtgagcagcggctcaagaccccggtgaccctgcgcaacctgtgcaggcccacgctgccggtatatccgccggacgaggacagcttccactggcgcatcatgagccacctcgggacccgttttctgaacatgatgagcagcccggaggtgctgagcggcacgctgaagctctacaactggaccgacgatgagctgaataaccgacggctggcagccattcaggacgtgcggcatcaccgcattcagcgctttgaggacggttttctgctgcgggggctggatgttgaagtcaccctcgacagcaatggctttaccggtgaaggggatattcacctgttcggcgaaatgcttaaccgctttctgtcgctctacgccgatatgaaccagtttaaccagctctcccttattgttcagccagaaggaaaatgcatccggtggaaagagaatcacagtccgcgactgcccggctga

SEQ ID NO: 435789 - DNA, 693 bp, Serratia marcescens
atgaattatgaccttgtaaaatcggttgtgctgccggttgttgcttctatgtttaaacccctggttggctatatgatgaaactcatttcggggcctcagataacgaaacggcgcagattcaataaaatctcattcgaacagaaggttggcgcaattgaaaaaataggtgaactaaatgagaagtcatcaacctcttatacgctttttcagctaaaacttttatatgaacagattgggataaatctccctgtatgggtgagtcataagttaatcgattttctggcgattgaaaatatcaggacgcaagatgaccaattgaatagttttttgaataatccgtcaatcgcgcaatactcaaccaatggttgcattttgaacaaaaaagtgatttggggcacaattgtaatatgtctgttatttgcggtgtgtgctatagctgccattatttattacggggatatatttgtgctttattttttatcaaagaaacaagacgccatatcttatattgtatttctaggtattattgtcttcatttacacagtggcggcttatgtcgttagtaagattgccgaattattgaagggggtgatatttgtgcgtcggtttgacgtctggcttcgtcagaatatacaaaaagagcatgctgagatatccgcagcgcagatccccgccacatcagatcctgcctga

SEQ ID NO: 435790 - DNA, 1602 bp, Serratia marcescens
atggcaacgctgaatgccctgctgacggcctgtcaggcggagcgggagccgatgctggaactgacgcaacagcgccttgcgttatggaatagctggctgctgccggtatcaaaggaggccccctgtggcgaagaccccgggtatgatgatgattttcagcaactgcgcgaggagatggacaggctgtccggcacagacccggagcagatttgtcgtctgtgcgaaaaactgctgaccaccgtgacgaaagatattcgcgtggtggcctggtacacctgggcaaggctggcgatggatggcgaagccggtctggctgacggactggcgctgctggcagcccttctgcagcgttttggtccacagcttcacccgcagcgtgagcgcccccgcacggcggcgctgggctggattgccggttcgcggatgctggacagcctggcgctgtacccggaagtgtcagtggaggattcacgacgtatcgccggggcgctgctggtcatggagcaggctatcacggctgacgacggcgaaccccggctacaggccagtgcgctgtacacggtgctggtctcccggctgatggcatccggcggggcggatgccgtggtcccgcagaactcagccagcgatgcacccggccagtgcgctactgccatgcataccggtccagtccccaccagtacggccattacctccggtcgcgacctgctggacctggcccgacagatgaccacctggctgaacaaacaaccggacggctggcttgccgcacaccggctgatgaagacgctgcgccacgacacgctgcagcaattgccgccgtctgagggagacggacgaacccgcatcgagccccccaaagcggatgcccgagccctcctgaagcgactgtaccagcagcagcgctggaacgaacttcgggagcaggcggacagcctgttctcacgcggtgcgggacatctgtggctggacctccagtggtatatccaccaggcgctactgaagccggggcgcgggacggaagccgccattattcaggatgacctgaaaggggtgctccgacgcttgcccggcctggaagcgctggcttttaatgacggatctccctttgccgacgacgtgacgctggtctggatacgccagcaggtactgaacgatgcggcagactggcaggagccctccgcctgcacggtcagtaccacagagagcgatattctggcactggaaaccgaagcccaggaaaaagccgacggagacggcgtggaagcggcgctgacctggctacagcagcgccctggtgtggtcacgccccgcgagcgctggctgatgcagttgctgatggcccgactcgctgagcagtacggcaaaaatacgctggccctgcatctgctgggggaactgaatacgcaggcgggcagcctgacgctgcagcagtgggagccggagctgctgtttgaggtgaaagcacgaaaattcaaactgttgcgccaggtagccgggcgcagtgaagctgagaaaacgcggctgcagcctgagatggaattgctactggccggactggtagcacttgatcctgccagggccgccgtgctgtgtaattaa

SEQ ID NO: 435791 - DNA, 3369 bp, Serratia marcescens
atgagtagttcagtgtggcgcggtaactggggacgctacgggttaacgctggtgatcgcggggatcatcgcctggctggtagggtactttggtgacgaaatcgggatcatttcattgcgggcaaaatgccttgcggttgttgtcgcatggatattgctgctgatcctgcgtcacggtggcgtgattggtctgctggtgcacgagcggtggcatcgctttcaggcgacacgcaaaagtgaaatccctgacggggaaattcgttctgcccggagcacaccccacaacatcaccgttggtgagatccgcgaaaccctgcgtaaccattacggccgcttctggtcacgcaaggtgcgcattctgctggtcaccggcacgcctgctgatgttgagttgctgacccccgggctgacggcgcaatactggcaggaagaccgtggcacgctgttgctgtggggcggcgatctgttgcggcctgtggatactgtctggctgcgggcgctgcgccagctgcgtcgcactccggcggatgggctgatatgggtgacggcctcgctggagtcggctgacgaagacatgatggaccagctgggacgtacgttccgtgaggtttacagccatctcgcgcggcgtctgccgctgtacgtctggtccctggagacggaaggcggcctacaggcaggtcggaccacccaggcggtgggctgtctgctgcccgcgggttgtcgccccggggcgctgaatggtcacctgcagtcactgataccggaccttatccgtcagggcgtccagcagatatgcaatgatacaaaacatcattttctgctcacgctggcggaccggctggcggcccgtcccggatccgtcagcaaaccgctggcaccgttgctgaacccgcaccgtcccctgccgctggcgggcgtgatattcagtccgtcgtctttcggcgctgagcgtagcgtgaaacaccactgggcaaaagacaaccgctgggatgcgctgccggagaccgtgcgagagttaccgtccgggctgcgtccggtgcatcccggtggcagccggtttccgctggtggcagcgtcatctgcggtgctgatggcactgtgcggcatcgcgatggcggtttcctttatatctaatcgtgctctggtctccgccacacaacagcaggtgcaggcggcgcaggacacgcaccgcacgctgacgaaccggctgcaggcgctgacggcgctgcagaagacgttagcccggctggcgtaccgcgaggcgcacgctgcgccctggtatctgcacgctggtctgaaccagaataacgcgttgctgaatgcgacatttccccgctatgcacagagtgcgctgccgctgcttcgggatgcggcggctgaacatctgcgtgcgcagcttcaggcgtttgtccagctgccgccggacagcccgcagcgggctcgcctggcaaaagccagctataaccaactgaagctctggctgatgctcagccgtcccgacaaaatggaacccgcctggtttcgcgacacgctgatgcaggactggccgacacgccagggcgttaagccgggtgtatggcagggagatgggccagcgctgctggcgttttatgccgccgccctgccgtcacacccgcagtggaggctgaagaatgatgatgacctggtcagcgccacccgagggttgctggtccgcctgaccgggatgcgcaacagcgagtcggggttgtaccagaaggtgctgcagcaggtgtcccacctttacgcagatatgcggctggaggatatgaccggcgagacggatgtggcgcggctctacaccacaaaagccgtggtaccggggatgttcacccgtcaggcctgggagaatgcggtacagcctgccattgataaggtggtgaaagtgcgtcgtgacgaaatcgactgggtgctgagcgacagtaaaaagcctgcctcgcagcaggtctcctcagaggcgctgaaaaaacagctgacagaccgttactttgccgatttcagcggagcctggctttcgtttctcaacagcatccgtctgcagcccacaccgtcgctttcggatgttatcgaccaactgacgctgatggcggatgtgcgccagtcgccgctgattgcgctgatgaacaccctgaacgtacagggacataccggcgagacgggagaggccatcaccgattcactggtgaaatccgcgaagcatctactgtcccgtgataacgccccggcaattgaccagactgccgtcccccacggcccgctggatgaaacctttggcccagtgctggcgctgacgggcaaacagaccgatggcaacagtgacgaccgcctgagcctgcagacctttctcacccgggtcacccaggtgcgtctgcatctgcagcaggttaccgacgccacagacccgcaggccatgacgcaggcgctggcacagaccgtctttcagggcaaaggcgtggatttaactgacacccagaattacggcaacctggtggcggcagcgctggggcaggagtggcgcagcttcgggcagaccctgtttgtccgtccgctggcccaggcctggcagcaggtgctgacgcctgccgctgaaagtcttaattcgcagtggcagacatcggtgatgaatgactggaaccgcgcgtttggcggtcgctacccatttcaggataccgacagcgaggcgtcactgacgctgctggcaaaatacctgagcaccaccgggcggctgaacaccttcctgaaaaccagcctgaacggcgtgctgcatcaggaaggcagccgctgggtgccggacgcgctcaacggccaggggctgacctttaaccccgcgtttctgaacgccattaacaccctgagccatatctctgacgtggcgttcaccaccgacgcggcccgtctgcagtttgacctgcgtccgggcaccgctgccggggtgatggagaccgactttcgtaccgacgggcagacgctcacgtatgccaatcagatgccggaatggcagcacttcacctggcccggtgacacgacctcgccgggtgcctcattaagctggatgagcgtccaggccggtacccgctcctatgcggagctgccgggagaatgggggctgatccgtctgctggaaaaagccgaggttcaggggtatcccggcctcaacagcagctaccgcctgcgctggactgctccggacggccgggcgctgaactacaccctgcgcacccaggacgcagaaggcccgctggccctgctgaagctgcggcactttaccctgccggacacgatatttctggtgaaaggcgcacacgctgacaacacggtggcggacgaacagacggagggtatggactga

SEQ ID NO: 435792 - DNA, 1152 bp, Serratia marcescens
atggcctggatacgtaataaacccactatagcaaaaatgccagaagagccgtcattaattctctggctgtttgctggtctggttgcgctgattgctggcgtactgctgtttgtgcttcatgcaaaccatttactgagggtatggcagcagtacaacgtctggctactgtctggtgccccggtatttgcctggtttgtgctgatttgtctgcgcggctggatatataacaatggcgcggacaaacacgagtttgaagctaaagaggcgaattacgcgcaacaacagtgggttgaatgggcgggtcgttatctggcagtcatttacagtgaagtgcttctgcctggcaggctgactccggcacaatttatggccgcgtcaggcaaggagaaacatataaatcaggcgctaaggattgatgcggacagtgacgtcgatgcgctttctgcgctactcggcaatgtctgcgaagctatacaacgcttgcctgctcgtcttcccctgacggttgttctgctgacagattcccccgacgaggacgatgtgttgcaacaggcattcagcgactgctggcagcaactgatgccagtgggcattgcagtgccctctctggacatcttgcgttcatattcctttgcagccattgagcaccggattaaaacgccagagatcctggtcgaattaattctggttcaccagatgcacggcgcagaacagtacagcgatgcgatggcggcactgctgctgaccctcgacgatgtcgccgacagatttaagcttgggcatgatgtacgcctgctgcgaccaatgcccttaaatactgacgatttgctcaccgagctggatctctacttcagtactcagacgcaggcgaataccaccggatacatcattggcgatcatctccgctggggggatgatttcgccaccctgctcgaagccagcgaaaagtatggcggtgactggaaaacggaacaactccactggctggaaacgtataccggtctctgcggtcctttttcttcctggattttgaccgccgttgtcagtgacctggtgcgcctgcagcaggctgactgcctgatgctttccggcagcgccgatcagcgttttattaataccgtgacaaccgggaataaggatgcagaagcatga

SEQ ID NO: 435793 - DNA, 1332 bp, Serratia marcescens
atgcgattaacttccccaaagattatttttattttctgttcgcttttatattcattaagtgctctggcgaatagtcagcattatcttgttgaggatattaagaacctcaatctttacttgtggaatggtccagaagttaaggatagaatactcattggatacaatttgtcaggtggtatggatttcaatgctactaccgggcttgtctgtggtggggttggtgaagcgagtagttatttatgggctgcaaatgttaagtctgggcttaagaaaactttttttccatcacgtgatgtatacctcaggacggcccctgtcaataatgttgttgtttcgtcaaatgatggtcgctgtatattcactgacggggaaaatatttactcttacaatatgagtgattctgtatccaaagttatgctttccggagcaaaaatagatacagcagaaaaacctcgccgacttttttttaacgataaaaacaatattaccgttgcaacttttgataaacacttttctctattgtcaaagtccaagagcgaaagtgtattaaaggctgttcacttttcaaaagacatcaaatactctctaaaatcactaggggattttgcttacctttccgataagggcgatgtcttatatgccaatgcatatattgaagacaagactcggaatgagggtgaaaactctgtactactgtcaatcaacacgcaaactggtgtcgttaataatgtttacatgccgcgtatagatgctaataaatatgtaattgagcaattttatatctttaaaaataaaattgcaatgctacttggtgggcaatcaaagcctgcatggtatgtgctcagtgaaaatggagtgtcaaaaaacaacaatgacaactatgaattactttttgataaatacaattccgaattaaaagctgttcaattagccactggtgatggctatttttattcagttccaactgataagggtggcttaataaagataaatctatctagtggttttaaagctatttcttttgatgttaagggcgaaataaaccgtgctgttagcgtgtcacatggtgatgcttcttatccgtttatagaaccgaaactatccagccctaagaaaggtggtgccgtaaaaatattgggtgattatatggtttgcaaagacttgaataactccccggacgaaaagaactgtggttcggcaagaagtggtgttgatgctattgtacaggaaataagaatcattgaatctcatgagtttgtgaaaatatctccagcaaaagatccgaatctagttttctggacggttgttgaaaacttgcagtcagtcaattaa

SEQ ID NO: 435794 - DNA, 888 bp, Serratia marcescens
atgaataagaatctaatagctatcgtgacaggagtctgttttctgatcggttgtgatcagcgcaatactgatactcaggccgcgaaagccctggtaaataaatcagttacaaacatgatccccgttcagggaggggaattcctcatgggggactttggtcccttagtgaaagataagctgccattcagtatccagcaggatgataaacatctgcacaaggttattctgagcgactttgcgatatcgaaatataaagttaccaatgctgattataatcaatatctaaagataacaggtaagaaagcccctcccgtcaacatattgttgaaagactatccatccttggcaaaggatgattactccgtcggtgtaacctggcaacaggcgaaggattattgtcagtggttgggtaagaaatccggaaaaaaaatagatctgccgacagaggcgcaatgggaatatgccgcgaggtccagaggtcagtatcttccatttgctacaaataatggcgagtttacacctggggttaatataccaaacgaggatgaactgagtaaatataccgatgggttcggctttcctttttatccagtaggaaaatatccatctaatcccctaggtctctacgacatgggattaagtggttctgaatggactaacgactggtacgcatcgaactattactctcactccccggtgaaagatcctcagggccccaaaaaaggaacgcggaaagtattacgggggtatgttggtggtgacagtcaatatgccctgactatattcaggcaatcgtcacagcctatccccaaaaccgacaaatatgatgattacgagaaagatggtgttgacccttcatatgtatttcgctgtgtggtgaacaactag

SEQ ID NO: 435795 - DNA, 2295 bp, Serratia marcescens
atggctaaaggtatacaacaaagtaatctggataatgtgagtaagggtactgtcgtccacggcgaacatgagcctcagatttatttccatccgggaagcgcaacgcttttatgtgtcgatgctcagggtaatcgaatcattgagcaggaacatgcactgttatccgcgcttctggaatcgcagaataaagcacaaaatgtgctggatgagattaattatgaaatgctcacacaggtgggtacaaaaccacagagagtctatgaaagcagactgaaaaatgcttacgacaacctcaataaagccaacgccaaactgactgacgagctgaaaacactcacagcaaaagtccccgaaggtgaattgcttgatgagaactcgaaggaatcagcagtcgggataatggagctcattccattaaaaggcgccaccggttttaaaatgacccatgtcagatcggataaaataaaaaatcactggcgaaaatataagttaagcgaagttgataaagaaagtggtgaagccagctttgttaaatatgaaaacaaagaagtggtttcagggcatgatgccaagggtaatgaaataaaaacgaaagttcgctccgccaaaattgatgcgaaagagctaaaaaaacaattcaaaaaagtatcagcaactttgaagtttgaagatgaactattggaagacagccatgttgttcttactgactgggcaaaaaaaatgaataaagggctaacctggcccaatgaaaatgataatcctgatgatgagtcaacctttcatcagtacgtcgatctgagtgctcaggcccagttaatgcgctacagccagggggctgggttatcggcagagtttaatccgttagagaaaaaagcctcagcaaaaatcgaggggcattccagttttgccctgggggaagcgaaagcctcttcggcactctatatcccggatcggttagggatcagtttactgtttcctgcaaaagagaatgtcaataaccttgtggaaatggcgctaccagatgctggtgtatgtaacatgggcgcattgcgcttttcgctcactgcgatactgtccgggaacgcgggtgccagtcttgcgattgaactgggtgttgaagctgatgccagtggggaaatggcaaaaggatatggcatcaaaggtcgcagggccagcctgacgccgccaccgcagccaggaagacgaaagatcaatctcgctaatccggttatccctgatgttaaagcgggtggggaaattggggcttttgccggtgcacaggctggcggtaacgtcaaaggggccattgaatggttcgatccacacccggatgagggcaagaaaacaacggataatgctgataaccctattgtaccgacggagaaaaaatttacggcgattgccaccctttcacttggttcaagttttcaggtgggcgcgggaggctctggcgtattttacatcacgtatattaacagtcgtttcagaatttactgtaaggccgcgctttgttggggcgttggtgcaaagggctctctcggctttgaagtggatggtaatgccttttcttcatttatgaagagctttatgtttatgctcagaaatgtggactatcagaaactggagcagatgatggagggcgatgccttccgtgctttatgtgctattccgatcattatggcagcacacgaagttcaggctattgatgtcatgtataaccgaagtcttgatattttaagaggaattaaaaaagatcttcttgatgaaaaaatacgtgttaagttaatggagggcattttaagtaaccctgaccaattaaaatatacaccaccagaaactaaaggtgcgataatctcaatactgattaatacaaattgggcagattgggttgatcccagaaaccagaacaatgatttcttctcggttaacagctggaagatcggtcctttgaaactccgaaaacaggctatttttaaggcgttaaagtgggtccagagccaggccgattataataacgtcatgcagcatctgagtacatcaccaggcgagaagaaaggcgacagcaaatgcaatgaacaggatgtcatcaaattcttaggtattggtgagcgtagtctgtttttctacacccactacggtgaaaaactggcgctgttatacgataacttgcccgtctctgttgaccacgacgatccctttgtctctattcccgataatgaaatggatgaataccttgcgatggtggatgaacaacacccggcaaatccaatcatgaaaaacaccatgatggcgtaa

SEQ ID NO: 435796 - DNA, 2478 bp, Serratia marcescens
atgagtcagaacaataccctgaaccgttaccggctgaatattgacagctgcccgtccccgctggacgtggaagattttaccggcgaagagaagctgagcgggacgtaccgctacaccatccattttaccagcccggataaagatatcccggcaggccagatgttacgcaaacccgccagcctggccatggcaggcggctggcttgcgcaactgatggagcaaaagcgggtgcatggcgtggtgacgcggtttgagcgcctgaccagttctgcagaccaggcagaataccgcataacgctggagccaacgctggtgctgctggagcgacagtttcgtacccaccgcttttttatcaacaaatcggtgccggacgtcgtcaggcaggtgctgcaggagcacgggctgaaaaactgggagtacgaattttcactcagacgcgcctacccgaagcgtgagcaaatcaatcagtatcaggaaaatgacctgcagttcattcagcgtctgctggccgaagtgggcattttttactggtttaccctgcagccggacacgcagacggaggtggtcaactttggcgacacgcagtatgcgctgacggtacgccataccgtgatgctgagcagtccgtccggcatgaatgacaacgggaccgaatccgtgtgggggctggggcttacccacaacgtcgtggaagcctcggtcgccaccaaggattataaccaccgtgaagcgcagtttcgtctggagtccaccccggcggacatgacgcgcggtgatggcgagggggtgacttacggtgaggtgtatcattataaaccgcggcatctggcgcttggcgagcgcattaacgccgaaaccgaaagcgccaacttctacgcccgtctggaccatgagcgttttctggcaaaccagacgcatatcaccgggaccagcaccgatgcagccctttcgccgggacaggtggtcacccttagcggtgacaataacaccacgcaccctgaattactgcagggtgaaatcctgctgaccgtcacgaaataccgcgccagccggaaagaggccctgctggtgagtctgcatgcggtaccgtacagcgacacggtctgctggcgtcctgcaccgctgccgcgcccacaggttaccgggacgatgacggcctgggtcaccagcgcgaaagcccatgatatctacgcctggcaggacgcctccggcctctaccgggtgaagtttgatgccgacatggacgataaggacgcggggcttgagagtatgccggtgcgtctggcgaaaccctacggcggggacaggtacggcttccacttcccgctgatccaggggaccgaagtggctattgggtttcatgaaggcgacccggaccgcccctacattgcccatgtgatgcataactcccgctcgcgcgaccacgtgaccgacaaaaacggcacacgcaatgtcatccgtaccgccggactgaacaagctgaggatggaagacaagcgcggtgaagaacatatcaagctcagcaccgagtacggcggcaagacacagctgaacctcgggcataacgtcaatgcagcccgtgaactacgtggtgaaggggctgaactgcggactgacagacatgtctctgtgcgcggtggcgctggggtctttattacagccgacagccagcctgcagctggtggcaaaatgctcgcgatgcgggaagccatttctcagctcaataatgcgctgacaatagcgaaaagccttgctgctgctgcagaaggggcacaggcattaccctctgataccgagagccaggaaaatctgaatgccgcactgaatgcgctgagccagcctgggatcctgttgaatgccccacaagggataagcctgacaagcccgcaggctgtgcgcctggcgtcagggagcgccagcgtgggtatcatgtcgcaaaaaaatacggatatcagtgcactgaagcgctttacggtcgctgcaggagaagctgtcagcatactggcccgtaaagccggaatgaaactgtttgcagcaaagggaaaggtggagattcaggcgcaggatgacgggctggatgcgattgcgaagaagggtatcacgatagccagcactgaaggtcgggtggaaattaccgcgtcaacagaactgattgtgaattgtggcggcgcttacgtcaagctgagcggtggcaatattgaggtgggctgtccgggaaatatattgctgaagtgtaacactatccagaaaacgggaagtgctgattataacgtcccccagcactccctgcctcaggggtacagcgaatattttgttgccagagataaagatactggaaacatactggcaaatacacgctacagggttacaacaagtgatggcaagatttatgagggacgtaccgacagtgaaggtaatacctcagaaatattcggcgcagcaaaaagtaaaataaatattgaactgctcggtggttaa

SEQ ID NO: 435797 - DNA, 2667 bp, Serratia marcescens
atggaaaatgcagctgtactgttacgtcgcctcaacccgttctgcgcccgtgcgctggagggggcggccacgctgtgccagacccgcgctcatgcggaaatccaccccgagcactggttgctgaagttgctggagcagggagaaagcgacctcaccgtgctggcccgtcgctttgagtgggatatggatggcatctggcaggatttgctgacctacctcgaccggctgccccgttcggtcagaagccgtccgcagctgtctgcgcagtttaacgcgctactgtgtcaggcctggttgtgtgcctccatggcgggtgacgagcagatacgcagtcttcacctgctgatggcgatgaaggataccccttcgctgctgctctgcgacggtctctggccgctgctctccctgacggccgggcagttcacggcgttgcgcccgctgcttgatggctattcggaagagcgccctgacgttcgggtactgatggccggggacggcccatgccacgataccggcggcgataaggtgacgtttgtcggtcgcccggtcatacaggaagggcaacctgccccggctcacccgtcagtactggaccgtttcaccaccgatgtgaccgccagagcccgcgacgggaaaattgacccggtatttggccgtgacaatgaaatccgccagatggtggacattctctcccggcgtcgcaagaacaacccgatattggtgggcgaacccggtgtgggcaagaccgctctggtggaagggctggcgctgcgtatcgcggaaggcaacgtgccggctagcctgaagccggtcatcctgcgcaccctcgacctcggtctgctgcaggccggtgccggtgttaagggcgagtttgagcagcggcttaaaaacatcattgatgcggtacagcagtcggagaacccggtgctgctgtttatcgacgaggcccacaccatcattggtgccgggaatcaggcgggcggcgcggatgcggccaacctgctgaaaccggcgctggcccggggcgaactgcgcaccattgccgccaccacctggtcggaatacaaacagtattttgaacgcgacgccgcgctggagcgccggttccagatgataaaggtggacgaaccggatgatgacaccgcctgcctgatgctcagaggtctcaagtcccgctacgcgaagcaccacggcgtgcatatcagcgatgaggcagttcgcgccgccgtcacgctgtcgcggcgctacctcaccggacgccagttgccggacaaggcggtggacctgctggacactgcggcggcccgtgtgcgcatgagtcttgatacggtaccggaagccctcacccggctggcggcgcaggagaatgcgctggtgctggaagaggacgccctgctggaagaccaggcggtggggcagcacactgacggcattcgcctggcggagatcgctctgcagacccgtcggctcaccgatgaacagcagcgcctggaagttcgttacaggcaagagaaaacgctggtcacacagctgctggaaagccgcaacgttccggaacagcaggcggcaaccgcagagctgcagcaccagttgcacgccctgcaacagaacagcccgctgctgtgcccggatgtggatatccgtacggtggcggaggtgattgccgactggaccggcgtgccgctctcatcactcatgaaagacgaacagacggagctgctgcatctggaagccctgctgcagcggcgcgtggtgggtcaggaggccgcactctctgccatcgcgcagcgcctgcgggcatcgaaaaccgggctgacgccggagaacggcccgcagggcgtgttcctgctggcaggtccgagcggcaccggcaagaccgaaaccgcccatgcgctggcggacgcgctgtacggcggggagaaatcccttatcaccatcaacctctccgaataccaggagccgcacaccgtcagccagctaaagggctccccgccgggctacgtcggctacggccagggcggtattctgaccgaagcggtgcgcaaacgcccctacagcgtggtgctgctcgatgaggtggaaaaggcccaccgggacgtgatgaacctgttctaccaggtgtttgaccgtggcgtgatgcgtgacggtgaagggcgcgagattgattttcgccacaccgtcattctgatgacctccaacctcggcagcgaacacatcctgcagcagcttacggaaaacccggagaccaccgacggcgaactgcacgcgctcgtccgcccgctgctgcgtgaccacttccagcctgcgctgctggcacgttttcagaccgtgctgtaccgcccgctcggcgaagcaccgctgcgcaccattgtggcaatgaagctggaaaaagtgacagagcgcctcgcccgccactacggcatcaccaccaccatcgatgaaagcctgtttgatgcgctggcggcggcctgcctgctgccggataccggggcgcgcaatatcgacagcctgctgaaccagcagatactgccggtgctgagccggcaactgctgcaccatctggccgccggacagaaaccacaacagctcacactgggctggcatgaggatgaaggcatcgtgatggaatttggcaatacacagcctgatgacacggagacaaaatga

SEQ ID NO: 435798 - DNA, 492 bp, Serratia marcescens
atggcaatcccggtttatctgtggctgaaagacgacggcggtgcggacattaaaggtgcggtggacgtaaaagaccgcgaaggcagcatcgaggtcgtggcccaggagcataatctgtacatcccgaccgacaacaacaccggcaagctgaccggcacccgcattcacaccccgtttaaattcaccaaggaaatcgacgcgtccagcccgtacctgtacaaggcggtgaccaccggtcagaccctgaaatccgccgagttcaaatggtacaaaatcaacgatgccggtcaggaagtggagtacttcaacaccagactggaaaacgtgaaggtggtgaaggtcaacccggtgatgcacgacatcaaggaccctgcctacgagaagcacagtcatctggagcagcttgagctgcgctacgaaaaaatcacctggacctacaaggacggcaacatcattcattccgatgcctggaacgaacgcgccacggcgtaa

SEQ ID NO: 435799 - DNA, 1701 bp, Serratia marcescens
atgcgttatctctcccgccatgcgctgacgctgctggcccttcttctgttcctctggctgatcaacggctttttgccggtatcattcagcacccggttgctgctcagcctgctgattttgctcgccatgggcgggctgttatggcgtcagtcgcaacagcgtccgtctgcgggtgaggcccgcggacaactcgctgatgatgccctgccgccagaggcctttaccggggcagtgatactggtcgtcggagagaccacgtccctgttttcacctgagcaacgctttcgcgaaacggctcagggctggtatctgcgggcagacaccccagagcagctcccgtatctcgcagagcagcttgctgacgcacgccggtcgctgttgccccgcgtggcactgctgctggcggtcattccggagcagcatacccgggaagacaccttccagcagacgctgcgcagttggcagcgggccatagtgcagtgtcatgaatggctgcccggtcaaccagccctgctgagcgcggtctggctctccccaccggagggggctgtatcaacagacgcccgctggttcagcataacgcctggccattccgcgccacgggtgcatcttccgggtgaaggcatcctgacgctggcggactggcagcgtgaagcggcaccggagagccgtttatcccgtctcagccagagtctctggctggatactcttcaggcgtggtatcagcgcgtggtgcttccgccattacagggcggtcagtccccccttcggcccgctgcgatggggtactgcctgacgccggtctgcggagagcacgacaatctctggcagcaacacacatcagcgcagaccaccctgacacccgcgacgacatcggcggtgtcgctgttgccgttgccggatgtcctgctcagcacgctctcccgtcaccgtggcatcagccgcaagatgcagcactggcgcatcgcaggactgataagcggcgccgtcctgatgctggcaatgacctgttcttttgtgaataaccagcggcttatccgcaccgtcagtgaccacctgaccctgtacgcccgccttggggcgcagcccgccgggccccgtattcagacgcaggccaccctgcgtggcgacctgcagcatctggatgacatgcagcgccggggcgttccgcagcgctacgggctggggctgtatcagggcatgcgactgatggcaccgataaacgcggcggtcaacggctggacgcctgagacccagtcggtgaaaccgcgcgttgtcagcgctgcgccacagattgtccgcctcgacagcctgtcgctgtttgcgccgggcgaggcttctctgaaacctggctccacaaaggtgctggtcaatgccctggtcggcatcaaagcgaagcccggctggctgattgtggtcagcgggcacaccgacaacaccggcagtccgcggcttaatcagacgctgtcgctgaagcgtgcagaagccgtaagggactggatgcgcgacaccggcggcgtgccggaaagctgctttgcggtgcagggctacggggcgacgcaccccctgcagaccaatgacacgacggcaggtcgcgcggccaaccgtcgggttgaaatccgtctggttccgcaggcagacgcctgccggatgccgggcattacccctgcgtcatcacaggatgttggcgcgtctcaataa

SEQ ID NO: 435800 - DNA, 654 bp, Serratia marcescens
atgaatcagtcaacagtggcaaaagccgaacagatattatacccgggctggctgatggtcagtcagatacgtaacggacaggccgcgccggagggcgatgtgttgtatcgtcgcgcctgccagcgggttctgcagatgcgtcgccagtttgacgaagcgggattcagcgagtcctcccgtgaacagatgttgtttgccctgtgcgccctgcttgacgagagcgtgctccgtcgtgggaacagcggtgacgtttaccagtgctggcacgtcaacccgctgcaggtgcatctgttttcacgccacgacgccggtaaggcactctgggaagacatccgcaccctgctgaaatcgcctgcaccggatgcggcggtcatgagctgtctgtaccgcaccctgcagctcggctttgtcggtcagtaccgtgagcaggagcatgagcgtcgtgaggatgtggtgcgtgcgctggcagagcgggtgccgccgtttaccctgagccaggaaagcccggtggtggtgcgaccttccgtgctgcgcggcgggcggtggtggtactggctgtcatggggcgcaggaatcgtggcgctggccgcgatgtggtttgtgttctcctcgttgctggatgctcaggtggcacagctcctcggaccggggtga

SEQ ID NO: 435801 - DNA, 1335 bp, Serratia marcescens
atgaagatttttcgtccgttatgggaagacggggcgtttctgaccccacagcagtttcagcagcaggccctgtgggatgcccatgtggcgcagacggtggcccgcatggcgctggcaaacccgtggggcgtggtctcagcagagtttgatgacggtgccctggccctctcccgtctgaatgccacccgtctggtggtgcgtttccaggacgggacgctgatcgacaccgatctctgcgacaacctgccacccgtgtgcgatctccaggggatcaccgccgactcggtcggggtggtgctggccctgccgctgctgagcgccaacggcggtaatctggatgacggcagggacagcgaacgtccccgccgctggaagcaggagcgggtgagcgtgcaggagctggcgggccacgagcagacagacatcccggtgcttcgccatgccctgacgttacgctttgcccatcaggaaaacaccgcctggctgacctgtccggtggcccggctggtgcgtaatgcacaggggcaatggactcgtgataccgcgtttattccccccatgctggcgctgtccggtagtccgtcgctgctggcgcgacttcgggatctgctgtatcgcctgcaggcccgtcgtctgcgcctgatgggcatgcgccgggaggccaatgaacggatggccgattttgccgtggcggacgtctcgctgttctggcttctcaatgccctgaacagcgctgcaccggtgctgagtgatctgctggagagtccggctctccatcccgagctggtgttcagggagctggtccgcctgaccggcagcctgatgaccttttcgcttgagcacgatcttaaggctatcccggcataccatcacgagacgccggagcaggtatttggcccgttgctctcgttgctcgatcagttgctcgaagccagcctgccttcccgtgtggtgccggttgtgctgaaacaggacggggtgatgtggaaaggggatctgcacgatgcccgcctgcgtgaaggggctgatttctggctgtcggtgcgctcatccatgccgacccacgagctgcaggcgcgttttccgcaactgtgcaaggcgggcagctttgatgacgtctcggaggtggtgaacgtggcgatgagcggaatgacgatcacaccggtcagccacgttcccgccgcgatcccggtgcgtctggataatctgtatttcgcgctcgacctgaattccgatgcgggccgggccatgctggcggcgggtaactgctcgttctataccccggcagcgctgggtgacgtgcagctggagctgtttgcggtgctgcggacatga

SEQ ID NO: 435802 - DNA, 1542 bp, Serratia marcescens
atgtcagcaaaacagaataccgccgccgcgacggctgaagtcctggagcaggaaccgtctgccggggtctatgcgtcattacttaaaaaaatcaacctgtcccctgtggaccagctcagcgatatccgtgcctggcgggatgaagccgatatggcggaagccggtgcgaatcagcgcgtgaccgccgccctgggtgtctttctggagcagttgcgccaatcgggcacgcaaaaagtcgataagctggataaagccctgctggatcagatgattggcgaactggatcgtcagctcagccaggatctggataaaatcctccaccacccggagtttcagcgtgttgaaagcctctggcgcggtgtggagcacctggtcggtaaaacggacttcaggaaaaatattaaggtcgagttgctggatctgtctaaggacgcgttgcgggaagattttgaggatgcgccggaaataatccagagtggattataccagcacgtttattcttcggaatacgaccagcctggtggagagcccattgcggcgctgatttcggcttatgaatttgatgcgtctgcgcaggatatcgcgctgctgcgtaatatctctaaggtgtctgccgccgcgcatatgccgttcattggttcggtgggaccgaagttcttcatgaaaaacacgatcgaagaggtggcggccattaaggacatcaccaatttcttcgaccgcgcggagtatatcaaatggaaggcgttcagggaaaccgatgatgcgcgctacatcggtctgacgatgccgcgtgtgctggggcgtctgccgtatggcccggacaccgtgccggtgcgcagcttcaactacgtggaagaagtgaaaggcccggatcacgacaagtatctgtggacgaatgcctctttcgctttcgccgccaatatgacgcgcagctttgccagcaacggctggtgtgtgcagatccgtggtccgcaggccgggggcgcggtggaggatctgccgatccacctgtatgacctcgggaccggtaatcaggtcaaaatcccgtccgaaatcatgatctccgaaacccgcgaatttgatttttccaacctcgggttgataccactaagttactataagaataaggattttgcctgtttcttctcggccaactccacccagaaacctgcgctgtatgatacacccgacgcgacggccaacagccgcatcaacgcccgcctgccgtatatcttcctgatgtcgcgtatcgcccattacctgaaggtgattcagcgcgagaacattggcacgaccaaagacagacgtgtactggagcaggagctgaaccgctggctgggtggtctggtgaccgagatgaccgatccgggtgatgcgctgcaggcgtcacatccgctgcgtgaaggtcaggtggtggtggaggacattgaggacaacccgggcttcttccgcgtgaaactctttgcggtgccgcattttcaggtggaggggatggatgtcaatctctccctggtcagcaagatgccgaaggccaaagcataa

SEQ ID NO: 435803 - DNA, 495 bp, Serratia marcescens
atgagttcgtatcagtctgagataccgaaagcccgaataaatcttcagctggatttgcacacgggtggggctcaaaaaaaatctgagctccctttgaaaatggtcgtgtcgggagacttcagtaatggccgggagacggcaccgctttcagaaaggaataaagtcaatatcaataagctgaacatgcagcaggtgctggcagagttcgcgccgtcgacaagctttgacgtgaagcatacagacggtgatgaagaaacggaagagaaaattaatctgacgtttcgccacatgaaagattttacccctgagcatgttgcccgccaggtgccacgtctgcaggcaatgttaatgatgcgcaatctgttgaaagacctccgggccaatctgttagatgacgcgggtttccgccgtgagttgctggaaatcctccgcaaccccgctctgagcgacgaactccgcgctgaaattgctgccctggctccacaggacatctga

SEQ ID NO: 435804 - DNA, 588 bp, Serratia marcescens
atgaaaattaaatatccgcatccgccttatattttttgctgtatgttatttctgacgaccttcatcgcgagagcggaaaccaccgtcgtattcctacgccacggtgaaaaaccggaggcacccaccggtcagctgacctgcaaagggtttaatcgtgcgctggcactgccatcagtcctgttgacccgttttggcatgcctgatgcaatttatgcttcagcaccaaaggaaaacaaaaccggcagttcactgcgtccgctaagtaccatactccccactgctatccgtgcagaacgcccggttattcttaaataccatgccacggagacggacggactggtcagcgatcttctgtccagcaacaacagacaacagagggtgtttgtctcatgggaacacaaaaacctggtggtcgccgcgaaaacgctggtcaactggaccggcggcgatcccttgatgatcccgtcgtggcccgggcacgatttcgatggcctgtatattgtcaagtttaacgatcagggtcggtttgtatcattcagcaaagaaaacgagggcctgaatggggtaagtgatcgctgtcagaactga

SEQ ID NO: 435805 - DNA, 357 bp, Serratia marcescens
atgaataaaagtatcacgctgttgatgttcatctgtttcggagggaccactgtgctggcaagtgccgcagaacattcgacgctggttttccctgcaaagggcatcgtttgtgacgcgtatttttgtgctgatgctatggggatttcagatgcgctgacggtgaaatacctgggcgcaaaaaaaggtcagcagctgactgcgcagggtgagtttgaccgcacgacgtttacattcgccaatggcgtgtattgcgataccaaagcacacgtgtgtcgtaaggaccgttattttggtgctgacggcaaaccctccggcgcgattgaccgcagcaccacacaggggttgtttgctcaatga

SEQ ID NO: 435806 - DNA, 906 bp, Serratia marcescens
atgaatattaaagacgaattagatcgcctgatggcgaggaaggcctacacccgtaaagaggtttgtaagcgtgccaacattagcgaggcgacactgagtcaatacctcagcggcacctataacgccagtgctgaaaatatcgaaaataagctcaccgacttcattgcggcggaagaggaaatatcccgtatgcgtcaggtgaaaaaagtcgttgttaatacgcccagagtggatgtggcgctggaacacatccggcgggtgcatctggatgccgatattttcatgctgacaggcgaacccggttacggtaagaccaccattcttgatgagtacgcggcacagcaccgcaacgtgatcaagattgatgccatttccccttcgccattcgccctgctgcgtgagctcagtgaggcgttaaacgttgtcaagatgggatcgacgcaccagatgaccaaagcgtgtatcaaggcactcagggggagtgacacgttgattatggtggatgaggccgaattgttgtctgctgatgcgcttaacactctgcgccgcattcatgatctggctgacgttggcgtggtgcttgcgggcaccaaacagatggtgaagaacatggcggatcagccgcagttgcgtagccgcattttacgccgcactgaactggacaatttgaccaaagaggaagaccgagaggcatttgtgatggtattggccagtctgctaccggtggtgaacggtgttaaccacatggaaaagcaggatattgtcgacgctttttaccaacagacggaaaaaggctaccgacacctgttcaagctggcgaaaaacgtggtgcgcgatagcgatattggcgatcaggggatttcggcgcagttgataaaaaaatgtgcgcaagaaatggtgaactaa

SEQ ID NO: 435807 - DNA, 2052 bp, Serratia marcescens
atgtccatctggttaacggctaaagaatgcgtgtccctgccggggttgcccctcatggaacacaacatccgcaatcgcttgaataaggccgctggcgaatgtgagaatttacgccgtcgtcgcgaaggtacgaaggctttcgaataccacatcgactgtttgccagcggaggcgcgtgagattgtacgccagcgtcattataaatcttcgcttgagcagtcaggctgtaagtcggtagatgtgccggtgccaaataagcgttccaatctcaagtcaccacagcaattggagatcatgcgtaagtgtccggtcctgcttgatcgcaaggtgaagtcgctgaacgacaaacagaaacagacggccgatgcacgcatggcgctggtcattgaggtgttgcgcatgatggataccttcaacatgacacgtaaaggtgcggtggagtatctggccagcgagtcgaaaaaagaaacattgcctgaacgtatgcagaatgcggcctttctggccaatgcccgtaaaggatcaacccgtaccggtgtcagcgtgcgggcgctgcagggttgggtctcggattacatggcagcggaaacgccaggagaacgattagtggcgctggcacctggcaagatccgggcaagaaaggctgaacagatcccctggcttcccttgtttttaacgttttaccgtgtccctaaccgtccgtcagttgaaatggcctatgagaacttttctgaggcgtggcaaaagcagcatgtcggtaatgaacacatgctggcgttgatgccaccgatacactctgtccgccgggcattgaagaagataccaaaagctgagctggcgcgtgggcgtgtgaccggagccgagtataaatccctgctgccgttcgtgcggcgtgactggtctgtgttgccggttaatggtgcctggattggtgatggtcacggtatgaagatggaagtctacaaacccggcaccaataccgcattccggcctgagttaacgctggtgatcgaagggacgacacgcgttgttgttggctggagcctggcgctctccgagaatcaagtcgctgtcggcgatgccattcgccacggtatctcacagtttggcgtgccgttgatttattactccgataatggcgggggcgaaaagaacaaaacctttgatgctgatattaccgggatattttcccgccttggcatcgaccatccgacaggtatcccgggtaacccgcaggcgcgcgggattatcgagcggataaaccgtgagataccgatgcgtgcagcaaaaaaattcgggtcatatgtcggcaaatccggtgaccgggaaacacaacgtatttaccagaaaagaaaagactcagcgctgaatgccattgaaagcggcaaggcattatcccccgtgcagcaagcggtattagccaaaattccgtcctgggatgatttgattgccgaggttgaagtacaggtacagcggcataacacccgagcgcatgacagtttgccaaaacgtgataacggacagcactggtcgccattggcgtaccgcaatcatttgatcaaacaggataaggttgaaattgattacctgacatccgcagagctgcacgaaatgttccgcccagaggtgatccgtaaagcggtgcgcggcgaagtgcgggtttataacaatatttatttcagtaccgagttggtcaaggttgagggtgaaaaggttcgcgtctgctttgatattcatgaccctaactcagtgatcgttcgcaagagggatggttcatgggtatgtgatgccatctgggacggtaacaaggtggatgctttcgctaaaccttatgtgaagcaacttgaggagaagcgcgtcaagggacgccgtgaacggcaagagaagaaaatctatcgcaatattgagcgggaactcaccccagccattgagcacaagccacaagacaatatcgcaatattacgttccggggattgcatgcgtgagccggagtgggagcccaaagtatacaccagcgcggcagaacgcctccgggcaatgaacgagcaataa

SEQ ID NO: 435808 - DNA, 267 bp, Serratia marcescens
atgcagttccctaaacaagatctggcgcattacttccttacccctggtcagggctggaccagcgacctcatcatcagagctttaaaaaaagcgggtttcagcgtgccagtcttggtggctgagtggggtattgctgacggctctctacgtaacgccttgtatcgtcacgttccgagatatgagcatttcatcgtacaaaaaatcggactttcgtcaggtgtaatctggccgagccgttacagttcttacggtcgtcagagcgcgtga

SEQ ID NO: 435809 - DNA, 606 bp, Serratia marcescens
atgagtacttcaccttcaacaccatcgcgccaactccgtctcggcctgttcgttcaggcgctggggcaccacataggagggtggcgcgcagaaggcgccagcggttcaccgaccgatatcgactggttcacctggatcgcaaaaaaagccgaagaaggcaccttcgatatgttcttcgtcggcgacgcgctggcgaccagcgtgcaccgcctgccctcgacgatgtcacgcctggagccgctgacgctgctcgcggcgctggcggtcaatacccgccatatcgggctggcggcgaccgcctccaccactttcgatcaacctttccacctggcgcgcgccatggcctccatcgaccatatcagccacggccgcgccgcatggaacgtggtgacctcattctccagcgatgcggcgcgcaacttcagccgtgaagatctgccgtcgcacgccgaacgctatgaagtggcgcgggaattcctcgaggccagctacaaactgtgggacggctgggaaaaagacgccatcgtgcgcgacaagcaaaatggcgtgtacgccatcgtgtggggtgacaatcattttagcactgttcggggcaaccttagctaa

SEQ ID NO: 435810 - DNA, 252 bp, Serratia marcescens
atgcgcagcagcatgagcatggcgaagctgtccacctgtgcggacagcgcgctggccgccgcaaacacggtcaacgcgatcaacaacatgcgtttgcgattgaattgcgacgccaacagcaccaacagcggcccgagcagcgcaatggtcagggcgaagatcccgaccagccagccggcctgcgccgtggagatgccataccgtgcaatgatcagcggcaaaatgcccaccacgccgaactcgatgcagtaa

SEQ ID NO: 435811 - DNA, 792 bp, Serratia marcescens
atgtatgaactgatacaggaaaaacttggggctttaacaagcatgcgagagtcagtttataaaaaaagagccgaggtgtgtgaacagctaaatacatctttaagtccaatggttaaggtagaggttaactattcatctgacaactcacgttatatagaagcattaaaaaccaccttaaaaggttcggggctacggtataacgaaattgttgagagcattgcgtccaaaacgcatcctcaatggttactttattatgtatttgctgagatgtatacagagttttcagaaatgatcgatatgccatatgatcgagcggtgagattattatcttatcttaaagaagttgacttaggtccacttttgactacagaaataaatgatgaagtaaatctatttttgttggataaaggaagctataaaaaagttgaggaattgtcgattgggcaaagatgtacggttgcactatctttaattttagaaaataaaaatcgcattcttataattgatcaacccgaagaccatttagataatgagttcattacaagcactcttataaggtcactttcaaaaaggtcgtccctagctcagacgataatatcgagtcataatgcaaatatacctgttttaggtgatgcaaaactggttgtgaacttagactctaatggacggcgtggttttgtaaaacatgcaggaccaataaatcaagatgatattaagtctgccattgaatcgattatggaaggtggaagggaagcttttcaatttagatctcatttctactcaggtaactag

SEQ ID NO: 435812 - DNA, 699 bp, Serratia marcescens
atgaatctattaagaataactcaagatttgcgaacaaagcctattagcgagcaagttagcattttggccgtgctttcagcatcaataaacgatataagcattgcagagctagataatgcaataagcgctacggaatcgccttttgtaaaaaattttctagtaagtcttttggataaaaaaaaggtaacaaccgcagttgttgaccaagagaaaaaatccatcaagcccgacgatatcgatattgaagctattaaaagtgaggcattctcagagagtattggccattttttacacgaactcaaccctatcattggagctgttcgtttacatactaaacaagaaatacctgattttgaagattctgccacatgtaaggatttacaatatctcgaggacataattgagacctttgaggattggttaaaggttgaacaggcggcgcgatataaaaaagtattaatttcaggcgaattagatagcgaaatagatattttaaataggcattataatatagatatcgtaaacaacatatctagttcccttgaggtcataacggataaggctttatttagaataataatatcaaatgtattaaggaactcaattcaagcaaccgatttggcaagctattcatcatctcctatttatattaatggaggctttactgaccgtgatttatggttatcaattgaaggatag

SEQ ID NO: 435813 - DNA, 1425 bp, Serratia marcescens
atgaatgtattacaccttgaagataatttgaaatggtttgaagaagtagtaaaaccagagctaatgaagattccagcaatgaatatttttcatgctaataataaaagtgaggcaataaattgtttagctagtaatagcattgactatgccctgctggatttgtctgtaccgttggatgatacaactgaaattacaaatatacagcatggtctatctgttgcgtggcatataaggaatgagtaccccggaattccaataatgatattaacaggagagtcaactgaagaagcggcagaaaaatttgaggaagaaaatacttttacgacttattgggatggtcaagaaagatcacttgtaaaattgcgtaataagagaagggtgtctgaggttattgaagatttatcatctatctcaagttcccttgagatgcttgatgcaatagaactagactacgaccccaaaaatttgagtttaactcattctgagaaaagggtaattagacttttttgccttaaaaataaagcaactgccgcaaaaattaatgcattgaatgatgggctctcttctgccaaggttctcaatgttattttaatcaatcattcaagcaagtcaatgttttccgcattagtaaaaattgacgataataagaaggctgaaattgaaagagtaaacttccaagaacatgtaactaaactttctgttggtagcttcccaacctatattaatgagttttatgccggttgtagtaaaaagaaaggggttttttttcagtttgctcaggattttaaaaaggattattttgatctataccttgaagatgataagcaatctcttgatattgctaagtcggtcaaaaatatttttacaaactggataaatgttaaaaatggaaaacaggtcactatagggggggttaggcgtattttttgttcggatgagaaatttaataaatataaaataaaagaagagttaagttcgttaaatattgatattgatgcgtttgagtctaaatccttgaacagtaatttttgcatgcaacatgcagacttacatgggatgaatatactaatctctgaaacaaacaccccgttaataattgattatggtgatattaaaagctgcccatctacttttgatccaataactttagagttaagcccctactttcatcctaaaatggaaggtttggttcaacatgatatgaatcttgcagaacattggtttgatgataaaagtctaagccattttagtaaaaaccctgaaacagctgtttttttaagggaatgggctcggagtaatgctttcctgcagaaagattatgttgtaggtgtatattcctacataataaagcaatttacctattctgatacaaataaagacttcgcaagagcactcataaaggctgcaattagggagttcaattaa

SEQ ID NO: 435814 - DNA, 1092 bp, Serratia marcescens
atgtcgggaactcctaagacaaatgcgcgatgttctgtgccgtatctgatggggatgcgccgcttgtttcgccgcgcgatagcgacgctgctgttcgccgggcaaacggcctatgcgcagccgacgctggagcgcatcgccgttccgtttcgcgtagcgacggcggcgggcgatttttcttactatgtcgcccatgagcaccgcccccagccgcgtaccgcgctggtggtgatgcacgggcatccacgcgacgccgccaagacgttgcaagcggcgatcgatgccgcgcagggagcgggaggcaacagcttgctggtcgccccgctgttccaggtgccggtaaaactcgccgtccactgccattccgccggtctaccccggccgcaagacggtgacgctctctggcgctgcggctcgtggatcgcaggcaatttggataatagcgggaaaaccggctcgttcaacgccatggataacctgctggccgatctgaaacggcgttggccgtcgctgcagtcgataaccgtggccggtttttccgccggcgcccagttcgtgcaacattatgtcggctttgctcaaccgccaagcggagtgcgtctgcgctatgtggtggccgatcccggcagctggctctattttgatcgtctgcgccctctgcccacaagctggggaagctgcggcagtgagaaaacctgccgcttccgctggcaaacgctggacgccggccgctgtccgcaggccaatcgctggaaattcggtctggaagcgcttcccgctcacctgcagcgcgccgcagacgcggctcgccggcgctatgctgcggccgatatcacctatctggccgccgccgatgataccggcaccgcgccgggcgcctactatcggatactcgacaaatcctgcgccgcccagctgcagggcccctatcgattgcagcgcgccctggcctacgccgactacgatcggcgttacctggcgccccagaagccgcatcggttaacgatcgttcccggctgcgggcacaatgtcgcctgcgtctttcccgccccgacggccaggcaggcgcttttccccattaatgcagactaa

SEQ ID NO: 435815 - DNA, 207 bp, Serratia marcescens
gtgaccttcgagctgacggaacagggaaacgcggtgctgctgacggtcacccaccggcgcttggccaaccgcgacgagatgctcagcgtcgccggcggctggcacacccatctggatatcctgctggatcgtctgcacgatcgggcgccgcagccgttctggagcacccatgcccggctggaagaagagtaccgcgcccgcctgtaa

SEQ ID NO: 435816 - DNA, 156 bp, Serratia marcescens
atgagcggtggcgtgctgatgcagatgcagctgtcgttcagcaccattttcacactgttggccatcccggcgctgatcgcggcgctggcgctgctcgccaaacacctttccggcggctacccggcgctgccggcgccgctcaacaaaatgctatga

SEQ ID NO: 435817 - DNA, 711 bp, Serratia marcescens
atgattgaggcgttagctgaggatggcgtgtatcgttcgcagtttgaaacgcataccagcaacggtggattaacggcataccccggtggagatcgttgggcgtgggaaaacgctatttttggcatggcgtatgctgacgcaagcccggaactacgccctaaatatggggcgctcaattaccgaaacagcataacgggaggctcgccgcgctttgggtcatcgcatttccgtatgcgcccagcggccatggagagaacgacattctgttaccccgatagctttttcgcgccgtcacattttgctactgccgaaaagtgcgcgctgattgaattagccgagcgagatagcccaatcacagacgttttagataactatatagaagctcacatacacggcatcatgactattgcggacgacgttgaagccgtagtgctggatggttgctataaagacacgccgatcgacattttcgctcaccggctagactgcccggtagaatggcatcctggttaccggctggcggaaaaacacctacccgagtgcgtcgattaccggggaaaagagattgccgatctggcgcgaaaactcgttaacaacggttttgttacgccatttgatatcgggctagctcgcgggaaaggttatgacccacagcatttgaagaaggtatggcattgcgtcgctaaatttggcagccccatcgcggagtaa

SEQ ID NO: 435818 - DNA, 918 bp, Serratia marcescens
atggatatcaccgcgattgccgctcagtttgggttggatgccacacagccgccgctcagtctttatccctatgcgccggtttataagataggggaacatgtgctgaaacgtacccgtccgacgacggatgaagcccatgcgctggcggcgtatctcgccgagttgtgttatcagggcgtagatatcgtagtgccgacggcgtgtccgcaagagatggagggaagcatgtgggtggtttatccctttatctcgggagagaaatatgcaggccgcgatgaacagatcgtggcggccggcaggctgcttggtcgaatacacgcgctgtctccgacaaaccataacgccgggctgacgacctatgacgagtacgcgctgactgaagaagacatcttggcggatctggatgtgatcgccgaccatgcggctgggcaggggattactctcgatatcacggcgttcaaagcacgcatgctgcagattgccgaacggcagatggcgctgaaagaacaggctcttccttgtgtggcgacgccctatgactttaaagccgataacttggtgtatgtcgcgccggataggccggtgctgatcgatcccgataacgcgctgtttttaccgcgggtatttgacctggcgttggtgctgctgctgttccacaataccctggcttcagcccccggtcgtgtcttcagcgtgtgggaatggcgactgttcttggcgggttacggcgagtctgtcacgctgacggccgatgaactgcagggctggcatcaggcagtggaacatctgtttctcgacgaagtgctgtggctgatggcggactttgccgatggctggcgcgatctccggcagacggcgctgttcgtctcgctgttcaagctgctggataatctttccgactacggattaacaccgtaa

SEQ ID NO: 435819 - DNA, 1131 bp, Serratia marcescens
atggaattcacaagcttaaccacagcaattactattagcattttgcttgcagcgattttaacctcagccgttttgtctgagacaaagttaataccaacaattaactatccagttggtgagtataaatcaattagtggaatacgcgggcttgctgccttgtttgtttatgtgaatcatgcccctgtaatgttagctaacatgggaatcaaggctgataatgtatcccagtggggatggatttatgcaaacctaggctctttcggtgtgcaaatattcttttgcattactggatttttgtttttcgatagaataataaaggttagtggccggcttgattggaataaattcttccagtcgagggttaaacggatagctcctctattttatttctcatcgttattgtgtgttttgatatcgatattctatagttccaccataacatttagtaaatctgatttacttacactcgccggattggcaacctttagttttatagatagctccatgactataggaggtatgaagctttatcctttaaattccgtaatctggacattagtccatgaatggcgtttttatatggcattacctttaatttgctttgcgttttgtaaacctaaacttggtaagtttgcactggttgctgcatgtgtaattgctgtaatagattttaataattcagttgtcgtttgctggccttactttctaaccggaatagtaactgcttatgtggttaatttaaaaccaaaaataaaccactctatcaacgtaataattttgctattggcaatagcattatttgtagttacagctggcgtaaaaattgagaacggctacaactggcaaagattcaccatgtcatctatatttttcttatgcatagtcattggcgatgcaaaaatactacacgcaaaagcacttaggtacttaggtgaaataagttatagcatttacctacttcacctaccaattctctttttgtcaatctggatactatcaaaacagatggacataactaaaataactcaatatgagtactggctttttattacaatgattgttccggtaattgtagtgttaagcagcctcagctttaaatacattgaattgaagtttatgggtaaaaaataa

SEQ ID NO: 435820 - DNA, 723 bp, Serratia marcescens
atggcggctaaaaatgagttcttaccgttcggcaccgcggcaaatgccaacgttttatccaatgctgattatttggcgctgcaggctcgtccggtgggttttggttctggagtggcaaagtcagaagagctgaataaagtctggcgtcaaacgtccatcatggcgaatgtgctggcgcagtttattgcagatcagagcggtcaggatgtgctggataatggcgatttggcaacgctcaaaaccaacctgcaaaatgcaatcaaaagctatgtaaatagcgggttaccatcagcaagcgacactgttgctgggataactaagctgagtaactcaaccaacagcaatgattcgacgcttgctgcgactcctgcggctgtaaaagcggtcatggatactgcaaatgggaaggctgataaaaatactgctttgaaaaacacgtcagggtggtggaaatgcgggagtacaggggtaatttatcaatggggcttggttacaaataattctcagtataacgtggcattaccgatagcttttccaactcgagttgctagtgtaacagcaactgcggcggggccgatatctgcaccatccgaggatagatcatttgttgaagtatcagtaaccaatctttcaaatataacaatcgcttgctcacgtcctgttgctggtgggggttcagaaccctataccaggaacgtgtattggatggctattggttattag

SEQ ID NO: 435821 - DNA, 210 bp, Serratia marcescens
atgactactatcaaagccacttatataagcaaagaccagaactggaacgaaggcaccaccacctattggtttgatgtaagcggtgaaacattcggggttgtgcatggcggtgaaagctggaatgccaaggtagtcgattgcgacggagcgccatccgaccaatacactgttgaccagttcaacgtcaccgaagagatgatcgccgaataa

SEQ ID NO: 435822 - DNA, 192 bp, Serratia marcescens
atgactttaaccgactacatagctgcctactttggcggcaataaatccgccttcgcacggcatatggcagtcaacccgcagcaggttacaaagtgggttgccgacggctggattgtcaataatcacacgctgtacagcccgcgccgaaccgtgccggagaatatctctggcggcagctcggctgaggggtga

SEQ ID NO: 435823 - DNA, 435 bp, Serratia marcescens
atgaaaaccagtaacaacggacgtaatttcatcaagggttttgagcagcttcgcctgaaggcatacccagaccccggcaccggcggtaaaccttggacgattggctggggtcacaccaagggcgttatgcagggcgaccgaattacccaggagcaggcagagcaattcttctctgatgatttggccgtgtttgagctgacggtcaacagtgcgattaagcgttcgattgcgcagaaccagtttgacgcgatggtttcgctggcattcaacatcggcgggcccgcttttgctggttcaacgctggtgaagaagttcaatgctggtgaagttcaaggcgcagcggatgagttccccaaatggcgcaattctgcgggcaaagttatgcctgggctggtgaagcgtcgcgcggcagaacgcgagatgtttctgtcatga

SEQ ID NO: 435824 - DNA, 825 bp, Serratia marcescens
atgagattagagtcgattccgaaatactttgcaccgaaatcaccgacctttagcgactcaccgcgcgcgacggcttcggactctttgaccggtactgacgtgatggcggcattcggaatgtgccaggcgcaggcggagttcggtctggatttgtttttggcaaaacagggcatcagctcacctgagcgcgcgctggaggggttgaaggaatacgcgataaaagccgccggcgcacacaaggccatccgcaaacacagtgaagagattcagcgcagagcgatcggcgtcatggtggcgtttgcattccaggattactcccgcagcgcggccagcgtcaggacgtgcgaatgctgcaagggagagggctttattgaggctgaggttttttcgaacaagacccataccccatttgcagctaaagagttcgtaagggcgtctatcaaaatgggcgtagagggatttaaaccgtctgaatatgacgttcggcgagaactaagagagcaggtgaaattgctctgcccgacctgcaaggggaagaaggtaatcagcaatgcctgtagatgtaacggacgcggcaaggtgctggacaagaagctgagcgataagacagggatcccggtgatgaaggactgcgacaagtgcagcggtagagggtatgcgcgcctgcccgctgagcaggttagaagggcgttggcgctggaaggcttggagatagcggaaaccacctggcgccgggactacaagccgttctatgagcagcttgtcacgcagtgtcacaaagaggaaagcattgcggattctatactggcggcggtcacagtttaa

SEQ ID NO: 435825 - DNA, 975 bp, Serratia marcescens
atgagagcgatagtcaaagcagctgtacagcgtgatctgggtattgccctgatcccggtcgacgaaaagctggcgtttcacatgacgggccgcgtgatggtttccacgctgccgaaagagttcaaagacgcccctgagggcatcctaccggcggtggagcatgagatcaccaacgacccgcggttacaggttttcttcacccatgagcgcgtcatagacgcctgcggcggggttaatgcgattgaagcctgggcgacgcagttcacaaaatgccagtacagcaagcacgacctgccggagacaattctggacacggagcgcgtcgggcattcagccgttcgcatctgcccgcagtgctacaagcaaagcctgggtgtatcgccgaagctggaaaaaatcgctgcccgcaacacggcgcgctgggtggtggcaacggcaaaacaccgtctgaagtctgaggggcaactgacaatcccagagctgatgctgtgggccatgctgtccggcgtattcgacctgatccccgatgatgtcgcgcgcaccgtcaccgacttgccagaaccaaaggtgatcacaggcacccgcaaggagtccgagatggactgcacgccggcggccactgcgattatttccaaacaggcggctaagtgcttcaccgtagacccagcaccacaaaaggctttcatgctgcggccgaagctcacccgcgtagaggacagcaaatatacgcgctgggttaagactcgcccctgctgcggttgcggagctcgctcagacgaccctcaccacatcatcggccacggattgggcggaatgggaaccaagcccagtgactacctgacaatcccgctgtgccgcacctgccaccgcaaactgcatgacgacccagcggcgtgggaagcggaacatggtagccaaaccgatttgctggcgcagttcctggattactccattggcatcggggctatcgcatga

SEQ ID NO: 435826 - DNA, 666 bp, Serratia marcescens
atgatgccggcggagccacaggcgcgggtagtcaatgggaatgcggaaaaattggttgatctgctgttcaccaacctcatgcaagtcttccctgcggcaaaacaaacagcgttgagcacgccagcagaagtcgctgcagcaaagcgtcagtggatcctggcattcgcagagaacgggatcacctcggtggaacaactgcaagctggcatgcgtatggcccgacagcaggaaagcgatttctggccgagctgtgggaaattcattggctggtgcaagacgggtgcagctttgaatgccggcctgccatcggtcgatgaggttgaggcggagttcaaacgctacagcgctaatcgcggtcacgtcagccctgaggatttcaactggtcggctccggtcatgtactggattgtgatcgacgttcgtcaccagatgctccagtacaaccacaccgaaagtgagatccgcaagtcaattgagcagcacctcaatcgctgggctaaacgactggctaaaggcgagcgcgtgccaacccccgcgccacaaatcgcctacaagcagcatatcccagccccttcagagctgatggacaaagatggaaaatttcagcgcaaaggtgaagagctgctggctcgcattcgcgcaaaaaaacagggacaaccgacatga

SEQ ID NO: 435827 - DNA, 315 bp, Serratia marcescens
atggaatcagtcgcaacaagtcgcaattcagtgcgcgtcaactgcaagcctgaagtgctggagagcttctttcacaaagaggcaattttgcgcggtaacaagccgctggcgatggggatggggatccacccttcgggattgagccgtgacaaggttcgcatcgtgaagatggcggcgcggatggtgttggagcttggattgcctgaagggtgcgttgcagccccaggatgcaagcaaaacgtagtgctgacgggcgatgaggcaaaaaagttgctttcgatgctggagcacatccgggaaccaaagacggaatag

SEQ ID NO: 435828 - DNA, 198 bp, Serratia marcescens
atgaatacgaaacattacctagctaagtatttccgcgacagatatagcgaaaatacagagcaacggcacgcagcgttcactgtgtggcttgcatctgattggaagcctttcagcctgcgtgaaatcaatttcatggttcgctatgtgcgcatgttcaaaaaccgctgcgcgctgccaacctgcctgtcagttgcttaa

SEQ ID NO: 435829 - DNA, 213 bp, Serratia marcescens
atgcaaaccactacccaacgctgtgagcactgcgggaaaacccgcgacgtagccaaacaggccgtgagcattcagcgctacgaggacggcagatataaggctgtccggatcctcgtctgcgtcgatacctgcgcgccagtgtacgtggtccgccagaacatcagaacactgcagcgccgcctgcacactcagcagcggaggccaacatggtaa

SEQ ID NO: 435830 - DNA, 144 bp, Serratia marcescens
atggtaagcctcaacgcccgcatacagcacaagtacgacctgaccgggggcgatttcgcccctaaacgtcaccacggcaaacacctcttctaccttctcatttttaccctgtgcctgctgactgccggcgcggtctggagttaa

SEQ ID NO: 435831 - DNA, 618 bp, Serratia marcescens
atgaaagagcgcccagtgattttcaacggcgagatggttcgcgccattctcgacggccgcaagacccagacgcggcggattgctaaagctgacaactccaatcacttgcttggctgtccattcggccaggtaggcgatcggctgtgggtgcgcgaaaccttcgccgttctcggcaacgaagacggatgccctatcgattgggatggaaacctgattaagggcgatgagaagcaagcagcacggatttataaggcatcgtgctggcagcaaccgggcaactacggcctgtggtcgatacctgaccgagacacccaatacgaaggcgcatggcgcccatcaatccacatgccgcgctgggccagcagaatcacgctggaaatcaccgcggtgcgcgttgagcggctgaacgatatcagtgaagaggatgctagggctgaaggtattagtgacggcggatgcctgaattgcggcgattctgagccttgtggctgtgcttccccggatccggatgctaccgatgcctttgcgtacctgtggcagtcaatctacgggctggaaagctggtataccaatccctgggtgtgggttatcgagtttcgtcgtgtggaggtgaaatag

SEQ ID NO: 435832 - DNA, 537 bp, Serratia marcescens
atgagcactgagaagctgagcgaactgagcaagccggtggcatacgttgtcaccggcggccgagcgcatcatgactggccattcatcattaaatcgacagcagaacgcgcacgcgatgagcggaaagatggagcgaccgtcaagcccctctactcgcaagagtacgtctccgccctgctggcagagctggaagcgaaggataagcgcatcgaggagctggagtccatccgagcagacgcctcccaggtgttcaaagaaatcggcaacgagcttggctgcaatcccgacaacgagtcgatcatgatggctatcgatgacctgaaagccactcagatgacgggcccgctgaaagacgtgttaaagcgaaatatcgagctggaagccaagctggctacgccggtgcggttgccgacgaagtacagcatgctgcaccgtgaagattttcatggcgactatcagtcgaagatggttttcaaggccgatgaggttattgctgctctgcgcgcgcatggcagcaccgtagagggggatgagtag

SEQ ID NO: 435833 - DNA, 1443 bp, Serratia marcescens
atgagcacagtcaagaaaattgataccatttcatcttacttcaaaattcccccttcaatacttgatcaattagatgttgttgatgttctgttagaatcagatacattgctttttattgacccaatgctactccctgaaagtaaacattcagaaatgaaagatgatgcagatcaaaaatacatcgacactttcacaaaaataataaagctgcttagtgcatgcaaaatagataatgacagtgatattgcatggagaactgcaaaaaaattattttcattttccgaaataggctggacatgtctgggttatggctcatcagccaaaggctcaggatttggacctcagcttgttaataatacgatgaaaactgctcatcaaattgtaagtatggatattgatgatcctgatttattcatggttatgtcattatttgaagaaggtattggggctgaccgaattagtgacatgaccaccaatataatatttgatgccttagttaaattttcagaaagagtaaacataacacttaagatcccaacaaaagaattcacttttaaagggaataaatacaacaccccccacaatccattaacaaataagccactaatattagttcctaaagatattgtccgcgacttaccaatttctacagattggagtggtgctgtccacacaatgaaggagaacactgacttaagagacagaatcaatacaaatattggtaatctcctcgcatctatgaccaaaaatcaaaaagaggaagccaaacgtcgagctttagagaaaaaagaatattttgaggatttgctaacattaataaaagaagtagaaaaagagccctacgatttcaaagcggatagaaacggtgaattattctggttaagattggcatcttcaatagacaagaaatatccgtttaatctgtcaggatataataaaaaactaactttggatgatgttgaacatcttgtaagcgacattttaaatcaattcaaggatctcattgaaaacaaagggttatggaaagaaatgtgggctgatgataaaaagccacgtaaagaaaaagctgcacaacgtttgctatttgctgttgcatattcatattgtaaagcaaacaacttagatataagtcctgaagccgactcaggaaatggccccgttgactttaagctttcacaaggctttgaacaaaaagtattagtggaagtaaaactctcgtctaatggaaagttattgcacggatatgaaaaacagcttgaaatttataaaaaaggggatgacactgaacgtgcatttttcgtaatagttgatattggctatatcggagacaaatatcaaaaagttcagcaagccagaattgctgccgaaaaagaaggaaagaaagtttcaaaaattattcacatcgatgctcaacaaaaagactccgccagcaaacgcatttaa

SEQ ID NO: 435834 - DNA, 348 bp, Serratia marcescens
ttggaaaacaaacatactacagcagaagatttcgacgacagcagcttctggaataaaatcatgcgttacgcaaagaaagcaggaagcgaggtgattgagaaagcactttggctttactttgccgctcaacgtcctaataccccactgtgggccaaaacagccatctatggggcgttggcgtactttgtattgccaattgatgcgatccctgatgtcgtgcctgtggtgggatacacggacgatctgggtgtactcgctaccgctttagcttctgttggcatgcatatcgacgacgaagtaaaaaatgatacaaaggaaaaaatggctgattggtttgatgcaaaataa

SEQ ID NO: 435835 - DNA, 336 bp, Serratia marcescens
atgctggagactgatgcggaagtatgccgcccccaaacggtaactgatattttgctggttgagcagatagaccgcctgacccgtctcagcaacagtgactggatgacgttgaaaaagcagattgagcagcatgagttacggattgtcagcctggatgtccctacctcatggcaggcgctgtcagagaaagatccttcacaggcggacccgatcacccgtgcagtaataaccgccatcaataacatgctaatcgacctgatggccgcgatgtcacataaggactggttgagtcgccgccaacggcaaaagcagggaattgaacgggcgcataggtag

SEQ ID NO: 435836 - DNA, 246 bp, Serratia marcescens
atggatcaggcactgaatttttcactcagctatgcgcagctgatccgggaagcagaagatgcgattaaaaaatgcaatctgaaccagggcgggatgggttacaccctagagttgggtaaggcttctgtcattctgagtttctggtacggtctggcgctgcagggctatccgggcacaataatggatgaacgtgttgatgccgaccggctgcgcctgcatgtcctcatctataagagagaggagtga

SEQ ID NO: 435837 - DNA, 1194 bp, Serratia marcescens
atgtccactgtaagtctaaaaccatcatacgaaaaaaagcatgcgtactggagcggcgtatttgccatgacgctttgcgtgtttgtgctgatcgcttctgagtttatgccagtcagcctgcttacgctcattgcccgcgatttgcacgttaccgaagggttggcagggcaaggaattgccgtctctggcgcactggcagtgctgaccagtctgactatctcccatattgccggagacctgaatcgtaaatatcttctgcttgggctgacggtcttaatggccatatcagggttagttatcaccatggcgcctgactatccgatttatatgctggggagggctctgattggcgtcgtcatcggagggttctggtcaatgtcggctgcaaccgccattcggctcgtgccacagcaccaggttccccgcgcactggcaatttttaacggcggtaacgcgctggccaccgttgtggctgcgccgcttggtagttatctggggacaacggtcggttggcgtggggcctttttatgtctcgtccctcttgcgatagctgcgttcatctggcaatggttcagcctgccttcgatggaaagcaataaaacacaaaaaccacaggggtctgtgcttcgtctgttcagcgttgccatcgtaccaacgggaatgcttgcctgtgggctcttctttatgggacagtttgctttgtttacctacgtgcgcccctttctggagagcgtcaccagagtgggaccttctaacctttctctgattttgcttgcaataggcatagcaggttttgtcggcacaatgatcgtctcaacattcctgaacgccaaattttacaagaccttaatcatgatcccgttgcttatggccgcgattactggtgcgttactgctggtcggacaccacatctgggccgttgccgtattattaagcctgtgggggctacttgcgacggctgcgccaacaggatggtggacatggatagcacgagcgttacccgaagatgcagagaggggtggtggcctcatggttgcggtgatccagctatcgattgcgcttggttcaacggctggaggtctggcattcgacagtctgggatggagaagtgcttttggtttaagtggtttgttacttctgggggcggtagcgatgacatgtgccacatcccgtaaaaataggaaggcgcactag

SEQ ID NO: 435838 - DNA, 789 bp, Serratia marcescens
atgagatacattattaataataagattaaatatcatgaagatagatcagaactggtggatctcgacgctgagctgccgcctcaaccgctcaccgccacgttgaaccgcctgctgtccgcgttggtcagaaacaataaccttgtgatctctcgcgataccttgctgacgcaggtatgggaagcgcacggccaggtggcctccggcaataacctcaataacaccatttccatcctgcgcaagatgttcgccgccatgggcgaggacgacattatcgtcacgttgccgcgccagggattcatgtttaccgccgcttcgttgaagacgatggacagcctggcggagagtttgccggagatgccgatcctggcggctgcagaaaaacccttgccgaccaggccgctgcgagtgcagcgatttaagcgcttcgggttggccgcgttgctgctgctggcggcggggagcgggattttggcctggcaggagacggggtatccctcggccagtttgatgacggtgggtaagattgggagctgtaatgtgcaatttgtcacttcctatcacaatgtcggccccggcgagatcgacctgaaccacctgaagaacatgttgcaagagaagaaaacggcaacctgcggcgagccggcgacgttgctttattatgacagccaggccctggtgccaaatgccagtggacgggtcagagcatcttatttctattattgtccgcaagaggccatgacctcgggcaaagtacaatgtgagaactactatgaaagcaggggtctatag

SEQ ID NO: 435839 - DNA, 543 bp, Serratia marcescens
atgaacgaacaaataaaaaaaataggggctttttgcctattgctggcgccatttttcatttcccagcaggcgatctctgccgtgcagggcgaagggcgcgtcaatatgcaaggggctattattgacaccgcctgtgcaatagcaacggaaagccgagagcaaattatcgatatggatattatgcctgtctcagatattgcgcgcgacggcagaggtcgatcggtgccattcagtattgagttggttaattgcgtgctcgaacgcgccgataaaaacttaccggactggaaacagtttcgcattacgtttgacggcaatagcgatggtgaaatgtttggcattagcggtaatgcctccggtattgcgctgaaaattaccgatgccgacggcaatattgccacgccagggaaatcattgccgtcggtaaatatattgccagggaattaccgtctgaattacgccatgacgttaatcagtaaccagcggccattgaaggccggggactatttctcatcagtgcgcttcaaaatggattattactga

SEQ ID NO: 435840 - DNA, 2541 bp, Serratia marcescens
atgatgtttttacctgccgggaaaccgtttcgtttgcatattctcagcgcctgcgtggcgctggtgctgggcagcttggcgagcaaagccggcgcggtggaagacatccagttcaataccgacgtgctcgacgtgaacgatcgcaaaaacatcgatctgagccagttctcgcgcggcggctacattatgcccggccagtacggcatggtggtgcacgtcaataaaatcgatttgccggaacagccggtggcgttttacgcaccggacgacgacgccggcggcagccgcgcctgcttatcgccagaattggtggcgcagctgggtatcagggatgaggcgctgaaaaagttaacctggtggcgcgaaggcgcctgtctggacgaggccagcctgccgggcatggaggtgcggggtgagttggctacgtcggcgctgtatctgagcatcccccaggcttatctggactacgtttcggaggactgggatccgccttcgcgctgggacgaaggtgtccccggcgtgctgcttgattacaacattaacgctcagacccagcatcagctgcaggccggcacgcgtggttacagcgtcagcggcaacggcacggcgggcgccaacctgggtgcctggcggctgcgcgccgactggcaagggaacctgaaccaccagaccggctcagggcagtcaaccgataagcaactggactggagccgctactacgcctaccgggcgatcccggcgctgcgatccaagctgacgctgggcgaggactacctggattccgggttgttcgacagctttcgcttcggcggcgtgagcctgcgctccgacgacaacatgctgccgccgaacctgcgcggttatgcgccggaagtcagcggagtggcgaagagcaacgccaaggtgaccgtgagtcagcaggggcgggtgctgtatgagaccaccgtcgccgccgggccgtttcgtatccaggatctgaacgatgcggtatcgggcgacctggatgtgcgggtggaggaacaggacggcagcgtgcaggagttcaaaatgagcaccgccagcattccgtacctgacgcgccccggctcgctgcgctacaagctggcggcgggcaagccgtcggatatggatcaccgctatcaggggccgatgttcggcaccggcgagttctcctggggggtgagcaacgggtggtcactgttcggcggggcgctgctgggcggggattacaacgcggcggcactgggtatcggccgcgatttgatgctgctgggcgcgctgtcgttcgacgtcacccagtcgcgcgccaaactgccgtataacggcgagacgctgagcggcggttcttaccgcctcagctactcgaaaagcttcgacgagctggacagccaggtgacctttgccggctaccgcttttccgagcagaactttatgagcatgagcgagtacctggacgcgcgccaatatgggcagcggttcggcaacagcaaggagatgtacaccatcacctacaaccagcagctgcgtgatatcgggttgagcgcgtatctcaacgttagccaccagacctactgggatcggccggccaacgatcgctacagcctgacgatgtcacgctatttcgacctcggggattataaaaacctgagtctgtcgctgtcggcgtaccgcaaccgctacaacgagaccaacgacgacggcatgtatctgtcgctgtcgctgccgtggggcaacggcgccacgctgagctacaacgccacgctcaaccgtgacgacagcacccaccgggtggggtactacgatcgtatcgacgatcgcagcaactaccagatcagcgccggcgattcacgcagcggcgccaacctgagcggctactacaaccgcgatggcgatctggcgcggatgagcgccaacgccagctaccagcaggaccggtacagcgccatcggcggttcgctgcagggcgggatgacgttgaccgccgaaggcggggcgctgcaccgcagcaacatggccggcgggacccggctgctgctggataccgaaggggtagccggggtgccggtgcgcggctacggcagcacgatggcgaccaaccgctggggcaaggcggtcgtggtagacgtcaacagctactaccgcaacaaggccagcatcgatctggacaagctgggcgataacgccgaggccaccacttcggtggtgcaggcgacgctgaccgaaggcgccatcggttaccgcaagtttgcggtgatcgccggggagaaggcgatggccgtgatcaagctggcggacggcggcgagccgccgttcggcgccacggtgctgaacgcgcgtaaacaagagaccggcatcgttaacgacggcggcagcgtttacctgagcggcatcaacgccggcgatcgcatgacggtgcgctggaacggcgccgaacagtgcgaagtgcagatgccgacgccgctgccggccgagatgctgaccgccaatttactgctgccgtgccgggcattaagcgccggttcgggcggcgacgaacactga

SEQ ID NO: 435841 - DNA, 804 bp, Serratia marcescens
atgttaaaacggatggcttttcctttttttatttatttttattccgttaatgttttttccgccgcgtgggaaatgaaaacggaatatcggccgataaatgcgacttacggccattttgttgcaaaaattattgcctgggatacggaggacaaaacccctaatccattatatggttgtaattctggtcaggaatattgctatcttgcatttgttaatggtaacaccccatttatgaataaagtgtatttttcaggtgttacaaccagtaaaacattgggtgaactgggtaaaaaatttatccagaatgggttactcaatcgggagtatcgtagtaaagattatgactacccgaatcaaccgcattgcatttactttggttataacacccctacaggtaatagctcatggggggtaattaggtttcccggcggcgaacagtgccgggtgccggagatcgtacccaacgtgtgtgagttacgtgagccgctggtggagttggatcatggcatgctgcgggccgaagtgattaacggcagtacggctgaagcgcaattgacggtggcctgcacgtttaatttcaaagtaagaattatgagttcagatcggtctgggacggtttattttaacgataaaaaacagtttcgcagcgaattgaaattagacggcgtcaatgtgggggatggcttgttgattaccgcgacgccggccggaaaaaccttaacgctgacatcaacgcttgcgggatatgacggcagcgtgggggagtttcagggggcgaaaagcatcatcatttcgttaccgtga

SEQ ID NO: 435842 - DNA, 498 bp, Serratia marcescens
gtgaatatcgcatcgaatatagcctacatgttttttctgacaatgatggcttgcttactgacgaacatgccggcttgggccgccaccacggtatcggtcagggtgaccgtgctggcgccgctgccttgcgtgatcaacggcaatcagccgatcgaggtgaatttcggcgatgaggtgatgacgacgcgcgtcaatggcgaaaattatcgcacgctcgtcgactattcggtgacctgcgacaaaccgggaaagaacggcatgcggctgttgattgccggcaccggagcggggttcgacggcaagctgctccagaccaacgtcggcggcctgggcattgcgtttttaaacaacggtgcgcgtatcgcgttgaacagttggcagaatttcacctttcccgttttgccgaagctggaggcggtgcccgtgaagcaggcgaacgctacgctgccgacgggggagtttacggcctccgccacgttgcgtgtcgattatcaatga

SEQ ID NO: 435843 - DNA, 495 bp, Serratia marcescens
atgaaacagggcgttgccgtgatgctgttgtgtgctagtagcctggtcggccattccgttcaggcggccgaagaggtcgccatgcacctgaaagggacgctgcgcgtgccgccgccctgtcgcattaacgacggcggtgtgatcgaagtggattttggccagcgcgtcggtatcaacaaagtcgatggcgtcaattaccggcaggcggtgaattaccgcatccaatgtgatttacccggtgccctgccgtgggagctgacgttgacctttaagggcaacgctgcgtcctttgataacgccgcgttgcaaaccgataacggcaacctcggtatccgcttgtaccgggatgacaaaccgttcgccccgaacagcagcatcaaaattgatccggcgaatccgccgcgtttggaagcggtgccggttgccaaagcgggcgtgccattgaaagaaggcgcgttcgccgccacggcgacgctgcaggcgaattacctttga

SEQ ID NO: 435844 - DNA, 546 bp, Serratia marcescens
atggagaggataagtaaaacggcgatgtggcgaggcgttatcggcgtggggttgctgatcggcgcgagcgggtgttgggccgcagctgacaatatgcatttcagcggcgcattggtcgccgagccttgcacgctgcggccgggtgatgaggatatccgcctggatttcggtacggtgatcgataagtacctgtatacctatggccgtactcccggcaaggcgttcagtctggtgctgcaggattgtgacatcagcctgggcaatacggtgaaggtgaccttcagcggcgctgaaagcggtgcgctgccaggtctgctgaagccggatggcggcagccaggcgacgggcatcgccttggggttggaaacgatggcgggggcgccgctggcgctgaataagccgagtgagggatacgtcatcggcaaaggcagcaacagtttacaactgcaggtgtacgttcggggcgaaccagaggcgatagcgcaaaagagcatcggtctgggggcgttttcgtctgtcgcgactttcggcctggaatatgagtaa

SEQ ID NO: 435845 - DNA, 654 bp, Serratia marcescens
atgacagggaaacagacggtgcgtgactgggcatacctgcgcggtgaactgggctattacgcctcgttgggcggcctggcgctgatggcgccgctcagcctggcggccatgatgtggctgttgccggcggcgcaggccgtcgataactgggaggtggatggcgctaacggcgtgctttatgtcaggggggcattgaccgaaagcgcctgccggctggagatggacagcctgcggcaggaagtctggctgggtgaggtagcgaccgggtcattgacgcaaaccggcgatcgcggcgcggcggtaagctttgcgctgcggttgcgcgactgcctgcgcagtccggcggcgaaccgggatgaacgcaccggtgcgctgagctgggcggcggatcagccggcggtgcgggtgagcttccgtgcaccggccgatgccgacaacccgcagttggtgaaagcgcagggcgtgagcggtatggggctgcgcctgctggatgcccagggcgaagacattcgcttgggcagccgcggcaagccgctgtggctgacgccgggcagcaacgtgttgaactacagcgtgatggcggaacgtaccggcgcgcctctgcgggcggggagttttgatgccgtggtggattttagcttgagttatgactaa

SEQ ID NO: 435846 - DNA, 513 bp, Serratia marcescens
gtgaaacggcgatctttgcccgaatcttgcagaagctatggcgtgttggcattgacggttctggccgaggtgctctgtgtctcaccaggattggcgtcgacgaccccaatctctatctccggcacgatcaccagcaaaccgcagtgtgtggtgaacaacaatcaaaccctccgcgtagagtttggcgatgatcttgtgaccactaaagtcaatggcagcaactatcttcgcacgatcgattatacgctggagtgcaaaaacaacagcagaaatgccatgaagatgaaagtggtgggcgctgctgctgcgttcaacagcagtgcgattcaaagtagcaaaggcaatctggcgattgcactgcgggccaacggtgtgccgctgatcattggcagttggcttaattttacctacccgaataagcctgtgttacaggcggtgcctgtgaaaggcagcggcgctctgaccgtcggtttttttagcgcgggagcgacgctgatggtggattatcaatga

SEQ ID NO: 435847 - DNA, 504 bp, Serratia marcescens
atgaagataaacgttggaaaaacgtgggccttgctggcttgtagcctgtttctgcccgcattgcagggatgggcggcagacaacgaggcgggcctgtcgttcagcggcacgctgaacgaaccgccgtcatgcgtgatcaataacggccagcgaatcgaggtggattttggtcagagggtcgggatcggtaaagtggatgggaggaattatctgcaaaccgtcaattaccggatcgagtgtgagccgggtggcaatgggcaggcgctgggattaacaatggtagccaccgccagtgggttcgataacgctgccgtgccgaccaacgttcccgatctggctgtgcgtctgttgttggcggggaatgctttcgttctgaataaacgtgtggcgatagatgctgccaatccgccgacgttgcaagccgtgccgatcaaacgacagggagccggattaacgccgcaggcgtttagtgcccaggcgacgctgctggcggattatcagtaa

SEQ ID NO: 435848 - DNA, 723 bp, Serratia marcescens
ttgcggtttactattttgtccgcagatttctctggcgctccgagagattgggatcttgaatgtgggggtattctttctcgaccgcaatgcaaaataacaatgtcgcctggtggtttcgctgctcctgtatattcatttgatttgcctcaaaaaaataagcaaaaagcgagtgcgttggttgcttattgggcttctaatttaccgaaaaccggtgcgatattagattgggataagtgggtaaagcagaacggtggtaaatcgccctgtattgtttttaatgttggcaccaataataccggatggttcgctgattcttgctctggtagcgttactgagccacccaccattgatccgccaaaaccgccggtatcatgctctatgagcggcaatattgatttgcgccacggttctctcgccgatagcgaagtaaccggcaatcgtgccgagagcacggcctatgtttattgctccggggccgccaaagtgaaggtgcgtgcgctagcttccgtcggcagcgacagctacaccgtcaatttgcgcgctgacggcagcctgaaatcgatattgagcgtcaatggggttgtgggtaacgccggggtgacgctggatgtaccggggggaggatggaaagcggcgaccttctcctctttactgatagctgcaggagcgccggccccaggggatttttccggttcggcggtggcggtcgtcgatgttctctaa

SEQ ID NO: 435849 - DNA, 816 bp, Serratia marcescens
ttgaacaggatatctgctctgctcttagccttttttcttcaaaatccagcgtctgcaaatgatgcggatatagaaacaaccgtgtttaaaattagctcgactaaccataattataaacaaatggggcataggctgttgcgttgggacagtataagtaccagaattaacccactctatggttgtaataatactagatgttcgttagggattctttatagcaacggctataacatgcgtgaattttacagtttcggctaccaggagtgggcgacgaagccgagaacgattgaggaacttgccagggcggcgaatgccaacggcctaattggccgtactctggagacgggatggtccccatttcccgagaaaggggagcaatcttgtgtttcactagcttatcaggcatatggtggtcccatggaaatgtatggtactgaagtgcaatgcggatacggcgtcatctcgccgaatgtatgcagaatcatggagcctgtaattgaactttttcatgggactattaccacaggccaggtcaatggtcggcgggtatcatcctatttccacgtaagctgtgaattcccgctaacaataagattaaccatgaaaaacgctaaggggtacatacctcttgattatacaggtgtatttcgcagtgagatttcaattaatgggacaagcattgccgatcgaggtgtgcttgtaaccgctgtaccgggagcagggagccgggtcagtattgattccacgctgaggggctataatggtcagattggagattttgtcggagcgtcagtgttggtggtcgcagtagaatga

SEQ ID NO: 435850 - DNA, 1068 bp, Serratia marcescens
atgaaaataataacactttataaccataagggtggcgtttcaaaaacaaccacaacttttaatctgtgcaattatatctcaggcaccggtaagaaagttttaatggttgatgctgatcctcaatgtaatttaaccgagattgccatggctacagtaattaagcaactcgatgagcaatcagagcaagaaaacttaatcaaagatttaccaggaagcaacatcctggatgttcttaaccaaagaataaaaggggattctgcttttattgatttagataaagttgaagtttgtcaggttgctgaaaatcttgatttaattagagggtcagttgacctatcctcgatagaagatgacttagctgaagctcatgtacaaagaatgagtaatcgtacaaacctcatgagaacatacgtagctataggtgacttcttggaaaggattgcagtcaaaaatacctatgattatgtgtttattgatgttggtcctagttcgggagcactgactagagcctttttcttggcatgtgatggattttttatacctgttgctccagacaggtttaatgttcaggctatttccacccttagccatataatagatagatggactaaagaccatctccaaaccatagaagcatacaaggaattaggattcccaattcgtgaaggtaacccctcatttttgggatgtatagtgcaagcattcaaaaaatattctggtgttgctaaacctggatatcagatgtggatgaatcgtattcctgttgaaattgatgaaaaaataaaacctttaatcggtgatgaaaagtatctaccacaattagacgataaatctaaagagcattcaatcatcatagagatccctgattttaatcagttagcccccctcatgcaggaagttggcaaagccgtatttaacatccaacagcaagatacagctttgattactagaagtggggagccatggagaggtaataactggacgggagctttagaacgaataaatacatatcgggctctttttaaaaaagcagcagattctatatttgaatttgaaaggagaaaataa

SEQ ID NO: 435851 - DNA, 660 bp, Serratia marcescens
atggacgtttcttcacattatgttgcttttatagatattctgggttttaaaaacatagttgaagaagaaaaactgaatcattttgataaaggtcttctcaagagtttatatgagtgccatataaactgtgaaaatatcttcgaggatgttaatattgatttagtacagttttcagattcaattgttattagcaaggctttttccaaggattcatttgaggaatttgctactgctgtctcatcatatcaaattttgcttttgaaaaatggttttttatgtcgtggaggtattgcattaaataaacattacagtaagtcgggcttcatttttagcccggccttgattgaagcttacaaagttgaaagcgagaaagccatctaccctaggatagttatatctgaggatttaatggactttctttatccttcaaaagcgattcctaagtttctttgcaaagaatatgacggattatatttcataaattacatcacagatgaactggatgaagaagcatatcaggttttattatcaataattgataattgtattactaataaaaatccttctatagcccaaaaagggctttggttggctggctattcagatgtggtgtaccagactcagtcctgcccttcccgatttactctttttaatgattga

SEQ ID NO: 435852 - DNA, 4029 bp, Serratia marcescens
gtgtctaaagaaacgcatttttacttgcctcgcatccttaccgcagaccctgtcagcggaaaaacgtacactgaagatgagctactgaaggcatcaccgtatctcatcatacttgcggagcccggtgccggtaaaaccgagctaatgcacagccttgcacaaaggctttcgactcagtcgattgaggctaactcttttcgatatcgagctgataatgaatgtggccgtccactggtgatcgacggatttgatgaactggccaagatagataaagccggaattcatcaacttttggcactggctttgaaagcaaaaccaacacaccttattgtatctagtcgatcaagtgaatggagtcattcctcgacatcccagttccgtaaaaccttcaacgtcgacccgctcgtggtgtatctttgtgaattcagtcaagatgaactgcggacacttttcagctacctgcatccaaatgaggatttcgatggctttgtgagagaagctaaacgtttcggagtcgatgtactgctgtcaaaccctcagtttcttcatctactagctgcagcctattcggagagtaatggacacttttcgagccgggaggcgttatttgctcagtccgtcaagtatcaggctcgtgaagataatcgcgatatcgttattgatgatgttcccttgtcggttgaacaaaagataaatatcagtgctgaaatattcacaaagctactgttgtcgggctcagaaggcattgcgacaagcgaaccagctgaaacccgagtttatcccttcatctattcgcttgctgcatctatcccctcaccgaagggaatattagccagtaggcttttcaggcctggttatcagacagatcagcatcgtccggttcataaaattattgctgaatattcagcagctgtttatctcacaaaacgaatcggaagttctgccgatccattgacgcttcgcaagtgcctgagcttgattgcgcctagtcactacgtgagggacgaactcagagggttactgggttggatggcggcgtgtggcgacaacactatgcagcagagcatcattcaactcgatccctacgctgtactagccaatggagacccctcacagcttacagttagctcaagactttttctgatcgggcaacttcagaaacttgaaagagaggatcccttttttcgccgcaatgacgcctggcgtcgctttagcgttactggatttttcactccggaagtcattgataccatcagaccgctattaactcctcaaggtgaaggccatcttagcggtctgcttttggagcttctccagggtgttgaggaagctcatgctttatcgcccacgctatcttctttggtatgcgatcgtttactcgatctacacacacgcttgctggcttgtggatgtctgcttggacttaaacattacaatttcagtgtagaactagcacgattacttggggaagccacgtctgattctttgcgggtcgcatccgaaatttacaccgtcaggggggctgagtcgtttgcgaacgatgaattggccacattcctacggacttgttgcgggctgtattcaaatccgaataatgaagatggcaacatctcaaccgaccattactttgtcagcttattcatctcccaacttcccatcacctgcgttgaacctttgctgaatatactttctgatgggctgacctgtgaatgtaaaaaacagagctttgaatgttattgccgcaacggcatcagcaaaataattggtaaattactggacaactacgtcgttaatgtcgcgcttccattggatccggtcagcatatggaggtggattgaatacctaaattttcatgaaacaatttcggcagacagaagtgaaacagttaaggtccttcagcagaatgctactttgcgtcggggggtttatcgacacgtattgtccggtaactttgatgctcatgcccttagagaagctctggataaccacttccgatatccctaccacgctcatgctggtctttgtttcaaagacggcgatcaggaatatctgctaaacatggcctttgaggaagaaaatgttgcactatggagtttacttttccctcaccatttccgaaaccgtcagataactgagagaaaaatcaatccactgaggcagttatgtcgccgccatgctttaagtaatcctcgttttatgcaggcatgggttagcgcggaacgaggtatgaagtcattgggtcgacctgatcagaaactcgcgcgtttgtctcgcagaatgaaacagcgtcgagaagcaaatcaggctatgaatcttcaatggattgattcacatcgtgatgagatttcgcagggtatgcaatggggtattttagactcctttgcgagaacaatgttgtcacaacccgataatctcgcctcaaagtttggtgacagaaacttagttgaacagtctttaattaattgcttaaaacatatatcaccgcatatacccgaccttcgtgaggttacccgactcaaaactgaagggaaagcatatggcatgaggtatatcttttatgcagcgtgtatgcttctttttgaagatcatggcacacttgcatctcttgataaatcgctgcttagcattcttaggactgaggccaatcatggcaatagcgaaggggcacggttaatacataacgcgatgatggataatgtggaccaagtgttgtttcccgcaggtcaggggacagaaatttttctccgaggctaccttgaacctcagcttgaatatcctcatcccccgctggaactaatcatgaagccttcagtgtttgattcaatccgcgggcagttagctatcgaatggctgggccaatataaggcactccccctcaacaccgtcagaagtctttttaagcttgcttgctgggaagcctctcagagtgaactgtgccatgtgattaccaagcgctgtgaggagttccagtcctcgcatacagacaacactggtgacaataagcaagaggaattgcgtctcttctggttaattcgcgccttctattttttgccggagttccccgcagattactggcaaagaattatcgccgacaaacgcaatctactcaggtttaactcgctttcaagagggataaatcgtgaagacacacagcactggccatcactaagtgcggaaaagctaggttcgattcttgaaggtttcatcggacaatggcctgttatgcggagttcccccccgtcacagaaccaacgcagcgaagtcggagatgcgtgggatattatgtatgtgatcgttgaaaggattggcacaaccgagccttccgagggaattttggttattaagcggcttctggaaatgccttcattgcaacctcttcattcagagcttaagagtgcgctggtaacacttcagcgagaaaggttgttcagggactacacgccaccatgcgcccacgatgtcacagaagtacttaatcatgatggtgtagtaactgttgaaggactgagagaaagcgttttgtatcaactggatgtgtatcaacagcatatcagcaagggagagttcaactctatcaggcagtttaaacccaacgggaatcggcttgacgaggaatcggcgagagatgtcattgcagaatggctccgcagtgcgcttctaccccagggtattactatcgttaaggagcatgaggtaaacgatgaaaaacgcgcggacatctctgcctcaaaagcacatcgcgatagacgtctgctgctgatgattgaagtgaagggccagtggcataaggcgatctacacggcaccgtatgagcaactgtatgaactttattctttaacacctgatgctggcatgcagggtatttatatcgctttgtggtttgggcaacatgagaaggtcgcaaatacatataaacatggattgaaaagtgcagaggaactcaggctggcaattattgagaaactccccgctgaactgcataagcaaatagatgtgttcgtactggatctctcaaaggaagctttttga

SEQ ID NO: 435853 - DNA, 558 bp, Serratia marcescens
atgcttacgaaagaacagaaaggccaacaagtgaaagagggagcattacggcttatgacgttgggtgaaatagccatggctcgacgtgttttcggtaagtcgatcgtctacaaccgtgtatggattcattgcgatagttacttaccccttggtttacaaggtaagcatgttggtatgtcgcccaacggcgagatatatttccgagaggaggaatacctggctgatttctctaaggtaaataattacgcaaaacaacatttctttattcatgagcttgcccatgtttggcagcatcagcatgggcagtgggtccgcctcagaggtgcctttagttgggcagctaattacacttataggttggacgctaataagacgctcacaaagtactctttggaacaacaagcttgtatcgttgccgattattggttgttaatacaatatggctatgatgcttgggcatatggtattgggcgttttgtgaattacacgggtccccaaaacaatagaattcgtctacagtacgagcaggttttagccgagtttttacgtcagaggtaa

SEQ ID NO: 435854 - DNA, 801 bp, Serratia marcescens
  misc_feature (773)..(782): n is a, c, g, or t
atgccatataagagtcttccagaattgacaaaaaaaatcattaaagaagggcttgtcgaacaaaaaactattctacatcaatcttatcaactcaaattttatttttctgataagttaaaaggaaatgaagtatggtggtgggatgtttttagtgatttcttcaatgaagaaattgaaaagcctcataatatattctattttggcctgctaataggatttaaagaaaaggaccctgagaattgctatcttatcagtcttggtaaatcacatttttatctcagcaagtttattgaagcagactttgggctgaatgtggcaatgcgtatagctaatgatgaaaatattttactcaagaaaagcagattcttttgtgggggaaagagtcaggaggcatcctcatactcacagtttgttcaaggatcatattttcctggcgaatccatcgagcatctcaaaacaaaagccaaagaaactgacaagtggggatgtaataatataactttttctgattcaattcagctaagtttggatggtgcccctactgcattagtcgatgttttcaatgatattgattcttcgttggcaaccaaagagaaaatcgaatttcctaaatcggaaaaaatcactgacgagtcaaagatagatgagcttgataattatctacttcaatcgatcattacagatgatgcaaaagttattattgatgagattcaatcttttggtgcctctattgtaattaataattctttgacattttttaaattgcacacaannnnnnnnnnatcttcaatcatcagataa

SEQ ID NO: 435855 - DNA, 153 bp, Serratia marcescens
atggaagccgccaccggcggcttccgccgtttcattgccccctcatttcactttttcttatcagataaagacttatctgagacgcccccggccgagagtttgctaatcttgaaagaacattgttttctgcataatcgaggatccgcaggatga

SEQ ID NO: 435856 - DNA, 2259 bp, Serratia marcescens
atgtccattaaacgctatccgcagctcgcccattggggtgcttataccgccgtggttgaagacggccggcttatccgttgtgaacccttcgtcgacgatcccgatccttcgccgctgctcgattccatcgtaccgatggtctactccgacaaacgcatccgcaagccggcggtgcgccgctcgtggctgcaaaagcgcgagggcagcgaccgtacgctgcgcggcagggaagatttcgtcgaggtggattgggagttagcgctcgatttggtggcgcaggagaatcgccgggtgcgcgatcgctacggtgcctccgggctgtttaccggctcttatggctggtcgtcggcagggcggctgcaccatgcccgctcgctggtgcggcggttctacttcagcggcggcggcggcgtcgatcagcagggcaactacagctggggcgcggcgcagtttttcctgccgtatgtgatcggcactttctcgccgttgaccgggcgcgtcaccagttggccaagcgtggtggagcactgcgaactgtttgtggcgtttggcgggttggcgctgaaaaacgcccaggtgtcttccggcggcgcggcggagcatgcgctcaagccctggctgcaaaagctggcgcgcaagggcacgccggtgatcaacatcagcccgatgcgcgacgactgccccgagttcgtcaatgcggaatggatcccgatccggccgaataccgacgtggcgctgatgctggcgctggcttacgaaatccagcggctgggcgcgcaggatgaagccttcctgcacagccactgcgtgggttatcaacagttggcggattacctgaacggcgtgagcgacggcgtggcgaaaacgccggcctgggccagcgacattaccggcattccgacggcgcgcatcgcgctgctggcgcggcagctgatcggcgtgcgcagttttatcacctgttcctactccgtgcagcgcgcgcatcgtggcgagcaaccgtactggatgatgatcgcgctgtcggcgatgctgggccaggtggggctgccgggcggcgggttctcgttcggccacggctcaatgaacggcgtcggcaacccgcgcgtggatacccccgcgccgaccatgccggtaggcgataacccggccgggctggcgatcccggtggcgcgcatctgcgacatgctgctgcgccctggcgaagcctatcaattttgcggcgagacgcggcattatccggatatccatctggtgcactgggccggcggcaacccgttccatcaccatcagcagttgaaccgactggtggaaggttggcagaagccggatacggtgatcgtccaagatatctggtggaccgcggcagccaaaatggcggatatcgtgttgccggtcaccagttcgctggagcgcaacgacatcggcggctcgtcgcgcgatcgttacgtgctggcgatgcatcaggcgattgcgccgcagcatcaggcgcgcaacgatttcgatatcttcgccgatctggcggagcgcctgggctatcgcgagcgctttaccgaaaaccgcgacgagcgggcctggatcgaagctatctaccggcaatgcggcgctgcgcagcgccgcgccggcgtcgcctggcccgagtttgaggcgttctggcaacggggctatgtcgagctgcccgcgccggccaaagagtttgtattttttgacgcgttccgcgccgatccccaggttaacccgctgcaaacgcccagcggcaagatcgagttgttcagcgagcggatcgccggctatcgctacgaagatttcgctccgcatccgcagtggcggccgccggtggagtggctgggcgcgccgcaggccaagaattggccgctgcacctgatctccattcaaccgagcgatcgcctgcatagccagatggatccggcgccgctggcgcagggcaacaagaccgccgggcgcgaaaccctgtatatgcatccggacgatgcggcgccgcgcggggtggcggacggcgccgaagtgctggtcagcaatgcgcgcggcagctgtctggcgggggtatcgctcaccgatggtgtgacgcgcggcgtggtgttgatggcgaccggtgcctggttcgagccgggtttcgacgcacagcgccggccgctcgagcaggcgggcaacccgaatgtgctgacgctggatattggcacctcgccgctgacgcaggggccgaacgccatgagctgcctggtcgaggtcagcgcgcgatga

SEQ ID NO: 435857 - DNA, 240 bp, Serratia marcescens
atgttcagatgccatcattgcaagcacgtagcctacacccgtaccagtcgtgagatgtcagaccgcaccaaggagcgctactatcagtgcaccaacgtgaactgctcggccacgttcgccacactggagaccgtggaaaaagacatcaccacccccaatctgcaaaattatgccgaaccgcaccccggaaaggacaatcagctcggcattgcgtttgatatggctgagagtgacggatag

SEQ ID NO: 435858 - DNA, 1098 bp, Serratia marcescens
atgatgaaccctggcgacttgctgagcacggcgcagcgcctgctgtcggatacaccggacttcacgttgtttgtggatgacaaaaatatcaccaccgatgtaaaggaccgcttgatctccctgcaactgaccgacaaccgcggatttgacgccgatcagctcaatatcgagctggacgatgccgacggcaagctggcgctgccacgccgcggcgccgtcattcgtctgagcctcggctgggcggggttgcctctgacggacaagggcgctttcaccgtggatgaaatcgaccacagcggcgcgccggatgtgctgagtatcaccgcccgcagcgcggattttcgcgatacgctgaacatcaagcgcaacgccgcctatcaccaggtcactgtcggcgacattatcaagaccatcgccggccgcaacaacctgacaaccgggatagcgccggagatggcggctatccatctcgaccacatcgaccagaccaacgaatcggacgccaactttttgacccgcctggcgaggctggaaggcgctatcgccacggtgaaggccggcaaactgctgttcatcgtgccgggccaggcgctgaccgcgagcggcaagccgctgggtgaagtgaccatcacccgtcaggacggcgataatcaccagttcagcatcgccgaccgcgacgcctataccggcgtgcaggcccactggctggatacgttacagggacgcccgaaaaaagtggtcgttcaccgcaaaaagacaaagaccgaacagacgcccaacgccgaaggtaactatctggccggcagtgacggtaatgtcctggtcctgcgccacacctacgcctacgaggccaacgcccagcgcgcagcaaaggcggcatggcagcgcatccagcgcggggcggcctccatgtcgctcaccctggcgaaggcccgacccgacctgttcccggaactgccggtcaacgtcaaagggttcaaacaacaaatcaatgatgtgcagtggcttatcacgaccgtcacccacgagctgagcgacggcggctacacgcaaagtgttgaaatggaggtcagagcgcaggatgtggatatggactga

SEQ ID NO: 435859 - DNA, 426 bp, Serratia marcescens
atgatgatggtattggggttattcgtctttatgcgccaaaccacgccttatcagaactttgagcagcaaatcggttggcgtcacccgtccaacagtcgaattggcctgcgcccggcgacgcagttcctggggcaggatgatgagacgatcgccttatccggcaccctgctgcctgagttcaccggtggcacgctgtcgctggaggcgctgcgcctgatggccgataccgggttatcctggccgctgatcgagggcaccgggtttatttacgggatgtttgtcatcaccagtctcagcaaaacccgcaccgtgttttttaaagacggcgccgctcggcgcattgaatttacgctttcgctaaagcgcgtggacgacaacctgcgccacctgatgggcgaccttgatctgagtaaatacctgccatga

SEQ ID NO: 435860 - DNA, 2553 bp, Serratia marcescens
atgagtgaccgcaagctacagctgcaagttttgttcaacgcggtggacaagctctctgcccccctgaaaagcctccaggccagcaataacaagctggccgccgccacccgtgaaacccgtaaacaaatccggcagcttgaggaccagaccagcaagattggtgcctttaacaagctgcgcgactccgtgagcctgggttccgaaaagctcaaggagtcagcccgcgagcttcgtaatgttcgccgtgcctaccaggaaaccaaaacgcccagccaaaagctgaccaccgagctgaacaagcagacccgcgcgcatcaaaaactactgaaggcacagcgagatgagctgggcaaactcagccaggtacgcggcgaacttcacagcaacaacattgacaccagggcgctagcccagtcacaagcgctgctcagcgagaaaacgaagctcgcgaacgacgccatggcaaaacaggaaagccagctcaagcgcaacggcgagatgcagcgccgatatcagaaggccaaggaggtacgaaacacgctcgccattaaagggggcgggatggtggctgtcggtggcggaatggccgccgcggcagcccccgcaatccatgctgccaccgaataccagcaggagatcacccagtttaaaggcatgggcgtaggcgacaccttcttgcagcaagcgcaaaagtacgcggacggcatgaacatcatggggagcagcagcaccgagaatctgcgcaccatcaaggaggcctactccatcttgcgtcatggaccggaaagcctggccatagcgccgacactggcgcaaatccaggtagcgcaaaaaatgctgatggccaacgggagcattaagcatgaagaccaggatgagcagaacagcgacagtcaggcgttggtgaaagtggcggaactgctcggccacatttcttcgacgaaggattttgccaatttcgccaatctggcaatgaaggccaatgccgcgtcgggtggccttgtgaccgccagagactacagggccgtggtatccaccggtggcgtcgctctcagccgcatcgatccccaggcgttctttttctccctatcccacctgatccaggaaaaagggggtgaacgcaccggcaccgggctggcaagcgcttatcaaaatatggtcatgggccgggaaaccaaggcggccgcagaggaacagcaaaaaatcgggttgctccgccccgacgccatccagtacaccaaaaccgggcaactagcaaaagtcaggcctgacgccattgtcaattcaggcctgtatcgcgctgatccctataaatacctgatgaccgaaatagtcccgcgcatcaaaaaagccaaccccaaactcgacgaggcaggtatggagatggcgatcgccaagctattctccagcagaacggcgcaggacatcatggtgacgatgtacaaacaacgcgccaatatcgataaacaaatcaccgcaggtaatgcagcgcagagcacgcagcagatactgagcaccaataaaaacagtgctgtcgggcagaggcttaaccttgccgcagaaaaagccaacctgaacaaacagattggcgccgacctgatgccggcctacgcggccgccctgaaagaattcgccaaagcgctgcactgggtgaacaccgagatgaaggctcaccccaaaatcggcaaagcactgatcgaagggatcgccgccgtgggcgcgctaacggcatcgctcggcgggctggcgctggtgctcgccggcctcatcggcccgttcgccaccctgcgctacatgtggggtatgctcaccggtggcagaaaggccgccaaggacatcaggctgctcaaaacagccctcgaaggcctgaatggcgcagagaagacagccaggaaaatcggcttcctgtcaaaagcgtttggcgtagtacgcacagcagtagtggcttttggcgaatcactgtggacgctgatggcaaaccccatcattgctgccatcacgatcctgatcgtcgcattgggtgtcgcggtttatgagatgtggaaacattgggacaccgtgaaaccttggctaattaagttctggaatgaggtatgcggcgctgccagtgccgcatgggattacctcaagcaaaaatggaacggcatgattggctggttcgaagggttgcccgccaaattcaaagccttcggcagcaacatcatcaacgggctaatggccggcattgacgagaagtggcaagaacttaaggccaagatcagcaaggtcaccgacatgctgccggactggatgaaacccggcagcgacgagaacccggacggggccggcacgcccgatgcggcaccgaggcccagcgcctcataccgcccactccggacggcggcggcaggaattccagactacggcccgcaggccgcgccggtgaccatccacgtttacccgtcgcccggcatggatgaaaaggcgctggcgcagcacgccgccaacgccctcaaaaaacaccagcgccagcagcaggcatccaaccgcagcaaactggccgatatcgactaa

SEQ ID NO: 435861 - DNA, 303 bp, Serratia marcescens
atgagtaaactcaaagaaggcgttagcgtcaccctggacaatccccttatccgcggcgacaaccaggtcacccaaatcctgctgacaaagcccaggaccaatgcgttacgcggcaccaccttatctgacctgatgtcgctggacgtttcggcactgtgtaaggtgctaccgcgcgtcagctccccggcgctgaccccgcaggagctcaacggtatggatccgtccgatctggtgcagctgggtacggcgttccttgattttttgttgccgaactcggtacgagagaacctcccgcaggattaa

SEQ ID NO: 435862 - DNA, 519 bp, Serratia marcescens
atggcactaccaagaaaacttaaacacttcaacgtgttcctgaacggtactgatttccacggcgtggccgagtccgtcaccttgcccaaactcacccgcaaactggaagcctggcgcggggccgggatgggcggtgccgtgcagattgatatgggcatggatgatgaagccctcaccttcagttggtcattgggcggttatgacccgcagccgtatacgcagatggccgaccccgttatcgatgcggcgatgatccgattcgcaggctctctccagcgcgatgataccggggagatttcggcgatcgagatagtggtacgcggccgccataaggaaattgaccctggcgacagcaaggaaggcgagaacacctcgctgaaaatcaccaccgaatgcacctactacaaactgaccatcgatggcgtcgacatcatcgagatagataacgtcaacctgatcgaaacggtcggcggcaacgatcgtatggcgcagcaccgtaaaaacatcggcctcatgtaa

SEQ ID NO: 435863 - DNA, 1173 bp, Serratia marcescens
atgcctgaagattatcatcacggtgcccgcgtcgttgaggtcaacgatggcgaccgcaccattaccaccatcagcacggcgatcgtcggcatggtgtgcaccgcgcaagatgccgatgctgccaccttcccgctcgataccccggtattgctcaccgatgtgcaggcggccgtaggcaaggcgggcaaaaaaggtaccctggcaacctcactgcaagccatcgccgaccagacccaaccggtcaccgttgtcgtgcgcgtggccgagggggccgatgaagccgcaacgaccactaacgttattggcggcgccgacgagagcggcaactacaccggcatgaaagctctgctttccgctcaggccatcctcggcgtcaagcctcgcattttaggggcgccggggctggataatcaggacgtcaccgccgcctttgcctcccttgcccagcagttgcgcgggttcacctacgccagcgcctggggctgccaaaccgtttccgactgtatcgcctatcgtaacaacttcagtcagcgcgaactgatgctgctgtggccggattttttgagctggaacagcaccaccaatgccgctgatgtagcctttgcgaccgcacgcgcactcgggttacgcgccaagattgaccaggacacggggtggcataagacgctttccaatgtgggcgtcaacggcgtgaccggcatttccaaaggggtgttttgggatttgcagagcaccggtaccgatgccgacctgctgaaccaaaacgatgtcaccacgcttatcaacaaagacggctaccgcttctggggcgatcgcacctgctccgacgatccgttattcgccttcgagaactacacgcgtaccgcccaggtactggccgacaccatcgccgatgcccagatgtgggcaattgacatgccaatgaccccgtcgctggtaaaagacatggtgcacaacatcaacgccaagttccgcgagatggtcagtaacggttatctcatcggggccaactgctggtacgacgacaccgtcaacacgccggacacgctgaaagccggcaagctcacggtcgattacgactatacgccggtgccaccactggaagacctgacgctgcgccagcgtatcaccgaccgctatttggcggactttggcaaaagcatcaacggctag

SEQ ID NO: 435864 - DNA, 630 bp, Serratia marcescens
atgaccacaccaaaatacaaccttgattttgagcacgccgttttaggccctgaaggctggtcgacaacggccggctggatactgacatatcaatgcgcctacagcaccacgcgcgagtttacctcctgctactggcagtattgtcagctgggcgtgggtatcgctgccggctcttacattgataagccaacgttgccagacgatgacaccaaggcgattcgtcgcacggaagatggcacagcctgggagatagtcgatgattttcgcggacaattggtatacagcacagagacaggtgaagcacggacgattgactacctggggccggttcccgccggctggacgctattggccccgcaaacaccgtatgacaagtgggacggcaagaagtgggtgaccgacaaagaagcccagcacgctgcccaggctaaagatgcgacagagatgaaaacgcagttgatggtcgacgccaccgcagctatcgctccgctgcaagatgccgtcgacaccggtatcgccacggatgaggaaacgcgccagctcacggcctggaagacctaccgcgcattactgagccgcattaacccggaggatgcgcccgatattaagtggcccgacaagccggcgtaa

SEQ ID NO: 435865 - DNA, 2094 bp, Serratia marcescens
atgaccgcgaagtattttgccttactgaccagtatcggcgcggccaaactggcgaatgccacggcattaggcaacccgttagccattacggatatggtcgtcggcgatgcgaacggcacggaccccactcccgatccggcgcaaacggtgctggttcacgaatgtcaccgcgcgcaactcaacagtttgcgcgttgatcctgacaacgccaaccaggtgatcgcggaacaagtcctcgctgaaaccgttggcggatggtggatacgtgaaatcggattgattgatgccgatggcgatctgattgccgtggggaattgtccgccgtcctataagccccagatggatgaagggtcagggcgcgagcaaataatacgcatgattctgatcgtaagcagtaccgatgccgtggagctaaaaatagatccttccgtcgtactggcaacacgggagtatgtggatgacgccatcgacgcccacgctaaaagccgcaatcaccccgacgccagcaccaccgccaaggggctggtgcaactgagcagcagcacgaccagtgacagcgaaaccctggcggccacgccgaaggccgtcaaggcggcgtttgataatgccgcgaataaggtcgcgaaggccggcgacaccatgacggggccgctggggataaaaagcaccgtcaccgtctatgaagacgatgtgaacaccatttcggagtttttgtattcgtacaacgaaaccggggtgcaaacgaagaaagtcggcattaaagccatctgtgatgccgacggcgccggccactgggtcgttgacgtcaacccggccgccaagggtgactgccgggtccaggcgttcggcattgacggcaaaagcaacatcgtcaccacgatgaacggcttcaagctgtacgaaggcaccgcgcgcgtcttcagtcccaacaatccccaactgatgtttggcgtggggatggggccggtagacaaggctgatgcctacagcaatattggccagatttaccgggtcaacgccaccgccaaaaacaagcccccggccgtttcgggcaacgtctccgccggcatcgtgtgcgtgccgatggatgctgcgccgtccgccggctactttgcggttgttggcggcagcatggcggcctacgtgggtttctcaggcgcagaggctggcggcatcacctggtcgcgactctacaccgacaaatacaagcccaccgccgcagatatgaatgcactaccactgtccggcggcaccatgaccggcgaaatccagtcaaccagccccaacatctggcgcggtatccagggcggctatggttcgatttggcgcatggatgccaacaattcgtatttcctgctgacgaacccgggagacccgacaggcaattacaatggtctgcggccactgactatcaacaacaacaccggcaacgtcagcattggtacagccttttccgtagacagcgagaacgccatttacaagaccggtatccacacctacagcgacgggggcggcagttataaccagacgagcggcatgaccatgcaaggcgcaggtgaccaggtcggtgaaatgtatttcctggagaatatcggcaaatatgcccttgtggggctgcacgcgagaagcggcggccgcgatgcctggtatgagtttcgcaatgacggcaatatttttgccaacggtaccaacgttgcccccgtcggggttatcgaggcatggccgagtgatacaccgccggccggctggttgctgtgtgatggttccggattcaatacgagcatattccctaatcttgccctgatattccccagtggccaacttcctgacctgcgcggcgcgttcctgcgcggtaaggacaacggaaaaggtgtcgaccctaaccgtgggttgttatccattcagcctggacaggcgccggcatcagcaattggcggcggtgaatggggtaactatgcagggcgagataccggccataccgtcggcaccgggaccgataacaccggcacttaccgtgtcatgcaggaaaccgaagtccagcgcgagacccgcccctacaacgtcgccattaactacatcgtgagagcagcataa

SEQ ID NO: 435866 - DNA, 609 bp, Serratia marcescens
atgactgagcgacttttgccgcctggcgccacggcgctagaacttcacacagagcaggcgagcgccgaactgagcgcagcgccggtaccgctacgtcaactctgggatcccgatagctgccccgcatcgctgttgccctatcttgcctgggccttttccgtcgaccgctgggatgacacctgggacgaagccacccagcgtgacgtcatcaggcaatcctattttgtgcatcgccataagggcaccatcggggctatgcggcgtgcaatcaagcccttgggttacctcattacggtgacggaatggtggcagaacaacaaaactcccggcacgtttgaaatggaggtcggcgcacttgatgcaggcattacgcccgagatgtatgccgagcttgagcgcatcatcaatgacaccaaaccttgctcgcgccatctcagcaacctgatcatttcgctggaggttcgcgggaatatacccgtctcggccgccagctatgacggcgatatcatgacgatttatccctattaccctgatgtgattgagacgacgtcgcccgctaagacaggggtggcgttgcacattattgacacactgaggatctctctatga

SEQ ID NO: 435867 - DNA, 909 bp, Serratia marcescens
atgccgaccatcgatttataccagttgccacccccggatgtgattgaaccgctcgactacgagtccctgctgagcgccattcaacgccgcatcattgagctgaccaacgagaaagaccgtgctgctgtcaaggctgtgctggcactggactctgaaccgctgactaagctcacccaggcgtatgcttaccgcgcgctactgcaacgccaaagcatcaacgacgccgcccgcgccgtcatgctcgcctatgccgtcggcaccgaccttgacagcattgccgccaacttcaacgtcgctcgattaacgatccggccagccaacccggcaactatcccgccgacgcccgccatcatggagtccgacagtgattttcgcaaacgcacccagcaagcgtttgaggggctaagcgtcgccggccccactgcggcatatgaatttttcgcccgcagcgccgacggcaacgtcgcagacgccaaagcgttcagccccgctccggcctgtgtcactgtcaccatactgtcgcgcgacggtgacggcacagcggccccgtccctgctcgataacgtaacagcaaccctgaacgatgaagacacgcgacccgtcgctgaccggttaaccgtgcagtcggccgatatcgtcaactataacgttgtggctactctctattattaccccggcccggaaacggagcccatcaggcaggctgccctgacccgtttacaggcttatatcaacgctcaacatcgcatcggccgcggggtatatctctccgccattgatgcagcattgactgttgaaggggttgagcacgtcgttatcattgagcccgccgccgacctggtgttggacaaaacacaggcctcgtggtgcgcagcaccgcagatcaccatggtgccgatgaatgactga

SEQ ID NO: 435868 - DNA, 354 bp, Serratia marcescens
atgatgtaccttggcatgaacgccggcagcggtgaacccatcaccgatctggatcacatccgtcagtccgtgagtgacattctgaacacgcccgtgggcagcagggtaatgcgtcgcgactatggctcgctgctctcaacgctgattgaccaacccgtcaacgacagcctgacattacagatgatgtcagccacctacagcgccatcatgcgttgggaaccacgtgttgtcgtcaaagccctgacgctcaccccgaatgccagtccgggcagttatacagcagacctggtgtgtagccgagccgacaatgacgagactttcgcgctgtcagcccgtataggaggttctacctga

SEQ ID NO: 435869 - DNA, 597 bp, Serratia marcescens
atgaacgaacatatcaccgaactgttacgcctcctgcacaacctgatcaacatcggcatcgtcgccgaggtccagggcagtaaatgccgcgtgcaggtgggcggtgatcccgagcgaaccaccgactggctcacctggttgacggtgcgtgccggttcggcaaaagtctggtggccgccgtcggtgggcgagcaggccatgctgcttggcatgggtggcgagctgaccaccgccttttgttttggggggatcttcagtgacgccaatcccgccccctgcgacctgccgaacgctctgcatatcagcttcccggattcggctgtgctgcagtacaaccccgacgacagcagcttcctgctgaccggcgccaaaaccgcctacgtcaaagtggaagaaaagacgacatgggactgcccggataccgattttttgggcaaggtgaccgcgcaaagcctcagcatcacccagggcggggagatgaagggcagtatcacccacagcggcggtagcttcatatccaacggcgtgcaggtcgatgaccataaacacggtggcgtccagaccggcagcggcgagacagagggccccatcaaatga

SEQ ID NO: 435870 - DNA, 456 bp, Serratia marcescens
atgtctgatgacaattttcatgccattgatacctggcttcaggggttgctgacccagctatccccgccgcggcgccgggtgatgaatgggcttatcgcgcgcgagctgcgccgccgcaaccaaaaacgtatcacgcagcagcagaaccccgacggctcgccgttcattgcccgcaaacgcctgcgagataagcaggggcgtatccgccgcggtatgttcgcccgcctcaagaccgccaaaaatatgaaggtggcggcaacggccgacgaagcggccgtgttcttcgccggccgccagggctatattgcccgcacgcaccagtatggtctcgaagacagcgtcagccgaagcggcccccgggtgaagtatcctgcgcggcgcctgctgggctttgacgatgccggcacgaaagccattgagcagcaaatcctggatttcctgggcaaagggctgtag

SEQ ID NO: 435871 - DNA, 465 bp, Serratia marcescens
atgctaaaaccgatacttttgcgcaagaccctgatggaagcggtgccggaattccgtaacgatccggacaagttaaaattgtatgtggaacacggccatatcgtttcaaccctggcaccgtcactgtcccatgagtatcagtacaccctgagcgtcaccgtgattaatttcggcggcagcgtggatctggtgatggtccccatcctcagttggttgcgtcggcaccagcatgacggcatggccaaccccgacctgcgccaggaggccttccgttttgaagtcgatatcctcagcaatgaaagctgtgacatcgaaatagcgcttcggctaacggagcgcaccatcgtcaccgagagcgagcctggcctgctgaccgtcaggcacgtcaatgaaccacccaccccctacgatcgccacggcccgttccatatggacggcgtgcccggcagcacatggacggtgtaa

SEQ ID NO: 435872 - DNA, 231 bp, Serratia marcescens
atgaaaatgcacaataaaggggtaattatctgcgcactattggcgctcgccgccaccctgaccgcctgcgccgccgtctctttcacgcacgccaatggtgataagggtcagagcgtcaccaacgcagaagtccagcctaacaacaccgtcgtgctgcaataccccaacggctcagcctgtatcgacaccaaccccggcgaaagcagcgcctgcacgccgagggagatgtga

SEQ ID NO: 435873 - DNA, 204 bp, Serratia marcescens
atgaaagtgatggcgcagcagcgcgaaaccgtcgagatgatttgctatcgctactacggcaaaaccgccggcgtgaccgaagccgtgatgaacgccaatccgggcattgcggatgttggcgtgtatttaccttacgggtatcccgttgaaatgcccgacacggttgctccggtggctcaagacacagtccagctatgggattag

SEQ ID NO: 435874 - DNA, 471 bp, Serratia marcescens
atgaacagttttattgccgcagagcccgcccccaaaaaagccgacaatatcgccaatggcgatttttggccggcaatttgcccggcagcgttctcgcgttcaatgcgtcttgatggcaccaccacaccagagcgccagcgtgatgcgctggtgagcgccatggtaaacgtcaatcgtgagttgcacgcctggcggatgacgcagcaggcactgggctatctctcgctccaggatgtgccgtatgacgatccggtcgatggtgaaagccccggcatgcacaactaccgtcgggcggtgttctgtatcgccaaggccaacatcaccgagcgctaccgggattttgacgccactgccaaaggcgaccggcgcgcaaccagcctggaaagcgaggtcgacgacctgtggcgagatgcgcgctgggcgatgcgggaattacagggactcaaccacaataccgttgcgctcatctga

SEQ ID NO: 435875 - DNA, 642 bp, Serratia marcescens
atgatgaccccggcccgccggcacttcatgcgtgaaaccgctgccgccgtgaccgacgccgagccgctgtctcgcatggaagcgggcacctatagcctgatgctgcgcaagctggccgaggacaagcgcagcctggcgcgcttgcagggcagcgatcgccgcattgccttcaaacgcaaggtgctgcccgattacgccccctggatcggtggcgtgctgcaatcaggcaaaggcgcgcaggacgatgtgctggtgacggtgatgatctggctcattgatattggcgaaccagcgtctgcgctgccgctggcgggttatgccttaaagagcggccttaccgcgccaggctatgaccgtcagctcgcggccattatcgccgaggaaatcgccaacgcggcactgacgcaacacagcctgtcgcaaccgctggatctggctgtgctgcagcacaccttggagcttaccgccggcgaggatatgccggacgaagcccgcgccaagctgctcaaagccctgggttatgcgctggaacaggccggccagcacaagcaggccgtgatcgcccttgagcaggcgttacgcctcaatcagcgcgccggcgtaagaaaagacatcacccgcctgagcaaggcggacgagtaa

SEQ ID NO: 435876 - DNA, 1347 bp, Serratia marcescens
atgatcccagaaacagaggtggcgtttggtcaatacctgacgcagcaagccaagctgaacggcatcaccaccgccattatcacggctggcaaaaaattcaccgtggtgcccaatgtcgcgcagcgtattgaaaagcgtatccaggaaagcagcagcttcctgaaagccatcaatattgtgccggtcattaatcagcagggccaaaaaatcggcctgggcgtcagcgggccggcggccagcaacaccgacaccacccagcaggaccgcgtgccgcgtgacctcagcgacatgacggcgcagaactatttttgtcagcaaaccaacttcgacacgctgctgcgttacgaaaaaatcgacatgtgggctgcgttccccaacttccagcccatcctgcgcgacagtatcctgcaacgtcaggcgctggaccgcatcatgattggctggaacggcacgcaccgcgccaagacctccgatccggtcgctttcccgctgcttcaggatgtggcgccggggtggttgcaaaaatgccgtgatgacgcacctgaacgggtgatggccggcggcaaggatccgaccaaggttgtgattggcaaggacggcgactacgagaacctcgacgccgcggtcatggatggcaccaacaacctgatcgccccctggtaccaggacgatccgaaactggttgtgatttgcgggcgccagttgctggccgacaagtatttcccgctggtcaaccagcagcagcccaacagcgaagcgttgtcagccgacattatcatcagccagaagcgcatcggtgggctgcaagccgtccgtgtgccgtatttcccggccaatgctctgatggtaacccgcctggataacctgtccatttactggcaaaaaggcacccgccgccgctgcattgtggacaacgccaagcgcgaccaggttgagaattacgagtccgtcaaccaggactacatcgttgaggattacgaaggctgctgcgtcatcgagaatatagagatgactcagacgccactggatggcaaggggacagaacaggaggacagggttaacgccgcagtagcgaaggctgttgaagccatggccgccgccttccagcgcatcccggcagcggaaagcgcccgcctgacagagaccgccgccgacaccgtaagcccggaggcacccgcgccaaccctggcaccggataccgacgcagaaccgaaacaaggtgacccgcagaataacagcgccgcatcggtcaccactgccgataatcccgggcaggctgagcaggacgacgggaagcaacccggcgccgaaaccaagcctgacgcgaaaaaggcgggcaagtcatga

SEQ ID NO: 435877 - DNA, 825 bp, Serratia marcescens
atgggtaagaaatcaaaattccagcaggtgtgcgtcgaaggggcgactaccgacggccgccacatcaaccgccaggacattcaggacatcgccgacacctacgatccaaagctgtttaacgcccgcgtcaacctggagcacatcaacgggattttgccgaacggtccgttcaaagcctacggtgacgtgacggcggtgaaggccgaagaaattcaggatggcccactcaaaggcaaactggcactcaaagcgcaaatcgacgccaccgacgaactggtcgagatgaaccgcgcccgccagaaggtccacaccagcattgagtttcgccccaacttcgccaaaaccggtaagtcatacctgaccgggctggccgtcaccgataacccggccagcctcggcaccgaaattttgcaattcagctcgaccgccaccgtgaacccgctcgcccaccgcaagaccgatgcggagtgcctgttcacggcagccgaagaggtgacattcgagtttgaggaggtgccggataatcgcccgtccctgctcgacaaggtgagagagatgttctccagtcgcgacaaggcaggccgtaaccagatggacgacgtgcacctggctgtgaccgagatcgccgagcaccaacagcaacaggaggagaaattcaacgagttgctcgatctgccggccacggtcacccgcctgagcgaacaggtcactgcgcagcaggaggaactggccgcactgaagcaaaagctcggcagcaccgatgctgacgtgcatttccgcccggaagtgaccggtgcgccaaacgaattcgaaacagattgctaa

SEQ ID NO: 435878 - DNA, 1782 bp, Serratia marcescens
atgagcatgaaagtgaccgttaccgccgccgatctcgatccccgacgccaggccatgtatcactactggcaggggctcaagctctcgtgcatcgcccggatgctgggcgttaaacccaataccctctacagctggaagcaacgcgacggctgggataattacagcccgctctcccgtgtagagctgacgacttccgaacgttactgccagttggtagtgaaggaagtcaaaaccgacagcgatctgaaggagttggatgcactcagccggcagatggagcgccaggcgcggatcaccaaatacgaggccactggcaaagaagccgatctcaaccccaacgtcgagcgccgccacagtggcaagcgcaaaccgccgagccgcaacgccttcagtgagtcacagctggaaaagctggagacagtatttttcgagcagatttacgactaccagaaaatctggtaccgcgccggccataaccccgactaccgtattcgcaatatccttaagtcgcgccagattggcgccacctggtattttgcgcgcgaggcactgctggatgcgatgcaaaccgggcgcgaccaaatattcctgtccgccagcaaggcgcaggcgcacgtgttcaaaaactacatcctggattttgccagggaggccgaccttgagctcagcggtgacccgatcaagctgccgaacggggccaagctgtattttctcggcaccagctcgcgtaccgcgcagagttacaccggcaacctgtatttcgatgaatatttctgggtaccgaaattccagacgctgcgcaaggtggcgtcgggtatggcgatgcaaagtgaattccgtcagacctacttctctaccccttccacgctgacgcatgaggcgtacccgttctggtccggcgaggcctttaacgtgggacgccccaaaggcgagcggatcgaactggatgtgtcggccgcgtcactggttgatattcgtcagtgcgaggacggccaactgcgccaggtggtaaccattgaaaacgccatcgcccgcggcttcaaccgtgccagtctggagcagctgcgccgcgagtacccgcctgaagagttccgcaacctgctgctgtgcgagtttatcgacgacagcacctcggtgtttccgttcgaagcgctacggcgctgcatggtggatgtctgggaggagtggtccgacttccagccgttactgctgcgcccgtttggttaccgcccggtgtggattggctacgacccgaacggtggcaatgaaggcggcgacagcgccggctgcgtcgtcatggcgccgccggcagtgccgggcggaccgttccgcgtcctggagcgtcaccgctgggacggtaacgactatgaggcgcaagccaaggcaatcaaggcgctgaccgaaaaatatcacgtggaacacatcgccattgatgtgaccggtattggtgatgcggtgtggaagctggtttcgaagttcttcccggccgcacaccgcatccagtacagcgttgaggtgaagaccaacatggtgctgaaggcgctgaacgtcattcgccacggtcgactggcgtttgacgccggccacaccgacatcgcgcagtcctttatggcgatccgcaaggtgatgacaaccagtggccgcagcgccacctataccgccagccgcagcggggcggtcggccatgccgatctggcctgggcggtgatgcacgttctgtttaatgagccgctcgaaggtaataccgccaacaacggcttccgttttgaggtgattggatga

SEQ ID NO: 435879 - DNA, 1056 bp, Serratia marcescens
atgagtcagtacgacagcgaccatcggcctgagctggcgatgaaagcagcggcgcctgcagcacaggcatttacgttcggtgagccggagccggtgctcaactatggcgccatcatggaatgcctggagtgtgtcagtaacggcatctggtatgagccaccgattgatctcgatgggttggcacggctgtttcgtgccacgccgcaccacggttcggcgctgttcgtgaagcgcaatattctggcaagcacctttatcccgcacccgctgctgagcatgcatgaatttaatggctgggcactggattacctggtgtttggcaacgggtatctggagttgcggcgtaacatgctcggcgaacccaagacgcttttgcgagcgctggcgctgcgagtgcgtcgcggcattcagccgggaacgttctattctcttcagcccgatgagcttacgacggagggctactacgcctttcgcaaggacagtgtgttccaactgatggagccggatattacccaggagatttacgggttgccgcaatatctgtgcggggtgaacagcattctgctgaacgagtcggcaacgctgtttcgccgtaaatactatgacaacggcacgttcatgggctcggtgttctatttgaccgaccctgtgcagaaccaaactgatattgaccggatcaaagagaccatcgaatccggcaaggggcgcggcaacttcaaaagcatgtttctttatgcgccaaacggcaataaagaggggttgcagatcatgccgctggcgcagatggcggccaaggatgagtttttgaacgtgaagaatacctcacgcgatgacgaactgagcgtgcaccgggtgccaccgcaactgatggggatcattccgaacaacaccggggggttcggcagcgtgaccgatgccagcgaagtgtttgtgcgcaacgagctggtgccgcttcaggagcggatgcgcgagttgaacgactggttgggtatcgaggtgatccggttcggcgactacattctgcctgggcagggttcgtccaaaggcagtttgtaa

SEQ ID NO: 435880 - DNA, 387 bp, Serratia marcescens
atgaaagacacagtgaaatatgagtttcaccatttcggaataccattacaggatggaaaagaggaaggcatattcagcgagaaagccggaatgtatacttctgacaatcccggtaagtttcgcgttcaatggcatcgatttacagataattccccgttacacactctcctgaaaacgatgccccatgtcgcattcaaagtggacaacctagaagaagcagtaaaggatgaagaaattattctcgggccatatgagccaattgatgactatttcgtcgccgtcatcaatgactcaggagtcccaattgaactgattcaaacttcactatccgataatgagttatggaatcgagctcgctcaggaaagggcagcttgtatcgcaaatag

SEQ ID NO: 435881 - DNA, 594 bp, Serratia marcescens
atgatttcactgaaaaaactaaacattatattgatatttatcgcaacattcagcggctcagcttacgccaaacagaccattgtttttgtacgacatggcgaaaaaccggcaaatggaagtgggcagctaacatgcaaaggcctgaatcgcgctctggcactccctgatgttctaatttcccgatacggcaagccagatgctatatttgcttccgcccccaaagaaaataaaatcggaagctcactgcgccctctcacgacaattacaccaacagcaattcggctttccctgccaattaatctaaactaccacgcaacagatatttccggtttaaccggcgcgctgcttaatgaagtcaataaagattcgttgagttttgtttcctgggagcacaagaatctggttgctgcggcaaaagagattgtagaaaaagaaggtggagatcccagcatcattcctgagtggacgggaaatgatttcgacagtatttatgtcattacactcaaccgagatgtgaccccacctctggtgacgtttatccacgagaaggaggggttaaacaccgtatctgaagattgcccctcttataaatag

SEQ ID NO: 435882 - DNA, 360 bp, Serratia marcescens
atgacgaaaatcacaaccccaaacacaatggaaatcgccgggcaaccggcgatcatcagctacgtgccagaaatgggggcatttcgcggtaaattcctcggcctatcagggtactgtgatttcgtctccgacagtattcaaggattgaaagccgagggcgagatttctttgcgtgaatacctggacgattgccgcacggccggtatcgagccctacgcgcggcaggagaaaatcaagaccttcacgctgcgctatccagaatcgtttggcgaacgccttaaccaggccgccgccgaacacgaggtatcagtgaacgcattcattgttgaaacacttaacgaaagaatgaaacacgcataa

SEQ ID NO: 435883 - DNA, 402 bp, Serratia marcescens
gtgagcaaccgcaaaatcagcttttacctgaagcccgcgcattcgcgggccgaccaactggccgacgagatgctggaagcgcttccggtcaaggcgcggggcaatgcctgccgcgcggcgatgctggccggcatggcgttaatgcgccaggatgcacgcctgccgtacctgattgccgagctgttcgacgaacgcaccaccatcagccagatccgccatttaatcagcagcgtattgccggaggacggcgcaccgctggcggcggcgctacagcaactggctgcgctggctcaggcaccgggaagcacagaggggcacggaacggcggtgccaacaccatcagcatcacctgacaatgcagaacgtactcggcaaaacgcccgtaatctgtttccgaattga

SEQ ID NO: 435884 - DNA, 966 bp, Serratia marcescens
atgaaaatctttatcgatgacggctccaccgcaatcaaaatggcctggcaggagaacggcgagcagcgcacactgcgcagccccaacagcttcaagccggaatggtcaacgccgttcggcgaccagccgccggccaactacctgctggacggcgagcgctactccttcgatccggtcagcccggacgccatccgcacgacccacacccgctaccagtacagcgacgtgaacgtggtcgctatccatcacgccctgctaaaaaccggcctgccgccgcagccggttgacgtggaggtcacgctgccgctgggcgagtacctggacgagcacaaccagccgaaccacgacaacattcagcgtaaacagcgcaacatcctgcgtccggtgacgctcaatggcggcgagaccttcaccatccgtaacgtgcgtgtgatgcccgagtccatccccgcgggcttcgacatcgtgaaagacctggacgagctggattcactgctgatcgttgacctgggcggcaccacgctagacgtggcgcaggtgcgcggtcaactgaccggcatcaccaaaaccttttgcgatccaggcattggcgtgtccctcatgacggaggccgtcaagtccgccctggctgtagcaaacacccgcgccagcagttactttgccgacgacctgatccagcaccgccacgatgtgccgtacctgcgcacccgcgtgaacgatgccggccagttcaaccaggtgctggacgccttgcaggagaaggaggccatgctttgccgccgcgtgcagcaggcgatcgagcgcttctcaggctacacgcatgtgatggtgatcggcggcggcgccgagatcgtgggggacgccgtactggccaccaccgccatgccggcagcgcgtttcttcagaaccaccaacccgcagtttgacctggtgaatggcctgtaccagatgggggcaccagcgtga

SEQ ID NO: 435885 - DNA, 672 bp, Serratia marcescens
atggggtatttgggaagcaaggcggcaagcggggtttatcaaaaaatcatcgccaatatgccaccgcatgacacttacatcgagacgcacctgggcggtggagccatcttgctgcgcaaaccgccagcaaaaaccaacatcgccatcgatattgatcccgatgcgctgtgtgaattcaatgcggggcgctgcatgccgcatgttcagcttttccggcatgacgcagttagcttcctggaagacttcgatttcagcagcgccggccgggtgttgatttacgccgacccgccatatttgccagaaacccgcaccggcaacgcccgctaccgttacgaatacaccgtggatgaccaccgccgcctgctcgcctgcctgcgaacattgccggcggccgtcatgttgtcgggctacccgtccgtgctgtaccacgagctgctgccggattggcggtctatcacgttccaggccatgacccgcggcggcgtcagaacggagcagctgtggatgaactttcccgaggggcagccattctccgccgcttacgccggcaaagactacatcgaccgccagcgcatcaaacgcaaggtggagcgctggcgtaaaaaataccaggcactgccgcccgcggagcgcctggcgatcatgcaggcgctatcgagcatagacgattaa

SEQ ID NO: 435886 - DNA, 2268 bp, Serratia marcescens
atgaacaactaccacggccggtatcaaccatcaccaccactgccataccccggcaacaccgaaacgcccgccggggttttcagctggaatcgcccgcgcgaggctatcagcaccgaagccgcgaacccaccgatcgaggagtgggcatttcgccaggggctgcacgccgaaccaatgtcgcgcgccctctgggtgcgccgccgtctggcgtcgctgcctcacttcatccggcgttactacgcccagcgcgccgacaacatcgaagcgcagcgcggcacaacgcgagccaataaatacttaatcaacacgtttgaaaagcatgtattgccgcgcattgatggcgtcaacgatcggtatcgcctgggtgttgtacccggtgtgctgatcggcttccaggatgattttgcccgcctgccgtggtacggcaagcgtgatcttaagcgcctggcgcaccgtttggccgactgcattaccgctgaattcatgaactactaccaaggccaggttgataaacacggcgatgtttcatttgcggtgctctatgcctatggccgcgccgggtgggtagtttcgcacctcaacatgtttgcgcctggctggcgcagctactgcgagatggagctaaccgacgctgacgccctgcgcagcatggcgcgcctggagtcgccagcgtggtggctgcgccggctaaaacgcatacacgatcagtggcgtgagcacctgatgatcgccgcgggttacgtcagcaagaagaccaccccgtattgcagtgatcctgcactcaaagaatggaaagcccagaaaaaagccaaccttgaatatttaaaggcaatggagttggaagaccaggacacgggtgaacgtgcgtcactcattgaaaaagtggtcggtagtgtggctaaccccgcagtgcgtcgtcatgaattgatggcacgtatgcgcggttttgaaaatgtcgccgatgatttgggcttagtgggcgatttctacacgctgaccgccccgtctaaataccacgctatgcacaacaccggtaagcgtaacgataaatggaacggggctaacccacggcaaacgcaaaaatacctttgccgcatctgggctcgcgtccgtgccgcatggaagcgggcaggcattcgggcgtttggtttccgtgtggttgagccccaccacgacgaaacacctcactggcacctattgctattcatgaggccggaggatatcgaccaggcacgggatatcttttgcttgtatgcccggtgggaggattcggaagagctgcaaggcatcaaagccctggaagcccgtttctatgtgaagccgatcgataaagagaaaggcagcgccaccggctacattgccaagtacatatcaaaaaacatcgacggttacgccttggatggagaagtcgacgacgacactggcttaccgttgaaagagacggcacgccgcgtaaatgcctgggcatcccgctggcgaattcgccagtttcaacagcttggcggcgcgccggtcacggtctaccgcgaattacgccgcctgcgagattgcgaactccgcttgcatccggagatcgccccggtgcaagtggctgccgacgaaggggattgggctgagtacaccgttactcagggcgggccgttggttgcccgtgacaatatacgcgttcgcctcagctacgaaatcaccgagaacgggaacacctacggcgatgacgtcagccggattaacggcatctacgccccagcatcggggccaggctcccttatttttacccgtacagccacttacaaaatcgtccccaaagccaaggcagacgtgggtttggccgttgacgttcagggcgcgccgcgcccccttggagttctgtcaataactgtacccgtcgccgacagtacggcccagggttcgggtctggctggtgccctcacgggtgaggataccagccagataccggctgattttgatcggatgacacgccaggaacggcgggaattactcgaccagctccgcgcagcggagaaaaacacaccgcggcgcgacgatctgccgaacaagacgcacagggttacgccagaaatagccgcagggatgggtgacattgcccgccaggtgatgaatttcgctcactcaatagggttggagctgacctcatgggaacttgatgcactgctatgcggcgccaccctcgacatcggcagtggcgaagccatcaggctgcgcggcgatcgcctggagccggtaaggcgggatgcaacgccattttaa

SEQ ID NO: 435887 - DNA, 288 bp, Serratia marcescens
atgaaacgatggagtaaaaatgaagacagggcgctgaaagaaagtgccagcagcctttcagcaaaacagattgcccacttacttggcaggtcagcaaaagcagttagcaatcgtgccagcctcatcggtgtcaacctgaaaaaaagtggtgacgcgtatcacggccgaaagtatccagaggcggatattcaactggcgcacaagctgcatgaatcgggtatgaaattgaggttggtcgccgaaaaattggagatcccatttagctcactaaaaaattatttttactaa

SEQ ID NO: 435888 - DNA, 810 bp, Serratia marcescens
atgatccgctccccgctcaaatgggcgggcagcaaagcccgcatcatggataccttgcgccagcacctgccggccggcaaccgtctgatcgagccgttcgccggttccgcatcggtcttcctcaataccgactacagcagctacctgctggcggacatcaacccggatttggtcgggctgttcaataccatcaaaaccaaccccggagacctgctcgactgtgccggactctttttccggttcgacaacaacgccgagcgattcagcgccatccgcagtagcttcaaccttaacgacgacgagttttgccgcgcggtgatgtttctctacctgaaccgccattgctacaacggcctgtgccgctacaaccgcgccgggcggttcaatgtcccttacggcaggtacaaggcgccgtatttcccgaaggacgaaatcctccagttcgccgagaaagcgaaaaatgccgttttcctgtgcctggattttgaagaaacgatcgagatggccggcgccggcgacgtggtgtattgcgatccgccgtacataccaacatccaacaccgccaatttcacccaataccacaccggcggattcgcgccagacgaccacagccgaatgattgcggccctgcaagccgcagccgcgcgcggctgccgcgtcgttgtatccaatgctgacgttgctgcagatctctaccagcaagccggcttcaccgttcaccacatcaccgcgccacgctctgtcagttgcaaaggcaacaagcggaaagccgcgggagagatcatcgcaactatgagggtatcagcatga

SEQ ID NO: 435889 - DNA, 210 bp, Serratia marcescens
atgaataaagaaacgaaaaaaggcgggctgggttttctgtccatcctggcgcttatttttatcacactgaaattaatgggctatatcacctggtcgtggtggtgggtgaccgcaccaatttgggggccgtccgccgccattctttccctcatgtgcatcatgttcttgttcgttggcgcagtaacctgctgggagaaacgcagaagatga

SEQ ID NO: 435890 - DNA, 204 bp, Serratia marcescens
atggatgttttcattctgttggcgttattcgccgctcaactgtttgtccttattcgaaatgattgggtctatcggcaacgctgcatcgtcatggattgctacgggcatctttattacgagttgctgccttcctattccgtcatgttctggaagtgttggatttgggatgtggacaaattcttatcaacaggaaaaacaaaatga

SEQ ID NO: 435891 - DNA, 225 bp, Serratia marcescens
atgagggcccggctttccgggccacaggctgaccggtgcatttatgcgaaggcagcagcgctgctctcacgctttgatcgtggcgaaaaggtttacaccaaaaccaagcgcttcgcctatctggaaatccgcgtcaccgcgtggtggagattattaagcaaaaaccacggcgtaagttggaaattaatgacacacgccgcctttgataatgaggtgaataaataa

SEQ ID NO: 435892 - DNA, 576 bp, Serratia marcescens
atgcaacacatcatgcttgatctggaaaccatggatataacgcccactgcggccattgtcgcgatcggcgcggtggcgttcgacttcaccaccggcaccctcggcaaacacttttatcagcgtgtcgatttagcaagcagccagaagcacggcggcaccatcggtgccgacaccgtgaagtggtggttacggcagagtgccgaagcccgtagcgaaatagccaccgatgatgctgtgcatattcgccaggcattgggtgagctggggtgttttatattgcgtaacagcccataccctgacgcgttcatctgggctaaaggcaccgattttgatattccgatcatcacctctgccatggcccgcattgatctggagcctacatggcgattctggaatgtgcgcgacgtcagaacctttgaggacgccgcccgcgatgctggcatggatctgcgcacggccgtccaatttgaaggggataagcacaacgccctacacgatgccattcaccaggccagaaccgtcatccatatttggcagcaactggttgccccacaccgtcagagcgagcagccatga

SEQ ID NO: 435893 - DNA, 324 bp, Serratia marcescens
atgcaacattcagccagcaccggaaacctgaccgccgagcaaatagctcgcggcctttcccatgcagccaaattaaaacgcctcgtgataagcgccagaacggaaaagaatttggtgcgtgagttcttcgacaatttgcgcatcagtcgctaccgctcggtaatttatttctgggcgcgcattggtgctgagcgtcaccgtctgcattttgaagaattaacggaacgagagcgtatcgccattattaacgccatgctggagatgcgtgaattggtcagtgagttccccaaagacatattgcacgacgatgcgaagttaacttaa

SEQ ID NO: 435894 - DNA, 636 bp, Serratia marcescens
atgtcaacgcggaattccaccactcaacatagcgatgaatttttcccatcgggtgaggcgctcgcacatgggttgactaagcgccaaacatgcccggttgcgagccgcattgtccatactgatgagcacggcgctatcaaattcttcaagcataaccagacgggccagcatctcatcaacatcaagcttatgaatatcattaataagagaagaataacgctttgcctgttgctttgcggcctcagctttaccgccaaaactccaagcaatccttattccactaaaaatagcaacaataccaccaaacaaccaactgagatggctctgcataaatacggatgcaccaagaatgcacagcacagcattaatccagacatccatacgccgattaaatgtttccgtcattctctcaagccaaaagctgttccagatgcggaacttcacaccatactcagtaggttgttcgctcattacttattcctcgtcgtcgtcatcctgctgctggctgtcacgttgatttaccggagcaggcacaggtttttgaagttgatgaaatttatcgctgtcagtcattttgacctctttgttggtgggaaatcgttacgccgctcacttctttgctggaaggcggcgtag

SEQ ID NO: 435895 - DNA, 417 bp, Serratia marcescens
atgaacgcaaccccattctggatcatgctggcccgtgaaggtgaaaccaccgacggcagacacatcagcgccgaaacgttgatcgcgctggcagagagctattcacctggcttttacagcgcaccaattcgcaagagccattttcatcgcttgcctgctgatagcctcggagaaatcatcgccgcaaaaacggaacttaacgacgatgccgtttgcttatatgtgctgattcagccaaacgaaaaatggtttagcgcccttactgaactggaagtcgccccggcgatatactcagccatggaatacatggagtgcatggccattatcaatgccccatatattaaagggatggcgttaactacagaaccaacaattaaaaaccttgggccgttgaataaatacatggtgaagtcatga

SEQ ID NO: 435896 - DNA, 507 bp, Serratia marcescens
atggacccaataagcgcccttgcgttggttaagcagtcagctgacgcaacaaaatcaattttcgatgcagtcaagactctgcgctcgacttttaaaggcgacaaaaacgcctctggcgagcttgaaaatataaccgacagactaatatccctcagggataaccttatttcagcacaagacatgattcagggcctccagtccaagctttcacttgagtctaacgaagtacgctctctcacagaaaaactccgcgaggttgagaaaactaaggctgatattgaaaagtacgaacttcacgaaattattcctggcaagtttgtacatgcgccaaaagagtctatggattatcaggcaccgcttcattacatttgcacaagctgcgcgagcaataatttcaagtccattcttcaaactgagacgcctactgggtataaactccttgtatgtcatcgctgcaactccagaattgaacttcaagcacctcgcggaggtgtttggccagtctaa

SEQ ID NO: 435897 - DNA, 279 bp, Serratia marcescens
atggaagataacgattatgtgatccgctacccgcttgacgcggttcacatggagaagttcgccgagctgatcggcaagtcgaaagcggcagttaccgagatggtgaagcagcataagctgccaatcattgagctgcgcgatccactgaaaccacacgctcgcgttggcgaaaagtggatttacatcccggagtttaaccgcgcagtacgcgaggcgtactacaacaggccagtagagcagcgcgacgcatggctgctgtggatggggctgacagcatga

SEQ ID NO: 435898 - DNA, 1008 bp, Serratia marcescens
atgtcgattaacaagctcgatgatggtcgttacaaagtggacattagacttggcgggcgcgaaggacgtcgcatccgtaagagttttgacagaaagaccgaagcaattgcctttgagcgctacgcactggcgaatgccgataaaaaagaatgggctggaaagcacgcagatcgcagacgtttaactgttctattgggtatttggtggctgtacttcggtcagaaccgcaaaaatggtgaaatcgaaaaacgtcacctgctgaaaacgatcactgctattggcgatatacaggtgtcccgcctgacaaagcgcgtgctgatagagcatcgaagccagcggctcacctcaggtatcagtgcagccacgataaaccgtgatttgtatcgcctttccggcatgtttacggcgttgattaagttgggggaattcgccggacaaaatccggttcatggactgccgcctctggctgaaaaagaccccggtatgacgttcttggatgccgacgagatggatacgctgttatcagtgctgggtggggatgaaaagctgattgccctgctgtgcctaagcactggcgggagatggggagaggttagcggactgaagccgacacagattatcaatggtcgcgtgacattcctggaaaccaaaaacggcaaacggcgtattgtgccgatctccacggagctggaaagagaggttaaaggccaagcaagcggaaaacttttcaaggtggattatgaaaagttctgcgccaaactgcgggcagtaaaacccgacctgccgcgcggccaggcaacgcatgtgttgcgccacacgttcgccagtcattttatgatgaacggtgggaacataatcgcgctgcaacagatactcggccacgccaacattcagcagacaatggtctatgcgcaccttgcgccagactatttgcagaatgccgtgatgttaaacccgctggggggaggtttgagcgtgaaaaagtgtccacgcagtgcccacaactaa

SEQ ID NO: 435899 - DNA, 699 bp, Serratia marcescens
atgaacaagattctgttagttgacgacgaccgcgagttgacctcgctgttaaaagaactgcttgaaatggaaggttttaatatcgtcgtcgcgcacgatggcgagcaggcgttgtcgctgctggacagctccgtcgatctgctgctgctcgacatcatgatgccgaagaaaaacggcatcgatacgctgaaagaactgcgccaacatcaccaaacgccggtcatcatgctgaccgcgcgcggcagcgaactggaccgcgtgttgggcctggagctgggcgccgatgattacctgccgaaacccttcaacgatcgcgaactggtcgcgcgcattcgcgccattctgcgccgttccaactggagcgaacagcagcagcaggtcgacagcggcgccccgacgctggatgtcgatggcctgcagctgaaccccggccgccaggaggccagcttcgacggccaggtgctggatctgaccggcaccgagttcaccctgctgtatctgctggcgcagcatctcggccaggtggtatcgcgcgaactgctgagccaggaagtgctgggcaaacgcctgaccccgttcgatcgcgccatcgacatgcatatctccaacctgcggcgtaagctgccggatcgcaaagacgggcatccgtggttcaaaaccctgcgcgggcgtggttatttgatggtatctgcaacatga

SEQ ID NO: 435900 - DNA, 1395 bp, Serratia marcescens
atgatcaacagtttgacggcacgcatcttcgccattttctggttcacgttagccctggtgctaatgctggtgctgatggtgcccaagctcgactcccgccagatgacctcattgctcgacagcgagcagcggcaggggttgatgctggaacagcacgtcgaggccgagttgcaaaacgatccggccaacgatctgatgtggtggcgccgcctgttccgcgccatcgacaaatgggcgccgccgggccagcgcctgctgctggtcaccagcgaaggccgggtgatcggcgcgcagcgcaacgaaatgcagatcgtccgcaacttcatcggccaatccgacaactcggatcatcccaagaagaaaaagtacggccgcgtcgagctggtcgggccgttcgcggtgcgcgacggcgaagacaactaccagctgtacctgatccgtcccgccaacagcccgcaatccgatttcatcaacctgatgttcgaccggccgctgctgctgctgatcgtcaccatgctgatcagcgccccgctgctgctgtggctggcctggagcctggcgaaaccggctcgcaagctgaagaacgccgccgatgacgtggcgcgcggcaacctgaagcagcatccggaactggaggccggcccgcaggagttcctggccaccggcgccagtttcaaccagatggtcagcgcgctggaacgcatgatgaacgcccagcaacggctgatctcggacatctcgcacgagctgcgcacgccgctgactcgcctgcagctggccaccgcgctgatgcgccgccgccacggcgaaggccacgagctggcgcgcatcgaaaccgaagcgcaacggctggattcgatgatcaacgatctgctggcgctgtcgcgcgggcagcagaagggcgagctggcgcgcgagcagttgaaggccaacgaactgtgggccgacgtgctggataacgcccgtttcgaagccgaacagatgggcaagcagttggagatcgctgcgccgcccggcccgtggacgctgttcggcaacgcgagcgcactggacagcgcgttggaaaacatcgtgcgcaacgccctgcggtattcacacacccgcattgccgtggcgttcagcgctgacaatcagggcgtgaccatccaggttgacgacgacggcccgggcgtcagcgccgaagaccgcgagcagatcttccgtccgttctaccgcaccgatgaggcgcgcgaccgtgagtccggcggcaccggccttggcctggctatcgtcgaggcggcggtcaatcagcatcgcggctgggtgaaggccgaagacagcccgcttggcggtctgcggctggtgctgtggctgccgctgcatcatcaacgcctatcgtctaagacagaacagtaa

SEQ ID NO: 435901 - DNA, 129 bp, Serratia marcescens
atgcttcatgcgggcggcatgccgcccgctatcccgtatcgcgcccgccaaagcgcgcctttcggcaacggcttgaaaggcggcgggtatagccgcatactggcggctgtttattttctcacccattga

SEQ ID NO: 435902 - DNA, 1059 bp, Serratia marcescens
atgatctatgtcaatgcgcgatttttaacacaggatttgacaggtgttcagcggtttgctcaagaaatatgtcttgcgctgagtaaaattaggcatgatgtcatttttgtatcgccacctaatattattcatcacgatatcgcgtcgcaattgaatgttcaggtagtgggtaagaaaagtggccacttttgggagcagttggagcttcctgcttttttaaggaaaaagaaaagtccgcttctcattaacctttgtaatacggcaccgatcttttatcgtaataaaattgttactcatcacgacattatatataaacgctatccgcaaagttactctgcaaaatttcgttttgtttataataatctagtccctctgatgctacgtcacagtaaggcgttgatcacggttagtgagttttctaaaaaagaaattagccaggcgtttgactacccattaaacaatatttacgtaatctataatgcggtctctgagcagtttaaacctgctgcgccagtatccgatacagagcgcccctatttattggctgtttcgtctccaaattatcacaaaaactttcatggtctgattgccgctttctctaaaatggcaaacagccaggatgtaacactgaaaatcattggagccgccaataagaacttcgcggatgtggggttttcgacaaaagaagctgcggcgaacgataacatacagtttttggggcgggtgagcgatcaacagcttgtcgaactctattctcatgctcgtgcctttgtgtttccttctttatatgaagggtttggcattcctccgttagaagcacaggcctgtggctgcgcggtagtatcgtccaatcgcgcttctttgcccgaggtgttgttgcagagtgcattgtactttgagccagagaatatcccggaaatgcaacaggcactggagcggattatacaggatgaagcgttgcgccaaactttaatcgctgagggttttgagaatgtcaaacgtttcgattggatgcgttcggctgcagcgttgagcgagataatgacgagagctatgtaa

SEQ ID NO: 435903 - DNA, 279 bp, Serratia marcescens
atgccaagccgctgggaatcgttcggccttgtcgccgttgaggcagagagctatgggttgcctgtggtcgccagccgctgcagttcattgccggaggtggtgaatgaaggtgttacgggctatctgtttacgaccaatgcagctgatgaggccgctgaaatactgagtactcgcgacaagcgcgattggggtgcaatgaaagcagactgtgtcgatttctacaatgctaatttcacttcagaaaaaatggtatccaatacctaccgtctttacagataa

SEQ ID NO: 435904 - DNA, 378 bp, Serratia marcescens
  misc_feature (366)..(375): n is a, c, g, or t
atgtctcaatcattgacttgtttcaaagcatacgacattcgcgggcaactaggtgaagaactgaacagcgatatcgcctatcgtgtcggccgtgcctatggagagtttttgcaacctcaaagcgttgtcgtcgggggagacattcgtttgaccagcgaggaactaaaactcgcgttggctgaggggctacgcgatgctggggttaatgttctggatattggcgtcagtgggactgaagaaatctattttgccactttccacttaggtctcgatggtggcatcgaagtgacggccagccataatcctatgaattacaatggaatgaagctggtgcgcagccaagccaagccgatcagcggtgatacnnnnnnnnnntga

SEQ ID NO: 435905 - DNA, 423 bp, Serratia marcescens
atgtatctggaggtgttctcgaacggcactaaaagctggcgcatgaaataccgcatcgcaggtaaagaaaaacgtgtggtgtttggcgtctacccgaccattaccttagccgatgccagaagcaaaagagatgaggctaaaaagctgctggttaatggcgttgatccgagtgcgtttaagcaagaaagcaaacaagcccacatcaaagaagtaaaaaacacttttcagcaaattgcgctcgaatggcacagcatgaaagtgaagaaatgctcagcgggttatgcctctgacattcctgaagtgttcaacaaagacgtcatcccgttcattggtcaacgtcctgttgcagacatcaagccgttggaactgctaaacgtgtttaaaaagatggaagacaggggagctaccattttttgtttgtaa

SEQ ID NO: 435906 - DNA, 381 bp, Serratia marcescens
atgatgaacagacgactattatgggccatggcggccggtgtcctggtggggttgcctgcgtgggctaatgcggagatgacgaaggcgctgcggtttccggcgaagggcgtggtgtgtgatgcgtatgtgtgcgcggatgctcagggactgtcgacggcgctgacggctcgctacctgggcaaaaagcaaggccggcagcttgatgcgttgggggaatttgaccgctcgtcgtttacgttcgcaaacggtgtttactgtgatacccaagagaaggtgtgccacaaagaccgctactacggggccaatggcaggccgtcgggggatgtggatgacgccacaacccgacaattatttggggataggtcagagagggggcaataa

SEQ ID NO: 435907 - DNA, 822 bp, Serratia marcescens
atgatgaaaaataacacgcgtcaacaccgctactcgatgtttttgcggggcggtggccttattgccttgctggccttggcgggaacggtacaagcggcggacaacagtgctgcggtgacggcatcggtaacagtgctcaacaccgaaagctgtaccattacggtgacgcctacttcgcatgccatggcgatgaactggtcacgcagttcagaaggtgtggtgacctatgacgtggtcagctcaacggagcccgtaaatgtgtcattgagtgcggcagggggcagtaattgttcgctgaacaacctgacactcaggacggagatggggagtggtattgttccggggccggactataacagtcagaattttaccttcaagaaaagctttggttcactcgggggattttggcgttttatgccctatctggcgcgcgcgcagttctatacggatgagcagcgaacccagccaggaacggggacaatcacgtggaacagcccctcaacaggttatcacatggtatttggcagtacggccaccattacgggtaaacaagagatgaacatgacgtccatgggggggaaagctgttttcatgaccgaccaatatgtcgtggatggaggggcattgctgattgacaagggggtgaatgaagggacatttacctcttccgaatccggtgaaacataccgttctgccgtgctggggtttggggcggtgatggccactgcgccagaaaatgtcaacggaatacgggcgcccgaactggcttcagggggagaccaggccacgatgacctggacggtgtatgtcgatcaggcctga

SEQ ID NO: 435908 - DNA, 828 bp, Serratia marcescens
atgaaaacacgcgcacgttttatcgtgttagcgacggggctactcttggggacggcactgtcatcggtcagccatgcggcgatggtggacagggggacatcggtcagcgtggggacggcgttttccatcgcgccggcctaccagggggcatcccgttatgtggccttgccactgtatgacctggaggggcatctgaaaacggtcaattggggcgcgtttacgctgggcattattcatggtgcacgctgggacctgccaatttcgtccccgctgggtattgcattgctaatggattatgaccgtgggcgtaaggagcgtatccgttcactgggagagcacgatgaccatctgcgtgggatggacgacctggggggctcactggaggcgggactggagttgagttatcaaatgaacccgctacgtgtttacgtcaaagggctggaggcgacccgggagcgtcattatggcggtgaaaatctggggcgcacggcgtatgtggatgttgggggggagcgggactacgcgataaatgacagggtgacgttgcagggggacatatttgcgacctgggccaacggtgggtatcagcgggggtactttggagtgacgccgttgcaggccttccggacctcgtttgcggcttatcacctgggggcgggactcaagcagtacacggcgagactggcactgaattaccaatggacaccgtcattgtcgttccagacggggggggaggcgtatcgcctggcaggggatgcggccgacagcccgttggttgagaaatcgctggcgggaatggtttttatgggagcccgctatcggttctga

SEQ ID NO: 435909 - DNA, 450 bp, Serratia marcescens
atgacaacggaaaacggaaaggtgcggtatggcgagacggtttcgggacgacagtcgaattatggcggttatcgtctgccagctggcttggctgtggggccgacagtgccgctttaccaggcggtggcgttttggggatggcagttggggcgacctttcagtcgtgatgaagtagcggaggtgtttcatattgaggtctgccgggcgggggatgtgatgtcgtatatccgccgcgcacgctctgaccgaataacgagtcgtcagcattacgttcgggtgccggatggcgtacgtatgcgttatttgcagatcatgacgaaaccgaaagtgaaaggcattccggtggcgctgaagcccattcatctgatgccctctgacgggatgagcgagacgtcgttgtctgcgttgcgacgatggtttatcagtggctcaggcacaatgccggtgtga

SEQ ID NO: 435910 - DNA, 306 bp, Serratia marcescens
atgacagtcacacaggaagataaggggatggcgatgctggcagtctctgacaagacagtggaagcgttggcggcggcgatgtttgtgcatggttcgtcgcgggagcgttaccggcagctatcaatgcaagctgcacaactggagcggaacgggcaatacgatagcgccatgcacgcctggactctggcggccagccaggcactttatgacgttgaacggcactggtgtgagtcacgggcgcattggtgtgaacattgcctgccgtgtcgggggagacgcgagcgggttgcagaggagaggagatga

SEQ ID NO: 435911 - DNA, 147 bp, Serratia marcescens
atgaaaggggaattaagtcgagccgaacggcgttggcggcgactggtgttggtggtgttgttacccctggcgatcatgggtggcctgctgctgtatgccatgagtgacgatggggtcgttcgattgctgcaagccgcgatgcggtga

SEQ ID NO: 435912 - DNA, 318 bp, Serratia marcescens
atgagtgagtcagaacatagggacacggggcttcaggatgagagtgctcaagcagcgtatgtcatcggcgtggacacgttggcggcgttgtaccaccggctggcggcggatggggctctgccgttgtcttgggcgatacagggcatgttggatgcttttgacggccgttgccagctggatgtgcagactcgggagcgtatcaggtcgcgggtggcgtcgccgtgtacgcttgtccgtcgcgatgatggtgacagcatcgaaattggtgtgatggaaaacgttaaggctgatggcgcatcagggaaaggaggcaagtga

SEQ ID NO: 435913 - DNA, 717 bp, Serratia marcescens
atgacgcaaggtacggtgttgcgactcgacacgggaacgcgactgttgattgtcgatccgtgtgcgtttggtcgcgtgggattgtcggcggtgttgtcggatgaggtgtcagcagggggggctctggccgtcatggcggtgacttcattatcggccgcgcgccagatcttgcgatccagttcgccagtctcaagcttgccatctcccgtcggcgggcagagcggttgtttggtggtgcgcttacctactgagcccagaacggcattggcgttgctgctggagctagggacacccgcggtacaaaagctgtttgcccgctgggtgacggtgttgttgacgtctatcccagcggctcaggttcgctggttattggcggcgatgggcggaaacagggcggtcagggtggttgatgatagccagtctgtggtgcgattgcgcagtgctgtactggcggcgagtcgtgctgcggcttgtgattctggcgatatccgggacgaggccatgagccctgccggcccgctgctgacggcgcgcgagtgccgtgtgttgctgtttaccttgcaaggcggggccattgcagaaatggcccgacgccatgccatcagccacaagacgctttatagccagcggcataccgctctgctgaagcttggcgtcagaggcgtacacggcttgctttctctggtggcctgtcatccctgtaaggcaagaccatga

SEQ ID NO: 435914 - DNA, 843 bp, Serratia marcescens
atgatgcggggcccgaaggcggcgatgtgtgtcgtgttgacggagtgcgccatgagtgcggttggcctggagacgctggtgcgtatgggcggggcggcggtgtactggcgccgctggtcggcggcagaggtgatgccgccgttatccctgaacgcaccgctccaggtggtggggacattgccggaggaggtgggggcactggcgatggcactgatgcagcttggcatgttgctgcgtcaggtgaaggccgcttcggtggcacgccccgtgcggatggtcttgctgtcggcactgccggagcgctgggtgatgcatacgcttgcgcgcctggtcggggatgcgggcactcactggtgcctgcaggttttgccggataccgcatcaacgccaagcgtgcaggcggcgatgaccgccatgccgacgcagccgcatgccagccctgggctgagcgggctgacgtatcgcgaccttgacatgctcatgcagacattctggtggcggtcatcacgggtggggtcgcccctgagcgtcgggcgcatgccgggtgaggggggcgcggcactgcgcacggcgctggctgccctgggggagtgctccctgcgaggcgggtggcactggcgggcccggcgcgcgtggttacccgggtatcctccgccggactcgcgctttctgcgagacagtaacgtggtgcgttatgcccgtcggcgtaaaggcataggggacaccagcggtaatcgcccgttggtcaccgatgtggatacagagagagaacgttcgaatgaaaacaacacaagcttggggcagacacgacgagtgcctgcgcacggtgtcggggaggtctga

SEQ ID NO: 435915 - DNA, 420 bp, Serratia marcescens
atgggcggcgcgttgaacacctgggtgacaggggccgggtggctgttgggcagtggcgtgctgacagtgtacctgctgtggccagccgatgtgccgccgcgtcgccatgccggcggtctgagtcggttgctgcgcgggtatctcggcatcggcggcacgctgcgcgtgggcatcatgctggcggccgccctgtggtgggtcacggcggccggactggttaatgccgatgcggtccgtatcggcgttgtgctggtcctgggtgccggcgcaggcgtggcactggtcaatgccgggcggcgggccgcgctctccgtgccctgggcgatggtcctgggtgccgcgctgggcggcgggatgatggggctgctccacctgtccgtcctcggatttcggcttgtcatgcatggtggtcttgcatga

SEQ ID NO: 435916 - DNA, 405 bp, Serratia marcescens
atgcacagtacggatggtctgcgctggtatctggcgctgggacacgggacggccgccggtgcttggtggggctgggttgccctgtgcgccctggtaggcagcagcgcgctggtctggtggtggcatcgggggcgggtgcgtcaacgcagcgaccggctgcgggatatgctccccccgcttggcttgatgttgttgggctgtttgatgctgtgtttccccttgtggtcagggctggatgtctggttgaacgatgtggacgacgctctgttgtgggtgttcatgtcggatggggccacgacgtcggggccaatgccgcaggtgtccatggtgtcgggcgggcgctgcggcagcccctgcgatgacgccgatatcaacgggcgatgtgtctcatgggcggcgcgttga

SEQ ID NO: 435917 - DNA, 510 bp, Serratia marcescens
atgagcaaacaatcaaaaccaaacccgtcgctgtcgccagtggaggcaacggtcgtgcaggtgctacagacaccggacatgatgtcgttgacatcatctcgtcttgccggggcggccgaggacacggtgccggcctgtcaacgcaaccatgacgcgttttaccgaccttcatgcctttcgcacctgccggccttgccactttacctgatggtggcgcactgggggtggtgcacgggcaatgtcttgacggcagccgcggtgggcgaggcttttcggctggagccgcgcagggcgtcggcggtcatgcgctatttcgcgcgctatgagaccggtgtgtcctttgtgcggccttggcgcggggcgatacgtatcacggcactgccgccggtggtcgccggtcgacatgccgacgccggtcgggcgcgggtggcgcgcaaggggcgcatacaagaccagcagtcgctgcgccgctggtttttacagcgtcccaatggcgcgtctgaagtgtga

SEQ ID NO: 435918 - DNA, 762 bp, Serratia marcescens
atggggatagcgatgatcccaatagggcagaaacaaatgaatgaaagaggcatacagtcggtgccaaacgtcagcgcaaaagcgtttgtggcagaaggggtaggcagcgcctggctggtgctgagcggcagcggtacggcggtgctggctgccggttttccggtgctgggggtgggttttttgggcattgccgtggcctggggcgtggggctgctcacggccggttatggcttggggcggcatgccctggccgggtttatgccgacgatggcggtcgggatgtggtgtgccggcgcgctgtcctttcgccaatgcgccgtcggtatcgtggcgcaggtgcttggcagcgttctgggtgccggcgtgctctggcttatcgtcagccaaatcccgtcgtttgatgtgcatcaggggtttgcgggaaacggttacgaggcgttgtcgcccggcgggttttccctggccagcgtggcgctgaccgagtgtgtgatggcgtttttcctggtggttgtggtgatgagcggtcgccccgctcaccgctacgggctggctgccggcggtgcggtcgtgatggcgctgctgacggtgacggtggacaacgccatggtgagcccggcccgcagcctggcggtggcgctgtttgccggtggcgactggctgtatcagcagtgggtatttcagctgtcaccctgtctgggggccgtactgggaggcggtgtcatccgcgggctgcgtcgcccgtcacgcgccaccgcgcagtga

SEQ ID NO: 435919 - DNA, 1311 bp, Serratia marcescens
atgcaccggttacggagtcagactgccgtgccttgtcggccgacccccccatggcgaccgcgttaccgcaccgtcgccctgatgttgatggtcgccctggcggccggggcccaggaggcgcctgccgcagcggcgggcctgcccctgcaacccgcgaccctggcggaggggacggcgccggcgggcaatgcgcccgcggccggcaacgccgcgccggccgatgagatggccaccatggtggccacgctgcaaaagcaaatcatcgcccagcaggcgttgctgcaggtgttgcaggcgcgtctggcggcaggcagcgtacctgcgactgacgccgcgccaccgtcggccatcgtgacacccgcttcaggggagccgaatgcgaaggccgttccggtaccgtcgtcatccgccgcgccccagaccaccgccaccgcaccggcgaccccgcccgcgggcaccggtcaggccccctcggtgaacggggggcagacacccccttccggcaccgggtctgcgccgggtgcggtacaggacggtgcgccatccgtgtcaccgaccgcgtcggcacctgaacacgcagcgccgtcggtgacggcaccggcggtctaccccgcgtcggcccatgcgcctgacgtcggggcgacagcggtccccgccagcccggccggctcggatatcaccttgtcgacgcaggcgcagcgacaggcctatgccagcggcgcctccgtgtggcgcgaaatccaaagttccatcgcctcgcagcacgccctcggcatcgagctcgatccgcgttatgtgatggccgggctgcaggacatggcgctgaaccagccgctgaaaatgtccgccgatgagatggacagcaccatgtcgtcgctcaataccgactacatccgccgtgccaatgaagcgcggcagcatcaggaggcggaaggcaaggcgttccgtattgccttcagcaagcagaaagggagctacagcgacgccggagcctggtatcgcattgatgaccgtgggcagggacgtcacctgaaaacgaccgacatggccgtactgcaggtcaccggcaccctgccggatggcacggtgttcgatgccagcggtcagcaggggcgaacccgaacggtgaaggtgggctccctgctgccgtcggtggccattgggctgcagaaggtcgcgccgggtggccgattgacggtcgtggtgccgccgcaaaaggggtatggcgatgcgggcttgccgccgtccattcccggcggcgccaccctgatttttgacattaccgtgaaaagcgtcagtcgcggggactga

SEQ ID NO: 435920 - DNA, 1725 bp, Serratia marcescens
atgcgtgattcgtgtcaccttaacgggaaaagtggcgccgtggccggcctgctgtgggttgccctgttgtatttcccctggggaaaagtattgcacaccggcattgccgtgcccgagcacctggggtgggggctgtttggcgtgggctttctgttcatggcgctgcgcttccctgcggcggtataccgctcctggctgctgattgccggtggcgtgctgttgacattgccgttgctgtggctgtcggccggggcggatgtttggcttgtcgccacgcgcgtggcggccttgtggggcggcggcctgctgctgtgttggctgggggggcaggatgtgacccggggcgggatgtctacgttggcccgtctggtgacgctgaccgggttggtcctggcgctgagcgtgctgtttcgccacgcgtcgcccgccctctttgccctgtggttgccgcaggctggcggcggctgggcgacaggcggttatttgcagccggacctgatagcgctgtggctcgcggtggccgtggtcgccacgttgcacctgtggctgttccgcccgggtgtctggctggcgctggcgctcggggtgttgatggtttccctgaccctttccctgcgcctgtccgccctggcctgtctggccgtggtctgtctgctgatgctgctggctgcggcgcgcgggctgcggcggcgcctgctgggtggggtattgctgatactgctggcaggggcgggtacctggctggtgatgacccgtgccctgcatcaggagatgatttttgcgtggccgaccggctgggcagccctgccgcagatgtggcgggcgtgtctggcgctgttgctgtcacacccgattgccgggatgggctacggccagtttgccggcagcctgccggacggcatgcagttggccggcctgggcgcgcagtggcatccgcgggttatggtcttccatcccggcagtgagccgttgtactggatcacggaaggtggcgtgctggcgttggtcggcatgctgctgctgctcgtctggggtgtgcgcctgatggccttgctgtggcgtcagtcccgccgggtgggcgggtacggtcatgccggcagcgaaggtcaggggttgctgttcgctgccctgccgttgctgctggtgacgctgacggcgggcacgccgtggtatcagtctcccctgcattacctgctgtttctcgtgctgaccggtgcggcagtagcctggctgtccgagcccaacgccacctggtcgccgccgcgtccgctggtcctgctgagtcgcggtctgctgccggtcgccgggatggccgtgctgtggtttgccctgaccggcacccgggtggcactggccctgcaggcggcccatcagagcaacgccaaagacgtcgctgccttggtggcggcgcagcggatgaacccgctctatatgccggatgacgtgcatttcgccctgaccgtacatcagttgcaacagttcagccagaccggcgacaaggccttgctggcgcaaaccgagccgtttttcaacgacttcctgacgcggcatccggaccccaacatttacagcatgtatatcaccgtgctggacaagcaggggaaatccgacgcggccgagcgggtctatgaagacggtcagcgccgtgtgccgtgggaccgccgctttgtgccggatgagccggccgatgcgccgtcatcctccacgtcgtcccaacacccataa

SEQ ID NO: 435921 - DNA, 210 bp, Serratia marcescens
atggcgggtgagttggtcgtacaggcgggacttatcaatggcggcgtaatagcccttgatatcggtacgaaagacataccgcgtgccgtgcgccttcaggtgccggtcgacgtgcagggtgctctggcggccaccgccgtgccccttgatatgctcgcaccacgggtgaacgggcagtcaggtttccagaacgccggtcagcatttttaa

SEQ ID NO: 435922 - DNA, 918 bp, Serratia marcescens
atgagaaagaatagcttaaaagggatgtcagtgaatcgactggcgatgttgatgagtggggcattgttgtcggcggtggttccggcacatgcggcacaggtggacatgcagggtcaaatcacggttgcgacgccgaagtgcgacattacgttggtgcctgagtccacgactgttattgccacgctagcgttttcgccggcggtagtcagtagcggtgcacctggaacgatgtcttctggtaacggtgcggcaagctaccaagtgcgcatgtctggcggcgcgggttgtgtgttcggaaatgtagcaatcaagatgccaaacatacaaaacgggccaggttatgggcagcttgttccccttattcatacttcattcgggtcgatacccgggtatccgtatttggcgagagtagatggttacaatacggtcgacaattctggtacgcctaccttggtaacgggaatgtatcactcgtcgataccctttaatttcgttacatcaagcactaccctggcaatcggcgtacaaaaccgagcggcactgcaagcgctaactgctggcgcatccactgcatacgggggatacaatgggaaaggttacacgtttaccgcgccatccgcttacaatgaaagcggaagcggtgcgtctgccgccaatcagataacttggccgtgggttactaacaaccgcatagcaggcgtcccgcacaacggcccaggtatgcagtctggtattggagaccctgcaaattttatcaacataccttctgcgtcgctcagcaattataaatcgctaactgttcgtattggtatgcttttgggtttacagacctatattgcggatgtcgttgataactcagcagcgatagatggcgataccttcacggatgcgggaactttggaagtcacagtgtcttga

SEQ ID NO: 435923 - DNA, 816 bp, Serratia marcescens
atgtctatcgtaatgaaaaacaaattatcggctaccgcgttggccatcgctaccatcatgggtatgggatacagcgccatggcatcggcagccacggctgattttagcgcaagcgtcaccattgcttcaccggtgtcatgtgagattgaaacaacgacgcctcaggggactcaatgggatgttacttggacgctggctcaattgacggacagctcaggtacgctgacctatggtcagacgccgaccgagccgttgcctattcaggtccggtttggtgaaggtgcggttcagtcttgcgacttgtctggcgtgaagctgaaagccgagtctgtggtgccggtatctgcgaacagtaacagtttctatgaccagccgaccagtaatggcggggtgtggcgttacgctccggtgctggccaaggtggcgctttacaccgatgatactgcgacaacgccggtagatgttggtgcgaacacgctgaccgttacggatgccatgaatggtacgcatacgcagacggcgtcggccaagtacacggctcaagctaacctgacgccaatcgctgagatggggtcgctggatgcggtctcgttgtcaaacaactatctggatacgaatgccaacgtgccactggcgggagacaatttaggcagcgtatcgcttgccactccgacgcaaattcgcgctgtggacctggatatcagtgccatcatggcgaaaaacccgattaatgaggcgggtgctgttgatgtgcagtcggtcaataacagcgacgtggtgtcactgccgttcactattgacatcgcctaccactaa

SEQ ID NO: 435924 - DNA, 918 bp, Serratia marcescens
atgagaaagaatagcttaaaagggatgtcagtgaatcgactggcgatgttgatgagtggggcattgttgtcggcggtggttccggcacatgcggcacaggtggacatgcagggtcaaatcacggttgcgacgccgaagtgcgacattacgttggatgcggtatctacagaggttacccaaaccctcacttttacccaagccaatctcgataacaaaaccgcaggggtattcagctcctcgaaccccgaagcgacatacaatgtcaggctgtccggtggcccatcctgcgttttcggtaatgtctcgattgcgatgccaaacatccagcatggcgtgggcggcggacaaaataaccgatacgtacccctattgagaactagtttcggctcgatccccgggtatgcttttttgacacgtgtctttggatttagctccaccgataacacgggcacaggcgtaccaatatccggcatggtgcagtcagccacgcccttcagcgtcaccggtaccgccccaaacgctgcaataatcaactcaaactccgcccctgccaatggcttaacagccaaaaactacccaactcaataccagggttacaacggcaaacaattctctacaagcgcaaacttttggttatatacgcagggaaacgccgccaccgagggcggaggcgtgtggccgtacgcggaccagaataggatagtgggcggcccatctaacgcaatggtccagtccggcgaagggcatacgtacatcaatatcccctcgagttcattgaacaactacaaatctctgctcatcgggattggggcgcttctggggaatcagacgtatatcgctggcgaggttgataataccgcggcggtagccggcgataccttctcgagttcgggaactttggaagttacggtgtcttaa

SEQ ID NO: 435925 - DNA, 816 bp, Serratia marcescens
atgtctatcgtaatgaaaaacaaattatcggctaccgcgttggccatcgctaccatcatgggtatgggatacagcgccatggcatcggcagccacggctgattttagcgcaagcgtcaccattgcttcaccggtgtcatgtgagattgaaacaacgacgcctcaggggactcaatgggatgttacttggacgctggctcaattgacggacagctcaggtacgctgacctatggtcagacgccgaccgagccgttgcctattcaggtccggtttggtgaaggtgcggttcagtcttgcgacttgtctggcgtgaagctgaaagccgagtctgtggtgccggtatctgcgaacagtaacagtttctatgaccagccgaccagtaatggcggggtgtggcgttacgctccggtgctggccaaggtggcgctttacaccgatgatactgcgacaacgccggtagatgttggtgcgaacacgctgaccgttacggatgccatgaatggtacgcatacgcagacggcgtcggccaagtacacggctcaagctaacctgacgccaatcgctgagatggggtcgctggatgcggtctcgttgtcaaacaactatctggatacgaatgccaacgtgccactggcgggagacaatttagccagcgtatcgcttgccactccgacgcaaattcgcgctgtggacctggatatcagtgccatcatggcgaaaaacccgattaatgaggcgggtgctgttgatgtgcagtcggtcaataacagcgacgtggtgtcactgccgttcactattgacatcgcctaccactaa

SEQ ID NO: 435926 - DNA, 732 bp, Serratia marcescens
atgggtgacagacgcagacgatattgggggaggagtagtcgggcactacaccaaggtggggctacaacagcgggtctgctggggcggatgttgacaggcatgctaccgggggtgatgctctgtgccgtgctgggtagtgtcctgagggataatgttgccgatgctgcgacagagacgttcctggcgtcgcaggatatcacactcagcggtaaggtgaccgcaccgtcctgtacggtgaagctggaaaacgagcagatgacgttcagtcgtcggcaagagggaaaggaggctgcctcgcagacacttttactgaatttgagtcagtgtgaggcggatggcgttggggtaacgttcaaggcggaacattggcccgacaatccggtacggggaaccctgagtgggaagcagtcgcaccaacgtgatggtggctggtactacacgttgagtccgggagtgggcggtggtgatggcggggaagctgcctggcccatgcgtctggcggatgattcgccggccctgcaaaaggataaacagacgggtgacgaaaatcataatgtttattttagtctggcggaagtgaattactggtatgacttaaaagcaccgatgaattacggtgatgtgcgggtgataccgtttcaggttcgggtgcatcggagtatgacaaaagacaaacagcttgcggatgacatgctggagtcgacgtttacgatgcagatatcctggcgataa

SEQ ID NO: 435927 - DNA, 1059 bp, Serratia marcescens
atgaaaagagcgcaaggcggttatgtgcgactgaccgggttgcttctgctggtgagcgcagcggtgcaggcagaggtcccggcggcgcaaaagagtacgccggtcccggttacattcggtatccgggcactgacgccggagacgccgattaaccctctggtggcctttgtgtctcaaggggtctcgttgccggacgtggtttgcaatgcctgcacggaccaggacagctggacgcgcgaatggacggtgtcacaagtgacgcttgaccgcgacaacagtcgggtggagcaggggtggtatgtgtttcacagtgggctgaaagggattgatatcagcgtacaggtcacgccgcagacgcgtaaaacgcagcaaggcagcgggatgcaattaaaggaaagtggtgagctgacggtcgggttggttcgaacgagcagggataccggcgcagggttggctgacttgccgccgacggagtttattcgcaccacgatattcactggggtggatgggcgggtgaagtacattcagcaggatgcgattcgggtgacggcggatctgcgagttccaacctgtaccacgacagccggtagtctgagttttcacctgccggacatcagtcaggtgaggctgcgccgcgctgtgacgccgggtgagttcacggacgagtccgcttcgtcgcctcaggtggtggtggcgaattgctctgagaatacccgacacctgcgcatccggtttattcctcagggcacggtgacggactcgcaacaggggctctccaccatcctgacgggaaaggatgagagcggccaagagacaggtgcgggttttttgatgaagtatgacgccagcgcctttggtcgtacgcagcagggcgtggtgcattgggactggaatcagccactggaactggagaatccgtcaccgtcggatatggggaatgaactgacgcaggggattacggtggcattgcaggcgttctatgctcgtccgctgaacaataagtccatcacggcagggcaaattaccgccaaggggttgtaccaggtgtcgtatgactga

SEQ ID NO: 435928 - DNA, 2865 bp, Serratia marcescens
atgaagatgtgtcggtcggtagtgcgaggcgggcaggccgtgctgatgaaagtgcctatgggggtgttcggtgtgttgctggctgcggttggtgcgccggaggaaggatgggcagttgaaaaggcggggatgccgggtgtgcaagctgcatcggcgcttcaaggggcgcaaggttcttccgctgaccagtcgttgtcgtttgacagtgattttctgagtatgggtaacggtggtcaggagaagcatgttgacttgtcgtactttgcccacaaaggggggatgcagccggggcgctatgccgttcaggtcaaggtgaatggcaaaacggtggatgaggggcggtcagtgcgttttcgctccttccctgatcagcccggcaaattgtatgcctgtgtgagtgtggagcagatggcgcagtggtggggaattattgcttcacgcgatgtgactgccggggcggcaaaaaaaaacgatgctttgcacgatggcagtaacggcgacaaaaacgaaaatgccattgatgcgacggcggtggcaagtaagggagggggcgctgtgttggcctctgcgcaagaggggggggctcccctcgtggcgacagcaatggctggcagtggtgaggcaggtcaggaggttggcgatggtgatgtctgcccggttggcggcgtggcggctatggtgccgtatgccaaagaggagtttgattttaacaagcgcctgctctccctgactgtgccgcaggcttcgctggggcccgcttctcggttgcggacgccaccacagatgtggaatgaagggatgccagccatcctgatgaattacaactacagtggcagtcagcagaacagtcgcggacaaaaaagtggcagtgattttttagggttgaacggtcagatgaacgtactgggatggcgggtgcgtaatgacctgacctggcataaaagccaggggcagagtgcagagtggaatacgtcgcaggtctatgctcagcgtgattttgtggcgatgggcggcggtcaggtgacagtcgggaataccacttcctcgggcggtggtgtggactcggtgcagtttactggggttaagctggagtctgacgatgccatgttggacccgaagtttaccacctatagtccggcaattaccggggtggcgaattccccggcaacggtgacggtgcgccagtatggtaaggtgatttaccagcagaatgtgccgcaggggccgttctcactgacggattttaaccgtagcggtaatggttcggtggatgtggaaattcgtgaagcagatggcagtacgcgtcacttcacgatggctcaggcgcagaatggcagcctgcttcgccgaggtggggtgacctggggggcttcggccggcaaggcatcaaacagcaatggttatgccgatgacaagtttgtgcaggccgggatgtcgtacggtgcctgggcaaataccacgttaaacggtggtgtactgctctcaaggaactatcaggcgattgcggtaggcaccagtgtgtatgccggtgcctggggggcggtgagttataccctgaatactgctcgtgcggacttgtcggtggtgccgggtgaacaaggggtatccactggggtggcgcacgcagtgagttggtcacgcagttttggcaatacgtcagtgggggcatcatggacgcacgcacaaacacgagactactacgcttatgccgatctgttgtccatggagccgctaaaagctggcgaaacgcgggcgcagagtgatggcacgcgagacagctatagcgtttcattgtcgcaatcgatgggggtgtgggggagtgtgtcattgagcggtggccgttctacctcttggggtagtgatgctgtgcaaaacaacgtgtcactcagctataacaccacggtcaaggatatcggtatcggggtgtcgctggggctcagtacctccaacggcagtgacagccggtactttgatgatggtggtggcggttcaggtgcatatcacagcaatgacaatgggaacagaacaaacagaaccatcggggtgaatatctcgctgccgctggggaaatggctgaatgccaacagcgtgagcgggacgtattcgtacactcgcagcaacggtacggtgagccagcaggcagggttcagcggttcggcactcaatggggcgttgtcgtactcggcctcgcaggggattagcggttcgaggactggtaataccagtgtggggtatagcggacgttatggctccatgaacggagggtataactacggtggaggaagtaacagttactcgtatggcgtgaacggcgggttggctatccattcgcacggggtgacgttgggtaagccactggcgctcagtggtggtaatgcgctggttgaggtgccgggggtcggagggttgaatgtggggaatgcggtgacggactggcgggggtatgcgctggtgagtggtttgacgccgtatgacctgaatcccatcagtgtcgacatgacgaacctgccgggtaacgtggagctggatatgtcgagtaaaagtgtggtgccgacgcgcggtgccctggtggaggtgccgttcaggagtaacaaggggtatcgcatattgctgacgttaagtcgggacaaagacagcgtgccgttcggttcgacggtgtcgctggtacaggctgacgacagtgcgatgccggttaccggcatcgtgggtgaggatggacaggcgtacctgtccgggatgccggcgaaaggccaggtgcttgccacctggggtgacggcaaggacaaccggtgtgcggcggacttcagcctgccaggtaaggccgatgaggaccgtctggcgacgttaacggccgtgtgccgctga

SEQ ID NO: 435929 - DNA, 600 bp, Serratia marcescens
atgacggtgacaaactcctctgctgcggatgtttggttgatgcgattttgggtctccccatacggtgatgtctctgggggtaaggataaaaagcagacgatgccatttgcagtgacgccgccgctgtaccggctcgatccgaaaagtgccgtgcaactgcgtatcaacaaactggtcgatacgctgccggccgacagagagtccgtgttctatctgaataacctcgccattccgccgaagaagggcgagaagagttaccaaaaagcggtgcagagtggccttcagtttgcggtgaatacacgcatcaagctgttttatcgccccgccgcgattaatgacaccaatgcggtgaaggcggcgccggggaaactgacggttacaccagtaggtaaaaacatcgtggtgaagaacccgacgccctggttcgtgacgatgtcgcaagtgtccgtcaatggcaaggcggtaccgtcggacagggataccatggtggccccgtttggtgagctcactctgccagtgacggtcgcacatggcactttcagttacagcaccgtggacgatcggggtatgaccacgccgaagataaataaggcgttctga

SEQ ID NO: 435930 - DNA, 594 bp, Serratia marcescens
atgagccaacggaaatatttaacacagtcggaagtggaggccctgctggcatgtgcgcagcaaggcagtaaccccgaacgcgattactgcctcatttacatgagcttcatccatggctttcgggtgagcgaggcatgtagcgtgcggttgtctgatgtggatttgcgggagaaaagcctgtttattcgccggatgaaaaatgggttttcgacctgtcatcctttgctggtcaatgaggtcaaggcgattcgggcttggctgaaggtgcgtaaaacgatgccaggggcagacagtgattggttatttctgtcgcgccagggcggacgactgacgcgacaacggatttatcaggttataaaccgactggggcagcaggccaatattgctgtagtttcgcatccgcacatgctgcgtcatgcctgcggattcgcactggcggatcgaggcatcgacacccgactgatacaggactacctggggcatcgcaatatccgccacacggtacggtatacggccagtaacgcagagcgatttgaaggtgtgtggaggtcaaaaagcaagcatcgagagagacaattaggaccaaactgttaa

SEQ ID NO: 435931 - DNA, 633 bp, Serratia marcescens
atgaaacgtaaatacctttctggggaagaggtctctcgtctgttgcaggcagtatcatcgggagcattgacaagtcgcgattattgcatgatcagcatggccttttggcatggtcttcgcgtcagcgaactgttgtcgttacaacttgaggattatgacccgcttgctcgatgtatccacattcgacggttaaaaggagggcttagtacaatacaccctcttcctcctgacggtgagaaagctttgctgcactggttacaggacagaaaacaatggccaggccacgagtctccatggctgtttttgtcacgacacggaggaaagctctcacgccagcgtttttaccaactgctgcgcacctatggccaactcgcccaactacctctctccattcatccccatatgctgcgacacgcctgcggttatgccctggcagaacgtggcaacgatacacgattgatacaggactacctggggcatcgcaacattcgccatacagtcctctacaccgcctcaaactctgcccgattcatacgcgcctgggcggacacacagggacacacatggcaaccgcccccacaagataacaacggacaggaagataacaatcacggagacttcctggcgtcatga

SEQ ID NO: 435932 - DNA, 336 bp, Serratia marcescens
atgaacacctcatcctgtttaccgattgaagtccgcaccgccgttttccgccgcgccgtggcgcaagcctatctggacacctgcgccttttaccgggtgagtctgggttacacgctggacgagctgcagatgacgattgccctgcgtctggaggggcactttgtgcgtcagtacggcgcagaggacggcatggacatggcgtgcacgatgttgagtgacatggtgcagccggacgtactggtggctgcgccgcgcctgaccgcgctggggcaaaagatgatggacgagctgtgctgtgagcgcctgtcggcggcacagaacgccaccgtacactga

SEQ ID NO: 435933 - DNA, 2037 bp, Serratia marcescens
atgcaacttaagaaaatttacatctccggttttaaaagcatttcgaatcaaaaccctcaaattattgaccttgaccatgaattaaccacatttattggccataacgggaccggaaaaagtacggctatggaggcactaaataaactgttctcggtggatcattcactgcgtggcataacaataaatgacttccataatgcggatggtggggaagatgagaagagcaaaagtttaataatagaagcctggtttagtttccctaaaccaaatgaaggtaaaatttctatccctcctttaattgaacacctcaccattgataaatctgatggggccattctttttagggtgcgactagagagtaaactttcctttgaagcaaacccgatgggggatattgacgaagacgtctgggtggttaacaccagtgacgacgtggttgaggagagcagtaaacagaagctttctgctgcagtaaggaacgccatccaagtgagttatgtcccagccaatcgagatcccttattgcaactgaagtattcatcgaaggcggtgcttggtcgcttgctaaaggcgattgagtgggttggaggtagtcaggaagtcatagaggagcaagcggcgcaactaaacgcattagcgaagagcaatcctgcaatgaatgagattgcggtggcgattaacgccagttgggggagtatctacaaggggcgttatttgtcccaagcatcgcttagctttccactcgctaatatcgatgaaatactgaagctgattcagcttcagtttaatcctgatgaaagtggtaacacggtaaatgtagaccgattaagcgatggacaaaaatcattggtctatttttctcttatcaaggcgatgtttgatattgataagaagactagggagttgattacctcaggagaagcttctaattttaatcctgaaaagatgagattgccgatttttagtatggtatccttggaagaacccgaaaaccatctgtcgcctcattacttaggcagaataattaaattggtgaaagattatggttgtaatgaattgtgtcaggttattatttcttcccactcttcttctattttaagccgaatagagcctgagcaaatacgccattttagactggataaggattcaaaaagcacggtagtgagtgcgttaatgctgccggaaaaagaagatgagctttctaagttcattaaagaagctgtaaaagcgtatccagagatctacttttccaaactggttatatttggtgagggggatagcgaggaagttataataccgaaggtgcttgagttacactcaacggaaattgatagtcattctatatctgttgttcctcttggcggacgtcatgtgaatcatttttggcgtctgttgaggtctttgcaggtcccatttattactttgctggattttgatattgatagaaatggtggtggttttggacgacttaaatatgctattgaacaattagctgagtttggtgcaagtggtagcccctatatccataaagatatagctgggtttataccgtcatgggatgatacacaggatccaatagacttcaccattgagtacgaatgcggagcgagaataaatgttgttgatgaattagaaaagtgcaatgtttatttttcttctccgctagatattgactatgcaatgattgaggctttccctgatattctttgcgagaaagatgaagtttatggtgaaagaggtccgcaaagtaacaagaaaaaagaatctgaagaagaagaaaaagaggagctaataaaggcagtgttgaaaaaaggaaactccggaattcgttacggattttcagctgattatctaaaatattttctgtggtatcgctatcgttttttatccaataaaagtaaacctgcatcacatatcagaatgttttctaaaattgaagaaaagtatacgtcagaagaaattagaggaaagttgcctccagagctaattagggttgttgaaaagacagtaacattattggcggaggttattgaatga

SEQ ID NO: 435934 - DNA, 1665 bp, Serratia marcescens
atgatgacacaatggcaaccctctgaaggcattacaccgacacaggagttaatggatattattctgtgtgatcaatccatttctgtacttgccggtgcgggagctggtaaaacagaacttttagcgcaaaaatccaattacttgctgcagaccggaaagtgcgtgtggcctaagcgcatattatgtctttcttataaaaaagaggcgcaggagaatatcaaagagcgagttaataaaagatgtggcctaagaggcgagcgtttcgattcgtatactttcgatgctttttgtaagagtattgttgaccgttttaaggatgttttacctgagaataaaagacctttaaatagttatgacttagtgttcaacgccaaagccagtaatggtaaggataagttatcttttgatttaatcagaaatttggctatagagattttaaaaaatagagcagatattgttgatctattttctcttacctattcacatgtttttattgacgagtttcaagatacacgttctgatcagtatgagttgattaaaattctttttaaagatagaggaacaaaattgctagctgtgggcgatatcaaccagagcatcatgttatgggctggcgccagaaaaacagtattcgtagactatgaaagagaatttaaaacaaccaggaaactactggtgcaaaattttagagccagtgatgaaattcaggaggtattgagatgctttattcactttgtacaaaaggatgccaagttttcgccaataacaaagaatgtctataattgcacgatccattgttatgatgatgagatttctgaggctgatgatattgctgataaaatagaaagatttatagcttccggtattaaagaaaaagagatttgtgtgctggctaaacaacagtcagaaaaatatacggaaaagctccgagataagttaacgatgaaaggtattagaaatcttgatatgtcggaattgcaagatgtcttaaaagaaccattagggcgaatatttgctgctctattcaaggtttatacatcacgttcatcatcaagctatactgaactctgcgatatataccttaccttacatagagttacccgtggcgatgggaaagaagatacgttgattaaagggttgtcggacaaaatagcggcaaatagagaaatattgggtgattcgcccacccctgatttattgatatcctatattaatgatattataagtttttttggtttgaagaaaatggtgggtcgatggaatcaatataagtccgctgattactggaggcaggtctggcttagtcttgaacggcacttacgctacacaataggcgcaacgcactctcttaacgaagctgccctgatgtttcaggcggaaaattccgtacaggttatgaatgtgcataaatgcaaagggttagaatataaggtggttattttccttggtttagaggatcaggccttctggaactataacaaagaaaaattcgaaaatgattgcattttctatgtcgcgttatccagagcgaaggagaaaatattagtcacgacagctaagcatagagagcacagaataaataatggatatgacaatagaaaatctaactatcagatggttatgccggtatattcatttttaatagatcattgcaagttcaaatga

SEQ ID NO: 435935 - DNA, 204 bp, Serratia marcescens
atgatggaaaaaggaagcattgctcagctgattgttgataaattaactgatgctcaaggtgagtttcagagtattaaatatctctcaagcatttattttggtccaaaaatcagcaagcacttaagggttttgatgaaaacccagggccatgatggacaagacccaaagataaacaagataatttcttatcatctatggccttag

SEQ ID NO: 435936 - DNA, 906 bp, Serratia marcescens
ttgaagttattccctaacgacattttaaaaagaattcctctctatgatccttataacaatttttactggtcagaaaaaacagcgtttttcagtgtcataaacatacttcatccatactctatgatcaaacttttaagtgaaaacaaacataatcttagtgagtatgtcgagtgggactatggggaaatagtcgctaacggatgggttcacattaaccaaataaaaactgaaattaaccgtgaaaattcttttctcatagcaactgaaggttcctcggactcacatatattacaaaaggcatttaagctaattaagcctagcgtttgtgaattttttcgtttcatcgatgtaacatctggccatccattccccggcactgggggattatcaaagtttgctgagggattagtaaaaattgatgtacagaaccaaatcatttttgtactcgataatgatagtgaaggggttgaagctttcaagaaaatcataaagatgaagcttcctcataatatgagttgcatatgtcttccggatcttaaggagtttgaaagtttccctacttgtggcccagacggcctaaccttatccaatattaatggaactgctgccgctatagagtgttacttggatttaacatatagtgaatatgactcatacactgttagatggactaactataaaaaagagaccgggatgtatcaaggcgcacttgagtttaaagagtattacgcaaaaagatatcttgatacatcagaagctaagcttatcgaaagtaaatatgacacctccaaacttgaggctttgcttaatgcgatcattgatgcttgttccaaattatctggagcaatacgtattgaaaaaataaagagtcactatccaaatatatggactgaagaaaaagtttaa

SEQ ID NO: 435937 - DNA, 237 bp, Serratia marcescens
atgcagaataacttattagtaaactggacgcgacagcagtactgtagctcgtgcacaaaacaaatctccggatcgagtgtctttaacgacctgtctcaattaatcaaaaacggcgttctgctatttcttaacacaatccgtcgccaagagctgaggcagattgagattggccttgtagccaaaacgactatctacgagatgggtgcggaagtgagtttccgcctcgctttaatctga

SEQ ID NO: 435938 - DNA, 939 bp, Serratia marcescens
atggcgacaataacggtttctccggttcattttgaggactacagtggtatccagttcgagcgccttgtttttgcataccacctgcgcgcgggttggcatgatctgatttggcacggtcaatcaggaggtgatcaagggcgagatatctcgggtattgaaccatttgatgaccagccagcacgtaagaccatcatccaatgcgcgaaccgagacacgttgacactggcaaaagccaagagcgacatgagtaagtcgattaaagcaactggcagtgtcccagacgtctttaagttcgtctctcgtggtgcggtctcggatgctggcagaacgcgcatcgagcaagcagcagcttccctgggcgtcaggcatgtaacgatatggtcgggcgtagagttcgaagaaaacttgcgtcttcatgctgaatatctgctgcaccgttttgtccagggcgtcgagtttcctgatgttgaagctgatattcaaaaattcacggatgattttcccgacctttccgacgccgatgttctgcaactgatggccgccgtatttgaccggccagcatttcgcacaccgtttcaacaagaaagttctctccctgcttttcagaaggcaatcgaagataccattggcgcactaaatacaggtttgtggagaacgcgtgagggcgtcgagatcaggcgcattccttcgatccaccatctcaaaaatcaacgcatccagacagtgatgggaaaagtggttcgtcaggtcgaccaactgcggcgcatcttcgtaactcggcttaaggaaggggaaatcagaccttgtggatgtggtcagcccgattgccccacgtttatgctcacgcaacgcgtggctgacgagctagacgacgcgagacagagaatcctcacgacgtttcaatcagtgtatacttccttcagtgtgagccttagttag

SEQ ID NO: 435939 - DNA, 804 bp, Serratia marcescens
atgatacgtattccatcattcaactctcagcaccttgaggccgcctgtcgcgtccttgctgataccgaacgtggcttgagtgggtcgcagatcgagcgactgctacaagaaattaaagttgcagacacatcgccaggaatgacaaagtggaaacgtctgtttaatgcgctcgcaggtgcgcagaaccagtatcaggtcggcaaccatcttattatgttcattaaccgtgcgatgaacccggttaattacgcccgtgatccatcggtgtttgcctggcgacgtgatgaactcaatgttgtcctggctttttccggtttttatatccgtgaggatggtaaggtcgcgagcgccgctaaagtaacgactctggattctgctcgagcccgcgccgggcgacttaaggctgcactcgaaagccgtgctgtgcatgcggaagttttgaactattgccgtgccgaacttctggacgaaaactattttcatgccgtcttcgaggcgacgaagggggttgcggaacgtattcgtcagttgtccgggttgagcggtgatggtgctgacttggtgaacaaggcatttaccggacaacaacctgttctgactttgggagcgctcaccaccgactcagaaaagagcgaacagaaaggttttgcgaatctactgattggtctattcggcgctgtacgcaatccactagcccatgcgcctaagaagaattggcccatgtctgaactggatgcgctggacatccttacgttggtttcgcttattcatcgcaagctggatggcacgcagaaacaactatag

SEQ ID NO: 435940 - DNA, 753 bp, Serratia marcescens
atgaatgcaactaaaggacttgtcgattttcactgtcaccttgatctctaccctgatcattattcagcagtcagagatgcagagaaagctggaatatttacattggcagttacgacaacaccgcgcgcatggcctcgcaatcacgagattgcaaagcgtacaaagtatgtccgagcagcattagggttacatccccaattggtagccaaccatgaaaatgaactagaactatgggatcagtacctatcggagacacgctatgttggtgaagttggactggatgctggtcctcgctttttcaagtcactcgatgcgcaaaagcgagtatttcaacatatattgcaacgttgcgctcaggctggcgataagatcattacagtccatagcgtcagagcggtcaaaattgtactagacttcattgaagcatatttacccttagggcgtgggaaaattgttctccactggttcactggaacaaagaacgaggcgaagcgagcattagagttaggatgctatttttctattaatatggaaatgattagcaatgccagacatattcctatgatacagtctattccaattgagcgagtgctaacagaaaccgatggtccattcacacgtattgataataggccttcacaaccagctgatatagaaaatactgtagaagaactagcccatttatatgggctatccacgagtgatatggtctacgtcattcggaataatttgcggaccctaatcagtttttga

SEQ ID NO: 435941 - DNA, 1935 bp, Serratia marcescens
atgattctaactgacaacgaaacaaaaatcgatctgctaaacaatgaggccattgcctccaccattattggattgcttcgagagcagcccaatcacccagtaacaattggtgttcatggtgattggggtgcaggtaagtcgagcgtactcgaaatgattgagtcgggcttctccgacaaagatgatgttttatgcttaaagttcaatggttggcgtttccaaggatttgaagatgcaaagatagccttaattgaaggcatcgtctcaggtctggtagagaaacgtcctgcattgaaaaaagttgaaggagctattaaagacgtattccgtagtatcgactggctaaaggttgccaagcgagccggcggtctggcattaaccgcatttaccggtgttccgacacctgagcaaattggctccatcatcaactccctacaaggtttggctgaagatcccgtcaaacttatgacgaaagaaaatatctctaatactatcaatgaaataaaggcggtgacgaaagagggagaaacaaaaaatgtaccgatggaagtggaaacatttcgcaaagcatttgatcaactactgaaagatgctggtatcaatcaacttgtggtattggttgatgatcttgatcgttgtctacctgatacggccattgaaactcttgaagcgattcgtctatttgtatttacctcgcggacagcatttgttgttgctgctgacgaggctatgattgagtactcagtgcgtaagcacttccctgacctgcctgacagcactgggccacgagactatgcccgtaattatcttgaaaaactcattcaggtcccgttccggatccctgctttaggcgaaacagagacgagaatttatgtcacattacttcttgctggtgctgaaataggtgagaatgacccagactatgaaaagttaatcatcgttgcgcgggaaaagttgaaacgcccgtggacaagtggtggattggacgctgccacggtaaaaataactctcggctcgcaagccgataaagcaaataatgcactaattctgagtgatcagatcggaccaattttggctagcggaacaaaaggtaatcctcgccaaatcaagcgttttcttaataccctcttgctacgtgaccgcaccgcaacagcgcgaggttttggcgatgatatcaaactgccagtactagcaaaactcatgcttgctgagcgatttattccaagattgttcgaacagatcgcgtttgttgcggcgatacattcagatggacactgcaaagatcttgaagcattagagacgtttcttacaatttccaataaaaacgatgataaaccaaaagaaaaaaaagccgcagaagtattattgccacctgatagtacggttttgactgaatggaaatcttcagaaacgataagtgactgggctcggctcccaccgaagttatcaggtctcgacttacgtccctacttgtttgtaacaaaagataaaaaagattattttggtccggtatcagttttgggccacttagccgaggtggtcgagaaaatgttcggcggcaaaatggcggttcaaagttacgaatcagagttgaagcaacttgtgcaacctgaagccgaaaaggtcttcgaagcagttcgtagcaaaataatgagcacagctacttttgatatcaaaccggcaggaattgatggtttgaccgttcttgtaaaggcacaaccaaaattacagagccagctaatggattttctagaggcattgccaaatgataagtgtggtccttgggctgtaagtggttggcagagtgctataaaggataccgaatgtttagcgcgtttgactgtactattggggaattggagcaaactaactactaataccagcctcaaagtcgcagccgaagcagcgcttaaaaatcacaaaggaatacattaa

SEQ ID NO: 435942 - DNA, 1812 bp, Serratia marcescens
gtggcacaagaatttattcatgaagaggcagttctccgtgtcggtgaagtatgtgaggtgtcaggaagaacaataagcatattggtcgataaaaataaaaaccttagcgatctttttttccgtggaaaagtacttaagaacgtatccgttggcggatttatcgaaatcaagaaaggattcatgagcctaatcggtaaaatagaggcagaaaagatacttgaggagaaaaatccattaggaagcggtgctgagtccatacgttttcgccgctacctgactgtctctttgtcgggttacgttgatcggaacggtcattttactgtcggtacaagggaacttcccttaattggaaacgaagcatttatagtgaccgaagagataattcagctcattcatcagatagtgagagcacaaacttgcgctatcacattcgcccgtactgatcttgaagatatcgatattaccctacctgttagcggtttattaaattctcacattgctattttcggtaataccggtagtggaaagtcaaacactctggcatctctgtacaaacacggttatgccgcgttgtctgaaatgctaaaagatagctttcaaagcaagtgtaagtttatattgtttgatttcaatggtgaatatggtgccgatgaatgcataacttcggagaaaattgtctataaccttagcacttataatgatcaaggggataaaatccctatgccggaaggtgtattacttgaacatgagatcctttctgtccttactgatgcaacagacaaaacccagaaaccatttttaaggcgagtacttgaactcaaatcggcagttcatcgctctgatgcccctattgatttttttagaaatatactcaagaaaaagatcagggaaactttgtgtggtagcgataagacacgttgtgatgcccttcttgatctttttcgaccaatttttaacgatcatgagcatatgacatccgatctagagtttcatttcggtagaaaagtttggtttaacaacacaggtcgcttttttgactctcctgaagatacggagcattcaaacctgttcagactcgcagaatcctatgaatttccaaatgatgttatagaatccttgcttggattcatgtatttgcagctaatcctcgaattcttatccggtcgctcaaatcctgaacacatagcaccagtagtaaatagaatgagtgcaaacagaaaagatattagaaaagtctttgataccaatgggaatagagatttttggggcaacagtaattttgtagtcatcaacctgaatatggtcaatctgaccatgaaaaaaacacttccattattactcgctaaatgggcctatgctgataaaaaagcaggtgacccctactcaactctcagtctcatcattgatgaagcacataatatcctgtctaatacatcttttcgtgaaaccgagagctggaaagattatcgacttgaaacttttgaagaaatcatcaaggaagggagaaaattcggtgtatttgtaaccctatcgagtcaaagaccgaatgatatttcctccaccattatttctcaggcgcataattatttcatccataggttgataaaccagaatgatttatacgctattgagaagtcagtttcttatattgaccgtctcaccgaggaatcaattcccaccctttctactggcacctgcatattcagcggtgtggtatgtccaatgccgctgaaacttcgcatcaatgaattggagatacatcatagcccccacagcagtaccattacttttgaagaaatttcactactatga

SEQ ID NO: 435943 - DNA, 948 bp, Serratia marcescens
  misc_feature (851)..(860): n is a, c, g, or t
gtggcaatgcaacgagcatactacggtcaggatcgggatcgagagtattttgagcgtgtttttcagtcagcaaacatcaactttcttatcggctccggagcgtcactaccagctatccgcatactaggagatatcgaagcgcaactagaagagcacgtgcgttcaggagatgacttagcctattttcagcaagcaggcgattttctaacctcagtttgggaagctaatgacgttctactcgatagaactcagcaaggtataccgcatagtcaacccacgttagataacgtaactgtcactcgcacctattactccagtttcctacactctcttgaaaagattcttacccaaagaagaactggcctattacctaggagaataaatctctttaccacaaattatgatctgtttatcgaagatgctgccgtcaaaagctataacgttatcttaaatgatggttttagtcggcgaggaaatttgtatggtgcacatttatttgatccagccagcttctaccatacgactcatgctactggaaacctttataactatagcgttgagctaccgacaataaacctgattaagcttcatggttctttatcatggcttaaatataaaaatgatttttactaccaagtacccccattgagacctgtagcttttgctacccatgaagaactaagaaattgggtgctctcacatgcactcattcttcccagaaaggataaatttcgcgaaactcttcttgagaatatctattacgatcttcttagaagttattctaatgaattagataaggaaggagcattgcttgtagtttttggtttctcatttgcagatgaacacatagnnnnnnnnnnctctaatgtggaaatagtttacactccaggtaaagaattagatttcactaagataaacgaaattataaattgttttctgaggagataa

SEQ ID NO: 435944 - DNA, 747 bp, Serratia marcescens
atgctgatttcatcctttaacgagcgccagacacgtaacaacgaaaaaataaaacaactgctgaacttcctgaaagaagaaacctacagtgattttaaaacgctgatgctgttatttggtttccgggatcataagtcgctttattcgctactggcaaaaacggagcgaatggggttaatccagaagcatgtgcttgaatcacgaacaatgaagatttcattgtgggggatcaccagcgacgggctggcggtggtgttaaccttggatgataaaatctttcctgcgcggtttgaaccatcaaaaatcaccggctggacgcttgagcaccatcttgataatcaggccgccaggcttattctggagaagaaaggcgcttcgggatggattaacggcgaccgggccacctttctcagccagtatcaggtaaaacatcgcccggacgggttgatcatcttgcctggcggcaccgtgatcgccattgaaaccgagcgtcgcctgaaaacccgagcccgctaccagtcgattattgccagccacctgctggcccgtacccgcaaacagtggatttatgttttttatgtcatgcctgacccacagaaaaaacgggcacttgagctgctgtttgacagcatcagacatgtcatcattaaccatcagcacgtcccgctggaagaacgccaccgtcgggtgtttcgcatttataccgttgatgaactgaaacaactgtcattaggtagctatacgtaa

SEQ ID NO: 435945 - DNA, 1860 bp, Serratia marcescens
atgattttaaataagcttgccgcttcactgtccccgatagtgaacgggatgctggcggtgctggcttttgtgcaacagaaacaactggtgctggcattattagcggggctgacgatgccgttttttgcatcaatgaaaagcgatgaacgccaaaaagccccgttatggaaaaggttgattatcgctttttccctgctgtgttttctctctggcacactggccccgatagttatcggatccttccagtggctgtataagaccagactcaccagtgataatacggtactggcctggtcagtacggattgctttcactgtaaccggaattatttttcatattatgcttcgccgggtaatcacgcctgaactggacaaaataaagaaacatcttgttaaaaaaaccacccttgaacgcgaattgcgcaccgatgtccgcaccgtaaagtccctgctgccgcaaacactgcattataatccactggattatattgacctgaataaaggcatttttactggcatggacagggagaacgaaccaatgtatctcccgttaaaagactggcagaaacaacacgcggatattattggcaccactggagctgggaaaggggttgccaccggcatattgctttatcaaagtattctggccggtgaaggtgtgtttgttatggaccccaaggatgatgaatgggctccacacctttatcggaaagcctgcgaggatgcaggaaaaccctttgccttaattgacctgcgaaaacagcaataccagctaaacctgattgaagatattacgccagacgaactggaagaattgttcgttgcaggtttcagtctggcggaaaaaggtcaggaatctgacttttatcggatcgacgaccggaaagccgcccgtatggccgcacaatttgtcagcgataatccatcgacaacaatccgtgatgtttataatggtgattacgttcagggtattgccgaaaaaatcaaagcattttttggcaagattgaggagctggcattactcaatgccattaattcaccggagggtttttcactcaaaaaaatatttgatgaaggtggctgctgttatgttatcggctccatgcgaaacagcaaaatcattaccgctcagcgtatgctgctggttcgcctttaccagttagcagaaaggcgcgaacgtgtaacagacgtaccccgccccattgctatttatctttccgaactgaaataccatttatccaggccagcgctggaaggtttaggcgcggctcgggataaaggcgtgcatattattatggatcaccagtccattgccgatttaaaagactgcccggcagatttgaaaggcgacgccgttgtcggtgcggtcgttgaaaatgccaaattcaaactagtttatcgggttatggacccggatacggcagactgggtggccagaatgtcaggcacgattctggtggatgatgaacttcgtaaggctaaaacggataatatgctgacggagaccatcgacagtgagcgcacaatccgccaggccgaacgcttctttattgacagcaatatgatcctgaacctgcccgattttgtcagctttatctttacgacaaaaacgctaccttctgcttcactgatttcaccgataaaggtcagaaagcgtcagctaaaaatcttctcggtttcccctgatattgccgcaacggcggcaccggtgaaaatcacactggactttagcgaggatgataaacgagccataccggatgtaatgacaacgcacccggatcttttcttcgacgaaagcgaagtaaaaccgggaaagccgaaatctgatgatgaagaacacctgtccccgcttgatttttaa

SEQ ID NO: 435946 - DNA, 249 bp, Serratia marcescens
atgcagcgagaaaaatgggggaaggaaaaacacgccagagcggtattaatattcaccgggaataataaagacgtgcagggatataatatctccacacgtctttgttacactgtcagcggccgcggcgttcaagtttttcctgacattccgtacaggtggttacacccggcagtgcttgccgtcgcttttctggaatgggtttaccacatacacgacagtggaataatgatggcgctggccctggtttga

SEQ ID NO: 435947 - DNA, 837 bp, Serratia marcescens
atggcaaccgggctgcgtattctcggtgtatccctgcattttttgggccgtcatgatgtcgggcgtgattatctccagcaatctcttgattggtatgaacatggtgaattaagccactctttccgttttggtcttgaacaagagagcgccggtcaggcctttctgtctcgtttactctggttacagggtgagtataaggccgcgaaacagatggcatggcgcggtgttaaaaaagccgctcgtttgcagcatgtctgttctctttgctgtgcactggctgaaggcgcttgtatgacagcagcactggatcgtaatccgcgttgggttataaaggccgcaaactggctgattcatctggcaaaaaggcatgatttatatttctggaagacatacggcgagctgtttcttgtttgggccaaacagttcagtcataccgatgttagtcaaaccacactgtttagctcgttgcgggcgatgggattagactggcaatattcccccttgttgtcagaaattgataccggggtatcactgagagccacccgccaggatcatgaaaactggtgcacgcctgaactgatgcgtctttctgccactcaattacctcctcagaagcaacgcctgctgttggagaaggccctggacaaagcgcgccagcaacaggcttatggctgggccctccgtattgcttattcattggcgacgttgcaggctgaagccggggaaaaatgggctgctaaacaattgatacaggacgctttacatgatgttgatgactcagacaatgcgacggatgtaagaagtgctattgcactatgtgcccgaataggggcctga

SEQ ID NO: 435948 - DNA, 2145 bp, Serratia marcescens
ttggcaacgacagaattgaccaggcccgagacgggcgcgctggattaccattcgctcaacgcgatgctcaatctttacgatgcggaaggccggatccagttcgataaagatcggctggcggcgcggcactacttcctgcagcacgtcaaccaaaacaccgtgttcttccataacctggaggaaaagctgcgctatctggtggaagaaggctactacgagccgcaggtgctggcgcagtacgaattcccgtttatcaagcagctgttccaacaggcctacgccaagaaattccgcttcgagaccttcctcggcgccttcaagtactacaccagctatacgctcaaaaccttcgacggcaagcgctatctggaacgctacgaagaccgggtgtgcatggtggcgctgacgctggcggcgggcgacaccgccctggcgcaggatctggtggaagagatgatttccggccgcttccagccggccacgccgaccttcctcaactgcggcaaacgccagcgcggtgagctggtctcctgcttcctgctgcgcatcgaagacaatatggaatcgatcggccgggcggtgaactccgcgctgcagctgtcgaaacgcggcggcggcgtggccttcatgctgagcaatattcgcgaggtgggcgcgccgatcaagcgcatcgagaaccagtcctccggcgtcattccgatcatgaaaatgctcgaagacgccttctcctacgccaaccagctcggcgcgcgccaaggggccggcgcggtgtatctcaacgcccaccacccggatatcctgcgttttctcgataccaagcgggaaaacgccgacgagaagatccgcatcaaaacgctgtcgctgggggtggtgatcccggatatcaccttcgagctggcgaagaacaacgaagaaatgtacctgttctcgccctacgacgtcgaacgggtgtatggcgtgccgttttcggagattgccgtcagcgagaagtaccgcgagatggtggacgacaagcgcatccgcaagtcgcgcatcaacgcgcgcgagttcttccaggtgctggcggagatccagttcgaatccggctacccctacgtgatgttcgaggacacggtcaaccgggagaacccgatcgccgggcgcatcaacatgagcaacctgtgttcggagatcctgcaggtcaaccgcgccagcacctatcacgaggatctgagctacgatcgcatcggcaaggatatctcctgcaacctcggctcgctgaacatcgccaaaaccatggacgcgccggacttcggcaaggcgatcgagaccgcgatccgcgcgctgaccgcggtggccgacatgagcgatatccgctcggtgccgtcgatcgccgaaggcaaccgcagcgcccgcgccatcggtctgggccagatgaacctgcacggttacctggcgcgcgagcgcatcttctacggctcggaagaaggcatcgacttcaccaatctctatttctataccgtggcctatcacgccatccgcgcctctaaccggctggcgatcgagcgcggcggcgcctttgatggctttgagcactctcgctatgccagcggcgagtacttcgacaagtacaccgagcgcgactggctgccgcagaccgagcgggtgcgcgagctgttcgccgccgccggcatcgccattccgggccgcgacgactggcgcgcgctgcgtcagtcggtgatgatgcacgggctgtacaatcagaatctgcaggcggtgccgccgaccggctccatctcgtacatcaacaacgccacctccagcatccatccgatcgtctcgcgcatcgagatccgcaaggaaggcaagatcggccgcgtttactacccggcgccgtacatgaccaacgacaacctggcgtattaccaggatgcctacgagattggcccggaaaaaatcatcgatacctatgccgccgcgacgcaacacgtcgatcaggggctgtcgctgacgttgttcttccgcgataccgccaccacccgcgacatcaaccgcgcgcagatctacgcctggcgcaaaggcatcaagaccatttactacatccgcctgcgccagatggcgctggaaggcaccgaggtgcagggctgcgtgtcctgcgcgctgtga

SEQ ID NO: 435949 - DNA, 1389 bp, Serratia marcescens
atggaattgatgcctttcaattttgacagattgccaaatggacaggtctttataagcaatctcgctggttttcatcacttcatcgatgagcaagagctgcttgatctagccaatgagcaaatcagtgcggagcaatcaaacgcactggaaagtaagctattcataaccaatgaaagctcatcggctataactccctatgctttaagttctgcttttgcaaaacgattgatgaatgaactggcggtcagaccaattttcatgattgtgcccacactacgctgtgaccatacctgcaagtattgccaggtcagtagagcttctgtgaacgcctctggttatgatctaaatcccgatctcatccctgatatcatttcgactatcaaaaaactatcaacgccaccttacaagatagagatacagggtggagagccacttttgcggttcgatttaattcagtccatttatgatcaatgtgctgaaacgttgggaagtaccgattttgagatggtggtagcatcaagcctgtctgtcttgaatgaggatatgcttgaatggtcgagagataggaacatcacgttctctgtttcgcttgatggtgaggaagttgttcacaacagtaatcgaattcttggtcatgggcttgctttcagtagaacagtgttagggatagaggctatcaaacggtctttaggcgcaggtcgcgttgcaacggttactacagttactaaagatcttatcgggcaccctgaatcgatcgtccaggctcacttatctcttggcctcaaggacatgtttatacgacctgttagtccctatgggtttgcacaaaaagcattgttcactttttctatggacgaatacttcgatttctatgcctcgttgatagatgaaatccttaagtccaataatgaaggaataagggttgtggaacattcagcttccattcatctgaaaagaatcttcaatcctggctttagtggttatgcggatttaaagtctccaagtggggtcgtgctaaacagtattcttttcaattatgacggccgagtatatggtagcgatgaaagtcgtatgttgcagaaggtaaatcctgaaacggagtttagtgcgggagaggttaagacgctatcattttctaagagtccttactataacgcagtgttgagttcatcgttcaattttgctctgccaggttgtgatacatgtgcatatcaaccattttgcggtgcagatccatgccagaacataagtgtacagggtgagcctgttggtgataggagtcgttcaacgttttgtcagtatcacaaggggatgttcaggtatctgatgaactccatctcagaaggtggtccgaaggctgagatgctaaaaggatgggcatatgtctga

SEQ ID NO: 435950 - DNA, 1113 bp, Serratia marcescens
atgtctgaggttatcaggaacgatatctttcattttgcttcaaaaaagaatgtgcccacggggttctatcggttatgcaaacaaaaaccagtgaaccctttattctttttgcccaatttactggtagttgctgaaggcaataatgatgccattcaaccatgctttgattactctgttattagcactgaattatttgagtcgattgaagatggagatattgggataatcaacaatggcaatatgatacgcgttattctgtcccgcagagccaatcataatactgtcttagttacggaacgttgcaataacttgtgtctgttttgttcgcagccaccaaagaaatcaaatgatgactggctacttatccaatcagctcttgctatagcttcatttggtttgaatggcgttgttggggttagcggtggtgaacctttgctgtatggagatgatttccttcacttcattgattttatcatcgagaattcaccagatactgctttgcatgttttaacaaacggacgcaaattcgctgataccaactttactcaggaaatggcaaagcgaagcaaaaagatcaaaatcacctttggtatcccgctctactcatcaagaccacttgtgcatgatcatcttgtagggagtgatggcgcatttaatgaaacggttaaggggttaatcaatgcaggaaactcagggattaatatcgaacttagagttattccgacactggctaactatacagaattggatgatattgtagagttcgttggccgtgtgttctctaacatcaatcagatttcccttatggggctggaatctatcggttgggcgcgaaagaactggtcaacaatcttcattgagcacggcagctatagtgacaaaataacctccgctatagacgctgcacacaggtcaggcatacctctaactatttttaattaccctttgtgtcatcttcctgaaagagcctgggagcttgctgctcagtcgatctctgattggaaaaattactatcctaaagaatgtgatgaatgcactcagaagtcttcctgtgctggttatttcagttcctcaacaggccgttttcatcaaccaccgagaccaattttatga

SEQ ID NO: 435951 - DNA, 636 bp, Serratia marcescens
atgaaaaaatttaattttgctgctctacttccgggatttttggcactcaataattctgtatgggcaagtgattcatctaccggagcaagcgatttgcctggtatgactcttaatgaacatgatttagtgatagccccacttaacaccgaagttccattctacattgcagggcatcgtagtcatagctcccatcggagccatagttctcaccgttcatcatcaggtggcgggtactatggtggcagcactccttattatccaaaaacatacagctcaccaagctcatctgggtcttcaagttcaggaacaagtccctcatcgtcctcttcctctgtgcgttcgcttcgttctaacgataataacaactttactactacgaattcagttggaacgacagaagctaaccgtgcaagtaatgggctgacttctggtacagagaagcgtaagcgcttaatcatgcgggttcaattcgctttgctggacaaaggttattacaacgggaatattgacggcataatgggaccttccacaaggcagtcaataaaaaattatcgcattgcgaatggactaccagtgccctcaagtgaaaccttggatacacagttgttaaattcattgagtattttagctcgataa

SEQ ID NO: 435952 - DNA, 891 bp, Serratia marcescens
atggacggcgcgatcctggtagtagctgcgactgacggcccaatgcctcagactcgtgagcacatcctgctgggtcgtcaggttggcgttcctttcatcatcgtattcatgaacaaatgcgacatggtagatgatgaagagctgctggaactggtagaaatggaagttcgcgaactgctgtccgcttacgacttcccaggcgacgacctgccggtaatccgcggttccgcgctgaaagcgctggaaggcgaagctgagtgggaagcgaaaatcatcgaactggccgaagccctggacagctacatcccagagccagagcgtgctatcgacaagccgttcctgctgccaatcgaagacgtattctccatctccggtcgtggtaccgttgttaccggtcgtgttgagcgcggtatcatcaaagttggcgaagaagttgaaatcgttggtatcaaagacaccgttaagtctacctgtactggcgttgaaatgttccgcaaactgctggacgaaggccgtgctggtgagaacgtaggtgttctgctgcgtggtatcaaacgtgaagaaatcgaacgtggtcaggtactggctaagccaggctccatcaagccgcacacccagttcgaatctgaagtgtacatcctgagcaaagatgaaggtggtcgtcacacgccattcttcaaaggctaccgtccacagttctacttccgtaccactgacgtgaccggtaccatcgaactgccagaaggcgtagagatggtaatgccaggcgacaacgtgaacatggttgtaaccctgattcacccaatcgcgatggatgacggtctgcgtttcgcaatccgtgaaggcggccgtactgtaggcgctggtgttgttgctaaagttatcgcttaa

SEQ ID NO: 435953 - DNA, 219 bp, Serratia marcescens
gtgcctccgccggacatacttatcagccacgcaatcaatcaccgcgtgttggcgctgtatactcgtcaggccgcctttgaggtgatacccgggaccatgacatgtaaaaccagcttcaacgcactgaaaaagtacatacaatcgctggaaaagtacggggccaaatgtgataaggtgcgtataaataacgagcagaaaggaagccaaaatggaaaataa

SEQ ID NO: 435954 - DNA, 681 bp, Serratia marcescens
atgaccgattcaccctcgaccattcccacctggtatcgcgatccgcgcgcggaagaggccatggccgatggccatgcgcccatctggcgccatcttatcggcctggtaccggaaaacgaactgtccggcgtgaaggtgctggatttcggctgcaatcagggcggttttctgcgcctgctgtaccagctccgcccatttcagcaggggcttggcgttgatatcgctcgccggtccgtcgatgaagccaaccggctgaaagggcatctgccggtggtttatcaaaccgatacgcggctgaacggctgggacgaccatttcgatatcgccttcagtcatgaggtcatctatctgatcgacgatattgcccagcatgctgccgatatactgcgggtgctgaagccgggcggcgtttactatgcggtgaccggttgccacaccggcaacccgctgtggccgcagtggcgtgaacgggttgctgcagatacccataccgtggtgcaggatcggtcgctggccgactatgcgcgcattttctccgccgcggggttccaggtctctgcccgcaggctgggcttttccggcttcgtgccctatgagtcggacgggtggatgccggatatcgcggcggcaatcgactactattggcacaccaaaacggtgttcaggctgcttaaaccctaa

SEQ ID NO: 435955 - DNA, 756 bp, Serratia marcescens
atgcaaaaagttggaacagtaacagaaacagccgatagcaatggtgaatttactaatggtaatgttgcgcaaggtatacctccgacgatattaaaggcggaaatattcaatacgtggcaacgtgagcttgttaatattgtcgtttcctctgggttaactcttgatcctgatgatgacgggcaagttttaaaagctatcaataaattattatcaatggctgctgctgtagcaagtgtaaatgggaagacaggagaggtaattataaacccttccgacatagggttgggaaatgttggtgattttaagtccgtacagcaaggaggtggtgccaaccaatcaaacagcaaggtttatattggttggggtaatgacggcttactgcgctgtactgttgacagtaccgatttagggcaaatattcactacaaattcccctccttctgctagtgaaacaggtgcatttccaataactggtgggacaattaacggcccattaaacactatggggcagattactgaagcaggacagagagtttacagcccgaacaatcaaccgcccatagcttcgcaagcagttacgggtgttcgcttatcaggaagaacaactaaaccggacactgggggacacatagaccttccttcaggatgtgtttacacaggcatgtcaggggctaactataacccttcaatctgggctgcatattcagcaattcaggtaaatattaatggcacttgggcaacagtcgcaacggtgtga

SEQ ID NO: 435956 - DNA, 294 bp, Serratia marcescens
atggctgctgtgcttgagaaaaccaaaacgatagtgttgtgccgggcgctgacggtaggggaaacccgttatgagcatcttgacttgaaggagcctgcactggctgaggttgagcagttctatgaactgcagcgcgccaaaaacagtatggctgcaatgaagctgctgatcgccctgaatgcgcaagtaactgaaaaggcattaggtcctatggcatttaccgactaccggaaatgtgaggactacctgatgtcttttttgaccttcgatccctcggcggatggcagcaactag

SEQ ID NO: 435957 - DNA, 414 bp, Serratia marcescens
atggcatcgaaaaaacagcaaggtaacgaactgggcggcttgccgcccgagttaatggtaggtgaacaggaaaacggcgaagagttgaaagttgacggtcaggcacccgacaattctgccgacaccgacaccgacaccgacaccgacaccgacaccgacaccgacactgatgacgattcagatgacgatcaggacggtgaacagttgccggcaggcatggtttcagtggttgtcaccaaaggtaatacggtgcggcacgatggctgtgactatccagaaaaccgggcgttcatgttgccggtagcggatgcgcagcgcctgattggtctgggcgtggttgctgatgttgagcagctccgcaagttagcgttgcttcgcagcgcgccggccgtatctgcgcaatcgggggagtaa

SEQ ID NO: 435958 - DNA, 198 bp, Serratia marcescens
atgagcaagattgtactgaccctggaacagattaaagagctggcacgcttcgctgaagaggaaggccagccgtcctacaccattaccaccggcactattccagcgtttgaggctgaggatggcgagatggttgaggagtacaacggcctgattgcttattcggattcggaagagcacagcgttctgcaattgggctga

SEQ ID NO: 435959 - DNA, 384 bp, Serratia marcescens
atgaacgcctcattcagcttccgcacgatggcgatcggcctgttgcttgtggcgctgattgtcgccggcaggctggcattttacttccatggcaatgcagtaaaggccggtgagcaggttaagcagcaggaaaagacgctggcgcagcagacagggctaatcaccacactgcgcgcggatgacgcccgtaatcgcgcaatgatggccgaacagcaacggagagagcagcagctgcgccagcagggcgaaaactaccagaggaaatatcaggatgccattaaaaatgacgagtgcgcccgccgcactgctcctggtgctgttcttgacctcctgcgcggaacggacaccaccgccgccggcgccgctcgtgctgtttccccctga

SEQ ID NO: 435960 - DNA, 177 bp, Serratia marcescens
atgagccaatcaaccccgctggataggaaatatgtcgatgaccacggcaaccctgtgaaggtcatccggtgggaacgtgtagaacgtcaggtgatttttatgagagagggctatccgcatgaatgcatgcaacctcttgaaagatttaaagagaaatttaagcgagtggacatatga

SEQ ID NO: 435961 - DNA, 186 bp, Serratia marcescens
atgatgaaggtgaaaatcacaacgaccggaggcgccgttcgagaagcaaatttggcagaagtcgagtttttgccggaacactacggcgcaattcggggttggtggtggtgccctgagaagggctacgtgatgcagctagccttgcgccacatccacattgacagcgtcgaatatatcaaagcctaa

SEQ ID NO: 435962 - DNA, 702 bp, Serratia marcescens
atgaaagagcgcccagtgattttcaacggcgagatggttcgcgccattctcgacggccgcaagacccagacgcggcgggttattaaggttcaacctgaaagcaagacttttgggctgaggaagattatcgagtctgaaaatgctagtgaagagggaaaatattactggtcattatcagatgcgctgggaatcagcagagctcgctcgaacccgttcctatgcccattcggccaggtaggcgatcggttgtgggtgcgggagacgtgggctgatgtgaatcatgatggtcacccagccattgcttaccgagccgatggtggtcttcgtgtcataggtgaagacgatggcgaggaagaagacccaaatcttgaaaagtattggtttgcacaatggtatgcagatttgattagtggcgcagaaggcaactggcgcccatcaatccacatgccgcgctgggccagcagaatcacgctagaaatcaccgccgtgcgcgttgagcgcctgaacgatatcagcgaagaggacgccaaggctgaaggcgtgaaagccggtgtttcccctggtcacgaacacatgatgcaccaggtggcattcagtgagttatggcagtccatctacggcgaagaaagctggggcgccaatccctgggtgtgggttatcgagttcaagcaggtcggcgctagggaggtggagcgtgggtag

SEQ ID NO: 435963 - DNA, 573 bp, Serratia marcescens
atggacaataagctgagcgaactgagcaatccggtggcgtattctctgcgatttcggaacatgaatggcgagcctgataaaaccatcaacgccaacaccaccttctctacgctggagaaagccaaggcgtatggtctgggtagccggtatgtaacgcaagacgacggcaagatagttaacgttcgcgatccgtcacaagaccctatcgttgagccgctttactcgcaagagtacgtctccgccctgctggaagataacgagcgcgttgcccgtgaccttgtcgctaggaatggcgagattgaagggttacgaaagagagctgccgaactggaatccatccgagcagacgcatcccaggtgttcaaagaaatcggcaacgagctgggctgcaaccccgacaacgagtcgatcatgatggctatcgatgcgcttaaagagcggctggatacgccggtgcggttgcctggtaaaaccagtgatttagatagctgggatggcggttgggatgcttgtcttgaggagtgtgccgaagcaatccgcgccgcagggttcaaagtcgagggggatgagtag

SEQ ID NO: 435964 - DNA, 1218 bp, Serratia marcescens
gtggctaataatattcattgtgaattaaaaaaaacaaaagacgggttgtttaattattctgtaaaaaacagaaagggtgaaataattttccaaagtgaagattatacaaataaacatgcagccattactagttttgaagttcttgttgaggctcttagtaaagacgaatatgaagagaaatacgaatttgatagtttcaggaaaccttacatatcaattgaaaataattataataacgttgtaaaaagtaaatcctttgaaaattactctgaagctaaactttcattccttaatttgaagaaaaacatcaatcaaatgaagagtgatatagatagtataaattcagaaaaggtatctggaaaggataatagagtatcgagtgtcgttgattttataactagagtttcgaaggtaaaaagggaaaaaggatgcctttattatttcagaggacatgcgaattacctttatgaattggttccggggatatatagaaaggaaaagagatggattaatcatgagcacaagttatttagagagataatgcttaaatgtccatccgatttcaaagggaataacacgacatttcagaaccttgttaaaatgcagcactatgctttaccgaccagactgcttgacattacctccaatgcattaatggcattgtattttgcgtgcattggtgagagggagaaggggcaggatggagaggtgataattttcaaaataaatgattccgatgtaaggtattttgatgatgtggaagtttctttactttcaaatttaagcaagcaggactatttgtttaaaataaaaaataggctgcgaataagtaacattccaatcacacaatcagattcgtggacgcagcttaacattaaaagaatagtggatgcagttcaacgcgatggctgttatatagactcggatattacttctggtgatttcaataaggttatttgtgttaagcctgaaatggataacccaagaataatacgacaagatggagcgtttttgctctttggtatgaataatgaaaagaagatgccgcctacattgccagattcatatttatatcaaggtgatgagggtaagcttataataaaatcagaggaaaaagaaaggataatttccgaacttgaatcgttaggtatatcagcaagtggcgtttatccagaaatagagcatgtagcattacatataaaaaacaaatactcataa

SEQ ID NO: 435965 - DNA, 849 bp, Serratia marcescens
atgtggataaaaataaagaacataatttctgtatggttgcttaaccattacatatcagtttttgtaagaaaaaaaacaccagatagattatccctatcgtcggaaaaatcaaagcactatgacctttacgaagtaagatttcatcctgaggaggataaaaactacttactcaatgatgttgccggaaataatgaggtaagtgtctttgaatgggatgatgctggccagaaaaaaaacaagcaagtacatattaaacaccttagcaccatgcaacatcaaataattcattattataaaggtcacatattagaatatgatgacatcattaaatatgccattgataaaaaaattatgcttaggtgcataaggatttttatctccaacatagtaaataaaacatctctatatttattctacagaaagaagctagttattgctaacagaatgaagttattagacatgttaatcgaagatagaatatcatctggtgataattatcaggggaaagataagattgcaatattatccctacatttcaaccaacattggattctgcatccggataaagataggttaatgaaaaccatacagttatatttggagtctttcatttccggaggtgaagtaatagtcatcaacaactttaattataaagtcactggaaaggcattggaaacatacactaagtacattcaagaagaacaacgacaccaacaagcaataaaacaacaaaagaacatgatatatttgaccattgttatatccatattaacactattcaccaccatttcagcgttaggacaagctggaattataacctttccgacattgataaatctaaaaggctga

SEQ ID NO: 435966 - DNA, 273 bp, Serratia marcescens
atgaaagataaatatattgacggcattaccatttcgaaaattgacgacaaaataaccaagttagtatccaaagttgcaaaaaaagaattaggtgggggcccgatgctcgttgccattcaaaatgaagccggtgaggtttaccggctcatcacttctgaaggtatgtcggcataccttgatatcgttcaggggcttgccaacatggggcttaatgaccttctcgccacgaatttcaaaccgcataaatacgacagtcttttcaccttcaaataa

SEQ ID NO: 435967 - DNA, 510 bp, Serratia marcescens
atgtttgattacgaggtttcaaaacatccacattttgatatggcctgccgccagttctctgtgcgtcataacttggttacgcttggcgatagcattggtatgaggccgcaggtattacgcaacaaactgaacccggagcagccgcaccagctcacttgtgcggagttattggcgcttactgatgctactgaagacgctggcttgctcgatgccttgctggcacaaatcaactgcatgccgtctgtaccggtcaacgaagccagcaccgggaacatctctgcctacgcgctgcacgctactgccgcaatcggcaacgttgccgccgccgccgtgcagggcgaccacaaaacgccggtacgcaaaagcgcactgcttgaaagcgtcaacacggcgatccgccatttgtcgctgatcggcttgaccgttcagaaccgcatccaatccaccccggctctggcctccaccgttgatgtgatcagcgggctgagtgctgttgctggtttaagctga

SEQ ID NO: 435968 - DNA, 573 bp, Serratia marcescens
atggaatttaatcagggtgctaaggtagttattgaacggatggttgaagcctacggcgtcaagacaaaactagcactgtgtgatgtattaggcgtgactgctagtgcactatctaaccgtcaaattcgtgattcttttcctgcggagtacgtcataaaatgcgccttagatacaggggcatcattgcggtggctaacctatgggcaaggtgagatgtttgagcagaatgttgtggctgcaccaaatgcacttgcagttccaagcaaaaaactcatagaccgaaagctacaagatggcgagactttgctattagataaatcctttcttcccgcagacatcacaaagccagtcttgattattgatggtgacactcagtacatcgcttcgcacggttttgcagaaatctatgatggaacgtggcttattgatattgacgacaatataagcatccgtgaactggttcgtattcccggaaacaaggtcaatatctccgataaaaaacactcgtttgattgcgctattgatgaactaaagtttatatctaagatattgattaaatgtgaaaaagtataa

SEQ ID NO: 435969 - DNA, 336 bp, Serratia marcescens
atgaacactgcatcctgtttaccgattgaagtccgtaccgccgttttccgccgcgccgtggcgcaggcctatctggacacctgcgacttttaccgggtgagcctggggtacacgctggacgagctgcagatgacgattgccctgcgtctggaagggcactttgtgcgtcagtacggcgcagaggatggcatggatatggcgtgcaccatgctgagcgacatggtgcagccggacgttctggtggccgcaccgcgcctgacctcgctggggcaaaagatgatggacgagctgtgctgcgagcgcctgtcggcggcacagcacgccaccgtacactga

SEQ ID NO: 435970 - DNA, 2388 bp, Serratia marcescens
atgagcggacagctttcttctgtcgaggagtttcgcaatatcacccttaaagcgaatgtcagcggcggtcgtttaaaactggctgatattgctcgcgtagagcagggcttgcaaagttatgcatttgaaacgcgtgaaaatggccaaccagcaacctctgctgccatcaaactatcaccgggcgctaacgccatcagtacggctgcaggcatccatgcgagacttaaagagctttcaagcacgttgccacaagggatggaattttcagtcccttttgatactgccccgtttgtaaaattatccgtacagaaagtcatccaaacgttcattgaagcaatggttttggtgttcctcgttatgctgctttttttgcataagctccgttgcacgcttattccggctatcgtggcaccggttgcattgatgggcacgttcaccgttatgctgttcagtggtttttccatcaatgtactgaccatgtttggcatggtgttagcaatcggcatcattgtagatgatgctatcgtagttgtggaaaatgtcgaacgtctgatagaggagaaagggcttcctcccaagcaggcgacacaccaagccatggaagaaattactcccgccattgtcggtattactctggtcttgaccgcagtatttatccctatggggttcgccagcggttcggtgggagtcatttacaaacagtttacgctctctatggccgtatctattttgttctccgcgtttttggcgttgacgttgactccagctttatgtgcatccctgctgaaagcacatgaactaaaagagaatcaatcgggtcgcttttcacgttggtttaatcgcagatttaatgcgttaactattcgttatgaaacgggattgatatatatattgaaacgtggggggcgagtaatgttactttatgttgtcctctgcggcctgctttttctagggctgaaaaagctcccctcatcgtttttgcctgaggaagatcagggatattttatgtcatcaatccagcttccttccgacgcaaccatggagcgtactcgtgaagttgtgaaacactacgagacggcgatagcaacccgtagtgccatcgagaataatgtctctatccttggctttggtttttctggttcgggccaaaacacagcgatgacatttacaacactaaaagattggccatatagaaatggggcaacggctcaagatgaggctcattttgctgaggccgcaatgaagaatattgatgatggtaagacaaccagtcaaatgccaccggctatttctgatatgggaacttcctcagagtttatgatgtacatagaagatcgcggtggaaaaggttatcacgcattgaaacaggcaacagatcagcttcttgtgcacgctaatcaaagtagggttttgggaggggtagctattgatggcttacctgagggtgtaagtctttcattaaaggtcgatagagagaaggccgaaacttttggcgtatcatttaatgaaattggcgaagcgctctctgcggcttctggatcttactatgtcaatgattacactgataacggccgtgttcagcaggtcattattcaggctgacatagcttaccggatgcaactcgcggatttactcaaaatctctatcaaaaataaaatgggagagatggtgcctctttcaacattcgtgtcttcatcatggactttgtcaccgcagcaattgaatcgctaccaaggctatcccgcactcagagtgacaggtagtgccgctaatgggcattctagtggaactgccatggcagagatggagagactggcgagccatctccccgaaggctttaaagctgaatgggccggtagttcgctccaggaaaaagagtcagcttcacaacttccattgcttattttgctctctattcttgttgtgttcatggtgctggcagccctctatgaaagttgggcaaccccttttgccgtgatgttggttgtaccgttggggcttatcggtgcggtttgcgcagtcttcattgctgacatgtcaaatgatgtgttttttagagtcggaatgataacgatcatcgggctttctactaaaaacgccattttgattattgagttcgccagacaactacgaatgcaaggcatggatattttttccgcaatattgctggcatctcggcagcgattgcgccctataatgatgacttcactcgcctttacgctcggtgttgtaccgttaatactcgctaccggcgccagtgataagacccagcactccatcggcactggcgtttttggcggtatgataagtggaacattattagccatattctttgttcctgtcttctatctattcgtcatgcgtttgctggaaaaaacaaagctataa

SEQ ID NO: 435971 - DNA, 690 bp, Serratia marcescens
  misc_feature (593)..(602): n is a, c, g, or t
atgtcccgtttttttattgagcgccccgtctttgcttgggttatcgcactatttattatacttggtggtgttcttgctatcccccagttaccggtagctcaatatcccgctgtcgcaccacctagtgtgacaatatcggtaacctatcctggggcaacaccggataccatgaatacatccgtgatatcactgcttgagcgtgaaatctctgcggtagataacctgctttattttgagtcgtccagcgatacatcgggtgtcgcttcaataacaatgacgtttaaacctggtactgatatcaaacttgctcaggtagacgttcagaaccaaatcaaggtggtagaggcacgccttccacaagttgtgcggcagaatggaataaacgtggagtcagccaactccggctttctgatgttgattggtttgaaatcaccttcaggccagtatcaagaggctgacttaagtgattattttgctcgtcatatcactgatgaactgcgtcgcgtaccaggtgtaggtaaagttcagcttttcggcgcagaaaaggcaatgcgtgtctggttggacccgataaaaatgtttagctacaagcnnnnnnnnnngatgtcattaccgcgattagccgacagaatctacaggtttcacccggtaggattggtgatgctccagcagctgttgggcaaaaagtaa

SEQ ID NO: 435972 - DNA, 891 bp, Serratia marcescens
atgagcagtcataatatcgcagcccaaaagcctgtcggaagtgcaaccaatacattgaaattactggcaaaaagaaacaagaaaaagctgttcatcaccttttttctggttgttgccgaaaacctgacctatcttctgtacccgattttggctggtatcgccatcaatgccatcatggccgggcagacgctgaatgcaatgctttacggattgatgatcttatttatctggtgtcttggagctgcacgtagaagcgtggacacccgcacttttgccaagatttatgctgctctggcggtttctgttgttatggcgcaacgcagaaataatcttaaccactctaccgttgcagcccgggtgacactgtccagagaatttgtcgatttctttgagttgcacctacctacgctcattacatcgctttcctcgatgataggtgcagcggtaatgttattgatcatcgaattctgggcagggatttcatgtttggtcatcttggtattcctggcttgctttctgtccggatttaccaggaaaaatgaggtgctttataacaaactgaacaatcgccttgaaaaagaggtcgactttgttaacaaagcttcaacgttatctttgaaccgacattattctacgcttgccaagctgcgcataagactttctgatcgtgaagcgttggggtatttgtcggtcggcggtcttgtcgccatgctgtttagcctgacgattatatggatgtccaattcagtgaacatcaatgccggtcatatttattcggtaatgacttacttatggatgtttgccacaagcctggatgatggacctcgattgctggagaaatattccgaactcaaggatattggtagacgtgtcaatacagaatcagattaa

SEQ ID NO: 435973 - DNA, 609 bp, Serratia marcescens
  misc_feature (114)..(123): n is a, c, g, or t
atgaaagctaaatcagagctcatgagagaaaaaatactgaatggcgtcgtcgagctatttatcgaaaagggcattgaaaacgtcactacgcgtgagcttactgagcatattggnnnnnnnnnnggtgtctccagaagccatatttatcattactttaaagattggcaatcgttgagcatcgaagccgttgctaatttcatgcgcagcgaattggcagagtttcgcactatcatcacaccgctacctgctattcagaaacttcaagagttcattcatggcatgatctcagaagaacctgaccctaccagaaaactatatggctcgttatggttactttccacccacaacggagcttatgccgaacagatgcaattctttttagaggaatggcacaaggtattaacttatatcattgactccggtatagaggagggcgtttttcagcgagtcgatgtacaccgtacagcacgacaactggatgcaatgctgtttggctacagcgaacatttgtttactttgccctcttcagatgcgttattacaggcaaaagaggatattgaaagttttatagagagaaatttactcggagataatattaaggttctatga

SEQ ID NO: 435974 - DNA, 987 bp, Serratia marcescens
atgattttattattaaattataaggtgccaccacttttactcgttcgtttgactaccgttttaattcattttgttacattttatttttttgatagcggtaagtccgatatgaaagcacgtattttaggctgggaaaaatccactagggaagagtatggttatacatactctcttttcggcgggagcgtgtgtacgcatcccgatgtggttgactttttgagtaagcgtcttgctccccctgatttttatgtttacaaacggaaaggtgatgttatagctgctgctttttcactaaataatgagctttctcttaagaagcataattaccctattttttttgatgatatcatcatcccgtttaaaaagggcagtggaaaaatcttaatgccatttaagacaaaacagctatctcatcatcataaaggggacttctccaattgtattcattggcagaaattaaaaaggaaaacctgtgtagtcaaggatgacttttctaagaaaacccataaaaaaagacgagccgaatatgaatacttcattaataacggaggggaatgtttatctattgataaattttctgacaaagcgttatcagagatttatatttctttatttaaaaaaagatggggtaaaaagctagaatgttattcagaggagattctattagacgtctttagtgagttacgccatctggtgtttggccatgtactgttgattaacggggtaccctgcgcatatgaccttgtatttaaggccgaatgcaaagagtggattttttttgactgccataatggtggtgttgatcaagcctttgccaactatagtgtggggagtctcctcatgtataaaaacatagagttagcgaaaaagacaggtaaagaaaaaaatattaagacaatctactcgttaggcatggaagatccaagatgggagtataaaaagcaatggtgcaacgtgttaaatttaggcagatctttgatgttttga

SEQ ID NO: 435975 - DNA, 825 bp, Serratia marcescens
atgtgtgatgcgaccggtctgtcgcaacgtcgtgcctgcaggcttacaggtttgtccctgtcgacctgccgctataaggctcagcgtccggcggctgatgcgcatttatcagggcgcatcactgagctggcacttgagcgcaagcgctttgactaccgccgtatctggcagttactgcgccgtgaaggccttcaggttaatcacaaacgcgtgtaccgcctttatcatctcaacgggctgagcgtaaaacgcagacgacgtcgtaaaggactggcaacggaacgtctgccgctgctccgcccgacagcgcccaacctgacatggtcgatggatttcgttatggactcgctggccaccggtcgcaggataaaatgcctgacctgtgtggacaacttcacgaaggagtgtctgacaattaccaccgcattcgggactgcaggtgttcaggtcacgcgtattctggacagcattgcactgtttagaggttatccggcgacgataagaactgatcaggggccggagttcacttgccgcgcactggatcaatgggcctttgagcatggtgttgagttgcgtttaatccagccgggcaagccaacgcagaacggatttatagagagctttaacggacgatttcgcgatgaatgtctgaatgggcactggttcagcgatatcgttcacgccaggaaaatcatttatgactggtggcaggattataacgagtgtcgtccacattcggcactgaattatcagacgccatcagagtttgcagcacggtggcgaaatggaaaaagtgaagataaacaaaccgacactactaactga

SEQ ID NO: 435976 - DNA, 264 bp, Serratia marcescens
atgaagaagcgcttttccgacgaacagatcatcagtatcctccgcgaggctgaagctggggtttctgcccaggatctctgccgtaaacatgccatttcagacgctaccttttacacctggcgtaagaagtatggcggtatggaggtgcccgaggttaagcgtctgaagtcacttgaggaagagaacgccagactcaagaagctgcttgctgaagccatgctggataaggaggcacttcaggtggctctggggcaaaagtactga

SEQ ID NO: 435977 - DNA, 3777 bp, Serratia marcescens
atgttcgaaattactggcgcacaagtcgccgacctcaatgacgccgatctgcggacactcgtcgcacgtctcgccttggcagaattgcgggcgcagggttgccccagttcgtcggtaacggctggcggcaatcaggatgcggccgatggcgggcttgatgtccgggtcgagtgcccgtccgcactgctgatgccggatttcgtgccgcgccagcacacagggtttcaggtgaaaaagcccgacatgccggcgagcgcaatccgcgatgagatgcgtcctggcggcgtactacggccggtcatcgccgaactcgccgctcgctcgggcgcctacatcatcgtcagcgcgcaagggtcggtcgcagacaagccgctgagcgatcgtcgcgatgcgatccgggcgcagctcgacgatctgcctgaggccgggcagttgcatagcgacttctacgatcgcgaccggctggcgacatgggtcaatcaccatcccggaattgccgcctgggtccgcacgcggctcggcatcggtatgtcgggctggagcagcatcggcgattggtgcggcgtcggcgtgagcgaggagacgccctatctcttcaacgataaggcctgcctaaccgatgagcgaacgaacgaccgcgagcaactcaccatcggcgagggtatcgcacggcttcgcgtctctctgaccaaagctcgccaatgtatccggttgatcggcttgtccggtctcggaaagactcgtctcgtgcaggcactgttcgaggatggtgtgggcgaggtgccgctcgatccggggctcgccgtctataccgactattcggcggagactgacccgaccacacgggacatggcacgccagctggtgatcgcacggcaacgtgcgatcctgatcgtcgacaactgcaacccggcgacgcacagcgaactagcccgcatctgttcggaagcgggtagccaagtcagtctcttaactgtcgaatatgatgttcgcgacgacgagcccgagcgtaccgaggtctttcgcctgcaatcagcatcgtccgaaatggtggagctgtggctggaaaagaccttccccaatgtgacgcaggtcgaccggcgaaccatatcggagttcagcgacggcaacttccgcgtggcgcgcgctctcgccgacacgctcggaaaaggcgagaccctgggaaagctcaagagccgcgacctcttcgagcggatttttcatcagcgcaacgagcctgaccgggatctgctttccgctgccgaggaccttgccctgctctattcgatcgatggcgaggacacttcggaaagcggtgaacttgcgcggatcgccgctattcgcggtgttcccgtggtgacgatatatgcggcactgaatacgcttcgacagcgggggatcgcgcagctgcggggacggtggcgcgctatcctgccgcatgcgatcgccaacccgctcgccggtttcgcccttgaacgcatgccgccgaccgatttcgatcgcttctacgcgtcgcttacaacgcggatgcagaagtccctttcgcgccgcctcggctatctgcacgacagcgctgaggcgcgggccgcggtcgagcgctggctccgtgccgacgggccactcggcgatcttgcggcattgggagaagacggccttcagatcatcgccaacatcgctccggttgcacccgataccgtgctcgcgaggattgagcgtgatattgccggcccagatggcggcgagataatcgatccgcagtcgaacaaccggtggcaatggatacggttgatcaagctcctcgcttacgatccgccgctgttcgaccgcgcggcaaccttgcttacgcggttcctttccgctgaatcgcccgaccaccacaacaactcggcgtcggacatgttcgccgagctgtttcacctgcacctgtccggcaccaaggctttaccagatcagcggcgagcgctcgtgcgccggttcgcgcaatcgggtgatccggctttggcgcgctgcgccggagtcgccctcgatgcgctgctaaaggcgcaccatttcagttcatccagcgacttcgacttcggcgcccggtcacgggactatggttggcatccgccgacctatggtgacatctgggcctggtacaacggcgcagtcgatctggcggtcgaactatcgccaatcatcgaaaacgccagggaccaccttgcccacagcgtaagagagctgtggcacttcggcgcctgccacgatgcgcttgaacgggcagcgacccatttttcttccgagcgaccttggatcgaggggtggatcggcttccgcacagcgctgcgcttcgagggcgacgcgatgccggatgaggtgcgcgcccgtctcgttgcactcatcgaacacctaaaacccaccgttcttctccatcaggcccgtgcggtcgtactggggcgcaacagtttcggttgggatgtggctgatggcgacgcggatgacggcgacgtcatgaaaccctatgagcgcgcctcccagcaggcgaaagagatcggcaccgcactcgcgcacgacccggagacgcgcgctgccttcatcgccgaactgctcgtcgaacaaaatccgcagcgcgcctatgaatgcggcattggtctgtcggatggtgccgccgatcttgatgcgatgtggtgtgaactgctggacctcttctccgccgccgaggcggacagccggaatgcgacggtgctgggcgggttcatctatggcgcgcacgccaaggcctcggcctttgccaacgctacgctagagaatgtgatccagaatcccgatcttgccgcgagtctgccgtatcttcaagcgtgtgttgctatcgatacccaaggcatagcgcggcttcggcgtgcgatcgaacgtggcgtcctttcggcgtggaattttcaaagcatcgccaatggtagtgtcggggagtctccacccgacgcgcttggcctgctactcaccgacatcggcaatttggccgacggcgtcgagatcgcacttgatatattgcacatgcacttctaccgcgatcgggaagaaggccgccaacgtgcgccatccttgatcgctgttggccgtgagctgctactgcgcactgacttcagaaagaagcagtcgttgcgcgattttgggctgcataccgttattcgggtctgctgcgccggacccgatggagaggcgacattgcgggaaatctgcgctcgcgtccgggccggactggagaccgtctatctctcgtcctacgatcttggttatgtcctgaaagcgctcttcgagacccatcccctgatcgcactcgacgaattcctgctccccgaactcaggccgagaaatcgggggctgtttgagggggactccgggtctggcacgccggtggaagatgtcggcgccgagacccttgttcagtgggcgaatatcgatccggatcgacgctatccgctgcttggcaaaagcatccccatgttcaagcggcagcagggcgaagaggagaatgctgtctccaggcttttcctggaaatattgggccacgcgccagacaagagggcgttcctcggcgatgtctggtcgcggcttcatccgcgcagctggagtggctcgctcgccgatatcctggttcgacgtcgcgcggctatcacaacgctgggtgacaatgttggaggcgaggttcggcaatgggtcaccgacatgctgcccgaactcgaacgctggatcgaacatgagagcaagcgcgatcgggaaggcgagcagagtttcgaataa

SEQ ID NO: 435978 - DNA, 159 bp, Serratia marcescens
atgggctttaaacattacagtgctcaacatcaagggattgcagtggaacagcaggtggcctttgagtacacgcgtaccgtaaggcactgtattgtgaccccattgtcataccatcaggacatccagcagctgctgtttaagcgattcatcatggcctga

SEQ ID NO: 435979 - DNA, 963 bp, Serratia marcescens
atgaaaacttcaccaccacctttactcgtttctttcaaaagtgctaaaaatttgatagatgcattgcctccttctgtatccgaaaaatatgaagatgagattaaatatttaactgaaaaaaaccttccgccagtggtttcagtagcagttgtgagcattatctttggtgtaagctctaactttgttgcatctattttaagaagaaaagagagtcaatatagaaattttaccattaagaaggggactaaaagaagaaaaattgaagctcctaaagtgggcttaaagattttccaatcctggataggccataatctatcaagcgcattaatttttcctaaatgcgtattcggattcattcccgatatgaatggggttttcgaagcagcggatgtacattgtgagtctaagtgggtttactccttagatcttagagattttttcactagtattagcagggaaaaagttaaatctgaattaattaatttaggttactctgctcactccgctgaattaatcaccatactttgcacataccaaggacgtttacctcaaggttctcctgcaagtccggtcctatcaaatatagtatttcaaaaaacagactcccgcttgcttaagaaatccgaagaattaggtataaaatatacgcggtatgcagatgacttagttttttccggtataaatcccatgcctgcagcacttccagaattaataaaagaagttctccttgatgagggctggactatagctgaagagaaggagcatatatcttgccttccaaatcgactaaaagttcatggccttttagttcatggcgaaaaaccaagactcacaaaaggttatagaaatcgtattcgagcttataagcatttattgaattctggcaaggttaaggatgctgaccttgatatggtgaatggacacatttcttatgcggaaaacttagagcggttcaataattga

SEQ ID NO: 435980 - DNA, 744 bp, Serratia marcescens
ttgtctcttgaaaaacatattcaggaaatcattgagagcaaggcaagttatgtgtcttctttcaaatacgacgatatatccgagtctatcctattggagatcccattagataaaataagagaagtttcaagtaagaacttcacatctaaaaggcaaattaaaaacctatctaaaaaattagaacttcttactaagcgaaaggttattatctcttataggcaatcggaaaaaataaacaacttagaaataggccttaaagagataatctcaataaagagcgggaatgtaatatcaaatttatcaatctctatgattgatgattcgaactgtattgtttggatttttacgtcggaaagtttgagcgaagaaaagaaagatgaaataaagaatcaagctgaaaatttcttacatagcgcccttataattgttaatgaaacatattttacgccccccaagaaagaagagccatcaacaatggcaatcatgcgtacactaaagatactatccccagcacaaacaacccccttaaaaatcgctctcgaagcgagagatttcaatgttccatctgaaaagtggttgctctctaaactagattatttgcgcaaacgaaaatttatagtcagaaattcagatggttcatatgccctttcagggaacggcattgccattgtcccaacatcatcttctaaatcaagttcggatatcgaacgcatcctatcgctagcaaggagaaaagtatggtaa

SEQ ID NO: 435981 - DNA, 561 bp, Serratia marcescens
gtgtacaagggccgttttaagtgtgagatgaaattatccactggagaagcgatgtcagattttcataaagttgctgagcatttatcgcaacatgcaaaaaaatgcaaagctgatacagctgatgcatttggcaggtcagcactgaataggtattattacgccacatacatttctgtaagagaatttttggggcaaatggataaatcttgggaaggccagtcccatggcacaatcccccctcttcttgaaggcgagttgcttaaaagaattagaaccgcagcagcaagtcaagaaaggctgggtcttataaccacccccaaaagcaaaggatatatttcatcagcatcaaatgccgcatcttcaatagcgtcaatacttaaatcagcttattccattagagttatttccgattacaaaccaaacatcaagctaacctttaataatggtggcttttcatgtgggggacatacggactccgaggcaagaggctggaaaagcaaagtcgatacgcagaaaggaattttattaaacatttctagggagttaggcattgtctcttga

SEQ ID NO: 435982 - DNA, 144 bp, Serratia marcescens
atgccgcgcactgtaacacagatgcagtatatccccaaaaatgatgagttcttggctggagcgatgctgattactactggtgatgccgaggagaaatgcgaattctggttatttttgctgtataaggttgctttttgcgactaa

SEQ ID NO: 435983 - DNA, 1743 bp, Serratia marcescens
atgttatttcctaagaaaaatgataatgttaatgaaaatccaatatggatgttcatgatgagctctgaaagtaagccactgatttatctattaaatacctctaaaaccgttgagaaggctcttagcccggtcttcaatgtaagccattgttggatgaatggatgtaacacatatgaagcatccacctatcgtcctttagaaataccctattcttctgaacttccctcaaacttacatgaagcagaaatagtagttattgatacaggtttaagagaaagttttattaaaggtcattcatctataaaagtgatttatagacatacacctagcgttgttgacctgttccctctagatatgaagactgctcttactaacattttttctactgaaaaatttcaactactatttgttttttgtgaaagtaataatgacgaagcctatacacttctgaatgaagcaggacaacactatcagtatcaaactaatacttattgctttccaaaacattacgcaccctctccttcaagaagagttggaaacagaatgaaggtgtttgaaggagagaaaggaatagagataaagcaatgtctcgaaaaataccttccacaatcaggctataactttgttttccaggtatatagaggtgaaaggtctctagatctccctttactcgttaatgaagctggagagtgtgttgcttttttaagaaagatgggttctaaggttgttttcttctttccagaaatatatgacaaggcaggtttgttgttagagctttttaataatgttttgccggacattgatttttgtagtgagatattcccaaatcatggaagcttcaaatggattaacgatttctcatatatctctttggatgaaagaaataaactaatagatattgataatgagataaaaagacatgaagaaaccttgtcatctctgaaagaagaatatgaaagagttcattccaaagatgaaaatgtaaagctaagggctatgctaaaagaaaccggggatgaccttgtatctgcagttaagtggtttcttgagtatatcggcttcactaatgtggtagatccagataaagatgttgatgtagacgctggagaagtgtttgaggaagatttgaactttgagcataacggtgttcacttcttgctggaagtgaaagggattggaggcacttcaacagatgctcagtgtgctcaaatctccaagattgccttacgtaggaagaaagctaatccgagaaatacatacaaagccgtctacatagtcaatcaccgtagatacaaagcgcccaaagatagagaggttatccctttcaatgataaccagattgaagatgcagagatggctcaacgcggcatgacatttacttatgagctgtttaacatctattacatgatagaagcaggtgttatcagtaaagaagaagctcgtggtgcctttaagcaagagggactcattaacttcagacaaagccttcataagcttgatttcaatcactgctacaaaggggcattagtctactctttagtcatacccgaaggcggttcatttactatcactaaagctgacaaaattgccattcaagataatgaaaatcactggcaccggttgtctattgaaagcttacagatagaccgggttgatcatgaagaagtcagaaatggtaaagttggcatcaaggttgataggctggtgtctggagcaagagactactatgtagtgaaggcttaa

SEQ ID NO: 435984 - DNA, 1500 bp, Serratia marcescens
atgacactgattaacctaaaagatctcgaggcccatctttggcatgcagcccatatcatcactgggcctattgatgcgtcagattacaaaacgtacattttccccatcctgttcttcaagcgcatttgtgatgtatatgacgaagaatttgccgatgcgatggaaagcgttggggatgcagagcttgccaaagggaagatgtttcaccgtattcagatacctgaaaattgtcactggcgcgatgttttcgctgagaccaaagacatcggccaggcattgaaagactccttccgtggtatagaactggcaaatcctaaactgcatggcatttttggcgatgccagctggaccaataaagaacgcctttctgatgagttactggctacgttactcaatcacttcaataaggtgaaccttggcgtttctagtgtccgtgacgatgatatggggcgcgcatacgagtatctgatcaaacgctttgcagacaaagccaataagaaagccggtgagttctataccccacgtactatcgttcgcctaatggttaacattcttgacccaaaagccggtgagagtgtctacgatcctgcctgtggtactggtggtatgctgcttgagactatccaccatgtaaaagaaaacggtggtgatccgcgcttgctaaaaatcaaaggtcaggaaaaaaacctgacgacggaagctattgcgcggatgaacctgttcctgcacggtcaggaagatttcgatattgttcgcggagatacgctgcgtgaacctaagtttttacaaagcgatcgtttagaaaccttcgattgcgtcgttgccaacccaccgtttagcttaaaggagtggggatacgatctgtggtcgaacgatccctatggccgtaagcaatatggtctggcgcctaaaacaaatggtgattttgcctgggtgcagcatatgtttgcttcacttaacgacaatgggcgtatggctgtcgtattgcctcatggtgtgttgtttcgcggcggagctgagggggtaattcgtaccaaattgctgcaagaaaatcgcattgtggcgattattggtgtcgcttccaatctgttctacggcactggtattcctgcgagtattttggtgctgcgaaaatcacggccggcaatacataaagatcatgtattgatcatcaatgctgaagaaatctataccaaggggcgtgcgcagaatacgctgtccaacaaacaggctgatgacatataccaaatctaccatggcttggctcaacaggggccagatgcaaaagaaatcgaaggcgttgcacgctgggtacctctgaaggagattgaagaaaatgacttcaatctaaatattgctcgttatgtgcaaaagccacttgaagaagaaaccatcactgtggaagaggcgctcaaagattttcaacggaagctggttgagctggaaaaagcagaagaggagctggaagccctgcttatcaaagaagggttcgaggtatga

SEQ ID NO: 435985 - DNA, 228 bp, Serratia marcescens
atgatccgctgccatcttgctcggctcatgggcgaacataagatgcgaattgccgatgtcgtcagggaaaccggactgagtcgcaacactatcactttgctttacaaagagacggctcagaaagttgacctggatacattagaaaggctttgcgtgctttttgactgtgaaatacacgatttactgcaaaaggttcctgcttcgcagaatcgtacagagaaaaattaa

SEQ ID NO: 435986 - DNA, 684 bp, Serratia marcescens
atgactgaatggcttaatgcacattttggtgcagacgcagctacctatcttagcttattagtcggcgtactggcactgtttggtattgggggcagtgttacatatagaatcagacagcaaaacaacatcaaacagaaggcaaagaaaaccgagggtgatgtgaaccaggccgggcgggatattaatcagaccaccaacgtttaccacacatccaatgaatctgctgaggaccctgtaaaaaaaaagcaagatgaacatgatctgaagatcatcgaccagattcttgaattgctgccttatgaggatactactcaatgggttgagcagagctacctgagcggtatacggcaagatgtttgcttaaacattgaaaaagctgaaaaatttagcggtgaaaagtatcggttattcaatactgaagtgaatggtgcgaaggacgcttttttggacgctatgaccgcatacttagatagtacgctacggtttatgagtgttgattacccgaacagaaagccagtgatgctaagccttccccatgactggaagagtaagagtgttgaattggaggcaaccttccgctttcatcagcaaaaggtgcgtgaaacatcgggggtgatgattgcgcgttatgaggattttgtcaggacatttaaggctcatggattcataagcgataaactgtaa

SEQ ID NO: 435987 - DNA, 651 bp, Serratia marcescens
atgaaggatgacaaaattgtacacttgggcaagagaagaaagtctcttgaggacgagcttctcgaaattgcgaaaactattagtaatgatactccccctgatgaagtaggtgaactaactgataaatcaatcatttatgttaatggtgcgggtaatgtggttggtagcggcaatacagtaaataacgtatttaatcttgatcgaactataaaaaagcaagttcatgtaaaaacaggtgacggcgttgttaacgccaatcagaagcatgacataaaaagtcttgtttatgagtgggttgatatgcataactcgataaaaaaatcaccactttcttacaacgtcgcatggtctcgtctaaataagcaccttaaagttaacagctatcacgaaataagatctgatgatttctccaaagctatcaagtacctacgtactcagatgggcattcttaggcggatggcatctgctcctaaaaaagtgtctgactggaggaaggaaattattaaatctattcaggcaagatgcacggaaaaggggtggcaagaatggcgaaaactgcatatggataaaaaattcagcaagtcatccatgacagaactcactgatgctgagctgcagcaactttaccaaacggtctggagtaaaaagtaa

SEQ ID NO: 435988 - DNA, 474 bp, Serratia marcescens
atgacggatgagctgaacatcctgatacctgaccggacgctgactatctgcggcgtccaggtcacggtgcatgagtacacgctggccgagcagctgcagcaccgtcaaccgctcaaggcaatcagcgaagggttcatggatgcgatgaacgccaagccggatgccgaggtgtcgattgatgagctgtacgacgtactcggggcgaactgggatgcggtgctgcaggcggtagcggtctcctgtggccgcagcgtcgaatgggtcgccggtttgactggggacgatagcgaaagcctgctgctgatctggtggggcgtcaacgcggctttttttacccgcaacgccattcgcccggcgctcaccaggctggtgcagcagctgcaaaacccgccccctggggagaggtcttcagctgtctcatcgaccacggccaccgattcggcgaactcagaaactacaccgcccgccagttga

SEQ ID NO: 435989 - DNA, 198 bp, Serratia marcescens
atgaccaggcgaattgtactgaccggcccgcacacccatcagggcgtggcgcttgctgccggcaccgagattgaagtggacgacgcaacggcgcagtggctgattgagcacgccggcgcgaaaaaagcgggcgtgaaccgcaaaatcaaaaccgagaccggctccgccgactcaccgaccgaggaacaggaacaatga

SEQ ID NO: 435990 - DNA, 237 bp, Serratia marcescens
atgctcgacttcatccgctcttcggtggaaaaaacagaggtcagcacggacgcaaaaccccattggttcaccgttcaggtggtgcgttcaccgagcggtaagcgattccgcgccggcattgagttcacctccgagccaaaaccttacgatttctcgctgttgagcgatgagcagatcgcggcgatctcggcggacacattcctgcgcatcaagccgattgcgccgactggggaataa

SEQ ID NO: 435991 - DNA, 285 bp, Serratia marcescens
atgtccgcgctgataagcacgctgttgcgccgcctgggcgaactcatcaccaatccggccacgggccgcttgtccacctcggacaccatggtgctgggcgcgttcctggtggcgtcgttcgttatcgtctgggttacggtgaccggtcacttggaagagtggcacctggctgcctacctgggcgcgttcgttttccagtctcaggcgtcgaaattcgtcgccatcaagcgagacaaggccaagctggaggtgggcgatgccgttaactctcagtctggtgtttag

SEQ ID NO: 435992 - DNA, 1527 bp, Serratia marcescens
atggtgatgacaatggcacaaccccaactgctcgatatgtacggcaaccccatccgacgtgaggtattgcgtgagccgcagtcctcccacgtggccgcgctggccggcctgtatgccgagcaccccagccagcggctgacgccccagcgcctggagcaaattctcaacgaggccgagctgggcaacctgcaggcccaggccgacctgttcaccgatatggaagaacgggacgcccatttgtttgccgagatgcaaaagcgcaagcgcgcgctgctgaccatcccgcacgaaatcacgccgccgcccaatgccacaccggcagagcaagcggatgcggcctggctggcggaatacatcaccgagcaagacggctgggaggatttgatcatcgatatgctcgacgccatcggccaggggttcagcaatatcgagatcgagtgggagcctgtcggccgcgagtggtttccgaaggcgtttcaccaccgcccggcgtcctggttcgaactggcgcgggacaatcaggatcagctgttgctgcgtaccgatgacggcatgggcgcgccgctgcagccgttcggctggatacagcaccgccataagtcccgcagtggctatgttgcgcgtgccgggctgctgcgcaccctgtcctggccgtatgtgtgccgcaacttcggcactcagagcctggcggagctgctggagatctacggtatcccgctgcgtatcggtaaatacccggagggggtcggtgaaaaagaaaggcgtgagctgatgcgggccgttaccgagctgggacgctatgccggcggtattatccccaaggaaatggaaatcaccctgcatcaggcgtcgaacagctcgcatgagccgtttatggcactggccgaatgggcggaaaaagccatgtccaaggccattctgggcgggacactgaccacgcaggccgacggcaaaacctccaccaatgccctgggcgtggttcacaatgaggtgcgccatgacctgctggcttccgatggccgtcagttggccatgacgctgcgcagcgatctgttttggccgctgctggtgctcaatcgccgagcgaacgccgacccgcgccgcacgccgcgcatcaagttcaaggtgccagaaccccagccccccgaacccatcggcgcaagtcgcaccgtgcaggttaatttgggtgcaccggcagcgccgacgccggcacgcagttatgattcccaggtcattgccgcgttagtggccgctttgacccgcaaacccggtgcggatgacacgcaaacagggattgatgaggcattaacggcactgttaagcggcaataagcctgctgaggggctgattgccatgttgcagccggctatcgctgcgttgtccggggaactggatgagcaaagcctactgggtgcgctggctgatgcgttccctcagctcgatccgaccttactgcaggctaacctcggtgatacgcagaccatcgcgcgcctgattggcctgtatgcccagcaggaggggcagtaa

SEQ ID NO: 435993 - DNA, 774 bp, Serratia marcescens
atgaaaaatgaaaccctgaatattcgccagcagtacgccagcgcagctatgcaggcgctggtaattagcggcctaaataccggagcctgggccgattacgccgatatggccaaatcagcctaccggatagcggatgaaatgctggatgccgaactgttgacgaactgcgttgaaatcaacctacagcagccggcacagcagcattatattcgcacctttagtggtcgccatttctgctacgaaagtattacaccagacatgattcacattaacgatattgcccaggctttatctcatttatgtaggttttgtggtcacttatggcagttttatagtgttgcacaacattcagtcttggtgagtcacctggtgccgccggaattcgctctggaagcattgctgcacgacgccagcgaagcctattgccaggatattccggctccgctcaaggcattactaccggattatcgtgatgtcgaggcgatggttgatagcgccatccgtgacaagttcggcctgcctcgcgagaaaagtgccgaagtcaaacaggcggatttggtcatgctggctaccgaacgtcgtgattttgacattgatgatggcgatcagtgggacattatcaaaggcattgagccgaccgaccaattcattatttctccattatcacctcgcaaggcgagtgatcttttcgtacgccgttatatcgagctgacaagccgccagtggaggccacatgaaaaacatcctgcgcaaaaccagcgccaaagactttaa

SEQ ID NO: 435994 - DNA, 540 bp, Serratia marcescens
atgaacatcccacaaacgagttttatatacaaactcgaggcgcatcaatggacgatgtataaggtaagaatcaaacaatggcatccaatccgagttgctcttttgttcaggttaggcccaaaaatgcccgcgcccaaattggcggcgctgctgcaatgccacgtcagcacgttaagaagaaaggccattaagtacggagtcgaactttatcaatgccacaaaaaatttgatgagtgggaaataaagttcatgcgggataaaaggcaagtaatgtcacaaagggaaatcgctgagtttttggggcgaacggaagataccattcgtgtaactatgcgcagcaatggaatacaaccgggccgtcctttcggtgagcgccacttattttgccgatatgggaaggacgaggtagagctggcacgaaaactatctgacgtagggctaacgtcaaaaatgatagccgaaaaattagaactcaatgacagaacagttcgcagttgggtgaacttcgaaaaaagaaaacattatgagggggcattgtga

SEQ ID NO: 435995 - DNA, 231 bp, Serratia marcescens
atgacactaacgacctttttgtcggtttctggctgccagcaccaggatggtggcgccaagcgtgtttatcaccttaccaataaagccacggtgatcgaatatccgcgtttgcctgtacgttcgcgctttcagttctatgacccgcgcggcaacaaggttcacaccaatggtgagcgtgtcgcgatgaaacaagcagtagagcgccataaaaaactctggaggttccaatga

SEQ ID NO: 435996 - DNA, 927 bp, Serratia marcescens; identical to SEQ ID NO: 423478

SEQ ID NO: 435997 - DNA, 507 bp, Serratia marcescens
atgccgaaagaaaatgaaggtgatgcggctgccgcgagcctcagtaagttgctggaaatgtttaccgccctgacggcgtcggtgaaaggcaaggacgacaaaatcgccgcgctgacggtcgccgctacagccaacaaaggcaacacggttgatccgaccaagtatgtgccgattgcggttgtcaccgacctgacgacccagttagccgcgctgaccgcgcgcgttgatggcggcgatctggacggtttgatcaccgaggctctgtcctccgggaagctgctgccgaccatggaagaatgggcgcgcgagatgggcaagaaagacattgccgctctgcgcagctacatcaaggcggctgcgccgatcgcggcgctgaccactcagcaatccggtggtaaaaagcctgccggtgaaactcatgggttaaccgcaactgagcttgaagttgctgcgttgactggcctcacaccggctgaatacgccgccgccaagaaggaaatgcaataa

SEQ ID NO: 435998 - DNA, 822 bp, Serratia marcescens
atggcgcaagtcgcatcacgcaacctggccggcatggcgatggagggtctcggtagcgtgaccgatagcctcaaggggctgctgggtctcggggccagtacggccggcagtgccgccggcaccgctgttaacgcggccaccgataccgcgaccgatgccgccggtgcgaccacctacgcgacagccatcaccaccgcctccacggcgggggccaccgccatgggcacctcgatcactgccggcagcacggcgctgacgggcggtttcaccacggcgctgacaaccggcatcacggcactcaccacggcgttgacgacggcattcacgaccggtgcggccacactggcctcggccattgcgtctgccagcgccgccggcagcgcgtcctccggcctgggtgcggctgccagtgtggcggccgcgaccggtggccagatcaccggccccggcaccggcacctccgacagcatcgcggctcgcttgtcaaacggcgagtttgtcatgaaaaccgccgctgtccagcgctatggcgtggacttcatgcacgcggttaaccagggccgcctcggcgcgttcgccgatggggggctggtctccgaccccggttttaaccgcgcggccggggtgaatcaatccgttaaccctgatgcaccaggtgcgcaaggtgccggcggcggtacgaccaacctgcagcagtacctggtgctcgatccaaacgagatgctggacagagccgtgaaaagtgcgccaggtaaccgcgtcatgatgacctgggtcaaggccaataccgcgacgctcaaacagttgctggggggtaaatga

SEQ ID NO: 435999 - DNA, 1038 bp, Serratia marcescens
atgctcctggttggccgcataggcggcgctcaggccgccgacagccagcgtcacgccagtgatggccagccccatcgggccacccagcagccccatcaatcccgtccccaggcgaccaaaggtcgatgcagaggcgcgggcaacgcccagcgctttctctgcagcagtctggcgaaccagcgaagcggtcaccaggtcttccgctttggcgcgcgcgcctggtgcggtgatgccggagactttcgcgcgggcggcctgcgcctgcgcggctgccacggcggccttggcttcggcatattccgcctcggcaagctgcagcgtctcgatgcggtcggcacgcgcggccgtggtcgctgcaaccagcgcggcgaccttacggccgcccatcaccaccgccagggcaatggcggcagtggtcaacgtggacatgttgctggccagaccggaaatgacggccgcaatcgccttggacgcgcccagcgcatcgttggtgccgccgacaaactcgacccaggcgttggccatttccgtggcggcgcggccgatggtcagcggcatctgcgcaaattcgcggtcaacgtcgccggcaccgtctttcagcgccttgaagaccacctgcgtggtgagcatcccttgctcagccatcgcgcgcagttcgccacgggttttgcccagggatttctccagcatctccatgatgcgcggcatctgttcggacaccgagttgaattcttccccgcgcaaggtgccggacgccaacccctggctaagctggatgatggcgttcgtggactcttcggccgtcgcaccggagacgatcgcggccttgttgatggtgctcgtcacctgcagcagttcggtctgggttgcgctgcctttaagcgatcgagccatacgtgtataaagttcagcggtcgaggcgatgcgttgaccggtttcatttgccacaccgataaccgatttaaaggtcgtggccgcctgttcgttggatgtggagaccaggcgaatgcgcgccgccaggttggtgtattcatctga

SEQ ID NO: 436000 - DNA, 690 bp, Serratia marcescens
gtgctcgtaggcgttgttgttctcaaagccgatggccaggcacctgaattgtcgctgcatcgctatcaggtcggcttccagtttggacggcacgcgccgcttgatctccgcctccatcacatgcaggcggctgcgctgcttgtcccagccgccaacaagaattgccgaggggtcgctggtctcaccttggcccatagaggggtcacaggcaccgaaaatcagccagtcgcgccagcgctgggtaaagaactggatattgataaacgtccggtcttcgtccgtgcgcgggtcgccctgcatttcggtggcaaatgccttgccgttcttggcgcgctggcgcatcaaccaatagagggtacgcaccgccggccagctcgtgaccgcgccatcatccatctgtacctggtgcgccaggtagaacttgtaagacggcagcttgtcctggggaagatcaagccccagctcggccgcctgttcctcggcgcgcttgtcgtcgttgagcatcttctcctggcactgttcccacaaatccatgtgcgtgggcagcgtcacgatggcgcggaagtggtgaaccacatggccaatggtgcgcttggcgcggctgatagggtcatctttattaagcacagtaccgacacccaggtattttaccgagccgtccggcggccccaggtactcgatcgcttttga

SEQ ID NO: 436001 - DNA, 501 bp, Serratia marcescens
atggatctaacgtcttttatgtctctttacgagtctgtcaaagcagttaaagacgtcgttaaagccgcttctgacctcaaaaccgacgtcgccattaacgaaaaagcgacggaaatctacagttacctcaacgacgttcaagaaaaactaatggcgctgcaggtagaacacatgtcgatgtcgcgcctcaaagacgatctcgaacgtcaggttatagagctgacgcaatggaatgaggacaaatcccgctatgcgcttaccaaactgtcttccggagcattcgtgtatcagctcaagacggcggataagggcgatgagccggtgcatcagctttgtgccaactgctatcagcagcagatcaaatcgattcttcaatttcatgggtatcataaattccattcaatcctgcattgcccgcgctgctcatcggaatatctgaatgagcgacaggaaatgagcagtcatgttgttagcgactatgacccttacgatgaagactaa

SEQ ID NO: 436002 - DNA, 207 bp, Serratia marcescens
atgatccgcctggcaagcgaccattacgttgcttacaacgtcattagcgatatgcatgtagacactaatcgccaggtcaaagtgctgttaagtgacggtcgcatagccctggctgaacagaggcatagccagaccgcgtgggcgcgtctggcgcagttggttgacgaagttaatctggctcattgtgagagtcacgatgaggattag

SEQ ID NO: 436003 - DNA, 333 bp, Serratia marcescens
atgctcgccggaggtggcctggaagaactgaccctggccatgttcaccggcctggtggtgcagttcaaaaccaccattgacaagctggcctatgacgatgtggacattaagcccgaagaccgcgtgaagcttctggccagcctgtcggatgcgttcaacaaagctgtggccagcagtaagcgggccatgccggaagtgtcccgccttgccatcgcgctggaagtgatccagctgctggccgcgtacatcaaagacaaccacccccagcagttgcagccgttcggcgacctgctggaggggttcggcaaagagatagagaggatttatggctag

SEQ ID NO: 436004 - DNA, 366 bp, Serratia marcescens
atgaacgatgacaacccggtttgtccgatggcgtatgtgatgtacctgggcgataccgtcaacacttcgacggccgccaccggtggcagccagcgccgtctgcagttcgtgacgcagctctgggctgtggtggtctgcgtgtatttcgccgacggtcgcggcctcggcgcagatatcagcagcgaagccggcccgctgatgttgaaaaccgtcaaggccttggccggttggtcaccgctcgaaggggttgcccggacgctggccaggagcaatcagagcctgccggcacagtacgagtccggctatggctattaccctctggtgtttcaggtggacgttcccgccgctattggaggctatcaatga

SEQ ID NO: 436005 - DNA, 198 bp, Serratia marcescens; identical to SEQ ID NO: 423474

SEQ ID NO: 436006 - DNA, 516 bp, Serratia marcescens
atgctctggccacatggcgtgctgttccgtgattctgagcaggccattcgtaaacaggtgattgaatctgacattattgaagcggtgattggtttggggccgaacctgttttataactcaccgatggaatcgtgcgtggttgttcttaactgcaataaaccagctgaacgcaagaacaaggtgttgtttatcaacggggttgagcatgtcacccgtgaacgtgcccatagtcgtttatcctgtgagaatttaactgtgttatgtgaagcttactttacacctgaaaaacaaagcaatatcactgcgttggttgatatcgacgttattaaagagaatctctataacctgtcaattccactgtatgtgcaagcacaaagtaacggtgaaacacataatattgaacatgcaattgaggcgtggaaagtaagtcgcactcagctaaaaaaacaaactaataaattattccaaagccttgcagaacttgggtataacgttgaaagcaaggtggggcagtaa

SEQ ID NO: 436007 - DNA, 297 bp, Serratia marcescens
gtgagcatcaccgtcaatctgccggccggctctccagacggctggttttccggtggctatctggagtggctggcggatggcgtgacagagcggcgcgggttgcgcgcgcagagtggcaacgtgctgggcctgttcggcggctctgctgggctaagcgttggccaggtggtggcggtttttccaggatgcgatcgcactatcgcgacctgtaacgacaagtttaacaacgttctgaactacggcggccagcctcacatgccgggcaaatcgccgtatcagatcatcaaacttttttga

SEQ ID NO: 436008 - DNA, 246 bp, Serratia marcescens
atggatccggctagttggatggcggttgccaagttcgtcggggtcattgttgcgtcctatgtgctgaatacggcgttggcaccgaggcaaaagaacaacgccccggaagcggcgacagaggatgactggaatctgcctcagccgaccgaaggcacgccgcaatgcatcttctttggcgattgctggagcgaggactggtttgttcttgcctatggcaattaccgctatgaagccattaagaaataa

SEQ ID NO: 436009 - DNA, 249 bp, Serratia marcescens; identical to SEQ ID NO: 423487

SEQ ID NO: 436010 - DNA, 228 bp, Serratia marcescens; identical to SEQ ID NO: 423486

SEQ ID NO: 436011 - DNA, 351 bp, Serratia marcescens
gtgtcgccggcagcgttcggcgtcggcggcctggttatcagcgcgctcgatggggtgagtatcaccgtcaatctgccggccggctcgcctgacggttggttttctggtggctatctggaatggctggcggatggcgtgatcgagcggcgcgggttacgcgcgcagagtggcaacgtgctggggttgtttggcggctcggctgggctggccgttggccaggtggtggcggtttttcctgggtgcgatcgcaccataacgacctgtaacgataagtttaacaacgtcctgaactacggcggccagcctcacatgccgggcaagtcgccgtatcagatcatcaaactgttttga

SEQ ID NO: 436012 - DNA, 435 bp, Serratia marcescens
atggggcgtttgcgcggcagtcatgatcctaaatttgttgcattgggcgagcgcctggaaaaacttcgtcaggattatgaagctggtgttatcaaggctatcgactggttgaaaggcctattggatgctgcgaaagatacagtacaagccgaacgcgaaacgggtgagcacccagtaactgaagctgataataaacaggcgttgaccaagcttttcctagaaacacgcccggaaactacccctaagttaatcggtgatgttgtagagcaaattgataaaatcgtgaaagctacccgctttgatggctggcaaaattccaacagtggcccgcgcgaaatccaaaaggcgcttttgctgaccttggcccagtttggactggggaaagataaagagttgttccggaaggcgtatgggtacattgaggagcattattaa

SEQ ID NO: 436013 - DNA, 183 bp, Serratia marcescens
atggccgaggccagtgtggccgcgccggtcgtgaatgccgtcgtcaacgccgtggtgagtgccgtgatgccggtggtcagcgccgtggtgaaaccgcccgtcagcgccgtgctgccggcagtgattgaggtgcccatggcggtggcccccgccgtggaggcggtggtgatggccgtcgcgtag

SEQ ID NO: 436014 - DNA, 591 bp, Serratia marcescens
atgggttcatgtgcagctccatcagcaaaaggggatgataagtttatcaccaccgactatttgcaacagtgcctctatgaggatcacgcttccggtactcggaatgatcggccgggcctggcggcctgcttgaagtccttgcgcgaaggtgatgttttggtggtctggaagcttgatcgtctcgggcgatcgcttgctcatctggtcaatactgtgaaagacctgtctgatcgcaatatcggtttgcgggtactgaccggaaaaggcgcccagatcgacactacgaccgcatccggtcgcatggtgtttggtatatttgccactttagcagagttcgagcgagaccttattcgtgagcgaacagtagcaggtcttgccgccgcaagagcgcgcggccggaaaggagggcgaagattcgctcttacaaaagcgcaggttcgtcttgctcaagccgccatgacacagcgcgacacctctgtttccgacttatgcgcagagctgggaataaaacgcgttaccttatatcgatatgtgggaccgagtggggagctccgggactacgggaaacgcgttcttggcctggttccgtag

SEQ ID NO: 436015 - DNA, 402 bp, Serratia marcescens; identical to SEQ ID NO: 223637

SEQ ID NO: 436016 - DNA, 336 bp, Serratia marcescens
atgaacactgcatcctgtttaccgattgaagtccgtaccgccgttttccgccgcgccgtggcgcaagcctatctggacacctgcgccttttaccgggtgagcctggggtacacgctggacgagctgcagatgacgattgccctgcgtctggaagggcattttgtgcgtcagtacggtgcggaggatggcatggacatggcgtgcacgatgttgagcgacatggtgcagccggacgttctggtggccgcaccgcgcctgaccgcgctggggcaaaagatgatggacgagctgtgctgcgagcgcctctcggcggcacagcacgctaccgtacactga

SEQ ID NO: 436017 - DNA, 213 bp, Serratia marcescens
atgaagaactacattaataattttcccgagagtagcctgtccttgataagtagcaacagcttggcgaatatcttctgcagtcttggctttttcttcttcctcgtgggtaatcagggcaataacttcaccggctgcactttcagccatgccaccaccaatcaactttttccggatttcctttttcaggctgtcaaaagaaaagagtctttctag

SEQ ID NO: 436018 - DNA, 360 bp, Serratia marcescens
gtgcgggtgctcggcgacggcaccgatctgaaccagaccggttccttctatctggcggcgcgcccctatgtcgaagccaatggcgcctttatcagccaggtcctgacggtgctaacccaggccgatgcactcacccgcagcgaccgggcgcaaagcgtgaccctgctggccaacgccatggggctgccggaaccggtgatcgccagctatctggatcaccgccccccgaccgccatcacaccgctagatgcgcatacgatcgccgcgcagcagcaaaccgccgacctgttttacgccaaccggttggtgccggtgaaggtcgacatctcgcaacgcatctggcgcccaagcgcgcaataa

SEQ ID NO: 436019 - DNA, 1230 bp, Serratia marcescens
gtgaaaaaaacaccgatccatttagattcactaatttatgacgatggcgattcattagtgaatcctccagacaataaatatgagctttcgtctaccttcgggaaggtaattcaaaaagccacctacattgatttaattgtaggggccgtattggttatccttttctgttcgattatcatcagtttaactggggggcttcaacatgcagatagttacgttgatacactttacttctgctttgtgacctttacaacccttggctatggtgacattgcccctgtcggtttctctcgttttatttctgtgatacttacattgtgtggattgctcttcactacattattaatagggaagtttgcttcggagcggcatcaagccatgcttcttttagttcacacgagtgactgtcagagacgtattgatgctttctgctcagagctttacaatctcaacactgaactcctcgatgcattttctgcacgggacaccctgcgaacgcaaaaggtattaaaggaattaatttcacggtttgaagcaacttctaactatattgtttttcatgctaatcaatctgaattgactgggtttggtaatgattctgtactaatgaaattttatcatgtactcagtcaaattcagggtggctgctatgaaatccaaacgcagaaacagtcttatcctaatgagctgatatttaatcgcagctttgcacttgcgaagcgtacctgctcattaataagcatcatgtataaattacatgtgagatctatgaagaattatggttacaccgatacattacttataaaaattaaaaaccacctggccttagaaaattctaaatgtaaaacaccaacccattcagcttcttgttataattcttttagattgtttatctacaaacaccttgtgcgcttcacggaaaaaaaagaatatcatgaaaatgatagtctgttagttgggataagaaaattaagagcagagatgcaggaacgattacgacaaattattatgtcacataaaatcataattaattcgaaattactcaatgaggtttatgatcttatgcctgaggggaataaagaaaactgggggaaaggcatccataaaagcattgccattaaactagaaatttcaaatagactcgcccaaacagcgatagatatcttaatcgcacagaagaaattacctcgttatccacggaaaggttctagatcaattcgtggcacctga

SEQ ID NO: 436020 - DNA, 225 bp, Serratia marcescens; identical to SEQ ID NO: 435756

SEQ ID NO: 436021 - DNA, 1446 bp, Serratia marcescens
atgtcagaaaacgaaaaaacacctaaggtatttatttcatactgttggagtggacaagaacgacaggataagattgttgaactcactgaaagactagcaaccgacggagtggagtcaattgtagacatatatgatcttaaagaaggggacgataaatatcacttcatggaaaaaatggtagtagatgatactgttagtcatgtattgattatctgcgataaaggatatgcgcttaaggccgatgagcgtaaagcaggagttggcactgagtcgctaatcatttctcaagagatttactctaaggcatcacagtctaaattcatacctattatttacgagtttaatgaagcaggggaagctttcactcctgtatttctgaaaagcagaatatatatagacttctcttccgccgaaaaagaaaacagtaactgggaaaggttaattcgactattgtatggagaaccagagctaattaaaccatcattaggaaaaaaaccttcatatcttgagaacaaagagacagtaaacacatatggtctcgagtcgaaatttaactcactaaaagacgccattgtttctaataaaaaaacagtcaactatcttcgagatgatttcttcaccacgtgtttcgattttatcgactcgcttagaataagaagcgaaccaactgataatgactttcctcagcgagttatagatgacttcaaaaaattaacaatagcgagagatgcactaactgattggtgtcttttagaatcaagtctagaacaaattaacttaatggatcacataaccttagtagttgaaaagctactcaatttaagttcaagacctcagggtgttaattcttaccaagaatgctggttctatgctcacaaagcatttgcatatgaatctttactttatataattgcttcattaattaagaacaaatcattccaagtcacgaatgatttaatcacttctcattataaactccccgacacatcatcttatagcaatatacaattttgcggaattgaagagttttactaccattcagacttcttacaagataaactatctcctccagggcaaagattgaattcagcattggcagagttgtttaaaataaacgcaaacagaacagatattccttttgacgacattatgcaatcagatttgattgttcaaatgtttagtctaatgaatcctacgcgacactggttccctcaaacgctttattatgcaccatactcccatcgttttcctttctttataagagctgcgacccataaaggatttcaaaatttgcttaccttaaccggtatgacggagaaagatgaacttaaaagctgcattatggcaggtataagtacccgagggcctcgaggttggagtgaaggattgagaggttcttcatatgaaagtttacttaatattgagaattgggatactttaaaataa

SEQ ID NO: 436022 - DNA, 882 bp, Serratia marcescens
atgttcgaagatttgataaaaacagttaaatctcaattatatgatagaattaccagccctctattaggctgcttcttaatatcatggtttatttggaactatagatttatatttactttattctcaaacttgaaaatagcagaaaaattcaagtacatagatagcgtaatctataagggaacaggtgattactttatatatttcttagcactccctctactcacaaccgtgttttttatctttatttacccataccctgccaaatttacttatgagttttttagaaagaggcaagttgaattaaaagaaatacagcagagattagacaatgaaactccccttacaaaagaggaggcaaagaaaatacgttctgatgcaataaaaatgagcatcgattttgaacaagagatagaaaaacttagagaggagaacttatcactgcgtaaattactgaaagagtcaaacgaaagcaatagcaacgtgaacaacgaagatatgaacagtaggaccattaaaaaacacagtagcgacattaaattagattctgagcatattgattatgaaccattctttagtaaggatagtaacgtaccaggcaactctcgattattattaaccggcccagagcacattaaggcctcgattgagaaccatatatcgagtgataagttatttaatggacatagtttcatggtaagtattgacagtcaaaacgtcctaatatcactacttttccgaaatgggaaaacaaaaacatttaagtatgattatcacatacctgaaaatgggaaaataggctacgaatcaatgagaatcattaattcatttgatgaggattttttaaaattcactaagaaaaatgaaacaaccttaaacaaatga

SEQ ID NO: 436023 - DNA, 2511 bp, Serratia marcescens
atggttgattttggaaagctacgtactcaggcaaagaaagcagtgccaattgaacctggcgaaatatttcgccgactgcctaaacctgaaggtttcaatgatatttataccagccaggagcaggtcttagagaattggtttggtcgaagaaatgaagctgatgttgtgataaagctccatacaggtggagggaaaacgcttgttggtcttctgatggcgcaatctacgcttaatgaaactaaagaacctgtcctttatcttgcgccaacacgacagctggttaagcaaaccttagagaaagctaaggcgcatggaattgcagcagtaccttacgagaaaggtaaaccgcttgctgaagatttcatcaatggcaaagctgttatggtggcaacctacaaagcgcttttcaacgggcaaagtaaattcggggttcgtggaggcgctagacccccggtaaaagtcggcgctgttatccttgatgatgcgcatgttgccttttctgttgtgcgcgagtctttcaccttagcggtagatgcagataataattctgagtgttatgaagaactgaccagcttattcagaaaggcttttcgggatagtgatcggatcggaacattcgacgatatcgtccaaggctcaagtggcggcgttatagaagtgccatattgggcatggcatgagcagattgacacggtaagggagtatctgcgggcagatgcggataattacgctttcgtttggcctcttctcagagacaatctacatttgtgccatgctttgatcagccgtaatgctttcactattactcccgtgcttcctttggtcaacgagttccctacgttttctgactcacctcgtcgaatatacatgtcggctacaattgcggatgacagcgaaattgtccgaaccttcgatgcagatccacgtttcgtgggcaacgcactaacatcgcgctcacttgctggtattagtgagcgaatgatacttattccagatcttatgccattttcattcgagacgattgaagctgtgagcaccttactcgaatggacggctgagaaaaggaatttgggagccgtgatactcgttcagtctaataacgctgcaaagcgttgggagaaggttgcaacgttcgctacaaaatcagaagatgtcgaccatttggtcagacaacttcaggatcgagagactaatggacctgttgtgctagctaaccggtatgatggtatcgatctccctggcgactcttgtcggttactggttatcgaaggattaccggctgggactactgactatgagctcatgcgtgcagcgacactctatggtggagcatcaatcagccgcatgttggcacaacggattgaacagggaataggccgtggagcccgtggttctggcgatcactgtgtggttattttagctggcgcggatcttgccggatggattgcaaaagatgcaaacttccagttgttgaccagcgctacacgagctcagttagatataggctctacagtcagcaaagaggtgaaggacaccaaggagctggcgaggacaattgctaccagctttgatcggaatccggactggatcgagtatcacgcagaaacactagcggagagtttggatcaggaacaagcagatccgaatcgtttcgaaattgctgctgcagagcggaaggcatttaacctgtgggttgatggatatcatgacaaggctattactaaactagacagcagcatcaattctgtgaaatcacttgattcacagactcgcggctggttgcttcaactggcagggcgtatagcgaaccattgggggcaaacagaacgtggtgatgaactgcaacaaaacgcttatggaaataaccgaaacctcttacgtccccgagttgttcctccataccgtccgttggccactccgagcgcccaggcgtccttaattgctcaacaatttcagggctaccgaatccgtcgaggtttaatcaaccgatttgagaatgtggtctcacagttacatcaaaattccacagcaaatcagtttgagcaggcgttggtggaacttgcacaaatgcttgggttgaccgccgaacgattcgatgatggaggaaaggggccagatgtactctggttgcttcctcagaaagtaggatttatcattgaggctaagagcaggaagctaaaaaagaactctctgacgaaagaaaaccacgggcaacttcttgttgctgagcaatggttcaatcaaaattatccagcttatgaggctgttcgtatttcggttcatcctacgaataaagcaaccaagtcagcttcggcaactgatacctacgcattaacgttcgaaaagctcgcagcattgataagtgataccagagcgttgctcataaagttgtgtgagtcacaactggacgatgttgagcttgctgcagagtgtgcccgcgagcttaaaatatcgcctgttcgggctgataagttggtacaaaactatctctcaaggttcgttgaagaataa

SEQ ID NO: 436024 - DNA, 963 bp, Serratia marcescens
atgtcggacactccacacgtacacctgccgaaagacagtaatagtaaacgcctactgaccgcttttttagtcaccgcggtctttatggtggccgaggtggtcggcggcctgttgtccggctcgctggcgctgttagccgatgccgggcacatgctgaccgatgccgccgcgctgttggtggcgctgatggcggtgcacttttcccagcgcaagcccaacgcgcgccacaccttcggctatctgcgcctgaccaccctggcggccttcctcaacgccgcggcgctgctggtgatcgtggtattcatcctgtgggaggcgatacggcgtttcttcgaaccacagccggtgatgggtactccgatgctgatcatagccatagcggggctgctggcgaacctgttcgccttctggctgctgcatcgcggcagcgaagagaaaaatatcaacgtgagggcggccgcgctgcatgtgttgggcgacctgctcggctcggtgggcgccatcgtcgccgccatcgtcattctcgccaccggctggacgccgattgacccgatcctgtcggtgctggtctcctgtctggtgctgcgcagcgcctggcggctgctgaaggagagcttccacgagctgctggaaggcacgccgcaggaggtcgacatcgccaagctgcaaaaagacctgtgcctgaatatcccggaagtgcgcaacatccaccacgtacacgtctggcagattggcgaccagaagctgatgacgctgcatgcgcaggtgatcccgccgcatgaccacgatgggctgttgcaacgcattcaggcttatctgttggaacactacaaaattggccacgtgaccattcagatggaataccagcactgcgagacgccggactgcggtatcaaccgggcgccggagccgagtgaacactcacatgccgaagcgcattcccatctgggacatcgccactaa

SEQ ID NO: 436025 - DNA, 1179 bp, Serratia marcescens
atggacgtcatccgcacgcagggggatatcgccgggctgaaggcacagaaagacccggcggcgctggcgcaggccagggagcaactggagaagagcggcaaaccgacgaacgatgcggcggtgatgcagcaggcatacgacaacgcgatgcggcaatacggcactggcagcgacctgcagaaggcggcgctgacggcgctggcgggcaataacctggcgggggcgctggcaagcggcgcctcaccgtacctggcgacggaaatcaagaaactgaccaccaattcgctgaccggtgaagtagacgttgccgccaatgcgatggcgcacgcggtgctgggggcggtgacggcgcagctgaacaaccagtcggccgcagcagggggactgggcgcgggcggcggtgaactggcggcgagggttattgcggacaaactgttccatgccgatacgccagagaagatagcgcaactgagcgaaagcgagaaacagcaggttagcgcactaagccaattggcctcaggacttgccggtggcttggtgaagggcgatactgcgggagcggtaatcggaggtcaggccgggaagaatgcggtggagaataacgcgctgagtgatcttgttgacgctgtatctcagggtaagacacctcagcaggtagccgaagaacgtgtcgacgcagagaacgaacgttataagcagcaaaactgtgccggaatgagcgcggaagcgtgctcggtgaagatgtatactgagcgccgggaagaactgaaagatatcctgtcgacaggtgcagattttgtgccggtggttggggatatcaagagctttgcggaagcgcagagtgcgctggattacttggtagcggcgatagggattataccgggtgcgggtgatgccgcgggcaaagcgatcaaggcggcagagacagcgctgaagaaaggggatgttgctgaagcgtccaggctgattaacaaggccagtgatgaagtatctgccactctcccaatgggaagtaagcgcaatccgatgaatcagccaagtaacccatcttatcaacctgtaaggaatcagccgggtacgatcagaaatcgagaatattcagggcacgccttagacagaatgcaggatcgaggaataacgccttctgttgttgagaataccattaaaaatggaaaatag

SEQ ID NO: 436026 - DNA, 276 bp, Serratia marcescens
atgtcattcagcattaccagagaacttaccgttgccaagtcataccctgagcttgtgatgcaggttgataatgggacggaggacgttgaggtgacttacgatgttacttcactggagagcctgcttggaagcgacggtgtcattaactataccgtgtccattgccggtgttgcctctccctgggttcgccagttcgacttcaagtattcaggtgctggaaatccgctcactgagggtgaggtggcgctcaaagcagctcttggatataaagcctga

SEQ ID NO: 436027 - DNA, 1842 bp, Serratia marcescens
atgtttcatttagacaacaccagcggcgttcctgagatgccggaaccgaaagagccattgagtaacactccacgctggtttggcgagagcgtacagcaaggcggtgtgagttggcctggcgctgactggtttaatattgtgcaagcggaattgctcaacacgttaaaaaatgcaggcattccgtctgaaaaagggaacatggagcagctcagctctgccatggaaattctgggggggcgggctttacgccaggaaatctacaaagccatatttgagtcacccgtcagtggtgaggatgattcatttgatgatggctcttttgggcagtatgttgtcgccaactttaagactgtccaatatatacagcattactacgacattattggggactgggatgccgcgatttatcaggcgcaactcaatgtctatctgaaagggtattcgcctgttttgaccctccctaatattgttatccgtctgaaaaaaccgattcttggcagcgtcgcactgggtgaccgcattcatcaggatcaccctgagctgaatttttacgatgcgtctaccgggagatacaaagcgacatggcctttaatcattcgtggtgttttcaggaagcagcaagatggtggcattgataccttcaatggcacgcagatagtattttcaggtgcttacgatacatcagacaggacgtggatgaattacggcattatccactgcgcccccactgaagtagatcaaattcgacagacggcgcccatccttaaaaaatggccaggttatgccgacttacgtgattttaatattcgcggcattaataaagatgagtcgcgattcccactggttcacggggttgtgatccacaatggcacacagtgttatctgcaaaacgtgaccgcctacaatctctacggtgccggtattctctttgactggacatgggactcactggttgataactgcaaggttattcagtgtggccgaatgagtccagcctttggtcaatacctgatggatggaaatctatcggccgaatatcagacctatgctccgttgcacgtattgcgttcaaaaaacacggataatagtaactttattcgtttcaagaatatgcatgttgaggattgttatcacggcacggcagacatgatagtcagcggtaactcatccccggtatggctcgaagatagccattttgaaacggatactgccgctggcgtcgcagcctcatctaaaaaattacgcgttgcactgggtaactacggtgtgacctattttggacaggactcggaagcctctttcgattataccaatcgccccgatacgaagactggggggtacctcatctggcgtggtggggcgacatatgttgatggttatgaggatttactgcacgaaacgcgttactcaggagccattatcgaagggttgagggtgccaaacacaggcggcattaaggtgtttggggggaactcagacccttatgtgatattgcaaaactgcacggtgggtgacatcgcgctgacgggcggtaatggtcacgcgaatcctttaatcatggacaattgcgattgcggggatatcacaacggattatgtgaaggcgttacgactttccaatgtccgaggccgcaaccttcgcagcacaaataatttcagtgatgaatcatgccctaccatttttgatggttgtacatttgcaacaatgtcaggtgtttacaattacgcgatgggcaaagtccatctgacgtccaaaaccgtgccttcttcattgctggtaaaaaagggccatgtggaaatcgcctcttatgcctggtttagggcgaatgtgctaggagaataa

SEQ ID NO: 436028 - DNA, 876 bp, Serratia marcescens
atgtcatttacttattcttcatcgccgcaggcactgtggctgtatcaatatgacaccgacggcgcttttatcggctccgtatttatgactattccggccaatctggggttgcctgccaacacgactgccattccctgtgagtgtaatatgggtgagaccggcatatttactggtgagtcctgggattacgttgcggacagtcgcggaacgcaatattggaatgaacgcggccagggctttgttatttccagcctgcaagagttattaccggagtgggctatatcccttgagccacccgcagcgataaccggctgcgttttattattcaacaatggccaatggcagcaagttgaagataaaaccggccaagcgttttacgagagcaatggcaacaagcacatggtgccagacgcctactacaccttgccagagggctgcaccttcattgccccgccagacgccaaaccaacattcgtcacccagtggaacggcaccgaatgggtttatgtgaaagacctgcgcggccagctcgcctacagcacggaaaccaaagagccgatttccctcactgagattgggccactgcctgacggctatacgctgttggttcctggcaggtttgatgtgtgggacagcaaagcatgggcaaaggatgacgtcgccgaacgcgcgttctatgccgaccaggccgaacggcagaaagccaagcgactggccgccgccactgaacagatcgcggtactgacctatgccatcgaaaaagggatggccactgacagtgagacagccaaactggcacagtgggaggaataccgcctggagctgaaccgcgtggataccacagcgactgacatcatctggccagaaaagccgtaa

SEQ ID NO: 436029 - DNA, 756 bp, Serratia marcescens
atgtatcacttggataatgcttccagcgttcccgatatgccgccggttaaatctgtgctctttagcgagcgccgattttttaccgaaggcggtgacggtgttacgccaagttatccaggcgcagactggttcaatattattcagatggaaatgctgaacgttttagcactggcgaatatcacgccagataaatcacagttcgaccagttcgccagggccattcgtgttttctcgtcagattatatgttgccgccgggcattccgttggcctggccgggtgcgattgcccccacgggctttacattgatgttgggtcagagctttaacaaggcggcatatccacgcttggcgcaagcctatccaggcggtgttatcccggacatgcgggggatgcacatcaaattcttgcctgcgtccgggcgcaccttgctgtcttatgaatctgacggcattaaatcacatggccacggcatcaccatcaacagcactgacctgggtaccaaacagaccagtgacgataatgagcatttccaccagggcggaatggctggccccggtgcgtcctgggaccccgattttattattggctccgataatgactcacatcgaacgcgcaacaataccagcacggcccccgcacatcaccacaccctctacatcgggccacacgcgcacaccgcatcggttgccgctaccggcaatacagaaaacactgtcaaaaacatcgcctttaacgccatcgtgaggttagcgtaa

SEQ ID NO: 436030 - DNA, 585 bp, Serratia marcescens
atggcgcatagcctagacgagtggcacgatgtacttcagcaactcatgccgcgcggcaaagcctggccacgcgaccagacagccgcgttaacttcccttttacggggcttcagcgggcgtttaaacgcagtggaaacccatgctgacttgctgattaaggagatgcgcccggagaccaccgagctattactggaagaatgggaagactatttggggttgccggattgcaatgccattcctgatggttttgagcgccgccgcgccgccgtggtggagaaataccaccgcaagggaggactggccccctggcaaatagaacaagcggttaaagatgcattgggattcaccatcgaggttacagaaatattaccgcaccatgtgatgcgaaatatcatgtatccgatttattcccataaataccgtttcattatgcaggtgaccgtcaccgatatgccgatgatccggtttaaaagtatcagcaacgtcctgacgccattaatcagttaccaggctcaaatcctggaatgtttcctgcgtcgttaccgcctggcgggtcacgattatgattttttatacgaggtgtaa

SEQ ID NO: 436031 - DNA, 1074 bp, Serratia marcescens
atgccctttaatgtaccgacaacgcgccagattattcgcaccggcattcaagacttggaggttgaattaaatcaacaagtgccgattgttggtgttgagcgggcgttaaatatcgcctttagcggtgcgctgcgcgatgtatacgattatcagacctggatagtgaatcaaattatcccgtctgataaatccgatgacgacaccattattgataccgcccgcaatgagggtgttattcgtaaagcggcgcaatacgcggcaggccccatgatattcaccggcagcaaccccttgccggtggacacggaaatgcagacgcaggacggcgtgcgctaccacgtcaccgccacagattctccttccgctggcaaagtgcgtgtcactgtccaggcggatgacgttggcaccagtggcaacctaaagagtggcgaagtcgcaacgctgatttccccgattccaggggttaacagcgacggtgtggttgccgaggagggtgtatccggcggtgccgatatcgagaccatcagtgaactgctgacccgcctgttgtaccgcaaacgcaacccgcctgtcggcggtgccctgcatgattttgttatctgggccactgagacagcgggcgtgagccgtgcctgggcattcgatagctggcacggcattggcacggtgggcctggcatgggtgtatgaccagcgggccgatatcatcccgacagagaccgacagaacggtgatgcaagcctatctgtttcgccatcaagatccggctaccagtacctgggtagggaaaccggggggtgtggaggtgtggcccattccactcaccctcaagccgctggatatgatggtgcgcgtagtaccggacacggcggcaacacgccgcgcagtgatgatcagcctgaatgcactgttccgttcgctgtcgccaggtgaaacattgttgttatcgtcgattcgtactgccatcggctcagccaccggcgtgtcggactatgagctggatctaacgaccagccaacccagcgagaactacgagctgatcactctgggggcggtcaaatggcgcatagcctag

SEQ ID NO: 436032 - DNA, 1878 bp, Serratia marcescens
atggcaaagcgccttgataccgaaatcatcatcaacctggcgggcaacctgacggctaaggcccgccagtacggtgccaacatgtcagagttcgcccaacgaaatcagcgcgccatgtctgtcgtcaaagctacgagcgaggcggctgggcgtgggcttgaccggttgggaaaccgctatacggcggctattgccgggtttgctgggggcgcgatgctgcgtgagtttactcagattgatcgccgtatgacgatgatggggattgccgcagaaaaaacccgcgcagagatggccgcaatgctgagcgggatgcaggatgcgtcaatcaaattcagggtggatgacagtgaggtggtgagtgcggttgaaaaggttggcacagtcacgggtgatatcgactttgggtataagaaccgtaacgcaatttcggcctccatcgcaggttctggcggttcgggcgaatccattgggggactgtttgctaactttaccaagttccagatacagaatgagcgtgaagccatacaggcaatggatacgctgaatcgcctgggtaaggaaggcgcttttgaactgaaggatattgccgaaaaaggggttagagccttctcgatgtacgcggccgccggtggtcgaggagtttctggggtaaaagatgtaggcgtagtgttggagtcagccattgatgctactggtgacagggataccgccgccacagcgactgaaaacctcatccgtgacctgcaaaacccaaaggtcgccaaggcgttaaaaacaaacggaatcgatgtattcggcaaagatggacgaatgcgcgagttaccgacgctgctaagcgaagtggccaaaaagtcaggtagcaaaggggctgaaaaacaaagtgcccgcttgttgggagcaggttttaaccaggacagtattctactcataagcagcgtcacatcgggtaaaggtgccgagaacctcaagcgttaccaggctgttgtgggcgacgggaaaggtatcatggatgatgcagcttatgcggccaaagattttacctcagcaatgcaaagcctcaataacgtctggaacaagttctctaccaaccaactggctaagcctgtgcaagagctggctgatgcgcttaactctgttgaccaagacacagtccagaattggttagagataggcaagaacgtagccatcgccactgggggcctgctggtagcccgcaaagccttccagattggcaaaggtgcctatgactttttgcgccctggcaaaaaaggtgttcccaaggatgttacagatgttttcggctcaggtgtaatgccggtttacgtcgtcaatatgggcgctagcggtatagggggcgcttctcaaggttcagctaagggcaagggtatgccaggcggggttggtggtgcagcagcggcagaagctgcgctaggtggtgcgggtttctgggggctggctttgcgtgcgactacgggtgctggcatggtctatatgcagaacgaggcggctcaatgggcagctaaaaccctctacgacaccagtggcgtcggcgaatgggccaagggttcatcgtttcgcaactgggtcgatacatcagtggacaagtcgcagttgccggaacaaacccctgtcggtagcattttgcaggaaataaaggactggatggcctctgctccgacctatcaagacccatccccctgggcatcgttacaacctcagaatccaatgggtaacttcctagcggtaccgcctcagctccagggcaagattgaggtgtccgttaaggatgaccgggtgcaggtgaccagcgtcaaaattaatacgccgggcgtgacgatgagcgcgcaaaccggcttgcgtaacctggagcaggactga

SEQ ID NO: 436033 - DNA, 381 bp, Serratia marcescens
atggccaagatgacagtgacattgattcacggcctggtcaccggcaaaggctcaccggatgaaaccacccatatggacgtggaactgcgcgagttgaccacccaggatgtggtggagtctcagttggcctctgagcggatagttctggcggatggtaaggctgtggcctattgctccgaagtcatgatggggctggagatgttgcgtcgccagattgcctccatcggtagcatccccggcccgttaagcctgaagcagatttaccaacttcacccggctgatctgaagcatttgacggaaaaaacagaagctatggacgggttgttgacggaggtggcagaacgggggcgaactgatgccgctggcgacggcgctcaataa

SEQ ID NO: 436034 - DNA, 258 bp, Serratia marcescens
atgaagaccaagaatcttaagcccaaaggtgacgtgcacgtgcgcaagccagacggcacttacctggccgccgagggggaaagcctgttgctgtccgcctactggttgcgccgcattgccgaaggtgacgtggtggttagtgacatcaccatcccacaagctgaggccgatgttgccttgagcaacgtcgcttcccagaagaccgaggcggcacctgtagaaccagccgcgccaaaatccaccaagacggagaagtaa

SEQ ID NO: 436035 - DNA, 534 bp, Serratia marcescens
gtgagtgggaagccaatcaagaaaaagtcggagcaagtcggtcaggcagctccagcagaagttaacgcgcctgaagcgccggttattactccgactgttacaggacactatcagcccgttacccagtccagtgcgccaccgcaaccggattcggcagcacctgagctaaccggcagcgataccatcgtgaccctgagcgtttccgggtcgcaaatggataccgagcaggtcaatcaagaccaggtcacgctgactgccgttctggcacaggaatatgcggacaaacctgctggcgttgaagtgttgttggttcaggcaatatcactcaacggtttttaccgtgccgggcagttctggccacacgaaggcgttcatgcattcgtcagttatgacgcggacagtgataccgccgagaacgaggccaacatggttgcgccattcatcagcatagcgacagccgagcgactgaaagctgagcctaacctccgggtcacggtcgtagaaaccgtcgtcactgacgccgagggggaataa

SEQ ID NO: 436036 - DNA, 303 bp, Serratia marcescens
gtgggttgggaagtcatcaaaggtaactggactattatctgggcgctactgatgttggccatccaaatggtgcaattgttgttgtccaaaacctacgtcaagcgtgaggagttggagtcactgcgcatccgtatccaggcgatggaaagcaccattgccggattacctagccagaaagacctgcatatgttgcagcttgaaatgagtaacttgcgcggtgatctgcgcgaactcggcccggccattcgccaggtgaaacacgtcagcgatctcctgctggaaaatgaattgaaggataagtga

SEQ ID NO: 436037 - DNA, 528 bp, Serratia marcescens
atggtcagcgtgatcgccttaaaaaagaggtgcttcaccggatggccaatggccccaaacctaccccggtggattaccggggctgtgacgggactcatgccagcttttacaaaagaggttgggaatcagttggccccagggatatcgcctgggaatgccagcgttataaggaaaaacatcatgttaaaactcattaattcaccctggtcagtgttgacattgctggccctatcaatggggctgtgcgcctccctggataaactcgcttttggtctgtggtggtgggtattcgccggtgtcgtcatttgggttttggcgaccatgcaaaatctgggtcactacttcttttctctctttttggcgtgtctctttagcggcgtcggtgggttgttgactggtcgggcggtggcttcaggctatgcctatctcggctgggtcagtatccctttgtcgctattgtctgcggttacggcatttctggtgcttcatcagcttaaacagcggggagcgctcatttggatccgataa

SEQ ID NO: 436038 - DNA, 540 bp, Serratia marcescens
atgcggaaaatactacttggggcactcttccttgtgtctatttccacttcagcagccaacacatcgattaaagataatgcgaaagtactattggaagaatatgcgggggtagattctgttgattggtataacaaaggtgacaccgcttttgctgagaatgacggttttattggcgtttatagacaattaaaagcatctgtagacgatagcggagttaacattaaaatgcagttcgtgtctggttctaagcgaccagatagtgatgactttagccgagtaactacggatgtatgtttgttggtcgtgtcggagttaatccacccaacccctaaagcgaaagaaccagtgaaatgggatgatgatattgagtctgctgatgacaagaataatccatttgattttatgcaagaaagtagccttgataaagttcacggggagcagaaagtaaaaatcatagatgggtggaaagttagcattaagcgaacaaccatgttaacaacatgctccgcaaaaaaaaatataatccaccaatcacaatga

SEQ ID NO: 436039 - DNA, 213 bp, Serratia marcescens
ttggacaaagtaaagtttatggaaatgaaaattcgtttctatgtaaccaaagatggaagtatcaaacaagatattgactctaaattcatgaaaaatgaaacatctaaggcttttagcgaaaaatatataaaggcgtttgtggctttgcagggtgatttggtgacggatatttccaaaactgtaatcagcgatgacattaataaattccactga

SEQ ID NO: 436040 - DNA, 2352 bp, Serratia marcescens
atgaacaacgcttggggaaagggagcgccggcttcgctttggggaaaacgcgccacgccgctggccgtggctattggcctggccttcgccgcaccgctgacggcgagcgccgccagcgccgccgcagcctatcatattccggccggtgagttggacggcgcgctgaacgctttcgccgctcgcgccggcatcgcgctctcggtggacggcacgctgaccgccggtaaacgttcgccaggcctgagcggcagctacggcgtcgatgacggcctgaacgccctgctggcgggcagcggcctgcaggctaaagcgctcggcaacaacggttacacgctggccaaactgcctcagccgcagaaggaagaagacatcaccgtggtcggtgactggctggcggaaggccgccaggtagacgtgttcgaacatcccggcgcgcgcgacgtggtgcgccgcgaagaattcgccaaaaccggcaccaccaccgtgcgcgaagcgttgaaccgcgtgccgggcgtagtggcgccggagaacaacggcaccggcagccatgacatggcgctgaacttcggcattcgcggcctcaacccgcgcctcgccagccgctccaccgtgctgatggacggcatcccggtgcccttcgcgccttacggccagccgcagctgtcgctggcgccggtctcgctcggcaatatggacgcgatcgacgtggtgcgcggtggcggcgcggtgcgttatgggccgcagagcgtcggcggcgtcgtcaacttcgtcacccgcgccatcccgaaaaccttcggcatggaggccggcatgcaggggcagctcagcccgacttcgcgccaggatcacccgaaaggcaccggcaacctgatgatcggcggcaccgccgacaacggcttcggcgcggcgctgctctactccggcacgcgcggcagcgactggcgcgagcacagcgcgaccaagattgacgacgtgatgctgaaaagccgttacgccccgaacgaggtgcacaccttcaacagcctgctgcaatactacgaaggcgaggcggacatgccgggcggcctgagccgggcggactacaacgccaacccgttccagtcgacgcgcccgtacgacaagttctggggccgccgccagctggcgaacttcggctatcagtatcagccggatcaacagcacaagttcgacgtgcagagcttctacacctacaccctgcgcagcggctatctggatcagggcaaaaatctgacgttgtcaccgcgtgaatactgggtgcgcggcgtggaaccgcgctacagccagagcttccgctggggagactcggcgcatgaggtcggcgtcggctaccgctacgtcagcgaatccacccacgagctgcgctacaccagcaaggccagcaccggccggctgccgtccagcgccagcccgtacgatcgcgatacccagtccggcaccgaggcgcacgccttctatatcgacgatcgcatcgacatcggcgactggaccatcacgccaggcatgcgctacgagtacatcaagtcgtatcagaacaactacatcaagaacaaccgcctcgacgtcagctataacgcgccgctgccggcgttgaacgtgatgtatcaccttaacgaatactggaacctgtacgccaacaccgaaggctccttcggcaccgtgcagtacagccagatgggcaaagcggtcgacagcggcaagattgaaccggagaaggcgcgcacctgggagctgggcacccgctacgccggcgatgcgctgaccggcgaaatcgggctgttcctgatcaacttcaacaaccagtacgactccaaccaggtgaccgacagcgtgaccgcgcgcggcaaaactcgccacgccgggctggagggcagcctgcgttacgatctgtcgcagttgacgccgaaactggacgatctgaccgcctacgccagctacgcctacgtcaacgccactatccgcgaagacggcggctacaagggcaaccaggtgccgttctcaccgaagcataaaggcacgctggggctggactacacgccgggcaactgggcgtttaacctcaacggcgagttccaatccagccagttcgccgataacgccaacaccgtggcggaaagcgccgacggcagcaccggccgcattcccggctatatgctgtggggcgtgcgcgccgcctatgatttcggcccggaaatggccggcctgaatctgggcgtcggcgtgaaaaacctgttcaaccacgagtatttcacccgtgcctatgacgacaataacaaaggtctgtacatcggccagccgcgtacgatctatctgcaaggctcggtgaagttctga

SEQ ID NO: 436041 - DNA, 504 bp, Serratia marcescens
gtgcggctcgcgctttgctgcggcggattatgggcgtgcagcctgttggcgctggccgacagtaaaacggcgaccctcggcgtcagcgcgaccttgctcagcgcctgtgaagccggcagcagctcaggcggcaacgtcagcttcggcacgctgaatttcggcacgctgtattttctcagcaccgccaccagcgtcgccgggcagcaaaacgccggcgccattcgggtgaaatgcaccaacggcaccagctacagcgttctgcttggcggcgggcaaagcggcaataccgcggcccgctacctgcaaagcgcggccggccaacgggtgaattacaacctgtacaccaacgccgcccacagcaccatttgggacaatctgacgggcgtgtcacaaaccgccaacggttcggacaactggctgccggtctatggcatgattccggcgcagtccacgcccccgacaggcagctacaccgacacggtacaggtcacgatcaattggtaa

SEQ ID NO: 436042 - DNA, 996 bp, Serratia marcescens
atggctgaaaaatctgagtttttctccagttttatcgatattgaaaggcgagcatcattttctttagatcatgagattagccctgacaatttcaaagaactggttggggaataccgattagatgaagatgttgcctgtcaggtcaaagcaaaaaatggaatttgccaccagaagcataaaaacgggtggttgggggttaccaaagacggctttgaagtgttgataggagggcattgcgccagaaattatttcaaagcagataaaacatttgctttcgaaagaaagcgagtgcgtaaagaaatagatcggaaaaaggctatccacaagctgaaagaataccgtgaaaacgtactgacttttagtagtgaacttgcagaactaagaaaaaaaatcattgacaccagagttaaattagatcagatactgaaattatttccgaactcagtgcttaccttcataactaatgcacagagaacacgtaactgggatatcaatgttgatttattaaaagaatacgatggtgataaaaaatcaacatgggtaatcagccacctatgcaagctacgacctttgccttacatgcacgaagtcatcaccctaatgaacaaagttaaaaacttatcagaagtatatagtgaagcttgtaaaatagaccctaacgaaataaaaaccccaaaattaaaaagagtcattgaaactctaaatgaaaaggacgatttagaaaagcttggcgcccttttaaatagagatgtatataagttcctagacgttaaaaacttagagtcattaatttatatttgcgatgataaagatgacgaatatttgacaacaaaagcaattatgactgttacagacgcaaaagtttcaactgatgggcatatcaatctccgcctccgtagaatcaaagaaaggacggaaaaacagtttggcggacagaaaatcaggaaaaatcagattatcgataagttccagcgtcagaatatttttgcaggttaa

SEQ ID NO: 436043 - DNA, 1818 bp, Serratia marcescens
atggctgacttacaagaggaagcgaagtgggaagattcgatctaccaaatcaagcgcggtgatgacgtctccggcgggcgaaatggtgtggcgaatatccaggcgcggcagttagcaaaccgcactgcgtcgctcaaaaacgacgtggataagctcaacacgtccgtgatgagcgatgccaagatttacgacagtgtcgacgaggcgcaggcggcgatcaacgccggcaccgaaacccgccggctgttctccgttaactcccccattaccaattattgggttgagcaatacgagaatgtgaacggcatcgccacccctaccggtaagaaaattgtcacggcggcattcgttgaagcggtcgagctgctggcgtcaacaaccgacaagcgcacgcggggcttactgaccatgccgcgcacaagaaagccggtcgattttgtcagccgccaaggggcgagcatgttctcgataaatgagaacagtgaaaaagagatgcccggtaaaaccttctccgactacatgaatatcttacgtgagctgattatcgggccgtcggcattgcgccgcgctcgtcctgggtatctgtttaatctggtcacgggcggcaagcgcctgctagccgtgcgtgatgatggcgccggcacacttgaatatcgcggcataccgttagaaacgcatattgggctgttgcagaacactctgggcgggttcggggattcaatatccgacaacggtcgcaatcccgcagacgcgggcaagccccgcggctggacgtataacgcgcgctcctggcagatgtgggcgtcactgtttagcaatggccggataaaatacgtcggccaatgggcgaccggcggttataccacggcggacatgatccgcgatcatctcaagcccgctattgcagcaaaaccgcgctttattacgtttctcggcggtcgtaatgatgtgatccagaaaaacagcgacggcagttttaaattctcgatcgctgtaatcaccagcaacgtcaaatacatcctgaccgaattcagaaaaaacgggattattccggtcgtatgcagcatggcggcgcaaaataatagcgacccggcccttaaaagccgcgagaacgccatcaatgcgtttttgcgggcttacgccagccagcagggctatccgttcgttgatatgcgggccgccaccgttgacccggccactgacggctggaaagaaggctataacggcgtgctggggaacggacagccggatccctctcacccggtcgcgctgggcgcataccatatgggtaaagcgctggcatcagcgctggaaccctacaccatgccgatattcccacaactggcgattgccaatcccacgacccaggacgggccaaacgccatcattaaccccctgtttctggatagcgccgccggcgcgccggccggctgggtggtgatgaccggcagtgtcgctatttcgacagatcccgccgttgtcggcaatgtgcttaccgtcatcggaacagggacgacaatcgcacgcgtatcgcagacggtaacggtatcaccgggcgatgtgcgcacattcagcttcaggatgaaggccgacgttacggataaaaattcaacggcctgttatctcgaagccaatgacgccaataaaacaaacctggccgggatcaggacgtggaatcactcaacggacggattcatgacatttagctatgacgtcattgtccccgcagatgtcacggaaataaacgtcattatcgcggccaatgcggcaacaatcagcgtcggacagatgggattattaaaacgggaggcagtatga

SEQ ID NO: 436044 - DNA, 717 bp, Serratia marcescens
atgattattatttgtgatggcgttgttaatgccggtgatttggaattggcagagcctgaaatgctgctaaatgatgatgccagcgtagcaacctacagcatgcaggataaatatgactccagcggcaacgcgcgcgatctggtaactgaaaacgagtttaccaagcgcggcatgatcaccgttgctgacgccgcgcatggcgctgacacgggcattattgagacggacgaaatgacgttcgcgctgtgcatcaacatgaacaagcccgacgtcagcggccgcctgttctcaaacttctatcccggcgtcgcgcccttctcaggtattcagctgcgcatcgaaccaaacggtgcactgattttgcaaattgcaaccggtgatgtgaccaacggccaaacgggaaccctggcactgacctctgtcgaaaacgggggcgctgttggaggatggacgcgattcaccgtgacgatttcaaacacagaggcttccatcactcgcgccggcggcgctcgtcgttcagcaccgatcacaaaacgcaataaatcgacccggccgattatccttaacggctcgcccagcccagagcaaaacatgggattacctggcatcatgggcgcattcgccgtttataaccgtgtactgactgccgaggaacaggccgaaaagcgcgacatgctgaaaaccatcatgagcttgcgcggcgagttcgttaactaa

SEQ ID NO: 436045 - DNA, 222 bp, Serratia marcescens
atgatgcattgtcctgaatgcggccaagccgcacacaccagatcatccagctacatcaccaatacgaccaaagagcgctacaaccagtgcacaaacatcaattgtgggtgcacgttcgtcagccatgaaacctttacccgcgtcatttcgaaaccgcataacgttaatccggttccccctcacccacaaagcggcggccaggcttcgctgatttttggatag

SEQ ID NO: 436046 - DNA, 816 bp, Serratia marcescens
atgagacgagagatccctcagcccattattgatgtcgtcgctgagtacatgtcagaagttgaaacacatgatcgcctagatagtctgtttgactatgttggtgcccctggtgaaccgccggatcaaccaaagaaatccaaatcattagcatggctgagacgtataaataaacaatgtgatgaacctttagctcttttaggcaagctcattgaaaaatacatggatgcagaacgtcctgataattcaaataatatctgggacaaagagctaaaagaatttgtcgagtctatgcataagcatcttgaaaagtatggacttaagtatatgacaggtggctttatagtagatggttcatcaataacttcattatctcttcgtgatgcaataaaaaagcgtgatattccagctgtcgaaaatgagttctctcgagctattaaaaatttacattcagaccctcgagaggctgtttccgcagcatgtaatataatggagtcaacttttaaaatttacattgctgatgaagggatcacaccccctgcaaaacaagacttacaaggattatggaaagttgtacgtgattcattagggatgaacactaagtccattgaagatgaagatcttaaaagaattttgagtggattatactcaattgcagatggagttggagcattaagaactcatgcaagctcagctcatggtgctggtaggaagatttataaattaaagccaaggcatgctcggttggcaattagttctgcgcacgcactaactatgtttattcttgagtcatgggaagaaaagcgcgactcaaaatag

SEQ ID NO: 436047 - DNA, 210 bp, Serratia marcescens
atgcagaaaaccgttaccgccgccctcgtggcggccttgccgagcctgaccggcgccgcacaggcgggcaccggcatcgatttgcagacctatgccccccctattcacgcgccgaagaacccgcaggcgaacgccatggtcaaccgctggggcgagagcgccgaacgccttgcgcagtcggaaatcaacccgcccggccagggcgattag

SEQ ID NO: 436048 - DNA, 828 bp, Serratia marcescens
atgtctgaagccattgattattacgccttgcccgaacagccggcgcgcaatctcaccccggtgccggcacgcggcctgatcgaaatcagcaacgtcagcaagttcttcggcaagcacaaggcgctggacgacgtcagcctgacgctgcagccgggcaccgtcaccgtgatcctcggcccttccggctccggtaaatcgacgctgctgcgggcgatcaaccacctggaacgcgtggacgaaggctttatccgcatcgacggcgactacgtcggctaccgccgcaaaggcaaccggctgtatgagctgaaggaaaaggccatccttcggcaacgcatcaacgtcggctacgtgttccagaatttcaacctgttcccgcacctgacggtgctggaaaacatcatcgaagcgccggtggtgcacaagatccactctcgcgaacgggcgaaagcggtggcctatgaactgctggataccgtcggactacgccacaaggcggacgcctacccgcgccacctctccggcggccaacagcagcgcatcgccatcgcgcgcgcgctggcgctgaacccgaaggtgatcctgttcgatgaaccgacctccgcgctcgatcccgagctggtcggcgaagtgctggatgtgataaaggggttggcggatctgggcgtcacgctggtggtggtcacgcatgaaatcggctttgcgcgcgaagcggcggatcgggtggtgtttatggtcgatggacagatcgtcgagcagggcgacgccaggcaagtgctggcccagccgcagcatccgcgcaccgtcaactttctcaacaaagtgctgtga

SEQ ID NO: 436049 - DNA, 303 bp, Serratia marcescens
atgaacgtgctgattgtgctggctcaccccgagccgcattctttcaatgcccatttggccgaacaggcgcggcaggcctggctggcgcaggggcatcaggtgaagacggtcgatctgtatcaggaggggtttgatccgcgtgaaggcgcagaccattaccccagcataaagcaggcgggaaggttcgatgcgatgcaggagcagcgccatcactggacgactcaggcgctgccggcggagatccggcggcatatcgagctgctgcgctgggcggacacgctggtgctgcagttccctttctag

SEQ ID NO: 436050 - DNA, 183 bp, Serratia marcescens
atgcgggcaccaggcacttcgagcagttcctcaccgcgccatagccgctttccccgcgccggggagaaaaacgacgcgctgcgcctgatgcaggccgacgtcgcggtgggtttcctgctggcgctggagaacggcttcgtcaccggcagcgcgatcgacatcgacggcggcggcctgctgtaa

SEQ ID NO: 436051 - DNA, 543 bp, Serratia marcescens
atgaccgcggccatccgcattgcggccattgaggcgctgcccgatgattacctgacgcgcggcgatttcggctttaccatccgctgttacgccctgccgcagttcgacaccccggtcgacagctggccaacccgcccggtggcgccgtttcgcaagcagtatcccctggcgccgttcgccaacgaagacagcgcgactttcctggcatatcgccaggaccaagccgttggccacatcacgctgagcaaaaactggaacggttacaccctgatcgacgagatcgcggtcagcgctcacgcgcgccgtcagggcatcgccggggcgctgctggactgcgccaaacagtgggcgcgacagcaggaaacctcgggtatgatgctcgaaacgcagaacaacaatctggccgcctgtcgctgctaccagcattacgggtttattctcggcggcatcgaccgtttgctgtaccgcgccgagccggagatcgccgatcacgaaatcgcgctgttctggtatttgccgttcaatagcgaaatcggttactga

SEQ ID NO: 436052 - DNA, 618 bp, Serratia marcescens
atgtcacaggatattggggaccttgcccggcgcgtggccaacatgatccgccgtggcgtcgttcaggcggttaagcatggcccgcagccgcaatgtcgggtagagataggcgacattaccacgacctggttgccgatctgccagccatcatccagcgccaacagggcagactctaacccgattgccgtgggggatgccgttaccgtcatcagcgaagccggcgacctgaataacggccgggtgttccccggttggaacacgggcaaaatgccagtcccggacgggagcgatagcgagcatgtcacccgatacagtgacggcacggaaatccgttatgaccgtgccgcccatgccctgaaaatcattattgccgagggtggtacatatgagattgagggcaagggaacgctgcgcggcccggtggagatcactgacactctgacggttcagggtatcacgcagatcaatgccaatataggtgttgaaggagacttgtccgtcagtggccagatatcggatggcaagagcacgctggagcgagtgagggaggtttataacaaccacgctcacccaggagacagcggcggcacgacaggtgagccaaacagcaagatgtga

SEQ ID NO: 436053 - DNA, 612 bp, Serratia marcescens
atgacacaaaacgaatttcaacgagcggcttgcattagcgccgggttagccgtgcgctggtatccgcatctgatcgccacctttgctgagttctctatcgagaagccagcggcacaggcaatgtttattgctcaggtagggcatgaatcagctggctttacccgcacggtagagaacctgaactacacgccacagggattactttcaacctttgggaagcgcatcaccccctatcaggctgacatgctagggcgtacaacagcacatctggcaaatcagccggcgattgcaaacttggtatatgccgatcgcttgggcaataaatcacgcggtgatggctggaaatatcgtgggcgtgggctgattcaggttaccggccaggataattaccgagcgtgcggtattgcgctgaaactcgacctggttggcaatcctcaactgctggaaagcgacgctaacgcgatgcgttctgccggctggttctggaaatctcgcgattgtggtcgcaacgccaacgatatcgaatgggtaacccaacgtatcaatggtggcatcaacggattatctgatcgccaggcacggtacgacatggctcgtaaggtgttgctatga

SEQ ID NO: 436054 - DNA, 387 bp, Serratia marcescens
gtgtcccaagatcaagatgcaaacgttatagacttccaaaaagagagcattgaaagtttgcacaagaaggcggtacagcgatttaatcgccttacatatgcgattattggcgaagttagctcgctgctaaaaaaagcaaaagtgatgccgctttctgacctacagaatcacaacccaacttttgaagaagtggttaatcagctgcggatttttcgggctttgtctgaagccgcagccaaagctctcggcattgataaagccgatgagctaaacgaagtagacatgtacattgacctggcagacgagctagctaaagccatagcttcggatgatttcgactcactatgtggggcgatagctgccttggactctaagccatacatatga

SEQ ID NO: 436055 - DNA, 126 bp, Serratia marcescens
atgaacaaaaccaatgactacgccaaagcactggacttactcaaccagatggaagcttgcttgcatcgtgtgcaagagctaaatgagtcaattggagttgttgactcgcaaaagaaagccgcataa

SEQ ID NO: 436056 - DNA, 597 bp, Serratia marcescens
atgactaccatcaagcgctttacccctgactacaaaatgcacgcagttcgctttgaggctttcgcccgtgaagctgagcatggtgagttcgttaaattctccgattatgaagccttggtatcagaactcgccagcatcaggcagatcaacacccagacgctgcaggtaaagctgacaatggctgacaccatcaaagagcagactgatcgagttaatgcgctggctgtggagaatgcgacgctgaagagtgccataaccgggaaagcctatatcgacttcgtgacatccaatggatggaacccagggatgaaaaccatcaacggcaagtttgccggctttatggatgcggagatcgatttcgggtgcatggcatatgaccatgccaagaagttgatcgatgcggtcgaaaccccagccactgacgcagcacttgcagctatcaatgcgcagggagtggagaagttcatcaagctgaagatggaacagcttgccaacatgcatccagacacccacgcatttggcgctacagccgagtctctacgcgctcagattaacgagttgcaagcattcgccaccgagctgcgggaggccaaatga

SEQ ID NO: 436057 - DNA, 291 bp, Serratia marcescens
atgaaagagcgcccagtgatgcagcaacaagtccaatatcctggcgactttgacagcctggaaatccgcaagctgttagatggccttgtgactgcgcatatctccgccgctattgccggtgaaaagatgagtaccgccgaccgcaatcgggacctggccaccatcaaggaaagcatcgtgagtgccgcacacctggttcgctcgattattgaagagcgagaaggcgtctggttgattggctctaatgcagctgagacatacgaaagcgaggtgcgtgatgccagcaaatga

SEQ ID NO: 436058 - DNA, 144 bp, Serratia marcescens
atgctggcgaactgttatgactggcaactgttccttgaagtcaccggccccgatggcagcagcaaaagcgtgatggccagcctgctggcggggaaagacaacatcaccttggccactatcgatacgctggaatcgtcacagtag

SEQ ID NO: 436059 - DNA, 1002 bp, Serratia marcescens
atgtcagaagcatattgtggaaatgatagtgttcaagatgctatacataaaatgttttcaggttcaatacctgaaagggaaaatgaaattaacgaactatggtctaattttcaaattaacttccaaattcacgctgataaaaattcagaaggtaaatatatatttgatgctggtttgtttaggttcataagatttaatcaccgagttttgcgtgttttttggatcggtgccttttccgcaatctcaggctatacggcaataattgaagataagaataataaggtggaggagtttataaaaagcagggatgaaatatttaacaattattcatctgagctgatatccttacaatcaatgcaattgagcttggaggttatggtgaataattttattagtaatacagaagacattgccactgcagatttcagcaatttttataatttaattgattgctttgaaaattctgctaaagacgatttttctgatgaaaaaccatttcctgcaggagttcctgaaccaggagtgttccctgacgtagggacagacccgattaatcggggtactgctgaaattgccgttatttctacagcctgggcttttttgcatgaagttaggcatattattcaccagcaggatgggactagttattgcccacataactttacccaaaaacaggcacatacagaagagttatcatgtgatgagtttgctacaaaattcattattgacaaaatgaatgactattgtaataaatcaggggatgatgcattgctggtgagtagaaaaaggaaacttgcgatttattgcgccttattcagccttgctttattaacgaaagataattgggatgcttcggatacacacccttcactcaaggaaaggatggataaagtcaatgatctattaaaacacccaaaggacgaggctctggaagcaatagtgacttgtatgttcgcagcattgaaaaacatctggcctctggttccatgtattgagttttga

SEQ ID NO: 436060 - DNA, 285 bp, Serratia marcescens
atgacagtacacgtcgttaaaaaaaccggcgactttgtccttcgcttacgcgaacaagatacgccgaatgctatcagcggtttcacgcttgaaaagctgatgacggtaacaggaatgaccaaaaccgagttaacccacatggcacttcgtaaactggcagatgcttttttgccgcattacgagagagatgatggcccactcacaaccgcgcaaatccgtgccatccgtgaacgctcaacggctagcggaaaatcggaggagcgatttaataagagtcttttataa

SEQ ID NO: 436061 - DNA, 1893 bp, Serratia marcescens
atgcgtcagccggatacggtgaagggcgcactggcctatacgccaggtgtgatgattggaaatcgcggtgcctccaccgcctatgatgcagtgaacatccgtggtttcagctcggtaggtaccaatatgtatctggatggcctgaaactgcaggacgataactattcgatttatcagatagacccttacttccttgagcgagcggaagtactgcgcggaccgtcttcggtattgtacggcaaaagcaaccctggtggggtggtcgcgctggtcagtaagcggccgacaacagagacgctgcgcgaagttcaattcaaaatggggacagataatctgttccagaccggttttgacttcagtgacgctttggatgatgcgggggtttactcatatcgtctgacgggggtggcgcgcgatgaagatcagcagcaggttggcgagaaaagtaaacgttatgctattgctccttccttcagttggcgacctgatgatcgcacttctttgactttcctcagcagcttccaggatgatcctagcgttggcttctatggctggttgccgaaagaaggtacggtgcaaaatggtatcaacggtaagttaccgaccagtttcaacgatggtgagcctggctataacaacatttcccgcaagcagcaaatggtcggatatgcctttgagcatagttttgatgatgtttggaccgtgcgccaaaacctgcgttattcgaaaatggatgtggactaccgttctatttacggcctaggcattgatccagataattcagctgagctgaagcgtggcgtgatgaattccaaagagcatatgtccagctttgcggtcgacacacaggcacaggctaaatttgcgaccgggcaagttgaccatatcttgttgatgggtgtggattatatgcgtatgcgcaatgatgttgtgtatcaatatggcagtgcatccaatctgaatgtcatcgctccacagtacggcaatcggagctataccattaccggtggtgccagtcaggttaaccgtcaggagcagaccggcctgtatgtgcaagatcaggctgaatggaacaactgggttctgacgatgggggggcgctatgattggagcgataccaacagcaccaatcgcctgaaccagaattccgtctctaagcagcaggataaccagtttaccggccgtgctggcttgaactatgttttcgaaaacggcatcgcgccttatgtcagctacagcgaatcgtttgagccaacctcaggcactgatttctcaggcaatacatttgctgcctctaaaggcaagcagtatgaggctggggttaaatacgcacctaaggatcgtccgatcaccgccagtgtggcgttttaccagttgactaaaaccaacaataaagtggctgacttagaacatccgttctttagcgtccagggtggggaggtccgttctcgtgggattgagttggaggcgaaagcggccttgtcggctaacctcaatctgttgggctcttacacctacacggatgctgaatatactaaagatacttcgctacaggggaatacaccttccgctatccctaaacacatggcttctctgtgggcggattacaccttccatgaaactgcgattagcggtttgaccttgggttcaggcgttcgctatgttggctccagctatggtgacgaggccaatacgtttaaagtgaaggattacacggtgtttgatgccgcgataaaatatgatctggcgcgtttcaatttgccgggctcttcgattggcatcaatgtgaacaacctgtttgataaggaatatgtctccagctgctttgctacctatggctgctactggggcgcagaacgccaggtggtcgccaccgcaaccttccgtttctaa

SEQ ID NO: 436062 - DNA, 1413 bp, Serratia marcescens
atgagttttgaagaacagcgtctcgaggagctttgcgaattagttattgattgcccccactccacgccaaaatggacggatgagggttttattgttcttcgaaatcaaaatattcgtaatggtgtattagatctctcaacaccgagttttacagatgaagatggctacaagaacagaattaagcgggcaaaacctaaggcgaatgatatcgtttttactcgcgaagccccaatgggcgaggtttgcttaattcctgaaggtattgagtgttgccttggccagcgccaagtattattaagagctaatagtaaagttgatccttactatttattttgggccttacaatctccctatgtgcaacatcaaatttcttggaatgaaggtacgggaacaacagtaagcaatgtgcgaattcctgtactcaaggatttgaaaattcctcgattgggagtagctgagtcttggattgcaaaaacaatgacttctttagcattgaaatctcagataaataaaaaaatcaaccaaaccctcgagcaaatggcgcaagccctgttcaaaagctggtttgtcgattttgaacctgtaaaagcaaaaatcgcagcgctggaagcgggtggttctcaggaagacgcgacgctggcggccatgacggcgatttccgggaaagatgctgatgcgctggtggtttttgagcgtgaatccccagaaaaatatgctgagttaaaagctacggcagagctgttcccgtccgcgatgcaggatagcgagttgggggagattcctgaagggtgggaggtttcggatataaaatcttctgtgagtgaacttcgtagggggatttcaccaaaatacactgacgatgctgatggcataatggtaataaaccaaaagtgtataagaaatcatacaattaacttttccctttcccgtcgccatgatggaaaaaaaaggtcgatatctggtagggaattacaagtgggagatgttcttgttaactcaacaggggttggaaccttagggcgtttagctcccgttcgctataaatcggaaattctaattgccgacagtcatgttactgtcgtacgtgctgacacaaaaaaaataactaaatctttcttatcagaattattgacaaagcatgagaaacacattgagtccagtggttctgggagtactggacaaactgagttacgaagagagactttagaggaaataaaattcccatgccctccagttattttaggtcggctgtttgataagattattaataatttcaataataaaatttctatcatggaagaacaaatgattgccctttcaaatctgcgtgacacccttctccccaaactcctctctggcgaaatcaccctgccggaagccgagcaggcggtaagcgaggtggaaaatgtataa

SEQ ID NO: 436063 - DNA, 1194 bp, Serratia marcescens
atgtataaaattgatacacctactaacagcctacactccctgcaagaagtctcattcagtagccttggtttcaccgagcgctatcacttgcaggagtggctggcaaaaaatccgcaggcgctgactcaaaaagacgacaaagaagacgaactgctgattatccaaaaagagtttgcgggctttgacgataccaaagagcgccttgacctgctggctatcgataaacagcgcaatctggtgattatcgaaaacaagctcgatgactccggacgtgacgtggtgtggcaagcgctgaaatacgcaggttactgcgccaacctgcgcaaagatcagatcctcgacatcttccagctttatcttgataaatacgaaccggaagaaactcgcccggcggctgaagtgatggcggaatttctggagtgtgaaagcctggatgaagtgcaaatcaaccagaaccgtactcagcgagtgatgatggtggcggccagcttccgtaaagaagtgaccaataccgcgctatggctgatgcagtttggcctgcgggtgcagtgctttaaagttaagccgtacaaattcaacgatgatgtatttgtcgatattcggcaggtaattccgacgccggaagcggaatccttcatgatcggcatggcgcagaaagaggctgaagagcagtcaaccagcagcgaattgaaaacccgacatcagatgcgcaaagccttctggacaaagatgctggagtgcctcaaagccagctcctgtaacgtgtataacaatatcagcccctctaccgatcactggatcagcgcgggttccggtattagcgccgtgtcgtataacctgattttcagtaaaaaagagattcgggttgagctgtggattgccaaagcctccgcagagagtaatacctttgcttttaactggctgcatgagcacaaagaggcaattgaaaacgcgtttggccatccgcttaagtgggagcctctgccgggtaaaaaatcgtgtcgaatttcctatgccagcccggccatcagcctcgatgaagccaactggcctgagatgatcgactggctgctggtaaacctgacagcgtttgaaaaagcgctcgctccctttattgccccactaaatatggcgctcaaagagatttcaaacgcaccggaagaaatggaagaaaccgagacagaggaagcctga

SEQ ID NO: 436064 - DNA, 1221 bp, Serratia marcescens
atgaatcgttcaacaaaacagttgaaactcttggactcacttagattacatgaaaaaaacaatcataagttctctataaaagatcttgttaactctaccggctacaatgaaaatagcatcagaaaatatattaatgaaaagttaaacggcgtttacttacacccaatcaatgaaaaagaatggcgatgcgatgggctattaaaattatcaaatgatgattttataagaatgatgtctcaatctttgaaagcaaaaaccgtcacacctgagttgaagatatataaaggactattaaagcgcagtttagatgctttcatcctttcacttgaagtatataacaggccaagcttagataaccgtgttgaagcattttgcattctttcaataaatgcgtgggaattattgcttaaggctgaattaattaaagcgctaagtttggatactgtattcaagtctagtggccattcgattagtataagtgatgcactaaataaaagattacaacagaatgatcccgtcaggaagaatctagaaacactagttgaattacgagatagcgcgatacacttacttatccctgaattacagcccgagttgtcaagactcttccaagcaaatgtactgaactatcaacagcgatatttaaatgaaacaggttcatcaccgttatcaggccaaagcattggaatgctcagcttagttattgatggtccacagagtgacatctctattattaaagaaaactatgggagtatgacagcagcagtagctgaagagtttctgggaagattcaataaaaatgcaagtgaatatgattctgtagaattcacaataccagtggactataagttaacgctaacaaaaaatactaaagagagtgatttgtcattaggcataggtgagaaaggtcataatgccattattattagagaggtcagagatcccgatatcacccatccttattatgaagggacagccattgaaagaataaacaaccagcaaagtgaattctcgatcactcgatattcattcagagctgtaattagtaaacacaaagttcaaaacaacaagaagtcccctatgcattttgaaattgacaagagacatagatactctgaaaagttcgtaatatggtttgtagatagtttgaaacagccagaatggttagatgatgcaatcagttatttaaagaataagaaagggaaaaagacagctagttaa

SEQ ID NO: 436065 - DNA, 228 bp, Serratia marcescens
atggtacaggccaaaggtacgattggcttgtggtttggagacaagccagaaaaaatcgaagttaatttcgttattccccaagataagtcgatgaccgttagagcaacacgcaggctagaactgagcaaacagtgtgcggttatcccaaccaaggtgcgggaggataaatacttaccgtcggtgatttgcacagataagacctcttgcaacttcaggcgtgatatttaa

SEQ ID NO: 436066 - DNA, 1164 bp, Serratia marcescens
ttgcgcggcgtggcggaagagcggctgaaagatccggcgcgtttgccgctgtttatcgccatcgatgcgtttatcaacgaaacgacggcattggccgactatatcgtcccggacacccataactttgagagctggggattcagcgccccctggggcggcgtcgccagcaaggccaccactgcgcgctggccgatagtgacgccggcgaccgcgaaaacggcgcaagggcagccgatctccatggaggcgttttgcatcgccgtcgccaaacgcctggcgctgccggggttcggcgatcgcgctatcggcgacggccggggcgggctgctgccgctcaaccgcgccgaggattattatctgcgcgccgccgccaacgtggcgtttgccggcaaggcgccggtgccggccgtgagggaggaagagctggcgttgagcggcgtcgatcgcttgttgccgcagcttgcgcagacgctgcgcgccgatgagatcggccgcgtggcgtttatctacagccgcggcggccgcttcgccggtcatgacagcggccgccgcgacggcagcgtgggcaaccgctgggagaagccgctgcagatctggaatgcggaagtggcgaagcaccggcatgcgattaccggcgagcgtttcagcggctgcccaacctgctacccggcgcgtttgtcggacggccgcgcggtggaagaactctaccctgagcggcagtggccgctgcggctgatgtccttcaaatccaatgtgatgagcagctccaccgcggtgatccggcgcctgcacgacgtgaagccggtgaacctggtggcgctgaacccggcggacggggcgcgtttcggcattcaacacggtgattgggtgagcatcagcaccccgggcggcagccgtgaggcgcagatcagtctgctggcgggggtgatgcccggcgtgatcgcggtggaacacggctacggccaccgggagatgggcgccagccagcactacctggacggcgagccgctggcgatggataagcgcattgccgccggcatcaacctcaacgatctggggtttgccgatccgacgcgcgaagtgccgaacacctggctggactgggtgaccggtgcggcggtgcgccaggggattccagcggcgatcgtcaaactttccgcgtaa

SEQ ID NO: 436067 - DNA, 210 bp, Serratia marcescens
atgacagatgaacaatttgaagaaaactacccgagggatagattcgagtacgtcaaaactaaaatgagagttaaaggaacgatgggacagaccgaaatagagtactttgacatcatcgaacgtgctacaggtcaggtagtgctacaaccaaccagaactgaacatacgaacttacgcgggttgaacactacggtgaattggaattggtaa

SEQ ID NO: 436068 - DNA, 1122 bp, Serratia marcescens
atgaatgagaaaaattatacagcgataactttagatacctcaatatttgatggtaatgcattaaaactagagaaaggtctgcttgggaaattaaagcaatttaatgattcgccgacgaagtttgttctgacagatatcatcgttaatgagcttgtaaagcatttgcatgagaaaactattaatagcaaaacatctttgcaaaaagcgcttgatgaggctaatgagcatctgttcttcgaaggtagcttgttgattgatgcaaaacagcaattaattgatagtccagaaataaatgatctagcgaattcaagagtcaatgcattcctgaagaggactggagctattgttctggattctgctgactatgttagcgttgctgaattaagggataattactttaataataaaccaccatttgcagttactgggaaaaagaaaaatgaattccctgatgctatagctttacttgcattagagcattgggcgaaagaaaatggtgaggttatttatgctgttgcaaaagatggagattggaaaagttattgtgaagactcggaatgtcttgattataatgaaagtcttgctgatgcattagattacttcaataataaagatgcgccatttatagtggtgaaaaaattagaggctgaattccaattattaaatgctagtaaatttggagtgcaattgagaggtcagttggaaagtgtatttactggatactatgttgatcaagatgcagattcacctttcaattgggaacctgaaggtgttgatgtaacctttgaagacttcacaacatctgatgataaattaaaactaattgagaaaactgaatcatcgatagttgtagaagctttgattaatgttgaactgaatgcagaaggcacattttcactttatcaatatgactcgattgatcatgaccaattatacttagatagcgttacaaaagatgtagaggagagttttgaatgtagaattctcattacctttgaaggtgaccttgataaggctaaagaagacatagcttaccttgaaatagataatgttgaggttattgataaattgaaatcaattcattttggatacctagaattagaatatgatgattataattaa

SEQ ID NO: 436069 - DNA, 630 bp, Serratia marcescens
atgcgcaaaagccgcaacagtcaatacgtggatgtgaattttatggaaatcgattcaggaatcagtaacgagcatgtcttagacaggatttgtgatgtctacggttacgcccaaaaaatacagctcgcccggcacttcaacatcgccgccagttccctgcaaaaccgctacactcggggcagtatctcctatgactttatcgtccattgcgccctcgaaactggagccgacattggatggttacttaccgggaaaggagataaattcgcaaatggcaaaactccgcccgctttcaaaactgaggatttattcatcaagacattcacattgagtgaaggaaaactagttgatgagtcagaaatgcgaatttcaaaatcactctttagtcgtgttccccttaatccacaatgcctccgttcagacaacgtgattcacttccttgagcttgaagcctcgctctctgatggctcatggcttgtagatattgagggggcaaaaagcatccgtgagttaacagttctaccgggaaaaaagttacatgtggctggcggcaaagtaccgtttgagtgcgggattgatgagataaaagcgattggtagggtagtaggaatatacagcgaggttaattga

SEQ ID NO: 436070 - DNA, 174 bp, Serratia marcescens
atggtttttttggaacgtattgaactcatcgcccgtctgggggtttgttatgagagccaagcaaaagataaagacatcgcattgatatggatttcggaattggccgaggagatgaaaactaacatcgacccggaaaaagcagcggtgattaaacaactcgcgactatttcttga

SEQ ID NO: 436071 - DNA, 900 bp, Serratia marcescens
ttgaaaaataaaaatatggatatcatactgcgcttcttaataaggaattatgccataaatggaagttcatcctttgactctttgttttctgatggtatagaaaaaaccaagttatacactcaggcttacaatgaattcaaaataaactttcagttttatgtcaatagatacttagcgttaagttatatttatcattctatgattaatgctgggtcaacatttagttcaatggtgttattagaggaggtgaagattatcaatttagatagagggccaaaagataccaacttctactacgctagaaatgagtcattcggacatcagattatcatgcagtatgccaagttatatgaagccttggttaatatagatgcattggaaggtgatagtaataaatttaatgaaaatgaaaagaggcacgctttaaaaatattggattcagataaattaaaagatgcctacgtttatctgaatgatctgcgaaacagaatagagtcatcaggtgctctaaagctcagaaataatattttcgctcatccatttaaagatggtggtgctggaagtgttgtttttttggaacaagtgacgagtaaagtttattcaatacttagagatctttgcgatgaaacagatagagagaaatatgaaggatcagataatagaataagatttttttgtagtaattacatcatgagggctgtatatggaggtagtgacggttgtaatgcgctttcgtctattgaaaaacagtttgcaataaaaacaaaggcacaaaaacatataatagcactctatgagttcatgtctattcttcgtggtgagaaacttttaggtgtagaaccatttctgatagttgacattaatactgtcaaagctgagttgaaagatattctttattaa

SEQ ID NO: 436072 - DNA, 150 bp, Serratia marcescens; identical to SEQ ID NO: 193627

SEQ ID NO: 436073 - DNA, 1095 bp, Serratia marcescens; identical to SEQ ID NO: 193628

SEQ ID NO: 436074 - DNA, 2220 bp, Serratia marcescens; identical to SEQ ID NO: 193629

SEQ ID NO: 436075 - DNA, 573 bp, Serratia marcescens; identical to SEQ ID NO: 193630

SEQ ID NO: 436076 - DNA, 1140 bp, Serratia marcescens; identical to SEQ ID NO: 193631

SEQ ID NO: 436077 - DNA, 1305 bp, Serratia marcescens; identical to SEQ ID NO: 193632

SEQ ID NO: 436078 - DNA, 549 bp, Serratia marcescens
atgaaacatgaaattgcggtgagtgtaataatccccgtttacaacgcagaaaaaaccatcaaatccttgatcgaagatatcttattagaagacaggatcaacattgaagttattatcgttaacgatggttcctcagacaacacgtcaacgataattaactccataaaggatggcagagttcaagttattgaacaaaataataaaggtgtatacgcggccagaaataatggattagacaagcataaaggccagtgggtcatgtttctggatgccgatgacgatgtgtctgaaggattcatttataacaggtacatccaggcttccagccataatgccgatgtgcttttgtccaatgcctggaagctttggcatgaaagcgataataaaaaacctgtacataccaaccaaccttatgatgaaattttatccggcaatgcgtgggtaagtcacgcagtaaaagtcagggaatggccacattacttttggttacagatagttagatctgactatatggggtcgtctcagaaaacggaaaataaagcacgctaa

SEQ ID NO: 436079 - DNA, 258 bp, Serratia marcescens
atgcaattgatgatctgcctgacgtccccgaaatttaccggccaccttggctttcgctatcccttcctcttggcgccggcgacgatcctgatagtctttgcgagctatggcggccagcatatcaagcatcattccgttaatagccttaagtattgcaagggtaaagtcatcgccagcatgtgttgcaagagccatatggctcgttgggaggtcaagactgacaaccacaaggtgtttttcctggataagatgctttag

SEQ ID NO: 436080 - DNA, 2985 bp, Serratia marcescens; identical to SEQ ID NO: 133423

SEQ ID NO: 436081 - DNA, 207 bp, Serratia marcescens; identical to SEQ ID NO: 193620

SEQ ID NO: 436082 - DNA, 225 bp, Serratia marcescens
atggatgacggatggctgacggatggctggccgctgtatgaatcccgcctgaagggaaagctgcacgttatcagcaagcgttacactcagcgcattgagcgacataacctgaatctgagacaacatctggcaaggctgggacggaagtcactgtcgttctcaaaatcggtggagctgcatggcaaggtcatcgggcattatctgaacataaaacactatcagtaa

SEQ ID NO: 436083 - DNA, 639 bp, Serratia marcescens
  misc_feature (612)..(621): n is a, c, g, or t
atgaacaggttattggttataaaggaagaaaatcatacagttaaccctgatatggggcttgtgattcctgttgcttatcttgatgaaaatggaaattatgaaaaaattgatcctagcgattttcctaatggaggaatatttatttccaaaggatttttgaatataagccagcagtttggatatgatgaattatttattcttaatgaatattacgaaagcaatgatgatgactggaaaattaatacaagacatcaaaagcattttggacttggaagtaaagtagaaaggctcgataaaagctactttattccaattataaaatctgctctccccgatataaaaacaggtttccttggtcatgatattgacgcccctagcgctcaattctttattgagaatgagggctatgtatatggaccgtttaaagcctccaaacaagataacaattggcaattatctcctttatctacaccgtcacccttacagcttaaacaagaccatatagcaaggtttgatttaaaggaaattatagctaatgatttttcttatgagttaattattaaaggtgaagttagaaaatatattaaaaatttgaaagatctctccagtttnnnnnnnnnnctccagtttattgtttga

SEQ ID NO: 436084 - DNA, 861 bp, Serratia marcescens
atggttattctttgctctttatctagttacttgaacttcgaactcgattccttagatgtgcaaactttattaaatgtgagggggattggaagtgtatcatttttgaagaatactgcaatatcgcaggttctacaaaaagatgttaaagggaattttatactgaagaatcctattcttgctaagcatctccttcagctttttgtaaataaaaagcctgaaatggtacttgattttattgttgatatatatgcaaagctagataagaatcatatttatgaaccaaaattcaagttcttagctaaagacttaaacgtatactcaaatttactcaagatctttgggagtaaaaattctgatatcattgaagatttttatgatagagtgaaaaattatttagataatacaactaatcaacacttttggctacaatatgcgattgctaaaatcacttcttcaaagcatgatgtagccgaacgatttattgaaacggcgtattcactggccaaaaggcatagaggctataactatgattggatcaattgtcagttttcaaggttattgatcgaaagtgctcctatgcaaccaactcctactgcgatgattggtcaattgaaacacgcacattcgttaattattgatcagaataatagacattaccctttcagagtagcaactaaatattgtgatttcctacaagatcatggaaatagattgggagctgatcataaagaagaagtagttactctcataagagagttctatgaaaaatatgacattacattgaaagctctaaataactacgatcatcccattatgaaatcattcaaaagagaagctgataaaattttcaaaaaacgttaa

SEQ ID NO: 436085 - DNA, 1509 bp, Serratia marcescens
gtgacctggaaaacaacagccgaacaaaacgccatcatcgagtggaagggcaatcatctcgtggtgaatgcctttgccggtacaggtaaaacctccactttagtgagttacgctgaagccaacccggaaagtaaaatgctttacctcgcctataatcgcgctgtgcgggatgaggctgaacgcaaattcccctataacgtagagtgtaaaacgtcgcatcagcttgcatgggcccgtttcggcaaacatttccgtgaccggctgacagccagtctgcgcattacggatgtggccagaaagctcaatacccgccactgggcgctggcgcggctggcgctcagcgggctgaacatgttcctctgcagtgctgaccccgagccggggctgatacatctgccgtctgaggatgatcgccacggtctcgatgccggtaaaattctgggggcaatacaaatcctctggtatgaaatgagccgtactgattcagtctttcccgtcacgcacgacacctaccttaaactgttccagctctctcatcctgacctgtcaaaacgctgggacaccatcctcttcgacgaggcacaggacgccaatccggtgaccagtgcatttgtactgaatcagccctgccgggtcattctggtcggcgaccgttaccagcagatataccggtttcggggggcagataatgcactgagagccccgcagctggtgcaggcagaccggttgtggctgacagcgagttttcggtttggccctgaggtcgcgcggatggccaacatcctgcttgaacgtgccggagaggaaaagcgcgtgacaggtaacggggggcaggatgctgtcgtcagcagccttccggcaggggctgagcatattgctgtactgagccggacggtatccggcgtgatcggcagtgccctgacggcgagccttatggagaaaaatgtcttctgggtcggggggattgaaggctacaaaacagaggagctggaaaacctgtactggttctccgccgatatgcctgaaaagatgcagtccccgcgcctcagccgggactaccgggattttgatgaatactgctcaatagcaaaagccacacaggacgtggagatgaaccaggccattcgtcttctcgatgactttttcccactaccgcaaaagctggccatcatgcgccgtcaggtggtaacccatgagaaagacgctcaggtcacggtttcaaccgcacaccgcagcaaagggctggaatggccggtggtaatgctgagtgaggattttactgacattaccgacccgcttctttcgcaggatgagcggcaggatgagactaacctgctgtacgtggctgtcacccgggccagaagaacgcttgtgcttaacgaactgatgcgctggctgagcgatgaaggcgggaaaaaccgcgagacgacgcacgaaaacgtaccgtccggaaatggagagagcgccgacaggcacgaagaaacgggaaaaacttctgagagtgagtaa

SEQ ID NO: 436086 - DNA, 1857 bp, Serratia marcescens; identical to SEQ ID NO: 193643

SEQ ID NO: 436087 - DNA, 1326 bp, Serratia marcescens; identical to SEQ ID NO: 164769

SEQ ID NO: 436088 - DNA, 237 bp, Serratia marcescens
atgaagatgtacctaacaatacacttactctcaagcaaagttaatactgagctgtacgagtcagcactaacaaaagagtttagtgaatacgaaatcgagttcaaactcgatcatgataaaattggaagctatgataatgcaatcaaaaacatagtgtatccagagaacagtactgaatatcaaaccgaagaaatagatgaaagaatttccaaggtctattctagtttgatagcataa

SEQ ID NO: 436089 - DNA, 255 bp, Serratia marcescens
atgtcatacaatctcggcaatctgccaaaagaagaaatggacaaggtgaacgtagatctcgctgcatccggtgtagcgtacaaagaacgcatgaacatgccgattgtcccggtacaggtcgaggccgaacagccagaacacctgcgtgaatacttccgcgaacgtctgcaacactaccgtgaacagagtaacaaattccctggccccaacgatccgcgttatcagcagatgactgaggctaacggtaaaaaatag

SEQ ID NO: 436090 - DNA, 153 bp, Serratia marcescens
atgatgatgatccacaatgcggcaacccaattccagagtcgcagttatacgattactatgctaatgatgagacattatgcgaaagctgccaatcagctggagactatcaaagaaatcacctgcataaagctatggacgaataaagtcgattga

SEQ ID NO: 436091 - DNA, 1062 bp, Serratia marcescens
atgagtcagaactggatgcggcattttgagctgcagctgcttgaccagcagggaaacggcatcagcttgtcagattttaaagtcactttccgcattgagtgggccgatacgcggtggccgcgcgtcgccaacgtcaaaatttacaacctgtcgctggatacccaaaaccggattctgggcagcgagttttccaaaatccgcatgattgctggctatgacgggatcgccccagatgcagacgccagtcaggtcggcgtagcgcggccggtggacccagcgaaatccggccagcgggacggccagaactttggtctgatttttgagggagatctgcgcttcacgatcaccggcaaagacaacccaaccgattcctgggtgctgattcaggccgtgggcgatcatgaggcgtttctctatgcgacggttaacaccacgctcgccgccggctataccgtggctgacgtgtacaatgccgccctgaaaagcttcaacgcctacggcataacccaggggatcaccggaacttttcccgatacggtttttcctcgcgggctggcgctgttccaatctgcgcgcgatgtcatggactccgttgccggcatgtgtaaagccacctggcagctgatcgacggcaagctgcagatgatcaacgagaacaaatacatccacgaggctatcgtgctgaacagcgaaacagggctgatcggcatgcctcagcagacgatgggcgccggcgttaacgtgcgctgcctcatcaatccgaatattcgcattaatggcctgatccaactcgaccaggcatcagtttaccgcgcagcgctatccgacagtgagattgcccaatccggcggccgcatcagcgaaactgaccagaacggaaaccgagtcatcgccggttccctgcagcagccggccagcattgcgacggacggcgtgtatatcgtgaaagcgatcgactatactggcgacacacggggccaggcgtggtacatggatctgatgtgcttcgcgcgcggtgcggcagaattgcagaccagtgctgctttgaataagattcaatag

SEQ ID NO: 436092 - DNA, 1002 bp, Serratia marcescens
atgtattcgaatcgtaaagctctatatgcccgtcttgaacagatgcgctcttctaaagtgatttgttatgtgactggcgataaaccaggcatggagactcaaattcatagtgaagtatttgattactttgttaatcatttggacgctattggagttgtgccaaagattagcttgtttatctatactcgagggggagacactctaacagcatggagtcttgttaacctcttacgacaattctgcgacgaactcgaaataatcatcccgtctaaatgccacagcgcaggtacgattatgtcgttgggtgcgaatacgatcattatgacaaaacaggctactcttggccctattgatccaagtatcactacacaactcaaccctactgccaacataaacggcctagaaatacgattacctgtcagtgtagaagacatcaaaggctaccttgccttagctaaagaagaacttgaaatttctgatgacattgctttatctaagctattgctttctctcggtgaaaaagttcatccactagttttaggcaaggtttatcgctcgaaggcacaaatacaaatgcttgcaacaaagcttctttcatatcaaattgatgacggagagcgaatcgaaaaaatcgttaacttcctttgtagcgattctggtagccacgactacactatcagtaggagggaagcggagaacgaacttggactaaagattgaaaaaccaggccaagaactttatgaactcataaaagcaatctatgaagacataaaagatgagttaaaactaggggaaccttttgttcctgcagctttcttaggaaatgcgcaacatgctgtctacagcatccctagggtcttggttgaagcaactgattcttgctcgtaccaatactgctcgcatggtgaagtcaggcttctccaaccggatcctgcggtgcagaaccatttgactattcataacaactttattagtgaagggtggactaaatatgacaactag

SEQ ID NO: 436093 - DNA, 1455 bp, Serratia marcescens
atgatgtctaagtcactgaatgaagtagaaaagcaggttcacgttgccgaagttgttcaccacggcgaaaaactgactattcctgtcggtatgggcgttcaggacgcgattgatttactggagcgccgccgcgattacctgagcaagaaagtgatcatccgccgcgaatttaacgtgttcccgtgggacggcgcaaacgcattggcgcaggcattaaccaaccgtttcggctgggcagcggccgagtccactccggggttttttggtagccaaccgccagcgatgatcaacattgaagtcgggccgaaccaaaccaaagaaattccgtggggacgtttcagcctgcctggcatcgatggtttcgttcagactgattcggatcgcaaagacggccgcatctgctttgtgacagctgcaaaaattcagcgtaaggacgaaagcgtcatcaaagagctgtttgacgatatcgccaacatcctgaaacgtggctccatctatgccggtaaggccatcaaaattcgcttccgcgatgacgacggcgacctgatcgaaatgccagaaccgaagttcttggacacgtcgtccattagccgcgacatgctggtttattcccgtgaagtgaccgaagcgatcgaaaccaacctcttcacgccgatcgagcgcattaccgactgcatcgcgaacgacattccggtaaaacgcggcgtgctgctgggcgggccatacggcaccggtaaaacgatggcggcgaccgtagcttcgcgtttggcgaccgacaacggggtaacctacctctacgtgccgcgctctgacgagctggctgacgcgattgagttcgccaagcagtatcaggaaacggcctgcgtgattttctgcgaagacattgaccgtgctgtcagcggcgagcgttccgtcgctatggatgacattttgaacatcctcgacggcatcgacaccaaggccaacaacatcataaccgtgttgaccacgaaccacctggagaacatcaaccctgcgatgctccgcccgggccgactggacgccatcattaacgtgacgccgccggacgccgaggccgttgagcgcctgatccgcctgtatggcaaagacaccatttcggccgatgcagatctccgccctgctgccgacctgctggccggcaccatcccggcagtgatcgccgaagtagtgaagcgcgcgaagctggtgcagctccagctgcagcagccgggaaccaaagtcgagaacgtgtccggtactgccgttctgcgtgcagccgaaaccatgcagagccagattaagctgctggcggagcaatccaaaccgaaggccaaagagccaaccttcaatgaggtgatgggtcatgccctgtctcatgcattgaacggcaccaaggagcagctgggcacaatgagcaagcgcgtcgaagaactgcacgaccgcgttgtgaattaa

SEQ ID NO: 436094 - DNA, 240 bp, Serratia marcescens
atgggcagcataatcctagccggccggcagatattcattctcaacgaaaacgacagatacccagaacctcagcagaacagcccaccgatgttcgcaatccgcgaggatgaggaaggccagcactggctatatgtgtggcacaaggggcgctggccgctcgtgtcagaggtaccgtttgaaacagagggcaaagccgttgatgcagcactcgaatttgactttgccacgctgtacaaatag

SEQ ID NO: 436095 - DNA, 195 bp, Serratia marcescens
atggttgaagattggatgatcccacaggattggcaaaatccgaaatggaatcgggacggtagccagcctcatcactggcataattatgtctccagcgctgttcagcaaatatggcaaagctttactgatgagcaaaagcaggtgctagccgctgggtttgcagaggtggcgctgaacgaggattgttgggattaa

SEQ ID NO: 436096 - DNA, 939 bp, Serratia marcescens
atgacaaataatctaaaatcattacgcaagcttttacaaagcacactttttttaagtgatgatctcattaatatttttattgccacagctccctatagatataagacttatgaaatcaacaaaagaaactccaatgaaaagcgtaaaattgcgcacccttcaaaggagctgaaattcattcaacggattattattaaagaactatctgatatactgcctgtacatgattgtgcttatgcttatagatctgggcgaggaatcaaagaaaatgcgctcatgcactcaaaaaatagttatttgttaaaactggatttatccaactttttcaattcgttaacacctgaaatattttttgctgaatgtaaaagaaacaatattgattttgataaagacaatgcctctattatatcaaactgtttgttctatcgtgagcatagaaaatcaagtttaaaattaagtgttggagcacccagctcaccgtttatctccaatgtaataatgcactcatttgataaaattattgaaacagagtgtctgaatagagagataacattcacaagatatgctgatgatatgacattttcgacaaatataaagaatacacttattggatttgacaatttaataaggaaagttttaatcgatctgttcagagactctatatctttaaataatgataaaaccattctttcttcgaaagctcataatcgacatattacgggtataacaatctcgaacaatgataacatctcacttgggcgagaaagaaaaagattaatatcgtcagcaattcatcgtttttcttatgataaattagatcagaaagccgtggacaagttgaagggcttgttagctttcgcacattacattgaaccttcatttgtggctgcaatggaaaaaaaatacggaagggaaacaataaataaattaaagaagtag

SEQ ID NO: 436097 - DNA, 957 bp, Serratia marcescens
atgtacgaacaaattataaaagatacatttaaaaatcttgaagttgaaaatttcactgtcattaataacagcctaaatttaatatttgtttgtggtgggcttgtagatgtaagacaacccattcctacaagtatgcgcggacagctatacgcttatacagctactgaacatgaagagtttcataattgcctaaggatggctgaatctttcaaagactatattgagtcaggtcagtatgatgatttgcttcatttcgagcacgacatcgcaaaaatatcatcacaagttcttctatttctcgaaagccccggatcattagttgagttagggatattttcttctttcgaaagcttatatgataaaatttgtgttattgcaccagaagatcatgttgagagcgaagactcatttatttttttagggccactaaaaagaatatccacttatgtaaatgaagcagtactcacatacccatatgatgccgaaaagggaaagtttgacacatcagtgtggggcgaaatttgcgaagatattctttcaagagttaacagtaaaaataagattgaaaaattcaggaaaaatgatgacggccatctatgtatgcttatacttgagataataaatatctgctttcctgttcaaatctctgaaattgaatcagttcttttgtcttttcaaattaagatcccgcaaaaacgtctttctcaattaatctacctactactcacattagagctaatacaaaaaaagaaaagaagttcaaatgcatatttcttcccaccaaagaagctggctaatgataactacataaaatttggttcttattcagataaaaaacaattcgacaaaacaaaaaataaaataaatttaaagcaagaactcgcctttaatttaaaggataaagaacaacgacgccttagtgtattagccaagtatggtgaagaaaatgacaaataa

SEQ ID NO: 436098 - DNA, 255 bp, Serratia marcescens
atggagaagatcggcaaaatccgcagcaacatagcggcagcgcgtcaggaagtgatcgccccggtggtgtgggtggggagccagcaaatcaacgtgatggccttgatgctggaaacgctggaggaggagctggcgcagcagactgccgcacacacccacagcaacaccggcgcaccgcagaacgcgggggcaatcagcgccgccgacacgaagtccagccagctgaaagccaaatacgcgccagtgattgggtag

SEQ ID NO: 436099 - DNA, 789 bp, Serratia marcescens
atgacaaaccaacaactggaagaaagatttaaggcgcttgagaaagattatgaggcgctcatttccacaaagtatactgagcggagcgttctcaatcacagtatggaaacttatgttgattccggtaaatatcaaaactggatctccagagtgaaaaagttaatagaggacagctacggaaaagactctgattattacaatgactttaatactgcaagcgacagttggtttagtaattacaagaccctgataagaagttataagccgttgtttgatgcggcgagagatgatcttgcgcactctacggtcagtacgaatacgcttcaagaaagttcagcgctgagccttgtacttaatattcttaacaggtttccagcctttgttcgccagttgaagagacggcacaacggtcgtgcgccgcttgaagttaatgatgagtatgacgtacaggatatggtttatgcgctgctgacgcttcactttaatgatataagggcggaagagtatacccccagctttgcgggcgcagcctcaagacaggactttcttttgaaaaacgagaaaattgtgatcgaggtgaagaaaacccgtgagtcgctgggagccggtaaagttggcggggagttgcttattgatatggcgcgctaccgcgctcatcaggactgcgatacgctgattttgtttgtatatgacccagattgctacataaataatcctttgggtgtgaaaaccgatctggaatctaaagatgcggaaggaaaagtgaaggtggttattgcgcagttctga

SEQ ID NO: 436100 - DNA, 660 bp, Serratia marcescens
atggaagatattaaagcagccagcacacgattaatcctatcctctgctggcctcattctctttttagggggctgggcatctttcgctgactcgatcccgatcgggagtctgggattaagaattacttctcttcgtatagctcccatcatactgatcgcattttgggctttcagttggcagcgttttttcgtgctctcccgtaccgctaacaaacccgcaattgatgatttgttactcaaaagcgtcaatgcatctacacttgcccgctcaatatttccccctaaactctttggtttgcctggtgctgtcggggtgcataagtgggggtgggatcattcagaaattccacaggcagctcctgacaaccatatattttataaacgcatgttttttagtcgtttgttcatgtttcactattttggcaatgacacaaacgacagtgcactatgcgtacactttggcccggttgcttcaaatattaataatgggtcagtaacaccacttaaacgtggttactggaaatgcatttggtttgaaatcaaaacattagcacctagattttttgatacccctatcatcgggtttcactatttcccccattttttcgcctacgtcgcctttgtttgcctgctcgtctggtgttttggtttggttacataa

SEQ ID NO: 436101 - DNA, 309 bp, Serratia marcescens
gtgaaactgacatggacggaacccgccatcgccgatcgtctggcgatttatgaatggttggaacttaaaaatccggccgccgccgcagaagcagaagcagaagcagaagcagaagcagaaaatgatgcaaaaatcgctgacgcggcggcacgcctcgtgcatcatcccgccagcgggaaaacggggcggatagccggtacgcgcgagctggtcatctccccgtcctatttgctggtctatgaatgggcggctcaacgcgtcatcgtattggccatcgtgcatactcgccgtcggtggccgccggcatag

SEQ ID NO: 436102 - DNA, 2601 bp, Serratia marcescens
ttgcaaaatcaggaatttattgccggccttaaagcaaaattcgccgaatatcgcatcgttttctggcacgatcccgataagcgtttcctcgaagagctgggtaacctcgaactggagaacgtcacgctgctcgatatgaccgatcagtcacagctggcggtgaaaaagcgcattgaaattgatgagcctgaacagcaatttttgctgtggttcccccacaacgtgcccccgcgtgaactcgactggctgttggatattcgtctttatagtacggagttccacgccgatttcgctgccatcacattgaatatactaggtattccgctgcttggcttacgtgaacatattcagcgtcgcaaggcattctttagcaacagtaaacgcctagcggcgttaaaaggtctggtgacagagcaagaaaacgaagcctctcttgataagaagatggttgcagtcatcgctggcgtaaaaacagcaaaaacggaagagattctgttcagcctgattacccaatacgttaatcagcagaaagatgacgacagcgagctggaaaacacgctggcgatgctgaaacgccacgatcttgaaggtgtgctgtgggacattctgaatcaggaaatgggctatcaagccgaacatccttcgctggaaaacctgatcctcaagctgttctgtaccgatctctccgcgcaggctgatccgcagaaacgcgaatggctggaaaaaaacgtgctgaccacgccgtcaggcagagcatccgcgctggcctttatggtcacctggcgtgccgaccgtcgctacaaagaagcctatgattactgcgcacaacagatgcaagatgcgctgcgaccagaagaccagtaccgtctcagctcgccatatgatctgcacgagtgcgaaaccacactgagcattgaacagaccattattcatgcgctggtgacgcagcttctggaagagagcaccacgcttgaccgtgaagccttcaagaagcttctgtctgaacgccagagcaaatactggtgccagacgcgtcaggaatactacgctatttatgatgcgcttcgtcaggctgagcggctgctgaatctgcgcaatcgtcatattgatggtttccactatcaggacagcgcaacgttctggaaagcgtactgcgaagagctgttccgctttgaccaggcctaccgcctgtttaacgaatacgcgctgttggttcacagcaaaggcgcaatgatcctgaaaagcctggatgactatatcgaagcgctgtattccaactggtacctggcagaattaagccggagctggaataaggttctggaagccgaaaaccgtatgcaggagtggcgtattgcgggcgttccacggcagcagaacttctacaatgatgtggttaagccacagtttaacaatccacaaatcaagcgtgtgttcgtgattatctccgatgcgctgcgttatgaagtggcagaagagctgggcaaccagatcaataccgagaaacgctttactgccgaactgcgttcccagttgggcgtgttacccagctatactcagctgggaatggcggcattattgcctcatgacgagatgtgctaccaggcaggtaatggcgacatcgtctatgcagacgggttgtccacctcaggtacacctaatcgcgataccattctgaagaaatataaagggatggcagtaaaatcggacgatctgctgaaatggaaaaatcaggaaggacgggatcttattcgcgattacgaagtcgtctatatctggcataacaccattgatgccatgggtgacagcgcatctacggaagagaagaccttcgaagcgtgccgcaacgcggtggttgaactgaaggatttagtgacccgtgtaataaaccgtcttcatggtacacgcattatcgtcacggcggaccatggtttcctgttccagcagcagcccctttccgggcaggataaaaccacgctgcagatcaagccagacaatacgattaaaaaccacaaacgctttattatcggccatcagcttcctgccgatgatttttgctggaaaggaaaagtggcggataccgcaggcgtcagcgatagcagcgagttcctgattccgaaagggatccagcgtttccatttctcaggtggagcgcggtttgtccacggtggtgccatgctgcaggaagtctgcgttcccgtattgctggtgaaagcgctgcagaaaacggctgccgagaagcaacctcagcgtcgtccagtagacattgtgaattaccatccgctgatcaaactcgtcaataacattgataaagtcagcctgctgcaaacccatccggtaggtgagttatacgaaccgcgtaccctgaatatcttcatcgtcgacaacgccaataatgtggtatccggtaaagagcgaatctgctttgacagcgataacaacacaatggaaaaacgcgtgcgtgacgttacgctgaagctgattggcgcaaatttcaatcgccgtaatgaatactggctgataatggaagatgcacaaacggaaacgggttaccagaagtaccctgtgattatcgatctggcatttcaggatgatttcttttaa

SEQ ID NO: 436103 - DNA, 3669 bp, Serratia marcescens
atgaataccaataacatcaaaaaatatgctccacaggctcgtaaccagttccgcgatgcggtgatccagaagctgactacgctggggatttccgccgataaaaaaggtactttgcgaattgcggatgctgagatcatcggcgaaaccgtgcgctatggtcagtttgactaccccaaatccaccctcacccgccgcgatcgtctggtcaaacgcgcccgcgagcagggctttgacgtcctggttgagcactgtgcctacacctggttcaaccgcctgtgcgccattcgctatatggagatccagggttatcttgaccacggcttccgtatgctctcgcacccgaataatccaaccggttttgaagtgctggaccacgtgccggaagtggcggaagcgctactgccggagaaaaaggcgctgctggtcgagatgaaactttccggcaaccaggacgaagccatctaccgtgaattgctgctggcccagtgccacgccctgcaccgcgcgatgccgttcctgtttgaagcagtcgacgatgaagccgaactgctactgccggataacctgacccgcaccgactctattctgcgcggtctggtagacggtattccggaagaagactggcaagacgttgaggttatcggctggctataccagttctacatctctgagaaaaaagatgccgttattggcaaggtggtaaagagcgaagatattcctgccgccacccagctgtttaccccgaactggattgtacagtatctggtgcagaactccgtcggtcgccagtggttgcagacctacccggattcgccgctgaaaggcaaaatggactactacattgagccagccgaacaaacgccggaagtgcaggcgcagctggcagccattacgcctgccagcattgaaccggaaagcatcaaggtactcgacccggcctgcggctccggccatattctgattgaagcctataacgtgctgaaaaatatctatgaagagcgcggctatcgcgcccgtgatattccacagctgattctggaaaataatatttttggtctcgatatcgacgaccgcgctgcccagctttccggttttgcattattaatgatggcccgtcaggatgaccgccggatatttacccgtgatgtgcgtctgaatattgtctccctgcaggagagcctgcatctgaatattgctaagctgtggcagcagctgaacttccaccagcagagccagaccggcagcatgggtgatatgtttgccgagaataccgcattgccccataccggcagcgccgaatatcagctgctgatgcgcacgctgaaacgctttgtgaacgccaaaacgctgggctcgttgattcaggtgccgcaggaagaagaagtggaactgaaggcgtttctcggcgcgctgtatcgcctggaacaggaaggcgatttccagcagaagactgccgcgaaagcgtttattccgtatattcagcaggcatggatactggcgcagcggtatgatgcggtagtggcgaatccgccgtatatgggtaacgggggaatgaatggcgatttaaagacatttgctaaaacagacttccctgacagcaaatcagatctcttcgcaatttttatgcaacgagcattttccttattaaaagagaatggatttaacgctcaaataaacatgcaggcttggatgttcctatctaggtacgaaacattacgtgaatggcttttagataataaaagtattgtcaccatggctcatctgggggcgcgagcctttgggcaaatatcaggcgaagtagtccagactaccgcatggattataaataatcttcatgtcagacattataaacctgtatttttccgtcttattgatgggggagaagagaaaaaacgactttctttacttaaaaaaagtgaaaaatgcacatatgccaatcaagatgatttcaaaaaaataccaggaacaccaatagcctattggataaataaatcattatttaatatatttgatgatttttctcaaatggggtctgttctagagccaagagaaggcttaactactggcaacaatgataaacatgtaagatattggtttgaggtcaataccaataatataggtgctgtcttatctcgtagtgctgctaaggaaagtggaagaaaatggtttaactataataaaggaggggaattaagaaagtggtatggtaacaatctatatattgttaattggtttgacgatggtagagagttacagactactatgcacccttcttctgaccgcatatgggcccataattttaatttagattatatatttaggccatcagtttcttggtcagacattacgagtaaagggttagctgcacgtttttatcctgaaggatatttatttgatgcaacaggattgagtgcttttgagaaaaatgataatctgttgcctatttatgtatctctagcaatatgcaactctccaattggtaattatatctctcgtattataaaccctacattacatttcaaatcgggagactttgcaaaattaccatactctagaaaattggagagtcaagagctatatacattagttaatttagctatagaattagccaaaactgattggaatacttatgaaatctctaaagatttcccaaaaaataatttacttctgcctagtaaaaaactactagaaaactatgaaagaacagtatccaataatacagaagccaatgtccaacttattggaattgaaaataaaatcaaccaattattaactgaacacttccatttggaagagcttcagttaccaatttcggaagtaactcttttttcaaatatgaaatatagatttgatgaagtgaatattgatatacagaatagtaggtatcaaacggaaaccatttccgagctcatatcctactccatcggttgcatgatgggccgctactctctcgatcgtgaaggcctggtctacgcccacgaaggcaacaaaggctttgctgaactggtcgctgaaggtgcctacaaaaccttccctgccgacaacgacggcatcctgccgctgatggatgacgagtggtttgacgatgacgtcacctctcgcgtcaaagaatttgttcgcaccgtctggggtgaagaacacttgcaggaaaatctcgaatttatcgccgaaagtctctgtttatacgcgatcaagccgaaaaaaggcgaatcttcgctggataccattcgtcgctatctttccacccagttctggaaagatcatatgaagatgtataaaaagcgcccgatctactggctgttcagctccggtaaagagaaagcatttgagtgtctggtttatctgcatcgctacaatgacgcgacgctggcgagaatgcgtaccgaatatgtggtaccgctgctggcgcgctatcaggccaatatcgatcgcttgaacgaacaggtcgatgctgcctccggcggcgaagccacccgtttgcagcgcgatcgcgacaatctgagcaagaaattcaacgaactgcgcagcttcgacgatcgcttacgccactatgctgatatgagaatcagtattgatctcgacgacggcgttaaagttaactacggtaagtttggcgatctgctggcggatgtgaaagccattaacggcaatgcgcctgaggtgatttag

SEQ ID NO: 436104 - DNA, 3642 bp, Serratia marcescens
atgaatattgaacagatctttgaaaaacgtctggaccgaaatattaatggcgttgtgaaagccgaacagacggacgatgccagtgcctggattgagcttgatgaatacgtcatcacccgggaactggaaggacatcttcgccatttcttcgaatcttatgttccggcaaccggtccggagcgtgtacgcatggaaaacaaaattggcgtatgggtttcagggttctttggctcaggtaaatcacactttatcaagattctgtcgtatctgttgtctaaccgcaaagtcagccataacggtacagaacgtaatgcatattccttctttgaagacaaaatcaaagatgctctgttcctcgctgatatcaacaaagcggtccatcatccgacggaagtgattctgttcaatattgattctcgtgctaacgtcgatgacaaagaagacgccatccttaaagtcttcctgaaggtgtttaacgaacgggttggctactgcgctgattttccgcacatcgcccatctggagcgtgagctggctaaacgcggccaatacgacgcgtttaagaccgcattttccactatcactggttcaagctgggaaaaagagcgtgattcctactatttcatcagcgatgaaatggcagaagccctaagccaggccacaggtcaaagcgttgacgcctcgcgtcaatgggtggaacagctggataagaacttcccattagatatcaataatttttgccagtgggtcaaagagtggctggatgaaaacggcaaaaacatcctcttcatggtggatgaggtcggtcagttcatcggtaaaaatacgcagatgatgttgaagctacagactatcactgaaaacctgggtgtgacctgcggtggacgcgcatgggttattgttacctcccaggcagatatcaatgcggccattggtgggatgagcagccgcgatggacaagacttctctaaaattcagggccgtttctctacccgtttgcagctttcaagctccaacacatccgaagttatccaaaaacgtttgctggtgaaaaccgatgctgcaaaacccgcgctggcgaaagtctggcaggaaaaaggcgacattctgcgcaaccagcttgcctttgatcctacaaccaccgcttctttgcgcccctacaccagcgaagaagaatttattgataactacccgtttgtcccgtggcactaccaaattctgcagaaggtttttgagtctattcggaccaaaggtgccgctggtaaacagttagccatgggtgaacgctcacagttagaagcattccagactgcggcgcagcaaatcgccccgcaaggtctggattctctggtaccgttctggcgtttttatgccgcgattgagagcttcctggaaccggccgtcaaccgcaccatcactcaggcctgtcagaatggcattcttgatgagtttgatggcaacttactgaaaacgctgttcctgatccgctatgtcgatgtgctgaaaagtacactcgataatctggtcaccctttccattgataaaatcgatgctgataaagttgatctgcgccgtcgcgttgaaacaagcctgaacaagctggaacgagaaatgttgattgcacgtgttgaagacaaatacgtgttcctgaccaacgaagaaaaagagatcgagaacgagatccgcaatgttgaagtcgacttctctgcgatcaataaaaaactggcttcgatcatctttgatgacattctgaaaaaccgcaaatatcgctacccggctaacaagcaggacttcgacatcagccgtttcctgaacgggcacccgttggacggcgcgatgcttaacgatctggtggtgaaaatcctcacgccaaaagatccgacctatacgttctataacagcgatgccgcctgccgtccttatacttcggaaggtgatggctgtattttgattcgcctcccagaggaggggcgcacctggaccgacattgatttagtcgttcagaccgaaaaattcctcaaggacaacgccggacaacgcccggaacaggccagcctgctttcagaaaaagcccgcgagaacagcgttcgcgaaaaaatgctgcgcgtccagctagagtcgcttattgccgaagcagaggtctgggcgattggcgagcgtttaccgaagaaatcttcgacgccatccagcatcgtggatgaagcctgccgctatgtgattgaaaacacgtttgccaagctaaaaatgctgaagccgttcaacggcgatatcgcacgtgaaatccatgcgctgcttacagtagagaatgatacagagctggatctaggcgagctggaggaatctaatcccgaggcgatgcgggaagtgggaacctgggtcagcatgaacatcgagttcaataaaccggtctatttacgcgatattctgaaccactttgctcgtcgtccctacggatggccggaagaagaagtgaagctgctggttgctcgtctggcgcgcaaaggcaaattcagcttcagccagcagaataacaatatagagcgtaagcaggtatgggagctgttcaataacagccgccgccacagcgagctgcgtctgcacaaaatacgtcgtcacgacgaatcgcaaattcgcaaagccgcacaaaccatggccgatattgcccagcagccgtttagcgaacgtgaagaacctgccctagttgaacatatccgccaggtcttcgacgactggaagcaagagctgaatgttttcagagcgaaagcggaaggtggaaacaatcccggaaaagaggagattgaatcaggtttgcgtctgctgaattccattcttagcgaaaaagaagagtttgctctgattgagaaggtcaccacccaggcaaacgaattgctggatttcagcgaagatcgcgaagatttagtcgatttctaccgcaagcagttcgccacctggcaaaagctgggggctgcgctgaacggcagctttaaatccaatcgcagcgcactggaaaaagacgccgtggcggtaaaagcgttaggtgagctggaaaacatctggcagatgccggagccttacaagcacctcaatcgcatcacgccgctgattgaacaggttcagaacgttaaccatcagttagttgaacagcaccgccagcacgccctggaacgtattgacgcccgcatcgaagagagtcgtcaacgcttgcaggaagcgcatgccacatcggagctgcaaaacagcgttctgctgccgatgcaaaaagccagaaagcgcgctgaggtcagccagtcgattccggaaattctggcggaacagcaagagacgaaagcgctgcaaacggatgctgagaagaagattaaccagtggattgacgagctgcgtaaaaagcaagaagcccagctacgagcagcgaatgaagctacacacgctgcagaatcacagcagacctatgttgtggtagaaaaacccgttatccaaccggtaccgaaaaaaacacatctggtgaatgtcgccagcgagatgcgcaaagccaccggtggtgaagtgctggaaaccgccgagcaggtagaaaaagcgctggatacgcttcgtgctgccctgttggcagccattgaggcaggtgaccggattcgtcttcagtaa

SEQ ID NO: 436105 - DNA, 603 bp, Serratia marcescens
gtgatcgatcccgtgcttgaataccgcctgtcacaggttcatagccgcattagcgaagagcgctttctcaaaaacaacggctccggtaatgagattgggttctggatttttgattatcctgctcagaatgagctgcaggtacgtgaacatctgaaatatctgttccgtaacctggagaaggaccacaagtttgcgcacctcaacatctttcagatcatcgtcaacatgctcactgaacgtgggttatttgaacgcgtctgtcagcaggaagtgaatgtaggtaccgaagcgctgaaaaaacagctggttggcttgttaaaccagaagaagatcgcagattacatagcaaaaaaagtcgatcttcagaatcaagaatttgtcatcctgacaggcatggggaatgcctggccgctggttcgtggccatgagctgatgagcgccttgcaggacgtgatgggttttacccctctgttgatgttttatccgggaacctatagcggacacgatctctcccccctggcgggtattgattcccgaaattattatcgcgccttcagactggtgcctgaaagtgggccagcggcgacattgaatcctcgttaa

SEQ ID NO: 436106 - DNA, 603 bp, Serratia marcescens
atgaagaccgacaaaatttggattggagacctgttaggcgggccgctgatgagcagggaaagtcgaatcatcgctgagctcctgcttaccgatcccgatgaacatacctggcaagaacagatcgttggccataacatcctccaagcctcctctgccaatacggcaaagcgctatgctacaacgataagattacgcctgaatacgcttgataaagcggcgtggcggctcattgcagagggaagcgaacgcgaacgtcagcaattgttatttatcgctttggtgctccattctccgattgttaaggacttcctggctgaagtggtgaatgacctgcgcagacagtttaaagaaaagctccctatagatagctgggatgaatttgtgaccagccatcttcgtcagcaacccatactcaccagttactcagattcatccatcaaaaaaatgggtaacaacctggttaaagcattggctgaggcgggttatctggatacgccacgccgacgtaatctccagtcagtctttcttttaccagaaactcaggcgaccttgcagcgccttgggcaacaggaattggtttctattctggagggccaacggtga

SEQ ID NO: 436107 - DNA, 234 bp, Serratia marcescens
atgaagcgtatcccactgtccgagtacgtttcagagcacgggcaaacaaaaacggcgactgatcttggcatgtaccaaagtgcaatcagtaaggctctgaaacaaaaaagaaatgtaaccattctggtttatgaagacggcagggttaaagcagaggaacaccgacctttcccaagcaataaaccagcggctcaaacagaggctaatcataagcactctgccatcaagtcgtaa

SEQ ID NO: 436108 - DNA, 729 bp, Serratia marcescens
atgaaaaagaaacctctcacagcggaacagctggaagacgcaaaacgcctgaaggccatcttcgaagcaaagaaaaaggaacttggttactcccaagagtcctttgggcatgcgttggggatagggcaatctgcagttgcttctttcttgaacggcgttaacccccttaacgtttccaatgcttctgcttttgctaaggcattgaaagttacagttcaggagttctcacctgatcttgctaaggaaattgcagatattgcgcaagcgcttggtaacaatgaatttgagtatgcaggaaccctcaaagatggctttgttcctgtcgttggtgaagctgttcttggagtagatggctcggtggacatgattgagttccgggctggatggctccgtatttatagtgccgacaaggatgcgtacggcttaaaagtaaagggcgatagcatgtggcctcggatccaatccggggaatatgtggttatcgagccaaatacactcgtccatccgggcgatgaagtatttgtgaggacaaaagatggccataacatgataaaaatcatgaataaaacaagggatggcagctatcaattttcaagtgtaaacagcgagcaccggccgatcaccttagccgccggagaagtagaaaagatgcatttcgtctctgcgatagtgaaagccacgcgatacgtagataacgacgacctccctaagcacaacctcccttcttaa

SEQ ID NO: 436109 - DNA, 1044 bp, Serratia marcescens
atggacagccaaacaacagtaattgatagctcggaagcattttggggtaaggtggaggagtatttacgccgagatgaggaaaaccccggtcaggagttcggtttcgatatgacttttgcaggctggccaaacctgcatatcaacgtcaagggtgagaaatttcactcgtcgctgacgagttcaatggttgctggtcttacttctatgcatgagtctttccaaagggcttacgcaattgcgaagtatggttctcccaatttgcaacgattgactaacgaagataagcaatcacttgatattatatttagaatatccgaaggttctactgactcggacactgattggtctgacacgatcaaccatgctattgaatttttaaagggtgcgtttgaaggtatgactggcgttcaaaagatgacagtgctgatagctctcattacagccttaacggttgggggatgcttttacctttatcagggtgcccaaagtgaagctgctaccacggaagcggccactcagaacaccaagattgtaattgatggaatgaacaaggcatacgagttagctactcaagcaaaacaacgcggcgaaacgtcatacagtcgtgagattgaggcacatggtgaagtagggaagggctccttgcttaagtctgttgcaaacgacgctgaacaagtcaaagtcgggcatgagacatataccggggcccaattgaaggactacacaggccgccagagcgtagatcgtgaaagaaaagaaagctttgataacttttatattaaagggatccagagagcgggcctcacgagctcagaactaaacctgacggtagttcgagtaagcaacggggaatcattcacaatgaaagtggctgaagatatagctcgccctcaagaactcgagcagttggctcgttcgatcgttagcggagaagttgttcgaatcagttaccttgaggttgtagaaaatggccatgttgcaagaggccaatttaacctgatacttgacaatcagccacctcaacaatcgcaaaatccgagttga

SEQ ID NO: 436110 - DNA, 2472 bp, Serratia marcescens
atgaaggcttttttgtcacacaacttttccgacaaaaattttgttaaaacaatctatgataatttaactgctacacatgcagttttcgatgaaaaaactttcccatccaattcacatctagttgatgaaataagaagtagcatgcttgattgtgatgtttttgttctttttttgtctaagtctgcacttgctagtgattgggttaatggggaaataaatctcgctaaagaattagcttttgtaaaatccataaaaaaaataatggtttttttgctagatgacactaaatggagtgagttacctgctactttccaacaataccgagtggagtcagttccaaacccaatacagatttcaatcataataaaaaacgagctatatacattattcaataataagatggatgaatgttatggtcgagaggatgatgtaaagagaattactagtgatttagttactatggatgacaagcccaagttcatttttttaagtggtcctgatgggattggtcggaaaactttaggtagggaaatatatagaaaactttacaggtttgtctctggagtcattgagttgtatattgatgaatatgcaaacctagatagtattcattcatctttaattaaatatactgccaattggagagggcgtgagtttttagatgagaaagaaagatttgaaaaaatgaatgaggatgagaagctaagattaataggtttgatgattgatgaaatttgtatcccgagtaaacaagctttgtttgtggatatatcaagagtcagcctgaataatgatggtgaattaactccaatattaagaatgctaatgacctgcttgaataaaaactcatggcctcatgtggtctttatttcaaaaaggaacttggaaatagatgggttagatggagggtgttcttatcaggtatatcctcttagtgaaggtgactcgatatatttattcaggatgttattaaactcatatggtgtcgatataccaaagcaagaagtgagtataattgaacaaagtgtcatcggacatccggggttaataaatatggttgcaacatatttaaaaacgaacccaacttataaactaaataaaacacatgggacgattgtatctaaagttaggacggaggttagcagattaatacaagattttgtcaaaaatgatagagaccaagaaaaaataattggtttttttggtatggcggaaatcatttccttcagtgaagcaaaggaaataggggaaagctggcctgaattcgaaaatggactatcaaaactgattgatgccggttttttgcaataccaaaaaaatgattacagactttcttcctatttgcagaatgaagcacagaaatattccgttacatatagaggggagttactcccaaaaatcaagtcgcttttaaaaaaatatactgagctagataatgagacttatgtaccaatcgacattctcgatgcaagaatagtatcatacttaactaccaatgagcctatgcctgactatcttcagagttttctgatgcctattcaattgataaaggcgtcaaaaagaagatataatgagagagattacaaagacgctctcaaacttgccatggatgcttatgaatggcgagggaaattaagcgctgaaggaataattgaggtgtggaggttaataggattatcttcagctagaattggaaatgaagaacaattcgcttttttccaagaacagtatagcaagatgcctaataattataaaaaagatataatatataattttgttaatggttttaagtatagattaaatggaaaattaaaagatgcatcaagttggttgatgaaaattgaaaataatcggaatgtagatgcatatgtttatagagagattgctacaatatattcttttgatgagcgatttgatgaagcaattgattatgcagataaagctttgtcaattgatgtagataatccttttattcttgatataaaagcgtgggcgctattatcactttatagaaaagaacgaacaacagctttagttagcaaaattgaagagtgtcttgatagattaaagattgctgatgaaaggaaaaatacaacatttttccatgtgcgtgagagaatgaaggatgttcttgtggatgagcaaagtgttaatctattagattctctttctaaaaatacacgattgaatattcagttaaagatatcgttacttgagattttttctgctaagggtagagactatcaatatgttgagttattaaaagatattcagatggtgattaagcagaagacagaacataggatcattgaagttaatttagcgaaggtgaaaattaaacatgctattggacagcaagactttcctgaagcagaagtgttaataagtcgatggggggggagatttactgattatttagaaaatagccttagaactgagattcagaaagcaaaagcttattcaaaaaaataa

SEQ ID NO: 436111 - DNA, 1764 bp, Serratia marcescens
atgagtgtggaaagtaaaagtgttcagaacttgttttctatgtacaagaatggggagtttatagttaaccgtcgatatcaaaggaaactggtgtggctaatggaagaaaaagaaaagttcattaattcactgctacacaactatccgatcccgatggtgttaacatcaaggtttatagatactgaatataacggatatgaaatactcgatggtcttcaacgattgaacgccataacgtcatttatagaaaatgagttttctgtaggaggtaaatattttgatttagcatcaacagcacaaactcttgagcttctgaaaagtggatcagttcagcaaaaaactcccactcttagcatagaggaatgctctaacatcctgaactatccagtgcctatttctgtaactcaatacaagaatagtgaatttatagatgaaacctttagaaggataaatacaggaggaaggaaattatctaaccatgacattcgtcaggctggtgcccttggcgaatttccaatgcttgttagcgagttggcatcttttgttagaagggataagtcaagaactaatttggttaacttatccaatataaaatcgataagcattagcaacaaaaaaatgaattatggtataaatattaatgatgtgttttgggttaagcacggaattataaatcatgagaatatcaggtgttcaagggatgaggagttggttgcttacatcactagttatgttctcgataaagataattcttccacgtcatccgtttaccttgataaggtatatgactctaattcaagtgcggctgcatcattaacaaccaagataaatgcttatgggcaagaagagttaacaaacaggataaaacacgtatttgaacagattgaaaaaatattatctttggacggaaactctccttttaataaactctgttacaaaggtaaggctttaaattcttcaatgacttttcagatagtgttcctgtcattttatgatttaatagtaaatgagaatatggaggtgtcaaactataaaaagatacatgattcactacgcaactgttatgacaccttgttcagtaaaacccttgaagggcaaaacaagtggtcaaacaaagatagacaaactttgataaatgcgctgtccggacttcttgttaaaaacatgagaaaatcaggggaggagaaattccctcacggtaaaaaagtagagagcttagaagggatactgaacgaatcatcagttgaacagacatattatgattttaaggccggattagtacaaacaagtccgcccaaaaattacatcaatcaagaaaccttcagtaaagtcgttaaaactttaactgccatgataaatacctatgatcaagagtgttcggtaataataggagtggcggaatcaaaggacggcgcagagaatcacaaggcggcgtacggaaataattacatacaatatagtaatttctacattgtaggtattggtgatgaagctataaaaagtcataagtccatagatgcatatttaaataaaataatacttatgataaaaaatgaacctattagcgatgaaatgaaaaggcaattggttgataaaataaagccatttaactatcatggaaaagaagtgttaatacttaatgccgaaagaacaaagaaaccagaaagctacggaacatccttgtatattagagagggatcaagcttatctcctgtagaaataggaacacctgagttttattccttacttgataaattcaaataa

SEQ ID NO: 436112 - DNA, 846 bp, Serratia marcescens
atgagcaaaataatagagattttcggtttggatgcttactcagaacaaaactgggaaagcgtgattcaagagcaacgttgcccttttaggcaaaaggtttgcttcaaaactagaaagtcaaactcgagtatagccattggtacctgttctgtactctatggaagagaccctcagccaataatgatctgccctgcgaggcttttggagcgaggtcagatatttacagattgcttgcatttgctaaccaaccatgaaccgggtaacgaattgcatgtagttccagaggtaaaaattccagggggaaatgttgacttctttttggtttctgtaagagaagatagagttaaggattttgttggtattgagctacaaactatggatactacagggacggtatggcctgaaagacagcgttttttgagggaggttaatattgctcgagacgatgatgcagagcactcaaccaaaccctacgggatcaactggaagatgacggcaaaaactattttggttcaaatgcaccataaggtaaaaacatttgagcatataaataaaaagcttgtattagtggtccaggatcatttattgaattatatggcaggtgagttcaacttctctcatttgaatcaacctgcaagacttggagattcactgcactttcattcttacagtatgaaccgtactgaagaacaatacagaatttatatgaatacgaggcttagcaccgatgatgaaggtatttcgcagtgtctaggtcttcaagctgaggctcgagtggaacttgaacaaattatcattgttcttgaaagaaaaatcggtccagccacgttgttccgtatgttttaa

SEQ ID NO: 436113 - DNA, 1350 bp, Serratia marcescens
atgaaacttattgctaacggattaaatggagagttttttagatcatgtttaccccctcctggtaaagaaattgatggtgttgttgccgccattgcttatggagatgataaaaccacgctcctcgagcattgcataaaaaaccatcaccgacttgatatttggatgcgatatgatcatacagttcctgtatcgcctgcatttttatcaaaacttctcgcaaacgttaaaaataatattttttgtaaacttataccagatcgcctgcacagcaaagttatttggtggaagggatatggcgcttatattggttcagctaatttaactgagcgtgcatggtactcgaatatagaagccggtattttcttcactgagagtgatttatacagttctaatttaattgaacagttagaggaattcttcgataacttagcatcacttgactcttgcgttgatcttagtaaagagattattgatgaacaaagacaattattaaaactaaaagtcgaattagagaaaaaagaacgagagcttatcaaaaagcggaaaatacctgaatggggtggcttgaattttgttgataacaaaaaaactaaagatagaaggaaagagaatttccataaagaatgggaaagcacattttcaatcatcaagagtatctcagacaaaattaatgattacagacctgcatggatatcagaagatactccaaagttttggcaaaccgatcaatttctacacgcatactattataaaaaagttcatcaacaagataatacttatccttttgaggattatcaccgtaccaatagtaaaaacccacaagcagcattgatgaatatgctctcctggtggaaaacccaatcagttcctccgtctaatgaggatattcatcttgggatttacgccccctacattcgcgaacacttgtcaaaaaaaaatattggctcattgacagaggataagctctatcaaatattctcttacacacatgcaacaatggaccatgtgataaaaatgagcgctgaaacatttggctattcagccaaaacatccttaaataaggaagagcgcgccgttttattcacaaaatggatcatgggccaaaccaatcaaaaaggtatgactattgctgaattgctcaactatgtcctctacggtggaaagccttcattaatgtgggaaaggctctatctggcaggcaaagacgaggagtacaaattccagcattacggtattaactctattgctgaagtggtcggttgggcaaggccagaagatacgcctcccagaaatggcagaaccaataaagcattacgagccctgggttatccggtcctagttaacatttaa

SEQ ID NO: 436114 - DNA, 156 bp, Serratia marcescens
atgcagctcgaacaaaacgcgaattggcagactaaagcgcgcggcgacaacgacagcgaatatcagatttaccttgcctgcgctgacgacggcaaaggcaatgaattcatgaccggcaagccgctgaaaacctatgacgagtggctagccagctaa

SEQ ID NO: 436115 - DNA, 786 bp, Serratia marcescens
atgaccaagaactctaccgaagcctacggggccagcggaaaaaccaacgtactcaattttgagcccgaacgactgcaccttgtaaccgacacagcacacccgctctacgatgagcgcattcacttgccgctggatgagtcgatgatcttgaacatcatggatcagggcgtgctggagccaatcatcgtttggaaagaccctgaaaccggcctgtcctgcgtcgttgatggccgtcagcgagttagacataccgtagaggcaaataagcgactggcagccgctggcaaggatctgctgttcgttcctgcagtaactaaacgaggttcagctgtacgcatggcgcaggcaatgatcagcgccaacgagattcggcgtgccgataccccactgggccgagccaagaagatggccgatgcgttggaacgcggccacgatgaagaagatttgtcactgatgtttggcgtcggcgtgcagacgatccgcgccacactcgccctactcgatgccactcaggccgttaaagatgcggttgaatctggcgacattaccgttacccaggcgcgccaactggcgagcctcacacccgacgaacagcgcgaaaaagtgaaagaggttgaagcggccactgccggcaccaaaggccacgaaaaggcacggcgccagcgccaggtgattggcgatgctaaaccccgcatgaagtcccgaaaagaaatcacgaaggcccttgagggtgcgatcggtgattacgctcaggcgctccgatgggtgctgggagaagacgaatga

SEQ ID NO: 436116 - DNA, 780 bp, Serratia marcescens
atgaaagagcacccagtgattttcaacggcgagatggttcgcgccattctcgacggccgcaagacccagacgcggcgggttatgaaggttcagccatctgagcatttccaccctatgaatatggcccttgaattggattattccgctcgctggtatacccctggcgtcgtcgataaagacggttatctgcaaccggcaaagaatcagattttcggcgttgcaggcgaggatgagggttatgcgtgtccgttcggagcggtaggtgagcggctgtgggtacgcgagacgttcgctgatgtaaatacagatggtgggcccgcattcacgtatcgcgcagaccacggccttaaattctgtctcgatgatgaatcccccgtcgagtatgaccgttacccgggtaaaaattttgcaatgtggtgcagcgacctgtggaacggcgaagacgggcatagctggtctccatcaatccacatgccgcgctgggcctcccgcatcctgctggaaatcaccgccgtgcgcgttgagcgcctgaacgatatcagtgaaagcgatgccaaggctgaaggtgttcgagcgatcgaaaacaacttcggcaatggccctgcctactgcgattacctgctgcctaatttggatgacgctgctgagtggtacaaccgcgcaagcgacagcttcaaaagcctgtggaagtccatctacggcgaagaaagctggcgcgccaacccttgggtgtgggttatcgagtttcgtcgcgtgggaggtagtgatgccagcaaatga

SEQ ID NO: 436117 - DNA, 249 bp, Serratia marcescens
atgccagcaaatgaactgaagcagcaggctgaagcactcggcattgtcctgagctttgatgcgaacttctggagtatagggccatgcgtcatcgccacgttccctacgcacaacggcggcgggtgtgattcagcattggcatggatgaagaatttcagcagccgcgatgacgcggaagcctacgcgctgaagattgccatccgcaacgcaagcccaggtgacagcgctagggaggtggagcgtgggtaa

SEQ ID NO: 436118 - DNA, 258 bp, Serratia marcescens
atggctaagcgtaagagcaacagagcggcgcgtcggttgttgtgcgtatcagctccgggccctgaagactgttaccgcatcagcaaccggcgctggcaggtgtacagcgccaattacccgcactcatggcagcacgttaaaccatcccgcagccagatccgagcggataaacgtcgctatgcgtggctacgagagaatgccagtaccgattgtgactatatcggcatagctgaccacaacccgcagtttcactgctga

SEQ ID NO: 436119 - DNA, 231 bp, Serratia marcescens
atgattgaagcattcaaggcaatccgacgctacaaggcggataagcaaaaatatgatgtctgggttgaaaagttctcagagcagattcgcaaatgcactggcaacgacgatagtgctgtcgccgcggagctggagtcctggccgttcgagactaacgacacgctgtacaactggcggttagaagacccagttgatgcggcattagaagctcttagctattacggggactga

SEQ ID NO: 436120 - DNA, 183 bp, Serratia marcescens
atgaccacgctgagtgaccttgagaaatcaagtagagaaaaccagcgcgtagtgcgcgttaacgttggggttttgaaatctgccattcgtgaaatcgaggcacacgcgaaagtaaacggtaaaggggttttcacagacatggtgctgaatgcgctgaattctgcggttaagggggatgcatga

SEQ ID NO: 436121 - DNA, 615 bp, Serratia marcescens
atgacactaacgaccactgaagagctgaagcatttggcttccagcgacaacaccaacgaactgacgcgccgattggctcgcgagtgtttggctaaccgggaggcgcagccggtggcaattgttgaacctagcgattatgtgacagcggcgcagcttgttggagaagaaccgcgtagcaaggcagtaaggccattatttgaaggtgcgttagctatcgggatggagctctacaccgccccgccagcgccagcagcgccagaaaaatgtccagatcgagtgcgattcttgatgaacatgcatactgacgatttattcggtgatgccgatgctcaagaaatatggaacgcctgccgcgccgcaatgctggctcaacctgtaagtagcggttacacgttcaactctccggaaattccggatggttggatagcgtgcagcgatcgcatgccagaagaaggcgatgtcgttctggtgtgccaggaaggtgggattatctactgtgcggaaatgcaagatggtgagctttatcccgatgaattcccgcgcgtgccaagcgaaggccgggaaattactcactggatgccattacctgcagcgccggaggatgggaatggctaa

SEQ ID NO: 436122 - DNA, 141 bp, Serratia marcescens
atgatgactttcaaacctcgcttcggcggggttttttatttctggtttgtgaagtgggcggcggtcagggtgttactgcacactgaccaccagacgctcatgtcgaagagtcacaagcaacctttgcccgtgctgctatga

SEQ ID NO: 436123 - DNA, 213 bp, Serratia marcescens
atggaggcgatgcccatagagtggcaggaaaagatggctaaattattgtttgagtatgacgaacgcatagatcagagcgtatgcggggtgcatagctgctttgtcacggtaaagaacgctgacaaccgctttatgaagatgccggaggagctgttgaattaccgacatccgcgccaagagtttattcaaagtttcctgcgtgagcttacatag

SEQ ID NO: 436124 - DNA, 627 bp, Serratia marcescens
atgacacaaaacgaatttcaacgggcggcaggtatcagcgccgggttagctgcgcgctggtatccgcatctgctcgtaacgtttgcagaattcggcatcaacaagccgttagagcaggcgatgtttatcgctcaaatcggccatgagtcaaacggcttcacggccaaggtcgaatccttcaactacagcgttgatggcttgatcgctacattcggccccaaatcgaaagccaaacggctgactgactatcagtgccggatgttggggcgtacagcccagcagccagccaagcaggaagctattgccaatctggtctacggcggacgaatgggtaacagcgccagtggtgatggttggaagtatcgcggacgcgggcctatgcaaacgaccggcctgaaaaactacatggcttgcggcccggcgctgaagcttgaccttgttggtcatcccgagctgttggaagaagacctgaacggcatgcgttcggctggctggtactggaaagctaacgactgtggtcgcaacgctggtgatgttgagttgaccacgcggcgcattaacggcgggacaaacggcctgcaggacaggcgcgaacgcttcgagcgtgcctgcgaggtgctgttatga

SEQ ID NO: 436125 - DNA, 174 bp, Serratia marcescens
atgatttacctcctgccgccagcggtgctgctgcaacaatgcgatgacgcgccgttcactggcacaacgttcggtgatgcagtgacagcgctgcacgccaaacaaggcgaaatgaaggtgtgcgcctcacgcatggaggcgttaatcaagtgggcgcagagcgccgggagatag

SEQ ID NO: 436126 - DNA, 1023 bp, Serratia marcescens
atgtcagcaggcggtcaaggtgatgatgcagatttaagcgttgttgttttccaaaatggctcccagcttgttaacttccaaattcatggggaaactcaagaaatctgggccacaacgcgcgatatagcacagctttatggcgtagatgatcagacgatttcctatcacattaacaacattttctcagatggcgagctgcatccagaagcaactacccaagattttcaggtagttcgaaatgagggaattaggcatgttcgcaggataatcagccattataacatggatatgattatttctatcggatatcgcgtaaatgctaagcaagctatatcattccgacagtgggccactcaaacattaaaaacatatcttgaacaaggctatgttattaatgaaaaagcacttcgtgaatcacctgagaaagttaacgaacttgctgcaaaagtacgtgctatacgatctgaagaaaagcaagtttacgccaaagtccgtgattgcttcaaaattagctcctctgattacgatcctaagtctcaggaagtacgcagtttctatgcccttctgcaggataagttccaccatgcaataaccgggatgaccagttcaaaactgatacttgatcgcgcaagccatactgaagaaaacatggggatgtactctatgaagggcacattccccaccaaggccgaagtgcagtcaggcaaaaattatctaaaacctgatgagctgtaccgattgcatctgctttccgagcaatttctgttgtatgctgaatcgacagcgctttcaggtaaaacaatgactatggcttcattgcacgcgcagttggataggttacttactttaaatgattacgctgtgtttcctggatataccgattacattaaagacgaagctatggaacatgccgcgattgaatttgacctttacaagaagaaaagacacattgaaaaacaagggtatatgtatgatgaagagctttttgcattaggcgaatacaaccacctatttgaagaataa

SEQ ID NO: 436127 - DNA, 534 bp, Serratia marcescens
gtggacaacaaagactttccgacccaggacgacattagcgaagcgatacacaagctgatcacattgttcccaggtaagtacagcgcgatggctcagcagttggacccggtggccggtaccgataacgcattgcgaaaccgcgttcgccaggtgtctggtcaagtcgtgccgctgggtatggcagttgaaatggagtcgatttctggtcgtagtgatatcactgaagcgatgtgcaaaagggctggtggcgttttcgtgaagcttcccgaagtcgagcagatgggcaatgaagagctgctttacaaatttaacgatctgctggcgtctctcggccagttcgcgcgctttcacaacgagtctacatcagacggcgttctggaccgcgaagaaagcaaacgcatgaaggccaagggctatcgggtgcagtgtctggtggctgaaatcatggtcgttacagagatgttgtttggagagggtgacgccacagatatgcggtctgtggcgtcggtcgcattaactaaacgtgtggagtaa

SEQ ID NO: 436128 - DNA, 606 bp, Serratia marcescens
atggatcttgttttgaatttactgacggatcccccccagattctggcgggtgagaactgccctttttcgtgttttctgaacgttcggattctgaacgttcagatcctgacatgtcagattttgaatggtcagattctgacctgtcagaaactggacggtgagactcgatgcttaatgctgcggccttcagctttggcacattcagggtgtaaatattgctgtcgtttcgctgccctctacggcgctccttgcgtgtcagccatccatcactttctaattcgccgatcgctgtcgttaccgtactgcggccagcaccgatctcacgggcaattttctcaatccccggatagcagatcccctcatcattcgagaagtcagccagacgaagcattacaagcagcttggtaccctttacaccgtgtgcagcgcatccgtcccagacgtaacttgagaccttcacgctcatacagcagctcccggcgccggcagtgccaaatacttgaagcgacccacaacttcctgcaaagcgctgtgggtgacaggcatccagccgcccggtattctcatcacataacgcaacggcatgagcggcttggaacagcttga

SEQ ID NO: 436129 - DNA, 1419 bp, Serratia marcescens
atgccgtccgctgcgtggcgcggtgaaattgtgtggtctgagcgccctgtgttaacggcacaaaagctgtcagcatcaggtttcgtattcagttacatgccaggcggcgaggcaactgcgggggctggtgtgatgtatgtcccgtccctgcgtgaaatgcccgttgacgctgaagaatcacatggtggtggttcagcaggccaatcgctgaatctttcagccgatttagccggttcaaacatcgtcaacaggaaccctgcttttcgtggccgcttattagcgggtgcgcgaggcaaaccggaaggaaataatattaaccctgtgacagttgatgatgtctcgacgatgaatgatatgagcgacccctcatatcggcaggggaacattctgccaatgtataacgcattgatgcatatgggggtaggcaatatcgtctttatccatgccccgttcgccgccggtggtcgctcatttgtgcaaattagccgaggtacagtgccttatgagaacggcctgaaatacgtgaaaatggctaaatccgcctctgatgcagtgggtaagcgctatgtattcaagttcctcggattcgagcatggcgaaactgattccgataatggcgactgtccgaatcctggggactatcttgcgaaagaaatcgtttatttccccggtattcaaatcgactttaaagccatcacgggccaagccgacgacttcctgattgttatcggccaagtcggtagtcgcagcgacaccaaagctggagccgttgatgaagagggcaacccgacaggcgaaagcatcgtggttcaaccgtactcagttccagcggttgaccaactggaatatgtgcgtcaaaaccccagcacagcaattatgtatggccctaagtacatgctgaactggctctataacgacaactcactcagtcatctgaatgcaaaggggaaagtgcttcaaggcgaatatacagctcaggcgattcactggcatttgtacaacgcagagaaaaaaggcacatggacggggtttaaggtaaaaagccttaccgtatcaggaaatattgcggatctgctttgtgatgtgccttacgcgccaatcgtcattgatacgacgttcatcgcagattgtttgaatcagggaattagcctggaaaaaaactcggcatcggttcagagcgtcaccgtcgttgacggtaacattattcgtgttgagtttgataaaacccccgcatcagacgattacatgctgattggctttactaataccgcgctaagttcaagcggccacgtttatccgcttacatgcttccgtgattcatctccaattaaatcacgatggattatgcgaaataatgccccattcccactttacaactggctgtgcctcgatcgcctgccaatgaccggagaattttaa

SEQ ID NO: 436130 - DNA, 186 bp, Serratia marcescens
atggtcgaccatactcagaagcatcggaagaaaattctgcaagcggcggtgaagacgcggcgcgccgctctgccgctcgcggcgaactcccccgccactgcgcattttattggtttgccccatcagacggaggccgtgctggtgcacctggtcggcgatgatgacgcacaagaggagcatgaatga

SEQ ID NO: 436131 - DNA, 195 bp, Serratia marcescens
atgaaaatctcaattaatgactcccttgggttcaatctcttctcttcgtttggtgctgacgtgatcaaccgctccgcgctgtgccggatcatgggcttcgacgataaccgctttcaccggtacgagaaaaagaacgggtttgaacgcgccctaaaacacttcatcgctgaggctcgcaaggctaaagctgaataa

SEQ ID NO: 436132 - DNA, 432 bp, Serratia marcescens
atggcagacacaaaaaatacccgcttcgacgatgtagaagatatcgcgcagcgtctggcgtccggccgcactttgcgtaagtctctaatccaacaggctagccgcttccgtaagaacggccgccacgatctggcgaacaacattaaagaggcgctagctcttgagttggaccagtacccgcagcacaccgcacaggcccgccgtctagaagaacgtgcagcaccgatgaccgcagaagaaaagctccagcttcgtgtgactttggacttccacggacagcgcgacctactgacggacgtgatcgtagcttggcaggcattctacgccgcacgcggaatggagatcagctctaaggacgtgtttaccatgatgaccttggaatccgcagcagatttcgaacaagttaccggcgaacctatcgcacgtcagtaa

SEQ ID NO: 436133 - DNA, 927 bp, Serratia marcescens
atgaccacagcagcaccagcagcaaataacgtagtaaccctgaataccgatattcaaaacggcaatgtagcagcattgaacatcgtcatgatgttggaatcatacaagggggttaagttaacccttgaaatgaaaatgacttacaacctgatcctaagcttcacccgaaccggcaagcgtgccgagtttagtcagtcgtatcttgcagcctatttgtcatgctcactctctacagtgaagcgtgcaatggcaactctgaaagaattggaactgatcgctgccgacccagacaaccggggaaggggagacgtagacttgctagaagcgctgccgatcgtggtggcgttcgcgaagtctgccgaggtgaagagagtaaataaccgtaagtcaaaggggaataaaaatgctgcaagccgtccagctagaaagggtaaacctcagctgcatgttgtccaagaccaagaacaacctaacaatgattacagcgacaactctggggatcctgtccagcatgatgatcttgattcagaacagcccgatgtaattaatacaagtgagtcaaccgaagtaaccgaactgcaaaatgaaggggtaagcgttgatagtattcttcatgttgatgactgcgatcacgatgatagcgacgtggtgacagctgccgagcctgaccagttggatcagcaaatgattgaagccgagaaggttggattagtgatcgacatggtggaggttatgcgcttttgtcgtggagaccgtgagaaggccgccatgcggttgcgtggtgagatcaaggcaatgcacacccgcaccgagttagaagcacagggggccgcacaggcctcggattgggcatctaacaatgacagttacgatgatggttacagcattgatgatgattggaacccggaggacggcgatgcgtactga

SEQ ID NO: 436134 - DNA, 582 bp, Serratia marcescens
gtgattgagatttccccagcagaacaacaacgcattgatgatctagccttccgcctgaccaacaagccgctaactaaaacgaatatccgagcgctgaacctgtcacccgctcaagtggatacgatccgccgtgcgtgcatctggggttatgagcctcatgagattgtgagcatgtaccattacgccacgttggccttcgtgttagaccagcgtaagaagtttaaccacaagctgcgccgacgcttccaaatctcacttaactgtaagatcgccatgtgtcattgcatgacccgcgacggcaagagcaagcgagagattgcatgcctgttggaagtaaacacgcagacggttaaccgctggctcactgatcaccaatacccgacccaactgattagcaaaatgcgccactggtccgagattttggaatccctacacgggccgcgccctcttaacgtgagtagcccaatctttaaaccaaccagcaagacggctaaagccgatgagaagaatagaaacgttgtggcgaaggataagcacgataaacaggattacaagcatagactacaggcagttggtcattaa

SEQ ID NO: 436135 - DNA, 408 bp, Serratia marcescens
atgtccaacatcgcagacttgatcaagaacgttcaagcccatgtcgccgaacaaaagcgagtccttgaactggaagccgcctcagaggtcaccaagagcaccaaggcacaggatgagctagaagccctgatcgccagctctggtgagttcctcgcagctgtagaagctaccgaagccaccaagtccggcaagggccgcaaggtcaagagtcgagggattgcccttgtccattctgtacagggtgggccagccaataagcgccctgagtcgctcttgatgaagtcgaaagatggaaagcgccgggtgcaagttgagatcagcaaaagcggggtaagagtcctgacgccagagcaagaggccaacctgaagggcatccttgcaacgctgaagatgaaaggggcggaatga

SEQ ID NO: 436136 - DNA, 282 bp, Serratia marcescens
atgatgaagagcaacaccattgtaagcttcgaaatctcatccccggttaagacattcgccaagactggaccagatccaaaggtggatcgcctgctaacccgcatcatgggcaagacgccaaatcgaatcatctcagaggtggagttcggacgcctcactctggccgatttggagttggtccgctacgacgtccaccataaccggccatcgacgaatattaaccgcatgattgttgccagcgtgagctatgcaatcgcagaattgaaaggaaacgataaatga

SEQ ID NO: 436137 - DNA, 2049 bp, Serratia marcescens
atgagcaacagcaatgtagttgtgacgagcaccgtcaacaaagtatccttttctgtagatcatggcagcttcgccaaggcaaagaaagcgatcaagagcatcggccaagagtgggataagacagcggccaagattaagcccctagccgccaaggtcaacccgaaaggaagcgagcgtttcaaacaatcagagtacacccgccgcactaaagcagcccgtgcagaggcagcacgcgaacagctgcaagcggagcgtaaaattcagcaaatacgagccaaggccattcgtttctcgaccgccgccagtaattacaacctgaccggcaagcaaagaactgaatcactctctcaatttggtgatctgacccgcctgtttcatcaagggaagcttgccgcaggtgagtacaatgcggcagtttccaagcttcagacgaacatgcggaaacagggccgtgtagggatgaaaggccagacgttgcccgtgacggcgaaagttacccgccttgatacatcgatgatcgaaggggcaaagggtgcaatcaccattgccgccacggtcgccgtcgggaagtccatcatgacagccgggcaagatctgcaatcgatggaatcgggcctaaccgctgttaccggttcagccgacaaggcagcgaaggaaatgcagtatctccgcgatcagtccaaccgtttgggccttgacctgatcgagactggtaaggattacaccaagttcctagccgctgttggtgacaaggcgacacagaagcagaccagagcaatctttgagggtgtttctgaatatgggaccgtcctaggcgcatccgcagatgaccaatcccgagccctgaaagcacttagccagatgtattccaaaggaactatccaatccgaagagctcaaagggcagctaggggacgcgctaccaaatgccgttggcatctttgttaaggctctccagaagacccagaagaacgccaacctaacagagaaagacctgtttaagatgatggaacagggccaactgttggctaaggatcttctcccagcggtaggggaagaatttaaaatcgttgcccgcaatggtggcgcgctcgataaggcggtaaattccaaccgtgccagcttccagcgtctgaagacagcaatgcaggcatcaatgggcgaattcttcgatggtggcttcggtagtgctctaacgagcgcctttgataccatgagcgccgcactgaacaacaacgccgacacgttcaagttttggggtgatttgaccgggaacgtgatcgagggagccacagacgccttcgcatacctctacgacacgatcgtatttgttgcccgtgttggtggtcattaccttgaaaatatggggatttcattcgaaggcctgaaaggctggggtgagatggcggcctatgcattgggcgtaacagcgtttgctggcagtatgtggaagctgggcggggcgttgaagtggatcatcggcttcctgaacccactaaccaaattgcttggcgtgctcaagtcgatcagcgcactcggcggagtggaagcggctaccgctggcggtgttgctaagacagcctccaagacaacaggcggcgtcgccggtgtagcctctaaggttggcatggtaggcaaggccggtaagcttctggggcctctgggaacgctgtattctgcatgggaagtaggacaatcccagtttggtgatccaactgaacggatcaatcaagccagactcgagagtaagcctactaatccttggctggaggcagcaggccgggccgctggaatgtatcagctggccgactctatcgcgccacctccagcactcagaccacagcctacaatcgatctgagcagcgtttattcaggctccgccatgatgaataattaccgctacccggtatcagcaccacctcagacgcataagcttgaagtcacctccaccgttaaagtacaagatggggcagtgcgtggactcatcaagcaagagatcgaagagaacgatggacattcgatcaacatgttgatccaaggcggtcactaa

SEQ ID NO: 436138 - DNA, 138 bp, Serratia marcescens
atgagagtgtacagctcatatacgaatggtattgtggattactatgcctcttatgctattaaagaggctgtcgatataagtaaaactgatattgatatgcaacctctatttttaaaaataattgataacttgaagtaa

SEQ ID NO: 436139 - DNA, 792 bp, Serratia marcescens
atgagtgaagaacaaaaactgccaagtgcagaaagcttttatatgaatcaccccctttatgaggacattccctacaccacagaccagaaaaatgaattaaaggagatgctcttagctactaggttgaacgatgtttactgcccaggttgtggttgtgatagtctttttgctgttgatagagataactgcacaggtggtttatttggagaatggtatgcatacgacaatactttctatcgcagaacatttttttgcttaagaaataacactcacacattgaccttcttttacagaataaatgaattcaaagtccaaaaagttggtcaatacccatcaatggctgacctaaacacatacgatgtaaaaaaatactccaccgtcttagacaggcaacaatatagtgatttacgtaaagccatagggttggtgtcacatgggatcggaatcggttcattcgtctatataagaagaatttttgaggatcttgtagaaagtgcaaaaaagcatgccgaagcagaaggagcattaaacattgatgcatacaaatcctgtaggatggctgaaaaaataaaaatgttagataaattcctcccaccatttcttgtggagcataggaaattatatggaatacttagtaaaggcgtgcatgaacttaccgaggatgaatgtttaaagtcatttgacatagtgaaagtaggaattgaaataattcttgatgaacatcttgagcaaaaggcaagacaagaaaaaatagattccgcatccaaagcaattaagaatcttcaacattaa

SEQ ID NO: 436140 - DNA, 2430 bp, Serratia marcescens
atgcttaatctgttcgccgcctttaaaaaagaccggatctgggatttcaacggcgggatccatccgccggaaatgaaaacgcagtccagcggtgcgccgctgcgtgtcgctcccctgcccaagacctttatcattccgctgcagcagcatctggggccggaaggcgagctgtgcgtcaatgccggcgatcgggtgttgaaaggccagccgctgaccgtcggccgcggccgcaccgtgccggttcacgccccgacctcgggcaccgtcagcgccatcacgccgcacatcaccgcgcacccttccgggctgacggagctgtgcgtgattatcgaggcggacggcgaagaccgctggtgcgagcgcgatccggtggctgactaccgccaagcgcccgccgcggatctgattcaacgtattcatcaggccggcatcgccggtctgggcggcgccggtttcccgaccgccagcaagctgcagggcggcatgagcggcgtggaaacgctgatcctcaacgccgccgagtgcgagccttacatcaccgccgacgatcgcctgatgcaggaacatgccgatcagatcgttgaaggcacgcagatcctgcaacatattctgcaacccaaggtcacgctgatcggcatcgaagacaacaaaccggaggcgatcgcggcgctgaagcaggcgttgcgcggccagtccggcattgcgctgcgcgttatccccaccaaatacccgtccggcggcgccaaacagctgaccaagatcctgaccggcaaggaagtgccgcacggcaagcactcctctgccatcggcgtattgatgcaaaacgtcggcaccgccttcgccatcaagcgagcgatcgtcgacggtgaaccgctgattgagcgcgtagtgaccctgaccggcgacgcgatcgagcgcccgggcaacctgtgggcgcgcatcggcacgccggtgcagcacctgcttgacttcgccggtttccgcccgcaggcgcagcagatggtggtcatgggcggcccgctgatgggcttcaccctgcctgcgctgaatgtgccgatcgtcaagatcagcaactgcattctggcgccgacggtcgatgaaatgacaccgcaggagccggagcagtcctgcatccgctgcggcctgtgcgtagacgcttgccctgccgggctgctgccgcagcagctgtactggttcagccgtgggcaggagcacgacaaggcgcgcaaccataacctgttcgactgcattgaatgcggcgcctgcgcgttcgtctgccccagcaacatcccgctggtgcagtactaccgtcaggaaaaggccgagatcaaggctatcgatctggaagcagcgcgcgccgccgaggccaaggcgcgttacgaagccaagctggcccgcttggagcgcgagaagctggcgcgcgaagagcggcacaaaaaagccgccgtcaaactgaccgacgacgatcagggtgcggtgcaggccgcgctggcgcgcgtgcgcagcaaaaatgccgaagcggcggtcacgccggtcgacggccagcagccggataacagcgagatgatcgccgcccgcgaagcgcgtaaagcgcaggcgcgtgaacgccgcgcccagttggcggccgaggcggaaaaagaggcgccaccggcggcctccggcgacgacgcgcgcaaagccgccgtggccgcggcgctggcccgcgtgaaagcgcgcaaggaagcgccggccgcagacaacgccgccccggcggcaacagaggacgatccgcgtaaagcggccgttgctgccgccctggcgcgcgtcaaagccaaaaaggcagagcagcaggcagataccccagccgcagcggaaccggctccggcaagcgccgaagaagatccgcacaaggcggcggttgctgccgctctggcgcgtgtcaaagccaagaaagcggcgcagcagacggatgcccctgcaccggccgaaacggcgccggtagccgccgaggaagatccgcgcaaggcggcggtcgcggcggcactggcgcgtgtcaaagccaagaaagcggctcagcaggcggatgcccctgcaccggcggaaacggtgccggcaaccgccgaggaagatccgcgcaaggccgcggtcgctgccgctctggcgcgtgtcaaagccaagaaagcggcgcagcaggcggatgcccctgcagcggcggaaacggcggcggcagccaccgaggaagatccgcgcaaggcggcggtcacggcggctatcgcccgcgccaaagccaagaaagcggctcagcaggcggatgcccctgcagcggcggaaacggcggcggcagtcaccgaggaagatccgcgcaaggcggcggtcgcggcggctatcgcccgcgccaaagccaaaaaagccgccagggaatcgctggcggcggaaacggaagacaaatga

SEQ ID NO: 436141 - DNA, 240 bp, Serratia marcescens
atgtgcaaagcccgatttaccgaaaaccagatcattaccattctgaagtctgtcgaaggcggaagtaccgttaagggtgtctgcagcgaggcaggaatatccgaagcttcctattacaactggaaagtaaattacgacgggatggaagcttcagatatcgaaaagataaaggatcttgaggacgaaaaccagcgattcaaacagatgtttgccgatcttagcctgaatgtcgggccctga

SEQ ID NO: 436142 - DNA, 318 bp, Serratia marcescens
atgaaaggagggcccacgggcactcctatcgcgatgcggccagtcggtgaacgccagaacctgaagttccaccgtaatttctggaaactgcaggagttgggtttctcgtactgggagccggattggacgtttgttagcgatccggagaactggagcgcacatgaggtggcgaagacgctggccaaactagaggcagagagcaaacggattgcggctcaggcagcgtgtgaccaagagttcgccaacgggcagtgtttcaatgatgctcatacacaagcgcagaacgcccataacctgcagcagatggagagcgtatag

SEQ ID NO: 436143 - DNA, 1176 bp, Serratia marcescens
atggcacttacagatatacaaatcaaacgagcaaagccccaagacaagccatacacattgaacgacgggcaaggcctgtcattgcttatcaatcccgatggctcgaagggctggcgtttccgtttccgctttgccggaaaagcgcggttaatgtcatttggtagctacgaccttgtgagcctcgcagaagcacgtgagaaacgcgagacggcccgtaagcaggtagtaaatggcatagacccagtagaagatcgtaaagcccaaaagttggcacagcagctttcaacagaaaactcatttgaagccataagccgcgaatggcatgcaaacaaagccgaccgctggacagtggcataccgcgacgaaatcataaagaccttcgagcaagatgttttcccgttcatcggcaaacgtcctatcggtgagattaaacccttagaattgcttgaagtgctgcgacgaatagagaaacgtggagcactggagaaaacacgtaaggtacgccagcggtgcggagaggtttttcgctacgcgatcataactggtcgagctgaatacaaccctgctcctgatttagccatcgctctggccgttcctaagcaaaaacatcatccatttctatctgccgaagaattgcctcattttattcgggatctcgaggcgtataccggtagcatcatcaccaaaaatgctacgaagatagtcatgctgactggtgtaagaacgcaagagatgcgctttgctacgtgggaagaagtagacctcgaaaaaggtatatgggaaattccagcagaaaggatgaaaatgcgcagacctcacattgttcctttatctactcaggtaattgatctctttaagcaactcaaacccattaccggccattactcctatatttttattggcaggaacaaccgcagcaaaccgatctctaaagaaagtgtttcgcaagtgattgaatcacttggctacaaaggacgtgctacaggtcacggattcagacatacaatgtcgacaatcctgcatgaacagggatttgatagtgcatggattgagatgcagttagctcatgtagataaaaatagcattcgcggcacatataatcacgctcaatatttttctcataggaaggtaatgatgcaatggtattcaaataaggctttagagagtttgatatga

SEQ ID NO: 436144 - DNA, 981 bp, Serratia marcescens
atgggaatttacattaaggttcacttctttgggtatattgatagatatcaaaatatattagatatcccattaagcatgttagctgttttggaagggcatgcatatgcgcaagaacaattattccatttagagattcttgaaaagaggaatgatttattcaaattacgaatgcttgagaatgatattaaagatagattacaacaaacagatcttgcggaatatacatgtatattatcttttattgaccagttattccctttgtttacgatgaagttaaagttaaagatgtgtatctttctttgtcgctcaactttaaacactgatgacctaacaagaataatgattcctgattggttaatcaaaaaaattttctctaaagcaccgagtgaacatatcgattcattaaggctcgatattaatagagggagtagtactccagcagttctcttcatttatcttgtgtctatagccatttacaatgaaagtaataatatcgtcgacggaactgacttttatgccgacatggagactattttactacatacggtatacgagaagagcaaaattgagtctctaaggaaaatgtcagatctaagcatcgatcataaaatagatttattgcggcaaaaaaatgcctatttagtatcagaactagctaatgaggttaagaactatagttggtatttatttgatcttcgtaaaataaaactaccgggggttttattatgtgatgaatttgagtatctatatccaaaaagtaacttatccatagatttggaaaaccatatagacgagaactttgcaaggtcaataaaacttgataatttaaaaaagagctcaccaagcaaaaaacagcatttagacccgagaattgccactgcatggctccaagacattaaatctggggaaaacagtcataccatagttgagtattcatttgatgataatcagaatatggagataagaaaaatagtaacttag

SEQ ID NO: 436145 - DNA, 1293 bp, Serratia marcescens
atgagtatggaaacaatagttagtaatcacaataaaagttctgatgtagttatacttaaaaacatgttaaatgacttaaagtatgacttgaataatcttgataaactactgaagttgcagtttaaaatattatcatgcattatgaggagtgagcgaaaaataaagcaccttaaaaaggatagtgctaacttacgttcagtattaaaaaaatcaagacttccaaaggagcagtctttggcagtaaaagataaaataaaaattattactgaaatgataagttctgagaagtttaaaatatatacgtataaaatgtttggtgatgcagtggcgtttttatacatcgataaatatacagtcaaacaattatactacaatgttcataattaccaagttaaagagcagtcaggtgatttgggtggtaagtctggattgcgagaggagtgggggtatgttaggtttgcgtgtcaaaataaaatccccgctttgttgcatgatataacaatgagtattagacatggagatgtgtcgcttttaggtagagatgaaccatttatccttgaggttaaatcaagctcaaatgctaataagagagtagaacgacaaaaatctaaccttgctaagttaggacgtttcatagaaaacgatgaagccgaaaactttcggggtatttcattattaaagagagagagcttattaactgaagaagtaacatattctcatgttctaaatgattgcctaaatgattgtcgaaccaaaggaatggctttggctgaagttgaaaaaggtttttatatttgcgcggttagacaagggagtatgatttctttatttgaaagtatgggctttaatgaagaaaatgaaatccttccaatatttctcaatcagtacaaaaacaatggtgaatggatgccattaactccttttactttgttacttaatgatccatatgaccttaatgattttattgatggtgagttaacaatcgcatgttttttaaaaattgatgaatttaaaaaaatggctatggcactgggttatgaattggttttttctttagatgacgaattcagtatattattcaaggcgattggtgaggatgttatatttggtgtgtcttggcaaatgctattaagagttccgttggaaatgatgtctatgtcttggttgataaaagaaagtattgggaagtatgaaaatactctcgaaatcagcaatcgaaataaattgattaatgagcgccctactattaacaatacaatgtttgagcggtttagatcattatttactcactaa

SEQ ID NO: 436146 - DNA, 627 bp, Serratia marcescens
gtgtcggttgacccgaaataccgcgacgcctattcggcctatatcccggcggtgattctggccgtgaacaataacccgatgcgcttcaccgaccgcagcgggggcgtatctcgtcgccgggtaatcatccacttccccgagcaaatagccccggaggaacgcgacccgcagctcagggacaaaatcgcgcaagagcttgccgtcatcgtgcgccagcttatgcagcagttcagcgacccgatgacggcacgtgcattgctccagtcacagcagaactctgatgaggcactcagcatcaagcgcgacgctgacccgacttttgatttttgtggctatctggaggcgctgccgcagacgagcgggatgtttatggggaacgccaatattatcccgcgacagccccgtaactatctctatcacgcctatctggtctatatggaggccaacggttacaagcacgtgctgagcctgaaaatgttcgggctggggctgccgatgatgctgaaagagtacgggctgaactatgacaagcggcataccaagcaggggacacagaccaacctgatgctcagggaggacagcaacggtgactggttgccgaagtgcgatgaatctatagcgacataa

SEQ ID NO: 436147 - DNA, 1140 bp, Serratia marcescens
atgtacaatatagttttagacacaaatattcttcatcaagaaggtttacactccaatgatatgagtattttgaaaaatcttgttgatgctgaattagtttgtgttcatatcccatctatcatcgctcaagaatttattacaaaaagaatcacttctgtaaaggaagagaatctgaaaataataaaatcccttgaagcaatagagaaagaaggtcgtagaatcaatacagtattgtacgatgagcgtcagagctttttagatcaaattgaaatggttaataaaagcatagaagaaagagccaaagtttcttttgaaacatgggttaaagactttaaagttaatatgcttcaccctcaacaagaaagctttacacaagtgtttaatgattatttttctggagtgggtgtgtttaggcaagtcaaggctagggatgatattccagatgctttcatcaacatttgtatagagtcgctaatcgaatctgtaggtcgtttaatcgttataattaaagacgagagattaaaaaaacacttagataaaaatacagaaattaaaacattaacaggtttaagagagttctttaatgaaaatggtttagagaaaacattagcaaacgataaaattactaagtttattcttgcagaagaatttagtcataatttagttgcgtttttagatgctgaacctcactactttgactattttaatgaagaaagtgattctgttaacggcgatactctaattggagtcagggcctataacatcaatattgaaatcgaatcatatgattcgattgaaaacctacaattatcagacgtacgagaaatatctccgaataaattctctgctatctgttcatttacagtagattctagtataggatatattactgattacggaagttatttggatgtagccaaaatacccgaccgaaatccagattgttggagtgttaatggtgatggttggtgtgatattgtagaagcagcacgactcaaatttttcggcgatttaacaattgaattttccagagagtatgatcaaattaataaaattaatatctttaatgaattaattgataaaggtattattatgagcatgaatattttcaattcacaaatagaagaaatgctacagtaa

SEQ ID NO: 436148 - DNA, 1638 bp, Serratia marcescens
atgatgattaatttctgttctcaaagtgatttttcaattcggaaaccagtaaaggttgcaagtacttattactataaaaacttgctggaagataaaaatctatataagagagggccagttgatacttatcagaatgagttattgactaggcatgcctcatcgtattttggttatcacggatatgatcgactgtataaattttttatgtctaatgagtttattgatcttgaacgtaaatataatgtgctatatacgttagacgtttcaaaatgttttgatagtatctatactcattcaatttcttgggctacaaaaactaagaactttaccaaaggtatgctagctaataaacctctgagctttggtgatgcattcgataaattaatgcaacgtagcaattttaacgaaactcatggtgtaattattgggccggaaatcagtcgaatatttgctgaagtaatactccaaaaaatagatttaaatgttcagcataaattaaatagaatggatcctcctatacgtaaaaatgttgattatgatattcgtcgttatgttgacgatgtgtttatattttctaggactgaatttgatgccgagcttatatataaagtttatagtgataaattgaatgaatataatatgcatgtcaatctaggtaaagtaacaaaaaacactcgaccttttatcacggcaaaaacgcaagttatacatcatgtcaataaaaggatgaattcttttattgattcttttattgaatataacgatgaaatgaagttgaccacaaaaaatatatacaataacaggcggttagctaacaaatttatagatgaggttaaaataatatgcgcggaaaaaaatgtagggtatagtgaggttgcctcatatattgtttcggctatttttgaaagaattaaaagattagtatcttcagttaatcaaacagaggataaagatgtatacaatgcaatgtatgttttgcttcatatatcattattctttttcagggttgcaccttctgttagttcatcatataagttagcgtctatacttatcgtaaccctaagatattttaaggctaaagttccatcgtatagtgagcttattgagtcatatgtctattttgaaatcgaggatttccttaaggacactaataatagcaaggcacccatagataatctaattagtcttgaggcatataatattatgtatgttattggggaattagatcaagatagatatctgccaaaaaagttgattgagaatgtttttcgcgaagttgattcttattttgatatagtgtcctgtctatatatcataaagaataaaaagaattatgatgcacttaaaaataaaatcattgccgctataaactctaagttaatgtcaagtgaggatattttagattatagtgaaaaggcgatgctctttatggatgttatgtcttgtccatacatcgattcaaaatggaaaaaagtgtggttgaagtcaactttaagagaattgcaagaggctgctcctagcaataaggaaatagataattttataagttattcagtagaaaacccctggtttgtggactggagtaatgtcgatcttttgaatttcttagagaaaaaacaattgaaaaaagcctattga

SEQ ID NO: 436149 - DNA, 1263 bp, Serratia marcescens
atgtatgatcagtctttcaatccgcgcacactatcacgatgctttaagcctgaagatttccataaaaatagagcattaagtctagagagtgttcgagaaaaagttattagctcagctattcagagatataaaaatgggttcttggggtataatttacgctcatcagttttaagagggaaaaaagtatattgggccgacgagttagctgacacattggttttgaggaaggtcaagaatgatgtatcgagattgtataagttaaaattgccttctcgaacaattattgttgatactttaaatgttttcttatcggaatgcacacagtataaattatataggttggatatattttcattctatgagtcctttaataaggactatatttttaaaaaaattgagagtttggaacggttggagataaaaacaaaaaaactcataaatgaattgctgtattcattctatttgactggtggggaaggaataccaagaggattatcacttagtgcatacttagcagagttgctaatgtgtgattttgataataatatgaagggcaatgagtttgttttttattatgccagatatgtagatgatattgttattgttactaatggttttgaagatagtgatgtctttataaataatgtaaagtcgattcttcctgatggtttgcgatttaatgaaggaaaaaaatattatattagcgctttgattccaaaggtctccaagaaaaccaacatcgcctatcctgccaatcttctaacctttgagtatttaggttacgattttagtgttagcgaaaaaatagaagagtgcaaaataagagggggctatagattaattggaattgatcttgcgtatgcaaaggctaataaaataaaaagcagaataatttattctattattgattataataaaactaatgacttcgagttgctatgtgaaaggttaaagtttctttccacaaactttagtgttttagactctggtagagtattaaagaggttgtctggcattcatttcaattaccctcttattgatgctaaagcttccaagcgacttgctgaacttgatgtgtttttaaggaaagctgtattatcatcaaacggtaaggttttctttgattttcatacaaatctaaatcaatacaaaaaatatagattactaaagattagttttgttagaggtcatgaaaaacgtcatttctttcattactcagcttcaaaaatgatgagaattcaaaggtgctggagatatgtctaa

SEQ ID NO: 436150 - DNA, 243 bp, Serratia marcescens
atgacaacgataccggtctttcaggtcggtatcgtgcattcaatacccttgttctttctgactacggatcgccagaacaaaagccgtatcaatatcagggatatatttgtagagcgccaaataaccgcgagcttgctgcccaataatcaattcacgcagccctgcgccaagggctcgtccgatcaatggattatgttccaataccgcaatcgcctggatgatttcctgaatgcgccgccctga

SEQ ID NO: 436151 - DNA, 1578 bp, Serratia marcescens
atgaaaatgaataagacgacattgctgttgtcagcagcggcgttgctgttgcccagcgcgccgctgttggcgcaaatagcacctcaggcggggggcgcatcggttgaccatatcaatcaggtgccggtggtgaatatcaatcgtgcgggtgcggacggtgtctcgcataacgtttacacgcagttcgacgttggcgctcagggcgctattttaaataacagccttgcgggcgcgaatacgtcattggccggaaccgttgcggggaacgctcagttagagggccgtgcagctaaggtaattctgaatgaagtgaactcggtaaataaaagtattttgaaggggatggtagaggtcgccgggcaacgtgccgatgttgtcattgccaataaatccggcattacctgcaacggttgcggttttattaatgcccgcaacggcgtattaactaccgccgatttgcagttcaaggacggtgattttaacggctaccacgttaatcaaggcaatattcgagtcgagggggagggcttgacgaagggcgatgtcgattatacggctgttattgcgcgcacggcggaaatcagcgcggcggttcatgcggacgccctgttagtctcggcggggaaaaaaacggtttcggcagatctatcccgcttcaatagcgttgatgcgtctaaagataagcctgaagtattgatcgacgtcgccgagttggggggaatgtatgccaacaagattaggctggtcgccaatgaaaacggcgtaggcgtcaatagcggcaatgccaatggggcgggctccaacgccggcgccgcgttgaacaatgtcagcatcgtcagtatccaaaccgacgcgggaagtgatgaacgcgtgcaaatcggcaacggcgctcaaaacgtatctcgcgcttccgtcggtatcgccaaccgcggtcagattcaggcgaaaaacggtggcgccgacatcagtaccgactcgctggtcaatcaaggaaatatcgcttcacaggggcaattgaacatcagcgctacccggctgcaaaatgaaaagaacgtgagtgcgcgttcggcctccctgacggcaacgcagctggacaatatcggccgcattgagggcggggcaatacggctgaatgcgacccaactgaacaatcgcggcagcgtcaaaacgcaaaacggcgcgctgacactgcgggcgacccgcgtcgacaataccggcggcattcaatccgcgcaggctttgcaactcaacgccaccagcttgttcaacgccggcaatggcgtgatcgaagcccaaaacggcgcggcgatccagggaacgtccatcaccaaccgcgggagcatcgtttctcgcgcttcttccatcagcttgtcggacaccagtttcagcaactacggcaggattgaagcctatggcgatatcagccatcgcggcgtctctttcaacaactcaggcacgatgcgctccacgtccggcgcggtcaccaacaacggccgcgacatcaacaagcccgcgaatagctggggttggggatacggcggtttcggctggccttacggttggtcttattggatgtga

SEQ ID NO: 436152 - DNA, 744 bp, Serratia marcescens
atgaaaagggaatgtcttattctttgtctgggcgtgctgttcagctgttgcagccgcgctgaagccacgccggcgccggccaaacaacgcgttagccaggaaagcctcatcggcgatacgcaacgcaagctgttaccgtccccccctcctgttttgtcgccgcagccggagcaaaacgcgcaagcggacatatttatcagcgaatctccgtgttggatgatcgataaagtcgaaacggcgacggcgccgctacgcctcacggctttcaaacagttggcgcatacggcccgtggccgctgtatgggggagaaagggttggcgaggttgcgcaaaaagctgcaaaacgcgctgatagcgcaaggctatatcacttcgcgggtgcagctcgacgttcaagaggtaccggcagggatactgaaggttcgtgtgcattatggccgcatcggtcagctgaaaatgcaggcgggcagcagcgcctatttccgccccgatgcgctttttcccattgcggccggcgatgtgctgaatttgcgtagtatcgagcaagggctggagaacatggggggataccgggcgtcatcagcgatatccgcattgctccgggcgaacgagctggcgaaagcgatatcgagatcctgcgccaacaggataaatattggcgttttaccgcctgggcggatgatgccggcgttcgttctacggggcgttatcagaccggcggcgcgctgtatctcgataatctga

SEQ ID NO: 436153 - DNA, 903 bp, Serratia marcescens
atgaaaaaacaacgcggtatggcgctgttgatggtgctgctgctgatgtcgctgatggcgatcgtggcgatcaatatcaacgacaactggcagcgttcgctggcgcgcacccagtctcaacaggatcggctgaaggccaaatggctgctgctgggcggggagatctacgcccaacagcgattgcggcaggcgggagagaagcgcaaggcctggggagcatcaggagcggcgttcagtatgcgtaccgaagagggggaggtggcgatacgcctgcgccgcgtcgatgcctgtttcaacctaaatgccctgatccgcgccgccggcccaacggaggccggggatagcgagggggggccccccaataaggagaggcggatattcatgctgttactgaacaacctggggatcgccgacgcgcaggcgggcgcgattgccgaggccatcgtcgccaggggcgatgacgaggggtatctgatggggaatgtcagcgaactgcgggagctggccggcatcggtcgtgagctttacctgcgcttggcaccgcagctttgtgcggcgccggatgccgaactgcgcatcaacccggatgccgtgagcgaggcgcaattaccgctgctgcgggcgatgctgatgaacgccctgagcgatgaacggctgcgggcgctgctggcggcccgtccgccgcagggctggcagacgctggcgtttttgtcgcaggaaaaagcgctgcaagacttgggtgacgacgatctcggcgagcgattgacgttcgacgatagccgctggattgcgcagctgcagctgacgctgaacgacgggcgctatcggctcgtcagcgcgttgcaatcgggccagtcaggcgtcacggtcagcggacgcctgttcgacagaggggaggggtaa

SEQ ID NO: 436154 - DNA, 1089 bp, Serratia marcescens
atggccgatgtgcgctggggccgcgtcggcgagacgagttgccgtttcgccgcccacctcgatctgaccgaaggcggcggcgagttggcggccatggcacagggcagccgcgtcgtggtgttggtgcctgcccgtcatgtggcgctgaggcaaacgacattccagggcaaggcccggcaggcgacgccgctggcgctggcctacgcccatgaggccgggttattggccgatgccgagcagatgcactgggcggtgctggacaaggcgcagcgcgatttcaccctcgccggcgtcgcgctgacgcagatgcaggaatgggtcgagcgcctgagcgccagcggcattcgcgccgataaaatgctgcccgacgtgctggcattgccgctgcccggccaatgcagcgcgctgcattggcgcaaccactggttgatccgaacgggaagcgggcagggaatgcagctgcccgacgcttggctgggctgcgcttcactgccgacgccggactggtgtctgcaccgcggcggggaggttccggcgggctgggaagcggcgcgcattgacgaggatccgctctggcgactggcggaagaggcctggaacagcacattcacgctgctgcagggacgtttcaaaccgagcgtacgctggccgcgccgcctgcccgacaagaccgcctgtgcgctgctgttgctcagcggttcgctgctggtgggcggtttgcatcaccaacagatggcccggcagaacgagagccagattgcggcgctctcacggcacctgctgccgggccaggccgcgtcggcgtttgccgagcaggcggcgaaagcgcgggtgcggcgtatgcaggatgccctgaatgcgccgcagctgttcaggctgttgccctacgcggccggggcgctcgcgttatgggcgcccccgcagctgcaggcactggctttcgacgccgccgacgatcgtctggtggtgacggtgaacagaaacgacgtgccgctgccggcgccggttaacgacggcgaggtcagcatggcgttcagcgaaggcggtgcgtccaaccaggcgatcctgacggtgagaggtgagcgatga

SEQ ID NO: 436155 - DNA, 1032 bp, Serratia marcescens
atggactctgaacacttcgaagattacattgaaatttacctgcaaaaaaatggatcgaccacacctcctcgccgagagccttatttgaaatttttcctactggaagagaatgatttaataactagtgtctctcatacagaatatacagcccatataatgttgaataagctattttctattttctcaaacttaagctacaatacacaaaatgatattagattagtaaggtcaatattcggcggtcctaagagtgaaagttatggcttgagagggagattgtgtaagagattgattaatcaggacattaatgagtttgactttgaaaagaaaatcacaaccttattaaatggaattaagggcgatggaattggtattacaacaattagagcaatacatgagttacacatgcttgcttttgaatactggaatcccaaaacagctacagaaagaagggaaatattagaaaaacttcacaatgaaaacaaaattcatggactttgtattctatcagattgcccatcaatcgattttaatgactgtgtaatcgaaaatggcatttttcgtcattttcgaagttttttcaattgcaagattaatgagaatacaaaatttataaactgtgagtttaaagactgtacgggtaatttcaagagagaaaatataaggtcagatgtttttattgattgtaaattagatgatggaatgaggcatttgctttatgctggtgatgataaaagaggcggtatagcctctaaagctaaatctgacgttaaacaagtattaaaatcaatgcgtcaaggtcttggctttctgtctatgagtatcaataaaataaaagctcaaagtaatttagtatctggaaaatcttatgaagagtttttaggcacaatgtgcgatataggcgttcttgaatttgataacgggttatacagtgttgctaacaatgtcgaactagatgcagttgctctttgcgaagaaggacatgcacaaggtaaaataacaatactcataaaagaattaagtgaaaaataa

SEQ ID NO: 436156 - DNA, 819 bp, Serratia marcescens
atgcctaatagttatggggtagagctttttaataataggaattacgttgtcgctaatgccaacgacgtaaattataccttaaggagcgctggtcagattcataattggcagttcaacccgcctaatgttctcagtgttgcagcgttttgcggtgtcgacttatcaccgtacaactctccgctcatgttctttaagccaatgtggaacgatcagcgtataggatgcatgacgggcgacgaaagggattggcacgcatctcagttagggccaacaaaaaagatgttcaaggtcatgaagtgggggaataaggatattggtagtattcaatattacatctttgacagatgggttccgccagagaggtcttcacatggaatgcagctttttgatagttctggaaatatcatttttgatagtggttggaacttcatgaagatccgaaatgtgatgtggcttgatccaggatatcctaaccacggacacggagatcctaatggaggaaacccagaaaatgaacaaaactggactatgataggcgctgctggcccgggtaatctggcaatggcgatgccgaatccgaggggctgggttaccacaaactggagaggagaaggttggatgatgtatgaatgtttccacttctctgactgggataacaaaattacgatctcacttgtacctcgtggtgagtacttatggacaccgccaaatgccggttgggcaaacccaaacactagatctcaagtcatgattattgatgttgatggatttccgacaaattattatgatgccaaaatagtaccagggtttaccgcttaa

SEQ ID NO: 436157 - DNA, 336 bp, Serratia marcescens
atggccgagaacggcaatgcgctggcgatggtgacggtttgcagcgcgctgagccccccggcgatcagcaaggcgatggcgacgatgcccatcagcgacgcccagaaaatgcgttgccagaccggcgtgttgctggagccgcccgaagccagcgtatccacgaccatggcgccggaatcggcggaggtgacgaaaaagacgataaccatcgccatggcgataaacgaaagcacgctggagaacgggaaatgctccaggaagttaaacaacgccagcgccacgtcttgctgtaccgtagcggcgaggtctgtcgcgcccttttccatgatgaggtaa

SEQ ID NO: 436158 - DNA, 420 bp, Serratia marcescens
atgtgtataagagacagcaatatcgcctatctgccaaaacgctcgctggttaagcgctttatggatgaggtcatccagcctgccatgacgctggtgcaggaagagctgagtaaacaaaacacgctcagcagcatcaacgccactgcggaagaccgtattcgtttcgaggtcgatttgggcgatgagcttaactttatctatgaagtcagactgcgcggctacagttcgccgacgttcgctctggccgggctggataacgatgaacagcaagccgagcagcacaagtattatcgcgcggagatctacctgaaagaaggcggccagaactacgatgtcatgggctggaatcaggagcagttgatcaacgatattcttgaccagtacgagaaacacctgcatttcttgcatctggttcgctga

SEQ ID NO: 436159 - DNA, 567 bp, Serratia marcescens
gtgcgccttgcagcagtggcatcatctgattggcgatcactccacgctggccttcatggagcaagagatcggcgagatcctcgccggtcgtggggcacagttgggcgtcgcccagccgttccgcaatgcggtggcgcaggcgcgcctggctctcagcgaggcggagcacgaaagcttcttccgcgacatgctggcggatatccgcgagccggtgctgccgttcggcctgagcgacgtgcacggcgaagggcggcaaatcgcctgccgctaccaggcgctctcttcggcgctgaacctgcggttgcggcgacaggcgcggcggctgggcgtcagcctggccagcctgtgccacctggcctgggcgcaggtgctggcgagcgtcagcgggcgagacgcggtcgtattcggcaccgtattgctggggcgtctgcagggcggcgaaggcgcggaacgggcattgggattgtttatcaacacgttgccgctgcgtctggacatcgatcggcgaggcgtggagacggcggcaagagaggcgcacgtgcggctgagcgggctgctggcgcatga

SEQ ID NO: 436160 - DNA, 1284 bp, Serratia marcescens
atgaatacggcaatcctacgatacggtgtgaaaaattttggcagctttggggaggaaggaggagtggtcgaactgacaactacctcccgtgatccccacagggagttgtggcgagacataggcggacaaaaagtaaacttggttactgcaatcatgggggctaatgcttctggaaaaacgactcttttaaagccgttaccatttcttgcatggttattttggaagatccctgaaagattaagtgacgatatgtttattcctgttaataggggggttaataatagctgtgagatatttgttgaattcatgcttaatggtgaattttataagtatgaactaatttcttgtaccgctttcattttagaggaagcgctatacaaaaaaaacgagaacaataagtatgtttatatttttaagagaaagcttgatataggctttatcgatgagtttagtaacgacttggaggaagtaaaaaagaaaccatccaaaaagggacttgaggaatgtttgaaaaaactcaagtatagttataaagagaaaagtgaacttttccctcttggtttagaggaaggcaaaagaacaccatgtaatacaagcgtagtgtcctctgctcgtcgtgttggcgtagaactagctaatgatataactcggtgcatggcatctcggtctaacgtgacgtttttgggccgtaatcatcatgagtatagtgacattgaagaggcctctgagtttttctatgataatccagactctttagagaaagttaagaatatacttaaaaaatgggatttaggattagatgacattcgaattgagaaggaagagggtactggagataatggcgagaaagaagaacgttatcatctttttggaattcattctctagaaaatggacataaatttgaattgccattctatttcgagtctgctgggactcaaagtgcctatgttcgtctttttgacataatcactactcttgatacaggcgggcattgtttcatcgatgaactgggggatgatctgcatccacacatggtgaagccaatccttgagttgtttagcgatcgcgaaacgaatcctgatggtgcccagcttatatttgcatgccacaagccagagctaataaactatctcggcaagaatagagttataatttgcgaaaaaacattcaacaccagcgaatgctttagattggatgaatttcctgcttcggaggcaagagccgacgataacttagctgcgaaatatttgtcgggggcatttggtggagttcctgacctatga

SEQ ID NO: 436161 - DNA, 531 bp, Serratia marcescens
atgagcaagaagataaggaagcttcgggtagtaaataaaacatttttgattgtatgtgaaggggtatctgataagaagttcttagagcgaataaagcggtttactgttcagcgtgatggtgggttgagagttacagttgatgagtcaggcggtggtgggcctcggggggtattaaatagagcaattaactaccccggccagtttgatagaaaatatatgttcattgattcagatatagctataacacaagaggttgctaaaatttcgcagcgtaagaacatccaaattatccaatcaaaaccgttttgtcttgagggcttgctacttaaatccaaaggttttgcaaaggaaatcagagactctcagcatgctaaacaagagatgagagatttgtacaatttggatcttgtgatcaccgaaagatggtacgaagaacatttaacacaggaatttttcttgtctgtcatcgatgatgaaagaaatccttcctcgagaatattcgctgagatacggggtatgttcattttgtaa

SEQ ID NO: 436162 - DNA, 585 bp, Serratia marcescens
atggtgtggcaaggggttccgtatcctttagaaaattcagatgtaattctttctttggccttaaagagcattcctaaaattgttgtcgatacccctttttcctgggagacagtatttagcgctgccattgctggcttgatacctgctgccattgcatatctcgcaatgcaccagaactttaagcttgctaatcatcaaaataggttacaggaaaaagccgagttctcccgtttatttagaggcgcggcagctgagcatctaactaatttgattttacttgcatcggcatatgagacgtggaaatttaatggtgatttaaagcttagtgaaggggcgaagcctcaggtaccaacagaggtttctgaggctgaaaaggcagctgaacgaagtaagaataatctaatcctattaattgaaccactctctgatggttttgaaataatgcagttgctgattaaaactcaagataaactgcgtgcgtatcttagcccagggatgataacaatagagcgaaagaatgcgtttaattactctacccatgaatttataaacgcctgccacaagtatctcgaaattaaaaaatag

SEQ ID NO: 436163 - DNA, 888 bp, Serratia marcescens
atgagcattccaatttttaccttaaagacttctaacacttccaattctaactttattgttattttggattgcctcaatcctgtttctgatatttcatctccaaggagaaaccatgatgatttgcgagtaaaattagtaggaaaagataacccagagaaaatagagcaaaatctaaaattgataacatgtgcaaacaaacaagagtttttgcatttctttgaagctctttttcaacatttcaacaatcctggttttaaacccatgtttataattcatgctcatggagacaagaaaaacggccttcagcttcctgataattcattcatagaatggtcaaaattgattgagcttttttatggagtaaccaagagatgcaatggtgatttgacggtaatttctggattctgtcactcttatgaactaataaaacacataccaaaaaatgaaaggttaccatttgcattttattatggatatgacaataaaatctcagcaggcacggttgaagatgagataaacaaaatcattcagtcatttattaatgatggcggaaagcatcttttttcaatactacctaaactgcgcatcaagtgttatggggagttcgatttcattagggtgattttgatccacgcattattaatggcagcagacccaaaaatgttatcagcactggacccaaacctatctcaaaataaaattaagaaatcgatttacaataaaattgaggggccactacaagggatagataaacttatcaagcaaatcacaagaaccgacatactagctgtcgaattagtcaaacattatatgtatgacacggaacgtcgcacgtatgctttgaaatctgttgataattatttctctttgcttaatacaaagcgttaa

SEQ ID NO: 436164 - DNA, 528 bp, Serratia marcescens
atggatactgatttaatcaattatgagacgatgctagctgctaaggattcggctcagtgggcttggtggactatggctgctaccatttttagcgtttttatttccttggcaactctaggtatggcttatatcgctcttgactcttggcgtgaacaagagagattgaaactaaagatggagttcaaacgaactgttttggagcttcgctactcacttgattctatgcctgaatcttggtcttatcacaatgtaaatatcgctcgagaaaggttaaaatcgtatcctcaagttgcaaatagaattggtgacgagtctgagatatattttaagaagcaggcgctaaaaattgcatttgatgaggcatcaaaagcatggattatgtgtgggtatttgtattcagatacccaagaagaagaactgtggctcaaatttaacagaggttttagagaatacataaaaacaggcggggaaaagatattgctttctagaaatatatcgcaattatgttcggcacttaaagtgttatga

SEQ ID NO: 436165 - DNA, 1620 bp, Serratia marcescens
atgccgatcccattctcgttcgacttcaaaaacccggattacactcaggtgttcgaatggcggatggagcgcctccagcgtatcagggccaatcctgaatcactcccaatcatgaaggccttttataaagaccacccggcccagttcatcattgattggggaatgacggttgacccgcgcaacgtcgagcgtggcttaccggcgcgcatcccatttctgctgttcccaaaacaggaggagtggatccagtggtttgtagagcactggcgggcatcaaaacccggcatcacggagaaaacccgcgacatgggcatgtcgtggctgacggtggggatggcttcgtcgctctgcctgtttaaccggggcgtcttcgccggcttcggctctcgcaaagaagaatacgtcgataaaatcggctcaccgaagtctctgttcgacaaggctcgcaactttatcggtttgctgccggtggagtttcgcggcggctggagtgccaaacagcacgcgccgcacatgcgcatcctgttcccggaaaccgaatcagcaatgaccggtgaggccggcgacggcatcgggcgtggtgaccgcaccagtttctacatcgtggacgaatctgcgttcctggagcggccttatctggttgatgcttcgctatctgccaccaccaactgccggcaggacatttcaacgccgaacggcatggccaactccttcgctgagcgccgtcatagcggcaagatcgacgtgtttactttccactggcgtgatgaccctcgcaaagaccaggcttggtacgacaagcaggtagaggaactcgacgcggtcaccgtggcacaagaaatcgacatcaactacagcgcatccgtcgagggcgtgctgatcccgtctgcatgggtgcaggcggcgatcgacgctcacatcgcgctcggcatcgagccaacgggcgtgcgtatgggggcgttggatgttgccgatgagggcaaggacaccaacgcctttacgtcccgtcacggcttcctcctggaggatatcgacgagtggtcggggaagggcgacgacatttttgggaccgttcagaaagcttttaacatttgcgatcagcaactgcttgatcacttcaggtttgactcagacggtctgggggccggggcgcgcggcgacgcacgggtaataaacgaaaaccgtgaagctgaggacataccgacaattgtcgctgtgccattccgcggtagcggcgcggtattcgatcccgaaggcgaggccgttcgtggcgataacggacggccagcccgccttaacaaggactttttcgccaatgccaaagcacaggggtggtggtcactgcgtacccggttccaaaaaacctaccgcgcagtgactgaagggatggagtttgatcctgacgaaattatttccatctctgggacgatgaaaaaaaaggacaagctggttattgaattatcccagcccacttacacggtgaatggtgtggggaaaatcgtggttgataaaaagcctgacggcaccaaatcaccgaacctcgcagactcggcaatgatcgcctacgccccaatggaaatgccaatgctcatttccgacgactttttggagagtatttga

SEQ ID NO: 436166 - DNA, 1713 bp, Serratia marcescens
atgagcgttgagaaactgattaccgatcatatcgatatctggtcctcggccctgcaaacccgctccaccgccgggcgcggcagcaacggcaaaatcgacctctatggcattaagaaactgcgtgagctgattctggaactggcggtacgtggcaaactggtagctcaggatccgaatgatgaaccggcgtctgagctgctaaaacgtatcgctgccgagaaagcggagctggtaaagcaggggaagattaaaaaacagaagccgttgcctgagattagcgaggatgaaaagccgtttgaactgccgggggggtgggagtgggtgcggctggggcagctagttgaaattttggatcatcaacgaaaaccagtcacaaaagaagcccgttcatcaggtgaatatccatattatggtgcctctggcattgttgattatattgatgattacattttcgatgacgaattagttttggtcggtgaagatggtgctaaatggaataaaggtgataaaacggcgttttgtatttcaggtaaggcttgggtaaataaccatgctcatgtaatcaagccattcaattcagttttattaaacgaatttgtttcttgctatctcactgcgaccgatctttcagaatatataacaggtacaacagttccaaaattgaatcaagctaaattagtatcaatacctgtgccgttatccagcttaaatacacaatttaacatttgttcaaaagtaaacgaactgatgcagctctgcgacgaactggaacagcaatccctaaccagcctgaatgcgaatcagcaactggtggaaaccttgttgggaacgctgaccgacagccaaaatgccgaagaactcgccgaaaactgggcgcgaatcagccagcattttgatacgttgtttactaccgaaacgagcatcgacacgcttaagcaaaccatactgcaactggcggtgatgggcaaactggtaccgcaagatcctaacgatgaaccggcatctgaactgcttaaacgtattgagcaggaaaaagcgcagctggtgaaagaaggcaaaattaaaaagcaaaaaccgttgccactaattaatgatgatgagaaaccgtttgaattgccgatggggtgggaatggtgtcgtttaggtgatatcgcttatgttttttctggaagtactttcaaaagtgaggattttaataataaatgcggggcaaggtgtataaaaataactaatgttggcgttaatgtttttgcttatacaaatgattatttgcccattaattatctggattcatacaatgaagttttagttcgaaaaggtgatctgttattagcgatgaccaggccttatatcaataatggactaaaagtatgtatatgcccagaattatataataactcattgttaaatcagcgagtttgtgcaatcagacaatttcataattcacggttttattatgaatatataagcagttcaattgtcttggaagtatatcagtcaaaatttaataactccggtttacaaccaaacttaaaaatgagcgatataacagaacttctaattccagtcccaccagctgcagagcaaggcagaataacttcaactattgggagaatgtcagaagtctgtgaacaactcaaatcccgcctgcaatccgcccagcaaacccagcttcacctggcggatgcgctgaccgacgccgcgttaaactaa

SEQ ID NO: 436167 - DNA, 270 bp, Serratia marcescens
atgataattcgcccgaaccagaactggttttttcgcctgttcgcctggcacggttccgtgctgtcaaagatcacctttcgcctgtcgctgaacgtgctgatgtcgatagtggcggtgatcagctatcaatggtacgaacagctcggcgtgcatttgaccatcgcgccgttcagcctgctgggcatcgccatcgccatttttctcggctttcgcaataacgccggctacagccgctttgtcgaagcgcgcaacctgtgggctcgctgctga

SEQ ID NO: 436168 - DNA, 1098 bp, Serratia marcescens
atggccgcctgggcctttttgatcgtcggttggctgttgatttggcgggattacccgattttcggcgcgttgtgcatcacgctgttcgccgtgctgcaatgggccaaatacgccgcaaaaggcgtgcaaaaccccgaagaggccgcagagtggcgcaagaccgactggcgttcgcagccgattgaaatggcgcacgccggcgacagcgaccggcagattggcggcgtgggggagctgggcatgggcggccccaatttttggacgctgctgctgcgcgacggagcgattgtgcatggcgcctgtgcggcgccgcaggacgtggacggcggcaggttgcgcctgatcccgacccgcagccgcgagggtgaggggctgacggtgtacgaacctgccgcccgggcgatgtacgcgctgcctgcgctgaccgatcgcgagctggaagcagtggccggcggttctgccgaggcgctggcgcggctgcgggcgagctgtcggcaggcggtggccacgccgctgcgtcaggtgcgcggtctgtgggtgccacagtgggcagaggatccggcggatcgtctggagatcgccttacccagtggccgcgcgctggcagcgcgctcgacgttaccggcggatttgcgccatgcggacgatcctgccgcgctgctgcacgcgccgccttatgagctgttgctggataaccggccgaccgatcgcttggtgtgcgatctcgaacgcgtggcggaatcgccgacgggcgacggcttgagcgtcggcggctgccagttccgcggtgagcatatcgtcgatggtctgtaccatctgtacttcgccggcgagtggttcagcctgctctcctacgcgcacaaaccggcgggcgggcgcggttcggacaccaccttttttgtcgagcgggtcgagccgcaagacggcggcgtattcgtgattgaatgggatgcctacagcgtggggcctgacgggcgtgcgccgcgcgtagcggcgccgccggtcttggttatcgcagtaagctggcaggaaacgccgctgcagctgcccacggccaataaccgcgtgaccgtgcgcttgcccaacgccacggcgtaa

SEQ ID NO: 436169 - DNA, 3252 bp, Serratia marcescens
atgaatgtacaggaaaccaaattttcatctaaagaatttctaaggcgccgtcgccctgaaaaattttctgattcaacaatcagagagactggtactttagatagagttgtactggaacacttcctctctacgctaaatacaagaaatcaagaactacaattcgaagattttgcaaaaaaaatatgtgaaaaagtaatttgccctaatctccttgaacaaactggtcctgtagcagggggggatggtaaaactgacacacaaacattccctgtttcggaacagaataagcttctttggttcgaaggtgttaatgagacatcaaataaagaacgttgggcctttgcggtaagtacacgtaaagactggaagaaaaaatgccatgaagatgtacttaagattaaagaaacagatcgtgggtatactaaagtattttgcgtaacgaatcaatctgcaaagtccaatattcgttcagaggttgaggatacactaaaaacaaaaactggaatagatgttcgtatattagatattaattggctattagatcaaatttacaaaaataactttgagcaattggccattgattcattgtcagttccaacacaatataaaagagaagttatttttggagaaaatgattataaaaagcataaaaaatatgaagaattaactgagtatattatagagaaaataaaccctgctgaaatttcatgtgaacaggtggatatatttttagaaatcgcagagttaagcgctgaacttgagaaaccactaattgaaacacaaggtctatttgagagagctataaaaatctcaaaaaaattcgggactaatcaacaattgctagatgcgtattatcaatatgcctggaagtctcatttttggatggaagattttaatctcttcgaagaaaatcttcaattttcatatgaaagtattgcatcatcaactaattcctcaaaatgggagaaagttttaaatttagtaaccgttcataaaagttatattagacttaacaacgctacatctacaatcgacattgagaatattgaacgtaacatgctcgctaaactagatgagatagctgacgatgaatcacgtcccagtaatgcactcacagcgagaactcacaaagctatttataaattgacaacgttttcagatatagaagatgcttcggttgtatttgaagagttacatgaaatttttaaaaatagcgggaatttaataggctatccctttgagaaaaacttccaacttttgaacgaactagatgacatttttttcgaggtagatgcatatgaaaatttattagactatatgactgagcaatctgctgttagaggtggtgaagttaaaggggcattattaaatctacgaagaggcataaagaggattcaaaatggtcacccttatcaggcaatcaagtatttaggaaaatcttttattccactctataaagaggaatcacgagataaatttatattagcattaaaagctattgcttatgcttacgaatccattgggttgctatggagttcacgttcatgcttgcttctatccgcttctttgattacagataactactggaagtatgatgagatatcattaaagcaggctgagatttattatagtttatgcctaacagaaataaaactagggaaattagcacatgcgcttttatggtatgaactgtttttaataatcaaccaaaatatcagtgatagctcgttcggcgataaagaaaatcagcaagttgatttttacataagtcaactcattttgaacactgacttaaagggaataaatcgacagagtaatattcccgatgaactcgatagattaggtctttttgtatcatcgggatgtcttaaatatgctttaggttatattgaagattttgaacgtgagtacgaagttactgccgataaagatcataatgatttcttgcaaaaaatacgtgactttgatgctggattcaatagtaaaggcataaaagataactatgataaacgaggaatatatacatcttttatttttggatgcaccatagaaattaactttccgaatcgttcaccatttatagagttttcaactagtatcttagcacttttagagagtgcttttgcaacctgtacgattgataacatccatctgaaagaagcatttttaattattgaagtaatagcagatgatgaagatgacttatccttatcacatgaaataaatagcaatagtggaaaactaaaccttactataaattgcaatggttttgagacaagtgcttttagaatcgatgcccaacaaaaaatcactaatgaattcaagaaaatagtatttggccttctccctgagttattttttataaaaaatacagaatacattgaaaaaatgatattcgaagatgctgcatttgacagagcaattagtttcggtgcctgtatcaaagctattgaaaatgttcttggaaatgatattgatcaacaaattaagacaatttattccaccagtgctgaaaagaaaacttaccctcttttaagagataaatcctgggatagtgaatttccgaaagtgttggagatcgaggatataaatgctccaacacctggtaaaggaagaatgcctgaagatgaacttaattccgaaaatataacacataaagattattcaatacaaagtctaatcaaacctcgtctatgggatagaacacgctggcaaggagtaggcttcgctcaagtaaaatcgtgttgcccagggttatatctattatttaaacaccccgatataggtgaggatatttttaaagatcttatatcatcagtaggcttggtagataataaagccagattacgggtttgtattgtcaagggtatttcagttaaaaacccaactcattatagagtactgatatctgaaaacatgatgacaacgccattaactaaaagaatgacaatgatcagtagaattaatacgatgactcctgatagcaatgtcaatttagaaagatttcttgctgcgtatcagtcctgtggaaaattctatcttggatgtgatgcgatgttaaaaaatattgttcctgagcatccacaaagagatagtttagggatagaaatgagtacgttagatgttaggtgggcttgggaaattgggttaaatgatgttgattgtattggggttaatttaaaagaagatgacccctatattcctagtgatgtagctgagatcccattattgcaattgataaaaagtaaataa

SEQ ID NO: 436170 - DNA, 2583 bp, Serratia marcescens
gtgaaagtatttatcggaaaaattaaacaaaaggttgaaacatccaaaagcgaatccgacttcactttcttttttaatttactagttgctggagaagcaattacaaagctaataacattattaatcactgccagcttgaaaaatgataaagatagacaccagtatagaatattacacagtttagttcgtgcaagcggagttggtgaatggagtagagccatagatgacctattgataggaacagcttcgcagcaccttcctgaagggatgagaatatatcaaacagaaatcactaagaagtgcaacaataccgaatggcaatataatgcagtacaagaattatatacagcgatggatttattcaatctgactgtagattccaatacagcaaaacgagatctaaagttgtggtttaaaggatttactgaactacgaaataaaaccagagggcatggtgcaaccttaagtaaagccgcttcagcagcagctccacatttagaaaaaagcataaatctcatcattgaaaacctgtcattattaaatatcccctcggcttatttaaaaagaaatatgagcggaaagttcagagtgacagcaatatcagttctaagccctcaattggaagatctaaagaaaaaagacacatataactatgaagaaggcgtctacttccaattagataagccaatattaatcccacttattaaaagcgaccctgacttatcagatttttatatttcaaatggtagtttcactaacacaagctatgaaatgctttcgtatattacagatgacaaaattcatgtagataatagtaactatacggctcctaaaggacaactccctccgagtgaatcagaaggtttgggggaattaattccttacgaaaactgtttttctaacgtaccaagacttacatatgattatataaatagaaaagagttagaggatgaactctacgatcttttaattgacgataggcatatagcgattacacttctgggtcgcggtggtatagggaaaacatcattggctctgcgcgtaataccgcggctttatgaagtaagtagatttgatgcgatagtttggttcagttctcgtgatattgacctatcatcaaatggtgcaaagttagttcatgctaatgtaattaccaataaagatatagcggattattactctcgtttattcaaatctacagaagcactgaaaaggaaagatttcgactctatttcttactttcaaaatcaattaacacagtctgatgccggctcaactctttttatttttgacaattttgagactgtcgacaaccctatcgaaacttacaaatgggttgatactttcatcagaagcccaaataaacttttagtaacaacaagacttcgagatttcaaaggagactatccactccaagtgcaaggaatgagtcaagatgagtctatggagctaattgagaaaacctcaaataacttaaaaatagagccattatcgctagaaaacaaagaaagaatttatagaatttcagcaggccatccatatataatgaaagtgttgattggtgatttctctcgtaaaaaaatgaaaggcagcattgagcgactcattgcaggcagcgatgagattttagtagccctgtttgaaaggacttactctgctctatctccatgtgcacaaagaacctttctcacattatcatcttggaattcagcagttcccagattgggcttagagtcaatactcatgtattctttagaagatccccttgatgtagagaaatcgatagatactcttatacaatattctatgattgaagaaataaagggggatgatggacattacttcttacagctaccttatgtagcttatgcctttggcaataagaagctaaaaataagccctttacaacacattattagctctgacgtttcattgatgagaaaattcggagtttcaaacattgaagataaaaaaatttccttaaaacaaaactttactagatatttatcaactatttatcacaatgatgatttctttaaaattcataagataatattagaacgaatctgctatacctttaatgaagggtggcaactgctttccacatgggctctggaggcaaactccgataaattcaataatttttcggaggagtgtattaaacgctacctcgaaaatgagaggtctgaaaaaaataaacgtaatgcatggagtatttttactactatctctgaacgacttggtaacccttacgagcaaatattaggcttaacacaaatcgcctcttatgaatcgataccaattgatgaattatctaacataacgaataaaataaatcgtattttcaaacaacatgaagtatctctcggtgaaggtattaagcaagaactactaattaaattatttaacgtagtgtatggcagaagaaatgaggctgatgctaacgcctgttcaagattcgcatggttggcgttacatattagcaaagagaatgaagcaaaaacattagtcgaaatcggattgagaaatgaaccagaaaatcaatattgtctaggcttaaacagaaaattcgaaaggcattaa

SEQ ID NO: 436171 - DNA, 603 bp, Serratia marcescens
atgttgtacggcggtcagcagaatagcttcacattgacgggcgccggaaacatgaccatgagcaccacagccttaccgaaatacatcaccgataaactgcaagcgcagcaccacagccggatttccaagcgggagttggcgaaagagttcgatggcctgattgaagagatggagctggacaaaatgcagcttcacctaaactgcggcggcacagccccgaaggtggtgagcgcgcacaaagacgccctcacgacctttgcagctcacgcgatgcatcaggccatggatgcgctgagcaaggcgctaatcagccctgacgttatcaaggcgtgtgcactggcttcacgggcttacggcgtctatgcggacaatccgatgaggatgattgagctacaggtacagggcgcactacaaggccgcattcgcgctaccatggctacgcaaaatatcgaccacccggtgcttaatgagattggcctgacgataccgcaagaaaccggcgtattgccggaactgcaaagcagcccaattcgccggacgcaagtggcaagagaactggcggaaaaacgccgtctgctgcaagagaaaggggcccaatcatga

SEQ ID NO: 436172 - DNA, 2010 bp, Serratia marcescens
atggttgaaagtaaggtttctcgtgcggatgaggtgcaggggaatgaagtttggcattatgagcatggaggttcgagtgtagcaaggaattttattgtcgagttatatgaggaggaggtaaaaagtagattaaaaaacgatgcaaatttctacaacagaagaaaaaaaacatgcacagttccgatcactagtgttgttattttttgtaaaaataataatagtgagatagacaatttctatcaagagtatgctgattatgaaagttcagctattgaatatggcgagattgaaaattggttagatagcgttgaagaagggttcaattgcgattctaaagttctggggcgaattttttcattgttagaggggacgtttatatatgaaaataaaaaaattctcgatgaagaaccgccccttaacactgtgaatgattatatcaaaaaatctctaaatataacatttaatcaagatcactcacaacgtattgcttcaatgcaactaactccgggccctcagagaattcgtggcttggccggaacaggtaagacgatagttctttcattaaaagctgcgataacgcacaaaaaatttccagattataaaatattatatttatttaatacacaaagcttatatcaaaatgtgcagagttcaatcgccagatactatactttagaagccaaaaaagcgccagattttgaatcgaatctaaatgtcttccatgcgtggggtggtaggcagaaaccgggactgtattcacatatttgccaacagtatggattaactccactaacattaggagatgtacgtggagcaagtgatgctttagctgtcatatatgcagaacttctcaaaaaaatcggtagtgatataaagcctgaatatgatcttattttaatagatgaagcccaagattttcctaaagagttgtttgaagtggtctttaaactagcaaagggcaaacctcacgagaaaaggatcgtgtgggcgtatgatgaatttcagtcattgaaggacactcagattaaaggtccatctgagctatttggtctggccaaagatggcaccccaaatatgagcgatgatgttttagacggattctatcctggtgacataaaaaaagatattgttttatccaattgctataggactcctcgtcctgctcttatgactgcacacggagtagcattaggactttatactaataagccgaatgaaatgttttataaccatgatgaatggaaagctattggctataaagttttaaatcctcagacaaaaatcattgcaaaaggcaatgatgttcaaatagagagacctaatgaaaatagtctaaatctgttggaaggaattatgacagagcagggtaagagggcccttaatctcatccagactaaggtggaacatgatagggatagtcaatatgaatacattgcaagtaacatcaaacgtttaattgatgaagaaaatgtctcgcctgaagaaatagtcataattaatttgaagtcctctagtaacaaagatgagatgctacgtattcaattcatcttaaataattacggtattcactctgtaattcccggttacgttgaaagctcagatgtctttaaacccaaggggttcgttacaatcacaacccctttcagggctaaagggaatgaagctaatattgtatttattttaaatagccagttagttgttaatgatttttcattaaggatgcgtaatgcattttttgtagcagtaactcgaacaagaggatggtgttatattgttggttatggagaaaaaatgcaaatgcttgtggacgaaatttcaggaatcaaaagagatttccctatatttaatttcatttgtccagacccagatgatgtcaaagcacgaaaaagttatctccacaaatcagactctgagatcaatgagatgcaaagagtactggatttagttaataataacgaagagttaagacgactgctacaggagcagctcattgataagaaaggagattaa

SEQ ID NO: 436173 - DNA, 672 bp, Serratia marcescens
ttgaatttctcattagtgcagcaaagcttaaaccatgtcgaagcacttttaaaacctgtaactcaacaaaaattaatagagcttaaagaaagagagaaggtcataagttggacaaataggaaaccaggaatttacaatgaagtctactatcctattgaatatcaatgtgtaattgatgcaaggcagtactcattattgcttagagatggcgatttttttcaatttttttatgagtttgatgcgaaaactggcaatctgaaaaaggctaagttggctttctatccctcaccaattgattgtagaaattcgttggatgatctcaatgaagccgctgaatttgcttttgaccataatgaagaactatataatcatcttgataattggattgcgctattggaaataaaaaactattttccagcaaatacatctcaagttagatttgattatgatagtacggttactacacatgagaaagcacatctgcagtttagtagtgtaaataaacttagacttccggctgacttttttcctttgccatatgcatttgtattaatggtttctgatcttattaatggatgctcaaaggtagacgctagacatataagctttactaagagaaacagcctaaaatcgaacgtttctaatagaattataaccttgaaatcacagtga

SEQ ID NO: 436174 - DNA, 954 bp, Serratia marcescens
atgggacacaaaaccatacgccacaccattaaacgtaacgggatctattacgttcgttttcgcctgcctgataataagtttttacgtaagtcgttagagaccgatagccacgcccaagctcaattgctgatgtcatttgcttctcctgtcattcctttggtccaacgtggaaccatccaaccggatcacttcggtaagcatctttctgagtatggcaatagtctgaagcagcagaatgaacaatggctggcgaaccaatttctgaatgatgtgcggcgcaatattcagccgatagttgctcaggaagaccgcgaggttgtcactccttcggtagatgaggaagaacacactgaagcacagccagaacacgcgttaacactggctggcgcatggaacacgtacaaaaaggagaaggctcagaactggacgaaggcaatttcacaggccaatgagtgctttagggaagtcatgttaactgtcctcggtgcatcaacagacgtaacgacgataaccaagcaggacatcaagcaggtgatggaagttgttgaaaacttgccaaagcgcgttgtgcagctttatcggtcgatgactgttcagcaactaatcgagtgtgattatgtcccgcccgaagatttggttggcgctgagtctatccacaagcatttgaagatttacaaatcgctgttcaaaaccttcctgactgacaataaagatattctggagaagtctccaactgatggagtagttgcctcaccatctaaagcaaggtttggtgcatctagcgcagcagaaatgagaaagtttgtggggggggggcgctcaagcagcctgatggatggcagaagtggatcaccttgttgttggcgtacactggagccagaagaggcgagatcgcaaagctggagaagtcatagatcaagtatgacgaggacagccagcgtcactatctcctga

SEQ ID NO: 436175 - DNA, 735 bp, Serratia marcescens
atggctgattatatcaatagtaacattcttagccaatcatatgttcatgtagagcctgagtggcttgcgacagtaaaagggaaagagaaacaagaggctattgaaaggataaaaaatatcatcaaaaaacatgccgaagagaggatgaagttctttctttatgatgatgttgatattgatgtttcctttgaagatggctctattaaagctcgtatcactgcatatggtagtgtttgtgttttattaaatgctcttactccagtcggtaattttgtaacaaactattcctcatatagggagggaattaaaacaatagtttctgatgtggcaagacttagtgatgttgtcaactctgaagttttgttccaaactaaatcaaggagtaaaaaagaaattattagagttgaggctaggaagggtattgttggttcgcttgagaatattaataaaaaaataaatgaaattagctataagactaaaacacacaaaaaaaattcagtcatgtcaatatataattcaatcttggaattacataaaaatattcttgaattgatggataatgtaaatgatgctgatgataaagaacttgtaagaactgcacttattgatggggttaaaaatcttaacttgggaaaaggtgcatttgatctaacagatccaatgtctcaaaaaatacacgctgatttgctacaggaacgaaaagaattagtcagtaatctagaaaattacaaatag

SEQ ID NO: 436176 - DNA, 651 bp, Serratia marcescens
atgaaatcacgagagctaaagactattcatgatctgataattacaaattatcaaaaacatgacttaggaaatggccgttatctacatactttccagccagcaacaactgacactacctatcagtttgaagccaacattgaggatgtagtcatcgaaggagaaagatataatattggattcactgagcataatggtataaagactattgagacatcatgtttatcaaagtcatctgttctagacaaagactttagctatcaatatgctcgtaatatgtctaaacagaaacatgatgaaaataaagggaaaaatgattcaagggtaaagcattctgagtccgatggctactattgggggcggaaatatgcttggcgtgaatttggactagctcttcctcgagaggtctttgagcgctacttaatagagtgtattgatcatccttatatcgaatgtcaggtcataacagaaggatatccacaaggtgatgattctatcgcttttttagatgatggcctagctgatgccattgatgatttaatccaaactgctgtgattgttaataaagggccttattttaaatcaccattatattatggtggtgatagaaaatttacgattaaaggtgtccctgctataaccgacaaaaaatga

SEQ ID NO: 436177 - DNA, 1299 bp, Serratia marcescens
gtgaaggtaagtttgacgaaaaaaacgtatgtaatccagagaagagtgtcttccggtgatcgtagtgtgagtgaaggtaagaaacctagttctgtgctcaaagtaaaagttggcaatgtttctgattttccgaatatcgatcaagctcgtgaagtagcccgacagttggttcagaccatgatcgcaacaaagaggaatcccaatagaatcaagcgagaaacagaggcttctgaactcactatcagcgaagtgttcgcccaataccgccaacatctgttaggaagaccaaaaccagccaaacccaacacacttagtgtgctgaacaaagcagaaaatcgcctgaaagagtgggaagctttacgagtaaaggatctcactggtaatgaaattcttcagaagtttgatgagatagcatctagggctagaacagcagcagaacagacgtttcgttggataaatgtggcagtgaaacatgcaatcgaaatcgaagctgggaatgctcaaaccctacaaaggcaacctacgctgtcttacaatccttttaacatactaaaagtgcaaaaaaagttcaggactcgttctgaactggaagatagctatcgtgcaaaaggtgttagaaatccgctttctccaaaagatactcttgggcgatttttaaccgcattacataacaagagaaacttcaatcgattagggtgcgattatctgctactgactgtcctgttaggtgctcgcaaggaagaaactgcttctctatgctggagagaggctctaaccagtgaagaagcaaaaacgacaagttatgtagatcttgaaaatcggctcattcgcttctatgacacaaaaaaccgaaatgaccatgagcttccgatctgtgatgctgtgaaacgggtactggaagacaggagagatatcgttatggattcagggattcgtccagaaaaacagaaatgggtattccctgctcgatcaaatcgtagcaaagccggccattactctgacagtaaaagtttgagagagtatatttgtgccgacgctggtattactaagcttggtatgcatgatctgcgtcgaacgtttggtcgcgttgcagaagaacttacttcctatgctgttgttaagcgattactaaatcaccgaaacacaactgatccaacagaaagatatgcggaaccaaatcaggagcgagtgtttgaagctcttcagcggattgagttgcacatgctgatgacagcacctaagttatacaatacattgttagcttcagcacagtatccgccgttgccagaggttcaatag

SEQ ID NO: 436178 - DNA, 882 bp, Serratia marcescens
atggatgactcaataaaaataagaatcaacaaccaaatctttaagtacgaagttagactaccttcatctggtgttgatgataacacatttacactggatttttttgatggcaagtatcgtcaagatgacttggttggattgatccgagatgttgtcccttacttctccttaacagcagatgaaatgaaagagctagatccctctgagatcaataaacgcagctttactcgaatctctgatgccagacgacaggcaaagggagattatggagagttaatgctatttttaattctgagtattttctatgatgttccgaaattcgtaactaaagcaagattacgttctacaacgagagagcagataaagggatttgattgcgctcacttctctgtggataatggtaaaattattctttggctaggcgaggcaaagtttcaccaatccatcagcggagctatttcatcagcactaaattcattgtctgagcatcttaacgacaaaagcagaatagcaagtgaactgaaattattaggtggtgaaatagagataaataagacacttgataaaaatctttacctgcaattgaaaagttatgttgatggtgggaaaagtttagattcagtcgaaattgccgtccctgtattattgacttacgatagtaaatatatacttcagtgctgtggtaaaggcaagattataattaatcaagaccctttcctctcagaactgggaactgaactgactaaacattttcaagatatatataaaaaaaactggccgaaagattccaacatcaaattagtgtttttcctttttccgtttgaagatattgcaaagttgaaagaaaagattgagttagttgaacaggcgatgaagttttaa

SEQ ID NO: 436179 - DNA, 3852 bp, Serratia marcescens
gtggcaatctttgaaattgaaaaagacgaattacttcgactctccgatacgcagctagaagagctgatcgctcggctagcagaagctgaagtggcaatgcacggccatagcccagcatgtgtaaattggtctggttcaattacagcccctgatggtggagttgatatccatgttcaggtcccagttgatcaagtgaaggctggctttcttgtaaggtctgatacggtctttcaggcaaagaaacctaagatgccaaaggcttcaattgagaaggagatgggtactggcaaagctctttcatccatcatctctgaacaagccagaaagcaaggtagctacatcattgtcagcctgggtgatgattgctcgccgtcaggaaaggcagatcgtcttaaagcgatgagggatgcagtaaaagacgatcctaacaaaagcaatcttcatctcgatttctacgaccgttccaaactcattcaatggcttcgccaacatccatcagtcatgctgtgggtaaaagggaaacttggacaagggtattccggttggcaaccttatggagcctggagcaatccgccccaaggtgttacagacactttaatctcagccccaggtgtaaccattactttaccgtcgggaaaggggcaaaaactcaaaattgatgaagcaattagcccaatgcgagcacttatccgttcgacggataaggcagttcgtattacgggattatctggtgtcgggaagactcgcatcgttcaggcgctctttgatgaaactgttggaacagatgcgcttgaccggacagtagctatttatgttgatactggctctgagccattaccgtcggctacagcaatgcttgataagctgatcgctgaggaccgacgagcaattatgatccttgataattgcccatcagaactccatgctttgcttgccagcaaggtatcagccgcaggaaaaaaagtaagtctcatcacgatcgagtacgacattagggatgacaaaccacagacaactgaggtcatccacattcagacagacggtccggaggtggcagagcaacttcttatccgtcgcttaccttctattggtcagaataatgcccgtcggattgctgagtttgcagatggcaatgcaagagttgctttggctatagcagagagagtgaaggaaggtgagagtttagccctactttcagatgcgcagttgtttaatcgcttgtttgaacaacgtaatcatcccgacggccatttacgggagcaagctgaaatattgtcactggtgtattcgttctcggtatccagtccagatgctgctaccgatgaactagaaatattgggtgcgatctctgggtatcccaaaatccagttattcaaagctgctacgaagttgatggaacgccacgtcgttcagaaaagatcccactggagagccatccttccccatgccattgctaacaagttggcagcatctgcacttaatagtattccggttgagcaacttagggcgacctttgaagctccggagcggcaacgattattgatgtctttcgcgcacaggttggggctattgcacagccatgatgtggctaaagagattgttgaagcttggttacagcccgaagggctgcttggaaaaataataaacctagatgatgtatcgacacgcattctgaattatgtcgcacccgtttcccctggagctttgcttgagcggattgaagaaacgcttgttacgtctaattttgaacatattaaatcacgctacaacccacagcgaacagcaattatcaaattgttgcagttacttgcatatgaatcgaaatactttgaacgatgcattaagctcttaatctgtatcgcagaccaggaaagcgcgggcaataattatgattcggctcgaaataaaataaagaggtttttccaaccgtatctatccggtacccatgcctctttagatcaacgtgttgcgatcatgaatgaatgcattggttcaagtatggccggacgtagagggctggggctcgaaatacttgaaactgctctcagcggaccatcgtggacaggattcgggattaatgagtttggtgctcggccaagagattatggatttcggcccagctacgatgagcttgttgagtggctaatcaccttcatcgatatcttggtgagattgggaacctcaggagtgcccgagcttgaagacgatgccaggcggatcttggctgataaatttcgctggatttggcgtcatgaaggaataaggtcaaaattaattgatgcggctcgcaagctacatgcccatcgcccttggggtgaaggctggaaagctgtccgctcaacaatttactttttccatacaaaaagaaaagacaacgaagacatagaaccattgccggaaatacttgtgacattggaacgagaattagaacctaatgacttggttccagcagtcatgacttatgtactcagtaaggggcgcgatttttgggcgctagatgctgattatgaacaccaaggacctaaaaaattcagtgaaatcaggaaaatacttggtgccaaagctttcaagttgggacacgaatttgcagtatctacccatggacttgatgagttgtgccctaatctttttttgcgggatggaatgccctatcgcgtcgaatttggtaaaggcttagctaacggggctcctgacctacgaatttattggcagcaactaatcattcaattggatctacaacacaaatctcaaagtgatgtttcggtcattcgaggtttcattgtagagactcattctatcgattcagcattagcgcaggaactgctcgatcagtgcgcacaacattccgaacttcgattcgaactagtcaacctgcatccttggcaggagtttactgaaatcgatctggatcgctgcatgtcgcttctggatgactctgacatacagccccatatgtatggggcaattctgtggggtgagcaattctctaatttgccagaaagcagggttctcgagcttgctcaaaggctgctgaataaaccgaatggtgatgaagtagtattggaagcactgagtatgaaattagctgataaaggagatgctacggatacactaggtcttgcgctacgaagaatcggactatccgctgcaatccagaggttccgaagagatcacaacgatcttggcggatatctggattatgcaatggaacgtgttatcgatgccacattgcgcttcgatggcaacgaggctgaaaagctagaatggctgagtacaatcttcgctgttgttgatgagcattttggctacatttattctttcgaagacgctatcggtatcaccgctgcatggatgccaaaagaatttctcagtcgcatttttgatggtacggaagatcaacaacagaggcggctgcatttcatcaattatgatgattcacatcagtctcctattgcgaaaatcgatgtagatcttttgattgaatggtgcggtaccaataaagatcctcaggtttgggcttcagtcgcttcaggtattaatctatggtcaaaagacggggagcaaagtcctatttgcttgcaggatgatgctctgagatttctagaagcctcacccgagccacgagccgtccttgagatctttgccgaacacgtagcaccttcatcatggtccggtagtcgtgcgaacgtgatgcaacctagggttgaagcgataggccggttggtcacccacgagcgtgcagacatttctaagtcggctaaagctgtttataaaaaactgactgactgggttgaaaaggaaaaagaacgcgagcgattggaagatgaggcattggaacaacggtttgaatga

SEQ ID NO: 436180 - DNA, 2049 bp, Serratia marcescens
atgacaccttaccttatttgtaaattcgaaaaacaaactcttagcaacttgattaaagagtgttttgacactaaattccctgacgtatataataaaatacaaattgattatatctatcgatatctgaaagatattaaatgtaaatcagttttacttgaaccagtctatatcgataaggattatttggaagattacaagcagtattacgtgaaaggattcaataataaaggatataaaacatcccgtctccattttttctcttctgacctaaatcataaaactatcgacaactacttagaagaaggagttgaaacttctaactttaatctcttacaagaacattatcttggatttatggtaattaaaccattaccaaaaacgtttattggtaaaacatgcctcaaaccttatgaaagcttagttaaaagtgatgataaaaaatgtataactcgtgaataccatgttgatcttttcggtattccattaaaggttgattcacttgcgtttcaagaacaagatatggttgtagcagcatattctaccactgctgtttggtcttctcttcatgcattaaattattgtgaaatacggtcaattccatcttgtagcgaaattaccattaatgctataaaccacataaataattctcacaatagcttcccaagtacttcattaaccaccaagcaaatgttgagaacaatagatgtagaaaaaataaaacaccatctattcaaagcagaccaattaagtaatgatgcatttcatgaaatagtaaagactcacattgatagtaaaatacctcttttactgagaggctcaatatatcaaatcgctgataaaaatacttacttaagaaagaatgattatacaattacaatattaggttataaagaaagaaataaaagcaaagctatttatatccatgatgatcgtttaggtccttttgtaagggcaaagtataaaaaaattgatataggttctaaaaataattggggtttaattgttcaagaaaaagatgacaatacaagatggatggctccccatgaagtatttattcctgacatactgatatctataacccccaaaaaggtaaggctttcgtgtgatctcgctatcaatacttgtagccttataaagtcgatttacttaaagatgttagagatcgaaacatctcacaaagaatctcttccaaaaatagaattctcgataaagcttaaagaaatatctgaaataagggaggcttttttggagtatgattttagaaatagtaatgacaatgaagcagtaatatggtgtaaaaagaatagaattgattttttaacccagtcatatgcacgatatcattgggttgcttccgttaaattaaatgacgaggatgcatttgatatacttttcgatgcaacagatattccgcaaggtgatgctgtatcagccataatatataaggacaactataattcgaaggcaatattagatataatgaaaaaacttgcctctaatgaagaaattcttaatataattcttaatgagactccatcatatagagaaaatagtttcctgctttcattcttttcattcttgataacaaaagattatgattatgcaagctatctagatgaatcctatgggcgactaagagcaccaagttatcttaaacaagaagaatataatggtggaaaaatcactggtaataagtcctcagaaattttctatggtcgcatagataaaacacttaaagacatcacaaaagatttaaaaaacaatcttagaagttctttcatgatttgggcgattacgcatgagggagcattagtgattggtaatgagattgataacaacggccatccatcactcacaggcttcaaacctgcgaggatagcaggagagttatttattaaaaatggagaattttacataaattcaaaatctggtcgttatagcagggattatacaaacccaagtaagcttcttgaaaatgccattaataaattcagtgaagttttccctgacaaagatcttaaaattgaaatagaacattttaactcataa

SEQ ID NO: 436181 - DNA, 165 bp, Serratia marcescens
atgagcacatatgaattgcttaagactgcaaatgaaatgacttttacagttgaaaaaattcttttgttaaaagaacaccttaagaaagaagaaagaaagttcgaagtggaatcgaaaaaacgtttagttgacgaacatttgctttctaaatcttacgaagcttaa

SEQ ID NO: 436182 - DNA, 366 bp, Serratia marcescens
  misc_feature (271)..(280): n is a, c, g, or t
atgagtgaggtggaggccgccagagcggcattttatcctgacgtgaacctgatggccttcttacagcaggatgccctccacctcagcgatctgttccgtgcttccgcgcagcagatgggcgtgaccgccgggctgacgctgcccattttcgacagcggcaggctgaacgccagcctggatatcgcgcaggcgcagaacaatctctcggtggcgaactacaacaaagcggtggtggaggcggttaatcaggtggcgcgcacggccagtgacnnnnnnnnnngaaacgctgaccgcgaaaaaccgtcatcagcaacaggtggaaaaagatgcggcacgggtggtagcgctggcgcaggcgcgttttag

SEQ ID NO: 436183 - DNA, 132 bp, Serratia marcescens
atgataagatgcctcaccaaaatcagtattgcgtttattaatatcgtatggatctacggtatcacttatttcaataaaccctcgaacctctctttcatctttgaaaaaatcatttttataacaggtaaataa

SEQ ID NO: 436184 - DNA, 525 bp, Serratia marcescens
atggcctctgaagggagtgctggagaacaaggtgggcgccgtgagttatacggattcagaaaaggaaatggcaatgcttatgacaaaatccttgctgctcgtaaccaatacggccaaggcagcgctgaagagtttgaggaagtatccaaagcaatgagcgcatcagcgaagtctgcaggtgcactgaacttttctgatccaggaaaacaaggggcaataacttcattggcacatatgcgtggctcatctggcgcacaagcgatcctgaactccatggagtccggacgaatagttaaggctgataccttaacgtcggaggcaatagccaaaattgaaagtatgtcggcggaaagctttcaggataatttacttaaagctcgggtagaatacgatagagcaatatatggagataccatcacgacgcagggtggtaaacagtacaactggtgggcacgttatggtaatggccttcaaaagcggtatgcccgggaagcagaagaatttttaaaattatcaaacgagtga

SEQ ID NO: 436185 - DNA, 576 bp, Serratia marcescens
atgaggattacaaaaaaagaattactcgcggcaatgtctagtaatgaagggttcgaaattattaaggatgattatggcaggggtgataaaataaattccgagagtgaaacgcctgttttagttaagtggaaagggttggctttttttatttctttcaatgaaaacagtcaaccagacaaagacaagctagatgatgatgactttgcctataattcagtggctgccgacttcgctgttacagtgattgtggtgggcagtcacccattcgatgataacataaatgaagatgacattattgatgcgaatattaaatataaaattgcaaattatgtaaatatgagatctcatttgaattcagttgtcatttatcgtgaagatggggatctttttgaaatctcttctcggcatggtgtctttttaagggaaggtgcagcacaccatatcaatggtacaattatgaccatggcactgacatgtacagttacctcacaaaaaacacgagaagcaatagaaagctatcggaattccccggaagcgtttttaaaaaaatgcaaggggataaggaatgaagaataa

SEQ ID NO: 436186 - DNA, 357 bp, Serratia marcescens
atgaagaataatgttctaaaaatatttcttttaacattgttttttaacatggttgtttcttattttattggttataaatataaagggtatctcaatgatttactttcgccagctatttactatcaagcagtggtgttcatttcactaacaatgcctttgattatttctggtgtttataaattgctttcaaagcgttgggttatgtggaagttgaataattttaaaaagaaaaacattgatgtatcaaagctagatgactcgactaaggaaatgtatctggaaattgtcagtcaggatattccaactaagaatcagattaaagagatgcatgaggccttacgtgaagagtttaagtaa

SEQ ID NO: 436187 - DNA, 741 bp, Serratia marcescens
atgaaaattgattttaaaaaagcacgggagaaaacgaggggcttttcattagactttctcaatagtctgaaaccattcacggctataaatttgtttttttacggcattatacttactcttgcttttttctctctcgtgttttccttcctttttgtttttgatggtacaggggagtataccaagttctttatcttgctggctgttagcgtgacattgctgactctggtttataacatcaggcgacatgtgtcagaggattattataaagacgctaaggaatatttggagaaagctttcgaaatgttacaaccaaaagagggtgatattcagccccctaatgatagatatatttggttgactgcggcgaggtttttaaaggtttcagagagaatggctggaaaaataatgatgacttcgcataaggatatgtatcgggaggagcgacaattctggcgagtaaaatttagtgggctggtaaaggactttcctgctgaatattatgctgaatcgcctgagaaaatgagcatgtggagttcgcgggacagggacccactaagcgaggcatcattggttgtaatctataaatttattgagtgggaaaaagactatattgatccacttgaaaatttaatattcagcgatgatgagatagagaaaatgagatttagcacctatagaaaactcggagaatttctccacgatgtgagggagcttcgtaaaagagaatataaagaaaagtag

SEQ ID NO: 436188 - DNA, 765 bp, Serratia marcescens
atgaagtttgtgctttttttggctcttataattccatctttatggtctttgcaatggtttcagtttgataatccggtagatatgcttgtcagtatgtatcgggatattctccctagtgtaacatggggacttgctgttttatacctttatgattttagcatggcaatgttgaaaaagaactccccgtacatgataaggttccacaatacattaaaaaaagattttattgtgctttttttactttcagtgttcactgttgtcatttattcgtgttctcctcagaaatttacttctgtaagtttagatgtctgcatggctggattcagcttcatggttatggggaatttaggtttgttacgtctttttaaatacaaaatcgggacaataaaataccctaagctcccggcctttgctatttgtttggtctctatagctctttctctttactttttgaacgtgacgttgaatattgccaatggtgtttatgaaacatcacgtgcactttggaatcaaataacagtcttttgtttttccatttctctttttttcttctcgggtcaaattgtctttttcatggatagtaaaaccattgagccatcgccggtgataatggatttgcttaagcgttttagaccaacgaataatctgtatgagatgagtgcgaatgcagctgagttatggaacgaggccgcgaagaaggaaagggctaagtttagtgctcaattaagaaaaaataagaaggggaagaaaaaaggtaagcgatag

SEQ ID NO: 436189 - DNA, 1401 bp, Serratia marcescens
ttgaaacgagtaagatacaaaccaaatctgaatgcaccatgcctatgtggatctggagtaaaatttaaacgatgctgtatgggaaataacgacgcccactgtgtaacaatgatcgattcagcaagagagttgctcctcaacaaggattacaaaggcgcattgaagcttgtaaggcttggcattacaaactattctattttgcataaaaccaataccgaaccatatatttttagtgataacgaagccgttctccgactattgagtatagatatcaaggctctttcagagttagtcgaatctttactcgattgctatcgcggccttcatgattacagctcgttcgaatgtgatttagaaaggctgagaaacaacatttcagatgctcgctggcaaaagaaaataacatattttcaaattttagcttctcttggtgaacattggtctgagaaaattgggaaaagagaagtaaaaaagctgctaccaatagatgaagagaatgatgtagaaattattcagttatatcttcacttctgctcttatgacctttcttttaagaaaaatatagacatcctagatagattgctttcattaattgaaaagcctagagagaaacttcaatacagcgtggtgaaaggtataaagtatcttagtattggggatacagaagagtcccaaaaaatcatagaagaagcgataaaagattacgaatctactgattgggccaacgatagctgttatggcctagtgcagcacgcaagagcaataagtcttttgggcgatctaaaaagatctgtcgagttaaaagccttgtcagtaaaggagtttatatcacttctcgacaatcataaatggacagattctggcgtagctgacatccatgctgaaatagggagatctttgttccacataagaaagtttgatgaagcaattgaacattatgaaaaatcattactaatagctgattcaaatttggttaggatttatttatctcaagttaagatggatttaaatgataaaacagccattgatcttataaagaaggttgagattaacatttctaagttgtctgagtctgaacttattgattttatctttacctacgcctcaatcagtatatcatttaacgataaggaaatgattgaaaaatctctaaattatttaatgagctcaccatcattagaatttatttttgaaaagcaaaaaaacgaaattattactcagatcacaaatttatatgtaagtggcaatttaaaaacacaaaacagcgtactgacaaaactaaagaatcttttgagtaggacttccagatatttgattttacaaccaaatatagctggtttggggataaacattaacaatattgtccaagattttacctctgggtctgataaggaaaagtaa

SEQ ID NO: 436190 - DNA, 216 bp, Serratia marcescens
gtgctgacggcggtggcgctgggttccgtcttcaacccgcccggccggcgggtgcttatctatacgctgctcggcgtgattttcacggtgctggtgcagggggctttcaatactttgctggctccgctggggatgccgtcgctgaccatgccgttcgtgatcgcgtcctgggtgtttttgagcgccaatccggcggtgatcgcggcgcggcgctaa

SEQ ID NO: 436191 - DNA, 816 bp, Serratia marcescens
atgcgattctcacatttttttttggctgtcattgctatttgcttattatatgcttgtgtcagttttactctgtcttggccatttgacgggtggagtagagagtcactaggacaatttggagattcatggggggtcgtgacatcgattttttctgtgtttgctttcttaggggttgcttactcagtaaaaattcaagcggaatctttgaagcagctgaagagtgattcaaagtccaataatatgatgatggtaaggcagcaggttgaaggaaacttctttcagatgttaagtttattgcagtcattgataaatgatatggatatacaaggggatggtaaagagggaggggggttcgaaagaaatggcagggatgtttttacatacttctataagaaattcaaaagcaataagaaggtagaacgtcgcttctatgtcgaaccattgaggttaaatcagatagattatagaaggttaaggcgatatataggtgattgctttgatgagttttacaaagacaggcagcaggatttggctcactatttcagggttgtatataacatctataaatatatagatagctctcacatcaaaaaagatgacaagaaaattcttgcaaatatactaagggctcaactttccaattatgaattattaatgttgttttataactgccttggtaaacatggggttaaatttatagatatagcaatcagatacgaaatatttgacaatctacctatagataaattagttattgaagagcataagttattaattgataaaaaagcattcggtggccaatcttcgggttggtaa

SEQ ID NO: 436192 - DNA, 999 bp, Serratia marcescens
atgagagggatactgaagccgatcgttgtccgcgaactggggcaggtcatcttaaagccaggcatcgaactgctgtcgatgttcggtgaccgggtgctggtggccacagtaccggctgaattccgggaactgccatcaggcgcactaccggccactgagcagcaacttgccagtgacccgcgcttccgtccgttcttccagcatgagcgcgttctttctgccgctggtggcattaacagcctggagagctggctggatcgtcgtcatgactgtcagcgccagtgtgccgaggacgattatcacgacaagaatatggagaccatgcgttatggcaccggtgctattcgtctgtgctggcaccattcgcatatgtaccgtgataagacgatggatgagctatcagccacagcagagcaaaatattgctgatttcgtggtgtatcgggctagagttcatttcatgtttgaagatagccatcaactgaccttacccgagctttgctggtgggcatgggttatggagttgacggatctgttgcctgaggcggtagctgcagcatctctgcgaataaagccttacagcccgccagcaggagtgaagaaagaagccgatatcacccacaccccggcggcacgccagattgtggcagaaaaggctaagaaagcggtcaagacgctggttatcgatccggagccgccaaaggcattattcaagataccgaagcgtgagcgctggacaagcgagaaatttaccaagtgggtgaagtcgcagccgtgcgcatgctgcggagtactctcagacgattcccatcacatcattggccacggacagggtggcatgggaaccaaggcacacgatttttttaccatcccactatgcagaaaacatcacgacgagttgcatcgtgatctgtcacggtgggaagaagagtacggcagtcaggtcgaggtgtggtttaagtttatagattactcgatgtccattggtgttattaactag

SEQ ID NO: 436193 - DNA, 372 bp, Serratia marcescens
atgaaattaacgttgccattcccaccaagcgttaacggctactggcgctcgccgaacaagggagcatcccgtggccgtactttggttagtgagcgcggcagggcatttcagactgaagctattgctcaggtaatggagcaactgcgccgccggccgaaaccaatcagcgcagacatatctgtagcggtggtgttctatccgccaacaaaggcccgtcgggatctggataacttcttcaaggcattgtttgacgctatgacgcaggctggcgtgtggctcgatgatagccaaattaaacacatcgatgccaagtgggggccagttatcaagggtggcaagatagagctaaggatcagcgaggtgctgacatga

SEQ ID NO: 436194 - DNA, 348 bp, Serratia marcescens
atgaaaaaattaacgatcccagtagacgtattcgaaagcgagcgcgtaaacagcggcatccgtcggataattatcgcagccatgctgaaggacaacctagaaaaccagatgggccgagttattcaggccgcagccggcgccaaatggatgacgttacgcgatttggaaagaaccattttcatgatgtttttcgtagctgacacccaggcggcgattagtgcccggctgcgtgaggttgaccccaaactgcatggccttgtgaaagaaaagcgcacgctgaaggatccggacacgggcaagcaggtttatttctaccgcctagtagccgtagaggagcagccagaatga

SEQ ID NO: 436195 - DNA, 459 bp, Serratia marcescens
atggataagctttgctttcctcccctgctcactcctggattccatgcctttgatgatggtcaaatcaaatcattatgcgtagacggattcccaaactccgttagaagaggcgtgctatactgtaattacatacagttaatggaagatattagaagtatcaataggcagtttaaatgctttgtcgaggtgtgggtagacggttcattcacaacagaaaagccagagcctgatgatatcgatatgctactagtcattgactatgagcagcttaatcttgttcctcctatgtttcagccgcaagttgagaaactgctaaataggccatatattaagcacaattataacattgaccttctcttgctgagaaatggacaggacgaggacaggatgcactggcgtggtgttttcggccatgacagagaggatacccctaagggtatagtgagggtaccattatga

SEQ ID NO: 436196 - DNA, 933 bp, Serratia marcescens
atgaacgctagtcgcaacataaactccttaaaggggcgcattcagttcgttcaggataaactcgcgtcaatttcatcgaaaggtgagatgtctttcgcagatcagctcatgtttaacaacatggattcatatctcagcgacttgaaagcagagcagcgagctgaagatgcccgccacccgttgctggattttatggagcttcgccttaaaggggcggtagttgacttaggaactataccacttgagatgcttggtataatttctagtaatcttgcagcactcatacagcgcgcaactcataaactgtcgtcaggcaaagattcatttaaagtacctcattctgttaaaagttccttagacatgaggcttgctgagctatcccctgggtcaaccaggctcggtttgacattttccaccgggcaatgcgagcttgtagagacggtatcgagcaaagcagtaaaggaaattattgacctattggatgctaacgatgcattaaccatgatgaatcagatagcggaaattggctataactcggcgcaaagcttgaagaaaatagtagaggaatgcgataaaaatcatatagattttgatttgtcatgggttggaccatttagcgaaggaaggcgaaccgttacagtgagcactccgaaaatcaagatacttaatgatcgccttgccgcgacaaccatatcacaaccaagtattgagacgatatctggtgttttggcatctctatctaagtacggaaaaatggaactagaggttgatggagataagattaaaacctcattcccgatcgacatgctcgatgaaattcagaaaaatcataaagttggccaacaggtgtcgcttactgtagaaataactgatattcataatgaaaacttaggacttcataggaaaaattatctggtgaggtctctaaagtaa

SEQ ID NO: 436197 - DNA, 525 bp, Serratia marcescens
atggagccgcaacaggaagggatcacgcgggcgttaacgccgggcgaagtcaatctggcgcgttcggtgtttggcagcaccattttctatcagagtgtgttggttcactgcgacagctacctgccgtttgggctacagaatcagtacacggcgatgagcccgaatggggaattgtattttcgcagatcactttatgaaagagattatgcgaaccaggatcctgaagcacagcacctttttattcatgaaatggcacacgtttggcagcaccagaagggcatgtgggtacgcacccgtgggcttctcagttgggcggtaagttatcaatatcggcttgatcaacctttgctgcgccactacagcatggaacagcaggcatcgataattgcggactatttcattctcaagagatatggggcgaataccttcttccgcttgccaaacaggaaactcatcgggatagtggacagacggacattgtcacaatttaaacccatcatcagaagcgcagggctgccgctatga

SEQ ID NO: 436198 - DNA, 684 bp, Serratia marcescens
atgaattgcctagagcggctaaattacaaaggtagcattgacaaaaatcaaaaaagaataattttcaaatcattctcaatgagtgattttttttctcattacagcacttgctttcttcatatgccaaaaggcatctatgagaaatcaaatagtggatatactaaaaattggaaagaaatatctcgctcaacacgagaggttgctgattatcactgtagtgactgtggtgtaaatatgagatcagcacgccatctatgtgatgtgcatcataaaaatggggtaaaatatgataactcacctcagaatttatgtgttttatgcagagattgccatcgaaagcagccattccactctggaattttcgttaaacgtaatgaaatggctgctattcaaaatttacgttcccagcaaggtttattaaaatcacaaagctggtcggagatttatgcgttggtcgatccttccgtaaaaggggatatcgagatgatggaatttaagagataccctatgccaactctaggatttgatttaaagaacaaaaataatgaggtagtagctatcgttgatgcggcatggccactattgaaaatagcagtaagccttgattctgtagaggtcgaaggctgggagatattttctgtcggagagttagtacatcaaattcaatctggtagagtgttctaa

SEQ ID NO: 436199 - DNA, 651 bp, Serratia marcescens
gtggaaattttagagcttattaggttggttagtaatcctttaaataaaatatcagttgatattgtttcagggaaaagtacttttgattacttattattgtcggcgccgactgtaattggtattttagcgttgatagtatcgtattgttcaattaagacagcggcgtccactcagcgtgagagttcactgacacaagcaagaatagaaatagccacaaaactaaagtatgacagattaaatgccatgacagatttggcttcagaattaatagtaaatctagatgcttttatgatgttaagtgtcaggctaaaatctcaaacggaagcgattaagcaccgaaaagataatttaaaagaggatgtatccgattcggtaattataagggctaatctgtttaatgaggttgttgataaattaagagatgtaaaaaagcattcctataagctgcaattgcttttagatacaaaaattcatggtgacattttttttacattaaagagaatagacgagattgtaaacaaggatgatccatatggagaagtaaaattattttctgagttagtggttgatttatcgagaaagatttacgttattttagctgaggagtggcgggatatacaagattacccattcgatagatcacaattataa

SEQ ID NO: 436200 - DNA, 1392 bp, Serratia marcescens
atgaaaccaaatgaatataaagaaaaaatcagctcaataaataaatgtttaaatttcattatcgacaatttatcaaaaaaatcaattaacgatactgacttcctaccttcaattgaatacgaaaaaatcgccacgcgtgcaaaaaaaataataagcggaattaataagcatgacccgataaactttccaaatgattactcatcgatggaagtagcaagatttgagaaaaacataaccaggctatatgaaaccacagactcaattatgtatgggataagcaccgataatgaaatggatgcgttatccatgctaattgatcgagtcattcccatttatagaattgcaacctctttcgagttagaatcaaaaatagaagataagatatcattattcagcaaggatatggttgaaaaagccaaattcttatcggaattagtgcataaaacagaagtaaatttgagcagagtttctgcattatctgaagaaacacaaacaacactcgatgatacaaaattattcactgaaaatttgaaaaatgaattaaaaattagcaccaagcaatcaaataacatcacttcgctacttatgaagagcgaagccgcctactcaactatagataatattaagaacacattaaatactgcatcaacctcattgaaaaccctgcaagataaaaatgatataattgctgaatcatttgatgaatacattacctcatctgaaagaaaaattaatgaactgcttgataaagaacagcgaataagttcaatcgaggatgatctaaaaacacatatcgatcattctaaagagctaattagcagcgcaagagtggcaatgtcactaacaggaacctttagattatctaggtctttcaaaaatgcatatatgatatctaaaaaaacaagagatagatgggcagttgcttcatcggtcttagcaattgtaagtctgtcatttgtttccttcatgctttatgaaatgtacacgtttgattattcaacacttttgaactccacaacacctgctattatgatgttcgccgctagattttccatgctccctgttgtgcttggattctttgcattttgcgccatgcagtacgtaaaacaaaataatatatgtgaagattatgcgcataaaaagttactttcggaaactttaatttcatttaaagatgaactatccacatcagacaatgaaaaaacttacaacttcctatcagagatattaaaaatcgtactccgctcaccaataaacacagttgataagaaaactcataaaattgaaatcgatcacatcaattcaattgtttctcaaaccaatgaaattggaaagacattattagaaaaactcacacctaaagagacacctccatcggttaaaaatcaataa

SEQ ID NO: 436201 - DNA, 216 bp, Serratia marcescens
atgaatcagatcgatatcgagaacattatccagcgttacttggaggcagagacatcagtcttggaggggaagtcgatcacgtttaacggccaatcaatgacgatggaaagcctgtcagaaatccgcaaagggcgggcgtactgggagcgcaggctaagcgatctgatcgcatcgcgccgtgggtggccgatgtacaaagtggcgaggttacgatga

SEQ ID NO: 436202 - DNA, 786 bp, Serratia marcescens
atgagtgttgttaaaatagatttaaatgacccagtggttttagttccaactataattgctacttatgcgttaataatattggtattgttatacatctactctaaattatccactgacaaacgaaaactgttatttaatatggctgttaaatttttatcggcgtttagttcagtattctcgatgtttttacttgatgttacggaaaaaaacaacaaacattcctcaagaaatagcttcggtaatatatcaagacgtgaatacatggggcgtagatacataacgggttcaaaggaaaaaatcacaaaacaagaacgaagtccgagtcttatagcattggttgacaaagaattttcaaatgccaatttggttaggaatgtatttattaacgtttttgttatttttacattatgtattatgggaacttatctctggttggataaaatttcactggaaactaagatagtagtgggtgtttcatacttatcatttagtttgtttaatatcttcattataaagtcatcttatagaaggactgcaatgttgctttctataatggaggattcaaaaaagcaaagtgatataggtgattttataagcaaacaccggcatggaaaaggattaagtgataatgatattgagttaataagattgatgtatgtttcaagggctgaaagagagagggctattgaacatccttacgaactatttttgaagaatgtcaatggtgcaactataaactttggtaaaggcagtataaaagtcgatgctgagaaagaaaaaaagtaa

SEQ ID NO: 436203 - DNA, 822 bp, Serratia marcescens
atgcgagtattcagaagcttatatgaacctgtgaataattatcttccgtcatatggaatatccaatacagaggagaaaatattgttaatgtcacccttagcctgggttgattctgaagtaggcgttaatgttaccaacaatataaatgtaacggcgattagcgatcgcacaaatgcagccatatggctacccttgagatcaggctatatgcctcggctaattacatctgccaacggacataagttcctcaacttcggattagggcgaggcccctccgcgcctggcgctatcttatctaataacgcttatgaacaactgccccccaacggagtttttgctttagcgatggtttatcgtgttcctctgcggcaacaaggaggatacgatggcacaggaggaaacatattaggcaactatgataacagcccaaatatttttcgcttacgtttccgtgacgatgggtatagagggaatatgttgtttttgcatcacggtgcaacatcgccaataacccagaacaattacccaataaattccacattcaatgatgatgggctctggcatagcctactgctggaagttagaacagatatgcatcaaattgagatagatggcattattaaacagcaacggttagttcctgcaataccattcgcaaactctgcgtcacgccaactcatcatcgggggcgctggaaaccctcttagtaacggttttttcggtgatatcgctatggttctcattatacctggcaccataagcgccgagcaaaaagagtctctttataattatataggtgaagtaaaatcaaaatatctatga

SEQ ID NO: 436204 - DNA, 516 bp, Serratia marcescens
atgagcaccacagatttgatagctttctgggcaatgctggggacttggttttctggcgcaatgactttaatagctcttttttttgcttataaagcactaacaacatggaaggagcaggagaaaaccaaagttaaaatggaattcaaaaagtcacttattgctttgaaaaatcagctaacatggatgccaagccagttgaacctcgcagtcgtgatagcgggaagaaaggccgttcaagaaggtaatgactcggctgagtacggtgatcggaagaaacaagtccatatatctaaaagttacgctgagaaatttgaaaaattcgaccaatgcatgttgaattgcatgatgtgttgggttgcaactgagcacttgtttgataatagtgaggttgctcagttatggataaatatttgtcaaatttatttgaactacctgcaaggtgataaacaaaagcgagagctcacagacgctctggatgaattatcctccatgagattcgtattcgatcataaataa

SEQ ID NO: 436205 - DNA, 288 bp, Serratia marcescens
atggccggcacgctggaatccagcgatgtcatggtgcgcatcgcgcccgccgaggggccgcagcacgatctgttgatcgccagcagcgtggaaaaacagttcggcgcggcgatccgccgcaccctgctggaggtgctgcagcgttatgaggtggagccggtgcaggtgatcgtcgacgacaaaggggcgctggactgcgtgctgcgcgcccggctggaaaccgcgctgatgcgcgcctgcgagagcggccaactgccgtgggaggcgaaagatgaaaacgctgaataa

SEQ ID NO: 436206 - DNA, 891 bp, Serratia marcescens
atgtccgatcgccctactattgcgcttattggccccggcgccatcggcaccgccatcgctgcggcgcttcatgaagtgggccgcacgccgctgctttgcgggcgtacggcccatccgcaattaattctgcgccacgatgagggagaagtggtggtgccggggccggttttaagcgatccgcgtaccgtcgcccatccctacgatctggtttttgtcgccgtaaaaaccacgcaggtaaccgacagcacgggctggctggcggcgttgtgcaataaaaacaccgtcgtgtgtgcgctgcaaaacggcgtcgagcagcaatctctgctggcgccttacgtcaatggggcgacggtgctgccctccgtggtgtggtttccggcgcagcgcgagcaagatgcgtccgtcaggctacgcgccacgctgcgcctgacactgccggatgcgccacaggcgcaagcgatcgccgacgcgctcagcggttcacgctgtgcggttgagctgtcatcggattttctctcgattgcttggcgtaagctgttgcagaatgcggctgcggggctgatggtgctggccaatcgccgcgcaggcatgttttcgcgcgccgacataacgcaactggccctggcttatctgcgtgaatgcctggccgtcgcgcgcgcgcagggtgcggtgcttcacgataacgtgccggaggcgatcgtggacggctttcagcgtgcgcccgcggatttgggcacctctattcttgccgaccggcaggccaaccggccactggagtgggacatacgcaacggtgtcgtgcagcgttatgggcgcttgcagggcatccctacgccgattagcgatatcctggtgccgctgctggcggcgggcagtgaagggccggggtga

SEQ ID NO: 436207 - DNA, 1614 bp, Serratia marcescens
atgggacgcagatcgggatttgaaggttttatccgcgcgacagctagagcggtagcagcagcagagcgagagcgcaagagatcagagagaaaccattttgcagaggttcgacggttagaacgcgaagctaaaagagaaaatgctcagatattacgtgtgcataaagcagctgaaagagcagctaaggttgcgtatttggaagggcgactcgatgaggtgtccgacctgaacgctgagttggaagaggttatcattgctctttctaccttgcttgaacatacactcgagtttgacgattcgatagatttctccgccttaaaaaaaactcctcagttcgaagatttcaaaacgcctggacacctattaccagaggcagagcctgaactgacaattgttaattctcctcccgcatggaaaaatatttttccatgggtgaagaaaaaatatcaacgtgagttaaaaagtgctgaagaaattttcgctagaagaaaagaagaatatctgcgaagaacctctaaccagaaggctgagttaaatacgttggttgaagaatatcaaaagtatagagtggcctattttgacgagcttgaaaagcaacatgaggaagttaatcagtttgagctagactatctggagtgtgttcctgacagtgtgctggcttattgtgagatggtactgactcgttctgaatatccggaagttggtttccctcaatcatttagactagcatacttacctgaaaataaagaattggtagttgaatatagcttgccagagatatctattgtcccaaatcagcttgagtatagatacattaagacaagagatgctatcgaatcaaaggcgaggaaagctaatgaaatcaaagaaatatatcaaaatgtaattgcggcaattacgcttagaactttgcatgagttattcgaagcagataaagcctcagctttaacttctgttctttttaacggtgttatcgagaccattgacccgactagtggccatgacatcgttgttacgttggtttcagctcgagcgcacaaagatgattttatgcaaataaaactcgaacgagttgaaaaaattgcatgtctccgaagcctgggagcccaagtttcaggacgacctgatgaactccaggcagtcaaacctattcttgagtttgatatggttgataaacgctttattgagcaaggggatgctctttctggccttgaaactcgcccaaatcttatggagctttccccatctgagttcgaagtattggtttcaaacctattcacgcaaatgggtttagatacaaaacttaccagaggtacaaaggacggtggtgttgatgcggttgcatttgatacacgtccaattctgggaggcaaagttgttattcaagccaaaagatataaagacacagtcggggtcagttctgtaagagacttgtacggtacaatgatgaatgaaggagcaaacaaagggattttggtctgtaccagccagtacggtaaagacgcttatcggttttgtgaggataaacccatagaactcattgatggtgggggccttctttatcttttaaaggaacacgccggcgtatctgcccgtattaatccaaatttttaa

SEQ ID NO: 436208 - DNA, 1128 bp, Serratia marcescens
atgaaaaaagatatcacagtaactattgattcttcttcgtttcccaaaagtcaagtacagtactataacccgttacttactgttaacaaaattgatgtgaactgcatgctaattcacaccgctctatggactcgcccccccaaacttactggctttcatttgtctgatttctgggcatggctaagatacttccctgccttttcgaaaacctcatctgacttgcgacttcgtaaagaatggaaagacatagatccccatcaaaaaaccattttaagtgatgaaataggggtcggttcaaccacgtatacattaatcaatacattaagttttcaggggttcattgatgcaatttacgtattggaaacattaaaccttactcaccttcttttaaagaaatctaaaaacggtaaaggtaaaacacctgattatattggtttggataattttggaagggttattgctcttgaatgcaaaggaacacaaaataagataaaggatttgtacaaggctataacaaagggcatagagcagaaggaaaatttgacaaaaaaccctactggtccaataaggattgggttggttggtgggatatttattcctcagtttgacaatcctgaaagtgcattaatacatttccgagatccagactggaatgaatttaacgagattatttctgaggttgcccccgaggaactggctaaagccatcattcgtggggcggtgattaaacaattgtatctcgcaggtgcaaataattctgcgaacgagttgtcaaattatattaaaggtaacgattttgaattgtctgcacaggcaactcaagaactaaaatcctttgagcgagaaataattgtgtttagtcataatttcaggaacccagttgaaggaggggtttcaaatataaagttcagcgcccaaatagataataaaatccttccccttattgaagggttaacctcaaatagtgccaaggcatctgtattaattaatgagctaagtgttacaaagaaaaattttgaccgacggcataatgatcgctcatggatttcatttgaaaatgattatagtggaatgattgtttctccacacggttttaagtttaaattaaattataaaatgaatgattag

SEQ ID NO: 436209 - DNA, 426 bp, Serratia marcescens
atgttcggattctttaaaaagaaaaaacctgaagctgaaacccggcaagcttcccgactgacggcaaaacagtttatcgcgctgacgctgagtgatgaaaagctgtctatgcccgtatacctgccggggatccgcaatgaggcagaatgcgacgagctgggtttatggccactcatctacatctggaatgtggatcatgccactggcactttcagcctttctgttaatggtaaggccattgcccacctcctggagccttttgtgacccgtgaagaccctgcgtatgtcgaaattcgtgatgaagcgatgcaggtcatctccgaggcttcaatgcagtccgtactggcaaccatagagaaaaccggcctcatgcccgatgttttgttcgtgtaccatgctgaggatgtacagcgggagaagggctga

SEQ ID NO: 436210 - DNA, 1395 bp, Serratia marcescens
atgtctaataagatctatagcctaaaaagaatgcctgctgaagcatttaagatatttgcaatgtcattgccacatggccctaattatggtaatgcggaattcctttccgcttggtcaaatgaaaaagggcttggatatggtgcagtccttcaatacagcaaaaattcatatggccttgtcgtgcttagacgacgggaagattatgtgctggtacctatcgagcataagatgtgttttaccgagcaggaggcattggtgcatcttgataagcacctttcagccgggggggatttattaccgattccatctgggcaatcacgtagagcccgactggatcaggttggtgagcggaatgtttgccaggcatttgtacaattatcgtccacgataaagtaccgaggagcatttcatttaattgccgagttctatctggcattaccaaaacctgatgataacttcataaccgatctccagacccgaggattcaactctagaatctgggagctataccttttcgcatgttttaaagagcaggggattaaagtttttcaagattatccatctccggattttatgctaatgaacggtaataaaaaagcatatgttgaggcggtcaccacgaatccaactggtccgggcagcctaaagttgcctcaaacacaattccccccaggagatcgattagctcgcacagcaggtgatatggcagcacggttcgctaagaccatcagatctaaattccagagaaagtatgaagaactaccacatgttaaaggattcccatttgcaatcgctatagcggattttagcggtgggggcactatggtctggtctcgcgagtcacttccaacctatttgtatgggcaaaccgcacatacagtcaaaacatccaaaggtatgaaggctgctgcattatcaattgaacggcttataggccatgaaaatattccggcaggactatttaaccacccagagatggagaatttatctgctatcttgtttagtaatgctggaacattgccaaaattccagcgaatggcaatccaagctgaattttcctcaccaattgtgaaagcccgcagggttgggattttatttgataggactgaaggagccttggaaccaattgacttcgacctagatattcaatcgcctgaatatattaatctttgcgatggcaaagaattttggtgttttgaacttgaagtatttcataaccctaatgctgcacatccaatgccccatgatttcctgccgggggcaacacattggtttgaacacaatggagatatcatctgtgagacccaatggaaaaaccaggtacttgcatcagtaaccgagtttagtattgttccagatgtcgtcgacaaactcgaaggcaaggaaaagccgtga

SEQ ID NO: 436211 - DNA, 1053 bp, Serratia marcescens
atgaaactaaaaaaaatgcttgaaatggatttcatcaaagagtttcaagagcacctagaaaccgactttgagcatgagctcttacatgccagtcttcgcaactattgttctcatggtaatccgctgcgcttcaacaactttgcatttgcaatacgtgagctaataaatcatgtgctgaaacgactggcaccaaatgacagagttatggcatctccatggttcacaaaaaataaaaataacgccactattacccgtaaacagcaagcaaaatacatcgcccagaagcatatacccgatcaactacttgatgatgtagctatcgaaagactagatgatggtatagcatggttcaataaaaactattcttcgttaaacgattacactcatattagcgaacattcatttgatagtaatcccaaacagttttttgaaagtgctaaactgataatagaactgtgtaacagaattttcgataccttcgatgaacttgagcgtgttattaccgaatcaataatcgaggaagtacaaaatgaagttactgatatcacaatgaataatatccctgacgaactggatatattatcttcacaaacagctgttgattggtgcaatgttgaatccattgagttgctgaaccttgacgaaaattatatttatcttttggtgcgcggaatagttgaaattactagacaatacgggcgtggggaggattactttgcacaggaagattcttatccattcaagtttgcagtctctattcgcactgataatttcaatgcaatagcaccattacttaacactgtagtagtggatacaggctcatggtatgacgatggcgaaggatctgctcattatgacacaatttatacaaccaccagatttttggagatgatctcatatataaaaattaaaccaaaaacaaagagaagattgtttcctgagcttagtacagtagtaacactagagattcatgaaagtgaagacatatcagaatcggtcgtcccagaaatatgtcatctaaatcaaggaagcttcaatttaactgaattttag

SEQ ID NO: 436212 - DNA, 564 bp, Serratia marcescens
atgcgtaaagtagcgaaattgatgggtatcagcctgctggcgcttggcctcgcggcctgcgacggcgacaccaaagacaccaaggcagcgccagacggcgcggcggccagcgcgccggccgggcagcaggtgagcctgctggacggtaagctggcgttcaccctgccggtcggcatggcggatcagaccagcaagttggaaaaaccggccaacaacatgcacgcatatgctgacagcaccagccagcgcctagtggttgtgatcctcggcgacaagaccgccgacagtctggaaaccctggcccaacggttggaaaacaaccaacgcgcgaacgacgccaatctgcagctgattaccaacaaggctatcgaagtagacggcgtgccgctgcgtcagctggacagcatcgtcaccaacagtggcaagaaagcttactcttccattttggttggcgcactgaacaacaacttgctgaccatccagatctcgctaccggcggacaatcagcagcaggcgcagaccgaagccgaaggcatcatctccaccctgaaactgaagcagtaa

SEQ ID NO: 436213 - DNA, 600 bp, Serratia marcescens
atggaagtgttgctaactgtcttgggaggagaaactgatgtagcggcgatcaccaagcaggacattaagcaggtgatggaagtggttgaaaatctccctaagcgcgttgttcagctttaccgtccaatgaccatccagcaactgattgagtgcgatgatgttccaccggaacaactggtaggcgttgaggccatccacaagcatctcaaactgtataaatcactcttcaaaatcttcctcacagaaagcaaagacattttatctaagtcgccaactaatggcgtagtggctgctccatcgaaagcgagatttggcgcatacagcacagccgagatgaaaaagtttgtgggatgggcgcttaaacagcccgatagctggcaaaaatggatcacattgttactggcatacacgggggcaagaagaggcgagataggaaagttggagaagtcacaaatcaaattcgacgaagatagtcagcgttactatttcttgattgccgaaggagggcaggggaaaactgagaacgctacaaggcaggtagtcatccacccgaagttaatcgaatggggtttcatggagtacgttgatcgccagtggtaa

SEQ ID NO: 436214 - DNA, 261 bp, Serratia marcescens
atgacaaagatcggcaaagtgtttgcggatctgcgtgatcagcttggtattccatatcttgatgactatgggcaacggcgattgttacattccatccgtcactcggtctgttctgcggcaatggctggttgggtatcaaacattctacatctgcaacagacggtcggacatgagaagagcggtgggattaccaagcgctatttgcacatgtttcccttgtcttcaatttcttatgtgattgatgggattgattggcaatga

SEQ ID NO: 436215 - DNA, 231 bp, Serratia marcescens
atggttacgcaaaacattagttggctctatccggcacaacaggatgagatagagattgatgttctgatggagcgagctgcgtcttatcagcatcactttcagaatgttccaaggagaagcgtaattgaggtggtcaaacagctgaatacggcctatcagcaatccatagggaatcattattggatattaggcagctactggctcagcgctgtttcctgttcgacattttga

SEQ ID NO: 436216 - DNA, 2259 bp, Serratia marcescens
atggattatcaggaactcaaacaactcgaagacgacctctgggaagcagctgatcaactccgtgccaactccaagctcacggctagcgaatactcaatgcccgtgctgggtttgatcttcctgcgtcacgccaccacgcgttttaatgatctgctgcccggagttgaaaagaccgtccctgctcgcgccacaggggcgctacgtgaagaccgtattaagctagggtttcagggccaggcggctatctatctgccggaaactgcccgttacgactatctggcggcgcttcctgctggcatcaaagtgggcgaggccatccgcgacgccatgatcgccattgaggcatccgtgaccgatcagcaaggcaacaagctgctggaaggtgcgctacccaaggactatctgggcctagaacaggacctgcttgccgaactcatcaaaatcttcaatcgtcctgccttgcagacgaccaagggtgatgtgttcgggcgcatctatgaatacttcctgaaccagttcgcacaaagtggcgcgcaggaaggcggcgagttcttcacgccgcccagcttggttcgcatgatcgtgaacgtgatcgagcctgaccacggtactgtgcttgacccagcgtgtggttcggcaggcatgttcgtgcagaccggacatttcattgaagaaatgtgccacaaacatacggtcgataccgacatcaccttctacggccaggaaaaagccgacctcaacagcaagctggcgcgaatgaacttggcagtgcatgggctggaggggcagattcgcatcggtaacaccttctacgaggatcatcaccagttgcttgggcaatgcgactttgtgatggccaacccgccgttcaatgtggatggtgtgcaggtcgcgaagatcaaaagccaagtgggcgaaaaccagacgggccgactgccattcggcctgccgggcattgccacaaagacaaagggcaagaacaatggcgacggcgaaaccatctctaacgccaacagcttgtggattcagtacttctacagctacctgaatgacatgggtcgtgctggtttcgtcatggcatccagtgcctcggacgccggcaacaaggacaaagatattcgccagaagctggtggaaaatgggcatgtggacgtgatgatgtccatcggccccaagttcttctacacccgcagcctgccttgtaccttgtggtttttcgacaagggtaagcctgaggacttgctcgacaccgtgctgatgatcgacgcacgcaacgtctacacggtcgtctctgcccgctcccatgtgttttcggaagaacagcttgccaaccttacggccattacctggctgtaccggggcgagcatgatcgtttcaaggttctgttggccagctaccacaccaaggctgggcattacctcgctacgttaccagagcgactggcggccgacgagctgcaaatcaaagcgcttgccagtgctttgtgcgactttgccaaggccaccgaagacgacgttgcagtggcggttattcgtgaaaagttgggggatgagcacggcattacagacgaggcactggccaacttccgcaccgaactcgccaagctggaggagcaagccgcgtcttgggatgccacgctggcgcaaagcttgaacgttgccaagccgctgcaagaggccattgccgcattgccggaaaacgccagctttgcgcagcgcaaggacttgcacgataaactagatgaagccaaccctgacctgaaagccgcagtggcagcattggaagcacggcacaagggctggctcaagctactagagttggccgaaaaaaacttgcgcgcccgacagtgggccgttttcgacggcgatgccactcgcgatgcaaagaaagcattgctgccgcgtgacgcaaagaagcgtgagaagcccacggtacgcgacctgggcgttgaagccttcaaacgcaccagctatttcgtggcccaaggtcattggctactgcaccgcttctcagacggactctatgttgacgtaccgggcctatgcaaggcagtgacgcgcaaagagattgcagacaatgactattcgctgacagcagggcgatatgtgggagtagctcctgttagccaggatgatgatgacgccgaggcatttgtcagtcgcatgcgtgaaatacacagcgaactctcagacctaaccgaacaagcaattaccttgtcggccaaagtccaacagatgtttttggggtgggctgaatga

SEQ ID NO: 436217 - DNA, 1209 bp, Serratia marcescens
atgacgcgtcaactagttgagattggcagcctgggtacggttatcacaggcgatacgccccccaagaaaaaccctgaatactacggaagcgcctacccgtttatcaaaccgacggatatgcgagttggtcagcgatatacgtacgcctacgaggaatgttactcagaggcagcctatgaaaaataccggaagaagctgattcctgaaggcgccaccgccgttgtgacaataggaagcattgggcagaagctgacacttacacatacggcctgttttgttaatcaagccgttaatgccgtaataccgaacaacgaggaatttaattccctctacgtttactaccttctaaaacacaatctcaatttagttaagagtgcagatacaggtgcttcttctgggcgcgagaatgtcagcaagagcaatttttccaagcttcaggtcctggcgacattagatatcaaagaacaggagagaattgccagcattcttgatggctacgatagcttgatagaaaacaaccagcgacgcgttgccttgctcgaagagtcagctcgattgctgtaccgagagtggtttgtaaatctacgctttcgcggctttgagtcggcaccattaactcttggtgtaccagagggatggggtaaggcatcaattgctgagcagaccacctttctaaatcgtgggattactcctgcatacaacgactctgcgccgggcctggttatcaatcaaaaatgcattcgacagggccgactttcgatgtcacccgcaagaaggcaatccaaagaggtgaagcctgaaagactcatacaaaaaggtgacgttctcatcaactccaccggagcaggtacgcttgggcgcgttgctcaagtgcgcagtctagtggaaaactgcacagtagacactcacgtcaccattgctcgaccaatcggcaaagagtgggcaacatactttggtcaagccctaattagccttgagccgacattatctgggatgggcaaaggggcgacgaatcagttagagctgagcagaaatgacattggggcaatagaaatatggcaaccccccgtagctgtggcccacgatttccatgagttggtctggccaatgcttgagcacgccgagattttactttctgccaaccaaaagctagtagaagcacgtgatgaacttttgcccaagctgatgtccggcgaaatccaagtctaa

SEQ ID NO: 436218 - DNA, 3300 bp, Serratia marcescens
atggccagcgccgcctactcggaagacaacaacatccaagaacccgccgccaagttgttcgaggacaatctcgactggcgttcggtctttgctttcaacaccgagacctttggtccgggttcgctcttgggccggaaagatgcgaccgaggtggtgctggtacgggagttggatgcggcgctgtacaaactcaaccccaagttggcggccacgcccgaggggcgtgccaagctcaccttggcacgcgatcaactgctggatgccgaccccaccaagacgttgctgcaacacaacgaggccaaatggcgcttgatgcgcgacggcatcaccttgaagtcgcctggaggcaatgcaaccgaggacgtgcatatcacggtgatcgacttccagaattcgacagccaacgacttcctcgtagtgcgtgagctgtgggttcagagtggcccattccggcggcgctgtgatttggtggggtttgtcaatggtctgcccttggtgttcatcgaactcaagcgccacgacaagggcctgaaagcggcatttgacgacaactacaccgactacaaggacacaatcccgcacctgttccattacaacgcgttggtgatcgtctccaatgggctggatgcccggtttggctccatcacaagtggctgggatcacttctatcgctggaagcggctcaatgagggcgataccgacccagcaccgaagcatgatgagccaccgctgaagcctatattgccgatcctgctgcgcggcatgtgcaacaaggatgctttgctggacttggtagagaacttcacgctctttgacagcagtgaggaacatacgctgaaggtggtgacgcgcaaccaccagtacctgggcgtcaacaaggccattgcaaaactgaaagctggcgatgccgatgtgctggcgggtaagttgggcgtgttctggcacacacaaggtagcggcaagagctattccatggtgttcttctgccagaaggtgcaccgtacggtgtcagcggcctatacctttgtgctcctgaccgaccgcaaagaattggacgaccagatttacaaaaccttcgttggctgcggtgtctcgaccaacaagggtgacaaagccacgggtgctgaaggcttggaacgtctgctcaagggtgaaaatcgccgctatgtgttcagcctgattcacaagttccgcaagcgtgtgactgaaccatggaaccatcgtgatgatgtgatcgtggtgtccgatgaggcgcaccgcacccaatatggccgtctggcgctgaacatgcgcatggccttgctgcgcgccaagttcatcggcttcaccggaaccccgttgatcgacggcccggagcgcagtgtcaccgagcaggtgtttggcccgtatgtgtcggtctacgactttcagcgcgctgtctctgacggtgcaactctgccgctgtactacgaaaaccggggcgagaagctgcgcattgttgaccctgatctgaacaagcggatcgaggagcgcattgacgccgcccgtgccgatggcgagctgaccgaagaacaggaaggaaagctctaccgtgaattggcgcgggagtatccggttttcacctcggacacgcacctgaacgacgttgccacggatttcgtggagcactttcaccaacgctggcgcttgatggagtcgcccgtgaaggcaggcaacccaccgaagtatggcggcaattccaaggccatgctggtctgcatcgacaagatcacttgcgccaagatggctgagcgcatcaaggataagtggaaagccaagatgctggagttgcaaggcaagctccagaaagaggaagaatactttgccaaggctggcaaacctgaaacggcgtttgtagcccggctgcgagcacagattgtatggatggctgacacacaaattcacccggtgttcagccccgagcagaacgaggtcaaagacttcgccgatgagggtatcgacgtcaagccttaccgcgaagtcatggtcaaaggcattggcggtaaggacattgatgagtgcttcaaggatggcaagcacccgttccgtgtggcggtggtctgcgccatgtggctgacaggctttgatgtgaagtcgctcgcaacactgtatctagacaagcccatgaagggacataccttgatgcaggccattgctcgcgtcaatcgggtggctgccaacaaaaaaaacggcctcatcatcgactacaacggcatgctcaagagcttgcgcaaggcgctggccacctatgcacaaggcgacaaaggtacgcctgctgatcctctattcgacgaagatcaggcattggctgaatacgcagcagctatcggcaaggtgcaagcccatcttaaaaccgtgggttacgagctggatgcattggtgcgcgccgaggaaggcgaagagacatgggcagaactgttgaatgcccaaaacgcgcttagcacgtctgccgaaaacaagaagacgtttcaggtcctggcggaggacgtgtttgatcgtttcaggggattgttcccgaatcagggcgtgtttacctatgagccgcaagaaaatgccatttcggccatctacaacctgctgcaaaagcccaagccaaaagtagacatcaccgcgatcatgcaagagattcgcggcgtaattgatgcctccctggggttgacacccaaggggcaagtgaaccagcccaccaagcaatacgacttgtcgggcatcgacttcgagcgcctgcggattgagtttgccaagtcaccctacaaggaaacggccgtgctgaccttgcaggagcggattcaagcacgactggatcgcatgatggcgcagaacccgagccggattgacctctacaaacgctatcaagagatcattgccgattacaacaaggacaaagacgacgccgaaatccagcgcgtctttgacgatctgatggcgctgcatgattcgttggatcaggaagagcagcgttacatccgggaaggcttcaagaccgagaaggaattggcggtctttgacctgctttcaaaggacaaaaccagcatcacaaaaggcgacatcgacaaaatcaagaaggtcgctcaagagttgatggttaccgtggaacaacgccgtcaggaaatgggcgacttgcgtgaccgtgcgtcgtcacaggccaaaatgaaggtggcaatcattgaccgcatgctggaaggaatgcccgatgaatactccagcgaggacatagaggcccgtgctgagctgatctaccaatacgtgaaaacacagatgcagtcagtagcagtgcattga

SEQ ID NO: 436219 - DNA, 1740 bp, Serratia marcescens
atggaactacacgcgtataccagaaccatttccgaattactttcagtcaatagaaaatatgttgttccaagattccaaagagaatattcttggatgaaagaacaaattaatgagctttggtatgatatcatttccaatattgaatctaatgaacacggagaatataaaaacaatgaatattttattggttctttagttcttgttggtgatgaaacaggtaaagaaatgcaaattgttgacgggcaacaacgcttgactaccatcacaattttcctctctgtgttgtgtgaccgatttttgtttattgggaaaccagacctcgcaaatgccattttcgaaaattatatagaaggcaaagatgatgatggacaaaagtttttcaagttaataaatgaaacaccaaagccatatttccaaagaaatatacagtatataaacaaagaagaagaaacacccaacacgcccgaagaaaaaaaccttctagccgcatataaagaaataagtattctcgctacgcaagagcggctaaacaaacatttctcgaattcaatccaaaacaatgatgagtatgaagcgtgtttaaaatccatacgagatcaagttctacgctatctgaaaataatatttataacggtgagtgaagaggacgaagcttataccatattcgaaactttaaatgcgagaggtatgaatttaagttatgtggatttgataaaaaataaacttttcaaatccctaaatggagatcatccaagcgatgtagctaaagataactggagacaaataagaactataatctctcaacgtcaaggcgttggaactattgagaatttcattcgccactggtgggtatcaaaatacgcatatgtgagtggtgaaaatctatataagtcatttatatcgaaatggcgtaagggtgagattgagcctaaatcgttcataaaagaaataagagaagacgctcagctatatgctctcatttctgcaccgcacgagagcgaatttcctcagatgcaggataagcccatttatcattccttgaatgctatacgtctttttggcatcacccaatgtcgaccattcttgttagcattattaaaagctcataacaatggcaaggttcgacatgctgatttattaaaagcattacgaatagttgaaagatttcactttgtatttaatgccatttgttctctcaggccatcaggtattgaaggtgcctactctaaagctgcaagactaataagtgtagatagttcaactaaacaaagcaatggcaaagccattaatcagttatgtgatatactggttaacaggaagcctgaaataagtattttcattgagaagtttagagatgtgacatttactaatgaacagaccaaacagaaaaaattaattcagtatatacttggcgagtttgaaatgtctcgccacaatacaatggattttaaaccagatcagataaccttggagcatataaaaagccaaagttcagggacatgtcgagagataggaatgattggtaatttgttgccattatctaaagaaacaaacgaaaaagctgggaataaatctattgatgacaagatagctgtttatgaaacatcagaatttaaacttacagaagaatttattcatgcatttcaccatgaatatggatcaaactggaatgaaagtactattttagacaggacagacagaatggctggcgaagcatattgttcaatttgggaaatttag

SEQ ID NO: 436220 - DNA, 561 bp, Serratia marcescens
atgaaactgaataaaattatgattgcagcggtattggccttcggtgcttcttctatgatggcgcaggcggcaaatcagggtagcggtactgtcactttcacgggtgaaatcatcgatgcaccatgctctattgcaccgggcgatatcgatcaaactattaaaatggggcagatctccaacctgagcctgaaagacggccgcgagtctcaattaaaacagccagttaacattaagctgcaagactgcaccagcgccacacagaagacagtgcagaccaccttcaccggtcagcctggcggcgcggatggcacggataataaaatgatcgggtttggcagcggcagcactgctaaaggggcgagtatcgttatgaccgataacgcaaacggtaatgccgtgattgagttgggcaaggcgaccgcaggtcagggtattaaagcaggccaggaaaaagcagtgctggaattcaccgccttcctgaaaggtaatggtggcgctttggatactgtcgttccgggtgcattcaccagcgtggttaacttcgcgctgaactatcaataa

SEQ ID NO: 436221 - DNA, 525 bp, Serratia marcescens
gtgtccttggttcgattccgagtccgggcaccatatttgaagaacccgcctatggcgggtttttcgctttctggggtacggactctccatcgaactgcgttcgattattcggccaagggcctcaccctgcgggccagcgctgaagcgctgttcaacgcggcgccagcgccggctgtccgagtccgggcaccactatttagagaacccagcctatggcgggtttttcgctttctggggtacggactctccatcgaactgcgttcgattattcggcctaaaggcctcaccctacgggccagcgctgaagcgctgttcaacacggcgccagcgccggttgtccgagtccggtcgccctattcagaagaacccgcctatggcgggtttttcgctttctggaggacggactctccatcgaactgcgttcgattattcggcctaaaggcctcaccctgcgggtcggcgacacaggacgaatgctcccttatctgcttggcatccccccagaaacgttggctccaagggtaa

SEQ ID NO: 436222 - DNA, 1737 bp, Serratia marcescens
atggcgcgtattaaaaccaagatcctcgatctgaacagtgctctgctccagcagggcaagactgcagcaggcacgcaacctttagcccttgtgctggcggagacccccgtcagtgaaatgccgttggtattgaccctggatgaagtgaacccgaattcggataacccacgaacctcgcgtaatccgagatatgaggaaattaaggcatcaattctagcccgaggtctcgatacggtaccgaaggtgacccgtgatccggagcgtccagagctggggtattttttcagtgatggaggcaatactcgttatgccattctttccgagctctggcaggagacgggagaagaacgattttatcgcttctcttgtgtattcaaaccctggccaggacgattatcctgcgtgataggtcatctggccgagaatgaggtacgtggtgatctgagcttcattgaaaaagcgtttggaattcgacaggcccgggcgctatatgaggcggagttggggaaagccgtctcactacgtgagctctcggcacttcttactgcacaaggttaccccatccataattccagtatcagtcgtatggaggatgcggtgcagtacctatatccctatatgcctcacttactggagacaggactggggcgtccacaaattctgcaattgctggctatgcgatcccacgcagaaaccacgtggcagaagcactgtattacccaagagccaaagcagccatttgataccgttttcggtgatgtatgcagccattttgattcgcccgaggactattcgctggatatgttccgtgatgagttgattggtgcgctcatcaacgcgttgccacacccgttgctcaattatgaccgctggctactggagctcgatcccaaagagcaaaaccggcgcaagcacctcggtgagcctgagccggcattaacgcctgaactgtcaggcaaaggtaatactgtcgaactggcgccagcactgcagcagggaaataccggcggacagacggtacctgaagtacagggagaaggcacttctttggtgctggacagcgcgttgcatgaatcaacgagagatgccgatgatgaatcacagaacgctcaggaagaggaaacgcctgcaactcaaactgaacgccgtgttgaaactcagccagatttatacggtgcgccttctgtgttgtcgggtgacgttgaaacggctttagacggtgagaataccaccgtccccctgccggaccctcatgagccgacagcccctcacagcaataccgtgacacagccaaagcaaggtgcaacccctgttgcagaggtgccttttgccgaggtaggacttgagccggtctcctccatttgggctatttctgccctgcaggatgatatcgagcacctgcaggtgatcaccttccgattggcattcgaactggccgaagtggcgggctgcgaggctgaaatcaaagctgataaagccgacttgcaggctgccggctacgcattgactgccgaacgtccctctcgcttcaccgcgttactcctgacccttgccggcaacaacccggacggcgccttatccagctcgctcaatgaagccctcatcgggtcggaaaatgctgctgactggccgttgcttgacgatattcatgccgtgaaattgatgcgccttattcgcgtcttacgccgtctgcgtgaactccagcgtgacttatctgcaacagaggagacagcctga

SEQ ID NO: 436223 - DNA, 1218 bp, Serratia marcescens
atgggaaccacagataagttctcagcaagtgaacagggactgggttatatctaccaagcacgcttggcactatttcaattactgcaactgcaagaagatactgccgtattcctagagaaagacgacgacctcgacttcgtggatcgcgatggtggaaaatcactcgcatcgttgaagcacaaggctcttggtgaccgcctaactgatttatcgactgacttttggaagtctgtccgtatctggttggtgcgatacaaacactacggtcgcagtgcatcaaatctccgtttcttcctattcacaacgggcatggtttcggattcttcgtttctgaaaagatttttgcctacacagcttaaaactaacgatgaaccgacgacactgaccgaacaggcagaagaggtgctcggcaaatcaaaatcgatactggccggggatatcacgaatgcatttaacgaactcacctccacagaaaaggaggatttcctcgctcgcattttgattcttgacggcagtccccgtatcgaagacattccggaaacgatcaaagacatactcatgcgaagcattcggcgcgagcatcggaatgcagtttttgaacgattggaaggatggtggaacgatgccgttatcaaacagttgaccggtagcagggatgagggaattttcggctatgaggtgtcggacaaactttattcgatatccgaagaatacaaactggacaatttacccatcaccttccgcgggaaagaaccggctggcgagattgattctgataacgaccctcgtatctttgtggtacagctccgagaaatcggaatttcctccaaccggatccgcaacgcgatcctggactactacagagcatttgaacaacgttcggagtgggtccgtgaaaacctcctcgtttcgggagaaatcgaggactatgaagaccgtcttgtcgacgagtggagtcgttatagggacgtagtgttcgaggaacttgacgaggatggtgccgaaaacgtgttgctgcaagcaggtagagagctttacaaatgggcggatcaacagaccgggaactacgaatctctgcgtatccgagctcgtgtgagcgaaccctatgtcacccgtggatcattccacatcttggccaatgcatcccctgaccccagagtctactggcacccccgattcctcgaccgcatcgacaagttgctgggaggctccaagtga

SEQ ID NO: 436224 - DNA, 483 bp, Serratia marcescens
gtgaagccctgggaccaacgccctttcgagatccgaaacttatttaatccggccttctgcggcctcgtcctgttccgtgccatgcagggttatgaggaggaagatgtccgtggtttgcctttctcgctctccttactcgtcctgccactgtgtctgcacaaggagtcgcgcgaagcaatcaatcctcgaagctatcttttgaaaagcatcgaaaagaatccccagattcaggtcggtttcgccagtagagtcaccgccatgctaccctatgtgttcgaaggttttggtttgttgatggagagaggctgcatatctgtcacgcctgacgggcgactccaaaccgtccctgacaaggttcgaaaaacaataacaggaaccgacgaaaccaaatcttgccagcgtgcggcccgcatcctcggaaaggaattcgctcgcatagccgaccgagtgaccgtatatacgacttttggaattcgcctatga

SEQ ID NO: 436225 - DNA, 1947 bp, Serratia marcescens
atgaagctcaagtccattcacatctacagccacgacgggcagcgccgggatctgcaattccaggtaagcggcctcaatgtaattaccggacgctcctccaccggcaaatctgcgctttccgatatcgtcgaatactgcatgggacgatcctcatttaatgtccccgagggcatcattcgcgacaaggtggcgtggtttgccgtcatctaccagttcgagagtgagcaggtgctgatcgcaaaacctactcctcccgaaggcggagcgagttgcagtaccgcaatgttacgtcggggtaccgaactacagtcccctctgttcaatgaacttgcggtcaattcagacgacgattccgtcgttacgttgctctcgcgcttactcggaattcccgagaatcgtaccgatgtagctctggaacatagcagagacagttacgacgctaacgttaagcacacgttttattacctgttccaaaaacaaggactggttgcaaataaggaccagcttctctatcgccagaatgaacagtttcagccgcaagcgatccgtgacacgctcccgatcctgctcggggtatcctcccatgatcggttcgagcttgaatccaagctgcgcatcgcacagcgggaactgaggttatgctcaaaattattagaacaagcacgagatgccatcgacacatttcacgttaaggcaattggactttactccgaggctaaaaccgttggggtcatcaacagtacagctataggcagcgcaaacgagctcattgaaaccctgcgatccacgttagactggaaacctgagaaaattcccgaagacgacgggagcagaatttctcttctcgaagaagaattgagcctattgcgtaaggatcgtaggaaagtacaagcgaggattgatgccgctcgccagttctccaaacgtgctggcgggtacgaaagcgaggctacagagcaattggatcgtcttgcttcaataaaagcactgccgaaaaaccctgataccggcgagtggcaatggccgttcagcgaatctaaccttacgttggaatcccctgttgccaaagttttgctcaatgaattgcaatcgcttgacgctgagctgcgtatcgcgacaggtcagcgccccaagctggatgcctatttatcggggctaaatgacgaagctcaagagatcgctaacactataaaaaacaaggaaaccgagctttccgcagcaatagaggccaacgaagtgattgcccagatgggcaatcgcaacaatgcagccgcgcgtgtcgtcggtcgcatcagcctgttcctagagaaccttgctccaaatgaagaaattgctaggcttgaggctcaacaccatcgcctcaagcttaaagttgacggtctggaaaagcgtgttggtgcggatgatagcaatgaccggctcaattcgatattgaacatcatctcgacacagatatcacaatatattgaaaagttcgaggccgagttcagaatctatccagcgcgattcgacctagctaacataacggtcgtttttgatcgccccgaacgcccggttcctatgagccgaaccggaggcggtgagaaccatctagcctatcacctatcagcattactcgctttgcacttgtttgccgtcaaaaacaaccggccgattccgcgctttttactgattgatcagccaactcaagtgtatttcccatcagaacaagtttacaaagacgccgatggttcagtccaaagtactgaggaagccgatgccgacctcaaggcggttcggaagttattcgagctgctgctgaaattcacacaggaagacgcgcctggcttccagttgatcatcaccgagcacgcgaaccttcgtgagcagtggttccaggatgcattggttgaacaaccttggaccaagccgccagcacttgtgccggaagattggcccgaacagtga

SEQ ID NO: 436226 - DNA, 2040 bp, Serratia marcescens
atgcagctctacctgtgtgagaaacccagccagggtaaagatatcggcgctattctcggggcgacccagcgtaagcagggctatctggcgggcgccggcgtcatcgtcacctgggctatcgggcacctgctggagcaggctcagccggagacctacggtgaacagttcggtaacccctggcgggagtctgtgctgcctatcttgcctgctcagtggaaaatgacggtaaaaaaagacactgccgatcagtttgcggtcatccgtgggttgctcaaacaggttgattctgtagtgattgcgaccgatgcggatcgtgaaggggaagtgatcgcacgcgaattactggagcattgccactttaccggcccggtccaacggctctggttgtctgcgctggacgaggccagtatccggcatgctctggcaaacaaactccctggcgagaagactgcgcccctgtatgaggccggcctggcacgcgcccgggctgactggatgacggggatgaacctgacccgactttatactctaaaggcgcgggaacagggatacggcgaggtgttgtcgatcgggcgggtacagacccccacgctggcgctggtcgtgaaccgtgaccgcgaaatcgccaactttatttccaagccgtactggcaagtcagggcgaacctgcaaaaggatggcattacttttcctgcgaactgggtgccggctgccaactactgcgatgaagagaagcgctgtattcagcagaatgtggcgcaggccgtggtgcagctgtgtcagcaaacaggtcatgccgttgtgcttgaggtagggaccgagcgcaagaaagagtccgcgccgctggcctttgacctggggacgctgcagcaggcttgctcacgcaagtgggggatgagcgcaaaccaggtgctgagtgtcgcgcagtcgctgtatgaaacgcacaaggcgaccacatatccccggacagattgcggctatctgccgacatcgatgcgggaagaggttgccgatgtgctgagtgcggttacccgcacggatccaacgcagagcgaaagtgtggccaggctcgacagggcctttgtttcccgcatctggaacgacaaaaaaatcacggcgcaccatgggattatcccgaccaagcagccgttcgatttgagcaagctgtctgccgatgagctgaaggtctatcagctgatccgtcagcattacctggcacagttcctgccgttacatgaagtggatgtgactgaggctacctttaatatcggcgggcaactgttccgcacccgtggcaaggtcgaggcggtggtaggttggaaggctctgttccagcatgacgtgagcgaggtgaaagaggagtcggccgacacggatgatgtccggctgccggcgctggtaaaaggtgaatccgtcgcggttgccggcgcgcagcttaaaacgctgcagacgaagcacccggggcattttactgacgggacactgatcgccgccatgaaaaatgctgcggcgttcgtcagtgacccgcaactgaagaaggtgctgaaagagaacgcggggctgggtactgaagcgacacgtgccggtatcctggaaacgctgtttaaacgtggctacctggagaagaagggaaaaatcctgctttccacgccgattgccggcgaactgatagatgcgttaccgaccgcgctgaccaaccccgggatgacggcgctgtgggagcaggcgctggacgagattgcccaggggcagatgacactcgagacgttcatgagccgccaggcacagtggacgggccatctggtggagaaagggaagacgcaggcggtgaagttcactgcgcctccttcaccgccgtgcccgacatgcggtgggacgatgcgccggcgcgcaggcaagaaaggtggcggtgccttctggggctgcagtaattaccccacttgccagggcattatcaacattgatgcaaaaggtggtcgtaaggcaaagcgctataaagaaaaatcaccggctaaaaataaaacaaccggtgcggagtaa

SEQ ID NO: 436227 - DNA, 552 bp, Serratia marcescens
atggcgtctcgcggcgtaaacaaagtcatacttgtcggtcatctcggccaggatcctgaagtccgttacatgccaaatggcggtgcggtggctaacattaccctggcgacctctgaaagctggcgcgataaggcaaccggtgagcagaaagaaaaaaccgaatggcaccgtatcgtgctgttcggcaagctcgctgaaatagccggcgaatacttgcgtaaaggctcgcagatttacatagaaggctccctgcagacccgcaaatggaccgatcaggccggtgttgaaaaatacaccactgaagtcgtcgtcaacattggcggcactctgcagatgttgggggggcgttcgcaacctgccaacgccggacaaacaggccagggcagttgggggaaacctcagcaaccgcaacctttgcatagcggtacgccggctcagcaaccccagccagctcaatcgggtggaaatgccgcgccgatggattttgacgatgacataccgttccttgggtttggttatggtatcgcaaaatcagccatttacgctttgtga

SEQ ID NO: 436228 - DNA, 465 bp, Serratia marcescens
atgttaaaactaaaaagtaaaccagcactattatttatactatccattattacatttatcacagtgatctcactgtcgtataaaaaaagactgatcttgtcctgttcaacagagctcaccataaaaagatcgactggcggattactgcatgccaatgctagctactttatgtacaacaacggcacgggttttgtcacctataaaggagtcattaaggaaaacggagtgaattacattataaacagggatacaccatttattatttcagacaaagacaatgatggtatagcaaccttagaatatcaaggagttgtaaaaaagaagaatgattcactcccagaaaaccaggtatggaacactctgtatggtcctggtgaaaaatattatttttcattttacaagacaaagtcagatgactacacgattcaagaggttggcagaacaggatattactgctccaattaa

SEQ ID NO: 436229 - DNA, 741 bp, Serratia marcescens
atgtattacatattgaacaaaaccataaagttcgctcctgccacctccgagctagctataatcaatgaggaacaaagcagtatcctattgtcgaaacccgcaaccagattgttgcttgttttggtcggcggtgttgatttagtacacccacgagaagagttactgaaaagtgtctgggaggattacggtcttactccttcaaacaataatttatacatggctatcagtgaactgagaaaatcgctcatttcccttggtggaagtgagaagatgatagtaacaatccctcgtattggactaaaactagaggcgatcattgacgtcaatgataaagaaacagtcattacatcatcattaaaagaaacggaaaaaagaaaacaagaaaacaacatattaattgcagcatctttgctcttaatagtttccaccgccctcttttacatacataaatcaaagcctgtagtaaggataagcccattagaaaaccgtctatttttacaacatgggacatgcagcgtgtttttagaaaaaaacctacacataaataacaaaaatgaattaaaaaatgaaattattgacaagttaagaaaatacaatataaactgcaatgatgtaagtaaagatgtatattatcaatttaaacttagccgattgaatgcagcaaaagaaatatcattaggggtttgcactaacactccaaaaataaataaatgtgaaaccataaaagaaataacaggatga

SEQ ID NO: 436230 - DNA, 537 bp, Serratia marcescens
atgaaactgaacaaaatcatgattgctgctgttattgcttttggtgcatcttccgcagcgtatgcagatcaaggtcacggtaccgtaactttcactggctcaattattgatgcgccatgctctattacgccagagaccgttgaccagactgttgatctgggccaagtctccaatgtggcgctgaaagacggcggtaagtctacaccacgtcaattcagtattgatctggagaactgtgagttaaacaatagcgatccaggtaagaacaacactgtttctgtgactttcaccggtatggagtcggcggctgataatggtcgactgggtattaccggaacagcacagggggccagcatcgctattaccgatggtgcaggacaggtgatcgagttgggcaaacctactaaggctcaggaactgcagaacggcaacaacaccctcagcttcgctgcttacctgcagggtgataatgcctctgccggcgtggtgccaggtgacttccaatccgtggctgacttcactctggcttaccagtaa

SEQ ID NO: 436231 - DNA, 549 bp, Serratia marcescens
atgaagcgtagcgcagcgtattttttgtctcctttcatattgctcgtgctgttaaatacgttggcgcaggcacaggccgctcatccgactcagggatgggggcgcgtcaatatgcaaggcgccattattgataccgcgtgtgccattgccaccggtagccgtgaacagactattgatatggacagcattccggtgggcgatattatgcgtgatggccaggggacgaccagatctttcagtattgaacttattcattgtgagctttctcgtcctacaccgggtttacctgactggaaacaatttcaggtgacctttgacggcgaggcggatggcgcattatttggcgtgcagggcgaagcgaaaggtgtggggctggaaattaccgacagccaggggaataaagccctgccgggtgagccaatgccgctgggtgaaataaaccggggggccatgaagctggattacgttatgaaacttgtcagtaataatcaggtattaaaagcgggaggttatacctccgccatcagattcaaactcgattattactga

SEQ ID NO: 436232 - DNA, 2637 bp, Serratia marcescens
atggtgttttcttcaacagggaaactgtttcgccttcaggctctgggattgagtatttcgctggcaatgggcagtacgtctgtttatgccgccgaggttattcaattcaatatggatgtgctggatgtgaatgatcggaaaaatatcgatctgagtcagttttcgcgaagcggttatatcatgcctggcctgtacaccatgacggtgcacattaataaaaacgaactgcctgagcaggcaatacagttttatccgccggaggacgacccgaaaggcagcatggcctgtttgtcgccggagctggttgggcagatgggcttaaaagcggacgcgacgaaaacgctgacctggtggcaccaggacgcttgtctgaatatcgacagtctcaagggtatggaagtgcgcccggacctggcgagtggatcgctatatctgaacatcccgcaggcgtatctggagtatacctcggcggactgggacccgccatcgcgctgggatgagggcattccggggttgctgtttgactataacgtcaatgcccagacacggcatcagcagcgtgacggcagccgcggctacaacgtgagcggcaacggcactgcgggggcgaatatgggggcctggcgcctgcgagcggactggcagggtaacctggaccattcgaccggcagcgggcaatccaccaataaaaagctggactggagccgttactacgcttatcgcgccatttcgtcgctggggtcgcggttgacgctgggggaggattacctcaactccggcatgttcgacagcttccgctttaccggggcaagcctggtttcggacgacaacatgctgccgcctaacctgcgcggttatgcgccggaggtggtggggatggcgaagaccaacgccaaggtgattatcagtcagcagggacgggtgctgtacgaaacccaggtggcatcgggtccgttccgcattcaggacatcaacgatgcggtgtccggcgagctgaacgtgcgggttgaggagcaggacggcaacgtgcaggagttcaccatgaacaccgccagcattccgtacctgacgcgcccggggtcggtgcggttcaagtttgccgccggtaagccgtcggactgggagcaccattcgcgcgggccgttgtttggtactggtgagttttcctggggggtgagcaacggctggtcgctgtatggcggtgcgctgatgggcggggattacaacgcgttgtcgttgggcatagggcgcgacctgatggcttttggtgccctgtcgtttgacgccacccagtcccgggcgcgtattccgtcagagggcggtgcgctcagtggcggctcttatcgtttgagttactcgaagactttcgatgagctggacagccaggtgacttttgccggttaccgcttctcggaagagaactttatgagcatgagtgagtacctggatgcacgctattacggcaaccgggtgggcggcagtaaggagatgtacaccatcacctttaacaagcagttccgggacctggggctcagtacttacctgaactacagccaccagacctactgggatcgtccagacaatgaccgttacaacctgacgatgtcgcgttatttcgacgttggtgatttcaagaatctgagcgtgtcgctgtctgcgtaccgcaaccgttataacgagaccaatgatgacgggatgtacctgtcgctgtcgatgccgtggggtagcggggcaaacgtcagttacaacaccacggtgaaccgtaacgacaccacccaccgggtggggtattacgaccggatagatgaaaacaacaactaccagctggctatggggacctcacgaagtggtgtcaacgcgagcgggtattacaaccacgagggcgacaaggcacggctgagtgccaacgccagttaccaggaaggccgttacagtgcggtcggactctctgcacaaggaggggtaacgctcacgcctgaaggaggcgccttgcaccgcgtcggcatgatgggcggcacgcgcatgctattggacactgaaggggtggcgggtgtgccagtgcgtggttatggcgcgaccaccaaaaccaacacctggggcaaggcggtggtggcggacgtgaacagctattaccgcaacaaggccagcatcgatctgaataagctgggtgagaaggctgaggccaccaaatcggtagtgcaggccacgctgacagaaggggctatcggttaccgcaagtttggcgttatcgccggtgagaaggcgatggccattatcaaactggcggacggcggcacgccgccgttcggcgccacggtgatgaacggtcgcaagcaggagaccggtatcgtcaacgacggcggtagtgtctacctgagcggcatcaatgccggtgacagcatgacggtgcactggaatggcgcggctcaatgcgaagtgcgtctgccgacgccgctgccggtggatatgatgagcagcctgttgctgccgtgcctaccggtctccgggccggttgacaagcctgcggcgaccccggtagccacgggcacggaaaagacgccggtgactgctccggctagtgacaagacggtggatgaccaggcgctgttagcggcagaacatgaggcgacgttgtaa

SEQ ID NO: 436233 - DNA, 753 bp, Serratia marcescens
atgcgtaataacactttaaagaccgctgctgtggttgtcgccctgttgggggccacggtggtccaacaggtacaggcagctatcgccttggatcgtacccgggtgatttttgacggtagccagaactcggtgagtctgaatatcagcaaccagaacaagcagctaccatacctggctcagggctggctggaagatgagcagggcaacaaaattcagagcccattgacggtgttgccaccggtgcagcgcatcgaaccgggcaagccgagccaggtgaaaatccaggcgctgccggcggccaaacagctgccacaggatcgtgagacggtgtactacttcaatttgcgcgaaattccgccgaagagtgataaaccgaatactctgcagattgcgctgcaaacgcgtatcaagctgttctatcgcccggcgacgattgccgtgcagaaaaatgcggcgcctagccaggagcaactgacgctgagcaagcagggtgacaagtatgtggtgaacaacccgacaccgtattacgtaaccatcgtggatgccggcaataaaaagggctccgccggagttaaagggtttgagccatttatggtgccgccgaaaggcaatgcgccgctgacggtgagtgcgggtagcgtgggtaacagcccggtgctgacttacatcaacgattacggtggccgcccgcaactgacattcggctgcaaaggtagtgtttgcactgtggtgccggagaaaaaggcgtcataa

SEQ ID NO: 436234 - DNA, 624 bp, Serratia marcescens
atgtaccgacgccatgagctgcgttattacggcacgcttggggggctggcgatgatggctccggtgagtctggcgatcctgatgctgctattgccgccatcgcatgcggcggacaactgggaggttgaaggggccaatggcgtgttgtatgtgacaggggcgctgaccgaaagcgcttgccgcctggagatggccagtgcctatcaggacgtgtggctgggcgagaccggtacggcccggctggagacgctgggcgcgcagggggggccggtggcggtagagttgcggctgaaggactgtttacgtgccccggccagccagcgcgatgtgcgcagcggttcgctgacctgggcagataaccagcccgctgtaacggtgcgttttagggcggtttcagacatggataatccgcaattggtcaaggcacagggcgtctccggcatgggcttgcgactaaccgacccggcagggcgggacgtgcgcctgggcagccgcggcgaaccactattcttgacgccgggtcagagcagcctggtgtataccgtcacgccggaacgcaccggtgcgccgctggttgcgggcgtttaccacgcggcggtggattttcagctgagttatgactga

SEQ ID NO: 436235 - DNA, 561 bp, Serratia marcescens
atgcaaatgtatgatacgtcgcgttcgtggcttcgtcttgggggggacctgttggtttgcgccgtcatagtcacgctgatgttgttaatcacgtcggcactggctgtggtactgatgttgttgctcagtggacgtgcgcaggcatttaccccagtgtacatcaccggcaccgtgattgccccactgccgtgtgtgataaacggtgaccaaaccattgacgtggatttcggcagtgagttgctgaccaccaaaattgacggcgtcaactacctcaagacggtggactacagcctggagtgcaaagacaacaccagcaacgcgatgaaattgcaggtgcagggcagcgccacgtcatttaatcgcagtgcgctgcaaaccaacatggccgacctgggtgttgcactgacggccaacggcagtgcactgactattaacgactgggtgaacttcacctatccggacaagcctgtgttgcaggcggtgccggtcaagcgggccggcagcacgttatccggcgggaattttagtgcgggagcgacgctgatggtggcgtatcaatga

SEQ ID NO: 436236 - DNA, 519 bp, Serratia marcescens
atgaaaaataacacagcgttgcgacgtgcctgcctggctgcagttgttcttgggggcatctacgtctgcccacctgctcaggccgaaaatatgagctttcatggtcggttgattgagctggctccgtgcgaggtcaataataatgaagacatgcagatagaatttggtgatattcagattcgcgaggtagacggtgtaaatcatgctcaattttttgccctctctttggtctgtgagggaggtgcttcaataatattgacacacaatggcgctgccactgattttaataaagcagcagtacaaactaatgtggcaaattttggcattcagttatcggagtatcatactcagggggggatgggggaaccccttaaaataggtgttccggtgaaaatttttgatgagtctgggggagcgaaaaatatcgtattggaagcggttcccgttaaaaaaacgggtgctgaattggttgccggtgtttttcagggcgtgtctacagtgcagttggaatacccataa

SEQ ID NO: 436237 - DNA, 516 bp, Serratia marcescens
atgctattaaatcctaaagctccaaggcggcgttctatattgggagtactgctatttatcacaggggcggcatacgcatctccgcaaaccaatactgatatcacgtacagcggcacgctgcttgacgcaccaccttgtaccatcaacggtgatgaaccggtagagattgattttggcgaggtgggtgtcaacaaggtggatggccaaaactacgctcagactttcacgttaatctacgactgcgagggtgtcagcaccgataaggtgttgcgttatctgggcgcggccaccgcgttcgacccggcggcggtgcaaagcaccatcccggagtttggcattcggcttcagcatcaaaaggatggtgcgattactccgtttgccgtgggcagtacgctggcgataccgtcttaccagggggcatcgcagtttattgccacgccagtgaaaagcgtcggggcggaactgcaggaaggggcgtttacggcaggggcgaccttacagctggaatacccgtag

SEQ ID NO: 436238 - DNA, 543 bp, Serratia marcescens
atgaacaaagtgattttcaccctgttagtcggcctcggtgcgggcggtgtgctgaatatggcgcaggccgccacaaacccggaagtcagtgtgttgtaccgcggcagcctggtggcagagccctgcaccctgttgccggaggatgagagcatcctgctggactttggcacggtgattgacaagtatctgtacctgaatgctcgtactcacagtaaaccctttcagctgcgcctgatggactgtgatatcgaattgggtaatacgctgaagatgacctttaacggtaccgagagtatgccactcccggggctgcttgcactggatggcagcagccaggccaaaggaattgctattggtctggaaacccaagatgggcaggcgctgccgctcaaccagcaaagccgtgggcaggaaattaccaatggcaataatgtgattaccttgcaggcgtatattaagggggaaccggacgctatcgccaacaagactatagaacgtggtattttctctgcaatagcaacctttgcattggagtatgagtga

SEQ ID NO: 436239 - DNA, 789 bp, Serratia marcescens
atgagtcgttgtaattcattttttggtttatttaatgcttttttattgttttttttgctgccatttaatgaggctaattcagcactgtggcccgttgttacaaaattggaaactgaggtggtcggcggagtggtgcaatataggataatatcatgggattattttgacttgcctgcggcaaatggtgttgcgcattcagatggagggatttggttgactcatcgccattgtagtgacacagcgtgttcaaatcccatggctgcgccatcgtattccgttccagttaaaactggagacaatctatcagcggcagcggcaaaaattaaaatgaacactcttgttaaacatacagggcctcgggttggcgagtgcataggtgttgtatatagcccaattaagggaagcccggtaccgtggtcaagtttgatttttccacctggtagttgtgtctgggcaccaccagcaaaagagtggtgtgaagttattactccctccataactctagaacacggtattttggttgtaggcactgggcgtaatgatgcggtaagtaacgttacgatagactgtactgcacagatgaaagtaaaaatatctttcgataaagatattgtcttattgtctaacggggctaagtcaaaattaaccgtacctaactcgagtaatgggtgggttaatttaaaagcgggaggtaataacgcagaggtgaaaagtacaatagaaattaatggtgacgttgatgctggtccattccaaggtagtagtgttgtttatctggagtattactag

SEQ ID NO: 436240 - DNA, 1341 bp, Serratia marcescens
atgtgtttttattctgtgattattaataaagctttttttatcctggcggtcttcattgtggttgctgtgggtctctatattcctaataatggtggggagatgcttgatctgccgatgaataccgtttttttaatggttttttttctggtggtgttattctctctcatgaggaataggcgtaattatttcgccgtgacgatatcatttctgctatttattgttggactcaccgtactaactattccattgatttatgctcctgccgccggtttatctctggcaggctggcgcgtagcggggctggttgcgggcgccgtattttacttcgcttggttgcagttgcggttctcccgcatgcagcagcatggggtgttctgcgtcctgctgctggctgttgccgggcaggcgtcgctggctctggtgcagctgtttgcccccgaactggcctgggtaccgatgcgcggaaacagggtgtacggtatcttccagcagcccaacgtactggcgagctttcttgccaccggcctggcgctggcgctgatgctgtttctgttgccgggttttgccctggcgcgggcgcggtatgagcactgtcgccagatatttctgagtgtattgctgttggtgctgccggcgttgctggtgtgggttaattcccgcgtcggctggctgggcggggcgttggttgccttgtcgtttctctggcgctttggcttgacgtaccccactcgctgcaaaacggctgccggtctgctgagtgtgggagtagcggtagggctggctggctttgtgttgaacggtgaagagggcggagtgcgctacctcagccacgacggctctaatcaggcgcggctcagcatgttgtgcgacaccctgggtatgattgcggccaaaccgctactgggctggggttatggcggctttgagtacagctttatgcactttcgcatcatgcagtcacccccgactgttgtggctgaaatcgccaaccatccccacaacgagatactgctgtggtgggtggaaggcggcatggtggcgttgctggggatggggctgattatcgccggtataattcgcctggtgatacgtgcctggtgctgggatcggctggcattggctgaaggccgccgccgagccggcgaatcgacggctctgtgctttgtgttattgcccattgccctgcatacccagttggagtacccgttttacctctcggcgctgcactttatggtgttcttattactgctggcgatgctggatcgccaggtcagcggtgtgaggggggcaaggcgcttccctccccgatcggttgggcattacggggtgttctgcccgtga

SEQ ID NO: 436241 - DNA, 402 bp, Serratia marcescens
atgtctgttggcgtgatggtgttgatggtctttgctttgctgggcgggttaacgctaacccgggccgagcgcgccggattggtggatgttcgtgaggtgaaagctatgcctgcattggcagcatgggtacatcgggagcgcaaaatctttgacgagcaggtgaatgcgctgctgcgctacaacgccacgcgggatgaagcgctgctggagaactatgcccagtgggcacaagcttatctgagccgcaagatagatgccaacgtctacgccagtctgatcgctattttgcgtcaccagtcccaggacgttgtggctgaacagtacttatgggaggcggggctgctgtttccgacagatacccgttttcggcgcacgccacatatttcagtcggtgcggagtga

SEQ ID NO: 436242 - DNA, 615 bp, Serratia marcescens
atggtaacgagcatgacggtagccattcttgaccccaatcggtttctggcgcaaggcatcaagcaactcttagtggcgtacttgcatgcacggggtattactgtgcgttttgtcggtaagcataacgcgggacgggccgatttggtgtttctgtccgtgagtaaaagtcaaccggcattgttatgcctacagtcgtccgagccctcgcccccggcaccgatgtatatcgcgctacaggcggccccacggggcgaagcattctcgccatggggcacctgcgtgcgggtgctgggttgtctgggtagccgtgcccagtcaacggcgctgctggggttggttgcccaggcgttgcagcacttggaggatagggtgacgacattatcgcagtattgtccgcaatgtgtgaatacgaacctgacagaacgggaagtggaagtgatgtactgcatggcgaggggtattgcccagaagcaactttcgcaacgcctgcatatcagcatcaagaccgtcagtgcgcataagcgctcggtaatgcgcaaactgggcttccggcgcaatgccgaattgtaccactggctgtggctgggtggattggaacaaataaagagaccttaa

SEQ ID NO: 436243 - DNA, 414 bp, Serratia marcescens
gtgacaaaaacacacatcgtatttcgccattccgtactgctgtgcctgctgggcggtagcctgttgctgagtggctgtcaggccaccaaacgcccgactgtggccgctactcccgtgcctgaaccgacgcaggaacaatcgcttgccgcgcgtgaagccgaggagcttgcgctgtgccaaaaagagctggaggcactcaaaccggtggatgccaggcaataccaaatctatcagcaggaattcagccgcctgatgagcggcgccgcgcagtatgccaacgtacgcacccaggccaacagcggtacgcgggaggctgtggatgcgctgtaccgttacaggggcaagcgcctgtgtgcgaacatcggtcaggcgttgctcaccggcctggccgacatgggggaacgggttaaatga

SEQ ID NO: 436244 - DNA, 1551 bp, Serratia marcescens
atgatgttgtcgaggctgaacgcccggctgcggcaactggccgtattgctgcctttgctgtggggggctgagcgtgcaggggcggatgagggcgttccggccctgctgcagtttgccgagcagtatcgtgccccacagatgcctggtgcaccggcaaaagcacctggtgccgccgcgcagccgaataccgctccgccgactacgccagcccccctcttggacagcctggccctgcgccggaccctgaaggcgagagagacgcagctagctaaacaacaggcgttgctgcagcgtcaggaaaatgaactggctgcgctgcgtcagtcgctggcggcagaaaccgcccgtcatcagcagacgttaaaggcggagcaaacgcaggttacatcaccgcgcaaggacgttgactgggcgctgttgcaaaagctgctcagcgggctgcgccaggcggcatccggtctgccggatgaacggcgggctagggcattgattgccgaggcgcgcgctgccgccgagcgcgagcggctcgccgtgcagcaagctcaggaccaggtaaaggccctgaaaatgcagctcaagacgttgcaggcagagcggaaaaacaaacgcacggcgcttacggcccgtcaggaaaaagaaaaaacagccttgaccgcacagttggccgccagtgaggcgcaactcacggcgctgaagaaaaaaaagcaggatatgcaggtggtgagcgagcagaaagacgccacgttatcggcgctccgtcaggagaacgccacgttgcaacagcagcaagtggctctgaccgaacaggccggcaaggccgaagccgatttagccaaacagacgcaagcgctgcatcagttgcaaaccgatgtggatatcttgcgaacccgggcgaagtggctggttaaaccggaaactttgagcaagccggctgggcagcaagcctatgccgcaggtgtgtcactgggccgggatgtcttgtctatgcttcacgaacgcaagagttggggcgttaatactgaccagcaaacgctgctggcgggcattgttgacacattcgccgggcaataccaactcaccaccgacgtgctggcccgggctctggcggattcggaggaggtagtcaataccgcccgcagcaagacggccgctgcccagcataaaaagggggaagcctttgttgcagacttcaaaaagcaaaaaggagtgaagcagtctcccgccgggttctggtaccgggtggattatgctggcgacggggcgctgcaagacaccgacatcgtggatgtagtggtcaaggagaccctgacggatgggaccgtcattcaggacatggcactcagtggcaacgtattgtcacagccgctcaaggcctatccgccactgttccgtgaagccatcggccacctgaaaaatcacggttcgctgactctggtggtgccaccggagctggcttacggcgaagagggttatccgcctaaggtgccaccgaacgccaccatggtgtatgagctcagaatagacagcatccaagggacgccggggacttaa

SEQ ID NO: 436245 - DNA, 885 bp, Serratia marcescens
atgagtgtggtcgtaagtaacgtgacattgccgtttttgaacgatgcgctggcgctgcgggtgtacacctgcacggaggaagaggtacaccgttggcctgcaccggtgattgtcttgtgccatggctttgccgaggttcaggaaatgttactgccggcggtggcgtgctcctttgcccaagaagggtttgtggttgtgacgtttgattaccggggatttggggacagcggcggtgagcgtggccggctgacggtggcgaatcagcaggaagacattcgggtggtgctgcgctgggtacgcaataacccgatcctggatgaacggcgtatcggattgtggggtaccggtcttggcggtgggcatgtgctgtgtgtggccgcccgtaatccgcaagtgcgctgtgtggtcagccaaatgccggtgcttgacgggagggaactgatcacccgtggaatggcgcttggggagcgggcgaattttttgcaggggctggcggagcgtgaggcgcgttgtcgcattgacggcaaggagttgtgggtaccggtgaatcgtctgatacaggatagggcttcgctgcagtttttccatcagcagcggcgagcctgcccggccatgtgcaaccggatgccttatctgacactgcatgagttatgtcaccttcaggtgcagccttatgccggagcggtggcacagcccacgttgatagtgttggccgggcaagatcacctgatgccggacgggcagatgcgggcgatgtatgaggcgttgggcggagtcaagtctctgttcacggtattgggcgccggacattacgacctgtaccgcacgccctggcgtgacgaggcgttgcaggcgcaacgggcctggtttcaggcgtatctataa

SEQ ID NO: 436246 - DNA, 612 bp, Serratia marcescens
atgaaaacagggatattgaggctagtgtccggcgcgcctgtgtggttgtccgccggggcgctggcggcgggtatgtccggggaactgacggtggcggggaaaatggcggcctcccgctgtgaggtcattgccccgaatggcggtacctatgattttggcaaactgactactgaccagagcacggcaggcgtggtgccggcaccgatgacgcagacctggcaggtccgctgcgacggcgcaacctacctggcagtggagccggaagataaccgggcaggcaccgccagtcgagccgacgcggcgcactttggtctgggaggcgacgccgcccgcccactggggtactaccgtttgacgctgagcaaggcgcagattgaccgggcaccggcggtggcctacacggctggtcaggcgttgtcgcaggcgggggggatgtcgctgatgtcgggggtacgcacccagtggcagatgcctgacaacaccgctcgagctgggcggcagttcgcggtcgatattaccgtggctccgtggctaacccagcagagtgcatcgctgtctgatgtggtcaagctggatggctcggtgacgatgaactttatttttggcttgtaa

SEQ ID NO: 436247 - DNA, 642 bp, Serratia marcescens
atgaaaaagactttagtttctgtcggtgttatttccgtcatgatggtgggtatgggcagtgccctggcagcggggatgtcaccagagctgacggtgaaagggcagatggccgttccctcctgcggggtaaccatcgccaacgagggcgtctttgacctgggtaaaatatccaatggtttgattcggccgaaccatgcaactgagctgagtgcctcagccggagcggtgaaggtggattgtgaggccgaaaccttcctgaatttcacggtggttgataatcgcgaaggtaccgcaagcacggctaatacgactaactttggtttgggcaacgtgaatggaagcgggaaactggggtattaccggataaacctgcttagcgcgtcggttgacgggaaggcttcaagcgtgttcagcgccgtcaaaggtagttcgtcgtttacggctctctcgtctgtctatgttgacaaaaacaaggtcaccggctgggcaaaaggcactagcgtgcaaagtagcgggaaaaaattcgctgctgtcatgcaagtggaaccaatgctggcgtcctctgcctccatgggcggccccatcacagataacgtcaagctggacggttcggcgacgttgaattttgcgtacggtatttga

SEQ ID NO: 436248 - DNA, 270 bp, Serratia marcescens
atgtatttttattttgaatggaatcaggataaaaatcacagtaaccagcgcaaacaccgtgtcagttttgagatagcgcaacgggtttttctggatcccaaccatttggctgtgctggaaaggatcgaggatggagaagaacgttggcaaacgatcggtatggtcggatcctgtttgctgttgctggtggcacatacgacgatcgaaacggatgccaaagagaggggaagatatgaagcgcaaaaattccgccaaaaatctggcccatag

SEQ ID NO: 436249 - DNA, 2229 bp, Serratia marcescens
atgatagcgagcctgatcggcgcgggactggcgctgtacgggcaggctgcggccgcgcaggaacaggcggaaaataataaaggcagcgtggcgttcagcccgctcaacgtctcggcggccgacagcggcaagagcagcgaaaaagacgcgttggcgaggccaggcgcgttcagttcgcgcgatgaaaacaagaatctggagtcggtggacagcattctgcgcagcatgccgggcacctatacccagatcgatcccggccagggatcggtcagcgtcaatatccgtggcctgagcggctttggccgggtcaacaccatggtcgacggcatcacgcaaaactactacggcaactcgccgagcgacgcagcgcacgggggattgcccaccagccagttcggggcgctgatcgatcctaactttatcgtcggcgtcgacgtggcgcgcggcaacgccaccggatccgctggggtgaacgccttggcgggcagcgccaacttccgcaccatcggcgtggatgacgtggtattttccgacaacccgttcggcgtgcgcaccaaattctcggtgggcaataacggcatcggccgcagcggcatgatcgccctgggtgccaaaaccgccgcctttgccgacggcggcagcctgggggcgatggcggcgatcagcggcagttccatcacctccaactacaaaaacggcgccgggttcgacagcgagatgttcaacgtcgataaaacctaccgccagaacccgaaatcccagctgttcaaggtggacatcaagccggatgcctttaacagcatcgaactgtcggcgcgcagctaccagaataaaatcacccgccgccacatcgacagcgacgatttctaccttaaataccactatgcgccgttctcggaactgatcgatttcaacctgaccgccagcaccagccgcggcaagcagcagttcatgtccaacaacatggcgggattcagcgacagcacggcgaaaaacatctccgatgcgctggatatcaacaacaccagccgtttcagcctgcaggacgtcgatttcgctttcagctacggcggcaagctggtgcgcaacgagtataagaaaaaggcctccggtttggtgacggatgacaatcaggcggaaagcatgccggtgggcattgccggcaaacaagatatctccagcctgtacagcgggttgcaagctaactacggtatctggcaggggaatttcgatctgaactacaccgcctatcgcctctccggttataagccggcctgtgacgagcgcgtagagtgcttcccgcagggcgccggcaatatcacccgcaacgaacacggcttcaacccgtcggtcatgctgtcggcgcaggtgacgccgtggctgcagccgttcgtcagctacagcaagtcgatgcgcgggccgaatatccaggaagtgttcttcgccaacagcggcggccagtcgatgaacccgttcctgaagggggaaaaagcggagacctggcagggcgggttcaacgccaatgcccacgatctgttgttcaagcaggatagcttccagctgaaagcggtctatttcgaaaccaggatcaaaaactacatttccagccaatcctatctggtgtgtaaaaatcgccagaagtgcaaccgttcgcaggcgacgcaggaagagtgggatgacgcggacgtcaacgtcagcatgaccatgtatagcaatgcccccgaaccggtcaaaatgcgcggggtggagcttgaagcgctgtacgacgccggtttcgccttcaccaagctgtcgttaagcaaggagcatacctcccagccgaccaaccaggccagcaacgtattcggcgcgggcgatatcagcgagctgccggagttctacttcacgctggacagcggggtgcgcctgctggacgagaaactgacgctgggcggggtggtgaaatacaccggcaagtcggtgcgcctgtcgccggactctgattacgatgagaatgagcagttgttgaaagagccggcgccgcatattccgaccattatcgatctgtacggcacctatcaggtgaatcgcaatctgctgctgaagctcagcgtgcaaaacctgatggacaaggactactcggacgcgctgaacaagatgaactcgctgccgtctcagtcgcagtatgagacgccgaccaacactgcccgtggacgcacctatatcttcggcggggaggtgcgcttctaa

SEQ ID NO: 436250 - DNA, 1563 bp, Serratia marcescens
gtgctggaaagtattgggcttaaaaatcttagaagttttgcaaaaactacaaaaattgaactcaagccgattactgtttttgttggaaaaaacagcagtggtaaaagttcattcttaagaaccttgccactgtttcggcagtcaattgagtcaaataccacggggccaatattgtggtttgggcgatatgtagattttggtgattttagtgaagtagtgtctaataatgctaaagatgagccaatacatttcaatttcgatattaaaaccaatgtattgaggaatggtgggtatagaattagtgagcaagctgatacttctgtaaatatagatctcggtgttgttgcacaaaagcaaaaaactgtaacgcatagtataaaaatagttttgaatgacgtggaaatagaaattcctccgaggagtagttttagctccacaacgaaagtaatcataagatacaaagaccaactaataataaaagacgattttattcttacaagattaggtcagttcataccaaatataatgttggcaaggaaaagagaagatgccaccaatataaagaaggatttttatatgcaacagcaatattatcatcattatcatgatgaggtggagcggttgtatctagaagaggcagttaatgtaattaaaaaatactttaattccaggacggattctcataaaatcatgggggcattggcaaggataccaataacctcgagagatacattccatcatatcttgagtgttgtatttagagatcaaaggattttttccaaacatttaattgactctaaagatgaaatattaaatgaaatatatccatatttaattgcatggaattttaatgctctaataagaactataaatatggatttgcatggttctttttctcaagttaaatatatagcgccattaagggcgaccactgagaggtattatagatttcaggatttacaagttaatgaaatagaccacaccggttctaatctggcgatgttgctaaactcattaagacctaatgagcaaaaagaattttcttcatggacattagaaaattttggtttctccgtggttgttaaagaggttggggctcattatgcagtgaaaataacctcactcgatgatagtaccgaatataatataagtgatatgggttttgggtactctcaagtgttaccaataattacaactatttggttggaaacagagaggagaaagcgccatgacaaatatacattgatgtttgttatagagcaacctgaattacatttacaccctgagtaccaagctaaactaggcgttctatttgctaaggttgttgcaagagcaaaagaaaaagatgttgatttaaaaataatatttgagacacacagcccaaatattatagaggcattaggagaggttattgaatataatgaaaccggtctatccaaagatgatgtgtctgttatagtttttgataaggactctaataaagaaactaatatatcaaagtctttttttgatgataacggttttctcatgaattggcctgttggatttttctctggaaaataa

SEQ ID NO: 436251 - DNA, 1116 bp, Serratia marcescens
atgatgatttcactgataagcccattgaaaaattatgacttctctgatcctcgaaaaatatctgctattgaaaatattttgaaatcatatggtgagtctaaacacattgttttttcatctagagcattattagatagcatcatagcgaatgagaaaagttttggtgtgaatactagaacttatgccattaatgctaggaaattcttgtctgactcgattaatattcttaacagtgttagttattatattgagataaatatagatgttgatgacttaaaagaagaggttgtttatcttgaagatgataaaaaagtaaaattaactgttggatatgatcgatttgttgattctagcattactcaaagtacgtctgttttatgtgaagatattgatgatgtaagcttttatgaaaaaatagctagattttataccgaaaaagaaaaattatcatcaatgggaatgagttataatgctataaatggtggcggcgcaaatacaaagaaaaattttgatgcgatatccgataaggggaatatatgtttatgcattgtagataatgacaaaaaacatcctaaatctccattgggtggaacatgtcgtccttttaaaaatataaaatatctcaacaaaagccgtgttattatactggatgttcatgagatcgagtcattaattcctgattttttaataaatgatgttttagtcactgaatattataagccgcaagtaatcgattcttttgatcggttgcagggaattatacatctgaatccagaagcaaaatttttctttgattacaaaaagggaattactttgaaagaggcatatatactagatacctcatttggtgagtattggattccgcttctttcaacgattaagaaagtcagagagtctaaatgttttaaagatagaaagtgtaactgtgaaaaagcttgcttttatattgatggatttggcgataacatcctacaaaaagtacttgagaaaataaataaacaaaaaatttcttctcttgaaaaaagaatagatagtttgacattgcaatactggagagatattgggcgagagttctttagctggacatgttcaccaatgatgaagtccaggctataa

SEQ ID NO: 436252 - DNA, 429 bp, Serratia marcescens
atgtttgattttgattcgcctgaacaggcccccatcattggttgggccagccatcgcctggtggccagggcgtttgccgacacagtcaaaatgtctacattggtccgttttgcacaggcaaacccgtattgcaggatgctctacctggcctataaccatgcagtcagggataaggccgagcaaaaataccccttgaatgtcgaatgtaaggcgtcgaaacagctggtctggcctaacttcgggcaccattatcaatatcgggtgactggcaatttgcggttcactgacgtcgcccgtcaatttaacatgcgtcactggccgctggctcgaatagctatcacgactttcagtgccttcatcagcagtggtgatattgaatttgatccacagcacctatccgatgatatcgctggaggcctggcatgttga

SEQ ID NO: 436253 - DNA, 750 bp, Serratia marcescens
atgttttccatcttcaacgaggagtctccgctttcggaaacactcagagactatatcaatagaaaactttcatcattcagtgagttagagtacacatacactgttgttaggaaaaaagatccttccaaagtacttatcatttccagctatcccaatgaatgggtctcattctatcgagccaacaacctacaacttacggacccagtgatcttaacagcattcaaacgggcctcccccttctcttgggatgaaaacatcacattgatgtccgaccttaagattactcgtattttcactttttcaaaacgttataatattgtcaatggttttaccttcgtattacatgaccctatgaacaaccttgctttattgtcgattcttattggtgataataaacaaagcgatttagaatcacgtcttatttctgaacgcggcagcatgcagatgttattaatagatataaacgagcaaatgtaccgactccttgactctcatacagcaggaaaagcattgcgtccttctgaaacggaaaaaacattactgacacctagagaaaacgagatcctttattgggccagcatgggaaaaacctatggcgagacggccactatcattggagtttcgttgagtacagttaaatttcatatgagcaatgtcgtcgtaaagtttggtgtaagtaacgccaagcaagccatccgattaggcgctgagctggggttaatcataccggcaacgaaagcggccaagtaa

SEQ ID NO: 436254 - DNA, 639 bp, Serratia marcescens
atgttcgaattatttgatgttggttacaatgaactaaatgacgtgcaatctgatgagctttatcgattaaggaaaacaaccttcagtgataggttaagatgggaggttacgtgtaagcacgatatggaatttgatgaatttgataatgccaatacccactatattcttggtctttaccatggtcaattgatctgtagtgttcgtttcatttcgctgaagtatccaaatatgattactcatacttttcgttcctgttttaaggatataaatctccctcaggctggcgtagagtctagtcgtttttttgtagataaaactcgagctaggttattgcttggggagcgttatcctataagtcaggttttatttttatctatgatgaactgggcgataaattaccaggaaaaaggtattcatacaattgtaagtcgagctatgttgaccattcttaaacgctctggttggcagataaaagtattgaaagaggcattccttagtgagcaggaacgaatctatcttgtttggctaccagtagggaaagatgaacaaagtagaatcgcatccaaactcagcataagacttgagcgagctcaaatgacatcgtctcttgttacttggccgctttcgttgccggtatga

SEQ ID NO: 436255 - DNA, 924 bp, Serratia marcescens
atgtcaaactggtgccataaccggttggtcatcactggccaatccgtttttgtggatgagctgcagcaatgggtcaatggccatgtggttcctgactaccgtcatgctgttcaacaaagttgccggctgttcctggcaggctgcgccggcatcctgaagccggcgacgacaaaacccggtgtttatgtgccttacccggcactgttaacgcagccggggattgcatcgcctcagaatctggcctttgaacactggttcgggatgctgaaggcggatgtgccgttaacgggcgagaacattcgcctgatagagcgactctaccgccagtcgggtatcgatgcagtgaaatgggagaacatccccaacgtcgcgaaggcacgtatggcggatgtgctgttgcgccagtatgcggactggttcggcctggtgggggtgagccctgacatcgatgccggtaactgttgggaacgtttggggatgctgcatgaatataccgcaccgtgcgatatgctgatgctgatcccgacgcgtctggcgaccgaactgaatggctcaggtggactgctgcgtgatgtgccgaccactgtcgaactctatggtcgacagtacggcgtcgaatggccggcaggccataatgtcggttgcgtacgggatggcattaacacgttgacagtgcactttgattccccatggtacccgccagccggcgaggttatcgggacagtgtcggagcagttcagttgtcaggtagaacatacctggtatatgcctgatgcggaacgcagtggctacgatcgttacgaccgtggtgagcatgtcgacggtggacgaatagcggctgaggttggggcaggtgaggtgatccacctgacctacgccgataaggattcagtgctgttgtcaccgaatgcatcagctggttaa

SEQ ID NO: 436256 - DNA, 270 bp, Serratia marcescens
atgacgacagagcaacgtgactggcagatccttgccggccggttactggccaaacattttggcctgacgttaaacgataccgacctgtgtgaggccgactgtgtgatggctttacaggaagcgggggtacggccgtttgaggcgattaatcacctggtggacaaataccacctgatacgcctggacgcccatccctttaccccctcatcgccatatctgcgcccgtttgaggaacgagctgcggtcgatgaaatcgggcaacaattctga

SEQ ID NO: 436257 - DNA, 873 bp, Serratia marcescens
atgcgatattctcatgaagcactcctggcatttgtcgaagcagtaactcagggttctttttcatccgccgcacgaaagttacgaaaatcacagtctgctattagtatggcgattgctagccttgaagaggattttgatgtgattttatttgatcgtgcatcacgttatccggtattgacgcctgccggacataaagttctggggcaggtaaaagaggtactggccgtagtagagcgacttgaaaaactaacgctgcggcttgcggtagacaatgtcattgaagataagctgactatagttatttctgatgtctatcaactcaatccaaatcataatctgatgcataggtttgagaggcgctatccgcttattgaactagaatgtcttgatgctgaaggtgatgatgtgttgagtctattgcaaagtggtcgggctcatcttggattattgacgacaaaaattaattatcctcaagatattattgcggaacgtttacctatgcgcattgaaatggctttgtatgtcggtctaaatcatccgttaacaatgctggaaaacgttgaagaggcccatctgctacgctaccgcaatctgtatctgaatacgcacgtgggagctgaaaacaaaccgcatggcaatgtatggtctgcgtcagattattttatgctcctcgaaatggctgaagaaggatttggatgggccgaattaccgcgcagcctggtggagcaatatggcagggggcggctagtagaattgaacgtgaaaacttggccaaggtatatcttttcagatattgtctggtcaaagcgccatccacctgggccagctggatactggttgctggatgagttgttaaaaacaggttcattatag

SEQ ID NO: 436258 - DNA, 264 bp, Serratia marcescens
atggcgtcggcagcccgtgatggcgggtatgttggttatataatcatggctacctccttggctttttcttattattttctcgcactgtccatccggaaaattggtgtcggcgtggcctacgccatatgggaaggccttggtctggctttattaaccctggtcggtgtttttattttcaaggataatctgtccatgagagaactcattggcctcggcattgctgtcataggcattgtctgcgttgctttgggtgaggagcattaa

SEQ ID NO: 436259 - DNA, 321 bp, Serratia marcescens
atgacgactctggctatttttttcgtaacgatttccgcgttcattgacattattgccaatatgatgattgccaaatcacagggtttccgcaagattggatggggcatcggcgctattattttggtctggattgcttttgccttgctgggacaagcggtgaaaaccatggatctggcagtagcttacgccatgtggggagcaattggcgtcaccggtactgccgcgtttggtcgtattttgtttgctcatcgactgcgcccaattggctggtttggcattgccgcgataacagtggcggttattgttttgtcaacgacataa

SEQ ID NO: 436260 - DNA, 666 bp, Serratia marcescens
atggtccgaatactgggcggagccttgctggtcgtgggacttgctcagccagcacaggcatcattccagttggaaagcatgggggtggtgctggaagaaagcgccgggcgggtgaacttcagcatcaagaacacctctagtgaaccgattttactggctaccaaagtggtagatctggacggaaaaaacttcagtaaatcgatactggtttctccgccgatttcgcggattgaggctgggcaaagccagcaggtgaactttgtgctcaagcaaggtacggtgcttgagcatgaggtgatgctgaaagcatcctttgaggggatcggccaggcgatagacaacagcacacgcatgcctatccgccagagtattggcatgattgttcagcccaaatccgtggcggtgagtaagaccccgtgggatgacctgcaagtgacgtacgagggcgacaaacttgtggtgaaaaacaccgggctgcatgtgatacgcctggcgccgcaactggtgttgctgcctgcgcgaaaaagtgtaccgctggataactattacctgatgtctggtgaagagaagaaggtgaaggtcgaaggcaaacccacggcagtagaaatcatgccgcttagccgttatggatttaagcaagataacgtgacgctgccggtcaaataa

SEQ ID NO: 436261 - DNA, 2340 bp, Serratia marcescens
atgaggcaaaggacatcggtggcgctggcgttgtcggccctgctgctggcgcgtgcagaggcgtccggatttgacgtaaagaccctggagcaattgggctataacgccgacattgccaattttttttctagtgcccggtttttaccgggagttcaccgggtcaccctggaggtgaatgccgcccagcgttatcaggaagaggtgcgttttggtcaggaaggcgagttatgcctggacgcgcaactggcgcagatgttgcagctgcgcatcgatgcgcagctcggcgcctgcgaacgtatcgaattccgctggccgcaggcgcaggtcaaggtgtttcccggtgcattccgggtggaaattaccctgccgcaagacgcctttgacccggacaagcaacgccgcgaacaacgcggtggctacgccgttttaatgaattatgacctgtacggcaaccgagtgcaggggcgctacggtgaccggcagacctttcaggcgatgctggagccgggggtgaacatcagtaactgggtgatccgcaaccggtcgtcctacagcaaagatgagctgggtgaccgcctggatgtgtacgagacctcggcaacgcgggattttccgcagtggggcgcttttgtgcaggtgggcgagttcggtgctggcggggcgctcagcggcggcctgcccatcaccggagtgcagctctccagtgagggctcccggcagtccggcgccaccctggccgtgccgctgcagggcagcgtgtcgagccaggcgacggttgaagtcaagcagcgcgggcaggtggtataccgcacactgctgccggccgggccttttacgttcaacacgttggggcaggcgatggccggggtggagaccgagatcggtattaccgacgcagaagggcatcagcaacgcttcactgtcactccggggcgcggggatgagcaggacagccaggacaattatcaggtagctctggggcgttaccgtacctacggtgcccggtcggacaccggtgcgccgccggcgctgctgatgggggagaaaaacctggctctgggcagcgctggccagatcggcttcggcaccctgctgtcgacccgttatcagcgcttagcctggcagggcatcgtcggtaatgaaaccggcggatgggggacggggggaataacgttcagtcgcggtcgtcggcacggcgttcaactggacgcgcaggggcagcagggcatcggacgcaaccttaccctttccctgacctctgtgtatcgcacgtcggggtttcggggcgcggacgaagcgttgggtgagccgatacaggccgcagacgaggcggtgcgattgcgatatgccggcggtgcggggttgacctggaatgcaccagcctggggatcactgacctacaatctgtcgcacgagcgctaccatgccggcggtcagcagaactggatgcacacgttgtcctatggtcggcgtttgggtggcacctcactgaccttgagcctgcaatcctctgcatatgaccgctcggcattctatgccggcgtgaacatcccgctgggcggcggcagtgtcggcagtcgtatgcaggtgcggcaaaataaccgggtgacgctgggcagtagttggcgtggagcgataagccctcagatgagcggcactctggatgtggcccgcgaccccgacggcgagtaccagaccagcggcaatctgagtggcagtacggcctatacccgcctgtcggctggggtatcccactccagccagggcagtaccgcgctgacgctggcgtcctccggggcgttgggggtagcgaatggcaccctggtgacgtctgcgcagcgggtgggcgatacgctggcagtggtgtcggtgccggggcagtcgggcgtggtggtatcgggtgctggcggcggggttaccgattatgccggagacgtgctgctgccctcggcggcaccctatatgccactcaaagcagagatagacaccctttcgttgccgctgaacctgcgcctgaacagtacgggcactgagttcaggctggcgcgcggcacggtggccacacgtgagtttcgggtgaccgaagtgcggcaactgttgctgacgttgcgggacgcacaaggggagactctcccgaccggggcatcggtacatgatgacaagggccggttgctaggcaccctgattggggacggcaacctgatgttggtgaatgaggatatcggcgccgccttgcgagtgcggcgggtgaacatgaatgaatgccgggtgagttacgaggtgccgacgatgtttgattcgtcggtgttgtatgaagagcgcgatgccgtctgtcaatag

SEQ ID NO: 436262 - DNA, 405 bp, Serratia marcescens
atgctgttcttcggcctggtcgcaccgccggtggggggcgtaatcatgtttctgctgatgacgttcggcagcggcgagctggtggaaattggccgtctcgaagccggcgatatgctgggcatggtggggtttatcgggattttttcttacgcgattggttttttgccggcctgtttggtgggggccatcgcgggtatcgcccatcccggcattcgtcgattgcggtggtttctgctgttatgcgcgatactatccgccattgctcctggtttgctgaatgccgatcagcgtatttttggtacgattgcggttttgccgggtatgctcgctgggtttttatggtggcgccggagattgcgcgatgccccccatgaggatgttttacgcggtaccccatcgccataa

SEQ ID NO: 436263 - DNA, 2448 bp, Serratia marcescens
atgaaggctcatattaaattaaagttacctcaaagcttaatggattatagagcgataactagcgcccctcccaagaaaaggtcacccgtaaatagaaatgcgcattttgcaaaattacgtagcggccttgatgaagcaattataaagcatgttaaatcagtggatttatctgaggagatttttggagatggttttgctcctcaaagaatggtattgactttcaaggataaccctgaagttagtgataggctttctcttaaaagccttgattcaaatggaatgaaattactatcggttaatacggtagatagccaagttgtagcaaatgtagctatacctatagataagatagaaaaattgaaaactattctatctgaatatgcgactaaagaaacagctaaaaagagacctaagaaccaacctcttgtagagtccatttctgaaatagattacggaggggttgagtcattatggtttagcactaaaccattacctcaagatgtcgataaacttgaaagctacgaggtttggttagatacatcaactgatactagtgataaggtttcagctcacctggatttggtttgtgagagattaggggttgttgtaaaacaaggagaaataaactttaaagaaaggctggtgaaaataattgtagcttctgttcgtcaattaaatgcattgcaaagagttactcagtttattgcagagttgagacccgcaaatactgtaacgacagactttcttgagctctccactgctgaaaattttcaatgggctgatgggttggaatatcactttatcgaacgcccggtacctatatgtatacttgatactggcataaactcggcacacccattgcttaaagagtttgtgaaaaaggaagttgtaatttctgctgagccccagtggaatgctagtgatattcaagggcatggcacgggaatggcagggttatcattatatggtgacttaaaaacagcgattcagaataaaaaaatcacaataaatggtattgtagagtctgttaagatattgcctgatactggtgccaatgatcctaagttgtacgggaacattacttcagatgccgtatataatgttgaaactatagcgccatctgaaagaagagtttttactatggctgtctcatctccttactatttaaaaggcgctccttctagttggtcagctatgattgactcattggctagtgggagccctgatgatccagctaagcggttatttatactttcagcaggtaatatgagaccgcaagacttaccagagtacccggataaaaatatcttgtcatccattgaagatcctgcaaattcatacaattccttaacgatcggatattgggctagtgaagataatatcactactgagggatatcgtctcttagctgaacttacagatctggggcctagctctacaacatctatatcatggggaaaaaactctccatttaagcctgatgttatttttgaaggtgggaaccatggttttgacgatactctcagatttgcggcagatttagaagagttaagtcttatgactacaagccacagggtggcctcaggtaattacttctcatcttttgctgaaacaagtgcagcaactgcaatggcatcattgttcgtttcgaagttgtgggcgcagtatcctaattactggccggaaacaatacgagcattagtggttcatagtgccacatggccagcaaaaattatggaacgtaacaagtcattacgaactaaaagagagattgaggtgttactaaggatggctggttacggctacccaaatcttaacaaggccatatcgagtggaaataagtcagtaaatcttataattgaagatcagattcagccatataaaattactggtacgtttaacaaaatggttttatatacattgccttggccatcttctgagttggaaaaacttggtgcagaggaggttaagcttagagtgactttatcttattttatagaacccaacccaggcgaaagagggtgggagaataaatataaatacagctcatttggtctcaggtttgactttaatagtcccggcgaaagtgcggatgagtttgttactagaataaataaaaagtacagagatgaaaatccagatattgacgtaggggatggcgattcaagtaagtggttgcttggaccaacgttaaggaatagagggtcaattcattgcgatgtttggaccggcactgcgatttcccttgctgataaaaagcatattgcgatcttccccgtaagcggatggtggaaagacttaaagcgagagaatcgacaagcaagcatggctcgattcagtcttatagtttccattgaaactaaagaaaacaatattgaattgcataatgaaatatctcaaatccttaaagtggaaactgaggtggaaaatatagttcctattcaatga

SEQ ID NO: 436264 - DNA, 990 bp, Serratia marcescens
atggccagtgcaaatcaattaaaattattagttaaaaattttatagcacgagatgatagaaagtttttgtcaatcgtattacagattgctgcccatgaagcaaaaattggccatgtgaaacttgctgaagagttaaggttgctagtcgagaaagcgaaagtaacgaatttaaataatcaaaatgattcatttccaaaaatagtctcatctagtactgctgtcattaatcactcttcatctgagctgttttcaatatctcatccgacgatatctttgaaagaaataattcttccggttgaggtttatcaaaagataaaaagattcctggatgaaaacaaaaactcgattaaaataaggcaatacgggttaataccaagaagacatttgttgctatacggaccacccggaactggcaagactttaactgctagtgtaatagctcatgaactccatttcccattatttacagtgcgaatggattcgttgattacgaaattcatgggtgagacctctgctaagttaagaagcatatttgattacatagctcaaaacagaggggtttacctatttgatgagttcgacacaattggttcaaaaagaagtatggaaaatgatgttggagaaatccgtagggttctcaatacgttcctgcaattgcttgatgaacatcactctgacagtttgattattagtgcgacgaaccataaagatatcctagatggggctctttatcgtcgatttgatgatgtaatcgaatatgttctccctgaaaagggaaatttagaaaagctgattaagtcgaagtttgtatcattcaagcttaagataaatgattggagtgagcttttagatgtggcagatgggttgagtttttcagaggtagcaaaaagctgtgatgacactataaagtatggaattattaataataagaatgagttagatcagagcgtacttcaaaatgtgtttttagagagaaaagcttataaataa

SEQ ID NO: 436265 - DNA, 573 bp, Serratia marcescens
atggaatttaatcagggtgctaaagcagctatcgaaaggatggttgaggcctacggggtaaagacaaaacttgccttgtgtgatgcgttaggtgtgactgctagtgcactatctaaccgtcaagtacgtgattcttttcctgctgagtacgttttgaaatgtgctctcgatacaggtgcgtcattgcggtggcttacctacggccaaggtgaaatgtttgagcagaatgtagtcacagctccttctgctctggctgtaccaagcaagaaactgtcaaataggaaactttacgatagtgaaacacttttgctcgacaaaacgtttcttcctctaggaatcaagagccctcttgttgtgatcgatggagaaattaagtacatttcaacccaggtttatgatgatatttatgatggtacttggttgatagatattgatggaaatatcagcattcgagaaatcgtacgtgtcccaggcaacaaggtgaaaatttatgatcataaaaattcatttgaaatacttactattgatttaaaggtgttggccaaaataattttaacttgcactccaaattaa

SEQ ID NO: 436266 - DNA, 981 bp, Serratia marcescens
atgttagaaaaacagtttttctcagagtcactatcgaaaataagctatctcagagctcatggatatatagaatcagaacaagcacaaagacttcaacgattagtaagaatcggtcattttgatgaagtagccaatgaaataagcagtctatacaagcaacatgaactaaaccctaaaaatggtagcgacttcattgattttgctgatgaaaactataatgaagacgaatctcccaatgaaaatagaaaacaaaattttattataagcaagttgaagaatgaattaaagagtgctaaaaacgataacgataaaatacagagctcattgaattcatacagatcaaaatacagacaagaacagatcgaattatccaaaaaaaatgaggaaatagaaagcattaataaagaatatcaaatattaaaaactgaatacgataaattagcatctgagcgccaacaaaagagaattgaaaataaaattcccgagtacgtaaaggatgtgagtaacaaacttgattcagacgataatttatttatgaaaaaatctcaacgttggtctcgatctggaatttttatatcactccttgccactgtgattgctctttatacttttaaagctggattcgaagctttaatagcatcaccaaatttaggctatatagcaatattatttgttttctttagggggatattggcaatcggtattctctcgtgggttgcctttatttgctttaatatgtcatcatcatatattcatgaatctatattaagaaaggataggcaacatgcacttagttttggtcgtctatttctccaaatttatggtgatacagcgacaaaaaatgatgctattgaagttttcaaagattggaatagatcaggcgattcagctttctcaaagcgacatatatccccaccaaacatttttaaattggctgaagcattcaaaaagacaacctccaaagaggagagtattgaatag

SEQ ID NO: 436267 - DNA, 774 bp, Serratia marcescens
atgaagcacattattctcattatcaccgtggtgctgtctatatgtgtgatgcagggatgcgaacaaggtagggatctacaaccacaagattactttgaagggaagcagctggacatcgccaccatcatttacgagggtgacaggcaaaagctggataaagttttatcgacggtaagcaaagaaacgttaaatcggccggccaaggcggagatgacgttgctattctggacgataaacaacgccatctttgacaagaacacgccagagcggctcaagatcattacagatttagtcaaggcgggggctgagccattacaacctcagcctaacgcaccaggcagccccgctgaatttgttatgaaagcggataaaggcatctggatacaggctatgttagagggcggactttctccaaatgccagggataaggttcataatcaacccattatatttaatagtatctttgcaaaaaacacagaaacattagaggtcatgttggagcatggtgctgatataaatataagaaattcactgggtgatacgctgctcatcgatgctttagactatcactcctatgaccacgtcattcttttattagaaaaaggcgccgatagcgatataagaggcaactcgggttggacgatgggtaatcaactacaacggctgattaataggagtccggacggcagtgaggcgaaagagtctcttgagcgcatcaaagacgagctaattaagcgtggtgggaaatggccacctctccctgtcagtaaataa

SEQ ID NO: 436268 - DNA, 606 bp, Serratia marcescens
atggacaataacgaaaaggcttcagcagcgcgcgcagcaaccttgcttgccaccggtgaggtggttacgccggaacagttttatcaggacagcgacggaagcaactgggggccggcgatcaacaaagcggcggcggcggcgctgcaagccggcggtacgttgtccctggggaagcgggtgtatacggtcgccggacacgtactcattcagacgacaacggacatctacggcggcatcggtttacgggtggtcggattggggcgggcgaccaaaattgtcaagacggcagacagcagttacaccaacgaacagggcgaaacgaagaaagcggtgatcgtggtgaaaggcttcgccaatctgacgctgcacggcttgacgttgcgggatgataccggcgtagacgacacccacggcgtgtggttcagcgaccgcaatatgacgaagtttgatattcgcgacatttacaccaaggtcggcggttattcgctgtttgtctcgggcgacatgttcatcaactggctggtgaacgtgcagatggaggcaaacgccaatcgcccggggatggggtgctgtggatggacaagtctggcaccaccaattttatag

SEQ ID NO: 436269 - DNA, 753 bp, Serratia marcescens
  misc_feature (38)..(47): n is a, c, g, or t
atgcgcaatctatgtgcgagctggcacggtccattagnnnnnnnnnntcttgatcaagagagcgccggtcaggcctttctgtctcgtttactctggttacagggtgagtataaggccgcgaaacagatggcatggcgcggtgttaaaaaagccgctcgtttgcagcatgtctgttctctttgctgtgcactggctgaaggcgcttgtatgacagcagcactggatcgtaatccgcgttgggttataaaggccgcaaactggcttattcatctggcaaaaaggcatgatttatatttctggaagacatacggcgagctgtttcttgtttgggccaaacagttcagtcataccgatgttagtcaaaccacactgtttagctcgttgcgggcgatgggattagattggcaatattcccccttgttgtcagaaattgataccgggttatcgctgagagccacccgccaggatcatgaaaactggtgcacgcctgagctgatgcgtctttctgccactcaattacctcctcagaagcaacgcctgctgttggagaaggccctggacaaagcgcgtcagcaacaggctcatggctgggccctccgtattgcttattcattggcgacattgcaggctgaagccggggaaaaatgggctgctaaacaattgatacaggacgctttacatgatgttgatgactcagacaatgcgacggatgtaagaagtgctattgcgctatgtgcccgaataggggcctga

SEQ ID NO: 436270 - DNA, 165 bp, Serratia marcescens
atggagcctggagaggaggtggtgccgataataggagtcgaacctacgaccttcgcattaccaaaacaacaccagcacctcagtacctcagtacctcagtacctgctcgtcagcctgaactggttgttcaggaaagaaaatgccactttaaatctgctgaggtga

SEQ ID NO: 436271 - DNA, 825 bp, Serratia marcescens
atgtgtgatgcgaccggtctgtcgcaacgtcgtgcctgcaggcttacaggtttgtccctgtcgacctgccgctatgaggctcggcgtccggcggctgatgcgcatttatcagggcgaatcactgagctggcactggagcgcaggcgttttggctaccgccgcatctggcagttactgcgccgtgaaggccttcatgttaatcacaagcgcgtgtaccgcctttatcatctgagagggctgggcgtaaaacgcagacgacgtcgtaaagggctggcaacagaacgtctgccgctgctccgcccggcggcgcccaacctgacctggtcgatggattttgtcatggacgcgctcgccaccggtcgcaggatcaagtgcctgacctgtgtggacgacttcacgaaggaatgcctgacggtcactgttgcctttgggatttcaggcgtgcaggtgacacacattctggacagcattgcgctgtttcggggctatccggcgacgataagaactgaccaggggccggagttcacctgccgcgcactggatcaatgggcttttgagcatggtgttgagttgcgcttaatccagccgggcaagccaacgcagaacggatttattgagagctttaacggacgatttcgcgatgaatgtctgaatgagcactggttcagcgatatcgttcacgccaggaacgtcattaatgactggcggcaggattataacgagtgtcgtccacattcagcactgaattatcagacgccatcagagtttgtagcacggtggcggaatggaaaatgtgaaggtaaacaaaccgacattactaactga

SEQ ID NO: 436272 - DNA, 264 bp, Serratia marcescens
atgaagaagcgtttttccgacgaacagatcatcagtatcctccgcgaggctgaagccggggtttctgcccgtgagctctgccgtaagcacgccatttccgacgccaccttttatacctggcgtaagaagtatggtggtatggaggtgcccgaggttaagcgcctgaagtcgcttgaggaagagaacgccagactcaagaagctgcttgccgaagccatgctcgataaggaggcactccaggtggctctggggcgaaagtactga

SEQ ID NO: 436273 - DNA, 249 bp, Serratia marcescens
atgagaatagctatttccgttatttcactctttgcaaccttggggcttggatatctggcactagatcagaagtccttggcttcttttattgctttccttgtaagcttagttacttttttaacttcattagccaatatgaaaaagaaaccggaaggtaatactaataaaaaaataaatcaaaaaataggtaaaaacggttcaggaattcaaatcggtggtgatgttaacatcaattccaagaaggattaa

SEQ ID NO: 436274 - DNA, 906 bp, Serratia marcescens
atgtcttttttagataactctggacaaaaagtgggtgataacagcaatgcggttcaggttgctggagattttaatgtaggaaataccacgactgaggttattgcaatctgtaatcttgttgtttcaacccaaatggctgcattacgtcaggaagcacaagaggaagctcgcttacgtgcaactgaatttggaagtcaaataattgaaaagctatcttctgaagttgaggatatagtaatggaaaaattacgagatcctgatattcaatatgcaatgaaccagtctgttatacaggttgccaggaaaggattaggagctaaatctgatttattaaaagaacttattgtatcaaagataaaaaacaaccaagaagaaactgatcttcttattgatcacgccttagatataactcctcgtttaaccacaagtgaaatgaaacttatttccttaatatattactttagattttgtcacaaaagcattaatggagtaagcctgacagaaatacttgatcatgaagatgaaagttattcaataaatgatgtcagtaaacaattttgcagaagtgtttacactcacacatataacaccccatctatagactttgacagaattactgatggaataaaaacaatacagccggttgatttgactatgcttgatgttaaaggctgcatttcctcagagaattattatacaaaaagttatttcgagttatttaaaggaaaaaccgggatagagttaaatgatgatgaagcgtatgcaaaagaaaaaattccatatataattgatttaattaataaattcaacatcagcaccctttctgatttcaacaaaattgttattaataagttaggtgtaatgatagctgaaaactatcttcgtgccagaggtttcttagcttag

SEQ ID NO: 436275 - DNA, 579 bp, Serratia marcescens
atgcggatacgaaaaaagcgcccaaaggcgcttttttctgaatgggtgggtcgtgcaggattgattcggcctgtggcctcaccctacgggcaacgctgcgcgttgtcgtatcgctgcgcgatgctcgaacctgaacgcaggatctcacccgcacgactcagtgggctatgtcagcaagaagataaaggtagagtcaggtgggcgcagatgcgaaaaaagcgccaaaaggcgcttttttctgaattggtgggtcgtgcaggattgattcggcctgtggcctcaccctgcgggcaacgctgcgcgttgtcgtatcgctacgcgatgctcgaacctgaacgcaggatctcacccgcacgactcagtgggctatgtcagcaagaagataaaggtagagtcaggtgggcgcagatgcgaaaaaagcgccaaaaggcgcttttttctgaattggtgggtcgtgcaggattgattcggcctgtggcctcaccctacgggcaacgctgcgcgttgtcgtatcgctgcgcgatgctcgaacctgaacgcaggatctcacccgcacgactcagtgggctatgtcagtaa

SEQ ID NO: 436276 - DNA, 480 bp, Serratia marcescens
atgggcagcatcccgttcaccgtaaactgcacagcaccgaccaacatgggtattgaagttaccagcgccagcggcgatgccgattatcaatatatggacagaagcttcaccgcatcgctggcaaaagacgccagcaataaagatatcgccgtgctgggccttgcactgtcagatatcgctatggatggtgaaaccgtgcgtgcggcgctgattcctgaaggcgatgatatttttgatttgaccaatgtaactgacggtgcagatcacgaacaggctatgttctctgttgcctcaggtaatcgctttgcggtcacatcagatgctaattacgacaacatggcgatcggtcagaacctgagcggcacattcaactaccgttcattccttaccccgcttagctacattgatgataaaagcatccaaatgcaagacagcattgcattgcaagcttctgtgaatctttcggttcactacctgtaa

SEQ ID NO: 436277 - DNA, 711 bp, Serratia marcescens
atgaaaggtctcatccattatctcaccgcaatatttatattgcttactccattttatggccaagcaaccattaaactggaaaaaataagcctcttggtcaatcaagagaaaggagagacaacggtaagagtcgataatatcggtaattatcctgtattgctattctcatccgttgttaaaaatgcactaagcaagcaaggagaagatcccttattcattctttctccgccagccgcgcgtattgatccgggtaaatctcagctggtacgcgtcatgcttgccgatccctcgggacttgataaaacccgtcagcaaatgcgccatatctatttccaggaaattcctgatatgggagaaaaaagcaaccagcttaaggtgaatactcggcatcgggtcgtcgctatcgccacaccctccgcgctggtggaaaacaaatctccctggcaaaccttgcattggcaacaaaatgggcattctatacaagtcaaaaatctcagcccttacgttatcaggttagccccttccatcaccgtacaacccagtaaccagcagtttgttttagaacaaccttatttgctgcctgggcaaacgatcggtacacgtaagagcgataggcttaccagccccccctcccgtttgcacttcacgccaatcagtaacacggggcgcgccatacccgatatcacggtcaaccttgccccaatccagtga

SEQ ID NO: 436278 - DNA, 2412 bp, Serratia marcescens
ttgaaattgcatataccgctacgtctgctggcgttttgtctgcctataggctatgcctcgaccagcctggctgactacgatattgaaatgatgcgcgcacttggattacccagtgagattgctgattacttttcctctggagcgaaattccccgcaggaaaacaagcgctattcatcaacgtcaacggacaaaatcatggacgacatgaagtcaacatagacaaacaaggcgaatggcaatacgacgctgaactcgtagaaagcctagggttatacccctgcaagctcaacactcaggcagatatgctgatgagccaatgttatcaaggcagccgcatcgacaatgaaaccggtaataatcaattgattttgctgttgcccgagcgctatatccgtcgacaaccggcggactatgaatttggcggccatgccctgatgctgaattataccgcgagccgattcgacagccaaaatcacagcagtgattacgcggcgttggaaaccggctttaacagcaataattggctgtttcgccataatggcacctataacaagtcagaacgacatcaggggtacacgccttataatagttatctgcagcggacattgacgaaccacgacgccatgatgcgtttgggacgagcgacgttatcagattcgctttacagcggcattaccttagatggcctgcaatggctgcctgactcgtcgttgtcattgagtcaacgcagtgatgtgccggtagtcgaaggtatcgccgagagccaagccaaggttgagatttttcagaatggcagattagtttacgctacgcaggtgcagccgggcactttccgcctgaccgatatccctgcgcagttcgacgcagtcgatttgtccgtcaccgtcacggaaagtaacggtagccgcaaacaattcatcgtcccttatctgacgacctcaggacgcgctactccccgccagggcagttactcccttgctctcgggcgcactcacagcctggaaaaaagtacagaaatgcctttcatcactggctcattctctttgccatggctcaaccaccaccaggtgagagggggaagtttcctcagccgcgattatcgcggcatcgccgccggttatagcattgccaatagcgattatcgttttacagccttgagccacgtggcgcagtcgccaagtggaaagggcaccaagctgcagctgaatagtgcattgcccctgataaaaaaccttaagctgaacgccggttacagcatccagtcagagcgataccgttcgcccacacagcttcgttctccacgtaaagatgacggcgaaggaacttattggcctgtatcgcacggcgcatcatcttcacaccaacgtcaaagctacagcctgggcctaggctggcaccataaatacattggaaatctatctttaggcgttacacgcgctgaagggggagataagcagcaaaatcaacgagtctacgccttctggaaccgtcaatttggcgcagccaccgttggcgttagcctggaaaaagagcgcagccgcgaggttcgcgataacgataccagggtgttcgccaccctttcattgcctctgggaaaaaaccgacgttatagcgccaatatgataagcaacggaagacatcgtagcatcagcaattcgctttccggccaagcgttgaatggcgatctggcttatggactcaatgcaacacagggcacccaatccaacaacggcacctactcaggcaatgtgaactatttgagtccgttcacaacgctttccggcagctatagccatctgtcagaaaatcagcaggcattttactacagtgcttctggctccctggtggcagacagcagcgggctaacgctctcaccacagaaaatcggcgataccttcggcgtcttgacgataccgggcctcgccggaatcagcgtgtctacgccaggcggaaaggtgaaaacctatggcaagcaaggtaaggcggtcatcccaaggctgcgtgagtatcaaccaagtctgattaacgtagacaccagcaccttgccccccggcgccgatatcgataacggcgtgcgtaagatcaatctggcacgtggcagcgttaaacgtatcaatatcggtgccattaatacattgcgggccattgtccagattagctatgcagacggcacaaaacccgctatcggcagcatgattttggatgaacaacaacgagtggtcgcttttaccaatgatcagggcgcagccttcattgaacatcagaaagcgcaccacgcgaagaacgaggcgtcttcacaacgtttcagcatgaaaaactcgtcgggacaggcatgttatttcgcaattgctgcagacacctcttcccgcaatcgtgccggcatcagccactccgaagccgtgtgtcgctaa

SEQ ID NO: 436279 - DNA, 555 bp, Serratia marcescens
atgaaagtgatttattatgggttggcagccatagccatcagttttggggctaacgctaactgcacgctaacgaccacacaaaacagcatttatctgggggagcacaatattgggacactgtctcagcaatccactctgctgcacagcgccccattgcagtatcggttgacttgcgatgagcccgtgcagttgcaggggttcactctgcgggagaatagaaacctggcagaaggaggcggcgcaaccgatgcttctagctatctcagcctcacggttgatgaattacgcaacgatgatggtgagcccctttccttttcactcgcccccgggcaaccacgccaaagacatctacccaactatcgtttatccgtcgatcgggaagcattacacatccttgtaccggataacgaggttgggcaacacttcacactgtcattaacagtctccagtttcgccgcggccgcgacacaactgcgtcaacagcaacgcgataacatcccgctgtcgacccaattgctggtcagtgctaactatcttgatcccgacgttcggtga

SEQ ID NO: 436280 - DNA, 2283 bp, Serratia marcescens
atgtccattaaacgctatccgcagctcgcccattggggcgcttataccgccgtggttgaagacggtcggcttatccgttgtgaacccttcgtcgacgatcccgacccttcgccgctgctcgattccatcgtcccgatggtctactccgacaaacgcattcgcaaaccggcggtgcgccgctcgtggctgcaaaagcgcgagggcagcgaccgtaagctgcgcggcagggaagatttcgtcgaggtgggctgggagttagcgctcgatttggtggcggaagagaatcgccgggtgcgcgatcgctacggcgcctccgggttgtttaccggctcttatggctggtcgtcggccgggcggctgcaccatgcccgctcgctggtgcggcggttctacttcagcggcggcggcggggtcgatcagcagggcaactacagctggggcgcggcgcagttctttctgccgtatgtgatcggcactttctcgcccttgaccgggcgcgtcaccagttggccgagcgtggtggagcattgcgagttgtttgtggcgtttggcgggctggcgctgaaaaacgctcaggtttcttccggcggcgcggcggaacatgcgctcaaaccctggctgcaaaagctggcgcataagggcacgccggtgatcaacattagcccgatgcgcgacgactgccccgacttcgtcaacgcggaatggatcccgatcaggccgaataccgacgtggcgctgatgctggcgctggcttacgaaatccagcggctgggcgcgcaggatgaagccttcctgcacagccactgcgtgggctatcaacagctggcggattacctgaacggcgccggtgacggcgtggcgaaaacccccgactgggccagcgccattaccggcattccggcggcgcgtattgcgctgctggcgcggcaactgatcggcgtgcgcagtttcatcacctgctcctactccgtgcaacgcgcacatcggggggaacaaccgtactggatgatgatcgcgctgtcggcgatgctgggccaggtggggctgccgggcggcggcttctcgttcggccacggctcgatgaacggcgtcggcaacccgcgcgtggatacccctgcgccgaccatgccggtaggcgaaaacccggccgggctggcgatcccggtggcgcgcatctgcgacatgctgttgcaccccggcgaagcctatcaattttgcggcgagacgcggcattatccggatatccatttggtgcactgggccggcggcaacccgttccatcatcatcagcagttgaatcggctggtggaggggtggcagaagccggacacggtgatcgttcaagatatctggtggacggcggcggccaaaatggcggacatcgtgctgccggtcaccagttcgctggagcgtaacgacataggcggctcgtcgcgcgatcgctacgtgttggcgatgcatcaggccatcgcgccgcagcatcaggcgcgcaacgatttcgatattttcgccgatctggcggagcgtctcggctatcgtgagcgctttaccgagaatcgcgacgagcgggcttggatcgaagctatctaccggcaatgcggtgcagcgcagcagcgcgccggcgtcgcctggcccgagtttgaggatttctggcgccggggctatgtcgaactgcccgcgccggccaaagagttcgtcttttttgaggcgttccgcgccgatccgcaggctaacccgctgcaaacgtccagcggcaagatagagctgttcagcgagcggatcgccggctatcgctacgaagatttcgcgccgcatccgcagtggcggtcgccggtggagtggctgggcgcgccgcaggccaaaaactggccgctgcacctgatctccattcaaccgagcgatcgcctgcatagccagatggatccggcgccgctggcgcagggcaacaagactgccgggcgcgaaaccttgtacatgcatccggacgatgcggcgccgcgcggcgtggcggacggcgccgaagtgctggttagcaacgcacgcggcagctgtctggcgggggtatcgctcaccgatggcgtgacgcgcggcgtggtgctgatggcgaccggcgcttggttcgagccgggttacgacgcgcagcgccggccggtcgagcaggcgggcaacccgaacgtgctgacgctcgatatcggcacctcgccgctgacgcaggggccgaacgccatgagctgtctggtggaggtcagcgcattcaccgaacgtcgggatcaagatagttag

SEQ ID NO: 436281 - DNA, 1020 bp, Serratia marcescens
atggctacgataaaggatgttgccaggctggcgggtgtttccgtagccacggtatcccgcgtgataaacaattcccccaaggccagcgaagggtcgcgcaccgcggtgctggccgccatggaacaactgcagtatcaccctaacgccaacgcacgggcgctggcgcagcaatccaccgagacgctgggcctgatcgtctccgacgtttccgatcccttcttcggcgcaatggtcaaagcggtcgagcaggtggcctatgccacccacaattttctgctgattggcaacggttaccacgacgccgaaaaagagcgccaggcgattgaacagctggtgcggcaccgctgcgaagcgctggtggtgcacgccaaaaggctgagcgatcaggaactttgcggctggatgcaacagatcccgggcatggtgctgatcaaccgcacgctgccgggcttcgaaacacgctgcgtggcgctcgacgatcgctacggcgcctggctggcgacccgtcatctgatccagcaagggcatcagcgcatcgccatcatctgctccacccaccagatttccgacgccaccgaccggctgcagggctatctcgacgcgctgcgggaacacggtatcgcggtggatgaaaagctgatcgcctatggcgaaccggacgagatcggcggcgaacaggcgatgaccgagttgctcggccgcggccgttcgttctccgccattacctgctacaacgatccgatggccgccggcgcgctgtcggtgctgagcgataacagcgtcgacgtaccgggggaaatttcgctgatcggtttcgacgacgtgttgatttcgcgctacctgcgcccacgcctgaccaccattcgctaccctatcgtcgcgatggccacccaggcggcagagctggccctggcgctggccaaccggcaaccgctgccggaaatcaccaacatgttcagcccgacgctggtgcgccgccactcggtcgccaccctcaacaacgcgcacgaacagccgtaa

SEQ ID NO: 436282 - DNA, 345 bp, Serratia marcescens
atgtggcaagtggtgacagtcgaacggttcgacgactggtttttagcgctgaacaacgtccagcaaaccagcatcctggcggcgatcttcaaattacagacgttcggcccgcagttggcgcggccgcacgccgatacgctgcatttttccgacgcggcccggcagttgaaggagctgcgcgttcaacatcgcgggcgccctttcagagggtttttcgcttttgacccacagcggcaagcggtattgctgtgcggcggcgataaaactggcgacaaacgcttttaccagcgcatgttgcccatcgccgccatggagttttcacattatctggcaacccggaggtag

SEQ ID NO: 436283 - DNA, 303 bp, Serratia marcescens
atggccaaacctttatcccaactgatcgataaactcgatcccgccgtcgttgccgcagccaggcaaaaagcggacaaggaaattttcgagctgcggctggcaatgctgagggaagagctggcggtctctcaggttgaattggcgaagcggctcggcatcagccaaccctccggcgccaatttggaaaagcgcggcagcgaaataaagctgtcgtcgctcaaacgctatatcgaggcgatgggcggcacgctgtcgctggatgtgcaattgcccaatggccagcaccgccgcatgacgctgtaa

SEQ ID NO: 436284 - DNA, 1263 bp, Serratia marcescens
atgcctcgctcgttgcacgacacctccaccgcgttgaatgccgctaacctgctggccttgccgcagcgtttcggttgcccggtctgggcctatgatgcggacatcatcagccagcgcatcgctcaactgcgccacttcgacaccattcgtttcgcacagaaggcctgttcgaacattcatattttgcgtttgatgcgcgagcagggcgtgaaggtggattcggtgtcgctgggcgagatcgaacgggcgctgcaggctggttttcagccgggcggcgaaccgagtgagatcgtgtttaccgcggacgtgttggatcatgccacgctggcgcgcgtcagcgaattgaagatcccggttaacgccggttccatcgacatgctggatcagctcggccaggtttccgcagggcatccggtgtggctgcgcattaacccgggatttggccacggccatagccagaaaaccaacaccggcggcgaaaacagcaagcacggcatctggtatgccgatctgccgcaggcggtggagaaaatccgccgctacggcctgcaactgatcggcgtgcatatgcacatcggttccggtgtcgattaccagcatctggagcgcgtctgcgatgcgatggtgcagcaggtgatcgatctcggtcatgacatcagcgccatttccgccggcggcggcctgtctatcccgtatcagtacggcgaagaggcgatcgataccgaacactatttcggtttgtggaaccgggcgcgtgaacgcatcgccgcgcatctggggcatccggtgcagctggagattgaacccgggcgtttcctgatggcggaagcgggcgtcttggtggccgaggtgcgggcggtgaaagacatgggcagccgccacttcgtgctggtggacgccggttttaacgatctgatgcgcccggcaatgtacggcagctatcaccatatttcactgttgccggccgatgggcgcgctacctcggggcaaccgctgcgcgacacggtgatcgccgggccgctgtgcgaatccggcgacgtcttcacccagcaggcgggcggcggcgtggaaactcgcgagctgccgccggttcagattggtgattatctggtgttccacgataccggcgcctacggcgcgtcgatgtcctccaactacaacagccgtccgctgttgcctgaagtgctgttcgaaaacggcgagctgcgtttgatccgccgccgccaaaccatcgaagaactgatcgcgctggagcttatctga

SEQ ID NO: 436285 - DNA, 924 bp, Serratia marcescens
atgcacagcatctctttgcggcagatagaaatctttcgggcggtgatgaccaccggcaacctgaccgaggcggcggccctgctgcaaacctcgcaaccgaccgtcagccgcgagctggcgcgctttgagaagctgatccggctgcagctgttcgaccgggtgcgcgggcgcttgtcccccacggtacagggcctacggctgttcgaagaggtgcaacgctcctattacggcctcgatcgcatcgtcaacgccgccgccggcatccgccagtttcagcaggcgcagctgtcgatcgtgtgcctgccggtattttcccaatcgctgctgccggcggtgtgccggccctttatcgaacgttacccggaagtcagcttcagcgtgatcccgcaagagtcgccgctgctggaagagtggttgtcggcccagcgccacgatctcgggctgacggaaaccaccctgacgccggcgggcaccgagcgggtaacgctgatgacgttgaatgaagtctgcgtgctgccggcgggccatcctttgctggcgaaagacccactgacgccgcaggatttcgccgggcagaactttatcagcctgtcgagcaccgacagctatcgccacctgctggatgcgctgttcgccgagcagggcgtcgagcgccgcatggtgatggaaacgcacagcgcggcgtcggtgtgcgccatggtgagggccggcgtgggggtgtcaatcgttaacccgctgacggcgctcgactatgccggcaacggcgtgcacgtgcgatccttcagcatcgacgtaccgttcaccgtcagcctgatacggccgctacaccgcccttcgtcggcgctggtgacggcctttatcgaccatttgcatcaacaggccgcactgttctccgctcgcctggccgctgccgtcaagcggtga

SEQ ID NO: 436286 - DNA, 909 bp, Serratia marcescens
atggatcgcattaccgccgctgaggtttttgtcaccatcgtcgatcgcggcagcatgatcgccgccgcagaaacgctggagatgtcgcgcgcgatggtcacgcgctatctggcgcagatggagcaatgggccggggcgcgtttactgcatcgcactacccgtaagcttagtctgaccgacgccggggagcgtactttggagcgctgccgacaaatgttggcgctggcgggggaaatcgatctggtggaggaagggcagagcgacgaactgcgcggcctgctgcgcatcacctgttcgcaatcgctcgggcaaacggcgctggtgggggccgtcgctcagtatctgaagcgccacccgcaggtggcggtcgatctgcagatgaacaaccgggcggtgaacctggtggaagagcgcatcgatctggcgctgcgcatcaccaacgagctggatcccaacctgatcgcccggccgctgtccacctgcgcatcggtggtgtgtgccgcgccggcgtatctggcggcgcacggcacgccgcgccagccgcaggatctggcgttgcacaactgcctgacttattcctatttcggcaaaagcctgtggcactttgacgctcagggggtgaaatcggcggtggcggtcagcggcaacctgagcgccaacgagtcggtggtgctgatggccggcacggtgcagggcgcgggcatttccatgcagccctactattcggcggcgccgctgctggccagcggcgaattggtggagctgctgccgggttaccggccgcagtcgatgggcatctacggcatctacacctcgcgccgccagatgcctgccaccttgcgtaccatgctggactttctggtggagtggttcgccagcgatccgcagtggcaggcgacgctgcgctga

SEQ ID NO: 436287 - DNA, 885 bp, Serratia marcescens
atgtttaagaaatcactgttaactctgaccttcaccggcgtcgccaccctgagcacttatgccaccgctgccgataccctgaccatggaagtgtataacccgggcgaaaaaagcgtgttcccggtgtcttccgaaatcgtcagcggcaaacacgaagtggcgctgatcgacgctcagttccagcgtaatgatgctgaagagctggtgaaaaagatcaaggcgaccggcaagaagctgaccaccgtttatatcagccactcagacccggatttctatttcggtctggacgtgatcaaggcggccttcccggaagcgaaaatcatcgcttcgcctggcaccatcaaagacatcaatgcgaccaaagacggtaaagttgcctactggggcccgatcttgaaagacaacgcgccgaaaaccgtgatcgtgccgcagccgctgcaaggcgatagcttcaccatcgacggccagaaagtggaagtgaaaggcttgaacggcccgacccccgatcgcaccttcgtgtggatcccggcgctgaaagcggtcgtgggcggcgtcgcggtcgccggtgacaatatccatccgtggatcgccgacaaccagaccgtggaatcgcgccagcactggcagcagacgctgaaaaatatcgaagcgctgaagccgcaggtcgtcgtgccgggccacttcctgccgggcgccgcgcaaacgctggcatcggtgcactttacccaaaaatacctgaccacgctggaagccgaactgccgaaggccaaggattccgccgcgctgattgaagcgatgaaaaagcattacccgacgctgaaagacgaatcgagcctggaactgagcgcaaaagtgctgaaaggcgagatgaagtggccgcaataa

SEQ ID NO: 436288 - DNA, 648 bp, Serratia marcescens
atgaccgcaaccactctgcattacattttcgatccgctgtgcggctggtgctacggcgccacgccgctggtgaaagcggctcagagcctccccgggctgaaggtcgtgccgcacgccggcggcatgatgaccggcaacaaccgccgccaaatcaccgacgaatggcgcaactacgtcattccgcacgacaaacgcatcgccgagatgacgggccagccttttggcgaagcctatttcaacggcctgctgcgcgacaccacggcagtgatggattccgagccgccgatcaccgctatcctggcggcggagaaactggcgggacgcgggctggacatgctgcaccgcattcagcgggcgcactaccaggaaggccggcgcatcgccgacacaccggtgctggaagcgttggcgaaagagctggggttgccttcggcggcgtttatcgccgaaatgcgctttagcagcggcgcgccgaccgcgcaacacatcgcggaaagccgggcgctgctggccaaagtgcaaggccagggcttcccgacctttgcgctgcaggacagcgaaggccgcctgcatctgctgccggccggcaactatctgggtaacgtggaagcctggaaaaacctgctgggtgccgccgcgctggcgtaa

SEQ ID NO: 436289 - DNA, 708 bp, Serratia marcescens
atgaaggcttggtttcctctgttgctgacctgcggcgtcttcgccagcgcccgggcctgggcgcacattgacgagccggacatcgccgccgactgccaaaaggtggcgagctacgccgaactgggaaaaaaggcctatcagcggcaggattacgctaaagccgccgacatctttcgcgatcaggcggcctggagcgagttttgcggcctgagcgagcaggctgtcgccacggcttacaacaacgtggcgttgtcgctgatgcacgccggcgaattgctcaaggcgcaggcctatctggcgctggcgccgcacgatgacaaatcgcagcacaacatgagcctgttgcgccaacgcctggcgcagtggccacagccgcaggggccggccggcgtgtattggcaatacgccgggcgcggcgtgtggagcgaagtgacagtgaagccgcagggcgagcgctggttgatcgcgttttccggctacgccatgccgcagatggggctgtattacgggccgaacatgggcgacttcaccgccgagctgccgatcgaacacggcaaggctgtctaccaccagcatgaagcggaaagcgcgcaggtctgcgacgtgacaatggcgtttggcaaacaagcgctggagatgcacacgcggggggattgcgggttcggtcacaacgtgcgggcggaagggcggttcgtgcgggtcgaatga

SEQ ID NO: 436290 - DNA, 1728 bp, Serratia marcescens
atgaacgcaacccccttgcagaaacacgccgtgtggcagctgatcaaacccttttgggtgtcggaggaacgatggcgcgcctggatgatgctgatcgccatcgtcatcctgtcactcggcctggtctatatcagcgtgctgatcaaccagtggaaccaggtgttctacgatgcgttgcagaacaaaaactacccggtgttcaaggcgcagctgtggcgctttacctatctggcgctgatttttatcgtgttggcggtctacaagatctacctcacccaggggctccagatgcgctggcggcgctggatgacggaaaagttcatggggaagtggttggcgcaccaggcgtattatcacaccgagcagcaacagatcgtcgataaccccgatcagcgtatcgcggaagatctcaacgtattgacccaatataccctgtcgctgtcactcgggctgctctccagcctggtgacgctgttttcctttatcgacattttatggcacgtcagcgggccgatgaccttcgcgctcggtcagcacgccatcacgctgtccggctatatggtgtggttcgcgctgctgtatgcggtgctgggatcgctgctgatctggtgggtcggcaaaccgctggtcatgctgggcttcaaccaggaacggtacgaggcgaacttccgtttcggcctgatccgcatccgcgaaaacaacgacgccatcgcgctgtaccacggcgaaccgcgcgaggcacagcagctaggcgatcgttttgacaccattcgcagcaactggtgggcaattatgcgcatcacccggcggctgaacattgccaccaacttctacagccagttcgccatcgtgtttcccctgctggtggccgcgccgcgctatttctccggcgccattcagatgggcggcctgatgcagatcgcctcggccttcggtcaggtacagggggcgctgtcgtggtttatcgacgcgtttaacgacttggcgacctggaaagcctgcgttaaccgtttggccggcttcaacgccgccgtcgatcaggttcaccatcagccgcgcggcattcagctgcgggaagaggccgcccatccgttaacgctggataatctcagcctgaacttacccgacggccagccgctgctggccggcgccaagatgacgctgcaacgcggcgatcgcctgctgatcgtcggcccttccggctgcggcaaatcgacgctgctgcgggccatcgccggcatttggccttacggcgcgggcgccatcgggctgccggccaacgccaataccctgttcctgccgcagcgcagctacattccgatcggcacgctgcgcgaggcgctgagctacccgagccaggcgacacaatacagcgacgagcagctgatgcgggtgctggaaaactgccgcctgaagcacctgcagcgctggctggataccgccgccaactggaaccaccgcctgtcgccgggcgagcaacagcggctggcgttcgcccgcgccctgctgattcgcccgagcatcctgttcctcgacgaagccaccagcgcgctggacgacgaaaccgagcaactgatgtactgcctgctggtggatgaactgccggacgtgacgctgatcagcgtggcgcaccgcaacagcgtggcgaagtaccaccagacctgctggcgcttcagccgcagcgaagatcaaccggcgcgcctggcgctgagcccgctgccggtataa

SEQ ID NO: 436291 - DNA, 435 bp, Serratia marcescens
atgccaggcattgtgattaccggccacggcggttttgccaccgggctgttgcaggcggtggaacaggtggtggggccgcagcggcactgcgcggcggttgatttccccgaacagatgagtaccgcgcagctcagggacgccctacgctcggcgctggctgcggtgatgcagccggacggcgtggtgttcctgaccgatatgctcggcggttcgccgtttcgcagtgcctgcgaactggcggatgagcagggcgattgcgaagtgctcaccggcgtcaatatgcagctggcggcggaaatgatgctggagcgcgacgggttgagcctggatgagtttcgcgaggtggcgctggcgtgcggcaaacggggcctgaccagcctgtggcatgagcgccgccgagtgaagtgcgaagacgtgcagaccgacggcatctga

SEQ ID NO: 436292 - DNA, 894 bp, Serratia marcescens
atggcatttaacgattccgacgatctgctggcgcaaaaggccgagcagcgcatggcgcaggcgctggccaccagccaggtggagcaggacgactatctggacagccagcccgccgaggcgctgacgcgcggcgacatcaaccgcatggcctggcgttcgctgctgctgcaggcgtcgttcaactatgaacgcatgcaggcgggcggctggctgtatcagctgatccccgggctgcgcaagatccaccgcaacccgcaggatctggccaactcgatgaagatgcacatggaatttatcaacgtgcacccgttcgacgtcaccttcctgtccggcctggtgctggcgatggagcagaacaaggagaaaatctccaccattcgcgcggtgaaagtggcgctgatggggccgctcggcggtatcggcgacgcgctattttggctgacgctgctgccgatctgtgccgggataggcgcttcgctggcgttggaagggagcttgttcgggcctatcgtcttcctgctgctgttcaacctgtttcatttcggcctgcgttttgggctggcgcactacggctatcaggccggcaccagcgcgctggcgctgctgaagacccacacccggcgcatttctcacgccgcgtcgatcgttggcatgacggtgatcggcgcgctggtggcgtcgtatgtgcacctgtccacgccgctggtaatgcatgccggcaaggccagcgtggccttgcagaccgacgtgctggacaagttgatgcccaatttattgccgctgtgtttcacgctgcttattttcttcctgatgaagcgcggattctcaccggtgaagctgataggcgtcaccgtagcgattggcgtagtgggcaaatttatcggcattttgtga

SEQ ID NO: 436293 - DNA, 780 bp, Serratia marcescens
atgttgacggatgcgttattgattgcgctgttggccggattggcgggggttgacctgttcgacggtctaacccacttccaccggccggtggtgatggggccgctggtggggctgattttgggtgacgtctacaccggcttgttggtgggcgggacgctggagctggtgtggatggggatggtgccgctggcgggcgcccaaccgccgaacgtggtgatcggcggggtgatcggcaccgcgttcgccattctgaccaaggccgatcctaaagtggcgatcggcgtggcagtgccgttctcgattgcggtgcagggctgcatcacgctgctgtttacgctgttctcaccgatgatgcaccgctgcgatcgcatggtgaaagagctgaactggcgcggcatagaacgggtgaactatctcggcatcagcatcctgttcatcttctatttcgtggtggcgttcctaccgatttacttcggcgccgacgcggccagcgccatggtgcagaaagcgccgggctggctgctggacgggctggcggtggcgggcggcatgatgccggcgatcggtttctcgctgctgatgaaggtgatgatgaaaaaaacctacgtggcctattttatcctcggtttcatctcggtcacgttcctcaagctgccgatcctggcagtggcgctgggcgccctggcgatcgctttgattgatttcttcaacacgcaacgcggcgcggcagaggcgaccgcccggcccgctccgcaggaggacgccgaagatggcatttaa

SEQ ID NO: 436294 - DNA, 477 bp, Serratia marcescens
atgccgaacattttaatgacccgcatcgacaatcgcctggtgcacggccaggtgggtgtgacctggaccaataccctcggtgccaacctggtggtggtggccaacgacgaggccgccgccgatccggtgcagcagaacctgatggacatggtggtggcggaaggggtgcagacccgctacttcacgctgcagaaaaccatcgacgtgatccacaaggcggcggacaggcagaagatttttctggtgtgcaaaacaccgcaggacgtgttgacgctggtgcgcggtggggtgccgatccgtttcgtcaacgtcggcaatatgcacttcgccgaggggaagcggcaggtgcacaaaacggtgtcgctggacgacggcgacgtggccgcgttccgcgcgctggcggcgctgggcgtggagtgcgaagtgcgccgggtgccggatgaggcgggtgaggcgatcggcaaattgctcttttga

SEQ ID NO: 436295 - DNA, 1284 bp, Serratia marcescens
atgcagcagttgttacagcttgtcgagcagcacaaggccggtatgccggtcgggatcttttccgtctgttccgcccatccctgggttctgaaggccgcgctgcggcaggccaaagcgcgcggcacgccggtattggtggaggcgacgtccaaccaggttaatcaattcggcggctataccggccaaacggcggcccagttccgcgatgcgctgtggcgcctggcggatgaagtgggcctggcgcgcgagcgcgtgtggctgggtggcgatcacctggggcccaacgcttggcaagatcgcccggctcaggaggcgatggcgctggcggaaaccttgatcgacgattacgttcgcgccggatttcgcaaaattcacctcgattgttccatgtcgtgcgccggcgatccctcgcccctgggggatgccacggtcgccgagcgtgcggcgcgcctgtgcgcggtggcggagtgggcctgggcgcagagcggcggcgaagcgccggtctatgtaatcggcaccgaagtgccggtcccgggcggcgcgcaggaggcgctggcgggtctgcaggtcaccacgccgcaggcggtggcgcaaacgctggaaacgcaccgcatcgcctggcaaaaagccgagctgaacgatgcctggcagcgaactatcgcgctggtggtacagccgggcgtcgagttcgatcaccacagcgttgagcattaccaaccgcagcgcgccgacgcattgagccacttcatcgaaaggcagccgggcatgatctatgaagcgcactctacggactaccaaccaccgcaggcctaccgccaactggtgcgcgatcacttcgccatcctgaaggtggggccggcgctgaccttcgcgctgcgcgaagcgctgttcgccctcgatcgcatcgagcgtgaatggctgggggaacgccagtcggcgcagctgtgcgccacgctggagcaggtgatgcgcgagcagccgcagcagtggagccgctattaccacggcacgccgcaccagcagtatctcgatcgccactacagcctgagcgatcgggtgcgttactactggccgcagccgcaggtgcagcaggccgtcgacgggttgctggacaacctgcgccgcagcccggcaccgctggcgctgctcagccagtacctgccggatcaggcgcgggcgctgaacgccggcgaattaagcgccgatccgcaggagtgggtgctgcataaagtgacgcaggtgctcgacgattaccacgccgcctgttacccggagggccgctga

SEQ ID NO: 436296 - DNA, 774 bp, Serratia marcescens
atgccagtgaataccgcaaagcgacgtgaacatattattgatctgttatgcgagcacggcagcgtgcgcgtggagcagctcagcaaacagtttgcggtatccacggtgacgatccgcaacgatctgcgctttctggaacgaaaagggtgtgcgctgcgcgcttacggcggcgcgatgctcaatcagcaattcgctttcgatcggccgttgcgggacaaagggcggttgaatcgcgacgtcaaaacgctgatcgccaacgcggcggctggctatgtgcgcgatggcgatgcgttgatcctcgattccggttccaccaccgcgcagatcgtgccgttcctgaaggggcggcgcgatctggtggtgatgaccaatgcgctgaacattgcctacgagctttcgggaaacgacggggtggaagtcatggtgctggggggcagcgtgcgccgcaactcttactcgctctacggtccggctgccgagcagcaattgcgtcagtaccgcttcgacaaactgtttttgggcgtcgacgggttcgatctgagcgccggcatcaccacgcctcaccccggtgaggcgcacctcaatcgcgtgatgtgcgaggtggcacgcgagattatcgcggtggcggatgccagcaaattcggtcgcaagagcttttgcatgattcgcgaagccggacaaatccatcggctgatcaccgacagccgtcttccggacgattacgagcgggcgttaaccgagctgggcgtggaggtcatcatcgccgatcggtag

SEQ ID NO: 436297 - DNA, 1221 bp, Serratia marcescens
atgccgcaacccgcttcatccccagcgtccaccgcgaccccgcgtcgccggttacaccgccctattttgctgatcgtcggcattatgctgatcgcggccaacctgcgcgccgccctgaccagcgtcggcccgctgctggagcagatccagcaacagctggcgttgtccgccaccgccgccggcctgatcaactcactgccgctgatcctgttcgccattctctcgccgctgaccccagcgctggcgaaacgcatcggcatcgagcgcaccctgggcctggccctcgcgctgctggtctgcggtatcgtgctacgttccctgccgcaagacgccatgctctggccgggcagcgtcctgatcggcgccgccatcgccttcgccaacgtggtgctgccaacgctggtgaaaagagatttcccacatcgcgccgccgcgatgatcgctgcctatgcggcggtgatgtcactggttgccgccatcgcttccggcctggccgtgccactggcctccctggccaacctcggctggcggttctctttgctgtgttggggtttgcccgcgctgctggcgctgttggtgtggctgccgcagctgcggcgctccgccacccccgtcgccaaagagccgcagccaacagagctgcaacgctatcgctctccctggggcagcgcactgggttggcaagtagcgatgttcatggggctgcaatcgatcgccttctacaccatcatcggctggttcagcgcctttgccgccagccacggcacctccgctcagcaggcgggtttcgaactgttcgtttaccaggtggtggcaatcgtcgccaactttgtcatggtggtgattttgccgcgtgcgcgcgatcagcgggcaatagcgttgggcagctcgctgctgatcttcatcggcgtcgggggattattggtgcaacccgccagttcactggtgtggctgacgtttgccgggttgggggcggggagttcgctggtgctggcgctgtcgttctttggattgcgcagtcagcatcatcatcaggcgacgctgctgtcgggtatggcgcaatccgtcggttatctgttagcggcgctggggcccaccctatttggcttactgcacgatctgacggaaggctggcgctggccgttgatcgccctgctgtgcctgaccgtcttgcaaatgctgttcggcgcgttggccggccgcagccgcgtgatcagctaa

SEQ ID NO: 436298 - DNA, 1653 bp, Serratia marcescens
atggaactgctacgggtggtttatcaccagtatcgttggccatttctggcggttatggcattgaccatgaccagcgccggcttaggcatcggtattattgcgtttatcaatcaatacctgatggacgccggcggcgatgcgttggccgtactgccaatgtttctcgccctgctggcattgctgatggcggtcacgctgggatcgcaattggcgctgacgacattgggccattacttcgtctaccgcctgcgcgggcagttagtgaagcgcatcctggataccgatattgaacgccttgaacagttaggcagcgcctcattgttggcgagcctgtccagcgatgtccgcaatatcaccgtcgccttcgtgcgcttgcccgaactggtgcaaggggtgattttaaccttggggtcggcggcctatctggggtggttatcgccgaaaatgttggcggtgacggcggtgtgggtcgccgtcaccgtggtgggcagcggctgcctggtctcgcgggtttatcgccatatggccagtttgcgcgagtcggaagagcgtctctatcatcattacgaatcggtgattgacggtcgcaaggaactgacgttaaaccgcaagcgagcgcaggcgctgtacgaacagacctatcaacccgatgcgcaaacttaccgccaccatatcattcgcgccgataccttccatttgagtgcgctcaactggtcaaatatcatgatgttaggcgcgattgggctggtgttctttatggctaacagcctgggatgggcggactcggcggtggctgccacctattccctgacgctgctgttcttgcgcacgccattactgcaggcggtgggggcgtttccgacgctggtcagcgccgaagtcgccttcaacaagctgaagacgctgcacttggccgagtaccaaccggcgtttcctgtcgccgcctgccgttcctggcagacgctggagctgcgtgacgtggtttttcactatgcagataaggaacagcagcccggttttgccgtcgggccgcttaatctgacgctgcggcgtggcgagctggtctttttgatcggcggcaacggcagcggcaagtcaacgctggcgatgctgttgaccggattgtaccgaccggtgagcggccacatcgtgctggatggcgtcgcccagaccgcggcggatatgccggactaccgccggctattttcggcgattttcaccgattttcatcagttcgatcgtttacaagggccggaaggcggtgaacccgatgcgaagctggtcgccgcctggctcgagcggttgaatatgaaaagcaaactgcagttcgacggcaccagggtgaccaacccgcaactgtcgcaggggcagcgcaagcgtctggctttgctgctggcggtggcggaacagcgcgatatcttgctgttggatgaatgggccgcggatcaggatccgcaattccggcgcattttctatcgtgaactattgccagaactgcgtgcgctgggcaaaacggtgtttgccatcagccatgacgatcactatttcgaatacgccgatcggttgcttgagatgcgctcgggtcatttacgtgagctgaccggcagcgagcgtgaacatgccagccgggattccgtcagcagaatcggttaa

SEQ ID NO: 436299 - DNA, 921 bp, Serratia marcescens
atgctcgccactcacgaatacgccaacgacctgattctgttcgccctgattgtcgactacggctcgttcagcaaggccgcggagagcgccggcatcaccagttcggtggtcagtaaacgcatcgggcggctggagaaatccctgggcgcccggctgctgtaccgcaccacgcgcagcctgacgctgaccgaaagcggccaggcgctctaccaacaggccaaagagatcggcgccaaagtgcaggaggcactgtacgccgtcagcgaaaaaagcgaagaattaaccggtaccatccgcatgtcggtgccgaccatttcgggcgagctgctgctgagcgagagcgtggcggagttttgcgcactgcatcccagtctaaaggtcgaaatgcggctggaaaaccgcttcgtcgatctggtggaagaaggcatcgatctggcgatccgtaccggcactatgccagattcgagcctgattgcccggccgatcttcgattcccgctgggtgatcgtctgctcgccgggctatttgaaaagccacccggaaccgcgcagcgccgaagacctgctcggccacaattgcctgacctacacctaccaggagagcggcaccgccaactggctgatgaaacggccggggcgcaacgaaatctacgagctgcaggttaacggcaacctgtcggccaacaatgcgcgggcgatccgcaaagcggtgatcggcggccacggcatcgccatggtgccgcgctgcatggtgtatgaggatttgcaggacggcaaactgacggagatcctggccggccactgcggcaaggtattgggcatttacgccgtctatccttacacccgcaatctgccgttaaaaactcgcctgctgatcgaacatatcatcggttcctaccaaaatatcagccactacttctga

SEQ ID NO: 436300 - DNA, 1584 bp, Serratia marcescens
atgcccctgctttttagtattgcgcccatcgtcctgctgatttggatgatgaccaaaaggaatggcgtgccctcttatctcgccctgccgctgacggccgccgcggtgtatgccgtacagctcctgtggttcgatgcctcgctgcggctgctgcatgcgaatatcatcaccgcgctggtgtcgacgctgacgccgatcaccatcatcgccggcgccatcctgctcaacaaactgatgcaggtaagcggcgcggaaaacgtggtgcggcgctggctggaaaccatcagccccaatcccgtggctcagctgatgattatcggctgggcattcgcctttatgatcgagggtgccagcggcttcggcaccccggccgccatcgccgcgccgattctggtcgggctgggcttcaacccgctgcgcgtcgccctgctgacgctggtaatgaactcggtaccggtctccttcggcgccgtgggcacccccacctggttcggctttgccaatctcggcctgtcggacgccagcctgctggagatcggccggcaaaccgcgctgatccacttcatcgccggcttcgttattcctctgctggcgctgcgctttatcgtttcctggcaggatatccgccgtaacctgccgtttatcctgctcagcgtgctgagctgcaccctgccctatctgctgctggcccaggtgaactatgagttcccggcgctggtcggcggcgccatcggcctggcactctcggtgctgctggcacgcggcggcatcggtctcgcccgcagcgacaaactgcagaacgccgggcaggcggtgccgttcttgcaggtggtcaaggccatgaccccgaccctgctactgattgctattctgatagtgacgcgcgtgcatcagttgggcctgaaggcgctgctcaacaacaccacgctgctgtggcaggaaaacctcggctggctcggggagctgcgcattagccaggcgctgatcgtcgaactgcagcaggtactgggcacctccgccgccgccggctacaaaacgctgtatgtcccggcgctgatcccgttcctgttggtggtggtgctgtgtattccgctgttccgtctgaatggcggccaggtgcggcaaatgttcagcgaaaccggcgggcgcatcgcgcggccctttatcgcgcttttcggcgcgctggtgatggtcaacctgatgatgcagggcggcgacaacgcgccggtgatcctgatcgggaaagcgttggcggcgctgaccggcgagagctggctgctgttctcttcgttcctcggtgcgctgggctcgttcttctccggttccaataccgtttcgaacctgacgttcggcggtattcagcaatcgatcgcccagagcagcggccttgacgtcaatctgacgctggctctgcagtccgtcggcggcgccatgggcaacatggtgtgcctgaacaacattatcgcggtctgttcgatcctcgggatcggtaacgccgaaggcaaaatcatcagaaagaccgtgctgccgatgctggcgtacggcgggattgcggccggtatggcagcgatcctcacgctctga

SEQ ID NO: 436301 - DNA, 1140 bp, Serratia marcescens
atgatcatctccgcgtcaaccgactaccgggccgccgcccaggccaaactgccgccgtttctgtttcactacatcgacggcggggcctacgcggagcatacgctgaagcgcaataccgcagatctggccgatattgccctgcgccagcgcgtgctgcgcaatatgtccgaactcagcctggagaccacgctgttcggcgagcagctggcgatgccggtagcgctggggccggtggggctgaccggcatgtacgcccgccgcggcgaagtgcaggccgcgcgtgccgcggccaaaaaaggcattccgttcacgctatccaccgtgtcggtctgcccgatcgaagaggtagcgccggcgatcgatcggccgatgtggttccagctctacgtgctgaaagatcgcggctttatgcgcaacgcactggagcgcgccaaggccgccggcgtgaaaacgctggtgtttaccgtcgacatgccggtgcccggcgcccgttaccgcgacgcccactcggggatgagcggccctaacgccgccctgcgccgcgtgctgcaggcgtttacccatccgcagtgggcctgggatgtcggcctgttcggcaagccgcacgatctgggcaacgtctcggcctaccgcggcaaaccgaccagcctggaagactacatcggctggctgggcgccaacttcgatccgtcgatttcctggaaagatctggagtggatccgcgaattctgggacggcccgatgatcatcaaaggcattctggatccggaagacgccaaagacgcggtgcgcttcggcgccgacggcatcatcgtctccaaccacggcggccgccagctggacggcgtgctgtcgaccgcgcgcgccatgccggcgatcgccgacgcagtgaaaggcgacattaccctgttggccgactccggcatccgcagcggcctggacgtggtgcgcatgatcgcgctgggcgccgacagcgtgctgctggggcgcgccttcgtctatgcgctggcggcggcgggcgaagccggggtggccaacttgctggatctgatcgacaaggaaatgcgcgtcgccatgacgctcaccggcgcgaaatccatcacggagatcaacgccggatcgctggtcagaaacgcctga

SEQ ID NO: 436302 - DNA, 810 bp, Serratia marcescens
atgtcagcagaacaatccgtactgaatcaaaatgccgaaccggactggaagaattacgacgatttcgcacgcggcatcgacaccaaccggctgccgggcacccaggactggcgcggcaaaacgttgcagatcgcctttgaagacggcggggacttcacgctgcgtttcagcgccgatcggcaacgggtgctctgggcctggggcggggagagcggcgaggacgcttacgaagaggtgcaaacctccgccgcacgctatttcttcaatattccgctgcagtcgccgggcaacgaatgcctgacgctggtgctcaaccgcgacagcggccgggcgctgctggtgcgcagcacgctactgcctgaacatgcggtagaaaaggggtctcgcctcaagcaaagcttccacgttgggctgattgcaggcgtcacgccgggcggcatcgcaccgcatttgacccgcgagctgatcggctatcgcacgctgaacgtctacagccccaaccattactacgagcacttctacgtcaacaccgagcgctacgcctggcaaaacctgcgcggcgaacagttcggccacggcgacatggactacgccacttactacaagtttgaggatgagatgttcctgttcaccttccgggaaaagattatcccggtgtgctcggtgttcttcttcgactttatctccgggcgctgcaccggcaccttcctcgggctggacgccgccggccgggtgctggtgtcaccggccggggcattcatcagcaagatgagctacaacgcgtacccggagggcgtgcagccgctgtga

SEQ ID NO: 436303 - DNA, 1266 bp, Serratia marcescens
atgaatacatcgccagggcctcgccgcgcattaagtgaagagaaccggttgctgattattttatttttcgtcttcggctgcgtgttcgtcgatcgtctgaccatctcgtttctgtttccgatgattgccgccgacctcaagctcagcaacgtgcatctcggcacgctgtcggcggtgctggcattgacttgggcgctgtctggcgcggggctgggggcgatagccgatcgctttaatatccgcaaaccgatgctgatcctgtcgatcctggtgttttcgctgttctccgcgttgtcgggattggtcagcgggtttgccatgctattgatcttccgggcgctcatggggatcgccgaagggccggttttgccgatcgcgcaatcgttgatggtggaaaaatcgcagccgcagcgccgcggtttcaacatgggattgatccagggcgcggcgccggggctgctgggcggcattatcgcgccgccgctgatcatctatctggcgcagaagtggggctggagcatggcgtttcacctgaccgccgtgccgggcatcattctggcgtggttgatctatcgccatgtgaacggcaaaaaagatcccgcctttatcgccgcgccggcgaccggtaaggcggcgggcaaagccgcttacggcgagctgttcaaaatcaagaacgtggcgctgtgcattctgatttcctgcgtgttcgtcacctggttcatgatcatcattaccttcacccctaactttttggtgaccgaccgtggcttcggtgaaggcacgatgggcggcatcatgagcgccatcggcgccgcctgggtcttctggggcgtggcggtaccggcgatctccgatcgccttgggcgcaaaccgacgctgattttcttttcgctgctggcggtgtgctgcccgctgttcctgagctacgtcgacaacccgtggctgctgggcgtgctggtgttcctgtcttataccggcctcggctgcttcacgctgtttatggccaccatcccgtctgaaacggtatcgccagcccgtattgccaccgcattagggctggtgatggggatcggcgaggtgattggcggctgcctggcgccgtttatcgccgggctgatcgccgatcgctatggcctggtcagcgtgatgtggctggcggctgccggcgcggtctgcgccggcgtactgagctgttttctcgatgaaactgcacccgcggtggtgagccgcagaacggtgaaaccggcgagcgtcgccgacgtgtaa

SEQ ID NO: 436304 - DNA, 918 bp, Serratia marcescens; identical to SEQ ID NO: 429761

SEQ ID NO: 436305 - DNA, 432 bp, Serratia marcescens
atgacggcaaaactgacagaagcgggcttttggcgcaaaaccgccgactcttcatcgctgcgcgagccgcgcgtgctgatccgggtctacgtcgacgaaggccagattgaccacgccatcgcgttttacgagcagctgcacggcgtggaagcggatatgcgttttgactttcccgagcatcggttggtgctggcagcggtaggaccgtttctgatcctggaaggcgcggaagaaaacctgcgcccttttcgcagcaccgtcggcacgctgctggtcgatgacatttacccttaccaccagcggctgctggcgtccggagccgagatcttcttcggcccggtggaagtgcccaccggcgcctgtttcaatgcgcgcctgccggacggcacgattgtcgagtacgtgcatcatcggccgcgcgcggacgaataa

SEQ ID NO: 436306 - DNA, 1545 bp, Serratia marcescens
atgacaatgaaaactcccccatcgcttgacgaagaacctgtcagattaaatgtcccggtatttttcggttcagcggcagtgatcctgctgctgggatcgctgattgtgctgtttcccgccgccagcaaacagtggttgaatgtcgcgcaaagctgggtggccgatgtgttcggctggtattacatgctgctgatggtcgcctgcatggcgttcgtgttctggctggcgctgtcgcgctttggccatattcgcctgagccaggatgacgagccgccgcagttcagctacccctcctgggtggcgatgctgttctcgtcgggcatcggtattgcgctggtgtattacggcgcctatgagccgctggatcacttcctgtcgccaccggaaggcagcggcggcagcgtacaggcggcgcggcaggcgatggcgctgacctttttacactgggggctgcacggttgggcgctgtatgcgttgatcgccaccgcgctcgcctatttcgcctattgtcgcggtttgccgctggcgctgcgttcggcgctgtacccgatcttcggcgagcgtatccacggtggcgtcggccatctggtggacagcttcggcattctggtgacggttatctcgatggtgaccaacctggggatcggcgcgctgctggtgaactcggggctgttttacctgttcgacatcccgcaaagcaccggcgtactgctggcgctgatcgtggtgatgatggtggtggccacgctggcggcggtcaccggcgtcgagaagggcattgccatgctgtcgaacatcaacgtcggcttcttgtgcctgctgctgctgttcgtgtttctggccgggccgacgctgaacctgctcaacggcatgttgcagaacctcggggattatctgacctcgctcgtcagccgcagctttgatatgtatctgtacggcaaggcgcgccaatggcagggtgcctggacgctgttttattgggcctggtgggtggcgtgggcgccgttcgtcgggctgtttatcgcacgcatttccaaaggccgcaccatccgtgaactgatcttcggcgtgttgctgatcccgctcgggttcacgctggcgtggctgtcgatcttcggcaataccgccatcagcctggtgctggaaggcgggcaggcgatcctggggcaggtagcgcaaagcgatccgccgatggcggtgttcaagctgttcgaatacctgccctatacccagctgaccgccggtttcgtggtggtgataagctttgtgctgttcctgacgccggtcgactccggcacgctgatgatagctaacctctcctgccagggcggttccgcgcacgatgacgcgccggcctggctgcgagtgttctgggcggcggtcaccacgctggtgtgcgccgggttgctgtacgccggcagtttcagcgcgatgcagaccgcagtggtgctgtgcggcctgccgttctcggcggtgatcgtgctgtacatggtcagcctgcgcaaggatctgcgcggttacgccatgacgccggcgatcccctga

SEQ ID NO: 436307 - DNA, 597 bp, Serratia marcescens
atgtaccgcagagacattcctgagcagcgcaaggagcagctgattaatgccgccttcgaaaccatcagcgtggtggggctggccggcgtcaccctctctcaggtggcgaaagaggccgggctgtcgaccggcatcgtcagccactattttggcgataaagaaggattgttgagcgcgaccatgcgcaagatcctgcgcgatctgcgcgacgcggtggccgagtgccgcgctcaggcggcaagcgacagccagtcgcagctgtgcgccatcattcagggcaacttccaccccagccaaaccaacgctatttccatgcgcgcctggctcgacttctgggccgccagcatgcaccagccggtgctgcgccgcctacagcgcgccaacgatcggcggctctattccaatatttgcagccagttccgccgcgagctgccgctgcagcaggcgcgcgacgcggcgcgcgggctggcggcgatgatcgatgggctttggctgcgcggtagcctggccggggatgacaccgatctgcagcaggattaccgcatcgcctgcgactacgtgatacaacggctcagggccgcgccatcggcggagtga

SEQ ID NO: 436308 - DNA, 1773 bp, Serratia marcescens
atgatggatcgttcccgtttgctgaaattcctgctgccctatctgtggccgaaagataacccgcggctgcgttggtatctggtggtggccttcgtgttcatggtggcggccaaggtcagcaccacgctggtgccgctggcctacaaagcgatggttgatgcactgagcggcgagacggcgaaaatgctggcggtgccgctggggctgatcgtcgcctacggcgtggcgcgggtgggcggcgcgctgtttgaggaactgcgcaacgtgatgtttattcacgtcagccagaacgccacgcgcctgttgggcgtgcgggtgttccgccagctgcatgcgctgagcctgcgtttccatctggagcgccagaccggcggattgtcgttgtccatcgagcgcggtactcaggcggtgtccacggtgctgtcgcggctgctgttctccatcgtgccgatcctgttcgagctctcgctggtcacggcgatcatgtggcatatgctgaacggctggttcgcgctggcgatcctgacgacggtcggttgctacatcctgttcaccgtgctggcggtcagctggcgcacccgctttcgccgcgagctcaacaaggccaacgccgacgccaacagcaaatccatcgacagcctgctgaactatgagaccgtgaagtacttcggcaatgaagagttcgaggccgagcgtttcgacctgtcgcgccggctgtacgaatacgccgccatcaagaaccaattcagttttacggcgatcaacctggggcaaaccgccattatttcgatcggactgatcgtgatgatgaccatggcggcgcggggcattacgcaggggacgatgacggtcggcgacttcgtgctggtcaacgcctatctgctgcagctgtatcagccgctgaacttcttcggctttatttattccgaggtgcgccaggcgctgatcgacatggagaacatgttcgatctgctgcaggaaccgcgtgagatcgtcgatagcccggatgcgcagccgctgcgcctcgatcgcggcgaagtgaggttcgacgcggtcagcttcggttacgacacgcgccggccgatcctcaagcaggtgagctttaccattccggcgggccacacggtggcggtggtcggcgcctccggcgcgggcaagtccacgctgtcgcgcctgctgtttcgcttttacgacgtgcaggggggcgccattaccctcgacggccaggacattcgccaactgacccaggccagcctgcggcaggcgatcggcatcgtgccgcaggatacggtgctgttcaacgatacgttgcgttataacatcggttacggcaaaaccggctccagcgatgaagaaatcgagcgggcggcgcggctggcgcatatccatgattttatcgtcggtctgcccgacggttacgacacccgggtgggcgagcgcgggctgaagctgtcgggcggggaaaagcagcgggtggcgattgcgcgcaccattctgaaaaatccggccatcctggtgtttgacgaggcgaccagcgcgctggatacccagaccgagcgcgaaatccaggggcacctgcgcgaggtgagccgcaatcacaccacgctggtgatcgctcatcggctctccaccgtggtggatgccgatgaaattatcgtgctggaggcgggggagatcgtcgaacgcggggggcacgaggcgttgctggccgcgaacggccgctacgccgccatgtggcaaacccagtacagcgaagagcaggaaccgcactga

SEQ ID NO: 436309 - DNA, 858 bp, Serratia marcescens
atgacccagacgtatgcaaagcgctttgcgctggtctttgactatatcgaccgccacctggacgaggcgctcaccgtcgaaaaactgagcgaagtggcccacttttcgcgctttcactttcaacgccagtttagcgcgtattgtggcatctcggtgtggcgttatatccagtggatgaggcttaaacgcgcctcttaccgcctggcgtataacccgctggagccggtgattgacatcgcgctggacgccggttttcaaaacccggagtccttcagccgcgccttcaaacaggcgttcagccaaacgccgagccagtttcgcaaacagccggcctggatcgattggcagcagcgctttcccgagccgaaacacaaaaggaaacaacccatgaaggtagacattgtcgatttcccggccacgccagtggcgatgatcgaacatagcggcccgcccgcgctggtcaacgaaaccgccgcacgctttatcgagtggcgcaaaaccagcggcctgtcgccggtcagaagcagccgcacttacggcattgcaccgcacgatccggccaccaccgacgcgcaagacttccacttcttcatttgcggcgaggtcactgcaccgatcccggaggacaacgcctctggcgtggtgaacggcacgctgccggccggacgctgcgcggtgctgcgccatcacggctcgctggatgggctctcggaaagtgcccactatctgtaccgcgagtggttgccggccagcggcgaggagctgcgtgactttccgctctatttccactaccacaacttcgtgcacgaggtggcggaatatgaactggtgaccgatctttatctgccactgaaatag

SEQ ID NO: 436310 - DNA, 807 bp, Serratia marcescens
atgttacactgtgcggctgacgcgtatcagaaccgaaaagacgattggggacaggatttgagcacaggaagcaagctggcgaggtggcgccgcatcgcggtgtgtctgacattggggctattgttggccgggtgttcgggtaaaaatacctacaaccgtgactacgacaaactgccgaagggcagctacaccggcaagtcttacaccgtcaaacggggcgatacgctgtactacatcgcctggatcaccgacagcgaagtcagcgatctggccagaatcaacaagatacgcccgccttatagcctggaagtggggcaaaagctgcggctgagcggcagcgcgccgaccaaaaccgccgccacgcgccgtaaaacgtcttcctccgcgatcgccaagcaaacgccgccgccgggcgccgcacgttgctggcgctggccgaccagcggccggatcgtgcaggcgtactccaatgccgatggcggcaacaagggcatcgacatcgccggtaagcgcggccagccgatctatgcttccgccaagggcaaagtggtgtacgtcggcaaccaactgcgcggctacggcaacctgatcatgattaagcacggtgaagactttattaccgcctacgcgcacaacgacaccacgctggtgcgcaacggccaggatgtgaaagcggggcagaagattggcaccatgggcagcaccggcaccgattcggtgttcctgcatttccagatccgctaccgcgccaccgcgctcgatccacagcgctatctgccgccgcagggatcgtcgccgtcctgttaa

SEQ ID NO: 436311 - DNA, 630 bp, Serratia marcescens
atgacttttaaatataaccgattagataaggcacaggccgccgtgttattagtcgatcatcagacggggctactgtccctggttagagatcaggatccggataaattcaaaaataatgttttggcgctggccgatctggctaaatacttcaatttaccgacgatactgaccacgagttttgaaaacggaccgaacggccctttggtgccagagctaaagcaaacgttccctgacgccccctatattgctcgtcccggcaatatcaatgcctgggataatgaagatttcgtcaaggcggtaaaggccacgggcaagaaacaactgatcatcgccggcgtggtgaccgaggtttgcgtggcgtttcctgcgctctctgcgttggaagaggggtatgaggttttcgtcatcaccgacgcatccggcacgttcaatgcgattacgcgcgatgcggcttgggatcgcatgtcccaggccggcgcgcagctgatgagttggtttggcgcggcgtgcgaattgcaccgcgattggcgaaatgatatcgaagggttggggaacctgttctctcaacatatccctgactatcgcaatctgatgaccagcttcagtttgctgacctcaggtaaacagtaa

SEQ ID NO: 436312 - DNA, 339 bp, Serratia marcescens
atgacaacccattccaacccgttgaactcgcgggaagtctgcctgcaattacgccattttaatcaggtaatcgggcaacaatgccgcaatatggcgcgccaaaaaaccacctgcccgtgctgcctgacggacatcgccaccggctgcgacgccggtatcaaactgtgtggacagcagttggccaaacccaacccgcaaaccccgttattccggcagattcgcaacttgctgctcgatctgcgcgcagaagcgataggagttcacagaatagacgtcctgaaccgcaccaataacgaaatatcctggctgttgcgcgagctgtatttcgagacgttctga

SEQ ID NO: 436313 - DNA, 996 bp, Serratia marcescens
atggtgaagtcgcagcgaattacgttaaatgacattgctgtactggcgggtgtaaccaaaatgacggtcagtcgctatctgcgcacgccggacagggttaaaccggaaacagctgcgcgcattgccgccgttatcgaggaagtcggctatcaggccgatcccgacaatcccgccctctattccaatagccctcccctcatcggcgttctggttccttcttttaacaatctgatatttgctgatgtcctcgccggcattgaatccgtgacgtctatacagggttatcagacgctggtcgtcaattatgactacaacagcaaacgcgaagaggagcaaattgccgcgatcctggcttttaagataaaagggctgctgctgaccgagtcggtccatagtctgcgggcggaaaaattcctgaagacggcaaaaatacccgttgctgaaatcatggggctgtcaggcaatacagatcgaattaacgtgggttttgataatgtgaaagctggctacgatatgaccaccatgctgctggccagcggtaaaaaacgcattatctattttggttcaatgtctgatatccgcgatgaacagcgttatacgggatactgtcaggcaatggctaaccatgatttacctaccggtcgtatctcccccaataagatctcttccatttcgattggaacaggcatgatgacgcttgcgagccagatgtatccggatatggatgggattctctgtaccaacgacgatctggccgtgggcgtgttacaggaatgtctggcaaacggtatcagcgttccagcgcaaattgccattgccggatttcacggtcttgagatcgggcagatcattacccctcggttagccagcgtattgacgccacggtatgagatggggaaagtggcgacagaaatcataataaaaaaaattaaagggctgccgaccattgaacgtgtcgatctccacttccgcctgtcgatgggggagacaatataa

SEQ ID NO: 436314 - DNA, 588 bp, Serratia marcescens
atgtcgttgcaaatcgtgcttacccgcagggaggcgctgggaaaaatggtgggcgtcatcgtcgccgccagcctgttgccttattcaaatataacctatgccgaacgggcacaaattgccgcctcgcccgttgaatacgcgcaatttttgcaaatttcgagaaaaattaccgagtttgacgatttggacgtcaccctctccgcccgctatttttccgcactgcgcgaacattttccgcagttgaactcgcaactcaacgccctgttcaccctgagccagcaagctaccgatgcggaaaccttgaaccgacatgcgattgaacaggggcagagggagcttattcaggccatcgtgaccgcgtggtataccggaaccgtagatccttcaagcgccgagcagggtcagttgattacctataaagaggcactgatgtatcgcacggttcaggatgccctgatcgtgccgacctggtgcaattttggcccgctgtggtggaccggcctgccgccgggcgttacccgccaaccttccattcccgcaacagatttgcctgccgtagccgataaaaaatatgaggaccgcgtgtga

SEQ ID NO: 436315 - DNA, 471 bp, Serratia marcescens
atgattattgatgctttaaccactgccgtaaataataggttctatccggcggccatccgtaaaatgctggccagtattattgaaaatgagccgtacaatttacctgtcgggcactatcaggtgcagggtaaacagatgttctttaacgtcgttgaaggggaaaccaaactattggccgaccagaagccagagtttcatcgccagtatctggatatccatcttgtcctggaagggaaagaagtgattggcgccggggttctggggctacctctgcccctgagtgagccgtttaacgaggcgcacgatcttgggtttagcccggcgatccccggtgagactctcatccacctgcaacccggtgaactggctgttatcttcccgggtgagttgcaccgcccgatgagtacctgcacggcaccggcagctctgcgtaaaattgtggcgaaaatcgactgcgccctgctgacgtag

SEQ ID NO: 436316 - DNA, 951 bp, Serratia marcescens
atgcacactgacactcaacctaccattttacttatcgcgccggtgatggatgctttacaggccgcgttggacgccagttaccgggtattccgtctctatgaacaatcagatattccagccttcctggctcgccatggcgcagacgttcaggcggtggtcacccgtggcgacgtgggggtaacccgggagacgctggagcagctgccgcaggcgggcatgattgctgtttttggcgtgggaaccgacgctatcgacctcaactacacccgggaacgccatatcagcgtcgggatcaccgccggcgtgctgaccgatgatgtggccgatctggcgatggggctaatgctgtccgccagccgccgcctctgccaaggagaccgttttgtacgcgaaggccgctgggaaacgacgccgccaccgctggcgaccaaagtgagcggtaagcgcatcggtatttttggcatggggaatattggccaagccatcgcccgccgggcgaaaggcttcgatatgaccatactgtatactgaccgccggcgcaaagacgacctggattacccgtggtgcgccgatctgcacacgctcgcagcgcagagtgatttcctggtgatcgcggcatctggcagtgcggaaaaccgcgggattattgatgccagcgtatttaacgccatgcccgatcgtgcctggcttatcaatatcgcccgcggcagcctggtcgatgaggcggcgctgataaaggcgttacaaaatcatgttatcgccggggccgctctggatgtgtttgaaaacgagccccatgtcccgacagcgttctttgcgctcgagaatgttttgcttcagccccacgtggccagcgctaccgtagaaacccgccagggaatgagccaatccgttttggataatctcgcaggttatttttcccatcaggatattcctggcttaattcaataa

SEQ ID NO: 436317 - DNA, 1311 bp, Serratia marcescens
atgaccgataaaataccaggaactcgctggctgcgggttatcgcgccgatccttgtcacctgcattatttcatttatggatcgcgttaatatcagctttgctctgccgggcggcatggaacaggatttaggtattaccagccaaatggctggcgtggccagtgggatattttttattggttatttatttctgcaaatccctggcggacgacttgcggtttacggtagcgggaaacgttttatcgcctggtcgctcgtggcctgggcgattgtctctatcgccaccggctttgtcacccatcagtatcagctgctcgtgctgcgttttattctcgggatctccgaaggaggaatgttgcccgtcgtgctgaccatggtcagcaattggttcccggaaaaagaactgggccgggccaatgcctttgtcatgatgtttgccccactaggggggatgctgaccgccccagtttccggcgcgattattgccactctcgactggcgctggctgttcattatcgaaggcttgttgtcggtcgtggtgctggccatttggtggctggtgatcagtgaccgcccggaagaggcgcgttggctgccggcgaaggaacgcgactatttattaaccgagctggcccgggagcgcaaagcgcgagaagggatggtgccggcggcaaaagcaccgttaaaagcggtgtttcgcaacaagggattgatgcgcctggtcgtgctgaatttcttttaccagaccggagactatggatatacgttgtggctgcccaccatcttgaaaaacctgaccggtggcagcatggccaatgttggggtattggcgatcctgccgtttgttgccactctggcggggatttatgtgatttcgatgttcagcgatcgcagcggtaaacgccgtttgtgggtcaggatctccctgtactgttttgcggcggcgctgatagcctcggtgatcctgcatgagcacgtggtggccgcctatatcgcgttggtggtgtgcggcttcttccttaaagcggcgaccagccccttctggtcaattcccggacgcattgcgacggcagaagtggcgggcagcgcacgcggggtgatcaacgggctgggcaacctcggtgggttctgcggcccctatctggtaggcgtcatgatttatgtgtacggacagaacgtcgcggtttgcgcgctggcggcatcgctgctgctggcgggaagtatcaccttcctgctgccgaaagaatgcgatcgctcctgcgaagaaacggataaccgcctgccctccggggctaaacagaaatggagctaa

SEQ ID NO: 436318 - DNA, 1518 bp, Serratia marcescens
atgtctgaacaacaagtacagggcgccgatcaggcgctggatctcaataacgaactgcagtcccgccgcgagaagctggccggcctgcgtgagaacggcattgcgttcccgaatgacttccgtcgcgattccacctccgacaaactgcacgccgcgtacggtgataaagacaacgaagagctggaagcgctgggcgtagaagtgaccgtcgccggccgtatgatgacccgccgcattatgggcaaggcatccttcgttacgctgcaggacgtgggcggccgcattcagctgtacgtcgcgcgcgacgatctggctgaaggcgtgtacaacgagcagttcaagaagtgggacctgggcgatatcctcggcgcgcgcggcaagctgttcaaaaccaagaccggcgaactgtcgatccactgcaccgagctgcgtctgctgaccaaagcgctgcgcccgctgccggacaaattccacggcctggcagatcaggaaacccgttaccgccagcgttacctggacctgatcgccaacgaagagtcgcgcaacaccttcaaagtgcgttcgcaggtgatgtcggctatccgtaacttcatggtggaacgcggcttcatggaagtcgaaaccccgatgatgcaggtgatcccgggcggcgcgtccgcgcgtccgttcatcacgcaccacaatgcgctggatatcgacatgtacctgcgcatcgcgccggaattgtatctgaagcgcctggtggtcggtggcttcgaacgcgtgttcgaaatcaaccgcaacttccgtaacgaaggcgtttctccgcgtcacaacccagagttcaccatgatggaactctacatggcttacgcggattacaaagacctgatcgagctgaccgagaccctgttccgcaccctgaccgagaaagtgctgggcacctctcaggtgcagtacggcgacgaagtgttcgacttcggcaagccgttcgagaagctgaccatgaccgaggcgatcaagaaataccgtccggaaaccgatctggctgacctggccgacatgggtaaagcggtggccatcgccgaatccatcggcatcaaggttgagaagagctggggtctgggccgcgtcgtgaccgagatcttcgaagaagtggcggaaagccatctgattcagccgaccttcatcaccgagtacccggctgaagtgtcgccgctggcgcgccgcaacgacgtgaacccggaaatcaccgaccgcttcgagttcttcatcggcggccgtgaaatcggcaacggtttctccgagctgaacgacgccgaagaccaggcgcagcgcttcgccgatcaggtgaacgccaaagacgccggcgacgacgaagcgatgttctacgacgaagattacgtcaccgcgctggagcacggcctgccgccgaccgccggtctgggcatcggtatcgaccgtatggtcatgctgttcaccaacagccacaccatccgcgatgtgattctgttcccggcgatgcgcccacagaaataa

SEQ ID NO: 436319 - DNA, 837 bp, Serratia marcescens
gtggaagccgacgacgaagaaaccttcaacgaagcggtcgccgagctggatcaactgatgagcaagctggatcagttggaattccgccgcatgttctccggcgaatacgacagcgccgactgctacctggatatccaggccggctccggcggcaccgaagcgcaagactgggccagcatgctgctgcgcatgtacctgcgctgggccgaagccaagggcttcaagaccgaagtgatcgaagaatccgacggcgacgtcgcgggcctgaaatcggccaccatcaagatcatcggcgactacgcgttcggctggttgcgcactgaaaccggcgtgcatcgcctggtgcgcaagagcccgttcgattccggcggccgtcgccacacctcgttcagctcggtgttcatctacccggaagtggacgacgatatcgatatcgaaatcaacccggcggatctgcgtatcgacgtgtaccgcgcctccggtgcgggcggtcagcacgtcaacaaaaccgaatccgccgtacgtattactcacctgccaaccaacatcgtggtgcagtgccagaacgatcgttctcagcataagaacaaggatcaagcgtttaaacagctgcgagccaagctgtacgagtttgagatgcaaaagaaaaatgctgataagcagacgatggaagacaacaagtccgacatcggctggggcagccaaatccgttcttacgtgctggatgactcccgcatcaaggatttgcgcaccaacgtcgaaacgcgtaacacgcaggccgtactggatggcgacctggataaattcattgaggcaagtttgaaagccgggttatga

SEQ ID NO: 436320 - DNA, 387 bp, Serratia marcescens
atggacattttcgtcacggatgatttcgacaaatttatgaagaaaaatcgcatcgtcgatcaaaagatttgcaccgcggctcacgaactcgcacacggtaaccatgacggcgatctgggcggcggcgtctacaagaaacgtatttcgctcaatcggggtaaacggggtggcgctcgatccatcgtggcgtttaaacgcggtcgtcatcagtattttattgatggatggctggaaaacaccgtaaaacagaacggtgcaaaagaaatcaacgatgatgaattggcaacctatcgcgagctcgccagagattttcttgccatgccgccggaaattatcaaacgagccatcgatagcggctacttgcgagaggtgaaatgcgatgactga

SEQ ID NO: 436321 - DNA, 345 bp, Serratia marcescens
atgactgataatcgcctgctcagactgcaaaaaatggcacagcgttttaatgagatcggtgcggtgtcagacgataccgtacgcaacatcgccacacgagtacaggcgcaggaacaacatgcccagcgtgagcagcatgatcaaatggacggcgcacgcatcaaaatgctgcgcagacggctcggcttgagccaggccgatttagcggccgtggtcaacatgtcgaccaccagcgtacaaaaatgggaacgtaacgcggtaaaaccccagggagccgcgctcagaatgctggaaattatcgaacagaaaggggtcgccagcctgatcatctcaccacgaaactga

SEQ ID NO: 436322 - DNA, 1734 bp, Serratia marcescens
gtgagtattaaaacgcaactacgccgccgcccggcggcggacgacacgcatttgcccgccagtttgccgccgctgctgcgtcggctttacgccctgcgcggcgtgcaggctgagcaagagctggaacgcggcgtcaagggcatgttgccctggcaacagctggacggcatcgacgacgccgtcagcctgctgcaacaggcgctggccgacggcagccgcatcatggtggtgggcgatttcgacgccgacggcgccaccagcaccgcgctgacggtgctggcgctgcgcagcatgggcggcgcagccgtcgattatctggtgcctaaccgtttcgaagacggttatggcctgagccccgaagtggtggagcaggcggcggcgcgcggcgcagaactcattgtcaccgtcgataacggcatctcctcccacgccggcgtcgacgtggcgcacgccaagggcatgcaggtgttggtgaccgatcaccacctgccgggcgagaccctgccggcggccgaagcgatcgttaaccccaacctgcgcggctgcgccttcccgtccaaatcgctggcgggggttggtgtcgcgttctacctgatgctggcgctgcgcgcccgcctgcgggacagcggctggttcgagcagcgcgcgctggcgatgcccaatctggcggagctgctggacctggtggcgctcggcaccgtggccgacgtggtgccgctggatgccaacaaccgtattctggtgtatcaggggttaaaccgcatccgcgccggcaaatgccgaccgggcatccgcgcgctgcttgaagtggctaatcgcgatgcccgccaactggcggccaacgatctcggtttcgctctcggtccacgcctcaatgccgccggccggctggacgacatgtctatcggcgtggcgctgctgctgagcgacgacatcgcgcaggcgcgcatgctggccaacgatctcgatgcgctgaaccagacgcgacgcgagatagagcaaggcatgcaggtggaagccctgcagctgtgcgatcagctggagcgcaccagcaccgagctgccttacgggctggcgatgtatcacccggaatggcaccagggtgtggtgggcatcctcgcttcgcgcatcaaagagcgtttccaccgcccggtgatcgcgttcgcaccggcgggcgacggcatactgaaaggctccggccgttcggtgcccggcctgcacatgcgcgatgcgctggagcggctggatatgctgaaccccgggctgatgatgaagttcggcggccacgcgatggcggccggattgtcgctggaagaggccaaattcgacgagttccgccagcgtttcggcgagttggtgggtgaatggctcgatccggcgatgctggaaggggtgatctggtccgacggcgaactggcgatgcaggagctgtcgctgacaacggcggagctgctgcgcgagggcggcccgtggggccaggcgttcccggaaccgaccttcgacggcaagttccgcatcctgcagcagcggctggtgggcgagaaacacctgaagctgatggtggagccgctcggcggcggcccgttgctcgacggcatcgcgttcaacgtggacaccacgctgtggcctgacagcagcgtgcgcgaggtggaactggcctacaagctcgacgtcaacgagtttcgcggcaaccgcaacgtgcagctgctgatccagcatctttggccgcgctga

SEQ ID NO: 436323 - DNA, 717 bp, Serratia marcescens
atgaaaaaaggtttaatgctgctctctctgctggtggcttcggtggccggcgccgcccatgccgatgacgcggcgatcaaaaaagcgctcgccagcctgggtatccagcaggcggacgtgcagccttcaccggtcaacggcctgaaaaccgtgctgaccgacagcggcgtgctgtacgcctccgaagacggcaagcacatcctgcagggcccgctgtttgacgtcagcggcaaagagccggtcaacgtgaccaaccaactgctgggcaccaagatggacgcgctgaaagatcagatgatcgtttacaaagcgccgaaagagaaacacgtgatcaccgtgttcaccgatatcacctgcggttactgccacaaactgcatcagcagatgaaagagtacaacgatctgggcattaccgtgcgttacctggcattcccgcgccaggggctggcttcccaggctgaaaaagacatgcagtcgatctggtgcaccgccgacaaggccaaggcgttcgacgccgccatgaagggcgatgccgtttctccggcgacctgcaaaaccgacatcagcaagcattacgagctgggcgtgcagttcggcattcagggcacgccggccatcattctggaaaacggcatgatgatcccgggctatcaggggccgaaagagatggccgccatgctggatgcgcaccaggccgccaccaaagccggtggttaa

SEQ ID NO: 436324 - DNA, 936 bp, Serratia marcescens
atggcgcgggtggaaatgcaacaaagagaggaccgcgtgcaacagcaagacaatgcgctgattgaacaattcctggatgcgctgtggcttgagcgcaatctggcggaaaatacgctggcctcctaccggctggatttgcaggccctgggcgcctggcttggccagcaaaataccaccttgctgcaggcgcaggcgttggatttgcaggcgtttctcgccgagcgggtggacggcggctacaaggccaccagctccgcgcgtttgttgagcgccatgaggcgcctgtttcaatatctgtaccgcgagaagctgcgcgccgacgatcccaccgcgcagctggcgtctcccaagttgccgcagcgtttgccgaaggatctgagcgaggcgcaggtcgatgcgctgttgcaggcgccctgcgtcgatcaaccgctggagctgcgcgacaaggcgatgctcgaagtgttgtacgccaccgggctgcgggtttccgagctggtggggttgagcatcagcgacgtcagcctgcgccagggcgtggtgcgggtgatcggcaagggcaacaaggagcggctggtgccgctgggcgaagaggcggtctactggatcgaaaattacctggagcacggccgcccatggctggtcaacggccagacgctggatgtgctgttccccagcacccgctgccagcaaatgacccgacagacgttctggcatcgcatcaaacactatgccatccttgcgggcatcgacagcgagcgtctgtcgccgcacgtgttgcggcacgcgttcgccacccatttgctgaaccatggggccgatctccgtgtcgtacagatgttgttagggcacagcgatctctcgaccacgcaaatttatacacatgtagcgaccgaacgactgaaacagctacatcaacagcatcacccgcgcgcctga

SEQ ID NO: 436325 - DNA, 519 bp, Serratia marcescens
atgaagattggtctgttttacggctccagcacctgctacaccgagatggcggcagaaaaaatccgtgagattctgggtgaagacctggtcgacctgcacaacctgaaagacgtctcgcccaagctgatggaggactattccattcttatcctcggcatcccgacctgggatttcggcgaactgcaggaagactgggaagcgatctggccgcagctgccggcgctggatctgaaaggcaagatcgtcgccatgtacggcatgggcgatcagctcggttacggtgagtggttccttgacgcgctgggcatgttgcacgatcacatcgcgccgctgggcgtgcagttcatcggcttctggccaactgagggcttcgagttcaccagccccaaaccgctgagcgccgacggcaaacacttcgtcggcctggcgctcgatgaggtcaaccaatacgatctgagcgaagagcgcctgcagcaatggtgcgaacagatcctgctggagatggagccgctgctgtag

SEQ ID NO: 436326 - DNA, 1362 bp, Serratia marcescens
atgaaatcggtacttttctggaaaataaccacgctgctgggattgatggtggtgatgttgatccccatcgcccagctgatgagcgtgatcgacgaacgcagcggctatcggcaaagcgtggtcgggcaggtgagcgaaagcaccagcggggcgcagcgcgtgctcggtccgttgattgtcattccctatgtcgaacgcgaagagaagaaagacgagaaaggacaaacggtagtgcagcgggtgcagcattaccgctatttgctgccggagtcgcttcaggtacagggcgcgccgaatgtggaggtgcgcaagttgggcatttatcagacgcaggtttaccaggggccgctgaacttcaaggtgcgtttcggccagccggagctgacggatttgcaacgcgccaacgtgaccgtcggccagccgttcctgctggtggcgctgagcgactctcgcggcatcaagcgcatttccccgctggcaatgccgcagccggtggcgtttgaaccgggcaccggcgtgggatcgttgcgccaggggatccacgccccgctgacgctggcgatgctgcaacaaaaagaggggctgaacgccgacttcaccctgacgttggcgggcaccagtagcctgtcgctggtgccgctggggcgcagcagcgagctgcagctgcaaagcaactggccgcacccgaatttcctcggcaacttcctgccggacgaacgcaaggtgacggagcaagggtttagcgctcgctggcgcagcacctggtttgccaacaacatcaacagtgcgttctattacgacgatgccattatcgacgaggacaagctgccggccttcagcgccagcttggtcgaaccggtcgatcactaccagctgaccgagcgcgcggtcaaatatgcgctgctatttatcgggctgacgtttatggcgtttttcctgttcgaaaccctgaccgggctgcgggtgcacccgattcagtacctgctggtcggtgcggcgctggtgttgttctacctgattctgctggccttctccgaacacctgggattcgctctcgcttatctggcggccagcatcgcctgcagcgggctgatcggtttctatctgagcgccgtactgcgcggcaagctgcgcggtgcgctgttcgccgcgagcctattgttgttgtacggcgtgctctatttgctgttgcagtcggaggacaatgcgttggtgctgggagccgggctgctgttcgccattctggcgggcattatgctgttgacgcgcaaactggactggtatcaggtggccgatccggcgcgtttgaccaaggaaacgccggccggggaagacgaaccacgcttccggctgtggaaataa

SEQ ID NO: 436327 - DNA, 1419 bp, Serratia marcescens
atgaaaattggcctgcgcctgctgctgggatattttctgatcgtggcggtggccgggtacttcgtgctgagcattttcgtccaggaagtgaagcccggcgtgcggcgcgctaccgaaggcacgctggtggacaccgccaacctgttggcgcaaatcgcccgtcaggacatgcagcgcggcgatgcggcgcatggccaactggcgcaggcgttcacgcagctgaaccagcggccgatcggcgccaatatctccggcatccgcaaggatcgcagtgaataccacgtctatcttaccgatgcccagggccgggtcattttcgattctgccggccgcgcgcaggggcaagactactcgcgctggaatgacgtttatcggacgctgcgcggccagtacggcgcccgcagcacccgtagcgatccagaagatgaaaacagttcggtgatgtatgtggccgcgccggtgatagaacaagggcgtattatcggcgtgctcaccgtgggcaaacccaacagcaccatggcgccggtgatcaaacgcagcgaacggcgcattctatgggccggcgcgttgctgctggggattgcgttgctgatcggcgtggtattcgtctggtggatcaaccgttcgataggccggctggtgcgttatgccgacggggtggcgcaaggggaaagcgcgccgctgcccaaagtgggcgggcgggaattgacgcagctggcgcaggcgttggagagcatgcgactgaagctggaaggtaaagcttatatcgaacagtatgcacataccctgacgcatgagctgaaaagcccactggcggcgatcaggggcgcggcggagctgttgcaggagctgccaccgccggataccgcccggcgttttctcaccaacatcgagcagcaaagcgcacgcatccagcagctggtggacaaactgctggtgcaggcgcggctggagagccggccagacatggagaccgcgcccatcgcgatcgcggcgctggtcagccagacgatggcgggcaaagaggcgcaggcgatgcagcgcggcgtcagattgcaactggaggcgttggcggaggtgacgctgaacggcgatgcgttgctgatcagccaggcgttgaccaacctgctggacaacgcgatcgactttaccccgtcgggcgggtgcgtcagcgtgcgaggcgaacggcgggaacagcattactgcatcagcgtctgtgacgacggcagcggcattcctgactacgccctcgataaagtgttcgaacgtttttattcgctgccgcgcgccgaacggccgaaaagcagcgggctgggcctgaacttcgtgcaggaagtcgcccgtctgcatcatggcggcattcacctgcgcaaccgccggccgcacggggtggaagcgactttcatgttatcgctgtga

SEQ ID NO: 436328 - DNA, 696 bp, Serratia marcescens
atgaaacccgtgctctggttggtggaggatgaacccagcattgccgatacgctggtttacacgctggagagcgaaggcttcgaagtacgctggttcgaacgtgcggaaccggcgttgcaggcgctggcgcaaggcgcgcccgcgctcgctatcctcgatgtcggtttgccggatatcaacggttttgaattgtgtcgccgcctgctggctcaggcggctgacctgccgattctgtttcttaccgcccgcagtgatgaagtggatcgcctgatcgggctggagatcggcgccgacgactatgtcgccaagccgttctcccctcgcgaggtcagcgcccgggtgcgcaccattttgcgccgcctgcataagcagcagcgcctgcaacagagcgcgcgctaccatttcggcgctttcacgctcgacgaagacgcggccaccatctcctaccatcagcggccgctgccgctgacccgttacgaatacttgctgctgaagacgctgttgttggcgcctggacgggtgttctcgcggcagcaactgatggaaagcgtttgggcgcaggcggaagaaagcctggatcgcaccgtcgatacccacatcaagacgctgcgcgccaagctgcgtgcggttgagcccggtgagccgcccatccacacccaccgcggattgggctacagcgtgagccgccagccatga

SEQ ID NO: 436329 - DNA, 423 bp, Serratia marcescens
gtggcccagtggcgatgtgatatccgcatttcctggcgcacccagcttttttccctgttgactcatggcgttctgatcttgctgatcctgatttcgccctggccggaaggttatggcccgctttggctggtgctgctgacgctggtggtgtttcagtgcattcgtagccagaagcgcatcgccgcagtgcagggcgagctgcggctgctggcggaccggcgtttcagctggcacggccgagaatggcggctggcgaaaaagccctggatgccgggctacggcctgctgctgacgctgcagccgatggaaggcaaaaagcgccgccggctgtggctggcttccgactgcatgagcaaagaggagtggcgccacctgcggcagctgttgctgtatccgccggcgggtaacggcgaggaaccctga

SEQ ID NO: 436330 - DNA, 267 bp, Serratia marcescens
atggatattaacaacaaagcacgtattcactgggcttgccgtcgtggcatgcgcgagctggacatctccatcatgccgttcttcgaatacgaatacgacagcctgaatgacgcggacaaggcgctgtttatccgcctgctggagtgtgacgatcccgatctgttcaactggctgatgaatcatggcgcgccgcaggacggcgagctgcagagaatggtgaccctgatccaaacgcgaaataaagaccgtggcccagtggcgatgtga

SEQ ID NO: 436331 - DNA, 993 bp, Serratia marcescens
atggcgcataacattccattcccaccccgtcagccctccgcttccacccatctccccctgacgctgatctcgctggaagattgggcgctggtgacgttgaacgggccggacacagtgaaatatcttcagggccaggtgacggcggacatcgacgcgctggcggccgatcagcacgtgctgtgcgcccactgtgacgccaagggcaaaatgtggagcaacctgcgtctgttccaccgtggcgaaggcttcgcctatctggaacgccgcagcgtgctggacagccagctggctgaaatcaaaaaatacgcggtgttctccaaagtcactatcgccgccgataatgacgcggtgttgctgggcgtcgccggtttccaggcgcgcgccgcgctgacgggcctgttcgccacgttgccggacgctgagcacccggtggtgcaggacggcgagaccacgattctgcacttcgctacgccggcggaacgttttctgctggtgacccgcgccgccgtggccgaacagctgatcggcaagctgcatgaccaggcagagctgaatgacagcagccaatggctggcgctggagatcgaagccggttatccggttatcgacgctgccaacagcgcacagctgatcccgcaggctaccaacctgcaggcgctggaaggcatcagcttcagcaagggctgctataccggtcaggagatggtggcgcgcgccaaattccgcggtgccaacaagcgggcgctctactggctggaaggtaaagcggcccgcgccccgcaggcggcggaagatctggagctccaactgggtgaaaactggcgccgcaccggcaccgtattggcgtcgagccaactggccgacggcacgctgtgggtacaggtggtgatgaacaacgatttggatgccgacagccagctgcgggtgcgcgacgatgccgccagccaactggcgatcaaaccgttgccctactcgctggccgaagagaaataa

SEQ ID NO: 436332 - DNA, 498 bp, Serratia marcescens
atgatcgttcgcttatccaaagcgctgctggtctgcgctatcgccttgttcgcttcgctggtcgccttcggcaacatcaccgactacggttccaacttcgccttcgtgcgccacgtctttatgatggacacccttttccccgacgccaccatcggctaccgctcgatacagacaccgtggctgcatcacgccggctatattttcatcattgcactggagagcctgaccgcgctgctgtgctggatcggcggcctgcgtctgttgggcggcctgaaactgcccgctaacgctttcaacggccggaaaaagctggcggtagtggggctgacgctgggcttcctcacctggcaggtcggctttatgtcgattgggggcgagtggtttggcatgtggatgtcgaagcagtggaacggcgtgccggatgcgtttcgcttcttcgtcaccatcattctggtgctgatttatctggtgcagcgcgacggggaattggacgagtaa

SEQ ID NO: 436333 - DNA, 675 bp, Serratia marcescens
atggggaaaacggacgtagtgaaagccgggagcaataagattgtcgccgcggcttatccgtgggcggaagagatcgccaacagcatcagccacggcatcgggctggtgttcggcatcgtcggcctggtgttgctgttggtgcaggcggtgaataccggtgccgatgcgacggccatcaccagttacagcctgtacggcggcagcatgatcctgctgtttctcgcttccacgctctaccatgcgatcccgcatcagaaggccaagcattggctgaaaaaatttgaccactgcgccatttatctcctgattgccgggacttacaccccgtttttactcgtggggctggattcgccgttggcgaagggcctgatggcggtaatctggggattggcgctgctcggcgtgctgttcaagctggccttcgcccaccgttttgaagccctgtcgctggtgacctacctgacgatgggctggctgtcgctgatcgtaatttatcagttggttacgcggctggaggccggcggcgtcacgctgctggcgatcggcggggtggtctataccctgggcgtgattttctacgcctccaagcgcattcgctttggccacgccatctggcacgccttcgtgctcggcggcagcgcctgccatttcatggcgatctacctctacgtctaa

SEQ ID NO: 436334 - DNA, 609 bp, Serratia marcescens
atgtcatccgctgtacccgcgttagatttcggctcaatgacccaagtcatccagttcctgatggaaatcgataagttgaaaggcgtgcaacgccgcaccaaagtgctgggtacccagcgccaggaaaactccgccgaacacagttggcacttcgccatcgccgccatgagcctggcgccctacgccggtgatgacgtagacattcagcgcgtgatccagatggcgctgctgcatgacatcgtggaaatcgacgccggcgacgtgctggtctacgatctggcggcccgcgcagcgatccacgatcaggaagtggcggcggcgcgtcgtctgttcggcatgttgccggaggctcagcgcgagtatttcaccgctttatggcaggaatatgaagatggcgaaagcgccgatgcacgcttcgccttgctgctggatcgcaccatgccgatgctgatgaacctgcacaatgaaggccaaagctgggtggaaaacggcatcagcctggagcaggtactgtcgcgcaatgcgtcgatcgccgacgtacaccccgagctgtggcgccatatggagcaacacctgcgggatgcgcagcgcaaaggctggttgaagtaa

SEQ ID NO: 436335 - DNA, 927 bp, Serratia marcescens
atgaaaggcaaagtctgcgtgttcggttcgttcaacctagatatcgtcgccggcatggcgcgctttccgcagcccggtgaatcgctgatcgcccgcaacagcatgatgggcgcgggcggtaagggcgccaaccaggccaccgccgcgctgcgcgccggggcgcgggtgcattatatcggcaaggtggggcgcgacgacttcggcaccttcgcccggcgccacctcgccgccgccggtttcgatgcggtgacgctgttttcgaccggcgattgcccgaccggcaatgcgcttatctatgttgccggcgaggaggcggagaatatgatcgccgtcgatcccggcgccaacctgacggtcagcgaagacgaggtgcgccagtgccgcccggcgatcgccgcggcggatattctgttgacccagttggagaacaacctgccggcgattgagcaggtgatcgccatcgcccgcgaagcgcaaacgttcatcatactcaatccggcgccgtttcagccggtgccggacagcctgttggctcaggtcgatctgctgacgcccaacgccaccgagtgcacgttgctgaccggcgtgccggtgcgcgatgtggcttcggcgcgccaggcggcgcaggtgctgcacgccaaaggcattcgcttgctgatcgtgaccttgggtacgcagggggcgctgttctcggacggggaaaacagcgagctgatcccggcgtttccggcgcagccgaaagacaccaccggcgcgggcgatgcgtttaacggcgccctggcggcgcagctggcgaatcaggtgccgttagccgaggcggtgcgcttcgccgccgcctacgcggcggtctgcgtggagcgcgccggggcggcggggtcgatgccgagctatgaggaggcgttggaacgccaacgggcattcgcgtga

SEQ ID NO: 436336 - DNA, 909 bp, Serratia marcescens
atgatgcggcattttcttggcgttgacgtcggcggcaccaatacccgcctgttgttgatgaatgatgacggcgagttcagcgggtaccgcaagatagcgaccgccgactgggcgcagcaggccgatccgctggcggcgttgggccgcctgatcgccgggcattgcgaggatcgtcaggtggcgcaggtgatgctggggctgccggggatcctcagtcgcgatcgctcgcgggtgctgtcgctgccgtttatcccggcgctggacgcccagccggtggcggcgctgttggccgatttgttggcgttaccggtgcgaatggacaaggacgtcaaccatctgctgtggtgggatttgcagcagctgccggcgctgccgcaggtggcggtggggctgtatctgggcaccggcatgggcaacagcctgtggctgaacggcgacttttatcacggggcgcacggcgccgccggcgagctgggtcacattccctggcccggccatcagggcgagtgcccgtgcggtaaacggggctgcgtcgagagcctgacttccggccattggctgaccggctgggcgcgcgccaacgcggcacaaacgccgttcgaccggctgtttgagcgccacggcgatcatccggatctgcggcgcttcgtcgaacgattggcgcagaccatcgccatcgaaatgaacgtgctcgatccccagcggctgatcctgggcggcggcgtgatcgccatgagcggtttcccgttggcgcaccttgagcaagagatccgccgccatttacgcgggccgcagccggcgcaggggctggcgatctccgtcagccgcctgaccgatgaaaccggctgcaaaggcgcctgcctggccgcccggcgccacctccaattgagcagggagtacccgcaatga

SEQ ID NO: 436337 - DNA, 672 bp, Serratia marcescens
atgaaataccagatttcaccttcactgatgtgcatgaacctgatggatatccgccagcaattggcggtgctgaatcgccgcgccgatatgctgcatatcgacatcatggacgggcactacgttaaaaacatcacgctgtcgccgttctttatcgaacagatccgcccgcacaccccgttgttgctggatgtgcatctgatggtagagaacccgaccgatttcatcgacccgatcgcccgcgccggcgcggactttatctgcccgcacgccgaaaccatcaaccgcgacgcgtttcgggtgatcaatcaaatccgcgcgctgggcaaaaaagtgggggtggtgctgaacccggccacgccggtggagtttatccgccactaccttcacctgctggacaaggtcaccgtgatgaccgtcgatccgggctatgccgggcagccgttcattcccgaaatgctggaaaagatccgtcagttgcgcgatctgaaacgccagcaaaatctgcgctatctgatcgagatcgacggatcctgcaatcagcggacctaccgcgatctgatgggcgccggcgcggaggtgttgatcgtcggcagctctgggttgttcaacctcgatccggatctggagacggcgtgggaaaaaatgctggatcaaatgcggcaggcggcctga

SEQ ID NO: 436338 - DNA, 1035 bp, Serratia marcescens
atgggcaacaacctgaaatttcgtccagacggggccgccgtcggtttgctggccttgctgttggcggtggtgctggccttcagcctgctgatgccggggcgcttcttcagcggcgccaccttcaccagcgtggccttccagttgccggagctgggcctgctgacgctggcgatgttcatcccgatcctcagcggcggcctgaacctgtgcattatcgccagcgccaacctgaccagcctgctgatggcctggctgttcatcagctatctgccggcggacgccgggctgggcttgcaggcgctgtggctggtgttggcactggcggcggcgatgctgctggccgggcttatcggcgcggcgaccggcgcactggtggcgtacgtcggtgcacatccgattctggtgacgctggccaccatgaccacggtcaacggtatcggcatctacctgacgcgcggcgcggccctaagcggcatgccggagatcgtgcggtttatcggcgctgagagcgtgctgggcgtgccggtaccgctgtggatcttcctggtggtcgccgcgttgctggcgctgttcttgcagaaaacccggctcggcaaatgcatctacatgagcggcagcaacatcaacgctacccacttcagcggcgtgaatacccatcgggtgctgatcgccatttacaccctctccagcctgctgtgcgtcattgccgggctggtgatgatggcgcgcttcaactcggcgcgcatgggctacggcgactcttacctgctgctgacggtgctggcgatcattctgggtggcaccgatccgttcggcggttttggtcgggtcagcggcgtggtattggcgctgatcgtgctgcaggtgatcgcgaccggtttgaacctgatgaacgtcagcccgcatttcagtctggcgatgtggggcgcggtgctgatcgcggtgctggcgatgaagtttttccggcatcgctatcggcagcggcgggcgatgcgccgcagcgcggcccaggccagaaccgcggcgggccactga

SEQ ID NO: 436339 - DNA, 987 bp, Serratia marcescens
atgcgtagattcagtctgaaaccgcgcggcaacgaaggctatctggcctgggtactgctgctgacggtcatcgtcttttcgctgctcagcgatcggtttttgacggtgcagaacctgctcgatcttagtgaaagctacgcggtgagcggcattttcgccctcggcctgttcgtggtgctggtgaccggcggcatcgatatctccttcgccgcagtcgcctcggtggtgcagtacctgatcgccacgctggcgacgcattacggcctggccagcccggcgggcagcattttgctggcgttggcgatcggcgccgcgctgggcatggtcaacgcgctgctgatctactgcctgcgcatcgtctcgatcattgtcaccatcagcatgcaggcgttcttgttcggcatgctgatgtggctgaccaacggccgcagcctgtacgcattgccggactggtggacgctgccgcgcagcgtgctgccgttccaactgggtgagcagagctatcagctcggtttgccgacgctggtgatgctggcggtggcactgctgacctggctgctgctgaacaaaacgcacctcgggcgccagctgtttgccgtgggcggtgatgcggagtcggcacggcgcatcggcattcgcgttggcctgctgcatctgttcgcctatggctatctgggcgcgatggcggcgatcggcggcctggtgcaggtgtatcgcatgggggaagtggtgcccaacgcgctggtgggcggcgagctcgacgtgctggcggcggcggtgctgggcggcgccagcctgaacggcggcaagggcagcgtggtcggcacgctgatgggcgtgttcctgatcggcgtgctgaaaaacggcctcaacctgatcggcgtgtccagctacttcatgaacgtggtgatcggtctggtgatcgtcgcggcgatcaccgtcactcactacaagaaacgcaaagaaaccgacgtcggtttcgcctga

SEQ ID NO: 436340 - DNA, 1518 bp, Serratia marcescens
atggcgatttccggcaatacggcaacgcagggtgcaccgctgatcgcgttgcaacagctgtcgatgaccttcggcgggcagcgagcgctgaacgatatctcactggcgctgatgccgggggaggtgcactgcctggccggtaccaacggctgcggcaagagcacgctgatcaaggcgatcgccggcgtgtatcaaccggatgacggcagccgcattaccctcgatgggcaaaccttcggccggctgtcgccggatcaggcgcgcgccttcggcattcaggtgatctatcaggatctgtcgctgtttcccaacctgacggtggcggaaaacatcgccttcgagcacaacctgcgcgggctgttggggtggcaccggccggcgcggctgcggcgcaccgccgagcgcctgctgcaggagctgagttttaatctcgatctcgacaaacgggtggcggagctgccgattgcccagcgccagcaggtggcaatctgccgcgcgctggtggcggaagcgcggctggtgatcatggatgaaccgaccgcctcactgacccgcaccgaggtcaatcagctgctgcgcacggtggattacctgaaagcgaaaggcatctgcgtggtgttcgtcagccaccggctggacgaggtgctggagatctcggatcgcgtcacggtgattcgcgatggcaacaagatcggcacttggccggcggcggagatcaccggcgatcgcctgaccgagttgatgaccggcttgaagccggattatcgcctgaagtcaccgagcatgaataaggatcgggtgatgctggaggcggatcgtctcagccgcgccgggcagtatcaggacgtgagcttccgcctgcatcagggcgaggtgctcgggctgtgcggactgctcggctccgggcgtaccgagctggcgctgagcctgttcggcatgacccgccccgacagcggcaagctttatctcgacagcaaaccggtacgctttcgcggccatgaggacgccatcaaggccggcatcggttacgtctcggaggatcgcctgacgctggggctggtgcagcaacagtcggtggcggataacgcggtgctgaccattctcgataagctgcgcgggcgttttcgcctgatcgacgattaccgcaagaatcgcatcgtcgcagaatggatcgccaaactcggcgtgcgggtggcggatccggatcaggcggtttcgacgctgtccggcggcaatcagcaaaagatcgtgctggccaagtgggtgctgacccagccgcggatcctgatcctcgactcgccgaccgtcggcgtcgacgtcggtgccaaggccagcatctaccaactgatccatctgctggcgcaggaggggatcgcgattctgctgatctccgacgaggtgcccgaggtgtattacaactgcgatcgggtgctgcacttcagcggcggcagcgtgatcggcgaatacctgccggggcaggtgagccagcagcagctggcggaggcggtcaatgcgtag

SEQ ID NO: 436341 - DNA, 984 bp, Serratia marcescens
atgaaaaaatccgtactggtcggtctgtttgcctcgctgctgctgtcggtctccgcgcaggcggcggacaagctgaaaatgggcgtggtggtgaagatcggcggcattccctggttcaacgccatggaggccggcatcaaaagcgagagcgccaaacgcggcatcgacgcctggatggtcgggccgacggcggcggatccggcgctgcaggtgcgcgccatcgaagatctgatcgcgcagaaggtggacatcatcggcgtggtgccgaacgacgcccgggtgctggagccggtgctcaagcgcgcgcaggaggcgggcatcaaggtgatcgtgcacgaatctcccggacagaagtacgccgactgggattttgagctggtggacgcctcgcagcacggggtcaaccacatgaaagcgctggccgcctgcatgaaagagcagggcaagtatgcggtgtatgtcggcagcctgacggtgccgctgcacatcacctggtcggactcggccatcaactaccagaagcagcactacccgaacatgcagctggtgggcgacaagttcggcgtgggggaatcgctggatgacagtgtgcgcaccaccaacgatctgatggccaaatatcccgatctgaaaggcgtgctggcgttcggttcgcaggggccgatcggcgccgggcgcgcggtgctcaaccgcggcaaaagcaacgatatctgcgtcattgggccgttcagcccaggccagggcgcttcgctggtcaatcgcggcgccatcaagggcggttatatctggaatccgatggtggccggcgaagtgttcgtgcgcatcgccgacatgatgcacaaaggagaaaaaatcaccgatggcatgaccatcgagggcatgggcaaggtgcaggtggatgcgcagcagcacactattctcggcaacgccaccgaaagcctggataagcaaaacctgccgaagctggtgaaaatggggctgtaa

SEQ ID NO: 436342 - DNA, 819 bp, Serratia marcescens
atgctgcctgtagaacgtcatcgctttattaccgaagtcttgagccagcgcggccgcgtgatggtgcaggaggtggcgcagctgtgccacatctctatcgagacggcgcggcgtgatctggccctgctggaacggcgcggcctgctgctgcgcagccacggcggcgcggtgttcgtcgagccgccggcggtggaaaaaacctatgtgcctgccgagatagatcagggggagtccttccgccagcgcagcaatgagtcgccggagcagaagacgcgcatcgccaaacgcgcgctggagtttatcgcgcccggggattgcctgctgctggacagcagctccaccagctggtttttggcgcgccagctgccggatatctcgctggtggtgctgaccaactcgctgcacatcatccagacgctggcctgcaaggccaacgtacgcaccatcgggctggggggcgagtattccgccaagtacgaggattttatcggcgtgctggcggagcagatgctgaaagagttcgtgatcaacaagctgtttttctcctgccacggcatttgccaggacggcggcatccgcgagagcaatgagcaccatgcgcggctgaagcaacagatgctgctggcctcggagcgcaagttcctgctggtggacagcaacaagttcggccgccgctcgttcgcccgcatttgccattaccgggaaatagatacgctgatcaccgacaggcttggcgacgacgagtttcgtcaggaattggcctggaataacgtcgacgtgattgaagtttcacccgccgcgaaaagggcggcgcgataa

SEQ ID NO: 436343 - DNA, 1326 bp, Serratia marcescens
atgaatgcatacaccactgaaacggcacaggttgccgcaccggccgcagaaagtgccgccgcaacgcccaataccggcaaacttgcggcggccagctcgatcggtacggcgctggaatggtacgatttcaccgtctacaacatcatggctgcgttgattttcaaccatgtattcttcccatcgttcgatccactggtgggcacgattctggctttctccacttacgcggtgggctatgtttcccggccgatcggtggcatcgtattcggccaccttggcgatgtgttgggacggcgctttgtactggtcaccacgctggtgatcatgggcgtgaccacggcgttgatgggattgctgcccggctacgctagctgggggatttggagcccactgctgctggtgacgctgcgctttattcagggcattgcgctgggcggagaatgggcgggtgcggtactgttgtcgatggaacacggtaagccgcatcagcgcgggcgcaacgcgtcctttgctcaggtagggccgtcctgcggttcgttgatcggcacaggcctcattacgctggtgacgttggcgatgtcggcggacgattttcagcaatggggctggcggattccgttcctgctgagtctggtgctggtcatcttcggtttgtggctgcgtcggggtgtgggtgagacgccggcatttttgcaactggaggcgtcgaaagatgttacgcagtcgccggtgcgcgaagtcttcacgcagcacatgcgtccgctgctgatcgccggcggatcgcgtatcggctctgacgtgctctatgcgttggtggtcgtgttcacgttgacctacgtcaccaccgtgctgaatctgccgcgcccgctggcgctgggtgccaccatgctgggggcgataggcaacgccgtcgcagtaccgctgtttggcgcattgtcggatcgcttcggccgtcgtccggtgtatatcggcggtgcattggcggcgatagtgtgggcgtttgcgttcttcgtcctgctcgacagcagtcaaccggtgttgatctgcatggctgtggtgattgggctgttgatccatgcggcgatgtatgggccacaggcggcattcatcacggaacagttcccgacacgggtgcgttatgccggctcttcgttagcctataccttggcggggattatcggtggcggctttgccccgctgatcatcacttctctgtttaaatcttacgacagcacgctggcgatttccgcctatgttgcgttggctctgcttatcacactttgggcggtatgggcggcgcgggaaacggcgcataagccgctgtaa

SEQ ID NO: 436344 - DNA, 654 bp, Serratia marcescens
atgaacgattcccagaacggaatgctgtttgtcgcgacggatgtcgccacgcaggatgatgcggattttaatcgctggtatgaccgcgaacatgtggaggagcgagtgcgggtgcccggctttttatccggcacacgctatcgggcattgcagggggggcgtcaatatttggggttgtataaaaccgaatcgttggccagttttacctccgaagcctatcgcgccgcgtttcaacaccaaacgccatggtcggtggcgagcctggagaaaatgcgagatccaatgcgcagagtgtgtgcggtggaggcggtcactggccaagggtgcggcagtcatctctgtatcttcgtgctgccgtcggcggcatcggaagcgctgcatgcccgcatcttgcaactgggcgcgcagctggctgaacagcctggattcgtgcgcagcagcctgttgacgccggatgccgaactcagttccccgctgccgaaagaatcgcgagaaaaccgccgaatgttgccgatgctattgatcgaaagcagcgacgccgaagccggcctgcgtttaagcgagcaggccgctgaagcgctgaacatgcccgccgccgatgcctggcattatgcccttggctggcaactgactgcacaggagctgacatcatga

SEQ ID NO: 436345 - DNA, 1347 bp, Serratia marcescens
atgaaaaagctgactttgatgcaggccaccgccgggctggctagcggtgagttcaccgcagtgcaactcaccaccgccgctttggcgcagatcgtcgatgagcggggagagggggggcgcgcgtttacgcgaacatacaccgagtgggcgcaacggcaagcgcaggcctccgatcggcgacgcgccgccggctcgcctctgtcagcgctggatggcgtgccgatctcggtcaaggatctgtttgacgtggccggtgaggtgaccacggccggttcgcgcgtattagcggacgcgccagccgctgaaaaacacgctgcggtagtggaacggctgttgcaagccggcgcggtggtggttggcaaaacgacgatgacggagttcgcctattccggtctgggcatcaatccgcattacgggacgccggccaatccttgggagcgccaggcggcgcgcattcccggcggctcctcttccggtgcggcggtggcggtggccgacggcatgtgcctgggcgcgattggcagcgataccggcgggtcggtacgcattcccgccgcgctgtgcgggttgaccggttataaacccactgcacggcgcatcaatgacgctggcttactgccgctgtcgccttcgctggattcgatcggcgtgatcgctcatgacgtcgccagctgtattgcgctggatgcactgattgccgactttccgctgcgggtgctgcaaaaaacgttggcgcaggcgcattttgccgtgccgcaagcggtggtgctggatgaactgcagccggaagttgccggggcgttccagcgcagcctgcaatgcctgagtcaggcaggcgcacgtattgaattgatccccgccacggcgttcgccgagctggcggcgatcaatgccgatggcggtttcaccgcgctggagtcctggcgctggcatcaagcgttgatcgctgaacgggccgatggctatgacccaagggtgctgtcgcgcattcgccgcggtgcatccttgggcgatgctgagctgcagctgttgcagcgacaacgtgccgactggcagcggcgagttacggcggcgctgcagagttttgacgctttgctgatgccgaccgtgccgctgattgcgccaactatcggcgagctggcggcggatgatgcctacttccgttgcaacggactgatgctgcgcaatcccgcgatcatcaatttcctcgacggttgcgcgttgtccttgccttgccaacagccaggagaggcgccggtcggactgatgctggctgggttgccgatgcgtgatgaggcgttgttggggtgggcgctggcgatcgagcactgcctcgccgacgcgtga

SEQ ID NO: 436346 - DNA, 714 bp, Serratia marcescens
atgagactgaccttcactttacctgaatcctgcggcgcggcgacgttgaatgttgagattgatcatctggtgatcgccggttggaccggacgcgatcgcgaggcgatcttgcaccatattcgtgaattggccgagctgggcgtgccccagcccagtgcaatccccctgttttaccgcgttgccgccaatcagttgagccagcaagagaccattgaagtcattggcaacgcgacgtccggcgaagtggaaccgctgatttttgcccaccgcggcgaactgttcgtgtcattggcgtccgatcacaccgatcgtcaactcgaagcgcacagcgtggcgctgtcgaaacagatttgcgttaaaccggtggcgcgagccgcctggccgctccaggaggtgttggaacattgggacagtttgatcttgcgttcgtggatcagggaagagggcgaatggcgattgtatcaacagggctgccttgccgcgttgcgtacgcccggtgatttgctggaacgttacttcaccggtatgcagccgccggagtgcgggctggcgcagccgcaaacgcccgacgggttggcgatgacttgcggcacggtggcggcgatcggcggcattcgaccggctggcgagtttcgcatggaactggtggacgacgtgctcgggcgaaccatcagtcatcgctaccgcagcatcgaactgccggtggtggcgtaa

SEQ ID NO: 436347 - DNA, 681 bp, Serratia marcescens
gtgaagactgttgacgcagaaagcccgcagcgcccgatgacggaagaagccggcgtgtcactgaacgagctggcctaccggcgtttcaaacaggcgctggtcacactcagctacaagccgggcgaatatctcaataccgcgcaggtgatgaacgacctggatatggggagaacgccgatcaatcaggcaatccaccgcttggccaacgaggggttattgcaggtcatcccgcgcaagggcgtgatggtttcaccgttgtcgatggacgatgcgttggaattgatcgaagtaaggctggctaacgagatgctgtgtatgcggctggcaagccagaagattaccgagaggcagatagcaacgctgaccgaactcaatcggcaaatcgaagccgcgagccaggagcgagatagggtgcgcatgatgacactcgatcatgaatttcaccaggaactggcgcagatcgccggcaataacatgctggcggatatcctgagtgtactgcacgccagggcgcagcgtttttgggccagcaccctgtcgcgggaagggcatatgcgcgaagtgatcgacgaacaccgggcaattatcgccgcgctggccgcacaagacagcgccgccgccgccgaggccgcgcaggcgcatatcctgtcattccgcactgcgctgctgcacgacgggtaa

SEQ ID NO: 436348 - DNA, 318 bp, Serratia marcescens
atgaagcgcaaaaattccgccaaaaatctggcccatagcgtactcccgccgttgacggaggagcagaaagcgcaaattgcttcactgaatgcgttgccggacgaggacatcgattatgccgatgcgccggcgctgggggaagaaacgtggcagactgcggtgcaggggcgtttttataagccgatgaaagtatcgaagaccatccgaatcgatgcggatgtgttggcctggcttcagcggccaggcaaaggctatcagaaacgcctgaacgccgtgttgcgtgaggcgatgttgaaagagcatgagcacgaagaataa

SEQ ID NO: 436349 - DNA, 324 bp, Serratia marcescens
atgtatgtttattttgaatggaatcaggataaaaatcacagcaaccagcgtaaacaccgtgtcagttttgagatagcgcaacgggtttttctggatcccaaccatttggctgtgctggaaaggatcgaggatggagaagaacgttggcaaacgatcggtatgatcggatcctgtttgctgttgctggtggcacatacgacgatcgaaacggatgtcgaaggcgatacagtagagatcgtgcgtatcatttcagcacgcaaggccgatgccaaagagaggggaagatatgaagcgcaaaaattccgccaaaaatctggcccatag

SEQ ID NO: 436350 - DNA, 747 bp, Serratia marcescens
atgacgaaagtggcattggtgaccggcgcaagccgggggattggccgcgcgaccgccttgctgctggcccggcagggctatgcggtgggtgtgaattacctgcgtgacgaaaatgcggcgcgccaggtggtggcggagatcgaggcgcagggcggtaaggcgctggcgctgcaggccgatgtggccgatgaagcgcaggtgatggcgatgttcagggcgctggatgccgggctgggcacgctcagcgcgctggtcaacaacgccggcattctgttccagcaggcgaacattgaacagttgaccgccgagcgcatcaatcaggtgctcggcaccaacgtcaccggttacttcctgtgttgccgcgaggcggtgaaacgcatggcgcagcgccatggcgggcagggcggcgctatcgtcaacgtttcctccgcggcgtcccggttgggggccgcgggggaatacgtcgattacgctgcctcgaaaggcgccgtcgataccctgaccatcgggttatcgcgcgaggtggcggcgcagggcatccgcgtcaacggcgtacggcccggattcatctataccgagatgcacgccagcggcggcgagcccggccgggtggatcgcgtgaaggacagtttaccgatgcagcgcggcgggcagccgcaggaagtggcggaggcgatcgcttggctgctgtctgacgctgcgtcttacgtgaccggtacttttatcgaggcagcaggcgggcgttga

SEQ ID NO: 436351 - DNA, 234 bp, Serratia marcescens
atgcagactgaaggtttcccgaacgcgggcgcctcgcggcggctgatgtatgtaggcgtggcgacgttgctcgttttgttgctgttgtcttttcgcggcgatgcgcagagccatagccacggcggccatcatgcttccgctttgcagcgggtgcatcaggcggcggcgacggatgcttacggctgcgccaagtcgcgcattaaaaagcagctgcgccgcctggctcagctttga

SEQ ID NO: 436352 - DNA, 660 bp, Serratia marcescens
gtgaacatactgttggtggaagacgacctgcaattaggcaaggcgctgtgccgcgcattggagctggccggctttaatttgtgctgggtgcgcctgctcaccgacgcggaaaataaactttcacccggcgggttcgatttgatgctgttggatctcacgctgccggacggcgacggtttgcagaagctgatcgcctggcgcgccgccgggcaaaatattccgatcatcatcctgaccgctcgcgaccgcattgaaagcttggtgaacagcctcgactccggcgcggacgactttctggccaaaccctttgcgctgcccgaactcatctcgcgcgtcaaagcggttaaccggcgcatggcgggcttcgcttctcaaacctggagcctcggcgcgctgtatctcgatccggtcaaccatcaggtcatgctggataacgaactgctgatgctgtcgaaaaaagagtatcacctgctgcacgaactgatgcgctgcgccggcaccgtggtgcgcaaagcggtgttggaacagcggctgttcggccacggcgacagcgtggaaagtaactcgctggaagtgcacatgcataatttacggcgcaaaatcggtaaagaaagagtgattaccgtacgcggcattggctatttgctgaagaaagagtag

SEQ ID NO: 436353 - DNA, 1407 bp, Serratia marcescens
atgatcggtttcaaatccttctttatgcgtaccattatttttcaggtgctggccattttattattgtgggggatcctcgtcgcctgggtgaaatattggtattaccccgacatggagaaatatttcgataaccagcaacgcatcgtcgctgcaggcatcgccaatattctcgacgaaaccggcactgacaatatcgattaccgcggcatcatcaagaccattgaaggcatgtacattgattccatcaataacggcatgcaggatgaaatcgactatcacccgctgtttgtggtttacgatcgggacagccgggtgctttacagttcgcaaacgcagggagaaccgctgcgcctgccgccttcggtgctgtccggctccgtcaattacgccggtgccaactggcatctcgccggcagctggagcgaaaagcaccagtaccgggtgatcgtcggcgaatcgttcaacgatcgcaccacgctgttcggcaacccggcggagagcaccgccgtaccgctgctgggcattctggcagccatcatcgttaccttgctgtttaccgcctatttcagcctgcggccgctgcgccagatcgcccgcaccatctccgatcgccagcctggcaacctgtcgccgatcaacgtcagcgagcagtatcaggaaatccggccggtggtgatggaggtcaacaagctgatggcgcgcatcgacgccgccaatcagcgcgagaagcgctttatggccgatgcggcgcacgagctgcgcacgccgatcgccgccgtgctggcacagctgcacctgctgacccaggtcggcgagcagcaggagcgccgggagatcatcggcgacatgcagcaagggctagatcgcgcggcatcgctgtcgcgccagctgatcaacctggccaagctggaggcggaagattttccactgaaaattgaggcggtggacatctacgcagagatcggcaaatgcatcgcgcagcacgtcccctatgcgctggaaaaggatgtggaactctcgctcgacggcagcgaggacgtggtggtgagtaccgatcgccatgcgctgatcgccatcttcaccaacctgctggacaatgcgctcaagtacgcgccccccggcagccgtatcgaagccaatatccgctcgctggcgccgctcggctgctatattacgttgcgcgacaacggcccgggggtgagcgaagaacaccgttcccgcctgtttgagcgcttttaccgcgtgcccggcacgcagcaaaccggcagcgggctcggcttggccatcgcccgaaacctggccgacaaaatcggcgcgcagctgcgcgtcaccgaaggccttgacgatcgcggcatcggcttcatcatcgatttgccggaaagttaccggccacagactgagagttaa

SEQ ID NO: 436354 - DNA, 531 bp, Serratia marcescens
atgatcgcccctgttctgctgcaacggcagcaactcgaccggctatgggatatcgaccgcagcgaaattatcgacactctgtatcgcctgcaggacggcaagctgcaagcctacccggactactacgacgtgcgcggctgggatccgcacgatcgggaaacctatacgccgatccacgaagcctgcttcgatcgcggcgggacattcttcgcgctgttcgaaggcgaggagatcgtggcggcggcggcgctggacaccgaaccgcgcggcccacagcgggatctgcgccagctgctgttcttttacgtcagcgcgcacaaacgcggccaggggttaggcaggcagctgttccaactctgcctgcgtcaggcggcgcaagacggcgccgccgggctgtatgtctcctccattcccaacaaaagcaccgtagacttctatctggcgcagggttgccggctcatcgaacaaccggataccgaattgttcgcccgtgagccggaagacattcatctggtctgcccgtgccgctag

SEQ ID NO: 436355 - DNA, 966 bp, Serratia marcescens
atgcaagcggcaatcgtaacagcgctggggcaagccccggttttcggcacttttgaggagccccaggcgcaggcgaatgaagtgccgatcgacgttctggcggccggcatcaaacagctggatcgcgccaccgtcgccggcacccactattccagcccgaagcaattgccaattgtgcccggtaccgacggcgtgggccgtacggcggacggaaaacgggtgtactttgcctccttccgccgtccttacggtgcgatggctgagcgcagcgtcgcgtcatggacggtgccggtaccggaggcggtggatgacgccacggcggcagcgctgatcaatccggccttcgccgcctggctgccgttgcgctggcgagcggatctgcagcccggtgaaacggtgctgatcatcggcgccaccggcacctcaggcaaactggcggttgccgcggcgcgtcaggcaggggctgggcgtatcgttgccgccggccgtcggctgagcgtgctggaggcattgggcgtggatgccacggtggatctgagcctgcagggcgaggcgctgacgcaggccttcgcggcagcggcggggccgggcggttatcaggtgatcgtcgattacatctgggggccggcgaccgaagcgctgctcgcgacgctcaataatcacgatctctcgtcttacgccggcggacgcggcattcgcctggtcaacgtcggttcgatggccgcgccggacatccggctgccggcggcggtgctgcgcagcaaccagctgcagatcctcggcagcggcaccggcaacttcccgccgatcccggagatgcagcgctacgcggccgagattttggcgctggcggcgaccggagcgctcactatcgagacgcaggagcacgcgttggcggagatcgccgaggtgtgggatctgaacaagaaaagcgacgtgcgttcggtgatgcgcatcgcccgttaa

SEQ ID NO: 436356 - DNA, 2880 bp, Serratia marcescens
atgactcagacactcagccaactcgaacacagcgaagcgttcatcgaacgccacatcggctcttctgcggaacaacgccaggagttgctggcagcggtgggcgctcgctcgctcagcgcgctgatccaacagatcgtgccggcggacattcagctgccggggccgccgccggtcggcgacgcggcgaccgaacaccaggcgctggctgagctgaaggcgatcgcctcgcaaaatcagcgctacaaatcctatatcggcatgggctacagcgccgtgctgacgccgccggtgatcctgcgcaacatgctagaaaacccgggctggtacaccgcttataccccttatcagccggaagtgtcgcagggccgcctggaagcgctgctgaacttccagaccgtgaccctcgatctgaccggcctggatctggcctccgcgtcgctgttggatgaagcgaccgccgccgccgaagcgatggcgttggccaaacgcgccagcaaactgaaagacgccaaccgcttcttcgtggctgacgacgtgcatccgcagacgctggacgtagtgcgcacccgcgccgaaaccttcggcttcgacgtcatcgtcgataaagcggaaaaagtgctggagctggacggcgtgttcggcgtgttgctgcagcaggtgggcaccaccggcgagttgcacgactacagcgcgctgctggccgaactgaaatcgcgcaaaatcatcaccagcgtggccgccgacatcatggccctggtgctgctgaccgcgccgggcaagcagggcgccgacgtggtgttcggctccgcgcagcgcttcggcgtgccgatgggctacggcggcccgcacgccgccttcttcgcctgccgcgacgagttcaagcgttcgatgccgggccgcatcatcggcgtttcccgcgatgccgccggcaacaccgcgctgcgtatggcgatgcagacccgcgagcagcatatccgccgcgagaaggccaactcgaatatctgtacctcgcaggtgctgttggccaacatcgccagcctgtacgcggtgtaccatggcccgcaagggctgcagcgcatcgccgggcgtatccaccgcctgaccgacattctggccgccgggctgcagaaggccggcctgacgctgcgtcataacacctggttcgacaccctgaccgttgaagtgaaagacaaggctgccgtgctggaacgtgcgctgagcttcggcatcaacctgcgtaccgacattcacggcgccgtgggcatcacgctggatgaagccacctcgcgtgaagacgtgcaaacgctgtttgcactgctggccggcgacaaccacggccaggacatcgacgcgctggacgcggcggtgagcaagaacagcgcatcgatcccggccgccatgttgcgccaggagccgatcctgacccacccggtattcaaccgctatcacagcgaaaccgagatgatgcgttacatgcatcgtctggagcgtaaggatctggcgctgaaccaggcaatgatcccgctgggctcttgcaccatgaaattgaacgctgcggcggaaatgatcccgatcacctggcctgaattctccgaactgcacccgttctgcccgccggagcaggctgccggttaccagcagatgatcggccaactgtctcagtggctggtgcagctgaccggctatgacgcggtgtgcatgcagccgaactccggcgcgcagggcgaatacgccggcctgctggcgatccgtcgctaccacgaaagccgcaacgaagcgggccgccacgtctgcctgatcccgagctcggcgcacggcaccaacccggcctccgcccaaatggcgggcatgagcgtggtcgtggtcgcctgcgacaagaacggcaacatcgatctgcacgatctgcgcgtcaaggcagagcaggcaggcgaagaactctcttgcatcatggtgacctacccgtcgacccacggcgtgtatgaagaaaccatccgtgaagtgtgccagatcgtgcatcagttcggcggtcaggtatatctggacggcgccaacatgaacgcccaggtgggcatcaccacgccaggctacatcggtgccgacgtttcgcacctcaacctgcataaaaccttctgcatcccgcacggcggcggcggcccgggcatgggccctatcggcgtgaaagcgcacctggcgccgttcgtaccgggccacagtgtcgtgcagatcgacggcgtaaccacccagcagggcgcggtctccgcggcgccgttcggcagcgcctccatcctgccgatcagctggatgtacatccgcatgatgggcgcggaaggcctgaagcaggccagccagatggcgatcctgaatgccaactacatcgcaactcgtctgaaagacgcgtatccgatcctgtataccggccgcgatcaccgcgtggcgcacgaatgtatcctcgatattcgtccgctgaaggaagagaccggtatcagcgaaatggacatcgccaaacgcctgatcgacttcggcttccacgcgccgaccatgtcgttcccggtagcgggcacgctgatggtcgagccgaccgagtcggaaagcaaagtggagctggatcgctttatcgatgcgatgctggcgatccgcagcgagatcgaccgcgtcgccaaaggcgaatggccgctggaagacaacccgctggtgaatgcgccgcacgtgcaggcggagctggtcaacgactggcagcacccgtacagccgcgagctggcggtgttcccggtggccggcgtgcgcgagaacaagtactggccgagcgttaagcgtctggacgacgtgtacggcgaccgtaacctgttctgctcttgcgtgccgatgagcgattacgaataa

SEQ ID NO: 436357 - DNA, 387 bp, Serratia marcescens
atgagcaatgtgccaacagaattgaaatacgcatcctcccacgagtgggttcgtgcagaaggtaacggcgtttacaccgtaggcatcaccgaacacgcgcaggaactgctgggcgatatggtgtttgtcgatctgccggaagtgggccgcagcgtcgccgccggtgaagattgcgccgtggcggaatccgtcaaggcggcgtcggacatttacgcgccaatcagcggcgaaatcgtggcggtgaacggcgagctggaaagttccccggagctggtcaacagcgaaccttacggtgacggcttcctgttccagattaaagcctccgacgaaggcgagctggcgaacctgctggacgccgcggcttatcaggcctcgatcgacgagtaa

SEQ ID NO: 436358 - DNA, 1098 bp, Serratia marcescens
atggcaaagcaaaccccactgtacgaccagcacgtggcgtgcggtgcgcgcatggtagactttcacggctggatgatgccgctgcactacggctcgcagctcgatgagcaccacgcggtgcgtcaggatgccggcatgttcgacgtgtctcacatgaccattgtagatctgcacggcgcccgcacccgcgagttcctgcgctacctgctggcgaacgacgtcgccaaactgacccaacccggcaaagcactgtacaccggcatgctgaatgcctccggcggcgtgatcgacgacctgatcgtttatttcctcactgaagactatttccgcctggtggtgaactccgccacccgcgacaaagacctggcctggatcgaagagcacgccgcgccgtatggcgtcgcgctgacggtgcgcgacgatctggcgctgatcgcagtgcagggcccgcaggccaaagagcgtgccggcaccctgttcaccccggaacaaaaaagcgcggtcgagggcatgaagccattcttcggcgtgcaggccggcgagctgttcatcgccactaccggttacaccggcgaggccggctatgagatcgcgctgccgaaagagcaggcggcggatttctggcaaaaattgctggccgcgggtgtcaagccggccggtctgggcgcgcgcgacacgctgcgtctggaagcgggcatgaacctctacgggcaagagatggatgaaggcgtttcgccgctggccgccaacatgggctggaccatcgcctggcagccggaagatcgccgtttcatcggccgcgaagcgctggagcaacagcgcgagcagggcaccgagcaactggtcggcttgatcatgacggaaaaaggcgtattacgtaatgagctgccggtgcgtttcaccgacgcggcggggcaaacccacgaaggcgtgatcaccagcggctcgttctctccgacgctgggcttcagcatcgcgctggcgcgcgtgccggcaggcatcggcgagcaggctatcgtgcagatccgcaaccgtgaaatgccggtcaaagtgaccaagcccggtttcgttcgcgccggcaagccgctgacaaattga

SEQ ID NO: 436359 - DNA, 1203 bp, Serratia marcescens
atgcaatcatttgacgtgattatcgccggtggcggtatggtggggctggcgttggcctgcggcctgcagggcagcgggctgcgcgtggcggtgctggagcagcgccagccggagatggcgccgccgtcggaacagccggccctgcgcgtctccgccatcaatgccgccagcgagcgtttgctgcagcacatcggcgtgtgggacgacattctccagctgcgcgccagcgcctacaatgcgatggaagtgtgggatcgcgacagcttcggcaagattgctttccgcggcgacgagtgcggcttcagccatctcggccacatcatcgaaaattcggtgatccagcaggcgctgtggaaacgcgccgaaagcctgtcggacatcacgctgattaccccggccgcgctcaagcaggtagcatggggcgaaaatgacgccttcgtcacgctggaggacgggcgcatgctgaccgcccggttggtgatcggcgccgacggcgcccagtcgtggctgcgccagcatgccgatatcccgctcaccttctgggattaccgtcaccacgcgctggtggccaccgttcgcaccgaagaaccgcatcaggcgacggcgcggcaaattttccacggcgacggcattctggcgttcctgccgttcagcgatccgcatttgagctctatcgtctggtcggtgacgccggaagaagccgaacggctcaaacggctggaaccggagcaattcaaccgcgaactggcgatgaccttcgacatgcgcctgggggcttgcagcctggaaagcgaacggctggcgttcccgttgaccggccgctatgcgcgcagcttcgccgcgcaccgcctggcgctggtgggagatgcggcgcataccgtgcacccgcttgccgggcagggcgtgaacctgggctttatggatgccgccgagctgatttccgaactgcgccgcctgcagcggcagggcaaggatatcggccagcacctctatctgcgccgctatgagcgccgccgcaaacatggcgcggcggtgatgctggccagcatgcagggtttccgcgaactgtttgacggcaaccacccggccaaaaagctgctgcgcgacgtgggcctgcggctggcggacagcctgccgggcgtcaagcctaagctggtgcgtcaggcgatgggcctgaacgatctgcccgagtggcttgcctga

SEQ ID NO: 436360 - DNA, 1179 bp, Serratia marcescens
atgagcgttattatcgttggcggcggtatggcgggcgcgacgttggcgctggccatttcgtcgctcactcagggaagaatggcggtggatctggtcgaggcgacccggccggatgaccgcagccacccaggttttgacgcccgcgccatcgcattggcgcagggtacctgccaacagctggcgcgcatcggcgtttggccggcgctgcgcgattgcgctacgccgatcactcaggtgcacgtcagcgatcgcgggcacgccggcttcgtgaatctgcaggcgcaagattatcaggtcgatgcgctcggccaggtgatcgaactgcacgacgccgggcagcggctgttcgcgctgctggccaaggcgccgggtgtcacgctgcactgcccggcgcgggtggtggacgtgatccgcaccgcagagcgggcggaggtgctgctggacaacggccagcgtctgcgcgggcagctgctggtggcggccgacggttcgcgctctgcgctggcgcaggcctgcaacgtgcagtggcggcaggaggactatccgcagttcgccaccatcgccaacgtcaccacggcggaagatccgcaggggcgcgcctttgagcgctttacccgctatgggccgctggcgctgttgccgatgtcgcaggggcgcagttcactggtgtggtgccatgcgcgtgaagatcgcgcccaggtggatgcctgggacgacgagcgctttatcgccgagctgcaacaggctttcggctggcggctggggcgtatcctcaaggccggtaaacggcacagttatccactcgggctgctgaccgccgatcgccatgtcagccaccggctggcgctggtgggcaacgcggcgcaaacgctgcatcctatcgccgggcaggggttcaaccttggcctgcgcgacgtgatgtcgctggcggaaacgctggcggaagcggcagacagcggcgaagacgccggcggttacgcactgctgagccgttatcagcagcggcggcaaaacgatcaacaggcgacgatcggcgtgaccgacgggttgattcatctgttcgccaaccgttatggcccgctggtgattggccgcaatctggggctgatggcgatggaacgtttgccggcgatacgcgatgccttcgccaagcgtacgctgggctgggtggaacgttag

SEQ ID NO: 436361 - DNA, 1317 bp, Serratia marcescens
atgactcagcaggaattcaacaaccgccgccaggcgctgttggcgaaaatggcgccggccagcgcggcggttattttctctgcgccggaaacgacgcgcagtgcagattcagactatccctatcggcagaacagcgacttttggtacctgaccggcttcaatgagccggaagcggtgctggtgctgattaaaagcgacgaaacgcacaaccacagcgtgttgttcaaccgggtgcgcgatctgacggcggaaatctggtttggccgccgcctggggcaagacgccgcgccggcgaagctgggcgtggatcgcgcgctgccgttcgatgaaatcaatgaccagctgcacctgctgctcaacggcctggacgtggtctaccacgcgcagggcgaatacgcctatgccgatcagatcctgttcggcgcgctggacaagctgcgcaaggggttccgccagagcctgcaggcgccggccaccgttaccgactggcggccgtggctgcatgacatgcggctgttcaagtcgccggaagagctggcggtgatgcgccgcgccggtgagatcagcgcgttggcgcatacccgcgcgatggaaaaatgccgcccgggcatgttcgaataccagctggaagcggaaattcatcatgaattcacccgcctcggcgcccgttacccgtcttacaacaccatcgtcggcagcggcgaaaacggctgtatcctgcactacaccgagaacgagagccagatgcgcgacggcgatctggtgctgatcgacgccggttgcgagtaccaggggtacgccggcgacatcacccgcaccttcccggtcaacggcaagttcagccggccgcagcgcgcggtgtacgacattgtgctggcgtcgctgcagcgcgctttggaactgttcaaacccggcaccagcattcgcgaagtcaatgacgaagtggtgcgcatcatggtggtcgggctggtggagctgggcgtattgaaaggtgaagtcgactcgctgatcgccgagcaggcgcaccgtcagttcttcatgcacgggctgagccactggctgggtctcgatgtgcacgacgttggccactacggcacgccgagccgcgatcggctgctggagccgggcatggtgctgaccgtggagccggggctgtacattgcgccggatgcggacgtgccggcggagtaccgcggcatcggcatccgcatcgaggacgacatcgtgatcaccgccgacggcaatgaaaacctgaccgccaccgtggtgaaagacgccgatgccatcgaggccttgatggcggcggcaaggtcgtag

SEQ ID NO: 436362 - DNA, 585 bp, Serratia marcescens
atgcgcatgtctatacagaatacatttccaagttaccaatctttgaccgtggccctaaaccagcagtcggtggcgctgaccgcggcagaaatgcacggcctgatcagcggcctgctgtgcggcggcagccgtgacgccggctggcaggcgctggtgcacgatctgaccaacgaaggcgtcgccttcccgcaggcgcttagccaaccgctgcagcagctgtatgaagtgacgcgtgacacgctggaagatgacgaattcctgttccaactgatgctgcctgaaggggagatcgtcagcgtgttcgatcgcgccgacgcgctgggcggttgggtcaaccacttcctgctcgggctgggcatgatgcagccgaagctggctcaggtgaaagacgaggtcggtgaagcgatcgacgatctgcgcaacatcgcgcagctgggctacgacgaagacgaagatcaggaagaattggaacagtcgttggaagaagtagcggagtatgtgcgggttgccgccatcatgtgccacggcgaattcacccgtcaaaaaccgacggcgccggaaaatatcaaaccgacgctgcactaa

SEQ ID NO: 436363 - DNA, 330 bp, Serratia marcescens
atgtctgcacaaccggtagatattcaaatttttggccgctcgttaagagtcaattgcccgccagaacaacaagatgcgttgaatatggcggcggacgatcttaaccaacggttgcaagatcttaaagttcgcactagagtctccaatactgagcaactggttttcatcgcggcattgaacgtctgtcacgaacttgctcaagaacggttgaaaacccgtgactatgcgtccaatatggaacaacgcatacggatgctgcagcagaccattgaacaagcgctgcttgagcaaggtcgcatctctgaacgtcaggatgcacaattcgaataa

SEQ ID NO: 436364 - DNA, 705 bp, Serratia marcescens
atgggttcaagggttacagcctgcgacggcatctcggagattccccttctcagcggtttatgtgtgctgaacgccacactgagcaagcctgatacgatgccttttcaccctcaattcgcgcagcagcgccaagccattcgtcaactcattcgccaacgtcggcgcgagcttacgccgggccagcaacgctttgccgcagacaagataaccgaacgcctcgtcgcgcacacacgtattcaggccgcgcacaacatcgcggtatttttgtcgtttgacggcgaactcgacaccgggccgctgatcgagcaactgtggacgctcggcaaacaggtttacctgccggtactgcatccgttcagttcaggacacctgctgtttctgcgctatgcgccggaaacaccgctggtgcgcaaccgcttcaatattctcgagccgcggctcgatgtgcgccaggtgttaccgctgggcgaactggaggtggtgctgacgccgctggtggcattcgatcataccggacagcgtctgggcatgggcggcggtttttacgatcgcaccctgcaaaactggcgcagcggcggcccctatcccatcggcctggcccatgattgccagcaggtggagcacctgccgaccgagcactgggatatcccgctgccggaaatcctcaccccgctctgcagctgggcgtggcacgagcccaaatag

SEQ ID NO: 436365 - DNA, 1239 bp, Serratia marcescens
atggcaaaagtatcattggagaaagacaggattaaattcctgttggtggaaggggttcatcagagcacggtcgataatttacgtgccgccggttataccaacatcgaataccacaagggtgcgttagacaccgaatcgctgaaggcatccatccgcgatgcacacttcgtcggcatccgatcgcgtacgcatctgaccgaagaggtgttcgccgccgcagaaaaactggtggcggtgggctgcttctgcatcggcaccaaccaggttgatctgaaagcggcgaccaaacgcggtattccggtcttcaacgcccccttctccaatacccgatccgtggccgaaatggtgctgggcgagctgctgttgatgctgcgcggcattccggccgccaacgccaaggcgcaccgcggcgtgtggcacaaattggccgtgggctcttatgaggcgcgcggcaaaaagctgggcatcatcggctacggccatatcggcacccagctgggcattctggccgaagggctgggcatgaaggtgttcttctacgatatcgagaacaaactgccgttaggcaacgcgcagcaggtgcgtcatctgtccgatctgctcaatatgagcgacgtggtgacgctgcacgtgccggaaacgctggccaccaagaacatgatgggggcggaagagctggcgctgatgaagccgggcgcgattctgatcaacgcctcgcgcggcaccgtggtggatattcccgcgctgtgcgacgcgctggccagcaatcacctggcgggcgcggcgatcgacgtcttcccggaagagccggcgaccaacagcgatccgttcaactcgccgctgtgcgagttcgataacgtgctgctgacgccgcacatcggcggttccacgcaggaagcgcaggagaacatcggcgacgaagtggccggcaagctggcgaaatactccgacaacggttcgactctgtccgccgtcaacttcccggaagtgtcgctgccggcgcatggtccgaacgccagccgcctgctgcacatccacgaaaaccgtccgggcgtgctgacgcagattaaccagatcttcgccgaagagggggttaacatcgccgcgcagtatctgcaaaccgggccggaaatcggctacgtggtgatcgacatcgaagcggaaaccgcgcgcgctgacgccgcgctgcagcgtatgaaggccatcgacggcaccattcgcgcccgtctgctgttctga

SEQ ID NO: 436366 - DNA, 657 bp, Serratia marcescens
atgacgcaggatgaactgaaaaaagcggtgggctgggcggcgctggaatacgtgacgccgggcaccatcgtcggggtcggcaccggttctaccgccgcccactttattgacgcgctgggctccatcaagcaccagatcgaaggcgcggtgtccagctcagacgcctccaccgccaagttgaaaagcctcggcatccacgtgttcgacagcaacgaagtggactcgctcgatatctacgtggacggcgcggacgaaatcaacggccatatgcagatgatcaagggcggcggcgcggcgctgacgcgcgagaagatcatcgccgccatcgccaagaaatttatctgcattgtcgacgccagcaagcaggtggacgtgctgggcaagttcccgctgccggtggaagtgatcccgatggctcgctcttacgtggcgcgcgagctggtgaaactcggcggcctgccggagtatcgccagaacgtggtgaccgacaacggcaacgtgatcctcgatgtgcataacctgagcatcaccgacgccatcgcgctggagaacaagatcaacggcatcgccggcgtggtgaccgtggggctgttcgccaaccgcggcgcggacgtggcgctggtcggcaccccggaaggcgtgaaagtagtcaaataa

SEQ ID NO: 436367 - DNA, 894 bp, Serratia marcescens
atgaaacgcccagactatcgtacgctgcaagcgctggacgcggtgatccgtgagcgcggcttcgagcgcgccgcgcaaaaactctgtatcacgcaatcggcggtatcccaacgcatcaaacagctggaaaacctgttcggccaaccgctgctggttcgtaccgtgccgccgcgcccgaccgaacaagggcaaaagctgctggcgctgctgcatcaggtggagctgctggaagaagagtggctcggcaatgacaccggcgtcgatacgccgctgctgctgtcgctggcggtcaacgccgacagtctggcaacctggctgctgccggcgctgaagccggtgctggcggactcccccattcgcctgaatctgcaggtggaagatgaaacccgcacccaggagcggctgcgccgcggtgaggtggtgggcgcggtgagtattcagccgcagccgctgccgagctgcctggtggatcggctgggggcgctggactacctgttcgtggcctcccgcggcttcgccgagcgctatttcccgaacggcgtcacccgctccgcgctgctgaaagcgccggcggtggccttcgatcatctcgacgacatgcaccaggcattcctgcagcagaacttcgatctgtcgccgggcagcgtgccctgccacatcgtgaactcatcggaagccttcgtgcagctggcgcgtcagggcaccacctgctgtatgatcccgcatctgcagatcgaaaaggagctggcatccggtgaactgatcgatctgacgcccgggctataccagcgccgcatgctgtactggcaccgtttcgcgccggaaagccgcatgatgcgcaaagtgaccgacgcgctgctggaacacggtcatctggtgctgcgtcaggattaa

SEQ ID NO: 436368 - DNA, 732 bp, Serratia marcescens
gtgaagctaaaagcattggctatggccgcaatggtcggattagggacgttaccgatggcgctgcaggcggctgaagtgcctgaagggccgcacgtcgtcacctccggcaccgccagcgtggacgccacgccggatatcgccaccctggcgatcgaagtgagcgtctcctccaaagacgccgcccaggcgaagaagcaggtagacgagcgcgtggcgcagtactttgatttcctgcagaaaaacaacatcgagaagaaagacatcagcgccgccaacctgcgcacccagccggaatacgattacctaaaaaccggtgagtcggtgttgaagggctaccgggcggtgcgccaggtgcaggtgactctgcgtcagttggacaagctgaacgagctgctggacggcgcgctgaaatccggcctgaacgagatccgcgcggtggagctgggcgtcgccaagccggacgtgtatcgcgagcaggcgcggcaaaaagcgatcgagaacgcgactcaacaggcagaatccctggccaaaggcttccacgccaagctggggccggtgtacagcattcgctaccgggtcgccaactaccagccgatgccggtggcgcggatgtataaggcggccggtgcggcggcggaaagcgacgcggcgcaaacctatgaacagcaaagcattcacttcgacgatcaggtggacgtggtgttcgagctgcagcgtaacgccgcgcagtaa

SEQ ID NO: 436369 - DNA, 618 bp, Serratia marcescens
atgttagccgtcttcctgcagggctttgccctgagcgccgccatgatcctgccgctgggcccgcagaacgtattcgtgatgaaccagggcattcgccgccagtatcatttgatgattgcctcgttgtgcgcgttgagcgatatcgtgctgatctgcgccggtattttcggcggcagcgcattgctgacccgctcgccgttgctgctggcgctggtcacctggggcggggtggcgtttctgctgtggtacggctggggcgcgttccgttccgccttcagcccgcaacctgcgcaggccgcggcgcaggagctggcgcagagccgctggcgcctcgtggtcaccatgctggcggtcacctggctgaacccgcacgtctatctggatacctttgtggtgctcggcagcctgggcgggcagctgacggcggacgtgcgttcctggttcgcgcttggcgcggtcagcgcgtcggcggtgtggttcttcgggttggcgctgctggcctcctggctggcgccgtggctgaacacgcagcgggcgcagcgcatcatcaacgcgctggtcgggctggtgatgtggggcatcgcgctgcagctggcctggcagggggcaaatttataa

SEQ ID NO: 436370 - DNA, 819 bp, Serratia marcescens
atgagcctgaaagccgtcgacgagaaagatgacaagaaagacaaaccgctgggcagccaaagcctgttccgcggtttgcagttgattgagatcctgagtaatttccccaacggatgtccgctggcgcatttgtccgagctggccggcatgaacaagagcacggtgcaccgcctgctgcaggggttgcacaccagcggctatgtgacccaggcgccgtcgccgggcagctaccgcctgaccaccaagttcatttccatcggccagaaggcgctgtcgtcactcaacatcattcacgtggccgcgccgcatttggaacagctgaatctggaagtgggcgagacggtcaacttctccagccgcgaagacgaccacgtcatcctgatctacaagctggagccgaccaccggcatgatgcgcacccgcgcctatatcggccagcatatgccgctgtactgttcggcgatgggtaaaatcttcatggcttacggcaacgatgattacccggctcactactggcagactcaccagcaagagattcagacgctgacgcgcaataccattaccgagctgccgaagatgtatgaggaactggccgatattcgccagcgcggcatggcgatggatcgcgaggaaaacgagctgggggtctcctgcgtggcagcaccggtgttcgatattcaacagcgcgtgccttatgcggtgtcggtttctctgccgaccgccaagctgcagcagatcggcgtcaaaagcttgattaaaccggtgctggccaccgcgcaacgcatctctcaggagctggggttcgtcacgccgatttaa

SEQ ID NO: 436371 - DNA, 1554 bp, Serratia marcescens
atgactatggataatgcggcacaacccatccttaccctcagccacatcgtcaaacgatttggcggcaacgtggcggtcaacgacgtcagcctgcaggtgatgccgggcgaagttctggcgttgctgggcgaaaatggcgccggcaaatcgacgctgatcaaagtgctggcgggcgtctacccgcgcgacggcggcgatattcgctttcagggcgcaagcatcgcctccgccgccgcgataaaaagcaccagccgccagccgatcgcctttattcatcaggatctcggcctgatcgaatggatgacggtggcggaaaacatggcgctggtgatggggtttccccgccgctttgggctgatcgactggcgcgccattcgccgccgggcggcgcaggcgctgcaagacgtcggcatcgcgctcgatcccgatgcgcgcgtcttcgaactgtcgcgcaccgaaaaatcgctgctggcgatcgctcgcgcggtggcggtcaacgccgagctgctggtgctggatgaaccgaccgcctccctgcccgccaacgacgtgcgtcatctgttcgccgtgatcaaccggctgcgcgccaaaaaggtcggcatgatttatgtcacccaccgtctggacgaagtgatcgaaatcgccgatcggatctgcgtgatgcgcgacgggcgctatgtcgccggcggtcgcaccgccgactactcgctgcgcgatctggtgcaaaccatcgtcggcgaagcgatggcggacgatcagcgcgaaccgctgccggaacatcgtccgccggtgctgcagctcgatagcgtcacggtgggcgacatcggcccggtgagcttcgacttgcagccgggcgagatgctggcgctggccggcctgcgcggggccgggcaagaagagattggccggctgctgttcgggttgcgccaggccgacggcggcgcgattcgatttcgcgatcgaccctatcaggcgagcaccccgcagcaggcgatggcctgcggcgtttcgctggtggcgggcgatcgcaccggcgaaagcctggtgatgtcgatgagcgtgcgtgaaaacctgtttatcaacccctgcgccagcggccaccggctgctctcccgctacgggctgcgagcggagatcggcgccagttggtggaaggtgcagctgttcgacgtacgccccaaggacgtcaatatcgatatcagcgcgctgtccggcggcaaccagcaaaaggtggtgatggcgcgctggatgcatctgggggcgccgctgctgatcctggaagatcccaccgccggcgtggacgtcggcgcgcgcgcggaaatctaccatctgctgaataaatccctggcggaaggcgtggcagtgctggttatctccaacgatttcgaggagatcgcccatatttgcaaccgcgcactggtattcaaccgcgggaaagtggtcggcgagctgaaaaatcagcaggtgtcattcgccaatttattggagctggcctctgccagcaccggggaaaacgtcgcaatcacgtcagaatccgaggtaggccatgtctaa

SEQ ID NO: 436372 - DNA, 1083 bp, Serratia marcescens
atgtctaaaacatccgttaaatcaaccgcactggagcagcgcgtcagcctggcgcaggacggcaccggcccgtggctgatgcaggttctcacccgctatggcctgctgctgctgtgcatcgcgctggtcgtgctgttctcactgctcaccccctccttcgcatcgatgctgacgcttcaggctatcttgtcgagcaaggccaaaatcgccctgttggcgctggcggcgaccatcccgatgatcgtgggcaagatcgatcttaacgtcggtttcggcattgtgctgtggcacattctggcgatcacgctgcaggtggaatacggcttctcctggcagatggcggtgctgacggtgctggcgatctcggcgctgtacgggttgctgaacggcattctggtggcgctggccgatatcgacagcttcgtcgccaccctcggctccggcaccgtactgtacgccattgccctgtggcactccggcgggcggcagatcgtcggcgacttgccggatgccttcatcgcgctgcaccacaccgagatcgccggcattccgatcgtggcattttacgtgctgatcgtcgcggtggtgctgtggctcatcaccgaacacaccccgctcggccgctgcatgtatgcggtgggcggcaacccggcggcggcgcgcctgaacggcatctcggtcaaccgctttaccatcggcgccttcatcgcctccagcgtgctcaccggtttcagcggcgtgttgatcgccgccgaacagggcgtcggccaggccagcgtcggcatggactatctgctgccagcgctggtcggcgccttcctcggcagcaccaccattcgcccagggcgcgtcaacgtctggggcaccgtggtcggcatcgccattctggctatcggtatcgccggcatccagcagttcggtggcgaattctgggtcgagccgctgttcaacggcgcgacgctgttgctgtcgatcactctggccggctatgcccaacgccgtcggctgctcaatcagaaagcggtacaacgcagccaggcgacgccggctgacaacaacaatcagacagcgacccacccttaa

SEQ ID NO: 436373 - DNA, 1101 bp, Serratia marcescens
atgaaacgcatttggctgttaccggggttcaccacattcttgctcgccgcatcgccggtctgggccgacgcctatctcgatcaggccaccgccgccgtggcgaaggctaccgccagcgccacccagtgggacggccccaccagcggcccgcagctgcaggccaacaagaagatcatttttatcgcctccgacatgaagaacggcggcgtgcaaggggtgcaacaggggttgagcgaagcggcgaaagccgccggctggaagctggaaacgctcgacggcggcggctcggtgaaagatcagctggcatcgctcaatcaggccatcgcccagaaaccagacggcatcgtgatcggcggctggaaccctaacgtcgccaagatcccgctgaaaaaggccgtacagcagggcatcgtgctgaccgcctggcatgcggtgccggaaccgggccccatcgccaaatacaatgtgttctataacgtcacgtcggattccaacgaagtggcgcgcatcgccgcgcaatacgcggtggtgcagtccggcggcaaggcgagcgtgttgatcttcaccgactcgctgtaccaaatcgccttggacaaggccaacgtcatgaaagaagagatcgccaaatgcagcggctgtacgctgctggaattcatcgacacgccgctggcagataccgccaaccgcatgccggcgatgaccttcagcctgctgcagaagtacggcgacaaattccaatatgcgctggcaatcaacgatctgtatttcgactttatggcgccggcgctgaaaaccgccggcaaaggcggcaagaacgcgccttacaacgtgtcggccggcgacggttcaatctccgcttaccagcgtatccggtcgggcgacagccagtcggcgacggtgccggagcccttgaaactgcacggttggcagctgctggacgaattcaaccgcgccttcgccaagcagccgccttccggctacgtcaccccggcgcatctggtcacccgcgacaatatcgccgccgacggcggcgccaataacctgtatgacccgcaaaacgattaccagggccattacaaagcgatctggggcgtgaagtga

SEQ ID NO: 436374 - DNA, 876 bp, Serratia marcescens
gtgaacggcggcattcggcattcattgcgcacgcacgctcagctcgagcgcttgtgctcaccggcgatttgggccgaagggccggtctggctgccgcaagaggatgcggtggtgttcagcgacgtgaaaggcaatcgcatgttccgctggtcgcgccggggtgagctaagcctataccgctcgccgtcgcactacgccaacggcaatgcgcgcgacggcgaggggcgtgtggtcagctgtgaacacgggcggcgcggcatcagccgcaccgaaagcgatggcgaggtgcgcctgttgatcgaccgcgtcgacggcaagcgctttaactcgccgaacgacgtggcggtgcgttccgacggcaccctgtggttcaccgatccgccctacggcatcatcggcgacgaagagggttacaaatcagaaagccaggtgatcggctgctatctctacagcttcgatccacgcgacggttcgctgaccatcgccgcctgcgacctgcagcgcccgaacggcctggcgttttcaccggatgaaaaatggctgtacgtggcggacatgtcgatcgtggattttccgacgctgggccgccgcgagctgcgcgtctatgcggtcaacggtcgcgagctggaagccggccgccgttttgcaaccgtggaacccgggttcccggacggcttctgcgtcgatcgggccggtaatctgttttgcagctgcgccgacggcgtgctggtctttgatccacaggggcgacagatcgacaaaatcagcgtgccggaacgcgtctccaattgtaccttcggcggcccgaacggcgatgagctctatatcaccgccaccacctcgctctaccgcatggtgctgaacacccgcggttag

SEQ ID NO: 436375 - DNA, 999 bp, Serratia marcescens
atgagagtgagttacagcgagttaaaacagcaattcaaacgcgtgctgctggcgcgcggcgtggcggaacatctcgccgacgactgcgccggcatgttcgccgacaccaccgccagcggcgtttactcccacggcgttaaccgctttccgcgctttattcagcagctggacgccggcgatatcgtgccggacgccgaacccagcaaactgttgtcgctgggggcgatcgagcaatgggatgcgcaccagggcatcggcaaccttaccgcccgccgcatgatggatcgcgccatgcagttagccgacgagcatggcatcggcctggtggcgctgcgcaacgccaaccattggatgcgcggcggcggttacggctggcaggcggcggagaaaggctatatcggcatttgctggaccaactcgatcgccgtgatgccaccgtggggcgccaaaacgtgccgtatcggcaccaacccgctgatcgtcgccgtgcccggcaacccgatcaccatggtggacatgtcgatgtcaatgttttcctacggcgcgctggagctgaaccggctggcgggcaaaaccctgccggtggacggcggcttcgacaacgatggccgcctgacccgcgatccggccaccatcgaagagaaccggcgcattttgccaatggggtattggaaaggatcggcgctgtcgatcgtgctggacatgatcgccaccctgctgtccggcggcgcctcggtggcggaagtgacggaagatcaccgcgacgaatacggcgtctcgcaggtgttcatcgcgattgagatagaccggttaatcgacggcgacagccgcgatcaaaaactgcagcgcatcatggattacgtcaccagcgccgaacgggacaaccccgacgtcgccattcgcctgccgggccacaagttcccgcgcattctggaagaaaacctgcgcgacggcattccggttgacgaacgagtctgggcgcgcattcaggcgctgtaa

SEQ ID NO: 436376 - DNA, 474 bp, Serratia marcescens
atgatattcggccacatcgccaacaccgcgcccgagcagtacccgacgccggtcgccaacgccgtcgcctatttgcagcgcaccgatttcagcgtcttgcccgcagggcgctatgaagatcccgccaccggctacgtggtgcaagtgctggatctgcatacccaaccaccggatgcgctacgcccggaagtccaccggcaaaacgtcgacgtgcagtttctggtcagcggtaccgagcttatcggcgtagcggcggacaacggcgacaacgtcattcatcaggagctgctggcgcagcgcgacatcctgttttatcaggacgtggccgacgaatcctggctcacgatgcggcccggcaacttcgcggtattttttccgcaggacgtgcatcgcccggcctgcattaaccaacgcccctgcgcgatacgcaaggtggtggtgaagataccgctggcgtcgtttagcgcccgatag

SEQ ID NO: 436377 - DNA, 1296 bp, Serratia marcescens
atgaatacagcctccgtttccgtcagccaaagccaggctattcccaagctccgctggctgaggatcgtgccgccgatcctcatcacctgcatcatttcttacatggatcgggtcaacatcgccttcgccatgcccggcggcatggatgacgaactcggcatcaccgcctcgatggccgggctggccggcggcatcttctttatcggttacctgtttctgcaggtgcccggcggcaagctggcggtatacggcaacggcaagaaattcatcggctggtcactgttggcttgggcggtgatctcggtgctgaccgggctggtcaccaaccagtaccagctgctgttcctgcgcttcgccctcggcgtttccgaaggcggcatgctgccggtggtgctgaccatgatcagcaactggttcccggataaggagcgcggccgcgccaacgccatcgtcatcatgttcgtgccgatcgccggcattctcaccgccccgctgtcgggttggatcatcaccgcctgggactggcgcatgctgtttctggtggagggcgctctgtcgctggtagtcatggcgctgtggtacttcaccatcagcaaccggccgcaggaagccaaatggatctcgcaggcggagaaagagtatctggtgaagaccctgcacgacgaacagctgctgatcaaaggaaaaacggtgcgcaacgcctcgctgcgccgggtgctgggcgatcggatcatgtggcagctgatcctggtgaatttcttctaccagaccggtatctacggttacaccctgtggctgccgaccattttgaaagggctgacccacggcgatatggagcaagtgggcctgctggctatcttgccctatatcggcgccatcttcggcatgctgatcatctccaccctctccgatcgcaccggtaagcgcaaagtcttcgtcgccctgccgctggcctgctttgccgcctgcatggcgctgtcggtgctgctgaaggatcacatctggtggtcttacgctgcgctggtcggctgcggcgtattcattcaggcggcggccggggtgttctggaccatcccgcccaaattgttcaacgccgaagtggccggtggcgcacgtggcgtgatcaatgcgctgggcaacctcggcggcttttgcggcccgtatatggtcggcgtcctgatcagcctgttcaacaaggatgtcggcgtctacagcctggcggcctcgttggcgatcgcctccgtgctggcgttgatgctgcccaataaatgcgaccacagcgcgaggagcgaatga

SEQ ID NO: 436378 - DNA, 1491 bp, Serratia marcescens
atggaatattggctggggctcgactgcggcggtaccttcatcaaggcgggtttatacgaccgcaggggccatgaacacagcgttgcgcggcgcaatctggcgatcgtcgcgccgcagcccggctgggccgagcgcgatatggcatcgctgtggtgcaccgccgccgacgtgatccgtgaagtgctgtccgccagcggcgtcgccgccggcgccatccaggccatcggcatctcggcgcagggtaagggggcgtttctgctggataagcaggggcagccgctgggcaacgccatgctctcttccgatcagcgcgcgctggcgctggtgcaggaatggcaacgacagggcgtgccgcaggcgctatatccgcaaacgcgccaaacgctgtggaccgggcacccggtctcgctgctgcgctggctgaagcggcatcagccggaacgttacgcccgcatcggcagcgtgctgatggcgcacgactacctgcgctattgcctgaccggcgagctggcctgcgaagaaaccaatatctccgaatccaacctgtatcagatgcgcagcggacgctatgacccggcgctggcgcagctgctgggcatcggcgacatcatgcccgccctgccgacgatcgtcggttcggccgatatcgccggccgcgtcgaggcaaacgccgcggccatcaccggcctgcaaatcggcaccccggtggtcggcgggttgttcgacgtggtgtccaccgcgttgtgcgccggcctgcaggacgaaacccggctcaacgcggtgatggggacctggtcggtcaccagcggcatcaccgacgccatcgtcgagggtttcgatcatccctttgtctatggccgccacgccgaaaacggccaatacatcgtgcacgaagccagccccacttccgccgccaacctggaatggttctgtcaccaatgggggctgcaggactacgaccagcttaaccgctgggtcgccgccctgccgaaagccgccggcgatctgctgttcgcccctttcctgtatggctccaacgccggcctggggctgagcgccagcttctacggcctgcaggccttccaccagcgcgagcacctggtgcaggcgatctacgaaggcgtggtgttctgccacatgacgcaccttaaccgtatgcgccggcgtttccctgaggcgcaggcgctgcgcgtgaccggcggccccgccaaatcccgcccctggatgcaaatgttcgccgacgtcagcggcctgccggttgagctgccgcaggtggaagaaaccggctgtctgggcgcggcgatggcggccatggtcggcagcggcgtcttcaacgatttcaccgccgcccagcaccggctggcgccgcgtatcgagcggctgctgcctgatgcggccgccgccgaagcttacgaccacaaacaccaacgttatcaggcgctgattgctgcattgcaaaatctgcagcccgccaacaaggaggccccatga

SEQ ID NO: 436379 - DNA, 657 bp, Serratia marcescens
atgagcacgaagccgcgcctgcagctggcgctcgatcaaacccgtttggatacggcgctgcgcaccgccgagaccctcagcccccatgtggacatcatcgaggccggtaccattttgtgcatcagcgccggtattcaggcagttagcgcgctgcgtgaacgctgtccgcagcacacgctggtggccgatctcaaggtggccgacgccggtgcgacgctggccgatcaggccttcggccagggcgcggactggatgacggtgatctgcgccgcgccgttggccaccatggccagcgcgcgggaggtcgccgagcgtcacggcggtgaaatccagatcgaactgttcggccgctggacattggaggatgcgcggcaatggcgcggcctcggcattcgtcaggcgatctatcaccgcggccgcgacgcgcaggccagcgggcaaacctggggccggcaggatctggatcggatgaaggcgctgtccgatctgggcatcgagctgtcggtgaccggcggcatcacgcccgccgacctgccgctgtttaaagaaatcgccgtcaccgcctttatcgccggccgcgcgctggccgaggccggcgatccgccggccgccgccaggcagttccgcaccgccatcgatgacatctggagatcatga

SEQ ID NO: 436380 - DNA, 861 bp, Serratia marcescens
atgcgtcagcacccgttgggaatttacgagaaagcgctgccgaaacacctgagctggcccgaacgcctggcgctggccaaggcctgcggcttcgacttcgtcgaaatgtcggtggacgaaagcgatgaacgtctggcgcgcctgagctggagcaaggcgcagcgcctggcgctggtggacgccatgctggaaaccggcatccgcattccgtcgatgtgcctctccggccaccggcgctttccgtttggcagccacgatccggcgctgcgacagcgcgccttcgacgtgatggaacaggccattcagctggccaaagatgtcggtatccggacgatccagctggccggctacgacgtgtattacgaagagcaggacgaggggacgctggcgcgctttagcgaaggcatgcagtgggcggtagaccgtgccgccgccgcccaggtgatgttggcggtggaaattatggacaccgcctttatgaactcgatcgctaaatggaaagcctgggacgccctgctggcctcgccgtggttctcggtgtatccagacgtcggcaacctcagcgcctggggcaatgacgtgccgcgcgagctggagctgggcatcgatcgcatcgccgccattcacctgaaagacacctacccggtcaccgccacttcgccggggcaattccgcgacgtgccgtttggcgaaggctgcgtcgacttcgtcgaggtgtttcgcacgctgcagcgcctcaattaccgcggcgcattcctgattgagatgtggaccgaaaaagccgaggagccggtggccgagatcgttcaggcccgccgctggatcgaacagaaaatgcaacaagggggcatgacatgctga

SEQ ID NO: 436381 - DNA, 696 bp, Serratia marcescens
atgctgactcagttaaaacaacaggtgctggaggccaatctcgatctgccgcgccataagctggtgacctttacctggggcaacgtcagcgcggtggatcgcgaacgcggtctggtggtgatcaagccttccggcgttgaatacgagcatatgacggcggaggatatggtggtggtcgatctggccagcggccgcaccgtcgagggggcaaaaaaaccgtcgtcggacaccgccacccatctggcgctgtaccgcgaatttgccgatatcggcggcatcgtccacacccattcgcgccacgccaccatctgggcgcaggccgggctggacatccccgcctggggaaccacccacgccgactatttttatggcgctatcccctgcactcgcctgatgacccaggatgaaattgagcacgattacgaactggaaaccggcaacgtgattatcgaaaccttccgccggcgcgatatcaatcccaacgcgatcccggcggtactggtcaatgcccacggccccttcgcctggggcaaagacgcccacaacgcggtgcataatgcggtggtgctggaagagatcgcctacatgggcattttctcgcgccagctgacgccgggcattcacagcatgcagcgcgagctgttggacaaacactacctgcgcaaacacggccaaaacgcctactacgggcagtag

SEQ ID NO: 436382 - DNA, 699 bp, Serratia marcescens
atgtctacgatcaccgatacctttatcgccccgccatgccatgacccaatagagatcctctatcaggacgatcatctggcgctgatcaataagccggccgggctgctcagcctctcgggcaagaatccgcagaatctcgattcggtacaccaccggctggtacagatcttccccggctgcgccctggtgcaccgcctggatttcggcacgtccgggttgatggtggtggcccgcaacaaggccgccaacgccgcgctctgccggcagttcagcgagcgcaccgtcagcaaagtgtacagcgcgctgctgtgcggccatctggcgaataacgaaggggtcatagacgcggcgatcgccaaagatccggcgctgttcccgctgatgtcgatttgcgccctccacggcaagcccgcccgctcccgctatcgggtcgtcgagcgtttttatcgtgaaacggaaggcgggatcccgctgccgctgacgcgggtgcagctcaccccggagaccgggcgcacccaccagctgcgtattcacagccggcagttgggccaccctattttaggctgcgatctgtacggcgggcgcctgctgccgggtaccgaacagacgccgcggctgatgctgcacgccagcgagctggactttgtgcaccccatcagcggagagcggatcgccgctcgtcacgccgcgccgttctga

SEQ ID NO: 436383 - DNA, 540 bp, Serratia marcescens
atgacaaaactcaccttacaagagcagatgctcaaagcgggcttggtaaccagcaagaaaatggccaaagtccaaagaacggctaaaaaatcacgcgttcaggcccgtgaggccagagaggcagtggaagagaataaaaaggcgcagcttgagcgcgataaagcgctgaacgagcagcaaaagcaagccgcgctgtccaaagaatacaaggcgcaggtgaagcaactgatcgagatgaaccgcatcgttctggcgaaaggtgatatcggtttcaacttcaccgacggcaacctgatcaagaaaatcctggtggataaggcgacgcagactcagctgatcaatggccgcctcgccattgcccgcttggtggtcgagaaccgggaagagtgtgaatacgcgattatccccgcgagcgtcgccgataaaatcgcgcagcgcgatgcggccagcattgtgctgcacagtgcgctgagtcaggaagagcaggatgaagacgatccgtacgccgactttaaagtgcccgacgatttgatgtggtaa

SEQ ID NO: 436384 - DNA, 978 bp, Serratia marcescens
atgaatagagactttacctttacgattaagagcagttctttcaatgaagattataacccttctgaaagtacgcgtatcaccaccaacttcgccaatttggccagaggggaaaaccgccgggagaacctgcgcaacacgctggtgatgattaacaaccgcttcaattcgttggcgcattgggataaccccaaggccgaccgctatttggtcgaacttgaaatcatttcggttgagatgcgcgttgaagatcggggtgccagcttcccggtgatcgaaatcctgaaaaccaacatcattgataaaaaaacgcaaaagcgtatcgagggcatcgttgggaacaatttctcctcttacgtgcgcgactacgactttagcgtcttgctgccggcgcacaataaaaacacggcggaatttaccattccggatgatttcggcgatttgcacggcaatatctttaagcacttcgtcaattcaaacgaataccatgaaaatttcagcaaaccgccggtgatctgcctcagcgtgtccagcaaagacacctatcatcggacgggcaatcaacacccggtgttgggcgacgaatatcggcaagacggcgcttcgctgaccgaccggtattttaaaaaaatgggcctgcaggtgcgctacttcatgccgaaaaatagcgtcgcgcccctggcgttttatttccccggggatttgctgagcgattacaccgatctggaactgatcggcaccatcagcacgatggagaccttccagaaaatttatcggcctgaaatttacaatgccaactcggcggcggggcaatgctatcagccaagcctgaataaccaggatcattcattaaccaagattgtttacgatcgcgaagagcgtagccagttagcgattgagcaggggaaatttacggaagagcaatttatcaaaccctacaaacctcttcttgagcaatggtctgctcactacgcgctttga

SEQ ID NO: 436385 - DNA, 1032 bp, Serratia marcescens
atgaaaatattgctccctacgtcgaccgccggcagcttgcccaaacctgtctggctggcccaaccggaaaccctgtggtcgccttggaaattgcagaatgaagaattaatcgaagggaaacaggacgccttgcgtttgtcgctggcagagcaacaacaggccggcatcgatatcgtcagcgatggcgagcaaacgcgccagcacttcgtcacgacgtttatcgaacacctcagcggcgtcgatttcgagaaacgcgaagtggttaaaatccgcaatcgctacgaggcgagcgtgccaaccgttgtgggggcggtctcgcgccaaaaacccgttttcgttgaagacgccaaatttttacgccagctgaccaagcagccgattaaatgggccctgccggggccgatgaccatgatcgacacgctttatgacaaccactataaaagccgcgagaaattggcctgggagttcgccaagatcctcaatcaggaagctaaagagctcgaggccgccggcgtcgacattattcagtttgatgagcccgcatttaacgtgttctttgacgaggtgaatgactggggcattgccgccctggaaagagccattgaagggcttaagtgtgaaaccgccgtacatatctgctatggatatgggattaaagccaataccgactggaaaaagacgctgggctcggaatggcggcaatatgaagaggcgtttccgaaactgcaaacgtccaacatcgatatcatctccctggagtgccataactcgcacgtgccgatggacctgcttgaactgatccgcggcaaaaaggtgatggtcggcgccatcgacgtagcgaatcatgccgttgagacgccggaagaagtggccgctacgctgcgcaaagcgctgcagtttgtcgatgccgacaagctctatccgtcgaccaactgcggcatggctcccctgcctcgtcaggtcgccagcggcaagctgaatgcgttaagcgcaggtgccgagatcgtgcgccgagagctgttagccaaataa

SEQ ID NO: 436386 - DNA, 1350 bp, Serratia marcescens
atgagcccagataccgctcgcatcagcgaaattatcgatcgcgccaggatctcgccttatcaaatcctcatcctcaccctgtgtttcctcattgccctgctggacggtttcgataccgccatcatcggctatatcgccccggcgctgcgcgaagagtgggatctgctgcccgctcagctctctcccgccttcggtgcggggctgttcggcctgctgatcggcagcctgctgttcgggccgatcgccgacgccttcggccgcaaacgcgtgctgctcgtcgcggtgctggtgtttggcggctgcaccctggcttcggcctatacgcattcgatcgaatccctgaccctgctgcgcttcatcaccggcattggcctcgggggcgcaataccaacttgcatcaccctcagctcggagtactcaccggcgcgccgccgcatgctgatggtcaccttgagctggagcggctttaccgctgggttagccctgggcggcctgctggccgggcagatcatcccggcgttcggctggcgcggcctgctgctggtcggtggcatcgcgccgttggcgctgctgccgctgttggcctggcagatgcccgaatcagtacgctttatggccgccagcgccaaacatgccgatcggctgcgccgggtggtcgagcgtatcaccggccagcgttggacgggggtcaccatcgtcgatgacgagcgcccggcacaggccaggtcgccgatctcgcacctgtttatcgaagggcgcgccgtgcgcaccctgctgctgtgggcggcattcttctgttcgctgttcgtgttttacctgctcaccagttggctgccgacgatcctcaaagacgccggttacgatatcgcccatgcctcgcgcatcggcgcgatggtgccgctcggcggcaccctgggcgccattctgatggcgctgctgatggatcgggtcgggccctaccgcgtgctggccgtctcctacctgggcgccgcgctggtgattggcgccaccgggtatctgatgggcgacgtctacacgctggccgccgtcgtgttccttatcggcttcggcgtggccggcgcgcagaacggcctgaacctggtttccgccaccctttacccgaccgcagcccgcgtgaccggcgtcagttgggccatggccaatggccgctttggttcgatcgtcggctcgatgctcggcgcctggatgatgaccgccgccggctcgacggaggtgttcttcctctggctggcgctgccggcgctgttgggcgccgccgccatcttcctgctttatcgcctcagcctgcgccgccgcgtgccgctcacggagccggcagcggacatctga

SEQ ID NO: 436387 - DNA, 867 bp, Serratia marcescens
atgaaagatttgaatgtagtagacggcatcaacggtgccggcaactggttggtgaagaaccaggatctgttgatccagtacgcggtgaatatcgtcgccgccatcgttatcctgatcatcggttcgatcgtggcccgcgtggtcggcaatgcgctgaaccgcgtgatgaaactgcgcggcatcgacgccacggtggcagacttcctgtcggcgatcgtacgttacggcgtgctggcgttcaccttcatcgcggtgctggggcgcgtcggcgtgcagaccacctcggtgatcgccgtgctgggtgccgccggtttggctgtcggtctggcgctgcaaggctcgctgtctaacttcgccgccggcgtgctgctggtgatcttccgcccgctgcgcgtgggtgaatatgtcgatctgggcggcgtggccggtaccgtcgatcaggtgcagattttctccaccaccctgcgcaccgcagacaacaaaaccatcgtggtgccgaacggtaaaatcatcgccggcaacatcatcaactactcccgcgagccgaaccgccgtgtggatatcgtggtaggcgtggcctacaacgccgatatcgacgtggtgaagaaggtgctgggcgatgtgatcgccgccgacaagcgcatcatgcacgctaaaggcgtgactgtgcgtctgaacgagatggcgccatcttccctgaactttgtgacccgttcctggaccaccaatgcggaatactggaacgtgtacttcgatctgatggaaaacttcaagcgcgcgctggatgcccacaacatcggcattccgttcccgcaaatggacgtgcacctgtatcgcaccgaagacgcttccgccaaggcggaataa

SEQ ID NO: 436388 - DNA, 669 bp, Serratia marcescens
atgcacattcgctcttcgctcaaacactattggcaagtgcggcccaggctgctgttttccgtcggcgccgggctgctgtgctttctgcttctgcccgcccagctctcgttgctgcagcgcctgatgatcggctggaatacgctggcctggctctatctgctgtttctttggcggctgatgctggtcagcacaccgcagcacattcgccagatcgctcggcgacaggatgaaagcgccagcacggtgttggcgctggtcagtttcggttgtctggtgagcattctggcgatcctgttcgaattgagcagcgccaaacaggccagcgactcgctgaaaacgctacatctggcgttaaccggcgcaacgctggcagtctcctggctgctgctgccgaccgccttcaccatgcactatgcccatcagttttaccgtcagggcgcacagcaggatcccttgccgctgctgtttcccggcaatctcaccgagccgacctatctggactttgcctacttctccttcaccatcgcggtcgcgtcgcaaacggccgacgtggcggtcggcgccgcggaggtgcgtaaaatcgcgctcgtgcagtcggttatttcgttcgtgttcaacatgctgatcctgggcctgtcgatcaacgtcggtgccggcctgctgggctga

SEQ ID NO: 436389 - DNA, 1080 bp, Serratia marcescens
atgtctaaaatttttgatttcgtaaaaccgggtgtcatcacgggtgatgacgttcagaaagtcttcgcagttgctaaagagaacaactttgcgctgccagcggtaaactgcgtgggtaccgactccatcaacgcagtgctggaagccgcggctaaagtgcgcgcgccggttatcgttcagttctccaacggcggcgccgcgttcatcgccggcaaaggcgtgaagaccgatgtgcctcagggtgcagcgattctgggcgctatctctggcgcacaccacgttcaccagatggctgaacactacggcgtgccggtgatcctgcacaccgaccactgcgcgaagaaactgctgccatggctggacggcctgctggacgccggcgagaagcacttcgccgctaccggcaaaccgctgttctcttcccacatgatcgatctgtctgaagaatctctggaagaaaacatcgagatctgcagcgcctacctgaagcgcatggccaaaatcggcatgacgttggaaatcgaactgggctgcaccggcggtgaagaagatggcgtggacaacagccatatggacgcttccgcactgtacacccagccggaagacgtggcttacgcgtacgaaaaactgaacgccatcagcccgcgcttcaccatcgcagcctccttcggtaacgtgcacggcgtgtacaagccaggcaacgttaagctgactccgaccatcctgcgtgattctcaggactacgtgtccaagaaattcaacctgccgcacaacagcctgaacttcgtgttccacggcggttccggttctaccgacgcagagatcaaagagtctgtgggttacggcgtgatcaaaatgaacatcgacaccgacacccaatgggcgacctgggatggcatcctgcagtactacaaagcgaacgaagcttacctgcagggccagctgggcaacccgaaaggcgccgatcagccgaacaagaaatactacgatccacgcgtatggctgcgcgcagcgcagaccagcatggtgacgcgtctggagcaggccttcaaagatctgaacgcggtagacgttctgtaa

SEQ ID NO: 436390 - DNA, 1164 bp, Serratia marcescens
atgtctgtaattaagatgaccgatctggatctggcgggtaaacgcgtactgatccgctccgatctgaacgtgccggtaaaagacggtaaagtgacttccgacgcgcgtatccgcgcttccctgccgactatcgaagctgcgctgaagcaaggcgcccgcgtgatggtaacctcccacctgggtcgtcctaccgaaggcgagtacaacgaagaattctccctgctgcctgtggtcaactacctgaaagatcatctgaaatccccagtgcgtctggcgaaggattatctggatggcgtcgacgtcgccgaaggcgaactggtggtgctggaaaacgttcgcttcaacaagggcgagaagaaagacgacgaaaccctgtccaagaaatacgcggcgctgtgcgacgtgtacgtgatggacgcgttcggcaccgcgcaccgcgcgcaggcttccacccacggcgtgggcaagttcgcgcctgtcgcctgtgccggcccgctgctgtccgccgagctggaagcgctgggcaaggccctgggcaacccggcccgtccgatggtcgccatcgtgggcggctctaaagtctccaccaaactgaccgtgctggattccctgtccaaaatcgccgatcagctgatcgtcggcggcggcatcgccaacaccttcgtggcggcgcagggcaacaacgtgggccagtccctgtacgaaccggatctgatcccgaacgcgcagaaactgctggaaacctgcgacatcccggttccgaccgacgtgcgcgtggcgaccgagttctctgaaaccgcgaccgcgaccgtgaagcaggccaacgagatccaggacaacgagcaaattctggatatgggcgacgtctctgccgagcgtctggccgttatcctgaagaacgccaagaccattctgtggaatggcccggttggcgtattcgagttccctaacttccgtaagggcaccgaaattgtcgcccgcgcgatcgccgatagcgacgctttctctatcgctggcggcggcgacactctggcagccatcgatctgttcggtatcgctgacaaaatttcctacatctccaccggcggtggcgcattcctggaattcgttgaagggaaaccgctgcctgcagtcgtgatgctggaagagcgcgctaagcagtaa

SEQ ID NO: 436391 - DNA, 1017 bp, Serratia marcescens
atgaccatccgcatagcgataaacggctttggccgcatcggccgcagcgtattgcgcgcactgtacgaatcgggacgacgggcggaaatctccgtggtggcgatcaacgagctggcgaacgccgaaggcatggcccatctgctgaagtacgattccagccacggccgctttgcgtgggatgtgcggcaagagtgcgacacgctgagcgtcggagacgacgcgattcgcctgttgcatcagccggcggtggagcagttgccctggggcgaactgggcgtcgacgtggtgctggactgcagcggcgtgtacggcagccgggcggatggcgaagcccatctggcggcgggggcgaagaaagtgctgttcgcccatccgggcggcaacgatctggacgccaccatcgtgtttggcgtcaaccatcagacgctgctggcggaacaccgcatcgtgtccaacgcctcgtgcaccaccaactgcattattccggtgatcaagctgctggacgacgcctacagcatcgagtccggcaccgtgaccaccattcactcggcgatgaacgatcagccggtgatcgacgcgtatcacgcggatttgcggcgcacccgcgcggcgagccagtcgatcattccggtcgataccaagctggccgcgggcatcactcgcatcttcccgcagttttgcgatcgcttcgaggctatctcggtgcgcgtgccgaccatcaacgtgacggctatcgatcttagcgtcagcgtgagcgccgcggtgaaggtagcggaggtcaaccagctgttgcaaaaggccgcacgggaatcatttcgtggtatagttgactacacggaattaccattggtctcgattgattttaaccatgacccgcacagcgctatcgtcgacggtacgcagacccgggtcagcgggcagcacctgataaagaccttggtctggtgcgacaatgaatggggctttgccaatcggatgttggatacaacacgggcaatggccgccagcggtttctag

SEQ ID NO: 436392 - DNA, 1071 bp, Serratia marcescens
atgattgaactttcggtagagaatctgcatttgacctatggcgacaacccggtgttgaaaggggtgtcgatggatctgaaacggggcgaagtggtctcgctgctgggcccgtcgggcagcggcaaaaccacgctgctgcgggcggtagccgggctggagaaaccgagccaggggcggatcgtcatcggcaacagcgcggtgtacaacggcagcgcacgcagtgaaattcccgccgaagagcgcaatctggggctggtgtttcagtcctacgccctgtggccgcataaaacggtgtttgagaacgtcgcttacccgctgaaactgcgtaagaccgcctcggcggaaatcgcccagcgggtgcaggcggtgctggatcagctcgggctggggcatttggccaaacgccatccgcaccaactctccggcggccaacagcagcgcgtggcgatcgggcgcgcgctggtctacaacccgccggtgatcctgctggatgagccgctgtccaaccttgacgccaagctgcgcgaagaggcgcgagtattcctgcgcgagttgatcatcaagctgggtctgtcggcgctgatggtgacccacgatcagaacgaggcgatggccatttccgatcgcatcctgctgctcaataacggcaaaatcgaacagcagggcacgccgcaggagatgtacggttcgcccaccacgctgttcaccgccgagttcatgggcagcaacaaccggttgccgggcaaggtcgtcgcgctggaaggcgatcgggcgcgcatcgaaggtaaggattgggcgctgtggggcaaagcgggcgaaggcgtgcaggtcgggcaggagggcacggcggtgatccgcgtcgagcgcgtgcggttgggcgaagatccgcagggcaaccagcttgagctgccgttgctgaccagcatgtatctcggcgatcgctgggaatacctgttccgcaccgtggccgaagatttcgtggtgcgtgcctatggccacgaggcgcgcgatcaaacgctgtgccggctctccctgccggccgagcatttgtggatattcccgaaagcttaa

SEQ ID NO: 436393 - DNA, 1770 bp, Serratia marcescens
atgcaagcatggcgcagaaagtggcagagcctgccacgcggcctggtggtgttgataaccgcgctggttatctatgtccccctgtcgtttatcatcattcaaagcttcctctcggcaccgtttttctctccctccaaggtcttcagcctggaggccttcgagttcatctttaccgatccggatttctacaaggcgctgaaaagcggctttattctggcattcggcctggtgattatcgccatcccgctcggcggcattttggccttcctgatggtgcgcaccgatctgccggggcggcggatcatcgaaccgctgattttggtgccgatcttcgtgtcgccgatggtgctgggtttcggttacgtggtggcggcggggccggtcggcttcttctcgctgtgggcggaggcgctgctgggtttcgtgccgtggaacatctattcgatggccagcatcgtggtgatagccgggttgacgcacgtgccccacgcgtatctgtacatctcctcggcgctgcgcagcgtgggctccgacgttgaagaagcggcgcgcaccgccggcgctacgccgctgcaggtgatgaccgccgtcagtctgccgatggtgcggccgtctatcttgtacgccggggtgctgctgttcttcctcgggctggaggtgttcggcctgatgctggtgctgggcgatccggaaggcaacctggtgctggcgacctacctgtatcagttgaccaacaagctgggcacgccttcttaccacctgatggcggcggtagcggtggtgctgatctgcatcaccattccattggtgatgctgcagcgcaggctgatgcgtaccgccaaccgtttcgtcaccgtcaagggcaaagcctcgcaggcgcgcgcgctgccgctgggcaaatggcgctgggtggccggcgcggtggtgatgttctggctgaccgtgaccatcggcgtgccgctgatcggcgtagtgctgcgcgcctttatctccaactggggcgtgggcgtgtctgtctgggacgaactgtcgatcaacaccttccgcaccatctgggcgcaacccaacctgctgcgcgccatcgtcaactcgatggcgatcggggtgatcggcggggcgctggcggtggcgtgctatctgtttatcggcattgccatgcaccgcaagccggatggcgccacgcgcttcctcgactacagcgtgctggtgccgcgcgcggtgccggggctgttggccggcctggcgttcctgtgggtgtttctgttcctgccgatgtggttggacaaatcgcttaaggaaggctggctgtcagtgctgccgatggcagaatggctgcgcgagaacgtgatcgtctggttgcgttcgctgcgcagcaccatcttcagcgtctggctggcgtacaccgtggtgtggatggcttacggcctgcggctgatctcttctacgctgctgcaggtgggaccggagctggaggaggcggcgcgcagcgccggcgccagccgcggtcagatcacccgccacgtcaccattccgctgtcgcgctacggcctgatcggctcctggttgctgatgttcctgatctttgaacgcgaatattccaccggggtgtatctgctgtctccgggcacagaaaccatcggctcgatgctggtttccctgtgggccgcgggcgctatcgatatcgtcgccgcgctgtcgttcatcaatatcctgctggtggtgttggggctggggatcgccttgcgctttggagtgaaattacatgattga

SEQ ID NO: 436394 - DNA, 1092 bp, Serratia marcescens
atgatgatgaaaaaaatcagcgcgaccgtagctgctatcaccttactgggctccgtttccgcctatgcggccttcccggcgggctaccccgccgactatcagaaactggtcgacggcgcgaagaaagaaggcaaggtggtgatttattcaaccaccgacaccaaggcggcggcgccgctgatccaggggttcgaggcgttgtatccgggcatcaaggtcgaatacaacgacatgaacagcaccgaactgtataaccgctttatcagcgagcaggcggccggcggcaccagcggcgacctggtctggagctcgtcgatggacaccattttgaaactggcgggcgattacgcgcaggagtatgcctctccggagcgggctcagctgccaaaatgggcggtatggcaagataaagtgtatggcaccacctatgagccggtggtgtttatctataacaaacggctgatcccgcagggcgatgtgccggattcacacgcggcgctggctaaactgatcgccggtcagacggacaaattcaagaagaaagtcaccacctacgacatcgaaaaatccggcgtcggcttcatgctgtcggtgcaggacttcaaggccgatcctaactacttcaaaacgctggccgacgtggccaagggcgggctggcggtgcaatcttccaccggcaccatgatggagcgcgtctcctccggtgaaaacctgatcggcttcaatatcctcggttcatacgccgaggcccgcgccaagagcgatccgtcgctcggcatcgtctatccgaaagactataccctggtgctgtcgcgcgtgagcttcatcagcaaagaggccggcaaccctaacgccgccaagctgtggttcgactacgtgctgtcggagaaagggcaaaatattctcgccaatcaggcggatatcccctcgatccgcaacgacatcgaaggcaagaacgacatcgatggcatgaccaagctgctgggcaacgcgctcaagccgatcccggtcgatgacagcctgctggaatatctgcagccggccaaacgtctcgactacatcaaacaatggcgcgccgccgcggcgaaataa

SEQ ID NO: 436395 - DNA, 918 bp, Serratia marcescens
atggaaataacccagcgcgaaaaacgcgatcggcgaaaggcattgattgcgccgtttttcctgatattaatttggtcgaccggttttattgccgcgcgggcggtggcggatcatgccgatcccaaccttttcctgacctttcgctttttgatcgccgcggcagtattcgctctgctggcgctgcattgcgcctggcccaaggggcgacagttcgtaatgcacctgctgaccggcatgttgatgaacggtgtttaccttgccgcaagctggtgggcggtggcgaacggcctggcagccggagtgatgtcgctgatcggcggattgcagccgctgtttaccgcgctgattttcgcgctggtgctgcgtaagccgatcgggttacgttcctgggccgggctggcggtcggttttatcggcgttgcgctggtgctctccccgcggctgaccggcatcgacgtcggcaatatggcgctgctgccgatcctgatggggtttggcagcatcgttgcgctgacgataggcatcatggtgcagaagtcttcgctggcagcggccgatctgcgggcggcaggcgccattcagcacctcggcgcggcgatcgtgaccggcgtactggcggccgtaatgggctcaggcgcctgggacaattcgccaacgctgtggttctcgctgctgtggtcggccggcgtgttgtcgctgggcggcaccgcgctgttcatttggatggtgcgccacggcgatttgactcgcattaccgcgctgatgctgctggtgccgccggcggcggcgctgcaggcttacgcgctgtttggtgaggcgttgtcgctggtgcagctggcgggatttgttctgacgctgctgggggttgccatcgtacagcgaattcgcctgctgcggcgctctcacctggccgaatag

SEQ ID NO: 436396 - DNA, 333 bp, Serratia marcescens
atggccgaaatcactgattttatgaaactggatatgcgtattggcgaaattatttccgtggaatataacgacaaggcattaaaacccgcctataagctgcgcattgatttcggcgaagaaattggcattaaaaacagctcggcgcaattatgcgaaaactatcaggaagatgatctgcttggaaaaaaagtcatctccgtcgttaatttccccgccaggcgggttgccggatttaaatctgaagtgctggtacttgccgcggtcacccgggatcaaggcactgtcttgctgaaacccgatgtcgacgtggagatcggcagcaagattttataa

SEQ ID NO: 436397 - DNA, 882 bp, Serratia marcescens
atgcgacagttatccctgcttgatgaagttaagaaggcgtaccaggaacaccgttcagcctttatccccggcgccaccatgcaagcgatcctgctggcgctgggcgcgcggccggaagattttgccaggctgcagcaggtcagcgccaatctggcggacgatcccacactgcctttccgcaagtccagaaacggccgcttctgcttcgacttcgatcgcgcccagattgagcggctggagttccagcctttcgtgctctcggtcgaggaagacttcatccgctacgattcgggaaaggtgcgccatttccgcggcatcaacgacgatctgcagttgaatacggcatttcaggcactgatgaaattcaaagcctacgtgatcgatggcgtgagcgtgacgccgcgcccccggcttaatcaggagatcaacaaattcgtctgcacggtgttcaacctgcgcaccgtcaccacgccgcagatgttgggcgaaccggcgctggaaggcgtacacagcgacggcgtcgaccacaccatgacgaccttcctcggctgcgacaacatgaccgacgacagcgccaagacctttattcacgatatgcgcgaaaccagcgggatcaaattcgatcgcgcccggccggaatggattttgggcgaaatacagcatcggcatttcctcgataccctgctgattgtcgaccatgagcgcaaacacagcctctcaccggtggaagcgcaggacaaacgccggcattcgacccgtgatatgctgatctttttcacccgtaaaccggtcgaagacggccacgtctccttcgcgtatgactcttttaaaccgcatatcgaaatcccgctgtcgatagacatggtggcgcgcgcgagctaa

SEQ ID NO: 436398 - DNA, 1323 bp, Serratia marcescens
atgaccaagagtttatccccgaaagacattatcgccctgggctttatgaccttcgccctatttgtcggcgccggcaacatcattttccccccgctggtggggctgcagtccggtgagcatctgtggccggccgccctcggttttatggtgaccgccgtcgccctgccggtgattgccgtgatcgcgctggcgcgcgtcggcggcagcatcagcctgctgactggccccatcggccgcacagccggcctgctgttggcgaccgtctgctatctggcgctcggcccactgttcgccaccccgcgaaccgccaatgtttctttcgccctcggcatcgcgcccttcaccggcgacggcgccctgccgcagttcatctacagcctgctgttctttaccctggcgatggtcgtgtcgctgtatcccggccgcttgctcgacaacgtcggccatattctggcgccgctgaaaattctggcgctggccgcgctcggcatcgccgccctggtctggcccgccggtgcgccggtctccgccgtcggcagctatcaggccgcggcgttttccaccggcttcgttcagggttatcaaaccatggacacgctgtcggcgttgatgttcggctcgattatcgtcaccgccgcccgctcgcgcggcgtcagcgacagcggcctgctgctgcgctacaccctctgggccagcctgatcgccggcgtcggcctgacgctggtctatatctgcatgttcaagctcggcgccggcagcggcagcctggtcgggaacgatgctcaggatggcgcggcaatcctgcacgcctatgtgcagcacaccttcggcgatctgggcagcgtctttatggcggtgctgatgttcatcgcttgcctggtgacggcggtcggcatgacctgtgcctgcgcggacttcttctctcgctacctgccgctctcttaccgcacgctggtggttatcctcgcgctcttcgccatgctggtctccaacatggggctggccaacctgatccgcgtctcgctgccggtgctgacggcgatctacccgccctgcatcgcgctggtattgctcagcttcagccagaaccgctggcgcagcgccaagcgcgtattcgcgccggtgatcgctaccagcctggtgtttggcctcgccgacggcctgaaagcctccagcttcagcagcctgctgcccgtctggttcgataagctgccgctggccgaacagggtctggtctggctgcagcctacgctgctggtgctgttgctggcggcggcttacgaccggttgcgcagcgccgaaagcatcaagaccgcgtcgtaa

SEQ ID NO: 436399 - DNA, 228 bp, Serratia marcescens
atgggttacaacgaagatgaaagccagcttgtcgcgatgctcatccaaatcatgccgacaaatctgtcaataaagatgaaagcggagggggcaaaaattcttgctgagagcatgaaaaaggaggttgaaaggcaatcagaactaactggattgaagaaggagctaatccttgaggcgacattacagttctttgagcaacaattgcagagacagcgagtgcttcactaa

SEQ ID NO: 436400 - DNA, 2397 bp, Serratia marcescens
atggctagtaagtcattaggcactttgacaatagatttagtcgcaaaaactggcggttttgtcagaggcatggacgacgctgagcgcaaatcacagaagtggcgtaaacaagtagagagcgacgctaaagcagctggtgtggctattggtacggtagcaaccgcggcagcgtcagcgggtgttgctgcaattaaactgcttcagagtactgcctcacaggtaacggaaacagatcgctgggcaaagtcgctgaacatgtccacgcaagaattattggcatggcagtttgctgctcaaaaggctggattgtctggcgataacatggcagacattttcaaggatctgggcgataagattggcgatgcggtgattaacaagtctggtgaggctgtagatgccttggacgcgttaggactatctgccgagaaactttccaaggtaacacctgacaagcaaatgctcgctatcggtgaagcgctgagcaagattggcaccaatgccggtaaaatcactattcttgaaagcctgggaaacgatctatcaaagatgcttcccttatttgacaataataatcagaaactaaaagaattcattcagctgtcaaaagattatggggttgcacctgatccagcttcaattgatgatctggttaaagttaatagtctatttgaagacatggaagctcaagccaaagcattaaagatggagattgccacagggcttgcaaaagttgacttatccccaatgcaggacgcattaaaagatttaaaagacgttttcactgataaagccgttttggaagggctggtggaaattgtaaatcaagtatcacagttagcaggctatatggggcaagcagcgaaatttgttaagccttttatagatcagataggtggttcattcaaaatagatgatgatgctactgactcagcgataaaaacaaggattgaatggctaaaagagtctagaaagacttcagatagtattacaactctgccagatagatggttagggttaaaggaaaattcagctgaaatagatgcagagttagagcatttaaacaggattctaaatgctagaaaagcagtttctgtattgaatttgccaactgcacaagcaactgttgcaacagatagctttgcgcttcctgctggtggttccaacggtaagccaaaaagtaataaatccagctctggaggaaataaacttgagaatgcttacaagtcaatggagcaaggttacttacggcaaattgcactgattgacaaagtaacaggaaaggaaaaggaatctactgagttacaaaaactgttatttgatatgactactggcaggctaagtggcctaaataaatatcagaaaaaaaatcttgaaagtctagcaactgaagtagataaattaaaagtgctagataggtttaaagatttgcaagaagatcttttaaccccagagcaaaagctcttagaaacaacaaaggaacgtctaaagctgctaaatgaagcaagagcagctggatttgcttcaccagaacaatatcaaaaagcaggtgatgctattgcaaaaagtgcatttatggaaatgccaaagtttgaaggtattgatccgctttatggcgggcagataggagaaatgaaaaaagttgatgaagctcaatcagccctagaaaagtggtatcagacacagctcgatatgctcgctgaaaatcgtcagagccaagctgatttgaatgaacaatgggatgcgcaagagctggcgatcaagcagaagcaccaagatgagcttaattctatcgagcaatccagaaacatgctgatgcttagcagcatgattgacggatttggcgctatggccgatgcaaccagagcagccttcggggagcagtctggaatttataaagcggccttcattgcgcaaaaggcagcagcaatagctcaggctaccatcgccattgatcaggggattgctatggccgcggctaacccgttcccctataacttggctgcaatggccactgtagcggcttctactgctggacttgtgtctaacataacagcggttggcatggcgcacagtgggattgatgcggtgccagaaactggcacctggctactacagaagggagagagggtagttacggcccagacatcagcgaagttggatgcaaccctggagcgtgttggtcgcgatacaaacgcaggcgggaacacttaccagccatcatttgagatgcacatcaatggcaacccggatgatagaacgatagccatgatggagcaggccgttaagcgtggtgctcagcaaggttacatgatggtggccaacgatctggctcagggcaagggcaccgcaagcaaagcccttgggaatggatggaatgtaggtaggaggaagatttaa

SEQ ID NO: 436401 - DNA, 1662 bp, Serratia marcescens
ttgaccgtctggaatgagtacgcaaatgcgataaaaacgggcgaaattccggcgtgtaagcgcgtaaaacaggccgtggaaaggtacttttcagacctgaatgacccccgttatgagttcgatacggcgaccgtagaacggtttattgcgttctcgcggctctgcccacacgtcaaaggcccgcttcggggccagccaatcgagctggagccgtggcagcagttcgcctttgctaatttgctgggctttaaagtcagggaatcaggccgccggaagtatagtagcgcctttattgaggtgccgcgcaagaacgctaaatccactgtggccgcgatgctggctaattggtttctgataatggagaagggccagcaggatatctatacggcggcagtaagccgggatcaagcccgtattgtgttcgacgatgcccgccagatgtgtctgctgtcaaaaccactgaaaaaacgcgtaaatattcaggctcataaattgattttcccgaaaaataacagcctgttgaagcctctggctgcgaaagctgccaccattgaaggaactaaccccagcctggctatcgtggatgagtaccaccttcaccctgataacggcgtttattccgcgcttgaactgggtatgggcgctcgtcctgaggctattttgttcgccattactaccgctgggagtaacgtagtctctgcctgtaaacagcattacgactactgctgtcagattctggccggggaagatatcaacgattcgctttttgtcctgatctacgagctggacgacgaaagcgaggttgagctgccggaaatgtggatcaaggctaaccctaacctgcatgtttctgttgatgcggcgaagttggaatccactatccagaaagcgcggggcataccgtcgcagtgggtggaaatgctgactaagcgtttcaatatctggtgtcagggctcaacaccgtggatgggcgccggtgcgtgggatgcttgtgtgctcgactacaccgaagaagaccttgccggtatggagtgctatgccgggttagacctgtcctcaaccagcgatattaccagcgtgagttacgctttcccgttcgacagggagatccgtctcctgacccgccattatcttccggaagcgcagttgcttaatgttgccaacaaaaaccgtgccatttatcgccagtgggtaaaagcgggctggatacgcaccacgcccggcgactgcatagattatgaccgtatccgtgacgatattctgcgtgatgctgaaaccttcaatatacggttggtaggctttgatacgtggaatgccacacatcttcgtactcagttgcagggggcgggactcgatgtggagccgtttccgcaaacctatctcaaatttagtccggtagcgaaatcttttgaagtgttcgttaaccgtaaggtgttatgccatcgtggcgatccggttcttgcctgggcgattggaaacgtggtgatggaatctgacgccaacgccaacattaagcccaacaaaaagaaatccgccaacaagatagacccggccgtctcagcgctaatggctttcggcactttccaggctgagcacgaggattttgctttcgatatgagtgatgttcacaaacaacgccttatcacatttgatggggtatag

SEQ ID NO: 436402 - DNA, 357 bp, Serratia marcescens
atggcaagaccaccaaaaccgccagcttaccttgatgagttagccgcgcagcagtggaaagcgaaggcgaagcaattggcggagcgcggggatttgactcccgccgactggaacaatcttgagcttttttgcgtcaactattcgatgtaccgcaaagccgtggaagaccttgccagccgtgggttcagcattattaatagccagggcggcgagagccgaaatccggcgctgagtgcaaaggccgatgctgaaaaaatcatgattaaaatgtcgtcgctgctgggctttgatccggtaagccgccgccgtaacccggtagaaacggaagaggaagacgagcttgaccgtctggaatga

SEQ ID NO: 436403 - DNA, 153 bp, Serratia marcescens
atgaatgagaaagacgtggtgaatctgtatcagtcgctggcccgaagccgtaatggcttcatgcagacccgctccagacgcgatgagcgccagccagtgaggcgcataagtgagcgtgagcgggagttgatggaatgcttccgcaaccgctga

SEQ ID NO: 436404 - DNA, 444 bp, Serratia marcescens
atgccgtggcaaccgttacgccgttgcactgagccgggatgcaacaagcgtgtgaagtctggcaaatgtgatgagcataagcgggaagtgtggcgggcgcaggatgccagacgcggccaccgtcgcgcccgtggctactctgctgcatgggagaagtaccgcgctcagtatctgaaacgctatccactgtgcgttgagtgccagaagctgggcctctatgttcccgcaaagattgtcgatcacatcatccctattaacggcggtgatgacgttctgttctggcctgagtggaatcaccagccgttatgccagacgcatcataaccagaagaccacgcagcaagaccccatcaccaaagccaaccgcaaagcggggatgtacaacgagcaggaagagcgggcagcacagcgcaatagctggatgtatgaggctgatcatgaatga

SEQ ID NO: 436405 - DNA, 294 bp, Serratia marcescens
gtggctgaaaccatagaacttgctgaagcaaaacttcactgccgtattgatggggatgatgaagatttgctcattcaagcttacatagatgcggctctggaggtttgccagaaacatatcggcaagcggtttgataatgggctggaacttaccccggctatcaaaatcggttgtctaatgtacgtctctcagttgtacgaatatcgcacgatgattagcgatgtggaggtgaaagaggttcctcttgctgtctccgcgctgtggtctgtctatcgtgatgtgggagtgtactga

SEQ ID NO: 436406 - DNA, 342 bp, Serratia marcescens
atgagagccggaaagatgaaacgccgcgttactattcagcagttcgtcagtcaccaggacccgaacacgggttctgtcactaaagaatggcgcgatgttgtcaccgtttggggagagatagacagcgtaagcgggcgggagcttgtagccgcccaggctgaacaatcagaaatgaccgtcagaatctgggttcgctaccgcaaaggcatcaccaccaaaaacaggctgatctgcacagaaaaaggaacgcctgtaaccatctacgacatcaaagctgttctgcctgatgcagatcgtacccgccttgaaattatgtgcaccggagggctgaccagtggctga

SEQ ID NO: 436407 - DNA, 1047 bp, Serratia marcescens
atgccctgctacctgtaccgggttcgtaatgataacgggcgggaggcgcgggagtggctgagcaatcatccggtagattttctgctgaacgagcagcctaacgtttgccagacgccttatcagtttaagcgcacgatgatgcgccattgtcttcttaacggtaacgcctacgcggtgatccagtggggtcgagacggtcaaccacaatccctgcatccgtatgcgccgggtgcggttgtgcctgagcgtatcggcgagcataagtacagatacaccatcactgagccgtttaccggggctgtgcatacctatttgcaggaagagattctgcatctgcgttattccaccgatgatggttttctggggcgctcgccgatcaccatttgccgggaggcgctggggttgggtctggctcaacagcgccatggggccagcattatgaaagatggcatgatggcggcgggcgtcattactgctaaagagtggctggatagcgttaaaggaaaaagtgcacttgaggcgctggagcgctacaaaggcgcaaggaatgccgggaaaacgccgatcctggaaggggggatggactacaaacagcttggcatgagtaatcaagatgccgagtggctggcctcccgccgtttcaccattgaagatattgcccgcatgttcaacgtgtcgcccatcttcctgcaggaatacagcaacagtacctacagcaacttcagcgaggcaagccgcgcctttctcaccatgacaatgcgcccgtggctcgccaactttgagcagcagattaaatccgcgttgctggtggcttctcctgtgccgggcattcgctatcaggtggaatttgattccgctgatcttctccgtgccaccccaactgaacgctatgcaacctatgagcgcggcatcaagaacgggattatgaacccgaatgaggctcgcgagcgtgagggcatggctccgcgtgaaggcggtgacgccttcagccaggcatggaagcaggaagtcactgtgagcaagggcaataaggatggtgacgaatga

SEQ ID NO: 436408 - DNA, 561 bp, Serratia marcescens
atgaaaacaatagattttgaaatccgcacttctgaactgaccgccactgataagaagctggtgggctatgtcgtgcgctggaacagcctgtcagaaatcatctgggacgaattccgggaacagttctcgccgggagcatttaaagacagtctggcatccggtagcgatgtgcgtgcattgtacgagcataactatacccagctgctggggcgtactaaatccgggacgctggtactgtctgaagatgataccgggctgcgctttgagctgaccccgccaaacacccagcttggtaatgacgtgttggcgttggtggagcgcggagatctttccggtatgagctttggtttccgtgctctgaaagaatcctgggatatagcgcaatcgccgtacctgcgaaccgtaactgccgctgaactacgggaaatcaccgtaacttccatgcccgcatatcctgaatccggcgttgaaatcgcacatcgttctctttttgctcaacatccagaattacgtcgtgttggtgataatcgtcggcgctgggctgaattagcggggctgtga

SEQ ID NO: 436409 - DNA, 1164 bp, Serratia marcescens
atgaaaaaattactcgaattacgccagcagaaagccgcactcaaaactcagatgcgtttcatgctggataaagccgacagcgaaaagcgcagcctgaacgatgaagagggtaagcagttcgacgaactccgagctcaggctgatgcgcttgaagttgaaatcacccgtcttgaagccgtcgccgacgatcagcgcaatctgccgggtacttctattgaaggtaaaggcgtaagcaacgatgagctgcgccactacatcatgacaggagacacccgctcactcaccactctggtgcaggctgatggcggttatacagttatccctgagctggacaaagagatcatgcgccagttgcaggatgacagcgtgatgcgctccatcgccaccgtgaagaccaccaaaaccaacgaatatcaaaaactggtatctgtgggcggtgcaacggttaatcgcggcactgaaggtgaaacacgcaccgagaccagcacgccgaagatggagcgcgttgatatcaaactcaacccgatctacgcctacccgaaaaccacccaggagattctcgatttctccgaggtagatatcctggcctggttgtcttctgaaatctccgacaccttcagcgctaccgaagaaaatgattttgttaacggcgacggtacgaagaaatctaaaggtttcctggcttatgatcgtgcggccactagcgataaaacccgcccgttcggtacgctggagaaaatggaaacggctgctgttacctctgatggcttgatcgacctgttgtacaagctgaaagccaaatatcgcaaaaacgccgtatgggtgatgaactccaataccgctgccacacttcagaagctgaagaacggtaacggggattacatctggcgtgatcgtctggttgccggttctcccgataccctgctgggccgtccggttcagtaccttgaaaccatgcctgatgcagatgccggagaagcgttccttgcggttggcgacttcaagcgcggttacttcatcgtggatcacactactggtgtgcgtacccgccctgacaacatcaccgagccgggcttctacaaggtgcataccgataaatacctgggcggcggtgtggtggactccaacgcgatcaagattctggagcttgctgcgggttcctga

SEQ ID NO: 436410 - DNA, 615 bp, Serratia marcescens
gtgtctactacgattactttcttaactactttacttggcgcagtcgttggtggtggtatcgcagggtatttttcatccaaggcaacaaaagaatctcaccagcatcagaaaaaaatatctgaagataatgaaaaactaataattagcagcctattgcaggctattcatgatgaactggaaacaatttttgatcgttatcacgaaacgattggaaacaggattgagtctcttcctgaaggaggagctcttatcttctattatcctgtggtgaatgattactttaccgtgtataacggcaatagctttttaataggcagagttaaaaacaatgacctaagaaaaagcattataaaaacatacaccttaggaaaagggatgatggattccctaagaatgaacaatgaaatattacaaaaggtagagcactgggagtcaatccacgcagaaacacaattgcctatccatcaagaaaaggcaaagcactattacatgagcttagtagaatatgcaaagagtataaagaaacaacatttagatttaaaagacaatttaaaatcaacactccgtgccttagttaaaaacggtgttcttaatgaatccgatcaaaaaaagtga

SEQ ID NO: 436411 - DNA, 516 bp, Serratia marcescens
atgaattttgatttcgaccaaatggcttacccagacactttctacttttcaggtaaagagttcaaaggtagtagaaacaataaaagcaaagaaattgacattccttataccgatgagcctgatttaaatattggtgacatagttactcagaaagttggctctcgagatatacacttcaaagttattgatttatcaatcactgaaaacggcactcttaatgttggcacaaatcacccacatataatgacattggtagtagaaaatttgacagagaatgctcatagcaccaagaaaagcacaaacacttttaatatttcctccgtatccggtacacaagtccaaattggagaaaacaatagccaagtaacaaatataagcctagaacaattagtagaaaaaatttcttcatcagaagatttagaagcaaaaacaatcattaggaagttattagaaaatagcacagtagcaagcatattgggagctggtagcgctgcattgtttggcttgcttaagtaa

SEQ ID NO: 436412 - DNA, 261 bp, Serratia marcescens
atgtcagagagactgaaagagattattgagtatcatgagcaatttggtattcaagatttaagtacaatgcatacaactgattatcgcaagacgttagaaggtggtgcttttatctggattgatcatcatgatcatgtgcgcagtactttttcagaggaagtttttgccacaaacacggaacagctagatgttttcatcggaaaacttaaggaatttagagagaaaatgtcggaacctccagagtggatgagtgagaaataa

SEQ ID NO: 436413 - DNA, 303 bp, Serratia marcescens
atggatgatatctacaacgcactgcttaacttcgagctggaaaagaaattagatgctgatttgaaagcatatagcaacacatgtggtgatgctgctcatgggattttctgcgcgttgcgtcttattggaaatctgacattgatggcaaatgccaatgaagaatatgccgctgaggaagcaaagaaggatctgtttttgttgggagcggttctccagcacttaccgagaatggctgaagcattgcaacagaacagtgagagcgctgattttgtgttgagaaaacgtaaagaggtgagcaaatga

SEQ ID NO: 436414 - DNA, 600 bp, Serratia marcescens
atgtcagataaaacaaaagcggccttgcagggccgccaatgtcaaagcacaaaacttaagccaactcagcatagcatgctgacggatctggtcaactatcagccctttggctcgatgccacgttgctgcagctccttgcggatgatgcgctttatccaggcagatacagatgcatctccatcctgggccaaagcttgcttgatcccctcttccaaacctggctctacacgtaatgcaatctgcttgttgcctttacctttgatttcgatggttgacatttggttgacacctgattaccttgaaatggtaatcaagtgtatgacaggtgcataccaaaaggcaacgccccggactgttggagcagtaccgaggcgtctcaccaaaccgttatacgaggtaacgatcatggctgacatcaagtctacccaaactcgccttgaatttacatggcgttttcttgccatcaccggcgcacggatcactgtcgtttacaccaacgcatgcacagagagtgaagcgcgggccaattgccctggctggaagctgatctttgctgcccgttttccacttcatcaattcgaggtggtgcaccatggatga

SEQ ID NO: 436415 - DNA, 846 bp, Serratia marcescens
atgagcaagaaaataaatagtaagaaggatttgccaaaatcattcgatttaaaaaaatacgatgaattagaaagtatgtcagataaggacctcttcagacagttgtattggcgtagtgaagaccttgatattacacatactgactaccctgactatggtttagaggtcggttctgattatcctttgcaaaacaatctcggagatccgtttggggagttatgtgagtcagaggagtttcttgaaagacaaaaagaacatgagcataaagtaaaacctgatctgttatgcatgagctatggtgatggtattaaacctttaacaaggtttgatgtatcattgattaataagataaattcagagtgtggttactggaagggaaagccaatcattgtagatgacgagatggtaggtgatttatttacagaggataatgggatgttctgggctgtcatgagagagcctgttaatttattaaatgacacattagaaaatgctttggttagtatcgatttaaataatagggatgacgtcctaattaatgcttttaccaatcttcttccattatggcgcgaagaaatgaaatttcctgaaccagaaaagccagtatctggaggatgggaaagtgttagaagaaaaatcattgattacaagattatccctcttatcgatcttctggcttggagtcacgcaacaaaaagtaagatttctctcggcgttctggctgttgcgttgtttcctgatggtgagaaggataccttcatgatagctcagacaataaaaccgtttttagacaaactaattaaatttgattctttagaaaaattaaggaaagaagtctctaaatga

SEQ ID NO: 436416 - DNA, 1224 bp, Serratia marcescens
atggctggtggaacaaacaaacttagcgatgcatcgttgagaaagatgattgggcgtgagagccccggcgataatttttatgccgacggtgatggactgagcgtaaaagtaacaaaatcaggcgtaatgacttggttctttgcctatcgtctcggtggtcgcgaggctaagccgcaaaggctgaaactgggtaactacccagatatgagcctcaagttggctagagaaaaaagagaacagtgccgcgtttggttagctagtagtaaggacccgaagcaccagttaaaactcatggcagcagcatcgctcaaaccggtgacggtgaaagatgctctccagtattggatcacccagtatgcagaagataatcgcgctaacgtggaacgccacaaagctcaactcgaaaagcatatttatccgtatattggcgctatgcccctcgcacaatgcgaaactcggtattggctagaatgttttgaccgagcaaagaaaaacgctcctgtggccgctggctatgtttttcagatgtgtaaacaggctctgaagttctgcagggtacgccgctatgccatcagcaatgctctggacgatttaactatacccgatgtaggtcgtaagcaagataagggtgacagagaccactcagatgatgagattgggcaaatctggcaggcttgtcagcaactgaaatttaaaccgtactacaccgccatgctgcgcctgctggtggtatttggatgccgttctcaagaagttaggctttccacttgggcggaatgggatttgaaaaattgggtttggactgtaccaaaagagcatagcaaagctgggataaaaatattacgaccggtgccggcggaaatgcgaccgtttatagagtggttatacaaccagcataaagatagtggcttattactgggtgagttaaagcaatcaagcgctgtcagcgcctgggggcgtcttgtgtggaaacgacttgggcacgaagagccatggacattgcacgatatcaggcgcacgttcgcaacaaagttgaatgatctgggaattgcacctcacgtagtagaacaactattggggcataccatgcctggtgtaatggctatttacaacctaagccagtacatgacggaaaagttgatggctctgaatctgtggtgtgagcgtttagaaaaaatttcatatgaacatttaaatgttactatttttaaggtgtcaaaatga

SEQ ID NO: 436417 - DNA, 534 bp, Serratia marcescens
atgaaaacacgacactacctcgtggcactgtgtgcgctgttgctggcgggctgcagtcagccgacggcgaaagccaaaacccgaagcggtggcggtgggattattgtcgccatcaaccacaccaaatgggcgatcaaccatttcagcgtcgacggtcagtcggggatagacattatcgggccctatcagggcggcggtggcggctgctgctatggcgtgccggcgaaatggcggccgggtatgacggtaaaaatcgattgggaaacgggggtgggatactcgatggatttccctggttatgaaaattgggataaatatttggtctgggaaaaaaaaatgaaggcccagaataagcagcacagcaaggtggtgccggtgccggactatacggggcaaaagacctgcgggatcacggtgcattttatgccctgcgatgaggtgaaggtgacgaccagctgtgtgagccccggccgaccgggctatccgatcaacgagccgctgcagatgccggagccaaaagtctgtccgaaataa

SEQ ID NO: 436418 - DNA, 780 bp, Serratia marcescens
atgacacgcattgctgactgggtgaatctgctggagcaaacctgcgctaatattgaaatggcccaccttgattttattatcgaccagtgcggtatcgatttttccgtcattcctgtactccggagtttttcaccgcctttagcatggcagtctctctaccaggggctgccggaagaggctttacccgatgagtcgccgctgttgatcaggatttcgctgaatgatcctcagcagaaacagtggtttattgagttagctcagaaaatacaaaagaccgccccgctattggttctcggttctcgttggcctttcgctattctggctgaatggttaacgacctgtaccgacgcgacccatgaggggcgtgccgggctgttcagatactttgatgcccgtattttcccttatctgttttctcatattttgtcatccgaacagcaggttcagttgcagcgtcctgcactgttctggagttggctggatcttgacgagaagccggcattattgctggggcaaggggctcaacccgcaatcaatgagaagtgccagaacatcgcttttagcgatagccagtttgaatccctgatgtgcatctgcgacgtaaagttgatgcttcgctatcgagacgttcccgctactggatttacctctcaggatgaacggtttactgcctgtttcaacggcatgctttcagccactgccgaaggaatactaggggataaagagcgtcaagactgggtgataaataccctgagcgagcggcctgctgaacaggcctaa

SEQ ID NO: 436419 - DNA, 2379 bp, Serratia marcescens
atgagcgcaaacccgatttcttttttcagccacaaccaccatctgctgacggtgaaaggcggtgcgtcagcgctcgatgtgctggcgtttacaggcgatgaggcactaagccggccgttcagctaccgtattgagttcacaagctttgaccctgccatcagcaaagaaatgatgctgatgaaagccgcctccctgacgctgcaggccccggtggaccagggctggggcatcaaggtgcaacagccggtgcgcgtggtgcagggggtgatcaccggctttgagcgttttggcacctccgccgaccagacccactacgccgttaccctgcagccgcgcctggcgctgctcgaccgttcgcaccagaacgccatctatcaggatatctccgtcccacacatcgtggaaaaaatcctgcgtgagcgccacggcatgcgcggccaggattttctgttctcgctgacacgagaatacccgcgccgcgagcaggtgatgcagtacggcgaagacgatttgcactttattactcgcctgctgggcgaggtcggcatctggttccgctttaccaccgatacgcgtctgaacatcgatgtggtggcgttttacgacagccggcaggggtatgagacagggctgacgttaccggcggtgccgccatccggccagcactcaaccggcgcggacgcggtctgggggatgacatgccaccacaaggtggtgcagaaacaggtcagcacccgcgattacaactaccgccaggccaccgaagacatgaatacgcaggtcgacgccacccggggggacaccaccacctacggcgatgcctatcactacgccgacaactacctgacgccgggcagcacagacgataacaacccggccccggagtccggggcgttctatgcccgtattcgccatgaacgctacctgaatagccagacgcaaacgcaggccctcaccagttgcccgacgctctccccgggccagctactcaacgtcaccggcggtgatgatgtggcggaggtgtttgctcaaggcgtagtcatcacggcgatgcacagccaggctcgccgtgaccgggattttgaggtgtcattcagcggtatccctgacggcaacgattttagcttccgccccgagcccggcgcccgtccggtgatggccggcacgttgccggcgcgggtgaccagtaccaccgaaaatgacacctacggtcatatcgataaagacggccgctaccgcgtcaacctgctgtttgaccgcgataactgggaaaccggctttgaaagcctgtgggtgcgtcagtcccgtccgtatgccggggacacctacggtctgcacctgccgctgctggcgggcaccgaagtggcgattggttttgaggacggcaaccgggaccggccgtacatcgccggggtgctgcacgattcggcgcacggcgaccacgtcactatccgcaactataaacgcaacgtgttgcgcaccccggcgaacaacaaaatccgcctcgacgatgagcgggggaaagagcacatcaaggtctccacggaatacggtggcaagagccaactgaacctcgggcacctggtagacagcgagcggcaaaagcgcggcgaaggttttgagctcagaaccgacgggtggggggcgatacgcgcgcagaagggcctcttcatcagcgcggacggccaggcaaaggcgcaggggcaggtactggcgatggagccggccatcagcctgctgaaaggggcggtgaatcaggttgcagaatggggaacgcttgcccagacccactacaactttgcaccggatgcgcagcctcttcaggcgcttgcttcagctgccagtgagctgaaagaaccgacggtgttgctctctgcgccgaaaggtattgccgccgtcacaccggaaacggcattgctgcatacagggaaaggtctgtatctgcaaagtctgggcgaggtgaatatcagcgcggcgcagcgttattcagtcaatgccagccaggccatctccatactggctcatcaggagggcatgcgcctggtctctgccaaaggcccgctggcggtggaatcccacgcagatacgctgtccctgacgtcgatgaaagatgtcacggtacagtccacccagggacatttgcaactgacggcaaagaatgggatcacgcttgcctgtggcggtgcttacatccaactgaccccacagggcgaaatcaatgtgcatggtcctggtctgctaagcctcaaagggcagcacaaattacagggcccgacgagtgaggattatccgctgcctgaattgccttcgtcggtgtgcaaagagtgtctgaaaaaggcgcagcaggctgcacaaggctttgtgccaagggaggtataa

SEQ ID NO: 436420 - DNA, 2655 bp, Serratia marcescens
atggaaaacccagccatcctgttacgtcgtttgaatccttactgtgcccgcgccctgggaggcgccgcctccctgtgtcagacccgcgcccatgcggaaattctgccggagcactggctgcttaaattgctggagcagggtgagggcgacttgacggtactggcgcgccgctatgagtgggatatggatgcgttatggcaggatttgctccgttggctggacaaacagccgcgatccgtgcgccgccgtccgcagttatctgacagcattcaacagctcatgcagcaagcctggctgattgcctcgctgaggggggaggaacagatccgcagcgtccatttgctgatggcgctgattgataaaccgcagcaggtgcgttgcgatggcctgtggccgttgctgacgcttgggcagaaccagctcgaacgtttacggccattactggatgcgcagtcggatgaacgcccggagatgcagcaagaggctgcgctggcccaccgtggcggggaggtggaaagcgccgcacttccggtagcggccactgcgtataaagagggcgagctgagcccggcattgcagagcgtgctggataaattcaccctcgatgtgaccgccaaagcgaaagaaggcaaaatcgacccggtctttggccgcgatagcgaaatccgccagatggtggacattctttcccgtcgccgcaagaacaacccgatcctggtgggggaacctggcgtcggaaaaaccgcgttggttgaagggctcgcgctgcgtattgccgaaggcaacgtgccggaatctctcaaacctgtcatcctgcgcaccctcgatctcggcctgctgcaggcgggggcgggcgtgaaaggcgaattcgaacaacgtctgaaaaacgtcatcgaggccgtgcaacagtcgccggtgccggttctgctgtttatcgacgaagcgcacacccttatcggcgcgggcaatcaggcgggtggcgctgatgcggctaacctgttgaaaccggcgttggctcgtggcgagctgcgcaccatcgccgcgaccacctggagtgaatacaagcagtactttgaacgcgacgccgcgttggagcgccgttttcagcgggtgaaagtggatgagccggatgacgataccgcctgtctgatgctgcggggcctgaaatctcgctacgcgcaacaccacaacgtgcacatcaccgacgatgcggtgcgtgccgcggtcacgctgtcccgccgttacctgaccggccgccagttgccggacaaagccgtggatctgctggacaccgcaagcgcccgcgtacgcatgagtctcgataccgttccggaggccatcgttcgcctgaaagcgcaactgactgcactggaactggaagagcaggcgctgctggaagatattgccgccggcagtcgccgtcaaggtgaccgcctgggtgccattgcgcagcagcgggctgaacgggaagcgcgaatccaggagcaggaagcccgtttcagcaacgaaaaggcgctggtgcagcagttgatgaccagccgcctggacatcagtcagcaggctgacattgccgatttgcaacagcagcttgagcaggcgcaacagggtgatgtgctggttcaggcggatgtggatgcccgcactgtcgcgaatgttatcgccgactggaccggcgtgccgctgtcctccttgatgaaagatgagcagaccgaactgttgaacctggaaaatgaaatcggccagcgtgtggttgggcaggatgccgcgctcgacgccatcgctcagcgcctgcgcgcggcgaaaaccgggctgacggcggaaaatggcccgcagggcgtgttcctgctggtcggcccgagcggggtcggcaaaaccgaaaccgcgctggcgttggcggatgtgctgtacggcggtgaaaagtccctcataaccatcaacctctcggaatatcaggagccgcacaccgtttcccaactgaaaggctccccgccgggttacgtgggttatggccagggcggcattctgacggaagcggtacgcaagcgcccctacagcgtggtgctgctcgatgaagtggaaaaagcccaccgtgacgtgatgaacctgttctatcaggtattcgaccgcggttttatgcgcgacggcgaagggcgcgaaatcgacttccgtaacaccgttattctgatgacctccaacctcggcagcgactccctgatgcagtggcttgatgagcagccggaagcaaccgaaggtgacctgcacgaattactgcgcccgatattgcgcgaccatttccagccggccttgctggctcgcttccaaaccgtcatttaccggccactggcggagacggcaatgcgcactatcgtcgggatgaaactcggtcaggtcagccagcgtatgaaccgccactacggtctcaacacacatatcgacgagagcctgtatgacgcgctcaccgccgcctgtctgctgccggacaccggcgctcgcaatgtcgacagcctgcttaatcagcaaatattgccggtgctaagccggcagttgctgacttatatggccgcgaaacagaagccgcagtcgttacaccttagctgggatgaagacgaggggatcgggttggtgtttgacgctctgcaaccgaacgttttgtga

SEQ ID NO: 436421 - DNA, 1671 bp, Serratia marcescens
atgacgcctgcacaacagcgcgggctggcgttgtgggctgctctgttgagcgcggtggtttgcctgggctttttgccggtgtcccggcaggtttccgtgcttattctgctggctgccttggggctgactgcggtgttctggtacatcaccggccgtggttctgaagactgtgccactctgccgttggacgccctcccggaagccacatatcgccggccggtggttctggtctgcggcgatctgccgctggcctggccacagcagtcacaggttatgaccgccgcgcaaggctgctggatccgggtggaagatcatcaggacctggaacaggtggctcgccggctcctttggcaacggccggagtgggggcgtcagctgtcggtgatggtcagtgtctgcccccaaaagcaggctgacaccgaagcgctggcccgccgcctgctggcactgcgttggcaaattagccggctgcgcaaggcgatcggccattgcgtgccgctggtgctgagtggccagattggcagcgcgatgatgagagacaggctttggcaggcggcgatgcagggtgaaggagtgagggtttggcgtgagtcaacggcgccttgttcgatagccacatgggtcaccaccggcggggcgcctgcgatgcagcagcaggtactgatgaacagcctaatgagctggttccatcagcacgtaaaggcggtatttatggatgaaaatcccgatgtgccggccatggctcccaccgcggtgctgtgggggatggggcccattcttgtcgggagcctggcctcttcggcctggacgacgtggttgtcccaccacacggcgatgcggcaggtggcgggctggcagccggtgggcacggacagcacggtgatgcccctgtttccggattttgtgttgccgctgttgcctgaagggcaaggattaacgccacgaggccgcgcctggcgctgcgccctcaggttactcacgctggcggccatcgcggcgctgctcagcagtggctggaacaatcgtcagatgctgcaccgggtgagtttcgatatcgcccgttatgaccggctctcaatggatgattctggcccgaaggctgaggctgtcgccgttttgcgagaggatgccgcgcagctggataacctgacgcgtaatggcgcaccgattcggatgggcctgggtttgtatcagggagaacgcctgcgcatgccggtgctggatgccatccgttcgtatgtgccaccgctatcgctgccacctgaacctcaatcaaaaccgaagcttgcaccgaaaattgtgcgcctcgacagtctgtcgctgttcgactccggccagtctgtgctgaagaccggctccaccaaagtgctgatcaacgccctggtcgatattaaagcgaagccaggcgggttgattgtcgttagtggacacaccgataacaccggcaacccgcagcagaatcagacgctctcccagaggcgcgccgaagcggtgcgcgactggatgcgtgataccggcgacgtgtctgaaagctgttttgcggtccagggttacggcgcaagccgcccgatcgccaccaacgagacgtcggaagggcgtgcgctcaaccgccgtgtcgaaatcagtctggtgccgcaggccgacgcctgtcggatgccggataccccctga

SEQ ID NO: 436422 - DNA, 690 bp, Serratia marcescens
atgagtgagcgtaaacgcggtaccgccgcgtccattgatatcgatgcgctgctgcaggatacctggctgcaggttatcagcctacgccacggcccgacatttcaggatggggaagggagaaggctgtgggagcgttgcatcgccgatgtggaacgcgtgcagcgggaactgaaagcgagcgggcttgatgaggccggctgtcggcatatcctgaccgcgcagtgtgcgctgctcgatgaagcggtcaaaggccgtggcgtagaggatgatgcctgcctccaatggtatgacattcctctacaggggcacttcctgggcaccatggatgccggtgacacgctgtgcgatcggatgcgtgatgtgctgcgtgagccggtgcccgacaacgccgtcgtcacctgcttccagcgggtgatgatgctcggcttcctggggagtttccactccctgaacgccccggagcgtcaggcgctcatcaacgccctgagtgaacatgtcatgccctttagctatccgcagacccatcccgtattggcgaaaaaccgtacagggcgaggcatgggcggctggctggtatcgtggccagcacgccttggactgagtgtgatcgttgtcgtcggcctgtggtgggggctgaaccattggctcgatcagatgctgctgaccttgctgccgggagccgtgaaatga

SEQ ID NO: 436423 - DNA, 1341 bp, Serratia marcescens
atgaaaacggaacaaccgttatggggcaggggccagatggtttctccccagcactttcagcaacaggtcgcctatgcggcctggtctgcggaatgcatcgcccagatgggcctggcccacccctggggggtgattgatgccactttcgaaccggatattctgaaactgagccgcctgcaggcccgtcatctgcacgttcgttttcaggatggcacgctgattgataccgacaatgctgactcactgccgccggcgttatcgcttgaaaatgaatcgcacgacgtggtggttgtcttggcactgccgctgctgcgggcgaacggcggcaactgcctgaaacccgaggaagtggccgagcgaccagtgcgctatcgccagcgctggcgagatatccgcaatacctttggtgacgacacacgtcagatcgcagtgatgcaaccggcgctgacgctgcgttttgctcatcagaacaacagtgattacctgacctgcccggtcgcccgtctgcggcaagattcgcaggggctctgggcgctggacgaaacctttcttccccctttgctggcggtgcagggtagccgctggctggtcgcccaactggagcaactgatgacgcaactgcgtgcccggttgagccgcctgatggcgatgcgccgggaaagtaacgaacgcatggctgattttgccgtagccgacgtttctctcttctggttactcaacgcgctgaacagcgcagagccggtgctggggcagtttcagcgcaacttgcaaagccctcccgagcggctgtatccggagctggcccggctggccggcagtttgctgacgttctcgctggagcatcaggtgagtgccattcctgcctggcagcatgagcaactcaatacggtgtttccgtcgctgtttgatttactcggtgacctgctcgaagccagcctgccgtcgcgggtggtggcgattgaacttgagcatgatgcccggcttcacttctggcaggctcgcctgcatgacccgcgtttgcgcgaaggggcagattactacctctcagtgcgctccccgatgccggtggcgcaactgcaggagcagttcccgcgccagtgcaaagtgggcagcccggatcacgtcaggggtattgtcaactcttcccggatcggggtccctctgacgcccttgcggcacgtacctgcagccattccgctgcgcctggaaaaccagtatttcagcctggatgttgcgcatcctctggccatggaaatgcttcagagcggcacctgtatgttttacgttcccgggatgctcggcgagcctgaacttgaactctttgcggtactgagaacatga

SEQ ID NO: 436424 - DNA, 1542 bp, Serratia marcescens
atgtctgtacaaaatgaaaatacggcgggtggcgaaagcgtcatcctggaacgcccttcagcggatggggtttacgtatccctgtttgaaaaaatcaatctgaacccagtgtctgaactcagtgcgttggagatctggcaggatacgcaggcgatgtcggatgcgacggctgatgagcgtttaacggccgggatgcaggtgtttctggagtgcttgacgaaatcaggttcgaaaattgaaaagctggataagaccctgattgaccaccatatcgccgaattggaccaccagattagccgccaactggatgccgtcatgcatcatgaggatttccaggcagtagagagcctgtggtgcgggttgaagtcgttggtggataaaaccgatttccgccagaacgtcaaaatcgaattgctggatctgtcgaaagacgacctgcgtcaggattttgaagacgcgccggaaattattcagagcgggttataccagcatacgtacacggccgagtacgacaccccaggaggagagccgattgccgcgctgatctccgcctatgagttcgatgcgtctgcgcaggacgttgccctgttgcgcaatatttcgaaagtgtctgcggcggcgcatatgccgtttatcggctctgccggcccgaaattcttcctcaaggcgtcgatggaggaggtggcggccatcaaagatatcggcaactactttgaccgtgccgagtacatcaagtggaagtccttccgtgagacggatgatgcccgttatatcggtctggtgatgccgcgtgtgctgggccgtctgccgtatggcccggacaccgtgccggttcgtagcttcaattacgtcgaagaggtgaaaggcccggagcacgataaatacctttggagcaacgcctcatttgcgtttgcggccaacatggtacgcagcttcatcaacaacggttggtgcgtgcagatccgtggcccgcaggccggtggagcggttcaggacctgcccattcatctgtacgatctcggtaccggcaatcaggtaaaaatcccgtcggaggtgatgatccccgaaacccgcgaatttgagttcgctaatctggggttcattccgcttagctactacaagaaccgcgattatgcctgcttcttcagcgctaactccacacagaagccggcactgtacgagactgccgatgcgacagccaacagccgtattaactctcgcctgccgtacatcttcctgctgtcgcgcattgcgcactacctgaagctcattcagcgtgaaaacatcggcaccaccaaggatcgccgtctgctggagctggaactgaacacctgggttcgtagcctggtcactgaaatgaccgatccgggcgacgagctgcaggcctctcacccgctgcgtgacgcgaaagtggtggtagaagatatcgaagacaatccgggcttcttccgcgtgaagctgtatgcggttccacatttccaggtggaaggtatggacgtcaatctgtcgttggtttcccagatgccgaaagcgaaatcgtaa

SEQ ID NO: 436425 - DNA, 498 bp, Serratia marcescens
atgtctaattcctaccagtccgagatccccaaggctcgcgtcaatatcaaactcgatctgcacaccggtggcgctcaaaagaaggttgaattgccccttaaactgatggtcgtgggggattacagcaacggtgccgaacagcgtacggtgtccgagcgtgccaagatcaacgttaacaaaaacaattttgacagtgtgttggcagaattcgctcctgccgtaaacctcgccgttgaaaacacgctggctggcgacggcagtgaagaaaacgtcagcctgactttccgtgaaatgaacgatttcacgccggaacaggtcgcccgacaaattccccagcttaaagccatgctctccatgcgtaatttgcttcgtgatttaaaggccaatctgttggataaccaggctttccgcaaggagctggaaaaaattcttctggatccggcgctaagcgcagaactgcgcagcgaactgtcagccctggcgccgaaacggccttaa

SEQ ID NO: 436426 - DNA, 177 bp, Serratia marcescens
atgtgtatccagttattaagcattatcggcagcaaaaatcgatttttccctttgggacaattcccaattaactttgccgccacctcgtttaaagtaaattctggccagatttaccttcaacgcattatttcctgcctatattcacccgagcagagtttccctaccctgccctggtga

SEQ ID NO: 436427 - DNA, 204 bp, Serratia marcescens
gtgaaaattgtatcgcgtgcattcgaggcggtgacggaagcggaattgcggtcgattcgctcgctgttgtccgacgctttccccgagataaccgacggattttatcggcggcaggtgccggtttacctggtgaccgccgcggaaggcgaggtgatcgtcggccaattggcggtgcataagcggccggtgttgattgacggttag

SEQ ID NO: 436428 - DNA, 960 bp, Serratia marcescens; identical to SEQ ID NO: 434472

SEQ ID NO: 436429 - DNA, 708 bp, Serratia marcescens
atgacgcgtgacaaacctcggcccaggctttattactggggtaagcaaatcgataatggcatgcaacaagagtcatcttttgatattgctccgactccgtctgctgagacggtagctttttctgagcatgctctttacccgcttttgattgagtacctttcagaagaagaagaattgctttgccgtcgtatcgatgaaaagcgttcaagcaacaacaaaggtcttggggcaaaccattggctttatccggatattgttgctttgcagcctcttgataaaggttgggatagcgttgtgcaaaactgcgtacggtatagcgaagggcgtttaacccgtctgtggtcttttgaggtaaaacgtcagcttaaccgtagcaatgttcgagaatgtttcttccaggcagtgagcaattcaagctgggcccattttggttatcttgtcgtgaccgaaataaatgaagataagcagcgtggtgtagaaagagaactgcagatgttgtgtacattgcatggtattggtgtgatccttcttaatccgcaagatcccggtaatagtcaaacgctgattcctgcacgagagcgaacaagtattgattggcaatccgtcaaccgcttggtggttgagaacaaggattttaaagagtttatcgatctggtttcagattatcaccagacaggaaaaatacacaaagcgctctggaatagataa

SEQ ID NO: 436430 - DNA, 711 bp, Serratia marcescens
atgctggctttaggggtatatcctgaagtttctcttgctgatgccagagcccgccgtgatgaagctcgtaagcttttggcaaacagcatcgatccgggagataaaaagaaaaatgatagggttgagctggaagaagcgcgtactttcgaacaacttgctattgagtggcacgccacgaataaaaagtggtcggaagaacatcgccgacgagtgctgaaaagcctggaggacaatctctttccagccattggcaaacgtaatatagccgaacttaaaacacgggatttgttagtcccgataaaagccgtagagatgtctggacgtcttgaggtcgcgtcacggctgcaacagcgaactacggcaattatgcgttatgccgtacagagtggtttgcttgattataatccggcacaggagatggccggtgctgttgcttcaagtaaccggcagcataggcctgcgttagagttgagacgtactcccgaactgcttcagcgcattgatagctataccggcaggcctttgactcgtcctgccgttgagttaaccctccttgtcttcatccgctccagcgaattgcgttttgctcgttggtctgagattgatattgaaacatcaatgtggacgatacccgcagagcgcgaggctattgaagggataaagcactcccagcgtggctcaaaaatgcgtacacctcatttggtgccgtga

SEQ ID NO: 436431 - DNA, 726 bp, Serratia marcescens
gtgaatcaactagtgaccgcagagaaagatttcgggaagaacgtattgacctcggtcgaggctagagctttctatcgtgaatggcgaaaacttgcatcaagcagagccagcccctggtctgccatacgtgctgctacatttatggtggagggccaaaaagatggtaccggtattaagatcatatcagcacttcgatcccaccttgctgctctgcaagctgaacgctgctgttactgtcgacgtcgccttgttgggattgcttatgcgcggcccattgagcatatcctgcccaagaacacctacgggcagtacacctttacataccgtaatcttgcagtggcatgtttcgactgtaaccatgtcaagagcaaagccaattggtcaacttggccacaaaatcgtaggcggtacatcaatgaaaagagctgcaacagtttttttcatgctcgcctccatgattatgactctcatgtcagatattttcatttggagacgaatggtgcatcaatcagcgtctacgttggcttgactccccagggacggcatctttgtgttgagctactgagcaaatcctcggagagaacccttgcggaaagtgccaacccaaggttttctgccgcaatggacaaacttcgtggccaagttcagcagatggcagcgacaactgacgacaccaagttgttggacttcatggaagcgttggaacttgctgttgacccgctgtaa

SEQ ID NO: 436432 - DNA, 2340 bp, Serratia marcescens
atggaaaatatagatgaacgcgatatcgatgctgcgcgctttgagaggcagattttagatatctggcgagaagagactaatcagacgcctgaggggggactcaagcttgccatatttctgctatttactgagcagaactcaaaacacatagtgcttccttggtcatgggccgatacagagacgatttatggcttgatggatgccaagcgtagtgctgacgactggttaagactcaaggactctgatgtaacagagcgtgaatgggcacgtcagccacaatatgtgctggaaaaactacgtcatcttgttagctatagcggtaactctacggcaaacttgcatcgattggattttcttgtcaaaagtttgtgtgccaggagatcttcaaacaactgggctcggaaagtcgaaagcttcgtcgccgattttgcacatggctggtcagttagcggtcgggcaatcgttgatatgaacacgatgacgacaggtgagctaggggttcgtctaaaagacgttcaggccggtgacgattacgtattgccggctgagcttcagccccatcttttcgaggtctgtcttcgtcttcatgctcataacgtgcaattccagttagtagcagaacagggggcagacagttcttggcgcggcgtaggggcagcctacaaatttgcttggccgactcgctatcgttcggagtggacaaatgaggtgcgtccctttgagctcaacggtcttgagttcgctcaatggttccttgaccatagacatggccaacgtatcacgatcgtagtcctccccacagctgatttacgaggcaaaggtcggggggccgagattcggcatgatctgctacagcgtaggtgtgttctgggtgtagtagagattcctgctcgagtgtctggtcgtacacgactttcgatgctgataatggcgaaggagcgatccagtaacgatgaatcagtcctgctgatgaacggtcgcgcggtagacggattgcgggacgagcctctggatcgcttggctagatttctctgtgccccattcttggacgcaatgaagggggatacattgtctcggcttccttatgagtccgatctgggtgatgcgctattaaatcgtgctcggaagatgttcggggcgaagttacacgaggtgcctggattttttcgctatgtgcagttagaagaaattctggacaaccagaacgcggttctcgatccatctctgtggatttccgagcgtgatcctatggtcgcgagcgatctgctggatggttcccctgtttacaagctgttggaggaacgagagcgaccctgctgcgtttacgtcattggaaacaacggtgcgggaaaaagcatgctcttgcgtcagcttgctaaggcatatgtgacgtctgggcggcctgtgcgtgctatcgcttctgcaaccagtgacagattcgaggccaaaatgggggtaacagccgactacgtctacctaggggcgcgcactagtaatatgtccacacagccgcgaagacttggacgtaagttagccgagttgatggttgctatccatgccgaccgcgacaagatcgcagcggtgagcagagttctcgaccaactgtcttttgcgggtcaacattatctattgccggagtccgctacctccgatgttctggagtctgtgcgtgaacttggtgtcgatggggctccaagtaacatgaatgggtggaagctcggctttcgaaaaaaccatgagaattcgatagttccctttgatcatcttagtaccggcgaacagcagctactgcttctgacggcaaggcttgttgaatacgcccggcccggtgttgtcttcctgatcgatgagcccgagactagcttgcacgtcgcttggcagcgagcactgccatcggtttttcagactatcagccgagacttcaattgccagatggttatcgctacgcactcaccgattctaatttctacctcgcgtggggacgacacataccgatttatggctgatggtggtgtgctagaagcaattggggagcaagctgcaagtagtgtcgaacgagtgctttttcaggggttcgatacctacacaggcaacaaccgagaggttcacgaacgctgtgctgagttggtttcgcgggctatcgagtttgccaacacggagcgaactgaaatgttgtcgagcgtctttgatgaattgcaacagatggaggagaaggttactagggctgtaccagcgcttggttccgaggtacctgcgcggcaccttgatctcatccggagagctacgctcgcgatagaggaactgactagctccgataagtctgaggaggccagatcgtga

SEQ ID NO: 436433 - DNA, 1569 bp, Serratia marcescens
gtgccctcaaaaggatgggctaaaccaaacgaattacttagagggctagatattttccatggccagcgactttttgtgcctggaggctcgtcgtcaaattgccaaaacctttggcgtacactgaatatccccgaaccaggcattgatgactgtatccaatgctgtcgggaactgactcgtgaacagtatgattcaagaatagaatctcagcttatggatgtttatcgttacatggagaaattgctggagcatgcagagcgctaccataaagataagttacgggtactaccactgttctgctcgactggctgggtaactcaacgcccaattcactacgtggacaatccagagcttcggcagcaattaagtaagaggcttcctacccttcattgctggataccgccttgtgatatacaggatttccctagactggttaaagcacttagagtaaaagaactgaatcctgaacttcagattctcggtaataattcctacgctaaagagcgtggtgaccaggaaagattacgttttgggcatgctgttgaacacctgtcaaatgagcttgccagaagtacccctgaattacgtgaaaaactcgttataagctgggatactcttaggaatactcagctctatatttacgagcaccccatcacagtgcgtgcattgtcttcagagttccctgctggatttattgaagttgctcttaatgccgtgagtttgaaccaatccgaagtcttccatttttataatgacgcaatcggcaatcgtgattctggaggatggcttattgcttctctgtttcctgcaaaagaacgtcggcgaattgatggcgaatgggttcttgcttggcaaaaaagctgtcactcagcggcagaagcaatccgccttgcgagtgacgaggctcgtactgaagccatggaagatataatcaccaatattaacggttcggtaaaacacaaaattaacgttactccaccgaagagccgatcagttggagcgaagccaagaacactgaagccatcggtaggtgctatggtcggagcttcgctgcagaccaaggctgcaccctcaaaatctacagccacccgtggaggatcccgaggactgaaaaataccccgccagtgccccaacgaggtccaagttcatcagttcccgcaccggttgcctataccaacgcagatcttgagcagagagcttgggagctactttcccaagctctggacacaaccgacgatcagaggattattgatttcagacgcaatcatggtgtgggtgccgatgccgttattgactggaaacagtttatcgaaatgaaagccactggccgtggtccccagaaccagatagagatgtctaacaatgagtacttacgcgctaaggaacgtggaagcaactttattctggctcttgtgtcaggacttgaaacaggtcagtcggatgaaatcaggctcataattgatcctgttaattgtgccaacgtaatccctactaatggggtcagattaggtgggttacttgatgccccctccgttgttattgagtttgagagcagtaatgatgaatag

SEQ ID NO: 436434 - DNA, 972 bp, Serratia marcescens
atgactggaacaaatcgttcaaaggtaacaattttagaacttgttattccacccatttctaatcaagaagcagtttggtttaaagatgagccttttgctaaacacatgaagcaaagcgatttctacatgatcggtggaaaagctaagtcaaaattttctaaagttcgtaccaatgaagacaagagtaaaattctctttgatgtttttgtaggcgacaatcataaaagcagcggaatcattcatatatatgagttggagtcggtcattgattttaagggtaataactttggtattggctgtggggatgaagcaatagagtttttctatgaaaataatggagaaaatattctattggatcggtttacaccagaaaacatcttatggtatcggtctagagaagcagctggtatatcaggattagataactatgcggatgtattggtttatgacctactttacgttggaatagcaaaaaaaggagatagttatgatcgcctaatagctaaaggtcatcaggcccgccaagaaatactttcgaatgagccacagcgttatcctggtgctagagttactgatgagatttttcttttcctattccatgctgaacctttatttatcacgacgttcggttctggtagcgatatagatttggactttgattacgatcacaaaaggattattgcggatgccgagaaagctttcgtaagcttgttgcagccaaattacaatacagtcagatttaaacaatatccaaaaggattggatgggttatatgactctaagttagatagatatagttactctataggtgaagctatcacctttaatacccctcacggtcaaattaaaggaggtagaaatggagattttggggggttaagtaacaaggctgattttatatcagtcgacaaggaatctgccaaacttttcatatcaggcgttgacttccctaatgatgaacccaacgtctaa

SEQ ID NO: 436435 - DNA, 1200 bp, Serratia marcescens
  misc_feature (18)..(54): n is a, c, g, or t
  misc_feature (1184)..(1193): n is a, c, g, or t
gtggtctggaaggcagannnnnnnnnnnnnnnnnnnnnnnnnnnnnnnnnnnnnaaagatgccgccagaaacctcgctgaaagggttacaaagcgttgcccgagagagcaggcgcggcgctttgattcaatgacttttgatgccttcactaagggacttctggaccggttccgccctgctttacctgagccgttcaatgcgcctggcacgtatcagatcgttacgccatttcgtcgggattatgaggattttcttgaacgtcatggctatcacggtgtgagtgttcaacagcttgagggaagactgcttctgacagacctgccaattgacttgtcaaatggatctgaagtacatcgtgcgttagcagattattggcatgaacaattcttcggaggcgacgagatctctctgtccttcccgatgataaacaggcttgtaaaactgttgctgcaggaaaatgcatatatccgtcaggccttacaggcaacgtatcctattgtctttcttgatgaataccaggataccacctatgcccagtacgacttgttgcaaacggcattcgatggtagcgatgctgtctttacggcagtcggcgatgataagcagcgtatcatgggatgggcgggagccatgaatgacgccttcgaccagtttgagaacgattttggtgcgaggcgtatcacattgctttcaaactggcggtcacatgcggatctggttcttattcagcacgagattgctcgccggatagacgacaatgtggaagctgtgcaggcacaagggacccgtgaaattgaaggtgaggtttctgctatctggcaatttcggaacgcaggtgacgagaacaattatctggctgaatgggtgaggcgtgaggttcagtcagggcgtgttgcgccacatgatgtagcaattctgatcagaatgcgggcagatcaggtggagggtgagatagcccctgcttttgcggcacgaggtctcaggatcagaaatgcggcccgttcagtcggtgaaattcaaatacaggatctacttggtgaagaactgaccagcatattagtccctttgctccgcctgggagcgacgaaccgaagcccggaaaactgggagcaggcccagcagaactatctgtttctggaggctactgatccggataacgatctcacgcaggaacggttactggnnnnnnnnnntggttaa

SEQ ID NO: 436436 - DNA, 1962 bp, Serratia marcescens
atgaaaatagagaagataaaactacagaatttccgttgtttcgggcatggggtggtcgagctaaatttcgaggaagaactgacgatacttgtcggcggaaacggttccggaaaaactgcagtgctgcaagctgtgtcccggttgtttggtacatcaccaacgcagcggtcggtacagcgtcgggattttcacatacctattgaccggcaggaactgcagtctggcgacagtctgtttgtcgaagcggtacttgctttccctgagctggaagatcaagacacttctcctcttgatgctgttccggagttcttcaatcagatggctgcttctggtgagggagagccccttaaggcccggatacgactacaagcaacatggacggatgatggtacgccggaaggggcaattgaagaggatatacgctggataagagccctggatgataattttgaatgggatgattgctccagggttcaggctgtagagcgctcttcgatccagtttatttacttaccggcaaatcgtgatgcgacgactcaggtgaccgctcttctaaaagggcggttatggcaggctgccaaatggtcgacggcatttagggatgcaagctctgatagtgccggtcagatccagagcagtttcgaggaagaggagccgtcgaggtttctgctgcaacgtctttcgaagcgttggcaacaggtctatgaagctgatacagacagtaagccacgcttaaggctcatcgaaaaccgttttgaggagcttgttcgtaaagccgaatttacctttatgcctgatgaagaaggtcaggagcgccgtttgtccgagctgagtgacggtcagcgttctctgttccatatagcccttacagcggcaacgctagaaagcgagcgtgaagctttttctttgcctgctgatgacagctcatttgaacagggtaagttacgccgtattcacctgacgattcttgccatcgaagagccagaaaacaacctgtcaccgttctttttgtctcgcatcatcaaacaggcgagagagatcggtgcactgccttccgcgcaggttatgctatccagccattccccggctatcctgagccggatagagccggaggaagtgagatattttcgtatggaccggagcacccggtgctcatcgatccgagaactgaccttgcctgaagatgatgttgaggccagcgtgtatgtcaggttggccgtaaaggcataccccgaactttatttcgcgcgatttgtaatcctgggtgaaggggattcagagcgcgtcgtcattccgaaaatagcggaagatatgggggtgccacttgacccgtcatttgttcctgtcgtcccactaggaggacggttcgtagcgcatttctggcggttacttagtgatcttgagattccatatgccacactgctcgatctagatttggggcgtagacatggtggggcgaacaccatgaggagctgccttcagaatctgggccatattgggaataattttgaggagctcaatcgtgataatgctgctcaggttaccgaccaacagctttataatgaaggccagcaaggtcaattgcttcaagctttcaggggggaaggtgttttcttttcctatcctattgatctcgattttgccatgttgcttgcgtttccagacgcttaccaggttgccaatccaggtggccgtgggcctcagagtgatgctaacgctattcaagccaaaaaggccagcacacttaaaacaggtgggaccccagccttgtataccgagcactatgatgatgcttttaaatggtatccgtatttattcttgagccgcagtaagccagagacccatctggctgcgttttcccgtatccctgatgtcgatgtttctgcgtcagctcctgctgagcttagggcccttattgagtacgtaatgcataaactaaatctgccaggaatcggggaatga

SEQ ID NO: 436437 - DNA, 273 bp, Serratia marcescens
atgagcagcgccaccctaaatcgggtgatgactatgacctacatattggcccagaaggaaggcaagtcgctcgccaagtttgggccccacgacttgagacgcacggccagctctctgctacatgaagctggctacaacactgactggattgataaatgccttgctcatgagcagaggggcgtgagagcggtatataacaaagcggagtattgtgatcagcgtacatctatgttgcaggactgggctgatatgattgatgaatgggttatttag

SEQ ID NO: 436438 - DNA, 375 bp, Serratia marcescens
gtggatacaaaagactttttggctaatgatggcctgttataccagattagcattgacgataacggcgaagacatcgaggtttatctaaacggggtaaagcaagggcgtatctgtgtgcagctattcgaaattgagaattctacaaacaataactactacatcacggatctcagccttgaaccttgcaaaggccaaggagtaggaagagcctgcctgaaactccaccaagaaatttataattctcgtctgtatgcagctgatccctatggccaagaacaggagaatgggggtcatttgatagatgatggtgtaggttttatagctaagatgcgtaaagagggcatcgttcttccttttaccgccaataacgactaa

SEQ ID NO: 436439 - DNA, 282 bp, Serratia marcescens
atggaaatattgtcgcagaaggatatgttacttgtcgcaggcggtcagcaatctgatgaagacagagctctcgaagagatgcgtgatttgctgagttctgtcggctccagtgttggcggcgccgtaggtgggtatgttggcggcattctcggtggggggtatggtatcgccgtcggggccggtgtagggagttacgttggagaacagatagggcagaactaccatgaacccgataatgtttctatgactcctgcgggaattggcacggataaccattggtaa

SEQ ID NO: 436440 - DNA, 768 bp, Serratia marcescens
atgaacgtcatccaactcacaccattacgactcccaaatataacaatgctatccgccgcgacgagagaaaatctcgcttctttggatgtcattatatcgacacatcccctctccagtgaaacaagtaaggggcatgatccagttgttgattttcctaataaagagatcgataagttaacgcaccgactcagtgcccattacctaattaatcagaaagatataaaaaacgacggccggacattgctggaaacaacgctgattaatcagttcgtcgatgattataatcgcatgatcattcgcgcccggttcgatgatttcctggcctttttagtcttctggtcttgccggataaatccggccaaacccggcatcaggaatacacccatgcgcacgtcttcagaccaaaaggggaattacacccgattcatcgatgctaaatacttgccagatggactgcgtaatatatgggatcttatcatcagtgccccctttaacagccttttctcaacggtaatcagtacaacagccttgcttgcctaccatccattttatgacggcaacggccgattttgtcgattgcttatcaatgccatgctgaaacgttgccaagaaaactatattccccttcatgatatttatcatctatcgcaaggtggatattttatccgtttgcggcaggcgctgatattttcagaatgggatgagattattttgtttcattataacatcgtcagttttttcaccccaaagccatgtaaacttagctaa

SEQ ID NO: 436441 - DNA, 201 bp, Serratia marcescens
atgacggtcaagatcctcaaatataaccacattgtattgtgtctgttcgaagaagtagactatttcatcaatgtacacattgagaagagagggggctgtagggcgcgtagaaatcgcccctttcagaacgtcaactttatcaatactgacgcggcggtcaaatacccctgtacggtgcagtttcttcagtgcaaagaataa

SEQ ID NO: 436442 - DNA, 654 bp, Serratia marcescens
atgagaaagacactcctggaaatagcccagcagctgagtacgcctaaaaaaaccaagaaaactgtccctgaaaaaactaaagaagttgaagagatcaggcctgtgccaaaggtgcagttaatctacgctttcaatggcacggggaagacgcgtctttcccgggatttcaagcaattgattgcgcccaaagtcattgacggagaaggtgaagacgaagctgaacagtccgaattgtcgcacaaaaaaatcctctattacaatgccttcaccgaggacttgttctattgggataacgatctgcaagaagacgcagaaccgaagctgaaggtgcagcctaactcctatacaaattggttgctgaccttgctcaaagatttgggacaggatggcaatatcgtccgttatttccagcgctatgcgaacgacaagctaacgccgcacttcaatccagattttaccgaagtcactttttccatggagcgcggtaacgatgagcgttccgcccatatcaagttatccaaaggtgaagaaagcaacttcatctggagtgtgttttacaccttgctggatcaagttgtcacaattctcaatggtcccgatcctgatacacgctcaaacggctgccgggagacgcgtactttacccaattcataa

SEQ ID NO: 436443 - DNA, 543 bp, Serratia marcescens
  misc_feature (18)..(27): n is a, c, g, or t
atgtatttgatatttttnnnnnnnnnnttatccgaatttgagaccgaggaattcagcatccccgttctgtcaaacgggataggcaataaatcactatatggatggactaacaaagctaagatcgagaaaccgagtctcactatatctgcgagaggtacaattggatggactagctatagaagcagaccattctttccgatagtgcggctgctggtcttgacgccgaaaattaaaatgagtttgaagtatgcttactacttcatgaaaactattgagaataattacaaaatcccagaggcaggcatacctcagctaactaagccgatgctcaaggacattaaaatacccttgccgtgccctggtaacccggaagaatcatatgctgaacaagcccgaatcgcagcaattctcgacaaattcgaaacattaactaattccatttctgaaggtttgccacgcgaaatcgagctgcgccagaagcagtacgaatattaccgagacatgctatttagcttcccgagaccggaagttgtagaggcgtga

SEQ ID NO: 436444 - DNA, 693 bp, Serratia marcescens
  misc_feature (670)..(679): n is a, c, g, or t
atgattgaactaaattatctcagtaagttgcttgatggtgatagcgttgaatggatgtctttaggggaaatagctgaatactcaactacccgagtcgatgctattaaacttgacgctacttcattcactggagtggacaatcttatttccaacaaaggtgggcgtatcgatgcaaattacctgccgaatactgcccgtttgaccgcatatgagccaggggatattctgcttggtaatattcgaccatatttgaaaaaagtttggatggctacgtattcaggtgggtgcagcggtgatgttcttgctgtccgtattcgttatgaatgcaggtctttcgtaaatccaaagtttttatattttattttgtcatcggatgcattcttctcatacagcatgcagcacgcaaaaggtgcaaaaatgccacgaggaagcaaagccgatatattaaactacgaaatcccagtcccttgtccgagcaatccagagaaatcccttgccattcaggctgaaatcgtccggattctggatacctttacggctcttaccgctgagcttaccgctgagcttagcatgcgtaaaaagcagtacaacttctatcgcgaccagttgctgagttttaaagaaggggaggttgagtggaaggcattggatgatgtatttgatatttttnnnnnnnnnnttatccgaatttga

SEQ ID NO: 436445 - DNA, 1554 bp, Serratia marcescens
atgacaagctttcaacagcgtgcagaactacatcgtcaaatctggaccatcgctaacgatgtcagaggctcggtagatggatgggattttaagcagtatgtccttggtgcgcttttctaccgctttatcagtgaaaacttctccagttacatcgaagccggtgatgacagtatcaactatgctgcgctggatgacagtatcatcaccaatgacatcaaagatgatgccatcaaaactaaaggctatttcatttacccgagccagctgttctgcaacgttgcagctaaagcgaataccaacgacaggctgaacgctgatttaaacagtatttttgtcgccattgaaagctcagcttatggttatccatctgaagccgatatcaaaggcctatttgctgattttgacaccaccagtaaccgtctaggtaacactgtaaaagacaaaaatagccgtctggctgccgttctgaaaggtgtcgaaggtttaaaactgggtaactttaatgaccaccagattgacttgttcggtgatgcctacgagttcctgatttccaactatgctgcgaatgccggtaagtcaggcggggaattcttcacgccacagcatgtctctaagctgattgctcaactggcaatgcacggtcagacacacgtcaacaaaatctacgacccggcagcaggctcgggctcactgctgctgcaggcgaagaaacattttgataaccacatcatcgaagaaggcttctttggtcaggaaatcaaccatacgacgttcaacctggcgcgtatgaacatgtttctgcacaacatcaactacgacaaatttgatatcagactgggcaataccctgactgaaccacactttggcgacgaaaagccgtttgatgcgattgtgtcgaacccgccgtattcggtgaaatggattggcagcgacgatccgactttgattaacgatgagcgttttgctccggcaggcgtgctggctccaaaatcaaaagctgactttgcgtttgtgcttcacgcgctgaactacctgtccgctaaaggccgtgcggcgattgtctgcttcccgggtattttctaccgtggtggtgctgagcaaaaaatccgtcagtatctagtcgataacaactatgttgagacggtgatttcactcgcaccaaacctgttcttcggcaccaccattgccgtcaatattctggtgctgtcaaagcacaaaactgataccagcgtacagtttattgatgccagtggtttgtgcaagaaagtgggaaataacaacattcttaccgatgacaatatcgctcagattatgcagatgttcagcagcaaatcagacgttgaccatctggcgaaatccataccatttgagattatttctaaagactacaacctatcagtcagcagctatgtcgaggccaaagatacccgtgatatcgtggatatcactgacgtgaatgccaagctgaaaacggtcgtcaggaaaatcgaccagttacgtaaagacattgatgcgattgtagctgagattgaaggaaatgaggtgcaggaatga

SEQ ID NO: 436446 - DNA, 1392 bp, Serratia marcescens
atgagcgttttgattgccctggcagcactgggattactgatgctggccgcctatcgcggctacagcgtgattttgttcgccccgatcgccgcactgggcgcggtgctgttgaccgatcccggcgcggtggcaccgaccttcaccgggctgtttatggagaagatggtcggcttcgtgaagctctacttcccggtgttcctgctgggggcggtgttcggcaagctgatcgagctgtccggcttctcccgttcgatcgtcgcggcggcgatccgcattctcggccggcgtcacgccattccggtgatcgtgctggtgtgcgcgctgctgacctacggcggggtgtcgctgttcgtggtggcgttcgcggtctatccgttcgccgccgagctgttccgccagagtggtatccccaagcggctgatcccggctaccgtggcgctcggcgccttctccttcaccatggacgccttgcccggcacgccgcagatccaaaacatcatcccgaccagtttcttcggcaccaatgcctgggccgcgccctggctggggttgatcggctcgctgttcatcatcgcggtcggtctgctgtatcttgaacgccagcggcgcaaggcgcagctgaagggagaagggtacggcaccgatctgctgaacgagccggaaaccccggacgacatcaacctgccgaatccgctgatcgccatcctgccgttgattttggtcggggtattcaaccttggcttcacccattggatcccgcagtggtacggcgccagccacgagctgacgctgccggggctggccaagccgatcaccaccgacgtggcgaagatcaccgccatctgggcggtggaagcggcgctggtgtcgggtattctgctggtggtggtgttcggctttcgcaatattcgcggccggctggcggaaggcagcaagacggcggtcggcggcgcgatcctggcggcgatgaacaccgcctccgaatacggcttcggcgcggtgatcgccgcgctgccgggctttttggtgctgtcgcaggcgctgtcggcgatccccaacccgctgctgaacgaagcgatcagcgtcaccctgctggccggcatcaccggatcggcctccggcggcatgagcatcgcgctggcggcgatgtccgacagctttatcgccgccgcccatgcggcacagattccgctggaggtgctgcaccgggtggcctcgatggccagcggcggcatggacaccttgccgcacaacggcgcggtgatcaccctgctggcgatcactggccttagccaccggcaggcctatggcggcatcttcgccatcaccctgatcaagagcgccgcggtgctgttcgtgatcggcgtgttctacctgaccggcattgtttaa

SEQ ID NO: 436447 - DNA, 771 bp, Serratia marcescens
atgagtgtacaaggcaaaaccgcgctggtgaccggctcgaccagcggcatcggcctcgggatagcgtccgtgttggccgccgttggcgcgcgcgtgatcctcaacggcttcggcgacgtggagcaggcgcaagcgcaggtcgcgcggctgggcgccgcgccggggtatcacggcgccgatctcggcgatgcgggccagatagcggacatgatgcagtatgccgaacgcgagttcggcggcgtggacattctggtgaacaacgccggcattcagcacgtggcgccgctggatcagttcccggtggagaaatggaacgccatcctcgccatcaacctgtcggcggtgttccacacctgccgattggcgctgccggggatgcgcgagcgtaactgggggcgcatcatcaacgtggcgtcggtgcacgggctggtggcgtcgaaagacaagtcggcctatgtggcggccaagcacggcgtggtggggctgaccaagacgctggcgctggagaccgcgcgcacgcctgtcacctgcaacgccatctgccccggctgggtgctgacgccgctggtgcagcagcagatcgacaaacgtatcgccgccgggaccgatccgcagcaggcgcgcgatgagctgttggcggagaagcagccttcgcaagcgttcgtcacgcctgagcagctcggcgagctggcgctgttcctgtgcagcgatgcggcggtgcaggtgcgcggcgccgcctggaacatggacggcggttggctggcgcagtag

SEQ ID NO: 436448 - DNA, 693 bp, Serratia marcescens; identical to SEQ ID NO: 196757

SEQ ID NO: 436449 - DNA, 645 bp, Serratia marcescens; identical to SEQ ID NO: 196758

SEQ ID NO: 436450 - DNA, 1101 bp, Serratia marcescens
atgagaagtccatctccggcgacaacgcccaaacgcccggcgctgctgaactggctgttatacagcccgctgcaggccgatgacgagccgtttcaacgccagctgcgtctcacgctgacgccctctcctctcactccctggctgaatgccgcagggccggtcgcgctgttggtggggtacgcctggctgaaccgaccgctggtcggtatcggcctgctgctgctgttgctgctgttgaccgccgggcgagcctggctggcgcgccggcgtcaacctgcctggccggacgccatgctggtgacggtgttgctgtggacgctgctggtcggcgccagcgccgcgctggcgatgctgtcgggccgcttcgttttaatacttttcgccggcctcaccatcaccgctctggcctgctggctgatgcagcgccacgccgccgcgccacgcttcgcgctgcttgaggtgatcgcgctgacgctgccttacctgctggcagcaccgctgtcgcgcgtgcaaaatctgtttgtcctggcggacctcgcgccgctgtggctggtgctggcccatggcatgatcgcacgctaccaccgccaactggtgcagcacgtcacgctggcctgggagaagcagcaggcgtcgcaccgcgatcgcctgaccggcttcctcaaccgcgcgggcggcgaggtggtgatgcgtagcatctgccgccccgcagcggcacagacgatctcccacctgttcattcttgagttcggtccgctggcggcgctctaccaaagccacggcgtccagatcggcgacgacgtactgcgcaccgtcggcgagcgtctcaagacgctgatccgcccgagcgactacgtctgccgctataccggcggcctgtttttgattctggtgcacgatctgccctacggcgcggaaagcgaattcctggcgcgcatcgtgccgccgctggaggcaccttacgattttggcgcgttcggcgaggtgaacatgcagctcaacgctggcattgtggcgctgacgcagcattatgcgacggtggaagatttgatgagttcggcgcagcaggcgctggcggaagccaaaggcgggaaaaagtaa

SEQ ID NO: 436451 - DNA, 198 bp, Serratia marcescens
atgagtgcgaataaccagcagcacagcacggtggtgccggtgccggactatacggggcaaaaaacctgcgggatcacggtgcattttatgccctgtgatgaggtgaaggtgacgaccagctgtgccaactacggccatccggaacacccgatcaaagaacctcttaagatgccggagccaaaagtatgtccgaaataa

SEQ ID NO: 436452 - DNA, 513 bp, Serratia marcescens
atgaaaatacggcattacctcgtggtactaagtgctctgctgctggcgggctgcagcctgccgacggcgaaggcgggaaccatagaggcagtcaaccacaccaaatgggcgatcaaccatttcagcgtcgacggtcagtcggggatagacattattgggccctatcagggcggcggtggcggctgctgctatggtgtgccggcgaaatggcggccgggtatgacggtaaaaatcgactgggaaaccggggttggtggctcaaagggatttccaggctttgctgattgggaaaagtacttggcctgggaaaaaaaaatgaaggcccagaataagcagcacagcacggtggtgccggtgccggactatacgggccaggaaacctgcgggatcacggtgcatttcatgccgtgcgatgaggtgaaggtgacgaccagctgtgccaactacggccatccggaacatccgatcaaagaacctcttaagatgccggagccaaaagtatgtccgaaataa

SEQ ID NO: 436453 - DNA, 2448 bp, Serratia marcescens
atgtccgaaataatcaccgatctggcgtggtacccgccggcgtttccggctcaggggcgtttacccacccaggctgcgctggttggggccaactgcgcccggcaggacagccatgagctgacttaccgacaggagttatgcctggcggccgggcggcgcgtggagcccccctgctgcaagaccctgcatatcagcctgtttttcgacggcaccggcaataacctcaatcacgacttatatattgcggatcctaagcacccgaccaatattgcccggctgttccgcgctaccattgggcagggaactgccgggggagtatctggaggagaggaattgctggatgcggacggcagcggcgaggataaatactacaaatattatattcccggcgtcggcacgcctttccccgaagtgaacgatctggatttcagcatgatggggctggcggcggcgacccacggggaggaccgcatcaactggggcctgctgcggcttatcgacgcgctgaagcgaacgatgaccagaaaaagtttgtcggacgacgagagctggaaggcggtggacaaaatggcgacctcgatggcgtcctttgggctgaccggcagcgctaaccgttttgagaccttccagcgcctgctgaaggagatgtcacccgaactgcaaaaggcgctgatgcccaccgggcccgacaagccgaagctgctagggatcaaactgtacgtgtacggcttttcgcgcggggcggcggcggcgcgggcctttgttcgctggctcagtgagctgctgccaaagcctgaagaggggcaggacaagcccgaacagtgcctggcggtgggggagctaaaaatcccgctcagcgtcgagtttcttggcctgctggatacggtggcctcggtgggggtagcacatatcgccccggtggcggaagggcacatgagctgggccgacggaacccaggagctgccgacagagaagacctacggcgggttgatcaaaaagtgtgtccatttagtctcttcccacgagcagcggctgtgcttcccgctggattcgatccgccgcccggatggtcaatatccggctcatagcgaggaaatcgtctatccgggcatgcattcggacctaggggggggctacccaccgggggatcagggaaaggcaaatggtgataacgatagtttactgttgtcacaaattgcattgaatgacatgtatgccgctgcttttgaatcaggagcccccctaaaagctcctgaagatagtttacctgaggaccttaaatttcaacgatggagagtcatggatgttgatattatttcagcgttttccgcagctccaaaccttataaatcgtttcaacgcctggcgtgagctaaccctcgggcaaacggcttctcaggccccaccttctcccgaacaggcagcaaaatacgatccgccgcgcgcgcccgtcagcctggagaaagccattgaaaatcagctgggttggatcacggcgtggcgcatcaaccgctatgccgggggaagctacaagacccagcgtttttatgtcgattcggcggcgaatgggctggataaagacagcgatccgctggtcagaaagcagtctgaggcggtcagaaaggctttacaggaggaagttgagaaaaagcgcaagaccgatattgccgaacataatccggatgatggcttcctgaagctcccgccggggccgaaggattttgatgcggcgctggggcagactcagctgcgtcaggcggcggaggaattcagagaggactatcatggcctctcccgaaccagtaccgggaactggtattttagtattgctgattcaatgagtaacgctattttcctgctgaataatgatgatgagtacggcgagtggttgagaataaaaaccgccggagacgatcgcgtaaaagtgcttttcccgcttaccggggaagcgagtaacgccacgcagcctgccgggctggtgcgggcgctatttgacgatcagatccacgattcccgcgcctggtttatgcacaacgccttcggctcccgtgaaccctggggcagctatttcctctaccggatgatctatttcggcagccgcagcagtaaaccgatgacgccattgatgattgccggtgcggtggtgggggttgcgacacttgcagcaggcgcggccgtgatcatcaaacagaaaagcgtgaagggcaaactggcgggccttgccggtaccgtaggggctatttatctggaaactcaggcgatcgatctgctttctggtaagcctttgcctatgctgctcaatgccgcacagctgcaggcgccgacaatggaacccggtgtgattgtcgcgcagcaaacgcaggcgatcggtgaacaacgcttggcgctggcaaagtcgctgattgagtccggctgggcggaaaagcttaaatcgaccgtgacggcataa

SEQ ID NO: 436454 - DNA, 258 bp, Serratia marcescens
atgaaagcgatcatacgtgagggcgataccctgcgggagtacggcgggaaagtgctgggcgggcattatctgtgcttcggcaaagggattgcctgcaaaggcgatgcggtaaagtgcaataagcatggtatgacggccatcagcgaaggcagtgcgttatcggaggcagacgggcagccggtggcattgcacggccaccgctgcgcctgtggttgcacgctggtgagctctttccctgattgcggcattgcgctgtga

SEQ ID NO: 436455 - DNA, 996 bp, Serratia marcescens
atgattaaagggatggctggcgcggcggttctgctgggcgtgctctggttaatgcgcttgctgtattaccgggtttcggcccataacgcccggtattatgcgcagctggttgaacagcagcagcaggcctggtgggagcagcatcaacgccgtttcgcgctcagtgaaatggtgttgctgggcccggccggaaccgatgcgccacactggctgcggttgttacagcgggagcatcgggttcctgagataaaaaatgagtcgagcggaaaagcgctgcgcatcggccggacgttggtcgactcggtggctgaacgagagactttattggcaaaaatgctggtgctgcagtggcagacgcaaaacgcaaattcccccctcccgcacatacggcgctgctactggctgggttccctggtggcctggcgggcattttgcgcgcaaatgcagctttcgtttgttgacgctgcgctacccgaaaagccggagaaatggcaaggcgaagagacgttgtcagtacttgccgccgtcgctcaaacgctcccggagaccgaagccattctggtcgccgggtgccattcgatgacggcctcgtttaactcagagcagcctgccggtgagtctgcggctttgtgtctggtggctcataaaggcctggtcagccttacccgaggggaggtctacgatcccaccgggaaagaggttttaaccgcagtcagcgagcgagcggagcagcaaagcgaaatcgaaaaggcacctgacgcttgcatgctgttctcacagcccacgttacccgtgctggcgcaaagtggctggaatgtgactcatcacgtccaagatctcaactggggcaacccgggtgagatggagatgctcatcgtgctggtcctggcagccttgtatgccaaacagtatcaagaaccctgcggctggatagccaaagatcctctacacactctcgcacttggaattattaaaccttatggagaaggaaaataa

SEQ ID NO: 436456 - DNA, 3423 bp, Serratia marcescens
atggagaaggaaaataaacccgctgaattttctgtggtttccacagcggtgttgtttgttgctactgtcacgttgcttgtgctggcaggtggattgctgtggtggtactgggagaacgatctctccacggaatggaatgtgctacgccagatcatgacggcctgttttgttgtctgggtagcgtcgctctgtgtactggtactgggttttatcgcgtttcatttagtgattcgggataacgtgatgggagacgcttcttccagaccagtgaaaaagaaaagcccctcccggttgccgctcaaggcagacatcgccagttatctccgccaacgttataccttcttctggcgccaaaaagtccgtctcctgcttgtcacgggcgatgaagccgttatcgaacggctggcaccgggccttcagcagcagcaatggcttgaaggcaatcgcacggtgctgatttacggcggcagtctggcattagagagggacagtgataaatacaccgcgctgcgcaagctgcgccggggccgtccgttggatggcatcgtgcggatgctggctgaaggccaggatcttaccccgcagatgagcgatagcgatctgcgggggctggagaaaattggcgaggcgctacgctattctgccccggtctatctgtggcagctgtgtggcagcaactggccgcaggcggggcgtaaatctcagccaattggggtgacgttcccgccgcgagccgcgccggaaaatgtggccgcgcagcttaacgcgctattgccgcagctgcgtgaacaagggctttctcaggttgcggaaaatcgcagctatgattttctgctgcgtttggcgcaacagtttgaacagggggaaagcgaacgctggaaaacgcgtctggctccctggctctacggttcccagcagcaagtcccgctacgagggctgatgttcagcctgaatggcgaagacgaaccggcaatcgaagccgttggaatcgatgctcgtcgcgctcacctgcatgccctgaccctgccggtaacctggcagggcatcgtcgatgactgtacccgggttcgtgggcgtcgggtggggatggcgtgggagcaggcgctcgtctgggcactgttaggcatcattggcgtctgggggacggggctgttgctctcctttgcgctgaattatagccagataacttccgtggcaggaaaagcccgcgttttggtggaacaccctgccatttccgatagtcaactgaccgccctgcatgatttgcgtaatgaggctggtcgactgcaacagcaggttgaggatggcgccccgtggtaccagcgttttgggctgggccaccatgcgcagttgctgaatgccatgttgccgtggtatggcgtggcgaataatcgtctgattcgtgacccggcgaataatgccttggcgcagaagctcagcgccctggtcaattcagcgccaaacagcgaccagcgcatcaagctgacgaaaccgggttatgaccagcttaaggcctggctgatgatggcccgtccggataaagccgacggtgcattctacgcgcaaaccatgaaaacggtgcagccaacgcacagaggcatctcaaccggcctgtggcaaagcctggcgccggatttatgggccttctacatttccgagctgccgaagcagccccagtggaaagttaccccggaggcgcaactggtgagccaggggcgtcaggttctgttgcagcagattggtcgccgcaacgcagaaggcgcgctgtatgaaaacatgctcaagtcagtacgccgcaacttcgccgatgtgacactggaggacatgaccggcggcaccgatgcgcgccgcctgtttaccaccgatgaggtggtgccgggcatgttcacccgtcaggcgtgggaaggcggcgttcagcaggcaattgataaaacggcgaacacgcgtcgggatgagatcgactgggtgctgagcgacaaccgcaaagcgctatccgcagaaatttccccggaagcactgaaagcgcggctgacccagcgttacttcgccgactttgccggcagctggctgaactttctcaacagcctgcggctgaacccggcgcataacatcgccgatgtgaccgaccaattgacgttgatgagcgatgtgcgccagtccccgctgattgcgttgatgaacacgctggcctggcaggggcagaccggggaacagggggaaggactgtcggattccatcattaaatcggcaaaagatctgatcggcagtaaagataaaccggtcatcgatcaacatgctgcaggcccacaggggccgctggatgagaccttcgggccgctgctggtcctgatggggaaaaacaaagccggtaacgtgatgtccgcggataactcgctcagtttgcagacctatctgacccgcatcacccgcgtgcgattgcggttgcaacaggtggcaaacgcgtccgatccgcaggcgatgatgcaaacgctggcacagaccgtttttcagggcaaaagcgtggatctgactgatacccagcagtacggcagcctggtggcggccagcctcggggaggagtggagcggatttggccgcacgctgtttgtgcagccgttgacccaggcctgggaaaccgtgttgcaaccgtccgccgccagcctgaacgaacgctggcgccgttcggtggtcacgaactggcgcacggcgtttgatggccgctttccgtttagcgtcggcaaaagcgatgcgtccttgccgatgctggccgagttcatccgcaaggataccggacgtatagaccgctttctgacggcagagctcggcggggtgctgcacaaagaaggcagccagtgggtaccggatagcgcccacagtcagggcctcacgtttaacccggcgttccttaaagccgttaaccagctcagccagctgtcagacattctgtttactgacggtagccagggcatcagctttgagctgcaggcgcgcgcggtgcctcaggtggtggaaacacagctgacgatcgacggccaaaagctgcactacttcaatcagctggccgactggcagtcgttccgctggccgggggaaagctacaagccggggacgatgctgacctggacgtcagtccatgccggtgcgcgcctgtttggggactatacggggacatgggggttcattcgctggctggagcaggggaaacgtcaacagcttgaccgcagccaatggatggtgagctttacggcacctgacggaagaacgctgcagtgggtgctgcgcacccagttgggcaacgggccgctggcgctgctggggctacgcaatttcagtctgccggatagcgtattcagcgtagaaacctcagccgccgagcaggcgctgatccgttcggagtcctcaagcctggatgaggaggaataa

SEQ ID NO: 436457 - DNA, 528 bp, Serratia marcescens
atgaaacatgcattattaagcccgctgctggcgggcctgctgctgctaaccggctgctcacagcctgccgctcaggcagggggcggaggtggcactatcgacgccatcaaccacaccaaatgggcgattaaccacttcagcgtggataaccagtcgggcatcgacattattggcccgttccagggcggtggcggcggttgctgctacagcgtgcccgcccgctggacgccgggtatgacggtgcgtattgactgggaaaccggggttggtgatacagaaggttcccctggatttggcgatgatgaaaaatatctcgcctgggctaagaaaatgaaagcccagaatcgccagcacagcaaaaccgtcccggtacccgactataacggccaggatgtctgtggcatcacggtgcactttttgccctgtgatgacgtgaaggtcacgaccagttgctacacctacggcagtccggcctacctgataaaagagcccatcaggatgaaggagccaaaagactgtccgagatag

SEQ ID NO: 436458 - DNA, 528 bp, Serratia marcescens
atgaaacatgcattattaagcccgctgctggcgggattgctgttgttaaccggctgctcacagcctgccgctcaggcagggggcggtggtggcaccattaaagccatcaaccacaccaaatgggcgattaaccacttcagcgtggataaccagtcgggtatcgattctataggtccattccagggcggcggcggcggttgctgttacagcgtgcccgcccggtggacaccgggtatgacggtgcgtattgattgggaaacgggggtgggatattccatggactttcctggctatcagaataggcaaaaatatcttgcctggaaaaaaaacatagatgctcaaaaacgtcagcacagcaaaaccgtcccggtacccgactataacggccaggatgtctgcggtatcacggtgcactttttgccctgtgatgatgcaaaggtcacgaccagttgctggtcaccgagaaatgccaactacccgattaaagagcccatcaggatgaaggagcccaaagtatgtccgagataa

SEQ ID NO: 436459 - DNA, 2451 bp, Serratia marcescens
atgtccgagataaaggaaaccgatttaacctgggtgccaccgccgttcccagcgcaggggcgcctgccgaaccaggcgctgcaggtggggcagagcctctatcagcaggacagcgccgagctgctctaccgtcaggagctgtgcctggccgccggacgacgcgtggccccaccgtgctgtaaaacgctgcatatcagcctgtttttcgacggcaccggcaataacctgaataatgatttacttctgtcaaacccaaaacacccgaccaatattgcccgtctgtttcgtgccactatcgggagcggtacggcaggtggggtaccgaccaacgatcagaacgcgctgttagatgctgctgaagaaggtgaggggaaatattttaagttctatatgcctggcgtgggcaccccgttcccggaagtgaacgacccggactattccactatgggtttggtgggtgccactaaaggggaggagcggattaactgggcgctgctgcgcattattgatgtactgaagtttagcgccacggaaaagtggctgactactgcggagagccgccggtctatcaacaacatgggcaccagctggaaccgcctgtggtttggtggcagccacaaccgttatgaagagttcagccgcttactgaatggtttagccccgcagctaaagcctttgctgacacaaccggagcccggtaaacccaagctgttgggcatcaagctgtacgtctatggcttttcccgtggtgcggcggcggcgcgtgcctttgtgcgctggctgagcgagctgcttcccccgccaaaggcggaaggcgaaaatcccccgcagtgcctgcaaataggtgacatgcagctgcccatcagcgtggaatttctcgggctgctggataccgtggcctcggttggagtggcgcacgtggtgccgattgccgaagggcatatgggctgggcagacgattcgatggaactgccgagcgatgaaacctatggcgggctgataaaaaaatgcgtgcacctggtatccggccacgagcagcgcctttgcttcccgctggactcggtgcgccggggtaacggcaaatatccgctttatgctaccgaggtggtgtatccggggatgcattcagatatcggcggtggctatccgccgggagaccaggggaaggcgaatggcgaggatgatgctttattactctcacaaattgccttgcatgatatgtatgcttcagcattttccactggtgcaccactcaaaatacctccagcgatgttaccgcaagaattaaaccagcagctttggcgagcgatgtcaccagacttgcaggcggaatttgtaatagattcaccattagtccatcgcttcaacgcctggcgcgaactcaccctgaacttgaccacgccagaaaaaatcactgctgaagaggccgccagctacaacccgccgcgcgccagcagcagcctggaaagcctcgtcgacaatcagattgcctggatcaccgcctggcgtattgaccgctatgccaaagggacgctggtggaacagcggttctataaagcggcgacggataaggaagcattacctgctgcgcgcaaggcggcagaagaagcacgggatgcaaagcagcgagaggtgctcaaaacgcgtcagggtcagatagccaaacagcccgccgaccagatggacgatctggtgctccatccgggcgtcaaggattttgatccgaagatggataagccccagctgttcgaagcggcgaaggagtttggcaaggattaccacgacggctaccgcattccggataatctggcgcaggcggtgctggataccgtgctgcaaccgatgattttcgtgctcaataccgatgatgaaccgcaggaataccggcgaataaaggctgacggagatgcccgagtggctgtcctgttccccgccgccggcgaggccagcaatgcgcagcagcccgccgggctggtcagggcgctgtttgacgatcaggtgcacgactcgcgcgcctggtttatgcacgccgcgctggggacgcgcgagatgtgggccggctacttccgttaccgcatgatttacttcagcgaccagtgcaataaatcgctgtcgccactggtgatcgccgggaacgtggtcgggttcgccacccttgtcacgggtgtggcgctgagtttcaagcaaaagagcctgaccggcaagctggccggcctggccgccaccggtgcggtgcgttcgctgcaggtcgaggtgctggacaggcttaccggcctgccattgccggcgctaccggggggcgaacagctcagggcctttaccaacgaaccgggcgtggtggtcgctcagcaaaaagcctttgtggcacagcagcagcaactgcggctggcgcgggcgcaagccgcgatcccggccagttggttggaacaagccctgaagacaatcacctga

SEQ ID NO: 436460 - DNA, 1596 bp, Serratia marcescens
atggccgcattacagaatgtacttcatgcgtgtggggtggatgaacatgccttgctgagccaggcccgggcgcgtagcgctgactgggcgaactggctgatgccggtggcggcggatcgccctacgggtgacgatcccggctacgacgatgatttccagcggatccgcgaggaggttaataaactctccggtattgatacgggattgatttgtgaactggcagaaaaactgctgaccaacgtctgtaaggatctgcgggtgatcggtttttacatctgggcgcgtctgcaccaggatggggaaatcgggttggcgcagggggttgaactgttggcggccatgcttgaacggtttggcaacgagctccatcctctgcgcgctcgcagccgtcaatccgcgctggcgtggttggctagccgtcgcgtgactgacagccttgctctctatcctgaggtggatatgtccgtcatgcagcgcatcatgggggcgctgttattgtcggaacaggcgtttatcgcgctggatgaagcctcccgcccggatcttggcgggctgtatcaggctttagataaccggctgatccaaagcggcggggcaaacacgctggtaccgcaaaccagccgtgaagagggcgcgccggttacctcggcgctatcgtcagcgccggcgttgaatgccgtgacgtcagggcgtgatttgctcgatcaggccaaagtgttggcgaaatacctgcgtgaccagcccggtggttggctggccgggcatcatttgttgaaaagtgtccgctgggacacgctgacggaacttccgccgctggatgccgccggtcgcacccgcctggccccgcccaaacccgacaacaaagcgcacctcaaacgcctgtttttgcagaaaagctggttagaactgttagagcatacggacacgttgttggcgcagggcgttaaccacctgtggctggatgtgcagtggtacgcctggcaggcgctggcgaaacaggatcatgacagcgtgcgtgcagacattctctgccgtgatttgaaaggcctgctggcccgcctcccagggctggaagcgctggctttcagtgacggcacacctttcgccgatgaagtgacgctgaactggataaatgaaagcgtgctcgatgacatagccggatggaaagaggagtcggtatccgtcgtggccagcagccacgatgatgtgctggcactggagccggaagtgctggcgaaagccgacagcgagggtattgaagccgcgctcaactggcttcaggttcagccgggttacacctcctcccgggatcaatggctgatgcgtctgctgatggcccgggtgagtgaacagtacggaaaaaatgacatggcgctgcatctgctgcgtgagcttgacgacagtgccggcgcgcttacgcttgcgcagtggacaccggcgctgatgtttgaagtcaaagcccgccggctcaaactgctaagaggcagaaccgggcgcggcgaagttgataaaacccggctgcagaccgaaatggatacgctgctttccgggcttatcgtgctggatcccgcacgcgcagtggtgctgtgtgggtaa

SEQ ID NO: 436461 - DNA, 1755 bp, Serratia marcescens
atggacgacttaaccctgcgttattacgacgctgaaatgcgttacctgctggaagccggcgaagagtttgcccgcgctcacccggagcaggcggcaatgctcaacctcgataaagcgggtgcgcgcgacccgtatgtggagcgcctgttcgagggctttgccttcctgatgggccggctgcgcgagaagcttgacgacgatttgcctgagctgaccgaagggctggtcagcctgctgtggccgcattatctgcgcaccattccgtcgatgtcggtggtggagttcacgcccgagtggcgcgaaatgaaagagacgatgcgtattgtcaaaggctttgaggtgaactcgcggccgatcggtgaaaagggcacgcgctgccggtataccaccaccaaggaaatagatcttccgccactggcgctggaatatgcccgcctgtcgaccgatgcggagggccgttcggttgttacattgcgctttaactgcagcgagctggcggactggagccgtatcgatctccgccatattcctttctatttcaatgccgatgcgccgctggcctgcgccatgcatgaagcgttcaccctaaatgtggcccggatggggttgcggatgcccggcgatgtggactgcagaccgctggaagggcatttcacctcgctcgggtttggcgaaaacgacacgctttggccgaggagcaacggcagtttcagtggctaccagctcttgctggagtactttaccttccgcgagaaattcatgtttaccggcctgcgtgggttggaaaccgtggcttttccggctgaacttccctggtttgagattgagatggtgctggccgaacgctgggcgcatgacttcagctttaccgaaaagcatctgcgtctgaactgcgtgccggtgatcaacctgttcccgctggaatccgatcccctgacgctgaactcgctacagaccgaatacatgctgcgcccaatgcgcgtgcaggatggccataccgagatttacgccgtggattcggttatctcttcgagtggccatacttacgtcccgttctcgagcttccgccacaaaggcgggatgatgcgccatggggctcccgaatattactaccacacccgtgtgcggcacggcccgtccgggttgcataacacctggctcatcctcggcggcgaagcctttgataaccacaccgtgcccgaagatgagagcctgtcgttgacgctcaccggcacccacggtcagttaccgcggcgtgcgctgcaaagtacggtgctggataccgtgatgaaaaccacctcggtcagtatcagcgtacgtaacctttgcgcaccgacgctcccgtgttatccgccggcacaagaccgctttcactggcgtgtactgagtcatctcggcagtggttttctttcgatgatggataacgccgacgtgttacgcggcacgctcgcgctgtatgaatggacagacagcgaaatgaaccgccgccggctggaggccatcatcgacgtgaagcacagtgaaattgaacgctttgaacagggctacctggtgcgcggtgtgcaggttgatgtgaccctcgacagccacggttttaccggaagaggagacatctgcctgttcggtgaaatgctgagtcgcttctttgcgctctacaccgacatctacctgtttaatcgcctgattattattctgcaaccgaccggagagcgtctggaatgggaagagaagcacaatcgccgcattcccggctga

SEQ ID NO: 436462 - DNA, 1086 bp, Serratia marcescens
atgggaagagaagcacaatcgccgcattcccggctgaccccacggctggaagccgaccttaaccgcattaacttctaccgtttctgccaactgcttgaaaaactgaacccggacaggccgttactgggctccaccagccacccggcggacgatccggtgcgctttgctccccatccagggatggggtttccggccagtgaactgaaaaccgtcgaatatgacgaagacgatgacagtaaacccccggtcatccgcacgaccttcatggggatgtacggcgtcgattctccgctgccgaccgcgtatctcgatgatatcacccagcgccgggaagggcatgaggcgctgcagggctttttggatatcttcaaccatcgcatcctgacacagttttatcgcatctggcgcaaatactcctacccggccacgttcgaacccggagggaccgacagcctctcgcagtcactgttgggtctggtagggctgggcattcccggcaccgcagaacatatcgccacgccagtgtcacgctttctgtcattgcttggcgtgctgcagcagcccggaaaaacccaggagggtatgcaggctctggtgcagttgctggcgccggataccaccgtgcatctcagcccttactgcctgcggcccgtggaggtcagtaaaccattgggcttttacgatgatgaggatgttctgctggatggcaacatgccgcttggcgacgaagtcatggatgccggcagccaattgctgattgcactcacgacagagaacgagcaagaggctcgaggatggaaaccggatgggctgctgtatcaggattttctggtcatgctccgggtctatctggggtggcgctttaaggcaaaaatcaccctgaccacccagacccacctgctggcgctccctccgctaggcgaagggcctttctggctcggcatgaatggggtgttgggcgccgatgagagtgaacttcctgacgatatcccgcaggcctttaccacagaactgggttattacaccggcctgcagtctgcaacaccacaacaaggaaaccgacgtgttacatacaagtttgcctaa

SEQ ID NO: 436463 - DNA, 546 bp, Serratia marcescens
gtgttacatacaagtttgcctaaatcggcttgctggttgccggcgctgctggcgttgagtctgacaggctgcggcctgactcagggcgtcagtgacggcaccaaatcggccttcaccgctgtattctataaaaaaatcaaggtactgcatctggacttcacggctcgcgaagcgctcaacaccgactcccgcgagagtcattcgctatcggaaccggtcatggtgcgagtttaccagctgaaagatcacaaagccttcgacaagacggtgtaccagcaactgctgaaagacgatgagagggcgctcgaggctgacctgttggccacacgagaggtcgtggtgaagccaggtggagatgcaaccctcgacatgccgatggctgaagaggcgaaatatgtggccgtggtgggattattccgccatccggatacggtgaaaaatacctggaggttgacgctgaatcgtgaagaactcgatccggacaaggcccgggtggttgaggccggggataaccatctgacgctgctgccggtaaaggataaataa

SEQ ID NO: 436464 - DNA, 456 bp, Serratia marcescens
atgtcccagtctcaccactcgccctcgctatatgaaatgcttgccggtaatttctcaggcggcctcgatttacatcaggtcagtgaagaaaatcaggtgatcctctccgtcctcgacaatatgcaacgtattctcaactgccgcgccggcacgctggcgcatctgccggactatggtctgccggatatgaccaaaatcctccagggaatgcccggtaccgcgcatgagctgatggggacgctgtcggcggtactgctcaaatacgagcctcggctgaaaaagatagccgtgatacttctggagcaggaaatccctggggaactgcgttacgccgtcgacgcggaactcaacggtatcgggctggtgcgctatggcacggagtttagtcccgaaggacgggtgctattacgccatctgaagcaacagcagtatctcgacaaagcaacacggacgtaa

SEQ ID NO: 436465 - DNA, 471 bp, Serratia marcescens
atgtcagtaaaatcacagttcctcaaaaagctgcagtcccgacaccctacagccgccgcttcaaacaacaaaagccagatcgatatcgccacatttcgctggggaatggaacagcttcaggcgcagatggacacgtggctgatggagaccggactgaatgcgcaaacgctgacggcctccatgatggatttgctggtggagggcggcgcttttgagatcccggctattgttctgcattatgaagatcgggtaataaaatttatgccgatatttctgtacggccaaggcgtgatggggtgcgtggaggcgactctccatacgggaaaaagcgttatcgctttggggcgcctgttcatgcgggctggccacgtgagcgactggacgtttacgcccccgggctcgttgtcccacaccggggacgtcttcgatgaagagacattttatcacctgattgccggcctcctgccataa

SEQ ID NO: 436466 - DNA, 1371 bp, Serratia marcescens
atgaatgacaatatccctcgtaaaatcaaacccggcggcgacccgcgcaccttgccggactatgttgctttgcgcgatgaactgagcaaactgacacacccggctcgcccggatgtggattggcattatgtcgaaaagcgctgtctctcgctgtttgagcaaaacggtgtggaactgcagacggcagcctggtacacgctcgcccgtacgcaactggccggggtagtcggtttgaacgaaggcctgacaatgttggaagccctgattggccatcaatggggcgtcttctggcctcagcctgcacatgcccgaatggaaattctcagcagtctgagccggcgattgcagcaacgaatgcgcatgcttccgctgaattacggcgacctcagcgagctgtatcgggcggagcaattgcttacccgtctgggcaacgagttgcagcggctggagcttaaacacctgagccagatcgagacattgcgaacggtgctgcacaacagtgctgtccggctggaaaacagtgacgatacatccggttttgacgctgcgggtatcgtgctgtctaccacggcgatgaatgggccggaaatatcggctgatgctctgcccggtgtcgcggccagagagaaaaatgccccggacagtacggtgaggtgggagtctgtgccacagccggaacatcagcctaatgtcgacatcatcgcggcgatcccggtgccagcaacaaagtgggcgttcttcgccgccgggatgtgtaccatgctggtgctcagcgtggccgcgatgtggggctggccttatcttcatcggcctgatccgctacaggcccagcttgccgcctcgctggcgccattacctgcacctctcacgcctgaacagctgaatatattccgccagcaatcgccgttaccgcaaacgacacaaacacagcggcagattacccgcctgagtgaacttcctcctgactggaatatcgtctacagccggcagctcgtcgaacaggctcaagcgctgtggcctgaacgtattaaccctctgatacaacagtggcagcaacagattaatctctcagtactgcctgttgatgcattgaatggttggcatgagggaatgatccagcttcaggcgctggccgataaactgaatgcgcttgacggccagaagggaagatacatcaccgtcagtgagcttaaatcgcaggtctttggcatgatgacaagtttccgacagaccgttccggtggaagagcagtttcgacagttgagacagttacctgaagattcaccgctgcgtccgcagcagcttctgcaggctgagcaacacctccgggcacaaatctattcgctggttcaggaaaaacaccgtgactga

SEQ ID NO: 436467 - DNA, 2589 bp, Serratia marcescens
atgctgagctgtcactttcgtggcggaaaaaaatatactcgcccgctttctgtctgtcagataacaccgaccaggctcctgcgaaatgtttttctcgagcgggagggatgttctgtcacctcattgactcagagggttattatatatggtaataaatacgcagttgtttattatcctggaagtaataagccttacgttatgagaacactggggctcgatttccaggtatgctctgactttacggatcacgccgcttttaattattttattcgtgtggctaatgaccgcatttttcatgctcgtggaaacgacaggagtatcgctgagaatgttcttcggcagctcaagagtgttgttcctcatccggatacggctctgcatgcatactgtacaggacagagtaaaaaacgcgagtctccagaggggatgatttttccgtttggtcttaatgaaagccagttacttgcagtagagcgggcattttcttcacaggtttcagttatcgaagggcctccgggcactggcaaaacacagacgatactcaatgttatcgctaatattttgattcagaataaaacggtggcaattctgtccaataataacactgcggtcagtaatatttatgaaaagatggacaagcaagggttggggtatctgattgcccggctgggaaatgcagagaatagacaacagttttttgctacatccgcttcgctttctgatgaggcattatcagattcgcctccggcacgtgaaattgatgatgtacttcagcaagtgaaaaaacacctgaatgccattaaccaggttgcttcgctgcaagccgaaattaatgagctgagtgttgaatatgaatacctgcagcaatggcaggaacagaatccttggacggaaggttcctttgccggcagttaccgcttatccacccataaaacaaccgatctgatggcttacattcattatctttccgatcgacgaattgggctaaaaaatagggttgacttgctgttgaatttcaggattctgagagtaaagccgttgggcaatcaggagaaaagacgggcgctttttacctttcttcaattatcttattatgaaagagctatccaggaaaagaaaaaggctctgactgaatgcaatgcattattagcgtcggctgattttacttatttactgggccagcttacatcgttatccatgctttatttaaagagacatttgcgggagagcatttcagcaacgtcctctttttcggtggatacatatcggcatgactttgatagttttataaaacgctttcctattatcggtagtagcactcattcgattattaactccatcggtaaaggtgcgatttttgactatgtcattatcgatgaggcctcgcaacaggacattgttcccggcatccttgggctggggtgcgcacgtaatgtgattattgtcggcgatcgcaaacagctcccacatgttccgatattacacccgaacataccaccggcccagcactatgattgcgtaaaatacagcctacttgattctctttgcatgctattcggtgaaacggctccggtaacgcttttgaaagaacactatcgctgccatcctaaaattattcagttctgtaataagcaattttatgacaatgaattgatcccgctgacgacagattcaggcgaagcctcattatctttagtggtcacggcaaaaggaaatcatacccgtaacttttcaaacctcagggaacttgaatccattgaagggcattactgggatgaggaaagcagcagaggatacattgccccctataatgcacaggttaatttggctgagacggtgctgccggccgattttgtgaaatcgacggtgcataaatttcaggggcgagagtgcgatgaaattgtgttttctaccgtgctggataagaaatgcgctagccagcaaagtcggaacatcgcatttgttgatgatcctaatttggtgaacgtggctgtttccagggccagaaacaaatttacgctggtgaccggcgatgatgtttttgcaaatcacggcagacacattgccgctctgattcgttacatcaaatactacgctaacgacggagacgttttcgagagcccggtgatctccgcgtttgatttgttatacagcgagtatgataaatcattggagcggctgaatagccggttgaatccggaggattcacgttttaagtcagagcagatcacagccagtttgttgagggatatcctgtcgcaggagagctaccgaagtatgatgttccactcacagatagcacttaaccagttggtatcattggaacagggagatttttcccccagagaactttcctttatgcgtaacggggccagctgtgattttgtgatttactataaggtcggaaagaccccggtaggtgttatcgaggtggatggcggttatcatcaggaaaaagctcagattgagcgtgatgaacttaagaacagcatactgaagaaatgtgatctgccattgcttaggcttcgcacgatagacagtgatatcacaggaaaactgggttcatttctatcaggcctgtcggagtaa

SEQ ID NO: 436468 - DNA, 1611 bp, Serratia marcescens
atgaaagctttgaccacgatgcaggccgcctattgggtaggccgacagtccgctcctcccctcggcggcatggccgcccacctgtatgcggaattcgacggcggcgagctggataccgctcggctgcgccaggccgtcgaggcgctgtacctgcaccatccgctgttacgcctgcgcattaccgacgatggccggcagacgatcgcgcctcccggccctcggcacgccttgcatctcgacgattggcagcacgccgatgaagcaacgctggcagccgcgctcgccgccaaacgccaggcaaaaagcacccagctgctgccgctggaacagggcgtgccctgcgatatcagcctgagcctgttgccggaagggcgcagccgcctgcatgtcgatctcgacatgatcgccggcgatgccatgagctttcgcctgttgatggaggatctgacggcgttttatcaccggtgtccgccgcccccctccgatgacgcaccagcggcctactttgatcacctcgaacgacgcgacgccgacgaggcgctacgccagcggcgcgaacgcggccagcgttggtggcgtgaacgcctggcgcaggtgcccccggcgccgcgcctgctgcgcacgccggaccgctgccgcagcgatcgcctggccgtacagctgaatgcagaagaaagccgcgcgctggagaatgtcgccaagcggcaccacacctccctctctacgctgtttttagcgctgttcgcactggccgtcggccagggttggaatatgacgcgcttccggctcaacgtgccgctgttccaccgcgaaagcgaacgggaggacgcgcatcgtcttatcggcgatttctctaacctggtgctgctcggcgtggagctgaacccgacggaaaacctgagcgctttctgccggcgcctgatggcacagctggcagagcttatcgaacatgcggattaccccggcgtgagcgtgatgcgcgatctgtcgcgcctgcacggcagcctgcagccttctccggtggtgtttaccgccggtttcggcatccgcggcaagacgctgttttccgaacgggtcaccgacaccttcggccgtctcggctgggtcatctctcaaggaccgcaggttgcgctggatgcgcaggtcgcccacgtcgacgacggcattctgattaactgggacgtgcggctggacgcattccccgagcacgcgctgccgcgcctgctggcctgttatcgtgcgctgctgcacctggccgcacggcaaacggaggcgttcgatcgcccgctgtcacagctgttggcgcaatgcacacccgacgcgctggcgcagcaggcaccggtgcgccaggtgctgcaccggctgctggcgcgggtggctcccgaggccagcttgcacgaccacgacgatatccaccgcttggccctgccggatgctggggtgaacgcgctgctgacggtgctcaacaaatatctggcggcggcgctgacggcgcaggatctggcggcgcatccctctccggcggcgctggcggcattgatctgccaacgctcgcccgaggcaggacggaatgcgaaaacgctgctcgccgcgctggcgccgcagcactga

SEQ ID NO: 436469 - DNA, 513 bp, Serratia marcescens
atgaaaacacgacactacctcgtggcactaagtacgttattgctggcggggtgctgcctgccgacggcgaaggcgggaaccatagaggcagttaaccacaccaaatgggcgatcaaccatttcagcgtcgacggtcagtcggggatagacattatcgggccctatcagggcggcggtggcggctgctgctatggcgtgccggcgaaatggcggccgggtatgacggtgagggtggactgggaaagtggggaagcgtctacagatgagtttcctggataccaagacagagctaagtatctggcgtgggaaaagaaaattgacgcaagtaatcgaaatcacagcacggtggtgccggtgccggactatacggggcagaaaacctgcgggatcacggtgcattttatgccctgtgatgaggtgaaggtgacgaccagctgtgccaactacggccatccggaacacccgatcaaagaacctcttaagatgccggagccaaaagtatgcccgaaataa

SEQ ID NO: 436470 - DNA, 513 bp, Serratia marcescens
atgaaaacacgacactacctcgtggcactaagtacgttattgctggcggggtgctgcctgccgacggcgaaggcgggaaccatagaggcagttaaccacaccaaatgggcgatcaaccatttcagcgtcgacggtcagtcggggatagacattatcgggccctatcagggcggcggtggcggctgctgctatggcgtgccggcgaaatggcggccgggtatgacggtgagggtggactgggaaagtggggaagcgtctacagatgagtttcctggataccaagacagagctaagtatctggcgtgggaaaagaaaattgacgcaagtaatcgaaatcacagcacggtggtgccggtgccggactatacggggcagaaaacctgcgggatcacggtgcattttatgccctgtgatgaggtgaaggtgacgaccagctgtgccaactacggccatccggaacacccgatcaaagaacctcttaagatgccggagccaaaagtatgtccgaaataa

SEQ ID NO: 436471 - DNA, 294 bp, Serratia marcescens
atggccgtaaataaaattcaggccgatgtgctggcgaaagaagggagcgagccgggagatttcagcttctttgctgagccgcttgaaaatatgttcctcgacccgctacttactgcgttggacgaatacggaattcccactcagatctcgactcagatcaagaacctcatcttgccatcggaacatctgaacgatctgctggcgaaacttcggaccctagcacccagagtagagcaccttcaactgactggctttgagaaaagcttaatgcgttgggctgtgtccgaaatgtag

SEQ ID NO: 436472 - DNA, 1887 bp, Serratia marcescens
atggaccagaagtttttccgtatccccttcgccagtgcaggtgataagcaacaaattcccgatgataaaaatgcagaaggttatgtcagctttgtcgagggatggggcgaggattaccaaaaagatttgatgagcgacgcgagcgccaaggaggtagagcgtgacgtgatgaacagtattctgaacgccatcaccgttgcgctgaggcagtatcaaacagacagcttccccgaatggatcacgccggcgaataacagcggcactgcgtatccctatgctacaggggtagttgtacgtcatcgtcagggcggcggggcatttatatcttatgtgtcattggcggataacaacacgactgagccaggtacaaaagatgctaaatggcaggcgtttatttatcgccgcgcgacgcaagatgaagcagatgcgggtaaagacggctcattgattattaccccccctacacttcaacagtctatcaaaaatgcgatcagtgacataacgacagaactggcaccattcctgctgcccgtcggtgtggtagtcgcatggggagctatggttccaccagatggctggattgaagcaaatggtcaaggattcgatacggctaaaaaccccaaattacacgctgtatatccttcagggacagtgcctgaccttcgaggtaagtttattcgtgggtgggctaatgggtctgctgttgatcctgatagtggccgcccgttactaagcgagcaaggacatggaatgcaggaccatgcgcatttcgcagggatagaaacatattatcgatttgatgttccatcctctaatgcgcgtaatagtccgggtggtgaacagatccgccaatattcagcacgtacaggacaaatctcaccgaatccagcggtgaatattgcaccagaaacgaggccgcagaatattgcgatgatgtatatcgttaaaacggatcaggcagataatattaaaccagatcctacgccgacgaacatcatagtgacaccgtcatcattaaatataggtgttggcgcgacgcaacaattcactgctcaggtgttacccgctgatttagcaccacatttccctgttacatggataagtacgaatactgcggcgggcaccattgatggtaatgggctctttcgtgcaattgggccgggcagcacagacattattgccagcatcagttcaggtctgagtgttcgtgttactgtacgggtggatattcttctgacgtcaatcactttggcggcaattcctgatcagattgcaggtaatacctacgaactgaaggtaacgaaaacaccatcaaatgccactgaaagcatcagttatggctctacagatagtgcggtagcgagtgttacggctgatgggcaactgatagccgcaggtgaggggactgcgacaatcagtgttagcgggaatgtatcgggtaaaaatgccagtagagttgtgaaggttacagcagcgccggtagagtcagatttccttgctatcaaaaataatctgtcagagatcgctgacgcaggaaagaaagcgcaggaagagtcgcagaaaaatctagggttggggaaattggcgaccaaagacgctatcactgcgaaggatgtcggtgcggtgcctgtggctgataaaaccctaccagcaggcacagatttaaacgctataaccgaaccaggcgaatacttccagaacgtgaccagcaacgccacgctggccctaaactacccagaggctgtggctggtgcgctaaaagtgtatcgaaccggggtggatgttggcgtatgccgccaggtgtatatgccgtacaactcaacggttgagcaccggcgctatgcatttggtgatccgctggtgttctctgcgtggaaagcgtattga

SEQ ID NO: 436473 - DNA, 1026 bp, Serratia marcescens
atgagagttgacatcccagagataagagaagttgaaataattggtgatgaaattgttttaacggttcaccctgaagttgagcttggaaatgttgtaggtatctatgaaaacgcccccaacgccagtgaagggaatgcccttgcattgatttatggcccaaacaataaagctcacataccttttaaaaaactcagtcacgaacctgtcactgactattatattgcactcttcaccagtaatgagcatgtctatgaaaaaattgacaacccagactttgacaaagcgttgtcatataaagtaaccctgtacaacatcgaaggtaacgagtcttcatcttctgcaataaaggggaaatccactccatgctcggaattaaccttagaattatataattactttggtgcattaactggtgatgtagtaagtcgatcggtaacagataacaacggccactttgaattaaagcttaacacaccactcgccccttacaaaccataccatataactgcaagagggacttattactctcccaatgaacatataacaataagcaaatcacttggtgacgatgagctaattgtaaatggcagtttccagaagggtctggatgattggatgctacatccatatgcaaaagattatttcacattcttaaaagcaaatggacatgggaacttcaaactgaacgaaggctatgacggccgtgagattaacatttgtcaacatgtaagcctcccaaaatcctcacgcataagaatgtcaggtgaaataagagttaataagtttgatacaagcaggccgtaccgcaccgtattctttggttgcatgaccatccctggcggaggagggcttttaggtcttcatattcgacacgacctcaaagaagatgaattaggtaaatggattacgttaagctttgagggggaaaaccttcaaggttggccatggcaatcccttaaatttggatttgatacagatggcatagctgaaattgatgtcagaaatatatccatggtagaaatttaa

SEQ ID NO: 436474 - DNA, 501 bp, Serratia marcescens
atggccgcgggtgaggggacggccacgatcagcgttacggggagtgtgtcgggggtaagtgccaatcggggcgtgaaagttacggctgccccggtggtgtcggattatctggtaatcaaaaataacctgtctgaaattgcagatgccggcgaagtcgcacaagctgagtcccagaaaaacctcgggttgggtgagctggcgacgaaggatactgtgactgcggaggaaacggacgcggttccggttgcggacaaaacgttgccagcaggcacagatttaaacgctataaccgaaccaggcgaatacttccagaacgagaccagcaacgccacgctggccctaaactacccagaggctgtggctggcgcgttgaaagtgtatcgaaccgggggggatgttggcgcttgccgccaggtgtatatgccgtacaactcgacggttgaacacaggcgctatgcattcggcgatccgctggtgttctctgcatggattgagatgtga

SEQ ID NO: 436475 - DNA, 285 bp, Serratia marcescens
atggttttcaatgcaatgtcgattctgtcgattctgtcgattctgtcgattctgtcgattctgtcgattctgtcgattctgtcgattctgtcgattctgtcgatgctgtcgatgctgtcgatgctgtcgatgctgtcgatgctgtcgatgctgtcgatgctgtcgatttgcgttcggcgatccgcgggtgttctctgcatggaaggcgtattgatgacgatggccggcgagtgccggcctaatataaccattgacctgctttggctgattcaacgagcatgttaa

SEQ ID NO: 436476 - DNA, 198 bp, Serratia marcescens
atggaaatcaacgaagaacgagcagtgtttatagccaacgagatcggtgctgcggtgatcgacctaatcgcaaatggtatggatgtgaaccgccctaacattactgactctcttgagatgaaacgtaagattgtcggcaacacgctttacaagggcgtattgagggatgcggctgctttggtgcgggagaagaaataa

SEQ ID NO: 436477 - DNA, 1959 bp, Serratia marcescens
atggaccagaagtttttccgtatccccttcgccagtggaggtgataaacaacaaattcccgacgataaaaatgcagaaggttatgtcagctttgtcgagggatggggcgaggattaccaaaaagacctgatgagcgacgcgaacgccaaggcagtagagcgtgacgcgatgaacggtattctgaacgccatcaccgttgcgctgaggcagtatcaaacagacagctttcctgaatggatcacgccggcgaataacggtggcaccgcgtatccctatggcgtgggcgttgttgttcgccatcgtcagggcggcggggcattcatctcgtatgtttctctgacggataacaatacgaccgaacccggtaccgaaggtgcgaagtggcagggctttatctatcgtcgcgcgtcacaggacgaagcagatgccggtacggatgataccttgattatcacaccgcccacgttgcagcaggccattaaaaacgccattggcaacataacgactgagctggcgccattcctgctacctgtcggtatcattggtgcgtggggtagcactgtgcctcccgatggatggattgaggcaaacggccaggcgtttgatgtagcgaaaaacccgaagctgcatgaggtctacccatcaggacatgttccggatttgagggcgcgttttatatcaggctgggcccacggttcagcagaagacccggagccgaaccgggatgtcggtagttatcaaccgcccactgatttgaaccactaccaccagacaggccggtactgggtcgataataacgatgacctttgggcaataatccgggggcagaacctttcgggcgatattcataaggcgaaagtgataacgggggattctggtggccgctacccagtgtctgactatccgttttgtggcagcggggtgattacaggaaccagtaatgctatcaaacttgacgacaccccgaatagcatgccggcaccacgcccagccaatgttgcattgatgtatatcgttaaaacggaccaggcagacaatataaaaccggaccctacgccgacgaatattatcgtcacgccgtcatcgctgaatattggggttgggaagacacagcaattgaccgctcaggtgctgcccgctgatttggctcccaacttcccggttacgtggatcagcacgaatacggccgtaggtaccattaacggcaacggcctgtttacggcggtagggccaggaactacggacatcattgctagcgtcagttcaggcctgagcgtacgcgtgacggttagggtggatattctgctcacgtcaattgcgttggcggctatccccgatcaggtagcaggagacacctacgacctggtcgtaacgaagacgccagcgaatgccacggaaacgctagcctatgcttcaacagatagtgctgttgcgagtctgacgacagatggtcgactcatggccgcgggtgaggggacggctacgatcagcgttacgggcagtgtgtcgggggtaagtgccaatcgggtcgtgaaagttacggctgccccggtggtgtcagattatctggcaatcaaaaacaacctctcagaaatcgctgacgcaggaaaaaaagcacaggaagcatcgcagaaaaatctagggttggggaaattggcgaccaaagacgcgatcactgcgaaggatactggtgcggttcctgtggccgataaaactatgccagcaggcacagatttaaatgcgataaccgaccccggtgaatatttccaaaacgtgaccagcaacgccaccctggctctaaactaccctgaggcagtggctggggcattgaaagtttatcgaactggcgttgatgccggtgcttgccgccaggtatatatgccgtacaactcgacggttgaacacaggcgctatgcattcggcgatccgctggtgttctccgcatggaaagcgtattga

SEQ ID NO: 436478 - DNA, 537 bp, Serratia marcescens
atgtttgtaaaaaaattaatggtggtttcacttgtctctctgggaatgatcagttctgtttgtgttgcagctgaccaggggcatggcaaggcaacgatggttgggagcattgtaagcacacaggctacttgctctatctcaccagaaagtgccgatcaaacgatcgcctttggtcaaattgccgatacagttttgctggaagcaaatggttcaggcaagtctacgccacgacctttttcaattgatttggagaattgtgatgttggtggcggtaacagtgtaagcgtcacattttctggaatggaaggaaaggacgggcgactcgggattacaggaacggccagtggcgccagtattgcgtttactgatggcactggcgaagtgattaagttggggcagtcaagtaaaagtttttctctccagaatggaaacaataccctaccttttgccgtttatctccagggggatggtgtgccgggaaacattaaaccgggtgattatcatgccgtggccaattttacgctcagctatcaataa

SEQ ID NO: 436479 - DNA, 990 bp, Serratia marcescens
atggcgaataaaaaactcccctctggtcgcaagtccggggggcgctctgctgcgtcaaaaatgaaccgtgtggcgattaaagcggatgcaactggagtcatgatatcggaccttcctgctgccgaggtgttgaccggcgcagagttattccccgttgttcaggcgggggagacccggaaagcagacatcgaacaaatcacagcgctcattcccgctggcgctgacggtaaagatggcgccccaggagaggttggcccacagggtgaaaaaggtgaaaccggtgacgttgggcctcaggggccacaaggtgagaaaggtgacaagggcgatatcggcccagccggtccggcaggtaaagatggcgctgacggttctccgggagagaaaggtgaaaaaggcgaagtggggccacagggtgaaaaaggagatgcaggaccgcaaggcgaaattgggccgaagggcgataagggcgatccagggacgaacgagattacgttatctccggggtctgggcaacggaaccttcttgagcgacaggccgacggatataaagtcgacgcgatgcgggctatcattcctaaattcggtccagagtataagactatttttctgtcagacttggtaaaaacatttccgaatggatcggttctctatcgcatggagaacaaagtaataaaccagcttcgctataaatcccttggtggtttacctatccccgtctcggtggacacccgattgcaacaatacttcctggacaaagaggggaacgttattacggttcaggccatgtcgacatacgatgttctggataaggattctatttcagtagtcacgtcggtgtttatgagtgccgtacccgatacggcattcaacctaaaagacgatacgccatacccagataccggtaagctagaaaagttcagcgtatatctctatgtgctcattggtagcacgcttaagcaaaatggtattgatattaatgagccgtga

SEQ ID NO: 436480 - DNA, 861 bp, Serratia marcescens
atgtctgaatttaaaagcaaggcattaagtcgcatttattggcaatataaaaatgcgcctaaattaattcagtggatcctaactctgcccgatattgtgcaaagtaatattgttgagcaggtcgagaaaatccgcaatattcttgatatagataacgcagaaggggaacaactcaacatttgcggccgtattgccggttaccgcaaacggcctgtggggcgattttatcctgggtgtgtcgtggcagaagtggatgacgtgctttatcggaaaatgattaaagcgaaaatctgcaaaaataacgggattgccacgattgacgatgttaaagccgcggcggattacattctcgacgtggatgttacggttctcgacgcgcaggatatgacgatgcggcttgtctggcaggatgatagcgtcagtatcgctgtgcagcagctggtggccgattatgaccttattccccgccctcagggggttgggatgcgtaagcaccgcgtcgtcaaatacaagccgtttggcttcggtatccacaatgccaactttaaccgcgcaccgttctggtatggcgacggcacaccgcccataaattacgacgccaccatcacactgaagtgggcagacgggatgttgaccggacaactgagggcgaacgtgctggacgtctctgaccaggatgtgacgatcatcatcacaggggatgatggtgccccccatgtcaggcatgcggtaaccgatgtatcaggtcatttcaccgtagaaaatatcactccgccggcgacggtcgttgcccgcgccttgctcatcgctctggattgccaggcgctcgagcttgagtctgaaccgctaaaaattaactga

SEQ ID NO: 436481 - DNA, 1206 bp, Serratia marcescens
atggctgaaatcacaaagtacggggttacgggtaaaaccctgcaagagtacaaggatgaggtgagtgaaaagtaccttgccatagacagtacctggaacatcgacccggaatccccggacggcatggccattgctgtctggtccgaactgctggccaatcttgatgaagaggtggtgaacagctaccactcggtggatccgaactcggccatcggacagcagcttgaccgtatcgctgcgtttgccggcattcaacgccagccggaaagcttctctacggatgtggtggagtttgaaggggatggcctgatagaagtgcccgcggggacaaaggtacggcatcgtgtcacaggcacattgtgggcgacggataccgtagttatcactgataccagcggcagagcatcggtcagcgtcacctgcacgtcagcgggggcgcagggcgcgaaccctggtacgttgaccattatcgcgacgcccgttgcacggatacgttccgtgacgaatacgcagggcgccagcctgggtaaggcggaggaaagcaacaatgcgtttcgtgtgcgtcgcacatactccgtcgctttgcctggcaataaccaaatcgacaacatcaaggcggcgctggacaacgtgacgggcgtcaaacagtcgctggtacatgagaacgtcgagagcgaaacggatgagcacggtgtttacggccacagcatggcgatatttatcgacggtggtgagacgaacgacattgtgctcgcgatggccacgcacaagaatcccggatgcggcctgaaccgctacaacaccttccctaacaaaatcagcgtggatacgtttaccccgaaggggcaaccggtaaacatcacgttttaccgcccggagtatgtggcgatttatgtacaggtagatattaaaaccagtacgctgggcgaagatgaaaaggcgctgattaaagctgccattgtcgattacacgttggtgggatttgacgagacgacagggtttgccaagcaagggtttcgtattggtgaggcattggcagcggggcggctttatacgccgacgaactactttgtcggtggcgatgactacgtgagcaacatctcaatcggcaccagtgaaagcgacatcactaagagcgtcattcctgtcacgtttaatcaactgggtgtgttcagcgtggaaaacattaagataaattatgtctga

SEQ ID NO: 436482 - DNA, 348 bp, Serratia marcescens
atgatccgcaactttgtagacggtgatatcgtgacgagtggcgatcacttcgttaccggcaagaccgaaacacagcaggcctgcatatgcaggcttcgtctttttctgggggagtattttctgaatgcgaccgacggcacgccgtggttccagagcattctgggcaagaccgcgcgggatattgccgaggccaatatcaagcagcgtattctctccacgcggggcgtgatggcgctaaataccttcgagatggacagcgacacgaaaaagcgcaaattcacggtatcggccacgctgaccgacatcaacaacgaacagtttgagttcctgtttgagaaggagctgtaa

SEQ ID NO: 436483 - DNA, 603 bp, Serratia marcescens
atgaaggactcgaacccatttttgacgatgttaaagggattgcggccccgtctgctttgggacttgatgatctgcttgccgggaaaagtgattgattacgatcccgaccttcagcgggcggtggtggagtgcggtattcagcggcacgaaggaaacggtgaatttgaaaccctgccagagattcgccatgtacccgttcaattctccggctctgccgtctggtccgtctttcatgaattaccggaaggaacggaaggcttaattcatttttctcagcgagcggttgactactggctggagcagggcgggcctgtgcggccactcgatgcgcggatgtttgacgcaacagacgctttttttgcacccggttatcgctcgcgagccacatgtatatcggggttgcctaccgaaggcataggaatgagcaacgccagcgggacggtacggtttcaccttaccgatgcgggcgttgagctgacggccggggggcaaaagctatctctgtcccctgaggggctcaggcacaatggcgtgaacataggtgcgacgcatacacatggtggggttgagaacggcggtgggaatactgacgtgccaagttga

SEQ ID NO: 436484 - DNA, 897 bp, Serratia marcescens
atgagtagatattttgatcgcagctatcaccttgaaatcactacgaccagcggcgaggtactgacgtatgagccgccaatcgaaacccgctttctgattgataacttccctcagcataataacgccactgcaaccattactatttatggtatttcctctcgagcgcgggaacttattcaactacgagataatgcaaataaccactatggtcgaatcagtcttaaggcaggctacggtgacaataccgggataatatttacaggccgtataaatagcatacaggtggcaaaggatggcgtgagtacttgcgttaagttgttttgcatgacggccgccacagagtgggattcgatctcttatcaatcttggggggacaatacaccctataaagatgtaatacgcgatattgctgaaggattaggggcgccggtcgaatttgttggtgatttttcagatcttcctctacttcccagagggcgcaacggtggcggaaagttatgtcgcgtattgttggacgacttaaaatctttctttggcttctggtggctgcatacgccgacacggacggtaatcaccagaaatggatcagctcgtgattgggttgttcatgatatttcagccttgaatgggatggagggagcgcctcgctggtttacggactcgctggaagtggatgtgaaattaaacttccaactgcaaccgggggatgtaatgaatgttacctctcgattttggacagtaaattttagcggggcctacttcactgacttacaaggtttatccgataagcaaaggaagacggggaagttcaccatacttcgcacggttcatgaaggggccttgtggggggacgtttggaaaacaacggcaatttgtcaatggagagataaagcatga

SEQ ID NO: 436485 - DNA, 717 bp, Serratia marcescens
atggctattaccgggctgtttaccaaaaacaggccgaagatcggcagcctttatttcgacgcgcttttaaaggagagcaccgaacttcggaccgatgtcagtgaatatcccctcgaaactgccgctaccgcacacgacaacgccgtcacgcgctcgttagcgataacgatggagatcggcgtatcagataactggtatcgcgggcttatcgcgcaacaagaagagatggcgcagccctttgttgatattggtggtgggctgacggtgggcgtggcgtcctctttgctatcaggacgaacggcagccttggcaggggtagcagcaagtgtggggctggcggtttatcagggaaaccagcagacgacgcgctctcagggacttcttgagcaattgcgaaccatccagcgtaatcatgagaccttcgacctcattgctagcaagggcgcatcttacaagaattgcatcattaccaacacccgaaccgagacagagatgaataccgagggtggactgattatcgcggtcgatatccttcagctcacgatcattcacgacacagtggctgagacgaacgccaatttaccctatggcgattcatcggctacgcaggggcaacgtgaattgtcgggtggcgaggttgttgttacggaggttaaaagtgaatctatccctctcccaggtcggccagggaacatttctgtcaattccgctcagtag

SEQ ID NO: 436486 - DNA, 1626 bp, Serratia marcescens
atgtcagaggtcatagactccctgttggtttcactcggcctcgaaaccgataagaaaagttttgataaagccaatgctgcgattaatagcgttaaaactggctttgtccaattggcagcggcagcgggtgttggcttcgggtttaaggcgcttacttcagaccttgccaaatctacaacggagatggaccgcttaagcaagattacaggatttgccgtcaaacaaatcggaggcttgcgttttgctttacgcgctttagggcaagacccagaagcagcaaatggcattgttcagaaaatcccagctttgcagcaaatggcaaagcaaggtgagttgggttcgaaagcatattggagcggaacattcaatcctactgagtttgcaaataagcctggaatggacgcgtttaagtatcttgtagagtcctatgggcgcatggatcacgagcagcagcggaatttacgaagcggtatcggggctggtgataacgatcctctcacccgtctgatggaactgggctcgcaagggcttgatgatgtacttaaggtttacgaaccactctaccaagcccttgacccaaaactcattgagtcttcaataaaattcaacgaggaactagctaaattatctacaagctttgaaaatctacaagcgcaaatcggtgggccattattagatgaggtgagtaaatttttaaatctgacaagtcgtgcaatatcaggtgatgcttatggtgagtcattaaagtatactgagaaaaaggggaaggagttccggaattggctccgcgatagttatgtggtaaaaaatgatgattttttaaaatggttgtttggcgaaaaggaggttgtctctgacgatgaactgcctgctgaaagactcgtcaaccagactgcaattcgtctggtaaatcatattgctgaaaatgatcgcttattaggcaaggtaatccctgtacaaaaggaacttccattctttcttacgaatagtcagcaagcctcgaatcaactctctaacgaaaatttgcaaaagtatttgaatgtcattgcgctgtcggaaggtactgccggttacatgaataatggttacaacacaatgtttggtggtgaccaattttccgatatgagtgatcacccgcgtatcttgaaagagttcactgataaaaatggcaagaggaataaaacctcagctgcggggcggtatcagtttacgcaggcatcgtgggacgaagccgccaaagctcttaacttaaaggacttctcaccacaaagtcaggatatggctgctttatacctaatccagcgggcgggccagctggataacgtgctgaatggtaattttgccgaggctacggccggtcttggtggtgtgtgggcatccttaccgtcttccacttatgctcagccgaagcatagctacgaggccatggagaatttttatgccatgaataatacgccaccatcctttggtggtgccgctggcggctcacgcgctgttactgtcaataaccaattttcaatcaatgcctcaggagctaatgctgatgaagtcgctgatattgtgtttgggcgagcctcagatagtgttaaccaagcagtggggcaattacctggggataaattctaa

SEQ ID NO: 436487 - DNA, 390 bp, Serratia marcescens
atggcacgaaatatcgaagtgaaaattaacgagattccatacgttggttcaaccgcgtcagccaaagaccaggtggaaatgctgcaaattgcgtcacgatgtggtctgctgccggctatctccgacagcgtgaccccgatgggagtagtggccagtttagcggcagtggaggcatccagcctgaaccgcctgaaggtgctatgcctgactaacggtaatattgttcgtcagagtgataatgtgccggtggccgaaaatatgttccaggatgaagcgcataactttctggtgttgatcgggggggtattgaaagagaatatcggccctttctggcaactcagcggcagcgaaaaaaccagccccaacgcagcagcagagactcaagagtaa

SEQ ID NO: 436488 - DNA, 264 bp, Serratia marcescens
atggcaaataaacaaccgctacgcgtagccattgattgtaacagcctgaaaacgaaggttgactacctttccttactgcttaactgcgctgattattcaccggaaaaaatcgaaagccttgcgacggggttatcccgtagcctgattttaggcgaatgtcgttccgctattgcggcagacggcgtgttggaactgcggcaggtggtggattttggcggacagtacgatgaattagtagcgaaccttatcgatacgaaaagataa

SEQ ID NO: 436489 - DNA, 405 bp, Serratia marcescens
atggcaatgaagaactacggcgccagccatgctgatctgacgataaacggcctgccgatcgacgaatttggtgacagcgatccgccgatcacgattgaagatattgatgcccgcgccaccctgaaacgggggatcggtaaaacctccgttcgtctggatggcccgacccggcctaaacgtctgaccgtcaacctgatgccgggatgtgaccaggtgcgccagttgctggcgattgaaaaatccggcgtggatttcttcttcacctttcgccagcggggtacggatgagtatgtggcggcgttcgacggcgttatgacccagcgaggtagcctgacccgcgggggcaaaaccagcgccagcgacgaacaatttacattcgagttcgctgactcggaggaaacctaa

SEQ ID NO: 436490 - DNA, 1257 bp, Serratia marcescens
atggcgtactcagtagacaatattatcccggtcaacgtgattatcggtgctgccggcctggggtatgcggattttgcaaccgcgtttgtttttgccgacccatcggatttagaggccgtggagcaggatagcgctctgctcactgaaaacggcaacaaaattgagacagaagatggcaagactattacggtgaatgcctccccgatcacgttgcgcggcgttgaattccccgttgatacctaccgcgattattctggcgtgacggagttgggggcggatttcccaaccgccagtgaaatttaccgtattgccacgcgctattttgcacagatcccgcgtccgtcgacgctcacggtgtggatgaaaaatcctgaagatgagggattgatcgcgacagtcaataaagccgctgaggccgcctggcgttacaactacttctttaaaactgaagactacagcgacgaaaatctgctgttgctcagcgactggagcgacgctgccggccatcctgtttggtacaccaatacacaggatgaggtgatcgatcagaatgtgaaggacgacatcgtttcactgctggcgaaaaagggtaatcgccatatgtttgcggggtggcgggcacaagaagcggtagatattgatccgtcgcaggcgcattcgatggtacaggtcgcagcgacgttcgccaaattccgccccaatgggctcaacacggcaatcacagccgagtatcaggtgttgcccggcattgatggcgatgagttgcagacgagccactacaaggcgctgaaagccaaaaaggcggtctttttcacaccgattgagttggcgggacagacggataccagccgggtgattaacagtgtgtcgatgtcgtcctatggcgagtttattgatgacgtgatcaacatcgatgtgctgaagaaccatctgcaggtggatggctacaactacatcgccaacgttggcaccaaacggccgttaacgccgaagggctacggtggcttgctgaacgtgctgaccggtaccctgaagcgtttctacaacaacggcgtgctcggcgaagggatattcacggatgaagaaaccggtgaagagaaaacctctgcgttcggttttgtcatcctctccagagaagaagatgtcctgaagctgaccaaggagcagcgcaaaaagcgcgaattcccgccgacaaaaatcctcgtcattctggcgcgtgccggccatgtcgccgaactgaacgtaactgtggagtaa

SEQ ID NO: 436491 - DNA, 537 bp, Serratia marcescens
atgaaagaaatcagtgaactgcatgcgttgttgcaggggctggtttcagtttgttctgggttggacagcgcccgcattgttcttgccgatcagggaagagcgccaccaggaggcagcacgctctatgcgacctacaatcctatccccgtccgcgcgtatgggcagcccggccagcggctggagtttatcgcgccggtggaagagttcgacgagtctctgggggaggattggcaggatttggaggaaattacggccagctcgatggaattgatgctgtcggtgaatttcttcaatgaaggtgcgtcgcaagctgccatgatgctgcataacgccaattttcgaaccccggtcagcgattatctgtttgttaaccagatcggctttcgttacgtcagtaatccccgcaatctcagtacgcactttcaatccggtattcagccgcgctggcaggctgacattcatttatttgttaaccatgaagttagcagcaaagtattacgtgctgcgggtttctctattcatttaacagaggagtaa

SEQ ID NO: 436492 - DNA, 420 bp, Serratia marcescens
atgtttggtaatgggctggatatgcgtggccacgttgattcgacatttaattcgaaaattgccggggggatttggctgatccgtatgagcggtgattactccggacctggcggcgtgtggcaggagtcggagtctgcccgccaggcgcttactcacgtcaacgttcagcccgctcgttggcgagagattacgctactggttgggcaaggtggtgtggccatgcttggtgacttcagaacggtgcacatcaacgatggaaaaacctatctgatgcccgatgagagtggcgaataccgtgatctgctggaatttagcgacggtgtgacaatgcgtcgttggcgggtgatgacggcagataatcgcccgtggcgtaatttttgccgcgctgttgttgaagtggtcagggagcctgtgaaatga

SEQ ID NO: 436493 - DNA, 468 bp, Serratia marcescens
atgaaatttaatactgaggtgcgcggcggagaaaagctcgccaaaaagctgaagcaaattcaggaccgagtcaccagtaaaaaacgagtgctggttggtttacctgccggcagtgggaattatgaagatggcgcaccgatcgtggtgattggggcggtgcaggaatttggttctgctgatggtcgagtgcctgagcgttcattcctccgcgtaccactgcgccaaaatcaggacaacatcaagaagggctttgcagcgctttcccgccaggtggttaaaggggagatctctgcctttcaaatgctggatcagatgggcgcacgtgcagtggggtactgccaggaggctatcgaaaccggtatagcacccgccaacgccccatcgacgattaagcagaaaggcagctcaacgccgctgatcaatcaaggcattttgaagggcgccatcactcatgtcgtggaggactga

SEQ ID NO: 436494 - DNA, 312 bp, Serratia marcescens
atggctgagttgatgaactggagcaatgcgccgatcgtggtcacagacgaaaatggcgaacgtcacaccattcctgcacagggcgcggcaaaagtggcgggggatttttcctcacatccttacgttgtcagcggcgaattgtcagtggacggcgagctggttgccaaaactcaagagggtgaacaaacggatatgcagaaattgcgcacccgatataaggccatctttggaaaatcagcgccgccagcagccaaagccgagacgctgatcaagaaaattgaggaatggcaggaacagcaggacgaagattaa

SEQ ID NO: 436495 - DNA, 939 bp, Serratia marcescens
atggctagaaacgtttttgacatgtcgccgaccgctgcactgtcctttttggtgcagcaggccgcttacatcgagagtgaaatttatcgccttgaatacccgcaatacaagtacagctcgctggttccgctggatgactcagcccccgactggacgaaacaggttgtcttccgttcggttgatgcccgcggtgagttgaaactctttggtccaaactctaccgacgtgccgactgtggacatcgcgatgaatcagggcttccacgaaatcaaaacagcggcactggggtatacctatacgctggaagagattgggttcgcgcagctcaacaacgtcaatctggacgttgaaaaaggccaggccgttcgtgatgtgacggagcaggggatgaataaaatctatctgctgggccacgatgaaattggcgaaggtttgttcaccagcggaaatgtgtccaaagaaaccgcaccagccacgttgaagcaactggtggccgatattccgaccaaaggcacgcagcctatcgttgatttgttcgctgctggttacaaccaggtttacctgaccaataccaagacggtccgtcgccctactgattttgttctgccaccggaacaaatgcagttgctgatgcgcaccatgctcaactctgccaacgcctcgaactacaccttgttgcagttcttgcgtgaaaacttcaaggatatggagttcaccgacgatctgctgctgacgaaagccgatggtggccacgcagcggatcgcatgatggtgtatcagaaagacatgcgtgtggtgaaagggcacgacgtaatgccgttgcaattcctggcaccggctaccgccgacaatatcaactttaaggtgccggctctctgccgcaccggcggcacggaatggcgtattccgaaagcggctcactacgtggatggggtgtaa

SEQ ID NO: 436496 - DNA, 615 bp, Serratia marcescens
atggcaattgcacagaatgatttcacggtattccgtggtcgcggctatgaaggccaaatctccaccatcgatgttgctgacgttatcagccgcatggtggaagacgcgtttattccttacgggcgtgctgctgtgcgtggtgtgggtaagcgtacctgcgcaccagtaacagccgccagcaaagccgctgacattatcggtttcacggtgcgttcaatggccgaagccagcccaacgccgcctaccgaaaatggcgagtatgcgattggttatcccgttgatcatgtggcgtcgctgctgcgcagagggtcgatgtatatcttgtgcgttgatggcgctatggcaggtgacccggtgagcgttatcactgaggaaggcgaaaacctcgggcgtcttacaaccggtggtgatggcctggtactcgattttgtgaagtgggtggataccgtggccgctggtgaaatcggtgaaattcaggtagacggcatcatggccggtgccggcggtggtggggctcctggaccgaaaggcgataaaggagataaaggcgatacggggccgacgggcccagaaggtccacaggggccaaaaggtgacaaaggcgatccggcgtaa

SEQ ID NO: 436497 - DNA, 1185 bp, Serratia marcescens
atgcggatcactctccacgatcggcagtcctttcctattaacacccaacgcatcattgctgagaacggttatttacgcgttccggggcgggttgctcgcaccggcgtgcagcagtatctcgcgtctgagctggggttaacggacaggccgccaaacagcattgttaacgtatatcgaccgccggaagaggtgttttcaccggccagtcttgccagctatgacaacaccgatgtcaccgttgagcatcccgacgatcttgttgattcgaccacgtttaaagaggtgtcggtaggacacgccacgtcaccggggcgtcctgatgaagacgatgagaattatgttgtcgttgactacctgattaaagatcaggatgccatcgacagcattaacaggggcaaggctgagctttctgccggttatacctctgaatacgttgagcgtgccggtgttgcaccggacggcaccccttatgagttcgtgcaaacggatatcaccatcaaccataccgcgctttgtgaccaggctcgcgccggtcgccgcgcacgattgtttgacaataaacccacggagaaacaatccatgccaaaagtaactttggacaatggcgtcaaagtagaagttgccgacgaggcgacgcaaacacttatccaaaccacgctcgacagtctgaaaaaacgtgtgaaggatgccgaagaggccgcacaaaaggccgatgaagaaaaagaagcagctgaggcgaaggcagatgccaaagacgacgagattgaagaactgaaggaaaaagcttcagaagatgcgatctccagccgtctggccgatgttatttccgctatggactcagccgtaaaaattgctggtaaggaatttaccagtgactccgtcaatccactgactatcaaacgtcaagcgctcgatgcggcaggtatcaagtgcaaaaaatacgcctcgtgggataaggcgccagaggcgtatgtaaatgcctatttcgatgcggaggaagaacgcaaagaaatcgaagacgaggaagaggaggaagaacgcaaggaagcgaaagactccgtgcgccgcctgggtggtgagttgggtaaaaaagtgaaactcggcgatgccgaagcacaacgtctagccactcgtcaggcgttcctggataagcgttatggccgtaaccaagaggacaaaaaataa

SEQ ID NO: 436498 - DNA, 858 bp, Serratia marcescens
atggcaacagtgtcccagacccgaaggaagccgatccgaccggtaacgctgaatgacgataccgagaaattctacaacggccagttacgggcgttaatccgcttaatggccggctcggtcgaatctgtgctcattccggtgctacgtcgcaactacaccgccgatagctttcttactgatctgattaaagaggccatccgccaggcatcagagcagttttactcggcaacactgcaagcacagtttcaccggttggctcaaaccgtggtcagtcgggttgagtctgattcatccagtgcgtttgttgagcagattaaccggtcaataggcattgatatgtctgcgctggtaacgcgggaaagcctgggtgatttttttgatgcctcggtggaaagtaacgtcgcgctgatcaaatcactatcgtccgattactttgatgacatccagcgtgaagtgatggatagcatcatgcgtggtgacagcgttaccacgttgacgcgcagcttgcagcaagtgaccggggctgcttacaaacgcgcccaccttatcgcccgtgaccagacggcgaagatccgcagcgatacgatcagccgacggcaacaatcggcaggcattacgcgattccgctggtctacatctcaagatcgccgcgtaagtggaaacccggcggggaaataccccaatgccaaaattaaatgttttgttctttcccgcaacgacgtgggctacggaccgggcgtttatctctggtcacgtggtgctcaatttaacggcgaaaccggcctattccccggacgggcccatatcggttgccgctgccatgccatccctcaaattcagggacttgattaccaatag

SEQ ID NO: 436499 - DNA, 1326 bp, Serratia marcescens
atgaccggaatggggaccgaacgggaccgccggacacataaccgctttatgctcggcactatgcaggactttgccgaaatggagtctgcatacatcgaaaactgggtagcacgcgccatagttgattttcctgttgaggatgcaacgcgggaatggcgcacgttctcaactgacgacgcgaaggtgctacaggatgccgaaaagcaattcggtatccagagcattactcaagatgcgtttcgttgggcaggagtatatggcggtgccggggtattgatgcttacagatcaagacctcgcaaaaccgttaaacctgaaaaaaattaaaaagggttcgctgaagcagctaaaggtgctcgaccgcatgctgatcaacgggttcgattataacgtcaccaatattctggcagataactacatgcgcccggaggtgtaccgggtaaacggtgggctgcaaaatattcaccacagccattttgttgttgctccaggtgcggcactgccaatgaggctacggctgattaatggtgggtgggatgatagccagttgcggcgctgtttggacgacatcaaggattcagtggcggcaaaaggtggcatagcgtctctgattctggaggccaacgtcgacaccataacccgcaccaacttgagtaatgatctgtccactggcgatatggatgaagcgatagcaaagcgttaccgcttgttcggtatgatgaaatccctttttcgcttggcactgctggattcgaatgaagccttcgatcgcaagccgatctcatttggtggattaggcgaaatcctcgcggtgttgatggagtggacatcgggggccgctggcattcccatgacgcgcctatttggcgtgcaggcgaaagggctcggtgattctggtcagggggatatgaacaactacaacaacaatattcgcgggcagcagacgacaaaatacaggccgttcctcagcaatcttgatgctgtttggatccgctcaactttgggtgcgatccccgatggctacgatttcgagttttcaccgttggcgcagccaagcgatagcgaacttcatgatcagcgtctggctgacgcacaggctgatgatattcgcctgcaacagagggtcgtcaagccgtcgcaagttgcacgtaaattgatggatcaggggctttatggcatcgacgaatctgatattacccgcatcgaagacgatgaaagcgccgaccgggacggtgattatcaattccggctgggacaaactgaaggcccgaatggcaacagtgtcccagacccgaaggaagccgatccgaccggtaacgctgaatga

SEQ ID NO: 436500 - DNA, 1641 bp, Serratia marcescens
atgagaatactcgaatgggaggatctcgattttcctgcgcgggtagccttgaaagccaagtctgaaaaaagcttcctcaattttacccggttgcagttcgagcttcagagcggtcagcggatgatggtcaactggcatcatcgccttatggcctcgaaaatcgatgacctgataaaaggcgaactacggccgcgcaacctgatcgtcaacattccacctggtggcacaaaaacggagttcttttcgatacatctgcccgcttacgtgaacatgttggtgcagaccgagaagttgcgccgattccgcaacctgaatatttcttttgccgatacgttggtaaagcgaaattctcgccgtacccgcgacctgatcttgagtcgggaatatcaggaattctggccgtgcagctttggcgtcaaccaggcggaagaatgggaaattgtcgatacgaagggccgctctatcgggcaaaccgtatcacgctcaagtggcggtcagatcaccggcggacgcggaggttacgccgggcctgatttttctggtttcgtctgtctggacgactacaacaagcccgacgatatgttttctgcatctcgtcgggatgccgccaaccgcttgctggtgaataccatccgctctcgtcgtggtgataagtcaaaagatcatccgaccccgttcgtcagcatccagcaacgtctgcatatgaaagacgctaccggttttatgctggccggcggcatgggcgtagatttccaccacgtcgcgatcccggcgttggtcagtgaagaatttatcgattcactggctgaaccgtggcgttcgatgtgctggagccaggtaaaaaacaccgaaagcgtggtggtgaacggtgtccagtattggtcctactggccggaaaacgagtacatcggcgacctgctgaaactgtgggaaagcgacgaatacacgttttggagccagtacatgcagcgcccgcgggcactgaccggtggtctgattgatacagcctggttcccccgttacgaaacactgccgttactgactcaccgcgccgtttacgtggatacaaacagcgggaaagttgaggactataacgattacacggtcttcacgctggtgggtgtcgaccgggctaaaaatctctacatcatcgacagtgtgcgtggtcgttgggacccggaagacttgctgaaaaaggcggttgagctgtgggaaaaatggaagccgcataaccctcgccagccggcaccgcttcgtcatatggcgatagaagataaacaggcgggccagggtctgatcaccacgctgaaaaaacgtaaaagcatcccgatcctggaaattcctcgcggtgccgggcagaacaagctgatccgttgcctgaacgtcatacctcaaatcaaaaccggcactgtctatgtaccagccctcatggccgacgatggccgaaaagtcgcttatgtgaagtatcacgacggtaggatcgcagcggcaaccgattgggtgctgcccggtttggccgaatgtgctgatttttctgccgacgacagccacgcgaatgatgacatgttggatacctggatggatgcgatcgatatagaactgatttccgccctggggatctctgaaaaagactgggtgtaa

SEQ ID NO: 436501 - DNA, 258 bp, Serratia marcescens
atgatcccttaccgtaaggttgagtcgctggctgcttgccggatgaccgaacaacaaatcgctgacgtgcttgatattgaccttggcgaactgaaaaaggagccgggggagattgctgcattccgcgaggccattcgaaaaggtagggcaaaaggagaagcggaaatacggactgcgttataccgaaaagccaaaggcggagatccgcgagcatttcaagaactgctgaggcgcgagaaacaacaggacagtgactga

SEQ ID NO: 436502 - DNA, 252 bp, Serratia marcescens
atgagctttaaattcgaattaacacagcttgtaaacatttccgtcagcgatgaatggggtgaggtgaaaggtcgcgctgaatattcaacgagtgagaacggttactacgtgcattacaaggcggctgatggtcgtgcggtaagcgcatggttcgatgagagcagcctgcatgcggttgaagatgagaaccacccgggttgtgcggtatatgccgggcgtgaattaccgaaaggtgctgtagtcgaagagtaa

SEQ ID NO: 436503 - DNA, 204 bp, Serratia marcescens
atgatcggcgctggcggctgcggtatccgttccgcgcaagaggtcaagaacagcgacaggagcagcgcgccgactacactcgtcattctggattgcttcacgatatttcctctggtagatttcgcctcgctggcgcagctgctgctctctccgttgttgttctgccatcattgcgcgattgcgggcgtcatccgtgcgcaatga

SEQ ID NO: 436504 - DNA, 393 bp, Serratia marcescens
atgaccgctaattttcgctttagtccacgtagtgagaaaaaccttcagggcgtcaaccccacattggtttctgttgtccgccgcgctcttgaattatcaccagtggatttcggcattactgaggggcttcgcacgatggagcgccaacgtgaaatggtacggaccggaaaaagccaaacgctgaaaagtcgccacttgaccgggcacgcggtggatgtggttgcgtatttgggcgccaacatcagctgggaatggaagtattacgagcagatcgccgcagcgtttaagcaggccggcaaagagttgggcacggtgatcgagtggggcggtgactggaaaaccctgaaagacggcccgcacttccaactttcagtgaaggattttccggcatga

SEQ ID NO: 436505 - DNA, 357 bp, Serratia marcescens
atgaacaatcaacacctgccgccggggttcctggaggctactttgctgtggatgaaaactaatgcacctgtgctttatggatcgttcgccgcattcggcatggctacgttgctgactttgcgtgatggcaaatcgtggctggatgcgctctacgctggggccatttgcttgctgatctctttgggggttatcaactcccttgagctattcggaatgagccaggacaacgctttgctgattggcgtcgtgattggtggcataggtgtggaacgttgcctagctattctccgcactttttccagcatgaaaaccaacacaccaatggatgagaaggaggatccgaaaaatgaccgctaa

SEQ ID NO: 436506 - DNA, 180 bp, Serratia marcescens
atgccgaaaggcaaggagaagaaggctatggagccacaaaaactagcgttaatggcgctaattgttgtcagtatagccctgttaggggcgctgctgctcaacaaaaataacctctgcgatgttagcttccgaagcggcggaacggagattgtggctcatatggcttacgaaaccaagtaa

SEQ ID NO: 436507 - DNA, 834 bp, Serratia marcescens
atgacacagatactaacgaccgaacgccagcagttcgagcagtggtgggaaaccactatgcataatggctacccgccaaggttcggctgggagcactggcgagacggcgacggatatcgcgatgatgaaggtgagtttcaagggttgtggcaggcatggaaagatagtcgcaaactggctagccgggaggcgcagccgtcgttctggattcacgagcgaaaactgtctgattttctctcaataacacgtgataaatctcgtgccgcaacatggattaacgaggggctaaatgtaatcccagcatacaccgtcccgccagtaccatgtgatgcacagccagtggcttgggattatgagtgggcctcatgcatcacctgcgaaggcccgcagaattttaaacccgttattgagcgcgaggctccgccgcaatgggcaattgacgaggggcaggctaggaatgttactccgctctacaccaccccaccagcgccagctttcccggaaagattgccatgcccggttcgcttgatgcctggtttactcttcgggaagggagttcccacagcgagtatgcttgaggctctcaacaggcgcgaagcttacgaggccgaggtggcgtctatgacgccagagcaaaagactgaaaatgatgcgcgattggaaaaattgaaagcgttaattccccagccagcgccagcagcggcgggggaattactcgaggttatggaggaagttatccgcatttccgatcgcgaccacgaagcttgggacaaagcaaaagccgcaatcagtacctgccgcgccgcaatgctaaatgtacctgggagcatttaa

SEQ ID NO: 436508 - DNA, 612 bp, Serratia marcescens
atgaaaatggataaattcagcgaactgaacgccacggttccggcaaacgttaaaagccgtgaagctgttgccgctggttttgtaacgcataacaacacagggggctatttcgtcattgagtgtcaagaatgccgtgcggtctatccgagtcagcaggcaggtggtggcggacaaattgcagataccggtgactatggcgacgctatttgccctcactgcggagaggaaggccccgatgagagcgaaaacgtcgggttggtgtggaatgttcagcaagccaaaatcatcgcactgctggcagagctggaagccaaggatgaacgcatcacatggctggaatccatctccactgattacatcagtaaatctcagaaagcacaggaatgcattgccgagctggaagccaagctgagtgaaatgaccactttcagagacaacgccttgaagaaggccctgcgacacttggaggagttgctggagcttagggcaaagctggctacgccggtgcggttgcaatcaccgtgggtggataaagttggcaatcgctggctgctggaggggacgacagccgatgtaatccgcgccgctggcttcaccgttagcgaggaatga

SEQ ID NO: 436509 - DNA, 270 bp, Serratia marcescens
gtggaaaataagctgagtcagccagtggcgtatgtatttgaccatggcgttatgggaccgggtgatttttcatatggtacgccgcaaatgcattctacggcgaaagatgaaaatgcaagcccgctttactccaaagagtacgtatccaccctgcttgatgcattgaaatcttcgcaggcaattgcaaatgagtaccggaatttgatgtgtcacatggacgccggtggcgacttctacgagtttcagcgtgataaggcaggcgagaaatga

SEQ ID NO: 436510 - DNA, 177 bp, Serratia marcescens
atgaggaagctcccggagaacccctggatgtctctccaaccaagcttcgtcattaattttctctcgatcaagtttattgaatttaagagagttgtttataagttttattgctccatccagtttgttttgaggcagcattgcgagaaggccctgaattacatattgatgtgcagttaa

SEQ ID NO: 436511 - DNA, 300 bp, Serratia marcescens
atgtttaattcaattgaaatcagaagcacaaaagtagaattatcagtaatcaactctgatctggcatcttttaattgcaatggtagcgtcactggttttgtacaccttcctgacgttggtcccattacagtggtgctcgatggcggctacgcactaggcgcgtataaagaccccgccagtgcaattaaagatatttctttcttatgtattgaaattgaatgcgcggataaacacgccgggatgaattatcaggcgtacatgcaaacttttaaagcagggtttgcatccagaatgcattga

SEQ ID NO: 436512 - DNA, 564 bp, Serratia marcescens
gtggaagatttattttttgcctacatcacagcgagcaagaaggtttcatcttacggtctgtcttcacctgaacgagttggcgactatatccaaggcatctgcatgcgtagcgccagctataagacatttcggttagaccgctttatcggctttttcggcgacattcaggaagccgaagagtatgccgagaaggtacgccagttcctgcttgagtcccccgacactgaagagttgccgatttttgctcagctgcgggagcaaaaacaatataaacggtatgaatcccccgcgatgcttaggccgcttgacttcagcgggccgatggaaatctgctttaccggattcaagaaggatgacaaggcgcggcttgccgctgttgcctcagagcatggaatgatcgttagaagcgacgtcaccgtaaaccttcacttcctttgcggtggctacaacgccggcccgaaaaaattagaggtagcccgaaaaaaaggcactctcattttaagggaggacgagtttttatccctggtcgcaactggtgagttgcctgatgactatgacaggtag

SEQ ID NO: 436513 - DNA, 219 bp, Serratia marcescens
atggccgatcaaatcgacatggcacaggaacggcatcagctaatccttgacgctcaaatcaaaaacgcccgcccgcagccttgcgggccttctgcatttcactgcgaggaatgcggagcacccatccctgagcagcgccgccgcctgattcatggcgtcagcacctgcgtgcactgccaggccaccagagaagcaaaatcacgccatttcaaggggtaa

SEQ ID NO: 436514 - DNA, 852 bp, Serratia marcescens
atgacaccacaacagcaagcgcagcaatggttgcgcgacaacgtccttattctggacaccgaaaccaccgggcttggcgatgacgccgagatcgtcgaagtcaccatcatcgacactgccggccgggttctgctgaacacgctggtaaaaccgcgaagcgtgatccctgcctccgcgacagccattcacggcattacaaacgaaatggtagcgactgcgccttcctggccgcatgtgtgccgcagtctttacgacatcatcagcgggcgcaaagtcgtgatttacaacagtgatttcgacacccggattcttgatcagacaaatgatgattgggggatcacgattcactttaaaatcgagcgaccaacgtttgaatgcgcaatgctggcctacgccgaattctacggccagaacagcgagcgcggcgggtacaagtggcaaaagctgaccgccgccgctgaacagcaaggcgtcattatcgaaggaacgccgcatcgtgccctttcagactgcctgaccactctcggcgtgattaaggcaatggcggccggaggtgctcgccgcgcatcgcacggaattacggcacagaaaactgtcgatatccttaacgggttatttcaggtagacccagatgcgatcacagctctggttgatcatcgcgttaagtgctctgaatatttcgccaaaaagacagcggcaacggtaggtatctgcgacagcacctatatcatcggcatgattggcgtcatcaatgcgctgattgcccctgaagtgatagcagcaatttatgatggtaatgagctgaagggtttcgctgtagctgatgtcgttgttccaggcggtgacgcgtga

SEQ ID NO: 436515 - DNA, 825 bp, Serratia marcescens
gtgaaccgcccggcgctgaaatggctgggcagcaaggccagcataatagacacgctgcgccagcacctgccagccggaaaacggctggttgaaccgttcgtcggcagtggcgcggtgtttctcaacaccgactatgaaagctatctgctgtgcgatatcaacagcgatctgatcaacttccacaacgtcgccaaaaacctgccggacgtcctgatccgcgaagcgcgcaacctgttcacggagcatgccagcgaagccggatattacgctgtacgcgccgattttaatctgcgctgcgacagtaatttcctgtaccgcgccgcgcagttcctttacctgaatcgccacggcttcaatggcgtttgccgttacaacctgcgcggtgagtttaatgtgccgttcggtcatagaaaagcgccctatttccccgaagacgagatccgggctttctctgcgaaggcgcaggccacaaaagcggttttcctgtgctgcgcattccaggaagcaatcaggatggcgcaggccggcgacgtgatttattgcgatccgccctacatcccggccagcgccaccgccaatttcaccagctaccacaccgacggctttaccagcgaacagcagaggaagctggcgcgcatgctgcgcattgcggcaaaacgcggccgccacgtcgtcgcctcgaacagcgaaaccgacgccgcgcgggcgctgtactccgattttaccatcaccaccgccaccgcacgccgttctgtcagcgccaaagctgccagccgcgcaacagctggcgagatcatcgcaactctggaggccgtcaatgcttga

SEQ ID NO: 436516 - DNA, 630 bp, Serratia marcescens
atgcttgagttaaaaccggaacagttggcgcagattagggccgacatagcagcacgcaaggcaatgcctgattacggccaaagtgttgcaggcaatatggagcgcctgcgcgtgattgccgatacgcgtgaaaccttctcaaccgaagcggttgagatgctggtaaaggctttggacgaactggtagctaaggccaaacctgtcgcagaagtacggctggtcgatgaattttgtggatgctgccaacgtccagacgttgaatggcttgggatggctggcgaccaattccctgtcggcacgaagttctacaccgcccagccagcgacggccctgtcagaagatgttgagtctgtagttggtttgctggagtcgggcgaatgggcagaacactgcacaaacacagaactcggccagcgtctagagtctgctgtaactgcgttaattagcgatgccacgccagcaccagctaaatcgaatgggttcaagcttgtgccgacagtaccaacgccagaaatgatcgccgctgctatgaactgcgacgatgtgaccttcatcaacctcgaagactgctgcgttaacttcggcaacatctacgccgccatgctggcagctgcgccggaggaaaagtag

SEQ ID NO: 436517 - DNA, 1050 bp, Serratia marcescens
atgctgatgccttcgcgcgttatctcatatccagccggaatggcaataatcgacgatcgcatccttgctgtggatgccatcaacgtgatcagtatttccggcgggaaggacagcctggcgcaatcactgttggccgccgacgccggagcgaaagccgtgcgggtttttgctgataccggacacgaacacccggaaacgatgaaatatctggactacctggaaagcaagctgggtgaaatccagcgcgtaaaggcggatttcaccgacagaatggccgggaagcgccagtttatcgccgagcgctggccggtcacgctggtaactgagtgcggatttaccgataagcaagccgccgagattattcgggtagcgctcgacacccttcacccgacaggcattccattcctcgatctgtgcatgtggaaaggccgattcccatcgacaaaggcccgtttctgctcttttgagctgaagcataatcccattcgcgatcaggttgtcgttccgctgttaagtgactatgacgaggtaatcagctggcaaggggtgcgcgccgaggaatcaccagatcgggccggcttgccaatgtgggaaatcgacgctgacaacaccccagggctgcacatttaccgtgcgatcttggattggaaacacgctgatgtgtttgccatcgccaaacaccacggcatcaagccaaatccgctttatcaacaagggtgtggccgcgttggctgcatgccgtgcgtcaacgtgaacaaggcggaactggcggaaatattcaagcgttggcccgaagagatcgcccgcgtcgcccgctgggaaaagttggttgcgatgtgctacaggaatgggaattctacttttttcccttcaacgcaggatccgaaaaaggcagaacgccgcatcaaatgcatcaccatcgaatcgcacggcattgaaacctatcgggattgggcattaaccacgcatggcggccgccagtttgatttgctgggttcggcaaatgatcacagcacatgcagcagcgtttacgccggcgtttgcgaatga

SEQ ID NO: 436518 - DNA, 1179 bp, Serratia marcescens
atgagtgaattactatctgatgtgaaagcagttcttaaagagagggtatcaggcccattttttggatatatatttctttcctttttcctatttaattgggactggatatatttttttatatttagcaacttgagcgcagaacagaaattaagcagcattggcaacacatatcaatacacaagggggtttgtatacccaataatatcaggttttacaatgtgcctggccgggcctttcataaatgtttttattaaaaaacttcactcgattgccgtaagaatcagtaaagaaattgattatgataacgataactctctcgaagcaataaaagctgacagggagttaaagaatagcctcaaaagacagaaagcatcaattataaaaagtgatgttgacaagttagaaaaagaccaccaaacactacatgaatcaacattagcgatgcgtagcgaggtggccactctaacagcaaggaggttagagcttctacagacagaacaggagctaaatcaaaaaatcaacgaaataactattgaactgcaagaaaaaaatgcaacaaaggacaatttcagcagactgaacgatatgatagaggaaaaaagcaatgaaaacataaaactatcatctaaaataaataacattgagactatgttagtagatatttctaagtatattgaaactaaagatgggtctcgcattgaaagtattttattaaatcacaaagttgaaagtttcttaggaagctatggctataataaaggaaaaacaaaggagcagaaggagcaaccaggtcttggggaagcgtggaagaccggtttattggggattaacgcactaaatagcaatcctataatgaaatcctggggagtgggggcattaaatactaatccaatgaataaagattggagaatggatacaataaatcgcatatcagaattaaaaggaagctcaattttcaatgaaatgccagcaataaaagaagcagcgaaattaagtagaatgggagatctagggctaactatcaaagcctacgaaagttccggtctcaaggaggctactcaactagccaaaagcttagatatctttggtaagagaaacaactcggagcaacttgattatgaagttgcaaagtcagacgatgaagaaaataaaccgagcaaacaacagcaccgcaaatga

SEQ ID NO: 436519 - DNA, 1074 bp, Serratia marcescens
atggaaaacttaaaatatttaccgtttaatcaagttgatttcgatgattctttttttgattcacttaaagaagattactcacatggtttcttagagtggttgaaaaagaaaagccaatcagcatcagatcatgcttacgttttgtatgatgatggaggtaacattgacggtttcatgtatctaaaaattgaagatgggaatgtcgatgacgtcacaccaaccattattggtagcaaacacctaaaggtaggaaccttcaagttcacccctaaagggacattacgtggacagcgtttcttaaaaaagatatttgaccacgccttgaaagaaaaagtagatgatatctatgtaactgtctttgataaacatagttatttaattcggcttttccagatgtatggttttataagacacggaaccaaggactctctcaatggtacagaaaacgttttagtaagagagatgtcgagagagcacctaacaggtgatctgctagcggactacccatacataaacaataggaataatgaaaaaaaatacctcctttctatttaccctgtatttcacacgcggttattcccagattcaaaattagtgacagagtccccagacatagtttctgatgtttcatatgcaaacagcataagaaaaatttatatttgcggaatgagtgatgttgcgatgatgaaacgtaatgacatcattgtaatttatagaacaagcgataacaagggcccagcttattacagatcagttgttacatctttatgcgttgtcgaagaagttaaaaacataagctcctttatttcagagaacgagtttgttgattactgcattaaatacagtgtctttagcaaaagtgaactaattggtttttacaagaccaaaaaatatccatatataattagcttcacatataacgtagctttacctaagcgattaaatcgtgctacactaataaatgaagcgggtatgaatccgaactcatattggggtgtcatgcagctgaatgatactgagttcaataagataatcgaattaggtaatgtagatgaaagtattattgtcgattaa

SEQ ID NO: 436520 - DNA, 786 bp, Serratia marcescens
atgagagatctacccgtcccttcagatatgctattgacagcccaacgtaatattgggtttttcctacaaacgttttattcattgtttattgatggatgggaagttttaggagccccaccaacaggagagactgaagagcaacgattaaagcgattaatatcagaaaaagaaggatttattcaagctagcttagtgattttattcaattctgctgaaatttatttaaaatcaaaaatagcggataaaagtgtatttcttctacttaaggatattaaagacgcggggagaaatgtatctttttttgattgtgtcacaatcgatgcgaaggatttaccaaatatttatgaaggaatttcaggattaacactatccagaacattcaaaaaatcatacgaatcacttagaacagagagaaataaagtcatacatcttgggaaaagcaatagtatttccataagaaaagatctcataattgctttcttatcactatcagaagaaatagtaagaaagcccattgtggatataacagaaattttgatatctgaagctcaagcaatgtctactaccgagattcatgacgcaaaagaagagttcagtggtactatagtatctattctaaggaaatttttcccaatagatgaaatcattaaagagacttatgagctaaccaacataccacaaagctggatacaatgcgccagatgtcaaaacaaagttgatacattagctgttatttccagaaagaaatcattatgcctttcctgtggaattaaaaacggagtctga

SEQ ID NO: 436521 - DNA, 627 bp, Serratia marcescens
atgcgaactataggatcaccaaacgaaatcgtcaacaacaaagttcacatggtgaaatctatggatttggtaaaaggtgggcgcggcgcgatagaaaggatggttgaagcctacggttttagcactcgccaagcgctttgcgaacaattaggggtgtcgaaaagcaccttggctactcgctatatgcgcgattctttcccatcagattgggtcatccaatgcactcttgaaactggtgtatcacttcgctggctgacaactggtcaaggggttatgtatgaagatgcgcgtggagatattctagaaatacctcgaaaaaagatcattgaaggaaaattgttcgagtcaaactattatatttttgacaaggcatttttaccggtagaccttaaaaaacctgtttcaattattgacggggatatagtttacattgctgattatagtttcagtgatataagtgatggaaaatggttattggacattgatggaaaaacaagcatcagagaagtcgctattcttcctggcaaaaagctaagaattgaaggaggaaagtttactttcgattgtgctatagaagacgttaccttcttggctaaaattgtatcaatgactcttaaagtgatctaa

SEQ ID NO: 436522 - DNA, 459 bp, Serratia marcescens
atgattgggcctcatttggaagagacgaaagccaattactatttctccccgtccgagctggttttcttggccggcgttatgaagaaagactatgtgatcgcgggttcgtggcctaaagatgcaaagcctgttcttgatgcggtttacgaaaggtataccgcaaatccgccggaaggaatgctacgcggcgcgaatgagaacggcgaaccgtgctggattgaagcgccacctcccacgcaagaggagctaagcgccttggccagccgtaaaaaagaccgctgtatgcagcaggccgaaagcgttattgcgccattggcccgcgcggcccgcctgggtatcgctaccgaaggggaaaaaacggcgcttatgcagtgggaaacctacagcgtgatggtgaatcgtgttgatgtgagtaaagcgccggatattgattggccggaggtgccgagtgtggcgtaa

SEQ ID NO: 436523 - DNA, 1020 bp, Serratia marcescens
atgagcacacccgccgcaccaacacttgatgctgaaaaattatacaataacgcagtaatttctatccaactaggtattgaagacttcgaacaatccaattcagagaacccagcaaggacgctctcatctgtaagaaacctttttgctggcttattacttttgttcaaatacaaaatagcagtgtccgtaaatgatcccgcggatgcgtatatgttgatttttaaccctccttttatcctgcctaaatccgacggtagtggtggagtgaaatgggttcctgatggaaaatttaagaattcaactatagatgtacaaggcattaagcaacgtttcgatggtttcggtatagatgttgattgggcagccataaagaaattacaagactgtcgaaatcatctagagcatttacatccgcagcacacacttggtgaggtaggtgggtttgtcgctgatcttttccctgtcctaagtgattttataacaaatcaattagagcaagctccatccgatgttttgggtagcgcctgggagaaaatgttagcccaccaagacttctacaaccaaaaacttgcgcagtgtgaagaatcctgggaatccgcaggtgtgccggagggaatgaaaacctacttaactcaatgcgtctgcgatatgtgcagttcaaaacttcttgcagctaatcaagatgatattgattcaaacctgacggtggtagacgatgaagatggattcagatatcgctgtttatcttgttcttacagcgaccttatagttccacagttatacgaggcattgcatttagaaaactatttcgacccacgcgatgggggcgaaccagcccatgaaacttgttaccaatgcgggcgtgatacatttctaatatctgaacaatgttgcgtctggtgtgaggccacacttgactatgaacaatgcacaatctgtgaggaacgccttggccaagatgatcaagagaataatggcttatgcgggtatcactcccacatgtcatttaagaacgactaa

SEQ ID NO: 436524 - DNA, 240 bp, Serratia marcescens
atggctatagatattatagttgatgcgaagcgggttaacttcgtggaaattggagggaatgattactaccaatgcttaaaagtatctttgtcatctattgaattaaccgagtccgttaacgcaaaaaccattgtctcggaatattcaaataatcagcttttaagagctattggtgagtcaaaggtagctgaatggctatccgaacagggatattcggtcagcataggtgatgcattatga

SEQ ID NO: 436525 - DNA, 417 bp, Serratia marcescens
atgctcctcatgaaagacacatctaaagagtactcatcacatcgggttaaccagttgctagaagctaacaactggagccagaccgaacttgctaagcgggtcggcgtgtcgccacaagccgttcagcaatgggtgaagggaaccagcgccccaaggggaaaaagccttactaagctatctgtcgtgactggcctgcccgaacattggttctttatggcgccaggtgacaacgcggaaaacgagctgatagtcaaaaacagcaagcctctgacatatcagcaagaaaggcttctgtcattatttgaacagctcccagaagatgaaagaaatcatatgattaagctgtttgaggaaaaggttaagtactttgacaagctccgcgatgaattggtcaacataaaaaacaagaccatctaa

SEQ ID NO: 436526 - DNA, 237 bp, Serratia marcescens
atggacgcaaccgtaaagaaaaaaattactgatattgcaaatcaaaccgaaattgcaaaacgcttgggctatacgccccagaccgtgagcctttggtttaaaaacgatgttccactgaagaacatccgtcgcctttgcgacgctcttaattgggaaatcacacctcacgaaataaaccctctgatttatccaaaccctagcgatgggttaccagacaaatcagacattaactcttag

SEQ ID NO: 436527 - DNA, 369 bp, Serratia marcescens
atgaaaatcacacagttaggtaaatttcttagaaagataagaattgattgcaaccaaatcctcatggatatggcaacagagctgaacataagtgtggctcaactttcagccattgaactgggcaagcgagcggtcagtgatgcaacaaaaagcaaaataatagaactatatagttcattttgctcaggaaaagaggagctggagcgattaatagacatgtcgcagcctagcttcaaagaggatttcgaagggattcctgaaatgcgtagagaacttttcatatcgttcgctcgcaaatacaaggaaatacctgacgaggaggcccaggaatggctgcaaactttaaacgagatgactatgaaacgttag

SEQ ID NO: 436528 - DNA, 567 bp, Serratia marcescens
atgcagaaaaccacacgcattttaggcaacaaagtagcagctttaactcctgaatatatcagggagaatgcatcctctattcgcggagcatgttcttctttagtcccttgtatagggaataaactagatgtgctccgtttgattgagaagctccacaaccatgagttcttgacttttgaaattgtcgagaccgaggaaatgcctggggagtatgcagttacgatccctagccagaaaaaaattattgttcgtcaagacacctacgtatctgccctcaaaggggaatcaagagggcgcttcacattggcccatgagctagggcacttcttcttgcatgccaataccgtgcctcaatatgcgtattcccaggtagcctctaaccacagctatctagaagatgttgagtggcaagcaaacgagtttgcggcatggttactggttgatgaaagggatgaaaaagggacagcaactccgagagcgataagcacaaccttcggtgtaagcatggaaacggcatcgattgtgtggaaaaaattaaagggccagaagccaaaaaatgacctctag

SEQ ID NO: 436529 - DNA, 147 bp, Serratia marcescens
atgactcataaccttaatgaagcccctgaaggggatatggtggaagtatttaccccgtttatcacgaagaacggtaaacgtatctttaagaaggatggggggctattccacttctatgttccgcgtgaaaaatatcgccaaggttaa

SEQ ID NO: 436530 - DNA, 387 bp, Serratia marcescens
atgaccggctggctgcaaaaactgacgcagggcagtttagtgctcttgctgctggtggctattagcctgggtggctacagctcattgttatcacatcgattggacctggcacggaagcagtcggcggagcagcagaagacgctggcgcagcaggcggggttgatcacctcattgcgcgcggatgacgcccgcagtcgcgcaatgatggcagaacaacaacggagagagcagcagctgcgccagcagagcgaaatctatcaaaggaaatacctcgatgccatcaaaaatgacgagtgcgcccgccgcgctgctcctggtgctgttcttggcctcctgcgcggaacggacacccccgccgccagcgccgatcgtgctgttaccccctga

SEQ ID NO: 436531 - DNA, 1995 bp, Serratia marcescens
atgtcaaaaatcactgttaaggctggtgcagatcatctggcatcgttggcgacggcaagaccagtaacggctttgtcagagttgatttggaatggatttgatgcaaaatcaagcaaagtggaaatcataattaataaaaaccctttgtttgaatcaattgactcggtcgtaataaaagacaacggtgagggtataaataataaaagagttgtcagttgctttggtaatttgggggagtcgtggaaaaagcaagcaaaggcaaacggagatcgctctcttcatggacaatatggccgtggtaggtttaaagcgctttccttgggggaaagggtcgtttggcgtacgacatatgaagatggaggggagtttttttcttacactatctctaccgatgcaaataaaattagtgactttacaataagtgatgtaacgcttgtcgacagtgaagatgccggtacggaagtggaaatttacaatgtaacggataattgtttggttcttctttctgaatgtttttcgatcgatgttacaaaggaatttgcgttatttttaactgaatatccaaataggaaattaatttttgatggctatgaaatttcccctgtaaatgcatgggtagagaaaactgattacgacgtaggtggagttgtttttcctgatggaacagtagttaatacatccatgtcaataattgaatggaatgggaaagtccagagggaaattcactattgtgattcacttggcttttcgttgtataaggaaaaacttggtcctatcattcgcgcccctggttttgatttcacaatatatgcaaagtgtgattattttaaatcactgagtgaacgtaatgagattggactaggagatttgattcctgagctcaaggcgataaaggactcagttatacagaaggcaagaactcactttttagataaagcgttcattgaaaagtctaaaatagtagactcttggaaagaacaggatatttatccttactctggaagtgtctcagtagatccagcaagcattgctgagagaaaggtttttgatatactggccgttaatgtgcaaagttatcttaaaggttttgataattctgataaaaagacaaaaaaattcacatttatgcttttgtctcaggcaatcaaacaaaatcctgaatccgttcagaaaataatttcagaggttttgggattaaagaagaaagaacaagatgacttggctgaattattggagagaactactttgtcatccataattagtgcatcaaaaattgttagtgatcgagttaattttgttaatgcgttagataaccttgtacatgaccgtgataccaaaaaatccctcttagaaagagaccagttgcataaaatcctagaaaaggaagcatggttattccgagatgatttctttttagctggttctgaggattggcttgaggaagttcttcataagcacatgaagcatttaggtgtaagaaatgacttagatattgatgaacctgtattactacctgatggtcgccgtggccgggttgacttaatgtttgcaaagtcccgtcaaccttatgagggttatactgagtatctagttgtcgagttgaaaaggccatcacaaaaaattgatttggatgttttggggcagatagagaagtacgctatggcagttagttctgacgaaagatttgatcatgctaactcaaaatggactttcattgcggtatctaattccatggatcaatttgcgacaagaaaagctcggcagcgtggttggcctaaaggaaagactcttgatgatgctgaacttaatattgaggtatgggtgatgacttgggcggaagttatcaacgctgcacgtacaaaactcagtttctttagtaagcaattaaaatacgaagcgacgcgagaatctgcgactgcttatctagagaaaactcataaagaatatatacccgtgatttcttctgatgagccagatgagttgatgaaaatctaa

SEQ ID NO: 436532 - DNA, 1671 bp, Serratia marcescens
atggcagagacaattgattccctgttggtttcgctcggccttgaaactgatgcgaaaagcttccaaaaagcaaacaatgcaatcaagggagtaaaagacggtgttcttcagttggcagcggctgctggcgtggggttcggttttaaggcgttgacaaccgatctggcaaaatcaacattagaaatgaatcgcctaagcaagatcactggatttactttaaaacagattgacggccttcgatatgctatgcgtaggtcggggttaaatgccgattcagcaaacaatcttgtgcaaagaataccggcatggaagcaggctgcatcgcaaggagagcttggtgataaggcatattggagcggaaaatttaatcccgctgaacttatagggaaatcgaatcaggaagcacttgagtatattgctgaaagttatgagaaaatgaataacgatcagcgcagaacgctcagaagtggtttgggactaggggaaaatgacgatataactcgattgttcgaagggggattgaaggggcttagggcagcagcaattgagtttgagaaattatatcagccattacctccctctcttatcgaatcagcaaataaattcaatgaggaattggctacgttagaaacaaatttcaccaacttgcaaaggcaaattggtggccctgttctggatgcggtaaatgaactattgaaagctacaggcaaatttatgacagggaataaaaatgaaatagccgccattgttggagggacgatggatggtagttggtatacaagtactatggatcatgcagagaaaaagggtaaggagttcagaaattggcttcgggatagccatgtggtaaaaaatgatgcttttttacaaaagatcttgggagataaagaacaagtttctaatgatgagttgccagctgaaagaataatagaccagcttttaattcgtggcggtaatcatcttgctgagaatgaccgtattctaagtaaaatcattccgaagaaaaatgaatcatctttttttatcccagccccaaaaaattcaacgatttctaacccgaatgtcaaaaattatttagatatcatcgccaaatcagagggtacggcaggatatatgaataatggttacaacaccttgtttggtggcgatcagttctcagattttagtgaccatccgagaatcctaaaagaattcactgaaaccaatggtaagaagaataagacttctgcggctgggcggtatcagtttacccaaaaatcgtgggatgaggctgcggctgcacttggtttaacggacttctctccagatagtcaagatatggctgcattatatttgatccagcgtgctggccagttagataacgtggtgaatggcaattttgaaggggccactgctggactcggtggtgtatgggcatctttaccttcgtcaacatatgcccagcccaaacatagttatgatgcgatgcaaggattttacgatatgcagaatacaccgccggccatagctggtcgtagtggtggttctgggccggtaaccgtgcatcaagaaaataacgtcacaattcacgccccaggggctgacgctagcgagatcgataatcgattggccagtgcatttaccgattactccaggcaggctcgtgacatgatggatacggagcattactga

SEQ ID NO: 436533 - DNA, 963 bp, Serratia marcescens
atgacgaaaatcaaactgtcgtcaggcagcactacgcctatttcacgaactgcacggccgttggatgaggagaaaactttgaatgagagttcatcatctagcattgaaattagtgctttacctgatgctgtcgagttatctggtggtgatttaataccattagttcaggtagttggtggaaaaaaagaaacaagaaaaacgaaggctgaagaattagagaaattcttgcccccaggcccacctggtcaagatggtgctcagggtgaggccggccctaagggggaaaaaggtgacaagggtgacaagggggatatcggcccagcgggtccggcaggtaaagatggtgctgttggttctaggggagagaagggagaaaaaggcgatgtgggaccacagggcgaaaaaggagatgccgggccacaaggtgagattgggccgcaagggccaaagggggatcctggtgaaggtggtaatgtaaccatcagccctgtcaaagataacctgttaaaacaggaaagcgatggccttaaggtattagcgagccaccctattattccaaagatttactcgacatcatatacgacaaccaaatcggcgatggcgagacaatctatgccagatggcgcagtcgtttatcgtgggacattcagtgttaaaaacccattggggattagccggttaaataatatcggcatttttacctctttttcccagcaaagcggatgtttttatctcggcaaagacaatgagtttgtaacggtacaagtccacgctatgccaaagacgacaacggcaagcactattaccgcagaccttgcattggtattcagtgctgaaccttatcgtgcatttgatgtttatagtggcgaggagcaggtaagccctgaagaaggagatgcaaaaatatcggtaagtattcgattggttgcaggtacaacgatggggcaaaatggtttcgattaa

SEQ ID NO: 436534 - DNA, 1062 bp, Serratia marcescens
atgaccactagtttcttcaccttagaatcaacatcaaacaaaataaaaaaagccataagtgaactcgccagaatgattccagagaacgagtatgaacgttctagaattgaatacataaaccttatactatcctcatttatatcagaagcaaaaagctgggatgaatcaagtcaattcaatatagaaaacataggccataaccttctcgatgaattagcaggaaaagaactatctaacttagaaatggacagcataacatccgattgcttccgtttttttatagagagatgtttatcaacaaaagaaaacccatcaacgaaattcatgaattttagagagttcataattgaaaataaaggtagattatctagcatagctgcaagacaagtaagttacgccctaaacgtaatgccgtttgatatttttcaggaacgttataactctgaaagcttgaccttagtaaattcctttctaaaggctcacgctgaaaataatcaaaatatcgaaatatggcgcactgagcttgatgaaagaaaaaaagaagtagaaaaactaaaagaatctctagatgagcaaaaaaatgcttttaactttgttggattatacaaaggatttgacgagctgggaatcacaaaagataaagaaagaaaaacagcaacgagaatattacttgctttaggaggactaataccactacctatattcatagaactatggtttatcttattcaaaagcaacacactcacattaactcactccttgataacactcataccttcaacctcacttgtgttgatattaatttattatttccgaatagcactacatgattacaaatccataaaaactcaaatcaaccagatagaactaaggaaaagcttatgcaaattcatacaaaattatgcacaatactcttcagctatcaaaaaagatgacaaatccgcgcttgagaaatttgagacaattattttctctaacatagctatgacagatgaaaaactaccatcaacatttgatggaatagaatccattgccagcttaattaagtctgcaaaaagttag

SEQ ID NO: 436535 - DNA, 480 bp, Serratia marcescens
atgagctactctaacgtcgtcgcaacaataagcctcattgtatctgcagctgcatttgctttaccctattggcgcgatcataaagccaagaaaaaagccaaaagaaaagaaatgttggatttgtttactaattcaggatggcataatgagggggatatatattccactcctaaagcacattacacacttgaagtaaacaaatcatcgggaatatcaaatgtttatggtactttatacataaatgttgacgagtctcattacgaattcaatggcaaaatcaacgcaaaaggcgttcttagcacaactctaagaatacctattggtaaaaacggcgctaacattgcaaaagtgaagtttatttattctgaagaagatgatgagatcatctataagtttgagggttttatagataacaaggactttgcacaggaacatgatgttcttgataccgagcagaaactttggaggtcatcaacatga

SEQ ID NO: 436536 - DNA, 1068 bp, Serratia marcescens
atgagaaaggttacgttagacgacatacaacggtctgcaatccacgctgaagggattgcaaaaagaaggactaggaagaaaagtaataagagttcttctaaagggccattgcgtatcttttctcgtgtttgtatatttgcccctactcatcttgatctctttaatccagagaattatgcggattttgttatttttttgacacagattcgagatgaagtagaaaaaaaagagaaagtgataataaactttaaaaatactgaatctttgaaggcttgtgcaatggttgtattatatgcacatattgattttttacaaaggttgactggcgatgaaaatatcataaagataacgttatgtagcaacaaacgtgcgaatcgttggttcaaagatagtggtgtttggaatttaacacgatttaattcaaatggtgatggtgaagaaacttctttgcatatcgtatctgcactagctgggtcatccaagaataaaaataatgatattgaggctagaaataagataaggttaatattgaagtttattaaagagaagatttatggaggaaaaatatctccagaagaggctcaaaaactttatgccgccgttaccgaatcaattagtaatgtcggtttgcatgcatattcaagtgagactcaatttgaagaattcattgagttgattgggaagcgatggtgggttttggcgaggcaaattgaagatcaacttttccttgtgatttatgatatgggggaaggtataccatcaacgttagtaaaaagagattttttcacattcctttatcaaatttttcaaccagaaactgatgcggataagatatttgcagcagtacagtatggtgaaactcggatgaaaagtgataagcatggtaaagggctgcatgatatcaaaacatttgtagtagataaccccatgggggaactgcatatcttcagtggaatgggtaagtattcatttaaatccgctactggggaggaatcaaaaaccaatttaaaatattctgttggcggaacattgatccagtggaatatttcattaaaggctaaatcatga

SEQ ID NO: 436537 - DNA, 516 bp, Serratia marcescens
atggaaattttatcatcatttttctctgggctagcaagtctgctggaagtgttagctaaaacaggtgttttagctgtggtggtagctatttctggttgggtttttgtttacaaaaactctagggctttacaaaagaggagtgagacttgggctatcgtaaaaaatatttcagatctgcttaaggatattgagtcgtcttcaagaggtttttggctacctagcgatgaaaaatttactagccaacgttcttatcaggctgagattaatgggggactagcggagctagaaagatggatggagcatcttatgcttaggataaacaataaaaagctattggatgatacatataaagatactatagtaaaaatattccgagatgctacatataacatggagcaagctagctctacatcagaagtacaaagaatgagaattacatcgacagtttcaaaacatacaaaaataatgaaggaaagaattgactctgcatatgagggagagttttttaaaaaataa

SEQ ID NO: 436538 - DNA, 1047 bp, Serratia marcescens
atggatatattttcaattgatgagtctggctacacgggccgcgatcttcttcaaaagtcacaaccttggcaaggtgccagcgctgtaaagattagtcgtgatgatgccctctatctgattaaacaacattttcctaaatgcaaagctcctgaattaaagtttagctctcttaagaaacgagatagttaccagaagccaatttttactttgcaacaagaacttcttgctaattttccatgtgtaacttgtgttgcagataagcgtttcattttgattcaaatgtttattgagtatgctgtagagcctttttactatgatcatgggataaatctgtacgaaaatggtgggaatgtttcaatggcatcaatggcctactatgtttgccaaggctactttggtaaagattttgataatatcctaatgtcttttcaaaatgcgatgcatgaaaaaacgcatacggcagtaaatgcccttattgcaagcgtaagagctgtgaattggcggttgttaccagaagtgctggggccaatagcgttggaacatccagattgtatcgaatcaataattaatccaaatatttccactgatgctgcatttattattctccaggcgctaataacacgaaccgaattaatgtcggaggggccatatggtattgagcatgatcggtctaaaaatcttttgcaatacaatgaatatctctccatgcttatcaagtgtcagacatcagcagagtttaaaatgtctgaagttgctagtataagcttcccactgaagctgaataatgtacagcaagttgattcgaagttaagtcctgcagttcaattatgcgatgttttaattggtagtgcaatatcaggagttcgccaattattacatgataaaaaaatgccattttattccgctttgaaactatatgaaggtgagcaattaattcattttttacctgatacggattttgaggggcaaaaagaattcaggcgtaacggtcaaggtagtgaatacatcgattttattgctgaacaatttaataggcttgagcgctaa

SEQ ID NO: 436539 - DNA, 1035 bp, Serratia marcescens
atgagcaagcgcaacggccgcaaggcatttaccaccccgccgcaagccccgacagcagagcagaagcaggattttgaggcttttacctttggcgagccgtctgctgtgctggataagcgggaaattctggattacatcgagtgcacgaccaatggcaagtggtacgagccgccgatcagcttcgatgggctggcacgcagtgtgcgcgccgccgtgcatcacagctcgccaatgtacgttaagcgcaacattttggcgtctacgtttatcccgcaccggctgttaagtcagcaggagtttagccgctatgcgctggattatttggtgttcggcaacgcctatttagaggagcgtcaaaacaggctcggtgccccgctgcagctgaaatcctccccggccaagtacacgcggcgcggtgtggagcgcggcgcttactggtttgtgcaggactggaaagaggcgcaccgcttcaagaccgacagcgttttccacctgattgagccggacatcaatcaggaagtgtacggcctgccggagtacctcagcgcgcttaactccgcttggctgaacgaggcggcgacgctgttccgccgtaagtattaccagaacggggcgcacgccggttacatcctgtatatgaccgacgccgcgcaaagtacgagcgacgtagacagaatgcgccaagccatgcgcgacaccaagggcttagggaacttccgtaatttgtttatgtacgccccgaacggcaagccggacggcattaagattttgccgctgtccgaggtcgccaccaaggacgacttttttaacatcaagaacgccagccgcgacgatctgctgagtgcgcaccgtgtaccaccgcagatgatggggattatcccgaataataccggcggcttcggggatgtgaaaaaggccgcacaagtgtttgtgcgcaacgagctaacgccgctgcaagagcgcatgaaagaggtgaacgactggatcggggaagaagtgattagattcacgccgtatgagttgccgaccgaataa

SEQ ID NO: 436540 - DNA, 627 bp, Serratia marcescens
atgatgtctccacagcatttcggtatcgcgctgatggcgaatccggtgctggccgtcctgctgatagggctgtttattgcggtgatggccgggttgaatttgcgtggcagcgagtcggcctgcgcacggcgccaccgacgttatcgtgcgacgggcgcccgcgttctacagcgactgccgcaactgggcggtgatggtcagcgcttgatgtatctgcgcaaaatcaatccctacgtcttcgaagaactgctgctcctggcgttcgagcgccagggatatgcggttatccgcaatgcttcctacagtggcgatggtggcctggacggccaggtcatcatcggcgacaaaaaatacctcatccaggccaagcgttacggcagggctatcacgccgtcccatatcaagagttttggtgcgctgctgcgacatcaccactgcgaaggattttttattcataccggacgtaccggccagttgagccgggctttgctgcagaaccaccctcacgtgcacctggtcagtggccagaagctgctggcgttgcttgccggcaatgcggagtggctgtcatttctgcctgggagcacggtaatcaaacggagtacctcaaatgtttcatcagtctaa

SEQ ID NO: 436541 - DNA, 531 bp, Serratia marcescens
atgtttcatcagtctaattatgttgtagtcgctacccgctttttgtcagcgatactcagagtcctgttggtctggcctggcgtggttctggcgatttttggcttcatgttttttatcgcaacactcggtgatgacggcggacagcgggtggcatcacaaatggccgccaccgctcagagttaccgtacagcgcccgtgggcatggtgatgattcagccatgcccgcctactaacgtccctgagtcaaaactattctcggtaccgtcggtggcgccggttaaaaaacaggactgtcgaccttatccaaagacgtttactgacgttgcagtgaaggagcgacggaatattctcggtattgggagcaccttgctcgcaggtggtttgttagccgaactgttttctttgctgatccgtcgacgccagatgagtcggagcgctgtttactacggatctatcaatgcaagaggggagcgcaacataaccctccagtctggtgaaacagtgcatgacaaggaaggccgccatgagtaa

SEQ ID NO: 436542 - DNA, 630 bp, Serratia marcescens
atgaatacagttgatataatcacaagggtaatatttcctattttgacattagttctggctggcattggacacaaagcaaaatgggtcatacaagctgatagtatatttgaaagatactcaaaattaagcaaattcacccatgaacttgcgaatcaactaaacgacgaaagattaaaagaaatttccggggagtatggttatgcagcaataataaggaaaaaaggattgagtcgtgatgaaagatacactttactgaacatgcttaaccccgtagaagggattgaagagtatcacacctgctcagactatctgaagatagacgttgtacgtagtggattcagttggaaaagaaaacggtacagcagccatctctatagaagaatagtttctctaataaactctatattttatttcatcggttcaattaagttgttctgccctatattctaccaacctttccaagataccattgtaggtaacacctttaggtctttatcagtaaaaatgcaaattggagccaccacttacatcatgttggcagggttgtttttcgttgtcgtcagcttaaacagaatgtctaagcaacatcgcgctggtaaattaatccaaaactcccgctctatccgttaa

SEQ ID NO: 436543 - DNA, 1032 bp, Serratia marcescens
atggaaaccaaccgtaatttcacatccgagaacgacaaggcagcagtttaccttttagagcaagcaatggggtttacatatcaggccgcattacgtgctgccgcagttttaggtatagccgatcatcttaggggcgagccgaaaacggcagatgagcttgggcgagaagttagcgttgatgggcagaagctgttccgcgttatgcgtatgctcgcatcgaaaaagatcttcgaagaagcggaggatggccggttttcactgaccccggccgcagaatttcttcgttcggatgcgcctcaatcactgcgttcagcggtgcttatgctcaccgatgaaacattttggtcaccgctaggaaatctcgttgagagtctgcgtagtgactcttcatttaaagacttgtacggcatgtctttctacgaatattggtcgagagataacaatcgaagagaaggatatgacttccatactggtatgtcatccatgtcgtcggtggaaaatcggtttttaacatgtgcgtataacttccccgagcacgcgacagtagtagatatcgccggtggtatgggcggactactgctgaacgttttacaccacaatccaacgttgcacggcatcttgttcgaccgtccagaggtactagccaggaatcggcttggggaattggacgacgattcacgctggaaaatccaggccggcagtttctttgagtcctgccctacggctgatttttacctattaaagtacatcacgatggattggcccgatgagcaggcaaaattaatattgcgcagttgccgtaatgcaatgcatgagaattcaaaattgctgattatggagccggtgatcccaaaaggtaacgcttggcacggcggcaatgaaatcgacttattgttgctggcaagttttgacggagggcaaacacgctctgaagaaaaattgtgcacgttgctggccagtgctgatttgaaattaaatcgcatcattaataccggctgctatgtttccatcgccgaggtcgtcattaaataa

SEQ ID NO: 436544 - DNA, 741 bp, Serratia marcescens
atggggaacgtttcaggaaaggtggttgttattacgggagcgagcagcggattaggagcggcaaccgctcgtcatctcgcgtctcttggcgcgacgttggtgctggcggcacgccgcaaggagcgccttgatatattggccagtgagtgtatcgctatgggcggtaaagcgttagcgcttcgagtcgatgtcacccaatatgacgatgtcagaaccatgatatccaccgccgtgacgcaatttgggcgtatggacgtcttgattaataacgcaggactgatggctatagcaccgattaatatgaccaaagtggacgaatgggagcgaatgattgacatcaacgtcaagggaatactgtatgggatcgcggcggcgttacctgtattcgaaaaacaaaacgaggggcactttatcaacatttcttcggtcgccggcataaaactcttcagccctggcggtaccgtctatagcggaacgaagttcgctgtgcgcgcgatttcagaaggcttacgtcatgaagtgggagcacatattagaaccacaaccatttcccctggtgtggtggattccgagttgaagttcggcagttccgatgtggagagttctcaattcttgcaggcgttttatcagcaagctatcccggctgattcagtggcacgcgctattgcgtacgcgattgaacaacctgccgatgtggacatcaatgaaatcgttttgcgtccaacgcaacaggatttctga

SEQ ID NO: 436545 - DNA, 1662 bp, Serratia marcescens
atgacgatgaattatactgtttctgattaccttctcgaccgcctggctcagattggtatccatcatttatttggggtgcccggtgactacaatttacagtttctcgatcatgtgatcgcacatcaacagatctcctgggtcggctgcgccaatgaactcaacgcggcctatgctgccgatggctatgcacgctgtaagccggcggcagcactgctcaccaccttcggtgtaggtgagctgagcgcagtgaacggtactgcgggcagctacgccgaatatgtgccggtgatccatatcgttggcgctccggcaatacgcgttcagcaaaccggccgagtactccatcattcgttaggagatggtgacttcggccatttcgctcgtatggccaaagaggtgaccgttgcacaaacgtgcctcaccatagacaatgctgaaggggaaatagatcgccttttgaccactgcgctgtttgagcgtcgtcctgtctatctggtacttccctgcgatgtggcagcaacgccgttgacttcacgccccatatcactgacgttgcgccaggcagagttgtcggaagcatcgctacagggatttattgttgccgccggcgaaaagctgcgatctgcgcgccgggtctcggtattggccgggaacctggcagagagattcgacgttgtggatgcgttgggtcagtggctggatgacgttaaggtaccgcattcaactctgctgctgggcaagggggggatagacgaaacgcgtaccggttttaccggtacttatgccggtgcggctagtactccgcaggttaaacaatggatagaagatgtagatgtagtgatcaacgtcggcgtgatgtttactgacactgtcactgcaggatttagccaccaccttcctgctgaaaagtgcatcagtcttcagccgtttgaagcgcgagtcgggcaacaagtattcagccagctccccatgcacgccgcggttaaagcgctgcaccagttgagcctggcgctggcagagcagtggcagttaccgatgattagccctccgacgttaccgcgccgcccacacggcggcctcgatcagagcactttttggcggcagattcaggattttctgcagccgggagacattgtttttgcagagcaaggcaccgcctgctttggcgctgcggcattgaatttgcctcagggatgcaaattcattgttcagtccctgtgggcctcggttggttatacactggcggccgcctttggcgcgcaaaccgccgagcccaaacgccgggtcgtggtgcttatcggcgacggttccgcacagtttaccgtgcaggagctgggttcaatactgcgtgacggcttgaaaccggtgatcttcttgttgaacaatgaagggtataccgtcgagcgagcaatccatggaccagagcagcgctacaatgatattgcccagtggaattgggcgctagtgccgcaagcgttggcgggccacaactccgtgcaggtacagcgtgtcacggaatcggaacagctgcaacaggcactgcgtacagtgagtgacagccagcaattggtctttattgaagttgtgctgtcaaaactggataccccagagctgcttgattccgtttcgcgcgccatccaaaagaacaacagcattttgtga

SEQ ID NO: 436546 - DNA, 489 bp, Serratia marcescens
atgaaaaaaaaccttctttcaaaaaaaatcattatcaccactattatcgtaatggctgtgattttatgctcaatcattgttaagcataatagaggcagaaagctgctaatgtcttgtgcttttgagttacagacgcacttagacaaccccgaattttcgaaaagatttactgcgttacaagtacactatttcttttataacgataacacaggatttcggtcagactttggcaaggtacttgaaaatgacaaatcatacactatcaatagggacgtgaatttcacctacagtgacaaggataatgatggtatctatacgattaagttcaataaaaccataagaaagcacattgacaacacaccatttgatatagtacctgaccaagcacaaaatagactttccctctatgtgtcatttaataaaatcgataatgacatttattatcttcaggaaagagcgctccccttcattttgtgtacaaaaaactag

SEQ ID NO: 436547 - DNA, 729 bp, Serratia marcescens
atgttctatgtaataaacggttggataaaattttcgccagaggatagccaactttcgtctatgaaagatgaagagataatgctgacgttgtctaaccagacaacccgtcttttgatggagttcgtcaaaaattgcgacgaggtgttaagtaaagattacttactaaagagtgtttgggaagattttggcctcacgccatccagtaacaacctttattccgcgacaagtgaactcagaaaggcctttactaatttgggtgagactgaagcaatcattaaaaccataccgaaagtgggattccagttcctgccaagaatcacaacacccgaaattgaacataaggaaaaggaaggcagtgaacaaaatgaaaaacacataaaaaaaccaaccatgatctatgtcattgtagttttgttattaacagctggatttgttgctttttaccttacctcatcaccaggaatagtaatgaaggaacaaaaagcaacatttgcaatgaatattgaaaaatgcagaatctatacgattggggctgccacgaaaacaacaccagaacaaattacacagcaattatctagttatacaaacatgttgaatgactgcaagacacaaaaacacgacatttactacggaaatactggaagcatgaataactataccttcattggttcatgtattgtaggtgaggatgaccatcattctaaatgcattaattcaaggataatgtga

SEQ ID NO: 436548 - DNA, 540 bp, Serratia marcescens
atgaaactgaacaaaattatgatggcggcagtggtagcttttggtatgacttctgttgctcatgcagcggttcaagaccaggggcacggcaaaattacctttaatggtgctattatcgacgccgcatgttctatttcacctgaatcaattgatcagactgttgagttgggccagatttctaaagtggcactgaaggacagcggaacttccaccccacgtaactttgctatcgaactggaaaactgtgagttcggcgaagatgaagccaataaggttcaggtaacctttaccggcatggaagcaaacggttctaacggcctgctgggtattaccggcaccgctaaaggtgcgggtgttgctattgttgattcatccggtaaaaaagtaactctgggtgaaccaaccaaagcacaggaactgcagaacggtaataacactctgaacttctctgcatacttgcaaggtgaaggcgcttctggtgctgcggttgttgccggtgatttccaggcagttgctgactttaccctggcatataactaa

SEQ ID NO: 436549 - DNA, 543 bp, Serratia marcescens
atgtggaataaaccacctgttggaatagtgttttctctcatatttgccttaaccactttctccgctgttgcggaaaattccgctcaggggtggggccgtgtaagtatgctaggagccattattgataccgcttgcgctattgacgttaatagccgggaccagaccattgatatggagactattcctttggctgatattactcgtgacggtcagggcaggacaaagcctttttccattgaactggttaattgtgaactcgcgcgttcggacagtagattacccgattggaaacaatttcaggtgacttttgacggggatgcagaaggggctttatttggtgtgcgtggagatgcatctggcgtggcgctgaaaattaccgacaaggccggtaatattgccactcccggtgagcctttaccattagaagacatcattccagggaacatgcagcttaattacaccttgaaactggtcgctaataatcatgctcttaaagtcggagactacttttcgtcaatccgcttcaagctggattatttctga

SEQ ID NO: 436550 - DNA, 2640 bp, Serratia marcescens
atgaaattgtcacctgctgggaagctggctcgtcttcaggtgttgggggtgtgtatttccctggcgctgggtgccccgtcgacggtggtgtatgccgccgatgaaattcagttcaatacggatgtattggacgtgaacgacaggaaaaacatcgacctgagccagttctctcgcgggggctatatcatgccaggaacatacggcatggtggtgcacatcaataaaacggatttaccggaaatgcccattccgttctatgcgccgcaagacgatccgaacggcagccgggcctgtatcaacaaggcgctggtcgagcagttgggactgaaagaaggagtactgaaagacctcacctggtggcatcaggatgagtgtcttgatgaggccagcgtggcgggcatggaagtgcggggggatttatcgacctcgtctctgtacgtcagtattcctcaggctttcctggaatacactgctgataactgggatccaccttcccgctgggatgagggcattcctgggttgttgtttgattacaacgtcaatgcgcagagccagcagcagctgaagcaggggacgcagggctatagcctgagcggtaacggtacggcgggtgcgaacctgggggcgtggcgtttacgcgctgactggcaggcaaacctgaatcatcaaacggggtcgggtcagtctacgaacaagcaactggactggagccgttattatgcttaccgggctttgccggcgctgcgctccaaactgacgatgggggagagctacctggagtccgggttattcgacagcttccgttttaccggggctagcctggtttccgacgacaacatgttaccgccaaacctgcgcggttatgcaccggaagtggtgggggtagccaagaccaacgccaaagtgattatcagccagcaggggcgggtgttgtatgaaacccaggtggcggccggtcctttccgcatccaggacatcaatgatgccgtcagtggtgaattgaacgtccgggttgaggagcaagacggcagcgtgcaggagttcgtgatgaacaccgcgaacatcccgtatctgacacgcccgggttcgatacgtttcaaactggcggcaggtaaaccgtcggactggcaacaccgttcacgggggccactgttcggcaccggggagttttcctggggtattagcaacggttggtcgctgtttggtggggcactgatggggggggattacaacgccctgtcaatgggtatcggtcgtgacctgatggcactgggtgcgctgtcattcgatgccatacagtcccgggccagtttgccgcaggaagataaggcgctgactggcggatcataccgcttgagttattcgaagagctttgacgagtatgacagccaggtgacctttgccggctatcgcttctcggagaaaaacttcatgagcatgagtgaatatctggatgcgcgttattacggtgcccgtaccggcaacagcaaggaaatgtacaccatcacctttaacaagcacttccgtgactggggattaagtgcttacgttgactatacgcaccagacttactgggaccgcccagtgaatgaccgatacagcctgacaatgtcgcgctatttcgatatgggccggttccgcaacgtgagcgtgtcgatgtcagcgtaccgcaacaagtacaacggtattgaagacgacggggcttatttgtccctgtcgatgccgtggggtgaccgttctaccgtcagttataacactacggtgaaccgtaacgacacgacgcatcgggtgggatattacgaccgcctcgatgagcacaacaactatcagttgagtgcaggcagttcacgcagcggggctaacgtgagtggctattataaccatgaaggggataaagcccgaatgagcgccaacgccagttatcagcaagatcgctacagcgccttcggtatgtccgctcagggcgggatgacgctaacggcggaaggcggtgcgctgcaccgtgccggtatgccgggcggcactcgcatgctgattgacaccaacggtgtgccggatgtgccggttaggggttatggcagtacgaccaacaccaatgcctggggcaaggcagtgattggcgatgtgaacagttattaccgtaacaaggcgagtattgaccttaacaaactcggtgacaaggccgaggccaccaagtcggtagtgcaggcgacgttgaccgaaggggccatcggctaccgtcagtttgatgtcattgccggtgagaaggcgatggcggtgatcaagttggccgatggcagtgaaccgccgtttggcgccaccgtgatgaatgctcgcaagcaggaaaccggtatcgtcaacgacggtggcagcatttacctgagcggcatcaagccgggtgaaaccatgacggtgcactggggcggtaacccacagtgtgaggtgagaatgccaaccccgttgccggcagatatgctgatgaacacgctgttgttgccttgccatccgttaagcgctcaggcgattgcttatgacggtaaaaaatcgacagatgacgcgtcacaggatgaggcgacgacagaaccaggacgggtaccgcaaccgccattgctgagcaatgaaaagggcgtgttgttttaa

SEQ ID NO: 436551 - DNA, 810 bp, Serratia marcescens
atgtgtaagaacgagttgaccatgcaaaagcataacgaaaacggcccggtgtcgtttggcaaaaataacaccctgaagtcgacggcaatggccgtcgccctgctgggctcgctggtcgcccagcaggctcacgcagcgattgcgctggaccgcacccgggtggtgtttgacggtggccaaaactcggtcagcctgaacgtgagcaatcagaacaagcaactgccttatctggcacagggttggattgaagacgaacagggtaacaaaattcagagcccgctcaccgtactgcctccggttcagcgtatcgaaccaggcaaaccgagccaggtaaaaatccaggccttgccagcagcgaaggtgctgccgcaagaccgtgagacggtgtattacttcaacctgcgggaaattccgccgaagagcaccaaaccgaacacgctgcagattgcgttgcagacacgcatcaaattgttctatcgcccggccggcatcgccatggataagagcgctgctccgccgcaagagcagatgacgctgagcaagcagggtgacaaatatgtggtcaataacccgacaccgtattacgtcactctcgtggatgcgagcaacaaaaaagacggcgccggcgtaaaaggcttcgaaccgatgatggttccaccgaaggggtccatgccgctgacggtgagcgccgccagtgtaggaggtagcccggtgctgacctatgtcaatgactacggtggtcgtccacagctgagttttagctgcagcggaagtacctgcaccgtggtaccggagaaaaaggggagttga

SEQ ID NO: 436552 - DNA, 657 bp, Serratia marcescens
atggcaaggcatgtagagaatcatccggagcgcgcacactggttatatgagctgcgctactacggcaccctgggggcgctggcgctgatggtgccggtgagcctggcaaccctcatcatgctgctcccgtcggcacaggccgtggataactgggacgtagatggcgccaatggctcgttatacgttcatggcgcgctgacggaaagtgcctgccgtctggagatggaaagcgtgcgtcaggacattgcgctgggagaggtcggaaccggtcgattgcagcaggtgggcgaccgcggtgagccggtgatgtttgaactgcgtctggcggactgcctgcgcagcccggccggcagccgcgatgtacgcaccggcgcgctgacctgggccaatcaacagcccgccgtcacggtgagcttccgggcaacccgggatgcggataacccgcagttggtcaaggcgcaaggcactgccggtctgggcctgcgtatggaagacggtcgcggtcaggatgtgcgtctgggcagtcgtggtggtcccttgttgatgacaccgggacaaaattcgctgatctataccgtcaccccggaacgtaccccggccgatttgatggcaggcagctatcgggccgtggtggattttcatctgagttatgactga

SEQ ID NO: 436553 - DNA, 501 bp, Serratia marcescens
atgataaagcagatgagcatgaatgccctgttgctggccgggatgttaagcctgcacggcgtggccctcgcggaaggggatgcagacatgacctttcatggcacgttgattgaaccgccaccctgcaccatcaatgacggcgagcgggtcgatgtggacttcggtgaccgtgtcggcatcaacaaggtggacggggtgaattaccgccagatgatgaattaccagattatctgcgacaacgccgccagtggtacttgggcgctgacgctgagcctaagcggcattgcggcgggatttgataaggacgcgctgatgagcagcaaagaaaatctgggtattcgggtgtaccagaacgacgaaccctttacgccgggcagcacgctgaacattgatttggccagcccgccgcgactggaagcggtgccggtgaaaaaagatggcagcacattgaccgaaggggcttttgaggcctgggccaccctgcgtgccgattaccaataa

SEQ ID NO: 436554 - DNA, 582 bp, Serratia marcescens
atgaaacgtaaatcgggtaaacgcccccatcaggggcggcagcgtacgcaggccgcggcactgctgctcgcccagacgctggttgcaactccgttgtccgcgatggcggccggcgaaaatgaaaacaatgtgcatctatatggtgcactggtggccgaaccttgcgtcgtgccgcccggtgatgaggaaatccatctggattttggcaccatcatcgacaagtacctgtatctgaatacgcgtaccctgggtcagcagtttgagatacgtctggccgaatgcgacctgaccctgggcaacactgtgaaggtgacctttatggggacagaaaaccgtgcgctcccgggcctgttggccattgatggcagcagtgaggcgacaggcattgcggttgggctggaaacgacggaagcacagccgttgccgatcaataaagaaagcggtgaatacgtcctgcaggaaggtagcaataacattgtgctgaaagcctatgtgcagggcgagtcgaaggcgattgaggccaaaaccattggtcgcgggccatttaatgcggtggctacctttaacctggagtataactaa

SEQ ID NO: 436555 - DNA, 840 bp, Serratia marcescens
atggtatcgagtattgtaaaaatcatctttgtgctttttttagttgtaaacggaaaatttgtctttgcaggaatgtcctgggggtcaccatataaaattgaaggaaaaaaactgaggtactcgtgggggattgatatgactggagggttcgatggaactgtttcttgcggtacttcaaaatgttactttggtgtattccctcggacaggtcttgggcctaatgggcagatgtgcgactctggtggtatatgtatattagggccaagctcaggaaattcaggggataccgcatatgcagttgttattcctaatggtacttccatgacgaatgcttataaaactttttgtgaacgaaagggatgttatggtgaggtgttaaatatcgatgcgacttggggaattgatgacccgagagttgcatggggtaagctgtgtgtaggatttgctcatttgccttataacgtaaggagtgtttcagtttctgcaagtggaacttcttgtggtgttatatcgcccccaaataaatattgtgatgtatttatacctagtattgtagatcttggtcaggtatctacaggatttgttaatgtgaaaaattatgtttatggtagaggggaatgtaatggcattacaaaaataagtgcagctctgttgtccttgccttatcttcaaggaaataaagttgaaattgccgttaatgacatacccttaaacaatgaagcgaaaattgttggggaaggaaaaagtatcccacttagtctatctgcaaaagtggaaggtgaattcagaaatcctggagtgtatagtgataatgcggttgtgttgctttcatttttgtaa

SEQ ID NO: 436556 - DNA, 1449 bp, Serratia marcescens
ttgtttgcctgttttcaggtgccttatacatgtcgagtgatttattgggtcttggggggaggagtgtcattagttgtcgtgcatgtggtaattgccttacagcagttatttgcaccgtcctgggaatgggtgccacttcatggtgcgcgcgtctatggcggtttttaccaacccaacgtactcgcgagctttattgctaccggattggcgctggcgctgatgctgtttctgttgccgggctttgtgctggcgcgggcgcagtatgagcgctgtcgccaggcggggctggttatgctgttagtcgtattctgcgcgctgttggtctgggggcagtcccgggccggtcaactgggcggattggcggtggcaatactgtttctctggcgtttcgggcgcgtgttttcacgcggttgtgcggtggccgcaggtgcaatgctgtttggcgtgctgttgggctggggtgtgatgttgtccggtgattcgctggtggtggccattatccatgaacacagtaaccaggcgcgctggaccatgtttcgcgacaccctggcaatgattgccgagaaaccgttattgggttggggctatggcagtttcgagtacaacttccagcatttccgtatcaatcagacgccgccgacggtggtgaccgaaattgctcgtcatccgcacaatgagattttgttgtggtgggttgaagggggcgtggtagggctggctggcatggtgctgattgtgttgggcggtatacgggtggtacgccagtgcgtgcgtcatgaccatgtggcggttgcggcgggactgcgtagggcgggtgtaccaacggcgctgtgtattgctctggtaccgatgactattcatacccagcttgagtttccgttctatctgtcgacacaacattttgcgatgttcctgctactgctcgctatggcggaccggctgagcgggggggcgatggttcgccgtccactgcctccagtggcgagtgttgtgctggccggtgctatgccggctcttgctctgggcgtagctgtgatagcggggtttgcgttcaaaggcagccaggtgattgccgaggttgaaagattcggtatggaagacgtgacgccgctgaaagagatgcctgcgctctcgcggtggtggcacctggagcgagtggtatttgatgaacaggtcaacgcgctcctgacctacaaccacaccggggatgaacagttgctggaagattacagccaatgggcacaacgttatctacagcggcgcatcgacaaaaatgtctacgctagcctgatacagatcttgcggcaccaggagcaggatttggtggccgaacaataccggcgtgatgccgtacgtctgttccccaaagaccgccggtttgtctctacgcaggacagcaatagtggccaggccattgtgaacaataacccccaactggaggcgctatga

SEQ ID NO: 436557 - DNA, 612 bp, Serratia marcescens
atgaagccctgtatcaccgttttcatacaagatgacaaccgtttctttgttcagggcctggagtttttactgcgtagccaattacaggcacggggcaggtcagtgcgatttgtgaccccggcgtaccgtgccgtggccgatttgcttatccaaagcgaacatcgggattggcctttacacccgtgccgcttgcttgcccagccaggcgaggcggcgttgatcacagtgcggaagtcgtatggacgcaaatcacgctccttgccgccctgtcagagcctgcagggcgtcatggggtatcgggacatgccgtcggccgttgcgctgttgattgagcaggtgttactgagtcaggaaagtctccctgggttaccgactgctttgtgtgcacgctgcgcgatgcggttgacgcctcgagaacagcaggtattggacactattgccagaggattatcgcaaaacggtgtggctgaagtgttgaacgttgatccgaaaacggtgagttcgcacaagcgtgcggcgatgcgcaagctgggttttcggcgcaataacgaactgtatcactggctgcgacaaggtggcctggaactggaaaagagaatgcaatcgcgatga

SEQ ID NO: 436558 - DNA, 411 bp, Serratia marcescens
atgatgagaattagtgggaaacgtgccgctctgctgctgtgtctggcgggggctgtcaccctcctttctgggtgtgaaggggggaaacgacctgtgtcggtgacaaaacagaccgttgcacaggatatcgagaaaacccaggcggcaaaagaggccgaacggatggcgcagtgccaaaaagaacttgaggcactgaagggcatcaaccccggccagcacaagacctatcgacaggagtttgaccgactgatgagtggcgcggcccagtacgccggcctgcgcacccgggtcaatagtgaaacgcaggacacggtagatgcactgtaccgttacaaggtcagtcggctgtgcgccgacatcacccaggccaccctgactggccttgctgaccgcggggagcggctgcaatga

SEQ ID NO: 436559 - DNA, 1782 bp, Serratia marcescens
atgacgtgttcctcggtaaatgtgcgcagccgattgtgccgactggcggtcgtgttgccgttgttgtggggtaccggcaccgtacgggcggatgaaggcattccggcgctgctgcagtttgccgaacaataccgcagtgaacagcctccggctaccgcgccgaccgccgggggaagcaaaacgatggatactccggcaccgaaaaaaaagacaccgccggcactgggcaccactggtgtggtgtcgggcgatcgtgagggtggcagcccaagcttgcgaagaacgctgaagcagcgcgatgcgcaactgaacaaacaacaaaccgtcctgcgagagcaggaaaagcagttggctactctgcgccaggcgctgaagaccgcagaggtgaagctgcaaaaaataggcaaaccagcgccagtcgtgcctgcccttcccggtaaaccggcggatttcgcacctctgcagcaactggtcggtcaactgcgggatgcgataagtggaacaccggatgcgaaacgcggaggcgagttgatcacccaggcccgacagcaggccgagcgcagccggggtgaattggcccatagtcaggcgcaagtacatgcgctcaaagtgcaactgggcgatctgaaaaaacagttacaaaacgggacgcagagtataagtcgggagcagcaatcccgtcagacggtacaagcgaagctgggaacactccaggcgcaattggacgacaaggtcaaaaacctgtcaatgctggatgcgcaactgcgtgaggcgcaggagcagcgcagcgcaatggcgacacagctggcgacgctgcaaaaaacacaggcgtcgcaacagcagcaggcgggtaaggcgttggccgaggttcaggctgaacgtgaaaaggttttgaccaacctcacttcccagcgcgatgcgctggaagcagaacgtaaggtgcagttggccgtaatcacgcagaaagaaagtgccttgtctgccctgcaagcggacaaacaggcactgcaaaaacgggctgatgggttgcagcaacaggtcagtgccgccgatgcccgcctggtcaagcaagagcaggagttgatgttgctcagcgacgacgcggagcaattgcgtgaacgggccaaatggctggtgaaacccgaaaacctggggcaagccgaagggcgccaagcttacgcagccggcagcgcgctgggtcgggacattatcgagatgctggacgaacgtaaaaattggggcgtcaaagccgatcggcagaccgtactggccggggtcatcgatgccttctcggggcagtatcagttgacgactgatgtgctgaccaaggccctggccgagtcggagttcgtggttaacaaggcccgtgaaaaagcgattgcaggccagttgaagaaaggcgaggcatttgtcgcggacttcaaaaaacaaaagggcgtgaagcaatccgcctcagggttctggtaccgcgtggattatgccggcgatgagggcattgccgaagatgcgatcgtcgaggtggtagtgaaggagtcgctgaccgacggcacggtcattcaggacatggacgtgggcggcaatgttcttagccagtcgctggatgcgtacccgccgttattccgggaggccatcgggcatctgcgcaatcacggtacgctgaccatggtggttccgcctgctctggcttacggtgaggacggctatccgccaaaagtgccgcccaatgccaccatggtgtatgagctgagggttgatggcgtcaaggctcaggcccggcagtga

SEQ ID NO: 436560 - DNA, 651 bp, Serratia marcescens
atgaatattaccgtaagtgatgtacgcattcctctggccgaggctgagcagagttcgccgttattggcgctgcgtgtatatacccgtgaaggcgatacggcaatgcaagcaccctatcctgttgtggtgctgtgccacggtttttgcggtgtacagggattgttgttgccggatatcgcctgccgttttgtgcatgaagggtatgtggtcgtgaccttcgactaccgcgggtttggcgacagtggcggtgaacgagggcgtattacgcccgccggtcaacaggaagacattttggcggtattgcactgggtattggcgtgcccggtgctggatgaggggcgtgtcgcgttatggggagctggcctgggcggtgggcatgtgttgtgcatcgctgcgatgacgccctgggtgcgttgtccccgcagacgaacggtatctgcgagcgcttccataaaactattttgcaggaattttatcaggttacgttccgcaagaagctatatgcagacctggagagcctgcaaatggatctggataactggttgtggcattacaataatgagcgaactcatcaggggaaaatgtgctgcgggcgtacgccaatggccacgttacttgatggaaaacgggtctgggcagaaaagaatctga

SEQ ID NO: 436561 - DNA, 507 bp, Serratia marcescens
atgatgacatcattcattgataaccctattgaaattagattacttaatactgccgatgtgaatgacctaatgtcactgtcgtatcgaatggacaacatcaatgggaatacattagttttagaaaacggccaagatatcgattattggcaccttgaagagtatagaaatacgtgcacctattaccttcttgccgaaggtgatattgacgccgagtattgccttaccgcatatgaaagccattcacactggcaacctgttgtattagagcctcgtcttgacggagagagaagacagttgtggcgtatcattaatcaccctaatgggcattatgtaataaataacttaaaatatctggataagtatttatcgcatctccccatagacagtttaagcgatgaccaaaaaagagtcatgattagcccgccgcaagaagttattgggatgggtgaggttatgatgcactggtattttgtccctaaagaggggtcggacagcgtcagtgagtaa

SEQ ID NO: 436562 - DNA, 1404 bp, Serratia marcescens
atgaagaaaccacaattattgcaggatgcacgtttcgggagttcaaatctctacaggactcatgattggagttggttatctggtaatagtgataccgctaacgaaccagccaactattatgaagcatcactatccccgtgggaaaaactgggttcgctggaaaatgacgatgtttgtgacgttgttgtggtcggcggcggattattgggtacgtccagtgcattgcatctttctgaagcgggattagaaacggtattactcgaaaagagcagtataggttcatccgcctcagggcgaaatggtggccaattgacaccaggtttagcgcgctgggaggcggaaaccatgattgacaatctggtctatgaggaagccaaacgattatggaacttcacttcctgtgaagcgatagatcttattaaagagattagcgccagatatgaatttgatactgagtattcctcaggacatttaacggcagcgatccatcaaggccacctttcctctttgactgaaagcgttgatgctcgtcactatctgggtgaccgaagtgccaacattcttggtcgacatatgatccgttctttagtcaacagtccgctttatcatggtggtgtactagatacgttaggtgggcaaatacatcctctggccttaaatcgggggatgtgttttggaatttatactcaaggagggagagtgtatgaaaacagtgaggttataggcttaacagagacatcaaaaggcacactggtagagacaaaaaaaggcaatgttttggcaagaaaggccgttgtcattgcagtgcataatcacaccttccgtttatttccggaagcaggaaaaaccaccatccccttctattcttatattggcgtaactaagccattaagcagtgatattgccacaatattgccgggcggatgcgcagtatatgatacccaactgcaaattgattattatcgtgcggtaagaaaaaacagagtgctttttggcggtcagggaacagggcatcgctggcagccagaagaggccattaactatcttggcaagcgcttacataatgtgtttcctcaatgtaaggggctggaatttgaaagtgtatggagcggcagtaccgatttcacactgaatggcgctacggattgccgtaagtttgggaataaaaattcacattatctggtgcacgggtggagtggtcatggcgtagctcaaacagtgaggattgggaaagcgattagcgatgacattacagggagcaataaagactttgagatgttaatggctattgaacatgctgggatcctccttgggcgtcagttatcgccgatggtgatacccatggcaaaaactatgttggagatgggtagtgccatcgtaccaggaaaactcatttcgttttaa

SEQ ID NO: 436563 - DNA, 378 bp, Serratia marcescens
atgagagcggaaatcgaggcccgcgtgaaggccttccgccgggcgctggagctcgccgccagtgagtctgtgccttccctctggcgtgacgatttgaaggcatttccgatcggctgctgtgagctggccagtcagacgctggcacagtacctgcgagatcacgacaaaaaactgttcccttatgtcatcgctatgcagtggaatgacggtcctgatatccacggccacattattatcgccctcgacggggactacaccgacctgacgctcgatcagtttcctcagtatgacaattacatcgtggctgagtcgatagagtccggcgggcagcctgcttgctgcgacagggcagggctcagggcagcgtgcctctgctag

SEQ ID NO: 436564 - DNA, 405 bp, Serratia marcescens
atggttaaaagtgtgggttcaacaaatactgctttgctccagatctaccctggcttctatgtcattgccgtaagcatcgtcataaccactttgccaaccacattgccacagttccggatcgagttggttgcccaacttaatcgcttgccgcaaacccgctcgcaggagtcgctgattcacacgattataaaattgacggtgtcccaatgcatgtgctgcccagaacactgtttgatcgatagcctgtttatcgccagaactccgcatactctggatattccgagcggcctgttcgaggtcgacaagaatgcggtgcaaaagcaatgcatcctcttccagtctggccaagctgactccgacactcgcgtggggaagaagctgttcagtctggtgtttcacaaatga

SEQ ID NO: 436565 - DNA, 381 bp, Serratia marcescens
atgtctgtatttgcactttggccttctcagcctgaactctcgttcattgaccgcctgcacgcatgttggcgccgaatatacccgggtcatcctggtgcagaaaatgtcattgataccgagtggtttaccaacaaaacacgcaatgtcagttgtaaggcgaccatatttcctctgccttccggcggctggaaagccaccgtagtgtcgcgtaccggttactccaaaaaggatttttcctactcctttgattcgtttacacaaaccttttcatcccagatagaagcggttcgtgcagcggaacagctggcaaaacagtttgttcatctgcgtcatcgctaccatcacggtgcacagcacctggtctgtaaaccggccgcttaa

SEQ ID NO: 436566 - DNA, 249 bp, Serratia marcescens
atgtcgaactggtgcaaaaaccgtttagttgttaccggccaatctgtgtttgtcgatgagctgcagcaatgggtgaatggccacgtcattcctgactatcgccatgccattcaacagagctgccggctattcctggccggctgtgccggcatactgaagccggcgacggtaaaacccggtgtgtacgtgccgtatccgggcattattaatgcatccgggtatcgcatcgcctcagaacctggcctttga

SEQ ID NO: 436567 - DNA, 678 bp, Serratia marcescens
atgtctgaattaattaaccatgaaaaagccttcatatcacttttcaacgagacggcgcgctaccatcggcgcgccaaggtgtttgaggactttgtcagctgtagtgtcattgctttggagaaccgcctttgcttcaaccaaaaacgcgaggataagtacctgcagatcatcaaaggttatgagaaagcagatgtctcgcgcatagcgcaactgctggccctggtagggatgagcatgatgagcaggttcagtgatttcctggggacggttttcatgcagctggagttgggtgacaaatatcgtggccagtttttcacgccgtgggacatcagccggatgatggcgcagatttcactgggagatgtcgacgccattttcaaggagaaaaccttcattacacttggcgaaccggcatgcggtgccggctgtatggtcctggcctatgccgatatacttaaccagtctggctatttgtcacatcgtcacatgtgggtatctgctacggacgtcgatccgctggcagctggcatggcgtatatacaattgtcgctctgtggggtagcaggggaagtggtgattggtaactcgcttcataacgagcgtcgccgaatactctatacacctggtcactatctggggaattggccgacacggctgaagacagatcaggtcggctga

SEQ ID NO: 436568 - DNA, 342 bp, Serratia marcescens
atgtttagaaaaatcggactgttaactatcctgtgtgcaacattttcaggttatgccctggcagaaaacataagtaaagacgttgagattactggtcttaaatttgctgagacggcaaatggcttgagagatatcaccggtaccggtaccaatacaaccgaccacgaaattaaaatggtcatgattaagttcaaccttctccagaatggacaaatcattggccaaaccgttgatatggctaatcatgttgagccgggtcagtcctggagaatatcagccacctacaacagcattgctctaaagcccgacagcttccgggtaacagaagtatcggtgcattaa

SEQ ID NO: 436569 - DNA, 612 bp, Serratia marcescens
atgcaactttttgacgaaaacaacctgtctccagtacgacgcagaaccctggaacgtcttgttaatgcggcactgatgctctacaaggaagacaaatttcccaccccggaagagatctctcgcgaggcggaatatgccaaagtcacgctcaggagctacttctccacgcacagcgaattcgttgagtacgtagtaaagaggattatcggttcctttgaaaaaccgaaaatgggggatgaccccgaagagaacattgccagattgctgagctggggctacggggagttgaactctcacgaagccttgatgcgtgatgccatgcgtattgcgcaacagcgctggcagagccagcacaaggatgaagaagttgacgaagacagcaggcagcttaaaaagagtaaccgccgtgacgccctctcagaagcattagcgccgctggagtcacagctcccaccggaaaaagtgcaaaagctggtcatgctgatgtcagtcttgtacggtaccgaagcgatgaccgtacttaaggatactttcggtttggatcaggacgaaatcatcgatctgacaacctggggtgccaagctcatgatccgacaggctgcgctggactaa

SEQ ID NO: 436570 - DNA, 1212 bp, Serratia marcescens
atggccaagtttgtgtatgtcattggtacagcagataccaagttggaagagctggtctggcttaagtcctgccttcatatggctggtgtggactctcatatcatcgacgtttctacccaggtgccaactgaactcagtgccggaagcaagatagatatcccgtgttcccagattgccgaataccatccgagcggtgccgctgccgtgttctgcaatgaacgtggtcgagcgattacggccatgtctgtggcgttgacccattttcttcgcagtaccgtagacgacatttccgctttgatagggataggtgggtctggaggaacagcgttgatctcggcggcaatgcagtcgatgccaataggtatacccaagctgatagtttccacgatggcctccggtaacgtggctgattacgtggggggcgtggatattgccatgttgtataccgtgactgacctcaacggccttaattatctttctcgcaccattctggccaatgctgccaacatgattgcgggtgcagtaaatcatgtgacggttccagatagcgcacagaaaccggtattgggtctgactatgttcggggtgactacaccctgtatcaatcaattggtcgctttgttggagaaacagtttgatccgctggttttccatgctactggcaatggcggaaccagtatggaaacgttgattgatgacggcgaaatcatcggggttctggatattacattaactgaggttgccgacttgctcttcggtggtgtgctggcgtgcctggaaacgcggctggattgcattgcgcggacccagacgccctgggttggcagtgcaggcgcactggatatgatcaattttggcggacctgacagtatccctgagcgttatgctcaacgacagtttgtcgagcataacgctcaggtgacgctgatgcgcacaacaccagaggaaaattaccagctcggcgcatggattgggctcaagctcaacctttgcaatgggccggtacgtttcatcattccagaaggcggattttctgcgttagatgcaccaggccaaccgttcttcgaccccgaggcaaggcaagcttttgctgaggggttggagtcgacggtggtacaaacggcacaacgacggataatcaaaacgcctcaccacattaactcacctgaatttacttcattggtactacaggaatttaatagcgttttgtaa

SEQ ID NO: 436571 - DNA, 828 bp, Serratia marcescens
atgaaaaactataattcactgatccaagcactcaaaaataaagtcatccggaacgaacccattctcggtgccggcgccgggacaggtttatcagcacgcagtgaagaagccggcggggtggaccttattgttatttataactcaggtcgtttccgtatggcggggcgtgggtcactggcggggttgatgccctacggtaacgccaaccttacagtgcgtgatatgggtaacgaaatcttgcctatcgttaaaaacacaccagttatcgccggtgtgtgcggcacagatcccttctgcaatttatctccgttcctggatgaactcaaggcccagggatttgccggcgtgcagaacttccctaccgtcgggcttattgacggtaatttccgcaagaatctggaggaaacggggatgggctatgcgttggaagtggatatgatccgtctggctcatgagaaagggatgttgaccaccccttatgtgttcaatccagatgatgcggtggcaatgactctggttggtgctgatgtgttagtcgtacacatggggttaaccactggtggtgatattggcgccgaaaccgcccatgacctcgagtcttgcatcccggttatcaatgcttgtgcctgggcggccaaggcggttcgtgacgatgtgatcgttctctgtcatggcggtccaattgccgagccggaagatgctgcgtatatcctggcgcattgtccggattgtcacggtttctacggcgccagctcgatggagcgactgccgactgaaaaagcgattaaaaacaccgttgaagaatttaaaaaaataaaacggaattaa

SEQ ID NO: 436572 - DNA, 1455 bp, Serratia marcescens
atgtcttattctgatacgcctgaacaggccgccgtcatcggttggtctggtcaccgcctcgttgtcagagcgtttgccggctcgggcaaaacgtccacactggtgcgctttgcactggctaatcccgacatcaagatgctttatctcgcctatagccgtgctgtccgggatgaggcggttcagacattcccatttaatgttgtgtgcaagacctcacatcagttggcctggccaaatttcggccggcattacgagaagcggttaacggggaatttaaggatcaccgacgttgctcgtctgctcaatacccgtcactggccgttggccagaacggccatcaccaccttcaatacctttctatgtagtgccgacaacgaatttgggccgcaacatctgcccgatgaagaggctcgcagcggactatctgcagagaaaatcctggccgctacgcaactgctctggcgtgaatctgtgcgccagggcggtatgtttcctgtcacgcacgatgtctatctcaagttgtaccaactctctcaaccagacctctcgaagcgctggcagacgctgctgtttgatgaggctcaggatgcaaatccggtcacacagagcctgctgctgtcacagcgctgtagcgtcgtgttggtcggcgaccgccatcagcagatttatcggttccgtggtgccgagaatgcactcgatgcaccggccctggttgatgcggaacggttgaacctgacccacagtttcagatttgggccggcggtggccagagtggccaacatgctgctggctcgccagggcgaaaccctgcctgttattggtgatggtggagaggacagagtattgccctctctcacggaggaaacccaagcccagcatgtcacggtgttaagccgtactgtcgccggcgtgattggtacagcactggacgccagcctggccggcaaaaaggtgttctgggtgggagatattgctggatacaaaaccgaggagctggaagacctgtactggttctcggcggatatgcccgaacgtatgcgctcgccggtattgtcacgaggataccgtgattttgaggaatacgagtcggtagccaaagcgagcaaagatccagaaatgaaccagggactacggcttcttgatcagtatttcccattgcctcagaagctgcaggtgatgcgtgagcatgcggtcactgacgaggccaaggctcaggttactgtttctacagcacaccgcagtaaaggtcttgagtggccggtagttgtcctgaatgaagactttatcgacatcaccgatccgctgttgcctgaggatgaacgcaccgatgagaccaatttgctgtacgtggctgtcactcgcgcgcgcaaaaccctggtcacgaacgcgttgctgcaggcgcttctcgacgacgaagccgtggatgacagagaagggggcatggcagcatgctga

SEQ ID NO: 436573 - DNA, 1695 bp, Serratia marcescens
atgctgaaggcaatcaaggcgctgctggtcggaaccccagaagtgcaggccaagagcaaagcctcatcacctgcggggcccgcggggtattttatgccgcagtccgccacgcaactgctggacatgccagcccgtaaacagagtctgcagcagctgtgggaaaacagtgcactgccaaaggatttgtacgagcagttttacctgcaaccacttcacaagctggtcaccctgatgcaagtgttgccggcagctccgcagggtgagtatgcccgggaagggggattggttgatgtcaccctgcagacgacgacctatgcggtgcgtctggccaaaggccacatgctgcctcctggtgctgcaccagaagaacaatcggcccagaatgtgcagtggaatgttgtggtgttttacgctgcactttggcactacctgccgctgttgagccagttgcagggcgagctccaaagtggccgcgcctggttacctggtttgacggtgccgagtgagccttaccgctttcgtttcagtgcgatcccgccaaccccgacattgacgacaagtcagagtgcgatgattgctgtccgtctgctgcctgcagaggtaatcgattggctaacaacgctgccagcggctacacactcgttgatgacggtcgcttcccgacagcccggcgctttacctgtgatagacgagattatccaggaggcggtcaagctggcgcgcggcgatagcctgtccgtatcgtccgcgccggcatccagttccgacacattgacagcactcttaccgtcggtggcgctgagtacagaagatatgacctcatcagcacccgcagttgatttgcaaagcgcaaccagcagcacccactcactgctcgttgaggagcagttgccggcagagacattaaatcagccagaagaaaatgcagcatcagcaacggaggtattactgagctctgccctagacgcgccggtcaacgataagcctttggctaagatggtcctggcaccagatacggaggtcggcgtcgaagaggatatgcaggcgcttttgtcattaatggctgttgaggtgtcagtaccggcttgcctggagagccaggaagagggaaacgcccctcagaaagagagccccattcctgaagaaaaccaggggccggtacatgacgtgcccactgtaatggaagatagctgtgatttaccagacgtaatagaacctgatttatcagagagcgcagatataacggttatttcagagcctcaacattcatcaaagaagctacagttagaagaaaataacgcggaagataatttgaacgcagaaaataatttgggggattccttcctacagtggttgagtctcggggtcaaaaaaggggatatatcaattaataccatggattccagagcgcatattgtcagtggcttcgtatttctctgcgttccagatatttttcatctgtatatcaaacaagagaatttggagcgtactgaacgaaatgcaatccagaaggcgtttgaaaaacttggcagacatcggatccgtaagggacagagattctttattggtcatctttatcaaaagccagagggggtgggttcatatcgtcgtatcaatggttatctggttaaggcaagtagtttatatggcggggcaagagtacctgaagacagtcagctgctcgtgatcccgtag

SEQ ID NO: 436574 - DNA, 789 bp, Serratia marcescens; identical to SEQ ID NO: 101531

SEQ ID NO: 436575 - DNA, 858 bp, Serratia marcescens; identical to SEQ ID NO: 101532

SEQ ID NO: 436576 - DNA, 306 bp, Serratia marcescens; identical to SEQ ID NO: 101521

SEQ ID NO: 436577 - DNA, 936 bp, Serratia marcescens; identical to SEQ ID NO: 101523

SEQ ID NO: 436578 - DNA, 2898 bp, Serratia marcescens; identical to SEQ ID NO: 119702

SEQ ID NO: 436579 - DNA, 606 bp, Serratia marcescens; identical to SEQ ID NO: 107131

SEQ ID NO: 436580 - DNA, 546 bp, Serratia marcescens; identical to SEQ ID NO: 119366

SEQ ID NO: 436581 - DNA, 600 bp, Serratia marcescens; identical to SEQ ID NO: 154770

SEQ ID NO: 436582 - DNA, 1104 bp, Serratia marcescens
atggtgctgccgaacggcgcccgcctgatgttcctcggcaccaacgtgcgcaccgcgcagagctacaccggcaatctgtatcttgatgagtatttctggatcccgaaattccaggagctgcgcaaagtcgccagcgggatgtcgctgcacaagcggtggcgcaccacctacttttccacaccgtcgagtctggcgcactccgcttatccgttctggtcgggagaactgttcaacaaaggccgccgcagtaaagccgatcacgttcaactcgacctcagccacagccacctgtcaaaaggcgtgctgtgcggtgatgggcaatggcgccagattgtcacggttgaggatgcgctgaccggcggctgtaacctgttcgacctcgatcaactgtcgctcgaatacagcccggcagagtatcagaacctgctgatgtgtgaatttgtggacgataccgcgtcggtattcccgttcgccgagctgcaaggctgcatggtcgatacgctggaagagtgggaggacttcaacccatacgccgtgcggccgttcggttatcgcccggtgtggatcggttacgacccatcggaagccaacggcggcgatagcgccgggtgcgcggtgatcgcgccaccaatggtggccgggggcaagttccgcgtgctcgagcgccaccagtggcagggcatgaactttgccgatcaggctcagaagattaaagaccttaccgaaaaatactgcgtggagtacatcggcatcgatgcgaccaccgtcggccaaggtgttttccagttggtgcgcgagttcttcccggccgcgcgggaaatcaaatacaccccggaaatcaaaaccgccatggtgctgaaggcaaaagacaccatcgggcgcggctgtctggaatacgacaccagccacaccgacatcaccgccgcctttatggcgatccgcaaaaccatgaccgccagcggcgcgcgttccacctacaccgccagccgcagcgaagaagccagccacgccgatgtcgcgtgggcaatcatgcacgccctcttgaacgaaccgctgaccgcaggcagcggccacagcagcccgaacattttggagttttactga

SEQ ID NO: 436583 - DNA, 615 bp, Serratia marcescens
atgaattcccgtttaatctttatggttatattttggttttcgccagttagggcattaactaaaatcaagggagttattatgtttactaaaaaattcattgttgcatcacttgtttctctggggatggctagcacgacttgtatcgcttccgggcagactaatggaaaggtagcgttggaaggtagcattattagtacacagccaacctgttcaatctcacctgagagccttgatcaaaccattagcttcggtcaaatctccgatgtggttttattgaaggaaaatggttcaggcaagtctacactacgccctttttcaattgatttggagaattgtgaggtaggtagcggtaacaatgtaagtgtcacattttcaggaatggaaggaaaggacgggcgactcgggattacaggaacggccagtggcgccagtattgcgtttactgatggcactggagaggtgattcagttagggcagtcaagtaaaagcttttctctccagaatggaagcaataccctaccttttgccgtttatcttcagggggatggtgtgccgggaaatattaagccgggcgattatcatgccgtagccgattttatcctgagctaccagtaa

SEQ ID NO: 436584 - DNA, 744 bp, Serratia marcescens; identical to SEQ ID NO: 25800

SEQ ID NO: 436585 - DNA, 210 bp, Serratia marcescens
atgcagaaaacccgttaccgccgccctcgtggcggccttgccgagcctgaccggcgccgtgccggcgggcaccagcatcgatttgcaggcctatgcccccctattcacgcgccgaagaccccgcaggcgaacgccatggtcaaccgctggggcgagagcgccgaacgccttgcgcagtcggaaatcaacccgcccggccagggcgattag

SEQ ID NO: 436586 - DNA, 1695 bp, Serratia marcescens
gtgcaggccgctttcgtcgtcctggtattgcccggcgtagcgcagcggctgctgatattgcgcgccctgccgcttcgccgcgccggccaccgtctggccctgcagcttgccgaaggtgtcgtattgcccggaccagcacaggttgcccgccgcgtcggtcacctccagcggtgcgctgttcagatcggtgtgataccagtaaatatccgccgagcggctgtcgcccgcctgctccagcgccgccagcgggctccacgggctggccggatcgtagctccagctgcggcggctgccgtcgtcgcgctgctcctgcagcaaccggtagccctgccacaggaaacgggtcgtctgttcggttttgcccttgtagcgcaccgccttgcggctgcggcggcccagcgcatcgtaatggtactgcgcctcgaattcgccctgcgggccgcggccatgcgcctgcaccagccgattgtcggcgtcgtagcggtagtgctgttcgtacaggccgttgcgccggctgatcaggttgccccaggcgtcgtaacggtaaaacagtttttgccagtgcgtcagccggttgtcggcgatcggcgccagcggcaggtgcgcgtcgatgtcgctctgcgggctgcgttcgcccagcaggttatccgccagatcgtacaccagccgcgcgcccggtttgccctgattaggttcgcggtgttgcagcaggcggccttcggcgtcgtaaccgtagtgcacttcgccgcgcagcgcgtcgctcaccccggccagctcgccgcggccggtatagcgataagcgcgccacagcacgccgtcttccggccgggtcagtttgtcgtggccgaaggcgctgctctgccagctgcggcggcccatggcgtcgtaacgccgctgctgctgcagcgccccctggctgcggccggtttcccggtgcaggcgatcgcgggtgaattcgcttaccacctgctggttgaatttaatggcgctggcgtggccggagccgtaatacagccactgcaggcgatcgccctgcggcagcgtcagcgcctgcaggttggccagcgcatcccactggtattgcagctcgccgttcacgccctgttcgccgagcagccgcccggcggcgtcatagcgcatctgcacgctgtccggctcgatgcccagcgccgcgccgctcgcggtcggcaggcggttcagctcgcgcagccgccccatggcgtcgaagcggtaatgccattccgcgctggcgttgccgcgccagaccagctgccccgcctcgtcgaagcggaagcgctgttcgcgctgcgtcagctcgcccgcgctgcccggcaggccgacctcgcggtgctcctccagcagcccggccgcgccgtagcgataatagtggcgggtgtcgtccgggcgctcttcggccagcacgcggcccaccgcatcgtagctgaagcggtattcgccgccgttgccgttctccagccgcgtcagccagccctgcgggctgtagtgatagcgccgggtgcggttgatgcggtcggtgatgctgaccggcagccccaaggcgttgtactgccagcgggtcaggctgcccagcgcgtcctgatgctcggccagctggccgtgtgcattccagttaaagcgctcttcgccgccgtccgggtggatcagggtgtgcaggcgcccaccgttatcccatag

SEQ ID NO: 436587 - DNA, 243 bp, Serratia marcescens
atgaaaaccaataaccttactgatagtgagataaagagcttagaggaaataagtacaatccttggcaaatgcgttttagaaatacttgtcagccaaaaaagactcaccacagaaaatgttttatatcaaatagttgctgaaatggaaaaagcagctgataacgatgcgtttcaattacaccgcaaagccttagcctttgtgggtaatattaaaaacaaccggggagattacgatgaaaaatga

SEQ ID NO: 436588 - DNA, 282 bp, Serratia marcescens
atgaaagacgtaaacgaaaataccgttaccctcgacaccccgatccagcgcggtgaaaccaccattaccgatgtgcaggtgattaaaccgaacgcgggcgcgctgcgcggcgtcgggctggctgcgatcgccaacgccgacgttgacgcgctgctggttgtgctgccgcgtgtgaccgtgccgaacctgacaaaagaagaatgcgcgcgccttgagctgccggatttggtggcgctggccgggaaagtggtcggttttttatcgccgaactcggcggcgtaa

SEQ ID NO: 436589 - DNA, 981 bp, Serratia marcescens
atgagccatcaactcaccttcgccgatagtgaattcagcactaagcgccgtcagacccgaaaagagattttcctctcccgcatggagcagattctgccatggcagaatatgaccgctgtcatcgagccgttttatcccaaggcgggcaatggccgacggccctatccgctggagaccatgctgcgtattcactgcatgcagcattggtacaacctgagcgacggtgccatggaagatgccctgtacgaaatcgcctccatgcgcctgtttgcccgattatccctggatagcgccctgccggatcgcaccaccatcatgaatttccgccacctgctcgagcagcatcaactggcccgtcaattgttcaagaccatcaatcgctggctggccgaagcaggcgtcatgatgacccaaggcactttggtggatgccaccatcattgaggcacccagctctaccaagaacaaagagcagcaacgcgatccggagatgcatcagaccaagaaaggcaatcagtggcactttggcatgaaggcccacattggtgtcgatgccaagagtggcctgacccacagcctagtcaccaccgcggccaacgagcatgacctcaatcagctgggtaatctgcttcatggagaggagcaatttgtctcagccgatgccggctaccaaggagcgccacagcgcgaggagctggccgaggtggatgtggactggctgatcgccgagcgtcccggcagggtaaaaaccttgaagcagcatccgcgcaagaacaaaacggccatcaacatcgaatacatgaaagccagcatccgtgccaaggtggagcacccgtttcgcatcatcaagcggcagttcggcttcgtgaaagccagatacagggggctgctgaaaaacgataaccaactggcgatgttattcaccctggccaacctgtttcgggtggaccaaatgatacgtcagtgggagagatctcagtaa

SEQ ID NO: 436590 - DNA, 1062 bp, Serratia marcescens
atgttgatgcagcatatcggtgtcggctattttgggtattaccgagcaactgcttatgcgatgaaacactctcttatgcccgagattgcgaagttaagaatgaaggccctgaacttctgggataagcatggtatccgtgccgcagctgatgcttttggcgtatcaacacgaacgctctactggtggcgccggttactgcgcaccggtggtccagaagcactaattccaagaagcaaagcccctctggttcgccgttcaaggcactggcatcctgatgtactcaaggagatcaggcgtctgagaactgagttacccaatctcggcaaagagcagatttttgtcaggctgaaaccatggtgtgaagcgcggcattttacctgtcccagcacgtcaaccattggaagaatcattgctggtgctcacgataaaatgcggatgatccccgtacgcctcagcgccaggggcaaagcccggttgataaaaaaacgctcagtgaagcccagaagaccaaaacaataccgcccggtaaaaacaggcgaactcatagggatggacgcgattgaactcaggatgggggacctacgccgctatatcattaccatgatcgacgagcacagcgactatgcgctggccctggcggtcccttcactcaacagcgatattaccagccatttcttcagcaaggccacaaagctctttcctgtcgctatcagacaagttgtcactgacaacggtaaggagttcctcggtaactttgataaaacgctacaggaagcctcgattaaacacatctggacctatccgtacacaccgaaaatgaatgcgacctgtgagcgatttaaccggacacttagagaacaatttattgaattcaatgaattgttgctttttgaggacctgaatttgtttaatcaaagaatggctgaatatctggtgctgtataacagcaaaaggccacataaatcactcgaactgatgacgccagtggactatattttacgtgagagtaaaaattgcaatatgtggtggacccatacatgctgttgcaacaatgataactaa

SEQ ID NO: 436591 - DNA, 162 bp, Serratia marcescens; identical to SEQ ID NO: 7070

SEQ ID NO: 436592 - DNA, 633 bp, Serratia marcescens
atgtttgacgtttcgttgttaaatctgccatgggcaacactggtgaccctgaccagtggctatattgggtattttattgcgaatgtgggactgaaggatcaccacaagcccattgaggtgactttttcttcgctgatttttggcctgacagcaatgatggcttaccaggctgttatgtgggcaggtctgaatgcctggctggcaacaccaccagcacttctgtgtgcccttacatgcggtgcgtggtggcgcaggtacggtcgcaaatggatgtacagattactgtggaataatgatatttcatggtctgacgataccagctcagcatggcaggcaatgtttgatcaaacaggcttcagcgttaccgaggtcagagtgattcttcgcgatggttccggtatgatgtcacggctgccagggaactttgaagagtggcctaacggtccgtttaccctggggaataaaggcgatatggttctttacgtcacgcacagcagcccttcaggcagtaacgaatgggaagagtataaaggcgtggttgataagtactggggagctctggcaacctatattccagcagatcagattgccagagtggagatcaggcgcgttcgtgcaacgaacgatgaatga

SEQ ID NO: 436593 - DNA, 450 bp, Serratia marcescens
atgactaaacaacgtcttatccagctcattcatattgcccgtaatgaactgggtatggatgaagacacctaccgccagatgttacaggggctgaccggtaaagcctcaaccaaaggaatggataccacacaactaaactgcgtgctggaatccatgaaaaggaaaggctttcgcgttaagcctgccggaaaagccagctccggtttaccgctggataaccatccgcagtccaggaaaatccgtgcgctatggcttgaaatggctgctgccggcattgttcgtgaccgttcagaaaatgcattagcgcggtggatcaagcgggaaacgggcatcagcgccctgcgctggctcagtactgaacaggcaagcagtgttattgagaaactgaagaagtggcagcgcagagctgcgggagtcaaacatgagcgacctgaatcagtttcgaagtaa

SEQ ID NO: 436594 - DNA, 684 bp, Serratia marcescens
atgacagaccaggataaacacattgagaaactgaaaaagttgctggcgctggccgcatccggcaaccctcacgaggccgctctggcactgcgccgtgcccgtaaactgatggatgttcacggcatcacacattccgacatcgccatgagtgatattgatgaaaccatcagtcactactggccgacaggcagcctccgtccaccgcgctacatgctgggcctgatgaacatcatccgcgaggcatttggtgttaactccatcattcaccccggcacatatccgggtgtggggttctacggcaaccgggaacgggctgcactggctgcgtacacctgggaagtgctggcccgccagctgaaaaaggcgcgtcagcaatatatcagcgcacagaacaaaagaataaaaactgccacccgtaccagccgtggtgaccagtttgctgaaggctgggtgctggccgttatcagtgaaatacagtccttcgccctgaccgatgacgaacgtgaactgatgcagcagtggctggaacataaatacccgcagacgcaaaccaccagggcgcgtaaaccgggaagaagccgcaatggcgacgcctcgcgctatgcggggtttcttgaagggcagaacgtcagactgcaccgcccggtcagtgggcaggaacaacagaaactggaggccagatga

SEQ ID NO: 436595 - DNA, 306 bp, Serratia marcescens
atgacacggaacaccgaactcacccgcaccgccctctaccgtctggccctgcagcgtttcgggccggacgcacaggccctgaaactgacagaagaggccgctgaactggcggccagtgccgcccgcaacctgaacggacagggcagcgaaagtgacctcgcggcagagctggcagacgtggaaatcatgacagagcagctgcgccttcagggaatggaccggctgattgacttccacaaacagaaaaaactggaacgccttgccgcacggctgggcgtcatgtacaccggagatactgaacaatga

SEQ ID NO: 436596 - DNA, 273 bp, Serratia marcescens
atgattaccccacaggaagcacgacagcgcacccgaacccttgttgaacactatgtcaacgagtgtgaatgccgcgacctcaccgatgtgaagcacgtcctgacggcgctaatcagcatgaccgctcaggccattgtggcgaccaacggaaaggcggctgccctgcaggtactggtgaacacactcacccacacggcagagcacgatgtgccgtaccggatggaaaccactgcagaaggcggcctgaacatcaccgtcgaccggaaacactga

SEQ ID NO: 436597 - DNA, 195 bp, Serratia marcescens
atgatatttaaatgtattcagtgcgagagggatataacagccctgcgttttcacagcgccatcgccgtgatgtccggtaagtaccacgtacctgcagtacgtgtcaccctggtctgtccgtactgcagccagcatttttcggcagacgtgcccgtcatggaattctcccgccctgacagggaggactcgcaatga

SEQ ID NO: 436598 - DNA, 531 bp, Serratia marcescens
atggcaaaaagtacaaaaggggcaaaacgtatcaagtccgcagcggcactctgggtaccggggacacgcgaagaggtcattgagggaatcagactgctcggtgacgcacaacgtgaactggtcagggctgaaacagaaatgaatgacgccattggcgatatcaccgcacgttatgccccgctcaccgagagcctaaaaaaacgcatggccgaactgcagtccggtattcagacatggtgtgaggcacaccgtgatgaactgaccggcaacgggaaggtgaagttcgctaacctcaccaccggcgaggtgcagtggcgaaaccgtccgccatcagtcagtatccgtggagcggataatgttattgaactactgagacgtctggggcttgagcgctttattcgtgtaaaagaggaaataaataaagatgccattctgaatgaaaaagaggccgtaaaaaatattcccggtattaccataagaagtgatattgaggatttttcaataattccttttgagcaggatgtgcagtaa

SEQ ID NO: 436599 - DNA, 270 bp, Serratia marcescens; identical to SEQ ID NO: 5827

SEQ ID NO: 436600 - DNA, 912 bp, Serratia marcescens; identical to SEQ ID NO: 36336

SEQ ID NO: 436601 - DNA, 189 bp, Serratia marcescens; identical to SEQ ID NO: 25242

SEQ ID NO: 436602 - DNA, 765 bp, Serratia marcescens
atgaaaatgaagacattacccatcgttccatggattggtggcaaacgtcgcctggcaaaacacatcctgccgctgtttccggcgcatgaatgttatgtggagccgttttgtggggcagcagcgctctattttcttaagacacccggcaagatcgaagtcatcaatgatatcaacggtgaactggtgaatctgtaccgggtggtaaagcatcacctggaagaatttgtccgccagttcaaatgggcgctggtcagccgtcagatctacaaatggctgcagatcaccccggaagaaacactgacggatatccagcgtgcggcacggttctactaccttcagaagcaggcgtttggcggcaaggtggcagagcacagcttcggtacctccaccacatccccgccacgcttcaacctgctgcgtattgaagaagaactgtcagcagcacacctgcggctttccagaacagtcatagaacacatggactggcaacagtgcattgagcgttatgatcgtccgcacacactgttctactgcgacccaccgtacctgggtacggaaggctatggtgtggattttcctgaagggaactactcgcggctggcagagctggcccggtgcatcagaggaaaaatgataatttcggtgaacgatatcccacagatgcgcgaggtgttcactggactgaacatacagacagtgaacatcaactacagtctggcggggaaatctacgccgcgccgtgaactggtaatctgcaacttctga

SEQ ID NO: 436603 - DNA, 744 bp, Serratia marcescens; identical to SEQ ID NO: 103401

SEQ ID NO: 436604 - DNA, 705 bp, Serratia marcescens; identical to SEQ ID NO: 103403

SEQ ID NO: 436605 - DNA, 654 bp, Serratia marcescens; identical to SEQ ID NO: 8695

SEQ ID NO: 436606 - DNA, 543 bp, Serratia marcescens; identical to SEQ ID NO: 8696

SEQ ID NO: 436607 - DNA, 1497 bp, Serratia marcescens
atggcgaggggtatctgggtttcacccgatgaatttgttgctttttctgagcctcagaaatcactgaccgcgcagattgcctcccgcagccgcgcgatcgacttttacggactgggcatgtatctgcccaatcctgatcccattctcaaggctcagggacgggatatccgtatctaccgcgaactgcgcaccgacccgctggtcgggggctgtatccgcagacgtaaagcagcgctcaaatcactggagcgtggactggagcgcggtcacgcttctgcccgggtcttccgtttcatcctcgacatgctcgacgatctggatctgtcccgcatcatcggtgagatgagtgatgccgtgctctacgggtatcagccctgtgaaatcatgtggggccgttcggtcagggcgtgggcagtgacggatattgtcggcaaaccgcctgagtggtttcagtttgatacggacaactgcctgcgcttccgggcgcgtgatgcgggtgtggagggtgagctgctgtcaccgtcaaaattcgtggtgccggcacaggatgcctcgtatgacaatccttacggtttcccggacctgtccatgtgcttctggccggtcgccttcaagaaaggcgggatgaaattctggctccgctttgccgaaaagtttggctccccgtgggtgatcggtaagcacccgaggggtgcaaatgatgcagagattgaaaaactgctggactccatggagcagatggtggaggacgcggtggccgccatccccgatgacagcagcatcgaactcaaagccgcggatggtaaggcggacagcagcgaggtattccgcgagctgatcacactgtcacgcagtgagatctccattgcattacttggtcagaatcagaccacggaagcgaacagtaacaaggcctctgcacaggccgggctggaggtaacggctgatatccgcgatgcggatgcggacatcattcaggcagcagtgaatcaggttatcagaacggtggtcaccctgaacttcggcgatgtgccgtgtccggtctgggccatgtgggaacaggagaccattgatgacacccgcgccacccgcgacgaaaaactcacccgggcgggtctgcgtctgaccccgcaatactttaagcgtgagtaccagctgcaggacggcgatattgacgagacaccaccgtcggaacgccagaataacatgctgccgctgtcatttgccgaggcgattgatgccgatattcaggctcagcagcagcttgacgacgcgctggacattctgatgaacggaggtgtgttaaatggcacgctggaacccgtcctggcacctctgtttaagcgggtcgaaaacggggttaacccgtctgagctgctgggcgaactggcggagctctaccctcagatgaacacggacgatctgcaggaacggctggcccgcattctctttgtggcaaatatctgggggcgtctgcatgagcgtgacaacggctga

SEQ ID NO: 436608 - DNA, 1116 bp, Serratia marcescens; identical to SEQ ID NO: 5807

SEQ ID NO: 436609 - DNA, 954 bp, Serratia marcescens; identical to SEQ ID NO: 19750

SEQ ID NO: 436610 - DNA, 339 bp, Serratia marcescens; identical to SEQ ID NO: 5805

SEQ ID NO: 436611 - DNA, 447 bp, Serratia marcescens; identical to SEQ ID NO: 103415

SEQ ID NO: 436612 - DNA, 1428 bp, Serratia marcescens; identical to SEQ ID NO: 103418

SEQ ID NO: 436613 - DNA, 336 bp, Serratia marcescens
atgtcacagaccccatccgatacttttaaattgtcttatcccttcaccactgctgcaggtaccagaattgagctggttgaactgaaacgcctgacggtaaaagacctgaagcaggtgcgcaaaatcagcaaaaacccggcagactgggacgaaccgctgattgcccgcagtactggtcttctcccggaagatctcgacaatatggatctggctgattacctgcagttacagaaacgatttcagctcatcacggggatgggtgagagcaaccagggcgctgacgcaggcgcaggggctgctggcgagatggttccggtttcagccgggggagattga

SEQ ID NO: 436614 - DNA, 3213 bp, Serratia marcescens
atgtcgggacagttttcagtcggcgttgttatcggcgggatgattggcagcacattccgttctgcaatgagcggtacccgccgtgcgcttgattccctgagcgatacctcacgccgcctgcaggaacgtcagaacgctttaacccgtgcaacagaacgttatggtcaactgggttcttcccggatgcagcatctcaacagcgagctgctgcgggtaagccgcaccatggagcaaattgagcgccagcagcgccgtctgtcagcggcatccgctaccagtgatgcgctgaaagctaaccgcatggcgctgtatggtcaggggattgaagcgtatggcatggcacagactgtttatcatacggtttcccctgccgttcagcagtccatgtcttttcaggacaaaatgattgatatgtcgatcaccgcaaaatatgacaataaaacgcgggatgcacttgccggacagataaaaggctgggcgcttaaatacaatcagtatcaggatgagctgcaggaggcggtgggttcactcatcagcgacaatattgataatgtgtcagatatcggttttctgatgccggatattgcccgcgcggcaacggcaacacgcacgtctgctcaggactgggcaaaagtggccgcagtctggcaaaactccctgaaaggtgcggccagagattttggtgccgttcagaatattatggcttatgccggtgaccaggggtcatttgaaatcccggatcaggtcaagtggatgcagtccctggccccaatgatggcgggtcttgccagtggaaaagaggctgttgctgaaatcggggccagtctccagatagcaaaaatcggtgcaggttccaccgacgaagcagccaataattttaaaaactttcttaccaaaatttttgcccgcgatactcagaaacagtttgctgatctgggtattgatttgcagggatctattgcgagttataaagctgcggggatctctccgattgaagggatgttgagtgttatagaacgttacctcaatgccaaaagccccgaagcgctggccggcttcaaatcagccatgaaaataaagaatgatacggcaagagatgaggcacttcaggctctggcgaaaaactttggtctgggcgatatgttcgcggatatgcaggtcatggcatttatccgcccgatgctggccaacatggacagatatcgagagatccgtgccggtgctctcagggctgcggataacgatttgcttgccagtgcttatgatcagcggctgaaatctccccttgaagccactaaaacacttatggtcagcagtcgcgatctggcaattacgctgggcgatcaattagctccatcttttatttctctgactcaggaactgctcccactcattcaggggacaaaacactgggtagcgactcacccgcaatttgtcagtggggcttttaagctcatcagtgcgctccttgcgattaagatagcgactattggtctcaaactggggctgaatctccttatttccccctttgtgaacgtctggaaaactactgttttactccggaccaactggcatcgactgactaccgcactcggagaaggtggcaaattacgctggcttgtcactggattcagccgactgaccagcggaggactgaaactcagcaaagttctggcgggcagcctcgttcgcggttttatgagcgctgcacgtgccgttctctggattgggcgagcgctgatgatgaatcccatcggtctcgttatcaccgctgtcgcgacagcagcttaccttatctaccgcaactggggggctgtcagtggttggtttaaacagcgctgggctgacattcaggaagcctttaacggcggcattgtgggaattggtaagttgctgattaactggtcgccggcaggcctgctctataaagcctttgcggctgcgctgaaatatttcggcgttgctctgccggcaaagttcaccgacttcggtggccatcttatcgacggtctgattaacggtatcaaaagcaaatgggggtcgctcaaatccagtgtaaccggaatgggtgacagcatcagtagctggtttaaacagcgctgggctgacattcaggaagcctttaacggcggcattgtgggaattggtaagttgctgattaactggtcgccggcaggcctgctctataaagcctttgcggctgcgctgaaatatttcggcgttgctctgccggcaaagttcaccgacttcggtggccatcttatcgacggtctgattaacggtatcaaaaacaaatgggggtcgctcaaatccagtgtaaccggaatgggtgacagcatcagtagctggtttaaacagtgctgggctgacattcaggaagcctttaacggcggtatcgcgggaactggtaagctgctgattaactggtcgccggcaggtctgctctataaagcctttgcagctgcgctgaaatatcttggtgttgatctgccggcaaagttcaccgacttcggtggccatcttgtcgacggtctgattaacggtatcaaaaacaaatgggagtcgctcaaatccagtgtaaccggaatgggtgacagcatcagtggctggttcagcgaaaagctgggcattcattcgccgagccgcgtgtttatgggctttggtgacaatatcgcgcagggggccgccattggcctgcagcggaccactccgcttgcagctctggccgggcagcgaatggccagtgaactgctccccagaatgcccgtgagcattcaggggccagaaatacgggataacacttcaggtgttcgcttcagtatgccgttgcccgatatcaacgggtttatgtcgtctgctaaaaatgcgatcggagccgtaatcaatagtttgtcttccatgcccgttattccgctctccacccgggcatcgattttaccagggcaacgtctggcaaatgagatgacaccggatgttccccgtatcccctcgcctgaaatcctggctgccggatattcaggccgtggtgcagctgcaaccggcggtggaacgtctggtggtatccaggtcagctttaatcctcagtttttcctcaatggcagggaaaccacagcgcctgcaggactgactggtgccctgaatatgagtctgcatgagctggaaaaaatgctggagcgtctgctggctcagaaacaacgtaaggagtaccgctga

SEQ ID NO: 436615 - DNA, 885 bp, Serratia marcescens
atgtttgccgtactgggtgatattgagtttgagctgattacctactgggacggcttcgaggccacgttcggcgtcgattatgcggagcatgcccgcatcgggggtaagcctggcctgcagttcgtcggcgacaggctggacgaaatccagataactctggttttccatcagcattattgtgtacccgatgtggagctggcgagactgcgaacagccatgaaagcccatcaggcactggcgctggtcttcggcaacggtgactatcgcggctggttcgtgattaccgatgtgactgcaaccagcgagcagactgacagtaccggcaacgtgctggctgtcagtgccaccgtgtctctccgggaatacaccggtgacccgaaaaatcctctgcaaccaccggcaatacgcacgaagctcccgggtgtcggggcggtctccggtgccattccttcaccttccggggtggcgcagttcatccgcaacggcgtcaactatgcgaaacaggcgcagtctgtactccagaccactatcagcgccgttcgggtgacacagaaaatgaaggataaccccgttgtcgcactgacccgtgtgccggggctgatgagcggactgggtaatatctccggggctctggggaaaagtgttccggcgtttaacgcactctctgaatccatgcccgatgccatcagtctggccagaacagccagcgaagcagccacgtatgtacagcaggcacagtctgcgctgagtggtgtggacaaaagaaatattgcaggtgctctggataccgtttccgggcagcttaacgccgtcggaacagcattcaaccgcatgtctccgggattaagtgcaatggccgccagaatactgacgaggagtgtgtga

SEQ ID NO: 436616 - DNA, 597 bp, Serratia marcescens; identical to SEQ ID NO: 262262

SEQ ID NO: 436617 - DNA, 246 bp, Serratia marcescens
atgatgcagttaaccctgggccgatacagctttaccctgaacgatagcgacgcgctgtttgtggccgaagctatcctgctgcaacgccagcacccggatatcgttttgccggaacaccgcagtactaaacacggtgtcatccgtctaaccagtcggcaggccgaaccgcaccttttttgcgacggaccggtgcctctgagcgacgcaactgcccacatctgccacgacctgcaaaccggtcattga

SEQ ID NO: 436618 - DNA, 192 bp, Serratia marcescens
atggctactatcctcaccccgactcaccctgaattctgtttcctgtttgcgaccattcgccgtaacgccctggcggcaaccccgtgcatgctacgcactgtggcggactccgagcacagtgcccgtcgcctgctgtcacgtgactacattctggcatttgccggtcgtctgcccgtacagggggtggtatga

SEQ ID NO: 436619 - DNA, 264 bp, Serratia marcescens
atgaatacgctggccgcccgttttcacagtgaaacccattacgccattccgcatgcggacttcctgcgtcttcagcacgcacattctaccggcgtgctgttcctcgacatgctggacagtctcgacctgagtggacagcgccccgacggctttcaacaggcggctttcgcctccgtcatcgccgtgctgactgaccagatcggccacgtcgtcaacacctgtgaaccccaacttcttgccagcatggaggcacccgccgcatga

SEQ ID NO: 436620 - DNA, 336 bp, Serratia marcescens
atgagtacccaatcctgtttaccgattgaagtccgtaccgccgttttccgtcgcgccgtggcacaggcctatagcgacacctgcgccttttaccgggtgagcctcggctacacgctggacgagttgcagatgctgattgccatgcgcctggaagggtactttgtgcaacagcacggtgcggaagcaggcatggatatggcgtgcacgatgctcagcgatatggtgcagccggatgtgttggtggcaccgccgcgcctgacaacactggggcaaaagctgatggacgagctgtgctgcgaccatatggcaactgccagtcacgccaccgtgcattaa

SEQ ID NO: 436621 - DNA, 2343 bp, Serratia marcescens
atgaacgcccatttcgtttcacagaccgtacgcaccgccaccggccattggccggttatactcccggcccttggcattgccctgcaaccgaacggtaaaccgcaaccctgcccggcctgcggcggcaaagaccgctttcgttttgataaccaacaggggcgcggtacctggttctgtaatcagtgtggcagtggcgatggtctgaatctggttgaaaaagcactcaccgtaaccgccaaagaggctgctgtgaaggtggcaggggtattaggtgagcaaaccgaactcgcatggccggagtacaatcttcaacaggaacaacaggaacaacaggacaaagcactggcacgaaataacgcagcgcaacaggccagacaactactagccagcgcccggcaacaaacggggaatccttacctgagcgccaaaggctggccggatagcgataccctgacattacaggggccgtcactgcgcgtggggggtattacttaccagcctggcgacctgttgttacccctgactgacagtactggtgaggtggtcaacgtccagttgattaacaccgcaggcgacaagcgtacgctggccggggggcaggtgaaagacgcctgccatttcttgtccggccagaatactgacgttatctggctgaccgagggctatgccaccggcctgaccgtgcaccaattaacaggggaaagtgtctgcgtggctctcagtgctaataatctacctgtgatggcgcagcagctgcgcgtccgctaccccgatgcagtgttgctgctggcggcggataatgacgagaacggcactggccagacccgcgcggccgaggccgcccaactgagcggcggtagaccggcgttaccgtcggaaaccggtgactggaacgacatatacctgcaacagggcaagctggccgcgctcgcacaattgaaggccttcagccaaccccaacagccgagcccgtttgatacgctcagcgatgctgacctgaaagccatgagtgccagtgagaaggcagaactgctgtcagaacattatggcaataccctggcggtgccgttggtcggtgaggaattgtgccgctatacgcaaggtgcctggcaggtgctaccgcatcggcagcttagccgcgagattgccgcgctgtttcagaaggtccgtgcaccgttttcggcggccggaatcaacagcattctggatacgctcaagctgatggtgccgcaaatgggcgaaccggtgcgacgcctgataggctttcgcaatggggtatttgataccgccagcggacaattcagcgcacaccgtaaagaacattggctacgcaccgtcaacagcgtggactacaccccaccgcgcaccggagaaaacctggccgaccatgcgccgcatttctggcagtggctgacgcgggcggccgggaacagccacgataaacaggaacgcattttggcagcgctgtttatggtgctggcaaaccggtatgactggcaattgttcctggaagtcaccggccccggcggtagcggcaaaagcgtgatggcctccattgcccgcttgttggcaggtgccgacaataccacctccgcgaccatcgacaacctggaatcggcgcgggaacgtgcttctgtggtggggttttcgctgataatcctgcccgaccaggagaaatggagcggtgacggtgcgggcatcaaggccatcaccggaggagatgcggtagctatcgacccgaaataccgcgatgcctactcaacgtatatccccgccgtgattttggcggtcaataacaacccgatgcgcttcagtgaccgcagcggcggtgtttcgcgtcgccgggtgattatcacgtttaccgaagcgataccggcgaaggagcgtgacccgcagctgttggagaaaatcagtggggagttggcggtgattgtccgtcatctgatgcagcactttgccaacccgaacgacgcccgtgagttgctgcaggcgcagcagagttcggacgaggcgttagccataaaacgccaatccgacccgttaatggatttctgcggttacctgacaaccctgagtaccccggccggcatgttgatggggaatgggaatatcagaccggctaatccacgacgttacctctaccatgcctacctgtcgtttatggaggctcgtggtcatcaaaataccatgaacctgacctcattcgggttagccgtaccacaaacacttagggagcatgagctgacgttgcttaaacgcagaacgaatcagggcatgcagaccaacctgacgttgagtgaagaatgcgaggcagactggctgcccaagtgtgatatcgcgtga

SEQ ID NO: 436622 - DNA, 1113 bp, Serratia marcescens
atggaaacgttgaaatacatcctgatcaagctggttgactggaaaacccggcagcggaagatccaatacctcactatgctgcttggcgcaggtatgctgagtgcaaacaaatatctggggcagtctttaacccttcagaaaggggatctccaactcgccctgtctatgtccgaaggaaacatcatcacggattacttcgtcaatatcgtggctatcctcatcatcttgggcggatttatctggttgctcatcgacgcttaccaggaggctaaaatcacggtgcgcaaaaaggtagtggtgatcgaagggcgcggtctacgcaaagtaatgacaaaccccttgcataagacggcagcgaaacattttagcgggaagattgacccattgaccctcgatattacacagcgggtaagagacggtgaggttatctatccgcaggatacctttaacaataatatcaaaaccattgtcagtaatatcgcgacccgcatcgacggtatcgaccatcaggacctgacgcttgtgtacgggggcctgttacccgtgccgttcaccttctacattggggcgatcctcgacgacaatggcccggtatccgtatttgactgggacagaacacaggaagattggcgccttatcgataataatgccgacgacgaccatacaagctttacgatcacggaggaacctcaagatcccccgtcgtcggcagaagacgtggtgctggccgtatcagtgtcttacctggccgatgttgcgggtatccgccgtacctttccccattacccgatgtcgcatcttacgctggacagtagggcatttggcaaccactggtcattatccaaacagagccggcttgcattgcaatttattgaatatgcgaaaatactgactgcgagaggtgcaaaacgtattcatatcgtcttggccgcccccagcagcatcgcgcttaatttcggccgccgctatgacaatcgcaatttggcacaagcccttgtgtaccaatacgaaaaaaatcacgcaatcacttacccttgggcggttgaaattccggcacatgggactccagaaggttcggtgttaatgacgcccgagcctgctttcgccagttaa

SEQ ID NO: 436623 - DNA, 492 bp, Serratia marcescens
atggtgcctaaaatggttatcaaatatcacctgaaacccctgaccatagcccaacaataccaggcgctacaaaccggcggcccgcatgaacggcttcttattaccgacaaagatcgtacgcttctttgggaaggttggctgcaaccttcattgttcagccgccgctataaaatcgcggtgcgatacacccttggtaagctgcctgtctgcgtggtcaccgaacccgatttgtttgcgctagccggtacaacagccatcccgcatctttatccaaaagataagtatattcctggtgcgagtctgtgcctgtttctccccagctcacaggcggatgacaaactcagcgagtggcgcagccagttgaaaatcagcgataccgtcattccctgggcttctctgtggctgttttattttgagctgtggttgcacaccggccactgggaagggggcggcaaacatccggcggccagtggggttaagaatgaacgctga

SEQ ID NO: 436624 - DNA, 1278 bp, Serratia marcescens
atgagtacttcaaccacagtcgcaagaaattttccgacacagaaaaaacaacgtattgccgatttactgtcgcaaattattgaaacgttggatctcaccaaaacccaatacgccaatattgaaagcgcctacagcggcgtgggtaattatctttccgatggggatgacccgttgttgaaagaggctgttatctacccgcagggcagtgtgcggcttaataccacagttaaacccaagaacgaagaagagtacgacattgatctgatctgttatctgcctcatgccaccgaaacggactataccggtgttattactgccattcgtcagcggttggaatcgcatagtacttacaaagcactgttaagcgatttaccccgtggattccgtatcaactacgccggcgattatcatctggacatcactcccggccggaattatcagcactataaccagctcctgggccagcccctgtgggttgtcgattccaaaaccggctggaaagaatccaatccccgaggctacgccgagtggttcgatgaaagcgccagcaaacaaccggttcgcattgcccttctcacgaacacggccagccgagtcggtaccgaagcattactccctctgcctgaccatacggataaaaaactgctaaaccgcatcgtgcagatactcaaacgtcatcgtgatgaatgggcttttgagctggacgaggatactcagcgttgcaaaccgatttccgtgatcctcactacgttggcttgccacgcctacaaccaaatcattgccgaacagcgcgcctacgacaacgatctggacgttttgcttgatgtgcttgatctcatgcccaacttcattcaagtcaataatggcgaggtacttgtcggcaacccccatatgccagaggaaaactttgccgagaaatggaatcggcaggaggacggcgaaggccaaaaacgcagtgatgcctttcaacaatggcacgccgctgcagaagacaccttcaacatgctggtagagagcattggcgaagataacttgttcttaaacctggagaaagacttcggtaaaacgccagttgaggccgtccggagccgcctgttgaacgaaatgcaacagtccagagaacagggttcgctgcttgtagacaagaaaaccggtggattgctggcaaccggtatcgccgctacggcaacagccagtgcagccatgcctaaaaacaccttctacggtacggagtcagccccccaatccgtccccaaaaacaccttctatggtgcctaa

SEQ ID NO: 436625 - DNA, 285 bp, Serratia marcescens
atgtcagatcatcaagttacctgcatccgaaagtctaaccgtcaaagtgcccatgaacgtattcaggctatcggcggcgtgaatgccgatggcacccgctggtctttaactgaggccgataccattgccgggattgaatccgggaaatggcgattttgggtcagtgctaatggcaaatccgtatgggtcatcgtgtcaaccagcgctgcgggcaataaatacctgaaaacgcagaatgatggcgaaacgccaaataacttgctcagtctgcctgagtgcccgtaa

SEQ ID NO: 436626 - DNA, 1395 bp, Serratia marcescens
atgatctcaagaggaccagcctgcagagccctggccgccttgctaggcagcctgctgctgtctacggcttcatcagcagcctcgcataataacaaagtcgacattccggctttattacagtttgccgagcaatataccgaacagaccaataaacctaaacagccctcttctcctccccgtagcacgtactctggcggccaagccgctagcaatggcacaaaaaccagccctgataagccaacgcggccgcggagtgaatactggcagatcaaagataaggagatccaacgccaaaatacggaaatcactcagttgaaagcgcaagtcacccatttgcagcaacgcaccgcgacaacggcgacaacactggatttagccactctgggtaaattagcgcagggattgcgccaggcgctggcgattaccccgacggaacgccaggcaaaagccagcattgcacagatacaagagctgtgggacagggaccgggcggcattgcagcaacagttgtccagggcaaaagcggataaccaagccttgtctgccgcgaccaacagccaaaagaatctgctgatggaggcgaaaagccaggctgtggtactgcgggaaaagcaggaagaaatgagcactcagcgccagctgatacaagccgagttggacaatacgataaaagagctgaccagcacgcgggccgactctgcgtctctgcaagccagaagcccacggcagatcaccggtgacgcgctaaaagccactcagccacgagaagattatgccgcaggcgtctctttgggcgaggaaatcctgcaaatgcaggaagagcggcgccgatggggggtgacttcggataaacaaataatactcgccggtattgcggatacgttcgcaggcaagcggatgttggccgataatgagctcaataaggtgctgaccgctgccgaaaaaaaggtggctgcagcaagagaaaaaatcagcgtagctcaacggcaaaaaggggttgcctatactaacgagttcaaaaaagatgagcgcgttcgccaggcaccctctgggttttggtaccgtattgactatgcaggcgacgcacagatccccaacacggcatccgtcgatgtggtagtcaaggaaacgctgaccgacggcacggtgatccaggatatggaagccaatggcgcaacgttgtcgcagccggtggcggatttccctccgttatttaaagaagccatctcgctattgaaaaaccacggttcgatgaccctgatagtgccgccagaattggcttatggcgataaaggttacccgccgaaggtgccgccgaatgccaccatgatctacacattgcggattgcagagatgtacccggaagcccaggctaaaaaacgcgaaggttcatag

SEQ ID NO: 436627 - DNA, 393 bp, Serratia marcescens
atgagtcataaacccctcgccgtcaccgccgcgttgatgagcatgcttttactgagcggttgccagtcggtcaaaaagcccatggccaaaccaacgtcagcggtagcgctgcaagatgaaaaagtgaaacgtgaaaccgaggatttaaaacaatgccaacaaaatttaagcgcgctcggcacgttaaaaacggatagctacctcgcgaaaaaaaaagtgttcgacgatctgatgtccggcgcctctcaatatgcaggtattcgcgctcaggttaatgagcacacccaagataccgtcgatgcgctctatcgttaccaggtgagctatcaatgcgccgagattaatcaggcgctgcttgccgagttggcaaaacgcggcggagcgatgaaatga

SEQ ID NO: 436628 - DNA, 645 bp, Serratia marcescens
atgaagagcacggtatatccaatcataaataaaaaattaaccattgccatcatagacgatgataaatttttcatgacaggattgatgatggcgttacccgcctactttaaaaataaaaaaaggaatgttagttttattcttgggcattctattacagagcctgcagatattatctttcaggccatccgctgtggcactttcattgatccacgtagccaatatcatgtgaacagcggcaagtcgcattattttgccatcgtagataatagagatttccacctgcaacacctttatcgcaatctggaaaaaaacgatgtcttttaccggcaccaaccggtgaacaccctattacaactaattgaaaataaaattttttcctcgcaacagttgccagaaacacaccagtctgaacaagaggtttttctccgcgaaccgctcaccctgcgcgagcatgaagtgttgtgtcacctcaagcagggtaaaacgcatgcaggtgcggcaaattgcctgggcatcaaagtgaagaccatcagctctcacaaacgcgcggcaatgaaaaaattgaattttaggcgcactaacgaactcttccattggatgctgcagggtggtttatcccgccaccagccagtaaaaggacattaa

SEQ ID NO: 436629 - DNA, 486 bp, Serratia marcescens
atgaatagaattattatcgggctttccgttttcttcgtcgtcattctgagcggagttgcactttaccttaactactcgagctggaagccttttcgctgtcacactcacgcgagctcgcaccttgtttccgtggatggcaggaaacttgagctcaacctggatatcagcattgtcactgcacaagaaggcaggagtgaattgctcgcggtgggttctctcaaagggcttaataaaaattatgccatttccagaaggatgttcgtttccatcaaggattctgactttagaggctttactaaagccatgattacccgagaagaacgccagcccatcgataacattccagacgagatttggcagcagtacgtactgccggaggcccccggcgtcgcgttttatatggaaaccaagcggttgagtaaaaatctgtttcttgtgaaagggctaaccaatcccttttttgtctgtgccgttatagagcattaa

SEQ ID NO: 436630 - DNA, 744 bp, Serratia marcescens
atgctgaggaataataaccaactaacagtagggttatctaaccctgcaacacgcctgttaaatgaattgataaaaaataataaaatcgaattaacgcgcgaaacgctaatcaagcacgtctgggaggactatggattttctccctccagcgctacgctgagcaatcatataagcgaattaagaaaagcctttgaagcacttggggtgagcaaaaatattctaatcaccgtgccgcgaataggcttcaaaatggaggctgagattcaccctgagatcacgacgccgaaagggtcggctgctgctgaagatatcgagcatatcctctctccccgcgagccgatgccagagggaaaaaatgctcctttattaatagacgctgaatcagagaaaataccgcacaggatgaaaaagccggtactttttctcacccttgctctgatagctattgcaacagcaacagcattcgttgtcctgaccaaagatgacgaaccaaagttagtcggcgttcaggataaatgtaatatttataccctggatgataataaacaaagtactgaactatccgataaggctcgaaagatgctcgtcagcgaaaagatagattgcacacaggcaaatcgtgacatcttctatatggaagcccgccccgccaacgaactgctcaaggttcattttatggcagcctgtaccaaaaatgacaatatgaattacacaaactgcaacaactacaaatcggtcgagtag

SEQ ID NO: 436631 - DNA, 537 bp, Serratia marcescens
atgatgaaacagccaagaattcattattcggcactttgcctgttaatgctgtcacctctcgagaatagccaggcggcggctggctggggacgggttaacatgcaaggtgctgtcattgaaacggcctgcgccattgataccaacagtcgcgatcaaacgatcgatatgtcggtactgccgttgagccaaattatgcgtgacgggcaagggctgactcgcccattcagcattaaattgatcaattgcgtactggatcgcatagatgaaagtttaccgcagtggcgacgttttcaggtgacattcgatggccgggtagataacgggttatttggtgtcgatggggcggcgcgcggtgttgcgctccagcttgcggacaacgacggcaatattgtcacaccagggaacccttcaccttatctggatatttccgagggcgagagagagctaaattactctctgcggttggtcagtaatcaacagatattgcgcagcggggaatacacctcaaccattagatttaaaatggattattactga

SEQ ID NO: 436632 - DNA, 516 bp, Serratia marcescens
atggatgcagataagtcatgcagaccaaaaccggcatggtatgcggcgggtctgatgctcgtgttctggggcggatgtttcccggccttggcgaaaacggcgactgctacggtgaccgttaaaatcacgttgacggcaccgccatgtgacgtcaatgacaacaagctgattgaagtgaacttcggcaacgacgtgatgaccacccgtgtggacggcgagtacaaaaaaatgccgatcaactacacgctgaaatgccagggcggtgcgtcaaatgcggtacgaatgcggattgatggtcagggggccgcctttgacggcggggtgttgaaaaccaacaaaacggattttggcattgagctgctcaacggcggcaagcggctgcccatcaatggctggttgaaattcacataccctaatcagccaacgcttgaggcggtgccggtgaagcgcagcggcgccaggcttagcggtggggcgttttccgccggggcgacaatgaaggtggaataccaatga

SEQ ID NO: 436633 - DNA, 534 bp, Serratia marcescens
atgagcgggttcagggcatgttttcatgcggctttgatcgccgggtcgctggcatttagctgtgtagcgcaagccgataacgttcacctgcacggggccctcgtcgccgagccctgcgtgatcgcgccgggggacgaaaacgtgcgcctggattttggcacggtgatcgacaaatacctgtacgccaatgatcgcacccacgggcaggcgtttgagattcacctgacagaatgtgatctgagcctgggcaaaacggtaaaagtgacctttagcggcagggaaaactcgagtcttaaagggctgttggcgattgacggcggcagccgggcatcgggtatcgcgatcggtatggaaacccaggctggccaacccttgccgctgaataaaattggcgacggatacaggttgatcagcggcagtaataccctgacggtgctggcctatgtgcagggagagccggaggcgatcgcccaccgcaccatagaacgtgggccgttcagtgccattgccactttcagcctggaatatgaataa

SEQ ID NO: 436634 - DNA, 825 bp, Serratia marcescens
gtgcgcaacggtaaataccgcttgcaacccatgcagttgcaccgtcatcacgacagaagctgggttcagtggagcgcgcaggatgcgctggtgctgaaatggaccaccttgcaggtggaagagcaactgcccactcatccacgttgcgtccacttaaaaggtcgcggcgggggcaggcagtctgtagtgcaggtctggcaggcgctcacctcgggtgagtacgcctttgtttatcggacggatatccgcggttactaccgccatattcgtaaagcgcaggcgttgagcctggtgcaacagcacattgatgatccggttcttaccggccttattgaacagtatttgtattacagcgtcgaggatggcggcgagattttcatcccgcagcacggtatttgtcgcggttgtgcacttagcccgctgattggtgctagtttgttgcaccacgttgacagttattttgccgctcaggaagggatcttctatgcgcgctatatggatgactttgtactgctgacctgcacacgctggcaactgcggcgctgcgttaagcgcttgcatgaattttttaatctgagtggctttgaaacccacccggataaaacccaattggggagaattgaacaaggatttgactggctgggcgtgtggtttacccctgagaggaccaccattgcgccccgcgcgttagaaaatcaccgaatcaagcgcctgcggctttacgagcaggcccggcgtcgggggctatcaatagaagcctctatggctcgggtgcaggcatatgaagcgcggtggaaaatatgggccaatggactttgtcggtag

SEQ ID NO: 436635 - DNA, 843 bp, Serratia marcescens
atgaaatggcgatgtgcaataactatgtgtgtattcttattagtcttactggggcttactgaacctgccagggctattggtaatcctggtctggggactgctatggtgtctcctggatatagaaccccgccggcaccgtatgtatcattggatatgacatatatcagcgccgattttgctgtgcactcccaaactccatcatgcactgtaactatatggatttatggggaacacaggggggggggatccccctatcatgaataccgactgaatcaaccaatgggtcccgacagaaaatgctggggtgcatacatggattttgctcatccggaattgtcttacccggctctcttcgatgcgataaaaggcatccacataccgtataacaggtcgtcatggacaggaaccaaaccgggggactcctgctatgtgacggtgggtgtgtcttacgggactgccacacaaggtgtctctgcgttccctgctaactgtaacagcaacagtgtgcctccacctgtgaactgcgtaatggacgtgcctagcctgatgcagcatgcaacgacacccgcgggggggggaaatgcgagtgcgcatagctcgatgcacgtgtcatgcactggaaggactactggtcgtgtgtccgtatctgacggtgacgtcttactccacggagatggggggacaatacggtctagattgtacgtgggtggggaggggcatacagaaaaaaatatggtagtggacccgtcctctactgttgacctaatcagtgttatcaggagagtaggagatgtacccgggacgtatcgtggtagtgggattgtcgtattcacctgggaatga

SEQ ID NO: 436636 - DNA, 234 bp, Serratia marcescens
atggcgggactggcgcagctgacgagggacctgtggatcgtcttcccgtccgttgtagcgatcgctttgctgttcctgctgtttcagcagggcttcggcgtcttcaacctgtcggcgaagtttttcggagcgggtaccgaacagcatccgacgcagtttttctatctgtgcccgcagatgctctatttcgcgctcttcgttctctattttctcttcagcgcgggccagcgctga

SEQ ID NO: 436637 - DNA, 318 bp, Serratia marcescens
atgatcaaaactcgtcggactaaacgcaccttttccccggagttcaagctcgaagctatcgagcaggttgttaaataccagcgagatgtacgggaagtcgcgcaggcactcgaactcaatcctgatcatctgcgcaaatggatacggctgtataagcaggaaattcagggaattgagccagctggcaatgctatcacacctgaacaacgcgaaattcagcagcttaaagcacagataaagcgtcttgagatggaaaaagaaatactaaagcaggctgccgtgctgatgagcgaaattcccgggaaattatcgcgttaa

SEQ ID NO: 436638 - DNA, 132 bp, Serratia marcescens
atgactgatccactacagacggaatacaacagcgagcggcctcatgaatccctgaataacctgacgccggaagaataccggctgatggccgagaatgatctcttccctttgttcagtaccggcgtaaagtag

SEQ ID NO: 436639 - DNA, 267 bp, Serratia marcescens
atgaaaaagacacgttataccgaagaacagatcgcgtttgccctgaaacaggctgaaaccggcactcgcgtggaggaagtgtgcagaaagatggggatttccgaagccactttttataactggaagaagaaattcggtggcatgggtgtaacggaacttcgtcgcctgaggcagttggaggaagaaaatcagcgccttaagcgtctggtcgccgatctcagtctggacaaggaaatgctgcaggacgtcatccgaaaaaagttctga

SEQ ID NO: 436640 - DNA, 756 bp, Serratia marcescens
atgatgcagagccgaacggtctacaactaccgcagctgccgcgatgaccgggccctcacgcagcggatacgggagattgcagaaacccgcattcgttatggtgtgcagcggatccatatcctgctgcggcgcgagggctggctggttaaccacaagaaaacccatcggatttactgtctggaagggctgaacctacggtcaaaacgcccgcggcggcacgtgacggccaggcacaggcgtatccgcccggccgtgaccgctgtggatcagtgctggagcatggatttcgttgctgataatctgttcaacggacgccggatccgagccctgactgtagtcgataattttagtcgtgaatgcgtggcgatcgaggtaggccagggacttcgcggtgacgatgtggtcgccgtgatggaacggatcaggcagacacagcagcgtgtaccactgcggttacagacggacaacggcagcgaatttatctcgaaaacgctggatcgctgggcgtatgaaaaccgggtaacgatggacttctcgcgccccgggaagcccacagataacgccctggttgagtcatttaacggcagcctgcgcgatgaatgtctgaacgtgcactggttcctgtcactggaagatgctcaggagaagatcgagcactggcggcaggaatataaccagtaccggccacattcctcgttaaataaccagactccggaggaatttgtccgaagtctgcaaaaaagcccggatctctga

SEQ ID NO: 436641 - DNA, 1347 bp, Serratia marcescens
atggctaagtataaagcgtatccggagtataaggattctggggttcagtctgttggcatcattccacatcaatggtctgtactcaaacttaaatatatttttgagataaagaaaagaatcgcgggtgcgatagattatgatgttttgtctgtcacccaaaaagggataaagataaaggatattgagagcggtgaaggtcagctgtctatggattactcaaaatatcaaagagtatatcctggtgattttgccatgaatcatatggatttattaacaggttatgttgatatttctaactatgatggtgtgactagcccagactatcgtgttttctctgtacgagatatacgtgagttttacagccgttattatctttatttactgcaagatggttataagcaacgccgtttctttcacctcggacaaggaagtgctcatttaggtcgctggcgtttacctactgaagcatttaatgaaattcaatacccttgtccttctttggaagaacaactacaaatagcgactttcctcgatcacgaaaccgcaaaaatcgataatctgatcgataagcaacagcaactgattgagctgctgaaggaaaaacgccaggcagtgattagccatgctgtcaccaaagggctaaaccctgatgtgccgatgaaagattctggtgttgagtggttggggaaagtgccggagcattggagtataaaaagctaccgatatgcttgcttaatttatagaggaaaatttggtcatcgccctcgaaatgatccttctttatatgatggggattatgcttttattcaaacaggggatgtcgctcgtgcaagcaaattcattgagacatattcacaaacactcaatgaaaagggaaaggctgtaagtcaattattcccatctggaacgttgatgatggcaattgctgcaaacattggggatacggctattcttgggtttgaggcatacgctccagacagcgttgttggattcaagccctatcaaagccttcatctggagttcttgcgctatagttttatggctgcgttacccgcgttagaacaaacatcgacacaaagtacccaggcaaatttgaatattgatagaattggtgcggtgaaagcagtatttcctccactggaggaacaattagatatcatcgattatttagatgataagttgtgtttatatgattcaattgaagaaaatgccaaccaaaccatacggctccttcaagaacgccgcaccgcccttatctccgccgccgtcaccggtaaaatcgacgtacgcgactgggctgcacctgatatgcaagacgctgaggagccacaggagaccaccgcatga

SEQ ID NO: 436642 - DNA, 531 bp, Serratia marcescens
atggaggatggttcggaggttactacagagcatttcccacagatggagaaaattgacaattcaactgaaacaaccaattcaacgttaagctatttcttagggagtaagaaagttggagagtatcctacacatcatatctcagataatatatatatatcttatcaattagaaaggatatccattgatattcctggttccaaacagtctcattattatgccacttcatttgaagaggcatttatcctcaaaaactataaaaataacttattgagagaagtattgctgagagttgttggaaaggattactcagatataatttcaacgaaacaggatgattattaccttctcgcgacgaactcattcaaaatacaaaagaaactttccgattgtaaaagtgcatttgctaattctattatttttgaattaatcacgagcaacaaaaccaaacctatactgccatcatatatattagatggactatcctggctcgagagacaaaaaacaaaaaaggaaggatttgaccatgtatga

SEQ ID NO: 436643 - DNA, 2031 bp, Serratia marcescens
atgtatgaaatagataaaaacaaggccaaaaaagaagaagaaataattgaaagaatatattcattaattaataaaaaagaatctttttactttcaatctggtgctggctctggaaaaacatatgctttagttaaggcaatcaaacactcagggaaattagaccttataaaggacaaccatggtttcagaaaaatattgtgcataacatacacgaacaatgccaccagtgaaatagttgagagactgccaaactcagacctctattatatatcaacaattcattattttatttgggagctattgaaaaattataataaagaactaattgatgtacatgtatcgtttcttgaaagtgagataataaatatagaagatgcgatttttcataatcctgattctaaaccttcatataaaaaattcagagacattaccattacagacttagagtttgctatcgaaaagatatacattgacaagaccaattattatgaggttgcctttgggccagctaaagaatattggaattatctcgaatctataatggggacaactacattacagagaatcaagtctaacaagcaagatgtttgcgatgtaataaaattgctaatgaatattagaaattataaattttgtctggaatcaattcagaatggtcaccttgaatataagaaaataatatataactccaatcaaaacattgaaatacttcataggaacatcataggtcatgacacattgcttaaatatgcaaaaatgttattactgaaaaatcgaggcttatcaaagttagtgatagactcatatccatatatttttattgatgaatgtcaggatactaacccggacattatagatttctttgctgaaatatatgactactccaaacaatctgaagatgattttgttctgggattttttggcgatccaatgcaaactattttctctaaagaaatagttcatgcccctttctattctaggctcaatgtcatcaataaggatttcaataggagatcctatgatgaaatcataaatagtataaatataatcagagggaaccatcagcctattattcagacttctatttttaaaaataaaaaaggtggcttggttaagtttcaaaggttggacgaactatataatgaaaagtcattgataagagaaatcattgctgagcatgtacgtgagtggaatatatcatcagaaagttcttttgcatgtctagtcctgaaaaataaaatgcttgctagcttgtgtgactatgaaaaagtttatagtttagttgctagactctatcaggcagaaaactcttcttatcacaataaagttaatgaggaattcgttgtaagagaaattaagaaggcagggcggttggctataaccctccacaaaatattacttccattgttttttattgttaaggatgacaggttgtctttaaatgaagtcttcccagttattcccaaagggcaatataatttgaatgaggtacgtgaggctatatcgttcttcaaaagtgtatctaattgctctttgttagaatatattgataatattcgtaacaaattaaacagcacatatccccgtgaaataaaagaactaataggatgtaatttcccgacggaactagttaatgctgactcgagtttggaagcgactattttgggattgtctggatttaagagggtttctgagtgttctccaattttatctgaacttcttcaagttaataccaatgagtttttgaattggatgaattacttgcacggggagaaaaaaacctcaggcacaaattatttaacatgccactcatcaaagggattagagtttgataatgtactgattttactcgaagattcaatgttacatgataagaacattttttctgaacttctatcttcagatttaaacataacgttaaatgacaagttagagagagccaggcgtattttttatgtttcagtctcacgtgctatcaagaatgttagtatagttttgttttctaaaaatgctgttgattttcaaacgtaa

SEQ ID NO: 436644 - DNA, 390 bp, Serratia marcescens
atgaatcgccaattagtagttgtggcaatgctcgtttttgcacccttggcccaagctgatactcacgcacaaacggagtctttcataaagttttatatcgatgatctgctttgtcattccgataagaactacaacaccccgagggatgagttggtaaaagagatacgcacccagctcaatgccaatacggatatcgctgacatcgacacagtcaggggttaccgtccagagtttactgttgctgaatcgtttaaagaagcagacgttactggtggagaagaaagttgcacaaagttcgtggagagcaaatttgaccagcagtatgcgattcaatctgccaaataccccataacgggccacatggcccgtgtactaggaaaacgactctga

SEQ ID NO: 436645 - DNA, 984 bp, Serratia marcescens; identical to SEQ ID NO: 17380

SEQ ID NO: 436646 - DNA, 2775 bp, Serratia marcescens
atgaaccccgtagaaatagaacaagccatcacggatcttgcagcgcaaccctatgatcctgtagagtttccttatgcttttcttgaagcctttggcaacaaggaaacgactatcaaacgtctgcgcgccggagcaacgaacaagtccgacttaggcggtgttctccagaccagcaacattcatattttgacgtgcgaagctgggcaagtgacgcgtatgttggccgcgctcaagaccagttcggcgacagataaggctaaagcgaagttcattctcgccacggacggctcagtcttggaagcagaaaacttggtaagcggcgaaacggttgcttgtgcctataaagacttccctgaccacttcggtttctttctggcgttggcaggtatcagcaccgttcatcagatcaatgagaacgcctttgacatccgggctactagccgcctgaatcgcctgtacgtcgaactgctaaaagataatccgcaatggagtactgcggggcgccgtcatgatatgaacaaattcatggcgcgtctaattttttgcttttttgccgaagacaccgatatttttattggcaagggccgttttaccgacaccattgcgcagatgagtgagcgtgacgcttccaatatgcatgacgttatcgccacactttttcgcgcgatgaacaccccccgcgatcaacgtactgccatcggtattccacgctgggctgcagagtttccctatgttaacggcgctttgttctcaggtaatgatgaagtgccgcgctttagtcgcatcgctcgttcctacctactacatgttggcaatctggactggaccaaaataaacccggacatcttcggatcgatgattcaggccattgccgaagacgaagagcgcggtgatttgggaatgcattacaccagtgtacccaatattctcaaggtacttaaccctttgttcctcgacgaactgagggccaaactagaggaagcgggcgataaccctcgcatgctgcttaatctgcgtaagcgcatggcccgtatccgagtattcgaccccgcatgtggctcgggcaattttttggtgattgcgtataaggaaatgcgcgccatcgaggccgagatcaatcggcgtcgcggtgaactagatcgagcctctgacattcctcttaccaactttcgcgggattgaaatacgtgacttcccggcggaaattgctcgccttgcgctggttatcaccgaataccagtgcgatgtgctgtaccggggacttaagctagccttagccgaatttctgcctctgcgcaatgataactggattacctgtggcaacgcgctgcgaattgactggttgagtgtttgccctgctactggaactgacgtgaagtggcaggcagacgatctatttgagacaccactcgaccaggctgagatcgactttcagaacgaaggtggagaaacatatatctgcgggaaccccccatatcgcggcagtaagtggcaaagtgatgagcagaaagcagacatggctaacgcttgggctaaacatcctaaactagcaaaaactactgatttcgtgaccggatggttcgccagattcttcgattacgccgataaagtgccggaagcggttgctgcatttgttacaaccaacagcgtatgccaaggacaacaggcgatcgatgtctggccagtggcgtatgagcgtgggtatgaaattcgcttcgcccatacttcctttaaatgggccaatcttgccagcaataacgcaggtgtaaccgtagtagtggtgggtttaggcaagaactcgtccttgcagaaaagactgtatcagggagacttacttaagcaatgttcggccattggtccatatctcgtgcccgacagccgagcctatgtacagaaggcaaatgcacctattggcgagcagtcaatcatgttattcggcaacatgcctcgtgatggtgggaatctgtttttagattctagtcttgcggcaaaaataatggctgaagatgtggtagctcagccgtttataaaacgatttgttggctcggaagaactcatcaatggaaaactacgctattgcctgtggatcgaagatgaggaagtagagactgcgaaaaaaagtaagttcattgcacaacgtctggcgcatgtttctaataaacgccttgaatctgacgctgaatctactcgtgcttttgctaagcaaccacatcgattcgtacagattgctggctctgcaaaagaagcatcaatagttgtaccacgagtttcatccgaaaatcgcccataccttccggtggactacttaacatctaattttgtagtcggtgatcgcaactttgctctctatgatgcccctttgtggaacttagcgttgatcgcctcacgcctacactgggtttggattggtacagtctgtgttcgaatgcgaaccgacttttcttattccaatactctcggctggaacactttcccgttaccaacgctgacggaaaagaacaaaaccgacctgacgcgttgtgccgaagacatcctgttagtgcgtgaacaccattttccgtctaccatcgccgagctatacgccccagacaatatgccagacgacctacgcgcagcacatgaccgcaatgacgaagtgctggagcgcatttacatcggccgacgcttcaaaaacgatactgagcggttagaaaagctgtttgacctttatacacagatgtctgcttcggctgcaccggtcaagggcaagaagcgtaatgcaggagccaacgcatga

SEQ ID NO: 436647 - DNA, 2046 bp, Serratia marcescens
atgagcgtcaagatcaagtcagtaccgtccgtttccgtaacctatgcacgcaatggaacatcgaccaattctaatgcccttgggatgcggcctatgcaagaacgggcctatgaaaagcgtggagaacaatatcttctcatcaagtcgccgcctgcttccggcaagagtcgtgcactgatgttcatcgcactcgataaactcgaaaaccaagggattaagcaggccatcatcgtcgtgccagaaaaatcaatcggcgcgagtttcaacgatgaaccgctatcgcagtatggattttgggctgattggtatgttgaacctaagtggaacctgtgtaacgcgcccggtaatgataatggcggcaaggtgaaatctttaggtgcctttcttgacggtagcgacaaggtgctggtttgcacacacgcaacttttcgcttcgcggtcgatacctatggcgtagaggtgtttgacgattgcttgatcgctgtcgatgagtttcatcatgtgtcagccaacccggacaataagctcggacagcatttggggcagttcatcgcgcgagacaaaacgcacatcgttgccatgacgggctcctacttccggggtgatgcagaggctgtattggctccagaggatgagtccaagttcgatacagtcacctacacctactacgaacaactcaacggttacgaatacctcaagcaactcgatatcggttacttcttctacagtggctcctacgttgatgacatcctcaatgtcctcgatcctgacaagaagaccattatccatattcccaacgtcaattcccgcgagagtacaaaggataaaatcaaggaagtggagcatattctcggcaagctaggcgattggcaaggtgcggatcctgcgacaggtttccagctagtcaaatgtctcgatggccgagtattgcgtattgctgacctggtggatccaactagccaaggcaagattcaggaaagccttcgagctgcagaaatgaagactgaccgtgactatgtggacatcattattgcacttggtatggcgaaagaaggtttcgactggatctggtgcgaacatgcgctgaccgttggctaccgtgccagcctgactgagatcgtgcagatcatcggtcgcgctactcgcgacgcaccgggtaaaacccgcgcgagatttactaacctgatcgccgagccagacgctgtagagggagcagtaaccgaggcagtcaacgataccttgaaagccatcgcggcaagcctgttgatggagcaggtgctggctccgcgcttcgagtttaagccaaagaacccagaaagcggcccgactccaggctttaactatggtgatggagggtatgatccggatagctgcaatttgggtgttaatgagcagacaggaacgtatcaaatcgagatcaaggggcttgccacgcccaagagccaagaagcggcacgcatctgtcaggaagatttaaacgaagtgatcgcagcttttgttcaggataagcccgccatcgaacgtggtttgttcgatgaagagctgattcctgaagaattaacacaggttcgtatgggtaagatcatcaaagataagtatcctgaacttgacgctgaagatcaggaggctgtgcgtcagcacgctatcgcagcgcttaacctcacgcagcaggccaaacgtattgtcaacggcgagaacgatggcacgctcaatactgcccttattgacggagtgcgtcgctttgcgatggacgtacgcgatttagacatagaccttatcgaccgcatcaatccctttggtgaagcctacgccatccttgctaagacaatgagcgaagatagcttgaagcaggtcgcggcggccatctcggccaagcgtacctcggtcacgcctgaagatgccaaagtgatcgccaagcgcgcggcagaattcaaacgtgaacgtgggcgcctcccatcgttaacttcaccggatgcctgggaaaagcatcttgctgaaggcgcagccgcgtttatgcgttttagggcggagggacgttatgagtaa

SEQ ID NO: 436648 - DNA, 1179 bp, Serratia marcescens
atgagtaaatctgatctagacgatttggctgatgaacttgccgagtttgcaccacctgagaagaaaaaaggacgtccagccaacgaggaacgcatcatcgcaggttttgaggaaatccagcgcttcgctgaccaacatggacgtgcaccgcaacatggcgaagatcgtcagatcttcgagcgcctctatgcagtgcggctcgatcggctacgcagcctcccagcctgccgtgccttgttagagccgctggatcatcagggcttgttggccggaggggccgaggtagcggattcagtggacgaaattatcgatatcgataatttggctgccgaactggcggatgttatcagcgaggaagatatcactgtcttgcgtcatgttcgtgctagcgccgaaaagcgtgctgtacaagcgatcgcggatcgcaagccgtgcgaggattttgatacgttcaaaccgctatttgaacaggtacgcagtgatctaagttcaggattaagagttacccgaccttttgggcagtatgcaacgattgaagtaggccattggttcatcctggatggtcaaacggcttatgtggctgaagaaggtgaagagtttgattcgccacagggaaagaaagatgctcggctgcgtgtcatttattcgaatggtacggaaagcaacctacttcggctgtcattggttcgtgccttgtataaagacgaaacagcacgccgaattaccgatccagacatggggcctttattcagcgatgctctagaagagagcgatcttgaaagtggcaccatctatgtgttgcgttcgctatctgataacccttatgtggctgaacatcgtgatgtcattcacaagattggtgtgactggcggcaaggtagagactcgtattgccaatgctgaacacgattccacctatctattggcgaaggtcgaggtggtagcttcatacaagctcgctggcatcaaccgcacccggatggaaaacctgtttcacaggttgtttgcacccgcacggcttaacattgccattaatgaccgtttcggccatccagtgcagcccgaggaatggtttctcgttccgttattcgtcatcgatgaggctgtagcacgtatcaaggatggtagcatcattgggtatgtctatgaccccatgtctgcgaagctggtgaagtcatag

SEQ ID NO: 436649 - DNA, 720 bp, Serratia marcescens
atgacagacgatagtgttctggatggcatttttgattcagtaaagaaggaagctgagcgttttatgtcttgcttcagcggtagtcatgatgatgtcagtagttacaatgaactccgtgaccggtgcgagagtaaagcaaaagaaaaaatcaataaattcaaggaggaaggcggccatatcatggatgataattttgaatgcttgctttacgatgctaatttttctgcacaatggaatggaaagtttggaacgtatcttggcattgcattcttcttttaccactgggggcagtattgttattcctctgggtaccggcgtgaaggattgctatttatggcaagagcagctggttgtggtggagtctggcagggggctgggctatacgctgaccgtgtagagactgctgaattggcgttaaagaaaaagcaagatcatggaaagaagggaggggaggctaccgccacggctttagcacccgcacgggatgagttgaaacggttacttaaagtaaactgcccggcagaaggatggaaaactaaagccgcagccattggcgctgttgtaggtcagcttgaggtttttgttaacaacaacaaaataaatttgaaaaccgataatctttataatgcaatattaacatggtgtaagagatatgatgatttacgagatgtattggagagttgtttacaaaagaacatgaaaaataaccgcgtggattga

SEQ ID NO: 436650 - DNA, 1164 bp, Serratia marcescens
atggctatttgtaaaagaaataactgtacgctctcaattggtgaattacctgatgagcggaaactgcgcctatgcccaaaacattatcagggtaagctatctaatgcagctaaaagagcccaaaggtgtgggctgacgtgtcagtacccatcctgtggtattagtctgtctggtactcgtaatcaacggtattgctgtattgagcatcgtaataaagacagaaggctcgtagatgacgatgccatcgtcagtctggtaaagcattcttactggatcaacgtggagtctatgctgaagaataaccccctcgggctgggaagtatcaccggtccggcggatattgcggaactcatcaggttatacgagcgtaaggcaagccaccagaaggcgtataacacgctaaacggatatagggtttgtgactcatccggtagagcagtaaaacgttcaatcccctggctggagctggaattatgccatatttaccccaattccaaaggcggtgccaatactacatacaacatcattatcgctccatcattgattaatagaatgatgaaggactcaatacctgtttgtatcaccagaagaacattctgcggcataaaagcagcaggttcattcttgcctgttaaatctacactattgaaatcgctcacagagcaatacagccaggttaaagttcaggaggctttaaacccagttaaacatattacatttgctgaccctagtgtatcacgcaggctgtttggtacagatatttatgcttacccacctttactaaaacttttaaaggaggaatcatcacgcttggaactctgggatttaagggaatctattaatcatattgaaagtagccactggctgtttgctggccctgcaaatgagttatttgctgtcgctgcttttcatgccatgttaaatggagatgctgatagtttacttgagatattttccgggttgcacgaagacgtaatggaacgggccaggcaaaaagcgactttgaatcgtgcatattaccaaagcactctggaccagtatatgtcccatcattttcgtcttgacttgcataatcaagaagcctgctttttattttacaacacatttttcacagtgccgccgctggacaaacgtggggtattaatcatacctcatcacttctaa

SEQ ID NO: 436651 - DNA, 729 bp, Serratia marcescens
atggctgtctaccgtaatgatactgatttgaatctgctgggccagtgcagcaatgaagaactgcaattactggtttccatcctgaccactgacccacgcgatggcgacactcgctggacagagagtcttaccggaaccccggagtttcgtctgctggcaccagaccatcgccgctactggcaactgatagccgctgagcttcagcgttacggcgcgaataccctggcgagtctggtccggctggggcaaggcgtgacctatcgggaaattctcgttgatgtctgtgacaagcttgatgtgaattacaaccagaaaagtactaccgaaaccattgagcttgctctgttgatgaaggtactggaaaagagcctggatcagatgacaccggaagagctggctgctttttcccgcaatatgcatctggatctgacaaaccccacgccgcaactcattcttatcgccgttcaggctgccatacggacttcctcgctggctgcgctggagctggcaacgatgttgtctgccagtgtcattgcctctctgggtggtattgccacctgggggacagttgtggttacttcgcgcgcactttccgtactggcgggtcctcttgccatcgcactgagctcagcgtggatgatttccgacctcgccggtccggcttatcgggtcacgatacccgcctgcatcattgtgtcctggctgagacagcagcacctttcccgctaa

SEQ ID NO: 436652 - DNA, 678 bp, Serratia marcescens
atgtctgaacaggaacaacgttatgaccgcctggcaagccgtctcgccatactggtcagccgcctctttatgggggaaacgctcagtgtcagccaacttgctcaggagtttggcgtctctgagcgcaccgttcagcgcgacctgcgtgaacgactgcgctatatcgacacggaatattccggggggagttttcgcctgcgggatgcacggggcccctttcgcactaacagtgacattatccgctttgcccggataaccagcgtggcacattactttccggcactagaccccaagttgttgtctgtcctgctcgacagcagtcaggattccccctgcattatctggaatgcgccaccccttcaggctccggcgttgtttggcggttttcaggtcattatccaggccatcatcagcagtcgccgcattcattttctgcaccacggacaccatcagtccgccgttgctccttaccggcttatctgcctggaaggcgagtggtacctgactgcagtgactggcgagcggattcaggtatttaccctttcagccatatccgatgtggtcatgaccatcgggggcttcaccagaagcagccatatccggcggatttttgaagacccgcgatttattcaggccctgccgcattttcagtacatcaatgggcttatccgggaatga

SEQ ID NO: 436653 - DNA, 465 bp, Serratia marcescens
ttgaaaaatgtatcgctcagcgccctggtactggcaggcagtctgctgccggttatggcgcaggcatctggcaaccaggatacctggacccgtggatgggggcagggagtatcagagtttgttatcaacggggaaggtcagtcgcaactgtctctgacctgtgaggattacggctcgcaaccggccacggtcatatttactgacgccagcgggcatcaggtcagtatggatgaagataaaagccttcaggtcagcattgacggcggagcccccatcgatatcagcgaatctgaaagtcgtgtgggcggtaataacctcgcgcaggcctgggcccagttacgtaatggcaagcaggtctcagtgacaggagacggtgttaagcctgccacattcacgctggccggggcggccaaggttttaccggtattcgggacccacggctgtgtgggtaaagatgcactctag

SEQ ID NO: 436654 - DNA, 360 bp, Serratia marcescens
atgaaatttaaatacatgctggtacccgcactacttgtattctcagcctatacgctggcagagccaacgccccccatcaaagtggagaccagtaaccaggtccatcctgccggaacacgctacgtcactgttgtggtcacctccctggatgacagtatcaacgttgaaaacatagatgtgaaccgcggtaactgtcgtatcgataaccagaagtacctgtcttcaaaaaataaggaaaccattctgcctgctgccctgcgctacgggcagtccgtcagagtgaatttttataataactgcgtggcttctgaagtcgtcgtcaccacggataaggggggatggcgttacacctaccactga

SEQ ID NO: 436655 - DNA, 213 bp, Serratia marcescens
atgacctttctgaaaatgctggtgacggccatgagccaggtgctgacctggtgcggcggacatcaggcccggcagtatattgaaattcgcctgcgtcaggcaggctacgatgacagcagcattgatacagcccgggaagcggtcacgttgctggtcactgcacttatcaccgccctgatggcgcagatacttaagattctggatacgcagtag

SEQ ID NO: 436656 - DNA, 822 bp, Serratia marcescens
atgcgattagccagccgttttggtcgggtgaaccagattcgccgtgaccgccccttaacccgcgaagaactgatgcagcatgcccccagcgtcttcggggaagacaagcactactccagaagcgaaaagtacacctacatacccaccattaccttgctggagaaccttaaacgcgaagggttccagccgttctttgcctgtcagtcacgtgtgcgcgaccagagccgacgggaacatacaaagcatatgctgcgcctgcgtcgtgccggtcagataaacggtcagcaggtgccggaaatcattattctgaattcgcacgatggcgcatcaagttttcagttactgccagggatatttagaagcgtctgcaccaattcgctcgtctgcggacagtcgtttggtgagattcgtgtgccacaccggggggatgttgtcgggaaggtgattgagggagcctatgaggttctcagcatctttgaccgggtggaagagaaacgtgacgccatgcagtccgtgcaactaccgccaccagcacagcattcactggctaaagcggcgctgacatatcgttttggagcagagtaccagccagtgacggaatcgcaaattcttgcaccccgccgctggcaggacgagagcgatgacctgtggaccacttaccagcgcattcaggaaaacctgctgaaaggcgggctaagcggccgtaccgcgcagggtaaacgtacccacacccgcgcagtaaacggaattgatggcgacgttaagttaaaccgtgcgctctgggtgatggccgagaacatgatggacctgttgggcaggtaa

SEQ ID NO: 436657 - DNA, 480 bp, Serratia marcescens
atgaccgatattattaatattaacgataagcatcagcgacctctgcaggctatagatgccagtcctgcaccagctctggcagccacgcccgtaccggacgaacagcgtgtggaattctggccgcagcactttgccaacatcccgcagtggataacccttgaaccgcaggtctttgcgtggatggatcggttctgcgctgactacagcggtggtatctggaatttttatactctcagcaacggcggggccttcatggttccggaaacggacaacgatgccttctggtcgctgttcaacgccatgaatggcaactccgcagacatgagcgccgaagcagcagggattgcagtctgccttgtcgcttacagtcatcacgcatgccgcacagaatgcgacgccatgacggaacattactggcgtctgcgtgactatgcgctgaaccacgcagaatgcagcgccatcatgcgcattatcgactga

SEQ ID NO: 436658 - DNA, 234 bp, Serratia marcescens
atgccatatgaactgtctcacctgaatgccctgtgggatgcgctggggaaaacaacggtcagggatgaggacggagaggttgtgaccgacgaacccttcctgcaattcccgacgggtacccctctcttccatatatgggcatggttcgaatcccagcacgacgagttcgtcgttgccgtgaagttgtacaacacatcccctcccgacgcgtcaacagacaggaaaagcaaatga

SEQ ID NO: 436659 - DNA, 483 bp, Serratia marcescens
atgaataccaccacttgtcctcccggcagcggggaaatatctcccactgcacagcgcaccatcagacgtgcactgaccttactggaacgccagttacgcgagcccggcgcggcattcacctccagccaggcggtccgcgactggcttcgtctgcagctcgccgcgctggagcgtgaagtattcatggcactcttcctcgataaccagcatcgtcttattgcccatgaaacgctcttcaccggcaccatcaaccatacgcaggtatatccccgtgaagtgataaaggcagcactgaaatacaacgcggctgccattgtgctttcacacaatcatccgtcaggttatgcggaacccggtaatgctgaccgacttatcactgaccacttgaaacaggcacttaaactcgtggatatctgtctgctggaccacctggtcgtgggaggcatggacatcgtctcgtttgccgagcgtggctggctttag

SEQ ID NO: 436660 - DNA, 360 bp, Serratia marcescens
atgcagaaaacaacccgtgtaatcagccataacatcgcggaaccctggtggggcctcagacgcaacgtcacgccatgttttggtgcccggctggtacaggagggtaaccacctgcattaccttgctgaccgcgtcagcattgccgggacatttaatgacgcagatttacgccatctggaccaggcatttccggtactgatgaagcagatggagatcatgctgagcagcagcgaactcacgccccacattcagcgctgcatcacgctccacgcaaaagggctgatatgtgaggctgatacactcggttcctgcggctatttgtatatcgtaatttatccgacatctgcaacaaccgcataa

SEQ ID NO: 436661 - DNA, 375 bp, Serratia marcescens
atgcaaatacaatcccggtcccctcaaagggcggcatcgtcacgtctgtcgtcagtagaaatctggcaaaaactactgaagtatctgctggaacaacactacggtctgatgctgaatgacacaccgtttggcaacgacgaagtgatccaaaagcacattgatgcgggcatctcactgtgtgacgcggtgaattttatcgtggaaaagtacgaccttgtacgtactgaccgtcacggcttcagcgtgaaagagcagtctccgtttatcggcaacattgatatgctccgcgcccggaaggctaccgggctgatgacccgcaagggatataaaaccgttactgacatcacaggcgggagattcagcggagggaaataa

SEQ ID NO: 436662 - DNA, 1386 bp, Serratia marcescens
atgtcttatcgcagcaaagtggcaatcgtctatctgctcggctttttcgtcgatctgatcaatatgtttatcgccaacgtcgcctaccccgccatcggccaggcgatgcgggcgtcggtcagccaactggcgtgggtcagcaacggctatattctcggcctgacgctggtgatcccgctcagcgcctggctggcgcagcgcatcggtgggcggcgggtgttcctgctgtcgctggcgctgttcatgctggccaccttcggcgccggcaacgccgacagcatcggcgcgctgatcggctggcgcaccctgcagggcatgggcggcggcttgctgatccccatcggccaaacgctgacctatcagctgtaccgcagccatgaacgcgccgggctgtcggcggccatcatgttggttgggttgctggcgccggcgctgtcaccggcgctgggcggctggctcgtcgatcggctggactggcgctgggtgtttttcgccaacctgccgctggcggccctggccctggcgctggcggcgctgtggctgcgcgcggaaacgtcggcgacagcggtacgtaaaccgctcgacggcaaagggctgctgagcgcctgcgcggcgttgacgctgctgctgctcggcctgacccggctgagcgaggccggccatcaggcttccggcgcggcgctgctggccgccggcctgctggtgctggcgtactatctgcgccatagcctgcgcaccccgcaaccgttgctgaacctgcggctggtcggcgatccgctgctgcgcaacgccatgggggtttatttgtgcattcccggcctgttcatcggcgtcagcctggtggcgatgctgtatctgcaaaaccagctggggatgcccgccgcccaggtcggcggcctgatgctgccctgggcgctggcgtcgttcctggccatcacgctgaccggcaaaacctttaaccgcctcggcccacggccgctgctgatcgccggctgcctgttgcaaggcgccggcatgctgacgctggcgcagatcgaccaggccgggcaacacgcgtggcagatcgccgccttcgccctgatgggatttggcggcagcctgtgcagcagcaccgcgcagagcagcgcgttcctgcagatccccgacgctcagctggcggacgccagcgcgctgtggaacatcaatcgccagctcagtttttgcctcggcgtggcgctgctcagcctgctgctgaatctgctgctgaccgggctgccgcccgcggcggcctaccgaacctgcttcattctggcgggcgccagcgtatttatcccgctgctgctgtgcctgcgcctcgccaaccgcgccatcgtgctccaactcaacgctcaacaggatgctttatga

SEQ ID NO: 436663 - DNA, 630 bp, Serratia marcescens
atgaacaatcaacacgacattttgcgcctgctgcgcaacctaatccgcatcggcaccgtgagcgccgttgacctcgataacggtctgtgccgtgtcgaaaccggcggaaaccttacggactggctgaattggctaaatttccgcgctggacgtacccgcagctggtcggcgccttccgtcggcgagcaagtgctgatctttgcgctgggtggcgaactggataccgcttttgtgctgtgcggcattttctccaatgacttcccggccccgtctgcgtcggcggatgcgctgcatatcgcgttcccggatggcgcagtcatcgagtatgaaccggaaaacggcgcgctgagtgtgtcaggcattaaaaccgctgacgtgcaggcgttggagtccatcaccgccagctctaaggtggtgatcgtcacggctgacaaaatcacgctcgatgcgccggaggtggtctgcaccaacaaactcaccaccggcacgctggaagtgcaaaaaggcggggacatacgtgggaatatcgagcacaaaggcggctcgttctcatccaatggcgttgttgttgatacacacgcccacggcggcgtccagaccggcggcgggcaaacggggaaaccaacatga

SEQ ID NO: 436664 - DNA, 1065 bp, Serratia marcescens
atgaacagcatactatccgagtatgacgacaataaaaaaaccaacattgaatactctgagtcactacagtctttaattgtcaatctattgaactgcaacgacgtaaaagtccacacaatcaactcaagagtcaaggagaggaaaagtctagagaataaaattgaagaaaaaggaggttatacctgcctgagtgatataacagatgtaattggagtcagaattataacacactttgccgatgaggttgatttcattgcaaaaataataaaaaaagagtttattatagatgccgaaaactctatagacaaaagggaaaccctcgagccggataaatttggatacctatccttacactacattatttctttaaaaaaagaaagatcagagcttcctgaatataaaagatttaaaaatattaaagcggaactgcaaataagatctattcttcagcatacttgggccgaaatagagcatgacataggatacaaatcaggcattggtgttcctcgtgaaataaagagacaattctctaggttggcagggttgcttgagataggtgactccgagtttataaacatccgcgacagccttaaaaattatgcacttaaaataaagaaagacatcaagagaagaacaagccatattccagttgacgcagtttctttattagaatactccgagaccagccaagccctgaggaatataatcgacatagcaaaatcaaaatatgaccttggaatctcgacaaaactgggaacaagatctgatttcgctctaagaaatttactgtacgcaggcattgagtcaatagaacaacttgacagtcttctagactcttacaaagaaatgataattaagaagtgcggcgttagcgcaaaaagaagaattgagatcggccttgagtcgccactacctaaaacatctatttttgtttataccgcgcaatgtcacatttttaaaacaaggggagaggaagggctcaaggaatacattaaaatgtttagaagtcgaagcagagcaaatgattcatttttaaaagataccatgtcaatttttagtaagtaa

SEQ ID NO: 436665 - DNA, 570 bp, Serratia marcescens
atgattaatcaggatacaaaagctgtaatcgacagaatgctccttgcctacggcctcaagacaaagttagctctttgtgaagcacttgatatcaccgctagcgctttagccaaccggcaactgcgtaacgcgttccctgcggaatacgtcctcaaatgtgccttagatacaggggcatcattgcggtggctaacctatgggcaaggtgagatgtttgagcagaatgttgtggctgcaccaaatgcacttgcagttccaagcaaaaaactcacagatagaaagctacaagatggcgagactttgctattagataaatcctttcttcccgcagacatcacaaagccagtcttgattattgatggtgacactcagtacatcgcttcgcacggttttacagaaatctatgatgggacgtggcttattgatatagacgacaatataagcatccgtgaactggttcgtatccccggaaacaaggtcaatatctccgataaaaaacactcgtttgattgtgctattgacgaactaaagtttatagctaagatattgattaaatgtggaaaagtataa

SEQ ID NO: 436666 - DNA, 1029 bp, Serratia marcescens
ttgggcttcgtaaaaggatttgccgcgctgtttgacaaactgctcgggtttgcgggacaagggactgatttcgtgttcggcggcatgggcgacaaaggcctggcgttcttcttcctgaaggtgctgtgcccgatcgtcttcatttcggcgctgatcggtattctgcagtacatcaaggtgctgccgttcatcatccgcattatcggtaccgtgctgtcgaaagtgaacggcatgggcaagctggagtcattcaacgccgtcagttcgctgatcctcggccaatccgaaaacttcatcgcctacaaggatatcctgggcaagatgtcggaaaagcgcatgtacaccatggcggcgaccgcgatgtctacggtgtccatgtccatcgtcggcgcctacatgaccatgctggacgccaagttcgtggtggcggcgctggtattgaacatgttcagcacctttatcgtgctgtcgctggtcaacccgtacgacaccaataaagaagaagagctgcacctcggcaacctgcacgaaggccagagcttcttcgaaatgctgggtgaatatatcctggccggcttcaaagtagcgattatcgttgccgcgatgctgatcggcttcatcgccctgatcgccgcgctcaacggtgtgttcagcgccatcttcggcctgagcttccaggaaatcctcggctacttcttctatccgttcgcctggatcatgggcattcctaagcacgaagccctgcaggttggcagcatcatggccaccaagctggtttccaacgagttcgtggcaatgatggagctgcagaaagtgtctgccgaactgtcaccgcgcagcctggggatcctgtcggtgttcctggtgtccttcgccaacttctcttccatcggtatcgtggctggtgcgatcaagggcctgaacgaacatcagggcaacgtggtgtcgcgctttggcctgaagctggtgtacggctctacgctggtcagcatcctgtccgcttcgatcgcaggcctggtgctgggctaa

SEQ ID NO: 436667 - DNA, 339 bp, Serratia marcescens
gtgagcaaggaattaaagcttgatgttatgaataacaaaaatgacttgattgaagggactttttgctactcgctttttgagcggtcgttctttgatgaaaagctattaagtgacttaataaataattcagaggcgtatttaaaagaaaacgaatatgataaggatattttaaatttgctatcatggattatcaatggtgttgatcagtgttttacatcccataatgataagaatgactattattcaattgaaaactattctgtgaatttggagaaaaaatggtgggaagtgtggcgacctgaagttaatgaaatagtgaatggtgataaaggttgttag

SEQ ID NO: 436668 - DNA, 240 bp, Serratia marcescens; identical to SEQ ID NO: 426823

SEQ ID NO: 436669 - DNA, 141 bp, Serratia marcescens; identical to SEQ ID NO: 36145

SEQ ID NO: 436670 - DNA, 177 bp, Serratia marcescens
gtgctggaaaccggcatcaccgaggaaatgtatcaggaaatggagcgcctgatcgccgacgccaagcccctgagccgccacctgatcggccttaacattttgcaagacatccccggccggatttacaccggcgcggccgccattgatggcgatgtcattaccgtttaccccggataa

SEQ ID NO: 436671 - DNA, 675 bp, Serratia marcescens
atgctgcagcgctttaacgggctgtcggccacgcagttacaggggacggcagccgagggcgaaagctccggcaccgcgatggcgcgtatgcagagcatcatcggcggtgtagacggctaccgccttgagtggagcgggctctcatatcaggagcaattggccgccgggcaaacattgctggtgtatctggcttcggtgttgttcattttcctctgcctggccgcgctgtacgagagttggtctatcccattgtccgtaatgctgatcattcccctcgggattatcggagccgttgtcgccgcgcgccttgcggggtatgaaaacgatatttacttccaggtgggaatgttgacgacgattggcctgtcggcgaaaaacgctatcctgatcgtcgagtttgttgaaacacggctcaaagcgggatccgctttgttgcaggcgaccctggaaggggcgcgaatgcgtctgcggcccatcgtgatgacctcattggcgtttgtcgcgggtgtgatccccctggcgctttctgtcggtgccggggccgccagccggcgcgaaatcgggattgcggtgatcggcggcatgatttctggcacactgctgacattattgttcgtaccgttgttttttgttctgaccaaacaagggttggcacgacttaaggcgcgaaaatga

SEQ ID NO: 436672 - DNA, 1449 bp, Serratia marcescens
atggacgtatgttatctttgcggaaatgattttaatgaaaattctacagtagaccatggagagcatgttatacaacaggccataggtggaaatttagtcagcaagggcatcctttgcaaaaaatgtggtggcgatctcagccgaaaaatagataatccttttaatgctatatttgaaggaatagcaacacggcttgatataaaaacagacaggaaggcaaacaaaagtccgtccatacccggtacgataataagcgaaaaagatgcttatggcatgaaccttaaagatactaaagttttttggaaaaattttaaagtctctcccatcaaaccctttcataggtttactgaggattataaaaaagttattatctactcccaaaagaaaaattttgagaaccataaatcaatagttcaaaaagaaatccagagcatggaattggatacccctcctgaaataattatgtgcgacgacattgattgcaatgtgcaatatcagtttcctatggagaatattgcttttaaaaggggggttgcgaaaattgccattggttttgcctgcacacacggaatttcgagagagactttaaatttagcgttaaaaatctcagaagacaatcacggatatattgatgaaagaataactttagttcaatatgctcctttgagtataattgatggattcattgaaaatgataaagcaagtttggctaattatccttcacataatttaattctatttacttcgaaaaaagatccttctttattatggtgttatattgagttgttttcaacctttcagtattatatattattaagtgatagttatgatggcaagcctgtttatgagtaccattatcaacgaatcgaaaaagcagatgagtatgtttttactccagacagaagacattataaagagcgtaatttaattctaggagggttggggattacggatgaacgcatccaatcagcatatgaaaaacagaaagataataaaaatcaaaaatcattagaacaaatcgaaatagatataatcagggaagagactgataagcagaaaaataaggtggatttcgaacgtgacatcaataattttgtcaattattgtgcgcaaaaaatatttttaaataatgaccttgattttgaatttatgatgaattttaagaggaatttttcgctattcagtagggttgtagtcaatgatgaggatgaggttgaaattttcgatatattaagctaccgacgttactacatcgaaaacgaaaaacttgtagattaccctgatgccttaatgttgatgagaatgtgtgctgaatcagaattgagaaaatatagtttctacaaatttaatcagctcgaaagttatagccaaaacaaggtgttaagagagaaagtaaggcaggtaaaaaactttattgaaaaatcaaaagatgaaaatcacactgaatga

SEQ ID NO: 436673 - DNA, 1086 bp, Serratia marcescens
atgtcatttaaattaaaacattgtgtgatacatgaattaaaaaaagaagcaggaaagcagaaggttgaaattgacttgaaagaagtcgcgttaccaaatacggatgagtcagtaataaaattagtgcagtctttgtgcgagcttatcggtaaaagagacaatcaggctgcgcgtggcacgtttgatgaagataataatttgtataaagtaccggccgagtttcatcgctattatgaaagtaagtgcgatagcgataacttcatcgattttacaaagatttgcatgaatgaattgtcaaagcaagcaaaagatgcatccagagttgcagcgagtggtggggcaatagttttctctcattatattagcaattcatcacattacttcttggttacaatgattaagcaaaaagatgcattgaggttagatgcaaatttaaaacctgttggaacagttcaaatcgatttgttgaaaatccaccaggcggcgaggcttaattttgatagataccatacttatcaaaacgcagacgaacttgaaaagacaaattaccttgcattcgtaagtccgaaaatcaatcaagatgcatcaggttatttcgtcgctgcgttaggttgtactgatagcgtcccgacggctagggctactgatgcagctttagctggggtgagagcatttttcgaggctagcaaagagttatcaccatataaatcacctgcatatgatgcagtcttgcactatatgaaagaaaagcctaaaggtgaaccagcaagactgatagaaattgaacacatagttagaagcgttgtgccagctaaattaaatgcgagtttggataatattgtagatttcttgaatagcgaagaaattggtttacctcatgagttcggcataaatgaatcagtgcttaagcgccgttctagagttagaacaaaaactgatggatgggaattggtctttgagcgaagagttcttggtactacgatcggttctggtatacaatatttaaaaggagaagggaagttaattatttcaaatttagatgacgccaccataaagaaaatagaaaaggcattggaggaaaaataa

SEQ ID NO: 436674 - DNA, 351 bp, Serratia marcescens
gtgatccgcaatttcgtgaatggcgacatagtgacgagcggcgcgcattttgccaaagggaaagaggctacgcgtcaggccgtaatctgccatcttaggctttttctgggggagtattttttagatgcgactcgcggaactccgtggtttcagagcattttggggaaagcatctcgtgatatagctgaaaccaatataaagcaacggattgtatcaacacctggtgttgtcggaatgactaaattcgaaatgaatcacgatgcgaaaaaaagaaaaatcacggtatttgcatcattggttgacatcaataacgagcagttcgactttctgttcaatgaggaattgccctga

SEQ ID NO: 436675 - DNA, 291 bp, Serratia marcescens
gtgaaagcaatcccacttaacagcggctatgcgttccaacgttttcgtgtgcagttgggtaatcgtctactgatcttccgtttgcgttggctcacccgctacggctatttctgcgtggatatttacgaaggtgatatgccggttactcttggtcgcgcccttcatccaagtgttaatctgttggcgggtttaaacaccgatttaggtcatctggtgctcgagggggaaagcccaagagttgacactctcggtgtgaataaccgacttatctggtatccaaacgatgagtaa
